United States Patent Application Publication US 2014/0325702 A1 - sequence listing, part 23

SEQ ID NO: 29503 - DNA, 2219 bp, Heterodera glycines
atgtatgggcgaaacagcgtgtcgtcgctttgctcgtactccaacacgcggaacaccttcgtgactcgatagccctcgtccagtgccgcattcagctcaattgatgtgcaagtgctgacccatccgcgttgctggtcggaatgttcacagcggtagtcggaatccacccctccactcgggtattctttggcacaagtgatgcacagcggaaagcacagtcggtcgtccactctcaccggcagcactgcgacatcgatttggcggggcggcactacccaaactttgagtagtgccaatgggaaagggttgtcagccgcgcttgtccaccgcacttgttgatttaatacgtgcactttgggagtgccaatagggtaacgggtagtgaagcttaaagtttttaatttatttggcaatataaagaaaaacaacaaactttatgtatgggtagagcgacgtaaagtcatagtaggagatcctctcccccggccccgccttgcgcagaagtttcatcggtccggtccgtcctcccataaacgcgtcgcggattaccaggggtccgtcgtccacgtaatttgcaaagcacttcctcatggctttgctcctctccagcattgacgtaattttgcactccctatatacgtccacacgattcactcgggcccgaaggtattccatccgcttggctcgcgctcccgtacttgtcccgctgtctttccgttaggcagcaacatgttgtcattcggatagcacttcttacaaccatgccaagtgcaaccttaaaattatcgatttttatcggaaggagaaatataatcaataccgttaacttcaattgcgcgtccttcggcctcaatccacccgtccagggaataaggaccgatccgcttctctcctccagccgaatgggcattctgtacttccaccccatgctcctccgaataccagtggaagaatcgaagtgccaataggctttggttctgcgcgttgtcatagccgcgctcagggacgatggccagatgttcagagggcagatgattagttcgaaaatgccgcatacaagctcctgcgatggtcatgcactcgcgcaacacgtcgatgccgtcatggttttccttgttgtcgattccatcgatgtactcctgtcgtcgcgaaatctcgaagaattcacggcggaatgcgacaagagctgccatcagtatttcaacatcgtttgtgcaataactgaaaaatcaataataaaagaaattacctggcaagcgcctcatcgagcctaaaaggctcatgacggtgctcggcgtaccactcgtcgaattggcgcctcttcccgggcatcattccattagccaaatattcatcaggtgtcgggtggatttctatgccgtagttctccggtctattggcgagatgagggaagaacggcttgtcctccacatcaagtccataggaagggaccaatgctgccagcgaacatggcatcaggttgaaagaatcacggaagatgacgttggggttccgctttttctgcttccgcactttcatctcgtacattttattaccctaaattttatattagcctaattttttaaatatcattgtacccgtctcagcatctcagggttaaaaccaatccggaacagctcgcggaagacgagcaccatgtcgaagcggccaccaaagtgagaatatgcgtaagtgtcgtacttcttgggcagttggtaaacgagccaatccacaaatgcctccagagggttgtcagacaccacttgcttgtccacctgagtgtccataaaacggcgctgacaaaaagcgacggttcgatgtagtccgcatatttggcagcctgctgttgccctcttccatttgccgttgtcaatgcagtcagggcacgcaactctcgcagcgataaagttgggctgatgttccttcttctcaggctcacgaggattgactggttggtgctgcatcgtctccaagtcaaaggccacaatgcggtaggggtcatgttccttcggttcaattggctggatgaagcaaccccgctctggattgtggtacgtgttgcacaattgacaatacgtttcgtgacatttgtgaccctgaagccaacgaatggcatttttaaatttatttacgcttcttacttttcgttcatttcgatgatgcactcgtgtgtcccaaataaccccgcactctttacactgttttgactgggcgcaaaa

SEQ ID NO: 29504 - DNA, 1451 bp, Heterodera glycines
  unsure (1)..(1451): unsure at all n locations
ataacagtgttcagcaacctcgaaaacccctaagaatgtgttttcctttaatttatgaatttcaaatttttgttcgaattgggttcaggatttgtatttgcaaaataaaggtcatattcgtgatcagcgccacaaattacaccatgaaaaattatttcaaatgtcttttgagtgctttttatagtgcggtcacttaagtcccagctgaatttggcactccaattccggcactttttcaacctgaaaaagggcaagcgcacctttaattctatttttcctaccctttctagcctttttacatcgattctgaccgttttaagcatttttgagtttggggactcatgagaatcccatattcctcacccttatttactagaaatgttccaaagattctaataaattttaatggaagcaataaatttaaattattaagacgaattattttacgtattgagccattttatttacaatatttataaaatattacttgttaaattttaaacggtacgcaaatgtctggtagccataaattgtttctatgtttttaaaatctgatgaagaataagcgattccataaatttagaaaaataatcaaaacataaataaattttaggatgtgacaattaaaaaaaggccgaaggtaaaatatttgtttttatgctggtgttatttttttttgtctaagttggttgtcgatctagcaagttcatcgtcatgtaaagagcatcacaaaaaaatgtacttcttcgaaaatgcagactattatgaaaacaggcgtttgtcttgcgtttggtcagaaggatgggaagcgaatgagtgctgcgggaaaaattaccaacttgtgatcatggacaaaaaatacgtaaaaaatgtaaagattttgaaagttagaattaattaattttatttttattaaaattcatggcataattatacttaaatattaataaaaagttttatataatatttttaggatcttcggaacataaagccagaagtaagtaaacaataatgctttttgagcatataaataaaaaagtaacgaaatttgaaataatttttatttaaatggaatttccttgaaaaaacaaatttaacattaataaaaatttgatataaaatttttttaggagtcttggataccacattcagtaagtaaacaataatgcattttgttttaagaataaaaaaaataatgattctgaaatttggtttaatttattttatttttactanattcattagatttaaaagaataactttanacattaatgaatattttttatataatattttaggttcttcggacaccatattcagtaagataacataaatgctttttgttttaagcaaaatttactagattataaaaacttacaatttagtgaaggtaaatattttataattggatttaattggcttattatatatattttaaaaataagcttttg

SEQ ID NO: 29505 - DNA, 1653 bp, Heterodera glycines
  unsure (1)..(1653): unsure at all n locations
tatttattcagaaaaataccacgttttacacgtattacatattatttaaataataaaattcagagaaaaaaatattgaaatttctcactctctctaactctttcactctactctataaaaataaataaaaattatagaaattgtaaacctactgaattaggtaaggcttggcatttttatcatgatgtcatccccacttcaatttctttttttgatttaaaaatttttcaattttattcaaaaaggaaaatcgaaaaaatctaatatgaaattattaaattttatttattactttattaataatgaatgcttgatttaaataatatcactatattctttttgaaaaagttgtattattaatagggctgggatttttaggcaatacctaaaatttatgcgcatttcataagtgtagctaagcgggaaaaaatcatttttatgagtttagagcttccgggccccgttttataatacctattcttacctatttgggagtttttggcactatatggaaagtgacagtttttgaaaattttttcaaaagggggggacccttttgttttgcaaaattttttttgtgatagtcaaaaaaatttattctctggggtttttggggtccccgatcacgaatccttcaattattttgatcaattccgatttcctaatctaaatttgaacaaaaaatcataattttaaaaattcaaaatttcgatttttattcgagttcgggttagggattagaaattagtcaaaatacatgtcagattcgtgattagcgtgatttatttgaattaataggaagcgagtttagcatagatcaagaaagaaatttcaagatgcataagtgtttaaattgtgaaattgccaatttggcattaaagaaaattaaattcgcagaaaatatgaaaaatgtttaaatgtaaattaaataaatcntaataatcaattgtaacanatattttatcttttaatattacaatgtttcttttattcagtctttntaaatctaaattngttatagaagaaaatatcattaaaaaaatcatttttcttggttttttttgttaaatttttgtatcaaaattcggtttttgtgggtcatttaattcacgtacttccgcaaatcgtttttaagttctggatttatttgaaaaaatcaaattctagtatccccaaaaataaaaactaaaatcctaaaacgagtcattaactctcttaataatattcaaaatatcattaaaatttattaaaccttaaatgcaataaagaatttatttatttgcaattttttagtttttaataatccaattcattcatttgatataaggaataaaatttatttcgttttattttattgaatgattatcgaaaattttgttacttttcaacatgctattataagttcgtcagtagacaatttttttaattaatattgagaaacttggacaaatgcattaacgaaaaaattgaagttgcatgcattttcaaagtgggaaaataggcgaataaattgttaacagatttttaccaaaaaagctaatttttacgctttgagctcattattttaaagaaaaatattagttttttgcagtccggcggtggataggcgccaccggtggaaaaattgcaaattttaagcttttttaaacagat

SEQ ID NO: 29506 - DNA, 1011 bp, Heterodera glycines
agtcggtcacttgcgcgacgggtatttgtcgaaattgggggaacgcgtttaggaaatgcgctttttccaaggagattttcatcggtggaacggacgcgcgttttctgagagaggcaattaactaattggaattaattgcaattgcaacttttcccttttcagaagggcatcccggcaattggcttctcaccgatgaataacacgcccattctgttgcacgaccacaacgaatttctcaacgaaggcgtttttctgcgcggagtgaaaatttacaccaaaatgatcccacggctcgccaatttgccgtcattttgagcgaagtgccggcagaacaaagaaaagaaggaatcaaaatgatttctcctctaggccaataaattaattatatttattttaattcacttaaggaattcctttgccaattttattgcctttgttttttaatttatttcattttgaccaaatttatattcaaattgaaaccgaatttatgatttttcgagccaaataaaggggcaaattttgcgaaatgctgcaaaatgacacctcaaaagccttcgactaaaaacgattcgtttaatgattgttcttttcgaattcgtccgccgttttcgacttccccccccccctcttttccttcattcattgtacttcctccacttctgtcatgagcttcggtggtgcgggtgaccaaacttcccgcgtcgacgtgtacattttaggcgtatggtcttcataatcgaagattgaagtcagtgtctccgtgccgtactgattgatcagctccctcgggttcgtgatgaattctttggtccatccttcgcgtggcactccgcccgggccttcgctaagcccttaaaaatcccaaatgtttatcttaccatctccccccccccgtcgtttccccccgccccgtcgtttgctccccgaaaaatttttcttgaaatttttctactaagatttcctaagagttttttaatgaaaaatttctaggtttgaaaattttttttt

SEQ ID NO: 29507 - DNA, 1844 bp, Heterodera glycines
cggggcagtccccccgaaccgatgcgcccagatttatggggagaccgaatccttcgggaatagcttccctatagcctgtactttaattctgcgttggatttttgctccccataattgtttgagtaccccaaacggacacttgaaaaaatcgattttttttgttttcggggcagtccccccgaaccgatgcgcccagatttatggggagaccaaatccttcgggaatagcttccctatagcctgtactttaattctgcgttggatttttgctccccataattgtttgagtaccccaaacggacacttgaaaaaatcgatttttttgttttcggggcagtccccccgaaccgatgcgcccagatttatggggagaccgaatccttcgggaatagcttccctatagcctgtactttaattctgcgttggatttttgctccccataattgtttgagtaccccaaacggacacttgaaaaaatcgatttttttgttttcggggcagtccccccgaaccgatgcgcccagatttatggggagaccgaatccttcgggagtagcttccctatagcctgtactttaattctgcgttggatttttgctccccataattgtttgagtaccccaaacggacacttgaaaaaatcgatttttttgttttcggggcagtccccccgaaccgatgcgcccagatttatggggagaccgaatccttcgggagtagcttccctatagcctgtactttattctgcgttggatttttgctccccataatttgttgagtaccccaaacggacacctgaaaaaatcgattttttttgttttcggggcagtccccccgaacgatgcgcccagattaatggggagaccgatccttcgggagtagcttccctatagcctgtacttaattctgcgttggattttgctccccataaatgtttgagtaccccaaacggacacttgaaaaaatcgatttttttgtttcataaatatttttttcagaaagtgctctaaagcgcaccaaattttatttacaacttaattttagcactctgatgctttagtatcaaaaaggaagatgaataaaatttttaaaatttttaattcctttttaaacaggccaaaaagtttaggcttaactttttagtgaaaattcaatcactcatttttcgagtagtgatcagaagcgcaccagattttgcaggggcctaaaaaggtcaaggaaaggcgtctctgcgttgatttagcagtagtacctatgaatttaaattttctatgaatttttaaagttttttgaaatttttttaagtgcaaaagtggtggtgtctgcaaaaaattttcaccgggtttaaaaaatctaggaaaattagtaagcatttgtagtgttccgatacgtattcctgcaaaatttggtgagcccctgatcaattacaaattatttatggacgatcaaatttttagaaatttttatttatttttgcataattaattcataaatatttttttcagaaaatgctctgaaacgcaccaaattttatttacatgctagtttaggcactctgatgctttttctatcaaaaagggagatgaataaatttttaaaaatttttaattcctttttaaacaggccaaaaagtttaggcttatcttttttttcagaaacttatcagaagcgccccaaactttgcagggatactgaaaggaaaagaattaacctgttttatcacattagcttgtcatcagtttttataaaaaattttcaaaattctgagtctcctattattttatttttttttcaaaattttgaagggcggagggggggcgaaggcccaccacgaggccgcgaag

SEQ ID NO: 29508 - DNA, 1408 bp, Heterodera glycines
  unsure (1)..(1408): unsure at all n locations
atcatcagcaaaattgatcaatcatcacatcaaagcattttttaattcaccgcaaaggaataataaaaattaatcagcttttaagacaaaaaaaaaagcgaaaaaaagaaattagcagaaagacagaaaaagagaaattgtaaagattttgaaactttttaaagatacttaactaattggcattatgtcctgatgattctttttttcttttgcttttgcattttttcagatcagaatttgtttttcctcctccttattttaatttgttttaagaatcaaacatttgctacaaatgacatcatcgagcagcagaaatggcatcaaaaaaattgcaattcgtaaatttcaacgtaatttttgcattctttttttatttctttcataatatttcaaccgttttcaggtcgcaatgatccgtctgtatctaattttgacacaaattggtcagttttggaggactccgttaagaaaattcaggagagagaaagtgttacggttacttgcgtcgaattgtacaatgtaagtgttgttaaattcaaatatttattatcataaattaaagaaaaattgcatatttcgggatttactaattgtttgtcataatagttagctccaaccccatttaaaatttaattttcactttacatgttgctatttggtttatattttagaatctttgtgcatttaatccaagccctatattaagtacccttaattttattagttttgtttttgccaattgctgatatttaactctttcattttcaaatttcgcagatggtcgagcatttgtgccaaatgaattatgccggtgagatttacgcccgacttcaattgctcattggaaaatttgccgaggctgagtcggctagccttttggacaacagtctgaatgtttccaacgaagccttcttggccgcactcaatcgcctttgggaggccttctgccagcagttggtccgtttttggacggagaaacttctgattgtattattttacccttctcagactctcaccagaagtgtgtttctgtatttggaccggacttatagggtccaatccacttcatccgtttcaatttggttggtttccgcttttgccaactttttacatccaaaaggttcagggatgcaggattggatgcatttcggaggcatattttggagaggtgtggcatttgttccaggacagtgagtggcattttgcaactcatcgagcaggacagacgcggaattcaagtcgagtttaaaaaaaaataaaattggttatttatttcactgttttcagacaaataaccaattgcttanatctctgattcggatgttcatgaacctgcagatgtacgaccgggcatttgaacgcgaatttctgaagaccactngaacattttatcgaaaatgaagcgaac

SEQ ID NO: 29509 - DNA, 814 bp, Heterodera glycines
acggtcagtggctattttccttttcttccacaatttccccttccgcttcattcttccatattttactcttccgccttatcccccgattccttcggcttttaacaccctgccccttccccgccccgcttctcctccgctttcctcgccccttttcttccccatcccccgtttcagttccgctttcccccgctatgctcgactgtttcgctcgttctgtgggtcgtgccctgtccaatgcttcttcctccaacgaattcttcaacgtttcgcccgatgattgcctgcgcttctgctctacggagcgggcctgcaacaccgttgtctaccacaagcacttctccacctgccaattgtattcgggcgcggaggagggcgacacggcacgcgaagtgagcgccaaagggcacgatttgtacgtgaagaaggaatgtgaggagaaccgccgggagcaggagagagatgaagcggagaatacggcaccgaagggcggcaaactgtgagcagaagccaagaaggaaggcacagcaccattcaaaaagccaatggcacaaatggcgattttggcactttttcaactattgataataatatattttatggaacatttgtttcttcttttcaccaataaatttcatttgcattttcatttggtgtgaatgttagaagacagagaaattagcgataaaaaaaaaactaaagaaaaaaggggggatgagatgagaacaaatcgccaggagatcagcagcaatttgttgacccagaaaacccactgacgcgaccaccgccactttcggggaaaagccaacggcactcc

SEQ ID NO: 29510 - DNA, 1624 bp, Heterodera glycines
  unsure (1)..(1624): unsure at all n locations
cgaagaaactcttttcatagagctcctggtggaaaacagcaattttgctggaccacacacgcatccacatgtcgaaacggtcagtgaacatttgaccatttttgtaaatgttctccttgaactctggccactcacggttattcgtgaatgtgataaagagccgcgccttttttgcgtcatggcaacgcgcaaaaatggtgttgcagtcttcatacatttttttccaatactgaagagaatttacatttctctcagaaaggcgaacaacgctgccaatgtcatcaacactcttttgttgtgcattggggttttgccgagcttgctgcctgttgtattggttcaccaagtactgcagcaaattttttggtgtacttacgcgcaggtccatgtctggacggcgcaaaaaagtggcaatttgccagtcaattttggacgcttggtctaagacccagcgctgtccaagaccaccgccacatgaaagaatgtgatggtattgccactccaaattttcatcccttattgcgagatgatatttgcaataatcgcgcagggagacaaatctttttgatttgtcatagcgactggtcactgactgcgtcgatgtttcagatccggtatctgacaatgcaattgacttggtctcgcacatgtcatcatcggacattgcttctgtgtcaaacatatcatcagaattatcgcttttccgcttcctttgtgcgggtttagcatatggaattccaattttatatccatcgtcgcccttaggcttaattaatggataggtcaagctatcagtccatggactgaacggggcaatttcgttcaactgcccttgcttgttttcaacccatattccttttggtgccggggcaccagtgggatccgcatgaatcgcgaacatcccttcacccgttgagggggtgattatctggtggggatgcaactttgggtctttcataccacccggagcagagcgctcatccagcaaagtcattctgaagaatcggagttcttcagtcctttgttgttttaacaactcttggagctgttcacgagcctgcttgtaagcagacgcagctgggtgattttcttggataacttgttccaaaatttcaagggtcgcctcattaagctgatgaccctgcacaaactcttcatcgtttgtgattttttcaccagtaaaggtgggatttttccgtcgctgctccatggcttcgactggatccagaatgtacaactgaccaaagccaggaatctgggttgttcctgcttgcatgctgctaatgcggcgatgaaattctccattgagaattactgccattggtccaccagcagggcatggcttatttcctgccgaaacactcgcaaattggagcaaattattgtaccgcgacatatgccgcacaaattctttcccttcacgggattgtttgtcgcacgtgatgagctcttcaagctcttttgggtgcgggttaagcttcggcaacacaactcttccctgtcgacagcaaaggctgctgtcctcatgcgggaagagtagtgccccacaatgagagcacttcttttcaccaagcnttacagaatctgagtattcgggataatgtttagccgctgctgcagcaca

SEQ ID NO: 29511 - DNA, 1194 bp, Heterodera glycines
  unsure (1)..(1194): unsure at all n locations
tttttgataaattttatacacatacaaatgctctcgagcatgataggagggcggtgcgcaatcgacctnttatttttgagggaatttttaaatgtatactctatcccagaaaaatggctatctctttttttgataaatgttatacacatacaaatgctctcgataataggaattccaaccgcattctcagaataattacgccgatactaattgttctggaatttgtttctcggcgcgtttgtttgggaaaaatttggaaaattggctatctctttttctgctcaacagtaataggaattccaaccgcattctcagaataattacgccgatactaattgttctggaatttgtttctcggcgcgtttgtttgggaaacatttggaaaattggctatctcattttctgctcaacagtaataggaattccaaccgcattctcagaataattacgccgatactaattgttctggaatttgtttctcggcgcgtttgtttgggaaaaatttggaaaattggctatctctttttctgctcaacagtaataggaattccaaccgcattctcagaataattacgccgatactaattgttctggaatttgtttctcggcgcgtttgtttgggaaaaatttggaaaattggctatctctttttctgctcaacagtaataggaattccaaccgcattctcagaataattacgccgatactaattgttctggaatttgtttctcggcgcgtttgtttgggaaaaatttggaaaattggctatctctttttctgctcaacagtaataggaattccaaccgcattctcagaataattacgccgatactaattgttctggaatttgtttctcggcgcgtttgtttgggaaaaatttggaaaattggctatctctttttctgctcaacagtaataggaattccaaccgcattctcagaataattacgccgatactaattgttctggaatttgcttctcggcgcgtttgtttgggaaaaatttggaaaattggctatctctttttctgctcaacagtaataggaattccaaccgcattctcagaataattacgccgttctggaatgtgtttctcggcgcgtttgtttgggaaaaatttggaaaattggctatctctttttctgctcaacagtaataggaattccaaccgcattcttcagaataattacgccg

SEQ ID NO: 29512 - DNA, 1758 bp, Heterodera glycines
  unsure (1)..(1758): unsure at all n locations
agaaggagtcaangcagcggaacaacaagcnggacagtgaaataggagggcagtgagttttgtcccggccaaaaattcgttggacaggacacatatattttctttggcgttttgtttgttgtttgttcaaaaaagacatggcaattaattgtatttcgggcattgaattgaatattattaaaaccaaccaaatcatatattattgtgtattacctattcccattcgttttgttcgccgcgtcctttcacaattcattcattcatcgtttttttttgttgccatttctcgccgttttttgttatttatttctcttttggtctttcgttcgtttgctcttttgtcgtctgtctgtctgtctgtcattcattcaattcatttattgattcaaccattgcatctcagttttgtttgtttgtgtgttcagttctgtttcacactgcgcctctccttgcaataaaaagtgcacttttatgaaaccaaacttaatcaaatttgtccaaaagtctcccattattttctgtatggtccattttctcctcaatgtatgtaccaaatcaacaaatccaatgcgcttttcatacccattttttgccattttgcattcgtttttttccaccgggggcatttccaatcggatttaaatttgcatttgtttttcattcatttttgatcaggtcagtgcgtgtcttacacttacttttttaagaagaaagttattgctaaaattttgcacatgaattttgagaatttccaaaagtactaagaaatttaaaattaaaaaagtaatatgcttctttcattcataatcctgcttttcctgccaaatgcttttccactgattgtgtgtgactgtatcatttgtcgtccgcaattccttttgatggatcgaccgctttcagttgacccaaaccgatcaatttgaatttaattttcaaatttactttcatttgctttattttttgtaataaaattggccatcattataacaaatctattaccataattaaaggtaatgcataattaacctgaacatttttgttgcattgtttctcccatttgcttgtttataatcacataatttctttccaaaaccaattttagcaagacaaaaaatcagaagcgaaaatggtcaacccgaagggataccgtcgcggcactcgttacatgttcgcccgcccgttccgcaagcacggcgttgagccgctttcaacattctaccgcgtgtacaagcggggcgacattgtcaccgtcaagggcaacggcgccttccagaagggcatgccgttcaaggcgtaccacggcaagaccgggcgcgtgttcaatgtgaccaaacatgcgctgggcgtcgtcgtcaacaagcgtgttcggttagtatttttggatatgttggtcggtgttcaattcggaattgtttaatgagttgtaatggatctgtctggccgacatttagccatgtttttcgggatgagagaccatcaccattcatagaaatcaagataagaatttttgagggaaaatgttggttccagttcagtttccatgtctctcaatcattgagttcttgtccaatttgtggaattaaaatgggtttggggtcgtaactgaagtcacgacaaatgaaagagatggcgagggattcggaaaaagtgccgattttccctcggttttacagatttacacaaaatttctcttaaaaacaaccgggttcggagattttttggggcgagggaaccgtctcttccccccccccccccccc

SEQ ID NO: 29513 - DNA, 1305 bp, Heterodera glycines
tgtccgtctccaaattggcgactttcgcgcggtcgatcggccaaatttgtctttaaaattataaaggcgcattttttcataattttttgactaattttgatcattgattaatttattgagtgcctaattgccttagttaatagatcattattactttaattgcctgattaatgagtcattgaattaattgcctgattggcctactttttaattataaagtgatttagtctttgttgattgagtgccttgcctaatcgctttgattaattgctcattgatatatgtattgcctaattagttgttaattggttcattaattaattgattgcctgcagtgcgttcatttgtttgagcgtcgctttcagtcgcacattcgcttcgtccctttgctcttccaatgccatcattttggcctcctgttctgccaattttggcgtcagttcgtccagtcgtcgctgcaattccgcgttttccaccaaaagtgcgcgtttttctccatgcgctctttcttacaaattagcaattaaaaaaggaaaatgaatcggaaatgtctctgagtttttcggggtttcggtctcgaccttaggggtaatttgtcggtctctttctcgactctttgggtttgaattttaatttaaatttaaatttccattccctcccctatgtcccgctttattaccttccatgtcacgcaattgctgctccgtctcgtccgcccgcaactgttccatcctcagctgttgttccgctgcgtgccgtcggcggcgttcgtcctccaatgccgcgggcgaaatgccggcgccgccctttgtctgcccggccattgtgccatcgtcgtaataattgtctctgctgtccaactaattaatattttgatttgcgattaattggttttaatgccttttcccattgccgtcgtgtgccattttgttgtgtgccgttgtcgtccgtttcgaagtgctgctgttcatcgacggacaccgcctcttcggcggacgacgacgactcggcgccacggcgacggccccggcggaggggcgacgacggacgacggtctgtgacaaaagcaacgcggcgctttggcattgtgttgggctgaaaattctcgagtaaattataattaggagaatcgtgccgaggaaaggaccgggcattactctcttttcccctcttcccttacacctttcctccattactctcttttccccacttcccttactcctttcctcttcttccttactcttttcccctcttccgctttttcctcctcatccctctcctcttcctccttctctcctccccttc

SEQ ID NO: 29514 - DNA, 1306 bp, Heterodera glycines
tttttaagtgttttcctttttttcctgagctccgcgtggcctgaaacgcacgaaaaacatgttttttttgggctgttgttaagctacttttcaagttactagtgcctattttctaggcttttatttttagcgcctaaaatcctaaaaaattttgaaaaagcctatttttgcctattttggcgttttgccaaaatttgttaacaaaaatgcaataaaaacgaaaaatacacccttaagaatcgacctaaaatttttatcaaaaaatacacccctaataaatgaaaaaattttcaaaaattcatctccaaaatttatttatttttttcttgacaagaatttgtgattttgaaaattatgtatcgcattaacgatttggcagaatatttttacttttttgaatacattttgtcattttacacccctaaaaatgagggtttttagtgcctattttccatttttagagcctatttttggggtttttagagcctaaaaattggagccctattcataattatgtgtgcattcaaatttttaacaaatcgataatttccgttgatatcgatcgcttaatttgggggaacacaaaacggtagcgcactgcgctgtggacgaggattttagcattcaaagtagtgaccgggggtccctttacaatttaatcacttatctctgttttctcgcgcatatttttttactctttttctctaattctctccactctcctatagtgaatgcgcatctctctgcccagggggggccagatttttatcccaatactactgggggggggggggataatttttaagcaaatttattgagttgaaaatcaaaaatgtaatcgcgtcaataaaatcaaattttgaaaattcgcaatcatctaaatccttgagtatttttgccttgacgagtttgtatgcttccgggagaactcttttcctaaaaaattattttttaattgctttgacttttaccgataatcgctttcatccttcagctcatatttacactgagctttaaaagtcgggtcagatagcaaaccaaatgacagattgttacaggttatcatgctgctaattcgtttgtcagccacagacaaaatgcctaaaaaaccaaaatctggaaaatttaccaacacaaaactaccgctgctggtcaaattcgtgcctattaaattttcgatcgtcggctggttctcaactttttctttggatttttttttcgccttctccagttcttcaaaattcttgacatattccgaattagcatgaattgttgaaaaagatggtttttggacgatttggtgctg

SEQ ID NO: 29515 - DNA, 1511 bp, Heterodera glycines
  unsure (1)..(1511): unsure at all n locations
acgactgttccgctggtcagcagcattttaggccacccttctccgagcactgaaaccgtggactatacagtacgtacctgcacagtacccaaaaaatttatccactatccatgtcaacaattgtaagaaatgatgggcacatacttaggtgcccaattgtagcaaaaatagtccacgagagtggtgccgatgaattgtccgtccaacccgtaacatggcaccgcgttcagaatgcccatggccaacgacagagtgagcaaatagcgcgcgaacagttcgaccactcgcggcacccaccagggggcaatgcctgaacaacaggacgaacatgacggaaacaaacagcagttcaaagtttaaacggaccaaatcggggcgtcagctcagacacttcgaccatttggaggggctaaaaaggggcaaaaaatggaaaagcgacaacaaaaagtgaattgatacttcgttcagagagccaatgaacagaacgggccgagtctgaccagccacttggaaacggagcagtgccgtgtcgttgaacagtgcgggcaccacgcaaacgtagcccgggggaagggtctgaaaatgggccgatgaacatagtcgggacgataatcatgcaattatacagtaccgccgccaaaaaggcgtccaaagtgccgaaagaggaagaagttggcgagtcgcaaagggcatgttcagtgactgaaaaggagggaaaaagctgacgcataggaaggaagacgaaatgtgccccacaatggagaatcgaaaattaaaattgagaaagccgtgccaactttgcattgctggcagacacgcgtgtgcgtatttgagtggcggcttcaccagcgccgacattttgatgcccgaggcaaacggagcggtggcaccggcggagcgccgactgtcactgtcgcccaaagttggcacttttgtttgcgggaagaaatgctcaaaaataaggtaatgaaatggatggcttcttcttctgctgatattactataccatcttcaggttggcccgttttcttctcaaatggtgtactgcttgaagttgttgctgctgcgcgctttctgagtcctgccggatgccaaactccgcgtcaaagtcgggaaatttagggaatatgggcttcgccgttgccattggccgatggttttctgccccgctgggccgacggagttgatcctgtactaaaaattggtatttaaaggtgaaattcggaatttcgagctgtttccgcttgcctccttgggccaattgcggtggggccaaatagcggaagcaaatgtgcgtgctgttgctgacgttgaactcgttgcagcactgcacttcgccatcggaaggagcctgccaaaaaatgtgcatcgaattactcaattcgctcgcaaatggcaccaaagattggcacacgaaacgccttttgattctaatgaatgcatttcatcatccccaaaaaaattctacaaatagaaattactcccanaaaaattcgaaaaattattcgaaa

SEQ ID NO: 29516 - DNA, 1818 bp, Heterodera glycines
tctgaatttgcgcccaacttttcggcactaaaatactgtaggtatggatgacggcttaattttgaaattggctttttgaattttcaacatttcccctgcagcggttggaattgccaatcggtggtgacgacgaccacaacaattcacgtgcaaatccgtcatttgcagctgcgcatggcgcgaatggcatgcgattgattggagccagcagaggtggcggaacggcagcggcgcatgacgacggatgtccaaggggaggaggaggaacaaaaagtggagtggcaaaatgccagaaacaaatgaatttttaaacaacctaaagagcagccaaaaacgatagcactttcccaacaaaaaaaaaattatgtaaaaatggggcacaatgccacaattagtctcaccagtacactgacaaatatctgacctattggcaaatcgccgaataccttaacctactatagtaagcgaataaatgacacgtacatcaaatgtccgtgccatcctatacaatttttcaaaagtttatgacgaattacaatttataaaaattttcaaaaaaacactgaaaattttttcttaaaatttgctaattttttgaaaactttcaaagtttgaaatttaaaaaaattcggggtgggaaatgaagtcgtcaaagcgttggctcttaattgataaaaaccatctcatccccattttgatccattaatcactgggttatcactcaatgattaatttaagaaatgtttcgtccaaatggcttcaacaatggcaattctccgccccatcgacaactgttcaaccattcgcctcctcagcagcaggcaaacagcaacagaaggtggccaaatgtccccacgggttgataaataaaaattttggattaatgacccctctccagtcattgatgaaccacagccctttaactcgggattaggttcatactgaaatagtagggggggggggggtcgacccgacttcatacgaacgaagtccagggggggggggggggtcggagatgaaaatttacgaagtcctaagtcatgtaaatcaacaaaatttttgcttttcaaaaccttttttttgcggcgcgctttttccaaaaaacatttggagaaccgggggggggggggggaatgtgtggggaaaaaaaggtgctgaatgagagaagcaaaggcttaaatagtgccacaaattgggaggggcgaacagaaggatattacatagcaaattgtgagtgacatgtgagtgaaggcaatccaagagagattggggaaatgtcataaaaataggtaattggaaaaggaaggaaattttggatgaataggatgatggacggccagaaggcctgggatgggacaaaaaggcgaaaaacaaaaatggtttaaaattacgaatggcagattccacagtatccgatcatttgatcatgaattaatgttcctaataaactagaaggtaatgtgttttaaatttaatgctatttcggctatcagggcttgaaaaaattttacctccgaatccgattttggacataggtgcaaatgtcggggccgcaaatgtcgaggctccgtaaggtggcattctcactgagtctcggaatgggataatctcaaaagaggtgtagccaatccgggccctataaatcaaatgcttttttaaccaataatcgatcataaacaggttaattttgccgttcccggatggagtcaaaatgaaatatcgggcgctttgtcccgatttggactttgtctctcccgaactggctgaaggccttcgctgtgaccctttcgtcgatattttttcccctggagttttgtc

SEQ ID NO: 29517 - DNA, 1064 bp, Heterodera glycines
  unsure (1)..(1064): unsure at all n locations
tgcaggtnnctttttattttttaatantttaaantgaaaatantttttgactttacgcaatttacttatattgaattctatgaataatataaaaaacaaaaaattaatttatttgtgtttttaattagagttgagtacatacactgaaagattggccatcagttaatttccgtcaccccgagaattcatgtgacaaaaaattgccctgtctgtcggactaaaaatattcgaaaaatctttgtttaaaataatttgagcttctaaattttcatgatacttctgtcaaaaaagaaaatcttttatatatacaggcaaaaatcttatttttcagttctgaaaattttcttaaatttgtttactgaagaataattctttaatttgttaaatttggtcttcattaagagaatcgcaaaatggcatttaattaccaccatagtgacaccacgctaatgagccttcctgcctatattagtgggcaagacaaggctagtcggtcggtcctatgaccaatgtgatatgggaaatacaaattgtatacatgctttcaccattcacgccacaggcacgggtgccatttaactttaactttcatattcatgccacaggcacgagtgccacttaaacttttttttgcacacctccgcaaaatgccaacaattatatgtgaaaaacgacatgacatttttgtccgctgatcaaccgcctctgatggtgtgtgtatgtgtgtgtgtgtgtgtcaaaggctcgcctattagcggtgccacctgctactgctggacagccgaccgtctatgcgtgccagacatatgacatctctgtcctccgtcttttggttgcttagcgacacaaagttttatttttggggggaatgagccacccgggcataagccgaaaaagtgatttagtattaataggtgcgcgaaacgaagggtggcacggcaccacttcattaacagccagcagctgttggacagcaaaatttggaaagcttttttaatgaaatttagagaagggggaaaaggggcacaaagtcaaattgtcattttgtgcccatttaatatgga

SEQ ID NO: 29518 - DNA, 1071 bp, Heterodera glycines
ttccaattgactaacgaaattcttacaattagtaattccgtcgattttttgcttttcactttgtaaattatgggcaccggtttcaaaatgccattcattcgtccgtccgtccctttgtcagaccaaccgccgctcatcgccgccctttcggccccttccgttttggctccgttccccgccccactcctccatcattttccttctccgaaacattcgtcccatccaattgcgccacttctatgcaatggaaataggcatcaaattagcacaaatggcagcgctgaaataacagtgccaatgaatgggacaggaggaggggtggaaaatgttcagccaccgcggccggcacggagtgcgagtgtcagcggaatggtaagcgaaggacgcccccacccctccccaccgccttccaaaagtggcacttttctcgctatgttcggcatcaaacacattttgcacttctagcatgactctttcataattagccgatttttactacagcaacagaaggcaacgaccagcaccagtcgagcaactttgctgttgcaacaacttcgtgaacgtaaggacgaagttggagttgagacattgtgcgcaaacggaggggacacagcgcggatgggtttgtcgggaatttgttggcacttttgtcgggactgaatgtcctttttattagcccttttcttctgtctgatcatacgcatttcccttcatttaaggaagtgccaaccacgtgttcctcgaattacaaggcgaaaccaaacggtcggcgctgccgacgaatgtccgatcggttgaacagatcaaaagtctattcttgcgcagctttccttcgcttagtccggctcagctccgatcgcccggggtcaaagtgtacattcaaaatgcccattcaccccaccggttgttctacgaattggaggacattcggtccgtttaactgttatgtttttgtgtctattttttgggtaaatttcagcgaagttggcaatcattcggtgctgaagctgttcgagcagtctttggcctcctcctcttcgccacatgcttccaccgccgtcctcccaacac

SEQ ID NO: 29519 - DNA, 1096 bp, Heterodera glycines
agattgccaaaaaaagagatagccattttttttggaccgtccatcccttcacatatctcaaacggcccgaaaatcatttttagagcataacaactgatgacagccactgtcatgtttccaaagagatttctataccagatgccaaaaaaagagatagccatttttttggaccgtccataccttcacatatactcaaacggcccgaaaatcatttttagagcataacaactgatgacagccactgtcattgtttccaaagagatttctattaccagattgccaaaaaaagagatagccatttttttggaccgtccatacctcacatatactcaaacggcccgaaaatcatttttagagcataacaactgatgacagccactgtcattgtttccaaagagatttctattaccagattgccaaaaaaagagatagccatttttttggaccgtccatacctcacatatactcaaacggcccgaaaatcatttttagagcataacaactgatgacagccactgtcattgtttccaaagagatttctattaccagattgccaaaaaaagagatagccatttttttggaccgtccatacctcacatatactcaaacggcccgaaaatcatttttagagcataacaactgatgacagccactgtcattgtttccaaagagatttctattaccagattgccaaaaaaagagatagccatttttttggaccgtccatacctcacatatactcaaacggcccgaaaatcatttttagagcataacaactgatgacagccactgtcattgtttccaaagagatttctattaccagattgccaaaaaaagagatagccatttttttggaccgtccatacctcacatatactcaaacggcccgaaaatcatttttagagcataacaactgatgacagccactgtcattgtttccaaagagatttctattaccagattgccaaaaaaagagatagccatttttttggaccttccatacctcacatatactcaaacggcccgaaaatcatttttagagcataacaactgataacggccactgtcattgtttccaaagagatttctattacca

SEQ ID NO: 29520 - DNA, 1000 bp, Heterodera glycines
cattttgcgaattagacaaaaatgatcataaagtaacaaatgagagaatttcacattctgctaattaggctttaaatataaactgtttaagtgttgcagacggatcaggttgataagcgccaataacctcagatttactattttcgcgaccccactttttgaattctgacattttcagctcattacgctctaaatataaacagcatcagtgttccggaaggatcgatttgaaatcgccaataacccccaaattacaatttcctactgtaaacttatacagattacatttggatataagaaattgaaatattgagaatatcacaaaagtgatcatgaaaattgtaaattggagattattgggacttatcagctcggtcctccgcaaacactgattcagtttatatttagaggataaggagttgaaatggtggaattccaaaaaggtgaccaagaaaattgtaatcgaagattattggcgattatcagctcggtcattccgcaaacactgattcagtttatatttcgcgaagaatgagctgtaattttgcgaattagacaaaaatgatcataaagtaacaaatgagagaatttcacattctgctaattaggctttaaatataaactgtttaagtgttgcagacggatcaggttgataagcgccaataacctcagatttactattttcgcgaccccactttttgaattctgacattttcagctcattacgctctaaatataaacagcatcagtgttccggaaggatcgatttgaaatcgccaataacccccaaattacaatttcctactgtaaacttatacagattacatttggatataagaaattgaaatattgagaatatcacaaaagtgatcatgaaaattgtaaattggagattattgggacttatcagctcggtcctccgcaacactgattcagtttatatttaagggataaggagtgaaatggtggaattccaaaaggtgaccaagaaaaatgtatc

SEQ ID NO: 29521 - DNA, 983 bp, Heterodera glycines
cggctttctctccgatttgtccagtaaataattcttcaaccacgaattttgcttcctcttctatccctttttcttccgctttcttctcatccggtggcttctcttccccagggcgctcccgaaaatcctgtcccgtaattgccgctttctgctgacccggcaacggtgcctggccctgatcagccaatgactgatcacttttctgatcactgatcatttcttggccgttttccgttattctccggccctgtttctgatcagcaatcttttcggctgatcgctttcttctccgtcttcgttccgtcccataatttgccaccgcctctttggcaattcgcaaatttttcagcaattggagaatccgttgcgaaagttcgctgtttcccgcttttgtcctcatgtcagatgtccgctgttgtccccccgggccgtccttcttctgtccgtccgatttcttttgctcatccgtcggcaattgtttggatgaagatggccgatcacccgacaaatttctgagtgatcgcccatccgttgtcggcagaatgttttccttatcagcagaatttgggagagatttgttgcgtgcggaagtctgaactggtagaattttggtccaaaggattcgtccgttcggcatttttttgccgcttgatgcttcttcgttccgattgcttctcgtccaatcgcttatccgatcgctcggctgctttatcgcccccattttcttatcagcgatcacttccctttcattattttgatcattcgattgctttttctccccttttgctttttctttcagtgtgcttttcctcaataatgaagtatcaccttcaattctgttgttagtctgtccttttgcagcggtgaattgtccgacatgaagctgttcactgttgatcctttggtccgttgtttttgtgctaacttcgaccatcatgctgtcgatctgtctctcattttctcgtaattctttgggtgtctat

SEQ ID NO: 29522 - DNA, 1130 bp, Heterodera glycines
ggtataagcgtttagaaattgcgggagaaaaaagcttcgatattgagaaaccaagtcaagtccagaaaagaatatcttaaaacgaattcgttttggtttggcattatgataccgaataacattcggaaattatggaaacaaaattggagaaattcgaataattttttgacttcaaatttttttcccagttttgattgggttttaaaatagtagtttggttcagaatttttccctctacaaaaaaaaatttataatagaattttttattattaattcgaaatctttaatttattggacaaatccaagacttaaaattgggagaagcatggggctgtagctgaggacccaaaatggggccccattggggaattaaacatgatttctgaaaagtccctgaaatgtcgattttttctttctatagcttcttgtagagctcgagctgctctttccaatggtcttatcccggtctcgatccgtgcagaactcaaaaagttatgaagtgaaatgtgaaatattgttttcgccacaattgggagaagcatggggctgtagctgaggacccaaaatggggccccattggggaattaaacatgatttctgaaaagtccctgaaatgtcgattttttctttccatagcttcttgtagagctcgagctgctctttccaatggtcttatcccggtctcgatccgtgcagaactcaaaaagttatgaagtgaaatgtgaaatatgtttgcaccacaagggattttttctgaaacccatcggaaccaaaaatctagggtttggtataagcgttttagaaattgcggagaaaaaagcttcgatattgagaaaccaagtcaagtccagaaaagaatatcttaaaacgaattcgttttggtttggcattatgataccgaataacattcggaaattatggaaacaaaattggagaattcgaataattttttgacttcaaatttttcccaggtttgattgggctttcaaataatagtttgggtcaaaattttctcctctaccaaaaaaatttatattataatattttataatataatctaaatctctaatttatatgacacatccaagactcttaattgtgagaaacatgagactgtggctgaggaccca

SEQ ID NO: 29523 - DNA, 1752 bp, Heterodera glycines
atttctttaattcatttttggcttgcttttgttattaattaaatattaaatttaatttagttactaaaaaaatttgcggtttttgaaaaataaaattctgagtgttttttttttgcagatttgccagccctcatttggaagcgtcgtccccaagttccattgtcccatcaatgtccttctccacaattggatcatccacttcatcagcagcaattgcgccaatgattgatgaaaagggtgaactgttgaatcgccatgaagtgcaactgatctccaaaacgttgaattggtcggtggaaaatgatcagaaatttgaatttaatctgctcatcaaaattggattaagtagataatctaataaatttaaaatttttacaatggcatcattttctttttttctaaaatagtccagatattaataaaaattattattattattgccaaactcacaaaacaattcaaccaaatttattatgaatgcctttttattttaatagccgaaaaggtcacgaattttagcctgcctaatttattacagcgctttgaaagagcttgactttggcaacgaaattgttgttcggcttcttaatgacaagaggtaatggtaattaataattaatttcttttcttaattcaattttatttgtgtccattttatttttagatcgctgtttaaaagccttttggcacgatgtgccaaacaagctcatgacattgaggtctgttgaacaattacatttattttaaaaatttgaatctttttgttactaataatattgaattaagctagttttttttttaattttaaaattttatattatttatttatttttaaaatgaatgaaaaaaaattgatttttgatcagcaaccaaaaatagtttatagaagaaaaccaaaaataaatggattatcttttcacttcttaggccatattttatttgggtgaagtgaaatttaaattttccgatattataaattgaaaatcagataaaactctcgagagtcttgacgacaatttactcatgctcctaagatttaggtgtttgacccgaaaagtttggcacgtttttgtccaagagcagtgcgagttggtgacggcgtgacaagattttttgaaaatgtgagtaatgtcaccctaaaattatttacattattttttgccaatcccagttggccattgagctcgagaagggtcacgccattgctgatctcgagcagaaagtggctgaactgtgccgtgccaatggccaactccattaccgtatgaaagtgtggttccaagccgagaattggctgtgcgtcaaacgatcggtagtcgacacggtaattgttgcacacaccaaacagttcgacacattttgcggcggaggtgatctttacaatgaaaattctcattattttattattatgatgtacataaaaatggcaaaatcaaatgtgtcggaatgccaaaaagtggtggtgatcaattccaacacaaattgtccaccgaccagtcaaaatcattcactgattattcccattttttcctttacaataacagaaatgcaaataaataattggcaacttctgtgggaattgaacccaatcgaccacacaatccgtgggaagctctaccattaagctaccgagcatgctgggcgtaactggattttcaattacggaaacccgtaattacggcgattttcttaattacggattccataatcagtcatgacggggtcaaaaaacgccgtatttcccgtaatcag

SEQ ID NO: 29524 - DNA, 687 bp, Heterodera glycines
ctgttgtacctcttctatttactgttgtacatcttttaatcactgttgtacctcttctaatcactcttctaatcgctgtttgtacctcttctaagcactgtcaaaaattatgtatttaaggcttggttgtaaattatttaaattaatttttttttaattaaaaattttcattatgtattttttgaatttgcaaaaaaaataatttcatttcaaattaataaatattcaattattaattttcaacattgtttttaattaataaaacgagtattttattataaaaaaaattttaaattaaaatgcattcgatttttaagcgcgaagcgcccgtcctgaggccgcgaagcggccgaatatccaccacaaaatttaaaaacgggcgcgaagcgcccgtcctgaggccgcgaggcggccgaatatccaccacaaaatttaaaaacgggcgcgaagcgcccgtcctgaggccgcgaagcggccgaatgattactacaaaattaaaaaacgggcgcgaagcgcccgtttgaccccaacaaaatttaaatcgggtgcgaagcgcccgtccaagcccaacaaaattaagaaacgggcgcgaagcgcccgtctggccccacaaagtctaaaaacgggcgcgaaacgccccgttctgaggccgcgaacctgaagaatgttccccacaaaattaaaaaa

SEQ ID NO: 29525 - DNA, 1141 bp, Heterodera glycines
  unsure (1)..(1141): unsure at all n locations
tcttttttctcattttttaccgcaaaattaggtaccaacatcccgccttctcttgtctggccctatcaaacaatcttacgatattgaaacgcaaacaaaaaaaattcttgaccaaaaaatggctatctcttttttctcatttttttaccgcaaaattggtaccaactgttgccttctcttgtctggccctatcaaacaatcttacgatatttgaaacgcaaacaaaaaaaattcttgaccaaaaaatggttatctcttttttctcatttttttaccgcaaacttggtaccaacagttgccttctcttgtctggccctatcaaacaatcttacgatattgaaacgcaaacaaaaaaaattcttgaccaaaaatggttatctcttttttctcatttttttaccgcaaaattggtaccaacagttgccttctcttgtctggccctatcaaacaatcttacgatatttgaaacgcaaacaaaaaaaattcttgaccaaaaaatggctatctcttttttctcatttttttaccgcaaaattggtaccaacagttgccttctcttgtctggccctatcaaacaatcttacgatatttgaaacgcaaacaaaaaaaattcttgaccaaaaatggttatctcttttttctcatttttttaccgcaaacttggtaccaacagttgccttctcttgtctcctatcaaacaatcttacgatatttgaaacgcaaacaaaaaaaaaattcttgaccaaaaaatggctatctcttttttctcatttttttaccgcaaaattggtaccaactgttgccttctcttgtctggccctatcaaacaatcttacgatatttgaaacgcaaacaaaaaaaattcttgaccaaaaatggttatctcttttttctcattttttaccgcagaattggtaccaacagttgcctttctcttgtctgggcctatcaaacaatcttacgatattgaaacgcaancnaaaaaaattcttgaccaaaaatggctatctcttttttctcattttttaacgcaaaaatgggaccaattgttggcttctctttgcctggccctacaaaaaaattacgaaaattgaaaaacaaaaaaaaaaattctggacaaaaaagggtttttttttttttt

SEQ ID NO: 29526 - DNA, 1096 bp, Heterodera glycines
  unsure (1)..(1096): unsure at all n locations
tttattaagtaattattgcatctgattaaatataaataatattcatataattccgggctctcttatntactcaatctataattgaactaaatattttgngcatacagcaaatattcgttaaacaattttaaataagaaaatattcaattaatgaaaattggttcaaatgtcgaaaaaattaaaaatatataattattttattagagaatatgttttatcaataagtatgccatttttactgttgattgattaaaaataaaatgacaaaaaataaagtacaaaaaactaaaaaataatgacgaatgcacaatgataaataatttgttcctgaccatatataatatttatatgcatacacattcaatataattaatttaaatgaaaaacaaatactgactcataaataaaaaaaataatttatttaaattaaattagttcattaataaaaataataattgtttaaaaattttaattaataatcgtaaaaaacttacgaaaactgccaatgaaatcatagtaaaaattttaaaacatataattttcacatgaaaatcaaaaaaaattttcctttcccctttttggccgtgagattaaaaagcaaaaagagataattaatattcaataaactaattttacaattaattaaataaaagaaataattaaattttttgaaaaaaattctgatcggaattatattttttataaatttattattcaattatggattaaaaaagcaattaaatagttaactttttgaaaaattttccaattattatggatttttgaaataaatcttttttaataggcgaaatttttttttatatttatggttgatattaaggaaatcccacattaaaaggtattttcgcatttatcgacgaaacaagttgcaggaataattttaaaaatatataaatcttataactatacttaattttttatttaataaaaataattctttaagcagaactattattcagtctaaataaataaaatttaattcgttaaattacctaaaaaatcccacgtaattggtacttgcatctaaatatgtaatcacatttattaatcaatnaacttagatttctgaatttat

SEQ ID NO: 29527 - DNA, 1534 bp, Heterodera glycines
  unsure (1)..(1534): unsure at all n locations
aatacatcgttggccatactggctgactgaccttgactgttctgcagttttttgtaaccatcacgacccgaccaaatgtaaatgcgcttgttgatcaccgccgaacaatgcccagcacgggcagttggccagaagtctaaaattaaaattttgaaaaaaaggtaaaacaaatgctaacacgtttgtccacacatgccaaatcaatttggacttccaattatttgcacgaaaacttttttggaaacttttttgctaaaaacttataattaattattctcaccataaaattttgaaaaaccactaatcaagcgattatttttaaattttatttatttttaatttttttctaaaaaatcgccaaaaaatttctctcattttttcatgaacttattaaaaaaaaaatttcgtgtggggctgatattggggaagaatgatggcggcagggaaaccacctgctgctccgaaccgagataagcaacttaccagtggaatatgttgttgctgtcacgggcgttggagggccgagggaatgttcccaacggagtgtgctcaaattcaacaccgccaatgtgttggtgcatttccaccccttatttggacgctccgagttgtcgtcagaatcatttggtacccaaccgccaaaaatgaacatgctgaaaatttgtaaaaaaaaataagtctgtttcccacataagaaaactttggaaaatcccaaaaaaggggaaatgaagagacccgtaaaaaagcaacaaaaaataaaaacaaaattctaatttattaataaacgcgtccaaacgcaccgattttcaatcaaatttgcggtgtgcagtgaacgcggcaatggtccaaagccttgcggtagcggatttgaccaattcatcgattccaaatccaaaatccacacatcaccaagtcgttggccattcatcccaccgtagatgatcaactgctggttgcccgtgtttgttgtgaaataaacggcagtgtgcgattcacgcgttggtggcgattgacaatttgtctgtttttagtggtcaagttttaattgctttaagtgtttttttggtattttttagtcgcatagaaatgtaaatttcatttcgtacaatttcaaaccccccgacgagcctctgaattcgaacaaaaacagaaaatccaaaattttcgagttttctcatttttggccaggaaaacaatttaaacattcaaaaaatagtcaaaatggattagtatagaattaactctcttttctttgcaatttaaaacaaattaatttggttatcctttttgttcgaattaaggttcgggttggggtattgtccatatttgaacaaatgaccccaaaacatgtactggactaacttttgtgacctatcggtactgttacacaataatgtacaaaaaaaagtagcaaaaaaaatgccttgggacaatgccaggaaagaccgcttggagcagtgctcnaatcgatggcataaaagtcgttcagatattctggcacattctctctgcgatccgcgctggcattagctag

SEQ ID NO: 29528 - DNA, 1190 bp, Heterodera glycines
  unsure (1)..(1190): unsure at all n locations
gattagcatcgggttacgagatagaatatgtcctaaaaagagatagccattttctgagaatatttcacaatttccgcagctctgcggntaatggaaaaaatttgaagaggctctgcggaacagattagcatcggggttacgagatagaatattgtcctaaaacgagatagccatttttctgagaattaattcacaatttccgcagctcttacggtaatggaaaaaattttgaagaggctctccggaacggattagcatcggggttacgagatagaaaattgtcctaaaaagagatagccatttttctgagaattaattcacaatttccgcagctcttacggtaatggaaaaaattttgaagaggctctgcggaacggattagcatcggggttacgagatagaaaattgtcctaaaaagagatagccatttttctgagaattaattcacaatttccgcagctcttgcggtaatggaaaaaattttgaagaggctctgcggaacggattagcatcggggttacgagatagaaaattgtcctaaaaagagatagccatttttctgagaattaattcacaatttccgcagctcttgcggtaatggaaaaaattttgaagaggctctgcggaacggattagcatcggggttacgagatagaaaattgtcctaaaaagagatagccatttttctgagaattaattcacaatttccgcagctcttacggtaatggaaaaaattttgaagaggctctccggaacagattagcatcggggttacgagatagaaaattgtcctaaaagagagagccatttttctgagaattaattcacaatttccgcagctcttgcggtaatggaaaaaattttgaagaggctctgcggaacagattagcatcggggttacgagatagaatattgtcctaaaaagagatagccatttttctgagaattaattcacaatttccgcagctcttagggtaatggaaaaaattttgaagaggctctgcggaacggattagcatcggggttacgagatagaaaattgtcctaaaaagagagccatttttctgagaattaattcacaatttccgcagctcttacggtaatggaaaaattttgaagaggctctccggacggattagcatcggggtacgagatagaaaaatgtcctaaaagagtagccatttttctga

SEQ ID NO: 29529 - DNA, 936 bp, Heterodera glycines
cgacattttcggtgtggtactccctttctgggaaacggacgaccgaagcaagtgatcaaggtttgcttgttttgcgtatttacttccctgacagtgaatgatgagttgatcatagtttttcagtgccatttgacatgcttttatgattaagcaaaaaaaaaaaaaaaacggttaccaaatttcgagtcgaaatgtaaaaaaattaattcaacaataaaagtattgatgttcaactttttaggggtgcctgtccctcctgacattcttattcctattttgattgcttctcataatttctgcccattttcggtggccttggtttgttcatacaaggacacggccgattggacggccaaagcgaccggcacagtgaccatgaaaaaatggcaggacaaattgccaaagtgcagcggcagccagcaacatttggacgagctcaaagaggtattctttacggcgtacttttctatcaaccttatagagaacctgtacatacgaaatattttcacaaattggatcacaaaatcttgttaattgatacgaaaatgattataattgttcaattttcattgtttcaacgcctcccttaaatttagcacttctcgcgcaaattcaccaactcccagccgaaaatgattatcactaaagacttcccgttgccccctctcctggatggcggcagtgcgcgtgttcttcccccctccactggggcggcggcggacgcgcaggcgtacgtcagcacgaagagcaagcgggtcaagttccggctggagttcatcctgcacaacgtgcgcaagaggttggtttgttttgcagtccatgcattttgaaaaaggggtcattcaaaattgtcagtattttttaatatattgctcaaaaacgactgaatttcgtgtatttgagtcgtcaattaaaaatttaagaagaattggtggg

SEQ ID NO: 29530 - DNA, 982 bp, Heterodera glycines
  unsure (1)..(982): unsure at all n locations
tttcattttttatagtctaatctactcaaaacggttcagaattcaataaaaataacattcacggtgcgaaaaatggggtttgacaagtttattggggaaaaaaagactttacaaaataatacccctgggagaagggagtgggaaacatgatttcaaaattttcaattttttctagtctaatctactcaaaccggttcagaattcaataaaaataacattcacggtgcgaaaaatggggtttgaaaagtttattttgaaaaaaagactttacaaaataatacccctgggagaagggagtgggaaacatgatttcaaaattttcaattttttctagtctaatctactcaaaacggttcagaattcaataaaaataacattcacggtgcgaaaaatggggtttgaaaagtttattggggaaaaaaagactttacaaaataatacccctgggagaagggagtgggaaacatgatttcaaaattttcaattttttctagtctaatctactcaaaacggttcagaattcaataaaaataacattcacggtgcgaaaaatggggtatgaaaagtttattggggaaaaaaagactttacaaaataatacccctgggagaagggagtgggaaacatgatttcaaaattttcaattttttctagtctaatctactcaaaacggctcagaattcaataaaaataacattcacggtgcgaaaaatggggtttgaaaagtttattggggaaaaaagactttacaaaataatacccctgggagaagggagtgggaaacatgatttcaaaattttcaattttttatagtctaatctactcaaaacggttcagaattcaataaaaataacattcacggtgcgaaaaatggggtttgacaagtttattggggaaaaaaagactttacaaaatatacccctgggagaagggagtgngaaacnatgattcaaattttncattntttctagtctatctactc

SEQ ID NO: 29531 - DNA, 1317 bp, Heterodera glycines
  unsure (1)..(1317): unsure at all n locations
aaaaacttagtagttcatcataaaatttcgaaaaaatcgctgaaaatttttcttgaaatttttatactaagaattttcatacgagtttttttatgaaaaatttctaggtttgaaaatttttttaaaaaaattttcggggggaaacgacgtgggggggggaaatgaagtgcacccagggaaacaattggcttaaacgaaggcggggcaaaagcatgtcaatttgaattaaatttgaacttggcattactttagctttgctcctttttagtatcgaaaagatgagcatggaactgaacaatctttcggcactttactcggccaaatgtcttgaaaattccaaattggacgaagaaatgcagaaaatgctcagagagcgtgagcagaaaagtaccaatacaaagtgggctttttatttattttttaatattttattttgaattttgctttcagcaatttggatgccatcaacaaacgccttcagagggaattgcgtcagaaggagcaaagcatcgatgacctcagacagcaaattgcatggcttgaaaagaagctgaaaatgagcggaattgaagtctcggagcagggtaagccgcacaacaaaagcacttcgccacaatttatttaccaatatttttaaattcaaatggtgacgggctgtccgcggtcaccagccatttttattatataatttatttgtgcacgctgagcaattttgtttccgcttttcacttcattcccttttctattcgatttcagagctatgcgacttcttcaaacggttagtggcgataacacattacaactcgtcaaacactttccatgcttttgcttttattattatttaattagtaaaaaggtttctgttcactcgtcaaagcattgcgcggcatttctcatgccaaacttttttaagccaaaaatgccgttactggctaaatctgttgaggagcatttgtacataaatgagaaatgtgacgcgcatgttgatgaatttaatttgaattgtgaagtgcaaattctcccccatacagtccaccgaggagcggacgctcgcgaagccgagcagcggggatcaggaatttgctcgcaacaaccgcagcagcaaaagcaatcgcaaaggttgatgacaacaacaaatgcgaagggtttgacgaaggcggcgatggtggacgacgagcagtgcaaaacgccaacaacagcggcagaagcaacgacaaagaaacagcagagaaacagtccgttgcaggagacgacgcccgtgaaagtcagacagtcgcccgcaagcatncaacaccagcagcaacagcggaaagactg

SEQ ID NO: 29532 - DNA, 1252 bp, Heterodera glycines
aaaaaagaaacaaaacaaattcatccatttgttagctcccgttggcaaaccgaagggtacatggggcaatgggatgttggcttcccgtatcagttattaaaatttttgtttttaaaaaggatactaaaactgggataatcccattcagagacaagtcaaaaaaaataataataggcttggactactatactaattagaaattttagaatgtgtctgttaaatgcaaaactgttgtgaaaaattgttataactcctttcagagaagagatagaaaaaaaataaaaatagggttagagagcccgtgaacagctgcatcggatgcaagtgccgccgttgctgtacgcctaacagttggtgagcaatgacggaaaattgcttaaaaaagaaaccaaacaaactcatcaattgttagctcccgttggcaaaccgaagggtacattggggcaatggatgttgggctaccgtatcagttattaaaatttttgtttttcaaaaaggatactaaaactgggataaccccattcagagacaagtcaaaaaaaataataataggcttggactactatactaattagaaattttagaatgtgtctgttaaatgcaaaactgttgtgaaaaattgttataactcctttcagagaagagatagaaaaaaaataaaaatagggttagagagcccgtgaacagctgcatcggatgcaagtgccgccgttgctgtacgcctaacagttggtgagcaatgacggaaaattgcttaaaaaagaaaccaaacaaactcatcaattgttagctcccgttgacaaaccgaagggtacattggggcaatggatgttgggctaccgtatcagttattaaaatttttgtttttcaaaaaggatactaaaactgggataaccccattcagagacaagtcaaaaaaaataataatagtcttggactactatactaattaggaattttagaatgtgtctgttaaatgcaaaactgttgtgaaaaattgttatatctcctttcagagaagagatagaaaaaaaataaaaatagggttagagagcccgcgaccacctgcatcggatgcaagtgccgccgttgctgtccgcctaacacattggtgagcaatgccggagaattttttaacacccccgccccccccccccccccgcccccgtccctcgcccttttttttcattggcacagcaatcggcataagcccaagcattagcatcatccagcagggcggcacagtgaagcg

SEQ ID NO: 29533 - DNA, 999 bp, Heterodera glycines
gcttttggaattttaatgagtaaatcagtaaccgtaaatgacattctatgcttctcttgttggatacaccgggaagaaataatagttagtccttttgttgaatttttagaaattctatccgtccaatcggcttttggaattttaatgagtaaatcaggaaccgtaaatgaaattctctgcttctcttgttggatacacgggaagaaataattgttagtccttttgttgaatttttagaaattctatccgtcatatcggcttttggaattttaatgagtaaatcaggaaccgtaaatgaaattctctgcttctcttgttggatacacgggaagaaataattgttagtccttttgttgaatttttagaaattctatccgtcatatcggcttttggaattttaatgagtaaatcagtaaccgtaaatgacattctatgcttctcttgttggatacacgggaagaaataatagttagtccttttgttgaatttttagaaattctatccgtcaaatcggcttttggaattttaatgagtaaatcagtaaccgtaaatgacattctatgcttctcttgttggatacacgggaagaaataatagttagtccttttgttgaatttttagaaattctatccgtcatatcggcttttggaattttaatgagtaaatcagtaaccgtaaatgaaattctctgcttctcttgttggatacacgggaagaaataatagttagtccttttgttgaatttttagaaattctatccgtcatatcggcttttggaattttaatgagtaaatcagtaaccgtaaatgacattctatgcttctcttgttggatacacgggaagaaataatagttagtccttttgttgaatttttagaaattctatccgtcaaatcggcttttggaatttaatgagtaatcagtaaccgtaatgacattctatgcttctctttgtggatacacgggaagaaataatagttagtccttttgttgaatttt

SEQ ID NO: 29534 - DNA, 1293 bp, Heterodera glycines
  unsure (1)..(1293): unsure at all n locations
gcggcggtcctcgggatggacaccccgaagggaaaatggcggcggaagggaatggaacaaaagattgcctgccctttgccattgccggcaaacaccagcagaacatcacccacttgctcctcatacctcctttccttctcacggcacttttctcgcaaggaacagaaaaaagggcaaagcgaaggggagcggggagagaacgcaggggaaaacaaaacaaacaaacataaccaatttaaaataatttaataagaccaaaataggcttgttgtcctctcattatgtcatttgacccctgcttctagccctctccgggggcaggtaaattggacaccagaaaattggacaccaagcggaaaactggacaccgtcggaattttggacaccaaaggaaaattggacactggaaaactggacaccaaattcctcttttaaaaaataaacacaggaattagcttgaaaaataattggtgtggataaatggattaaggcatttagagtcgatcaaacattaaataggcacgattattgatcaaatgtggcaaaaagtgtacgaaattaggcgatgattggttatgccaaaaaatgtagaaaattggcgatggttgttcaatgtgccaaaaatacgcaaaaatgggaacccgatcaaaatgaaaacttttttcgttatgaatgtatgatggcgttctgctgctgatattcagatgggcctaacgttaggcaaggggtaatataaagggtatattcgtattcagcgaccccgaaaaccctaaaaacctaaattagactcattttgtttttataaattttgaaaaattttggacatttcgtgggtttttactcttttggacatttcgtggcttggacactttgtgggggtgccctaattttccattggtgtccaattttcggtgtccaatttaccgggagcccttctctcctgctgcgctcgcctctctttctctatcgctctccctcttccctccgctactcgttcccctctttctctcctcctttcccacctcatccctctcccttctctttccccttccttacgctctttctgctttcttttccctcactattctttacctctgaccaaagcggaagacacccatttgaatcagttaaatggacgtgggagaaaagcaatggaaatgcgggaaaaggacgacacgaaatcttgacacgaaatcttattatatctcctcncagagaccaaaattaagaaattgngaaaaggcaaaggcaaagaatatgcatgttggcatttgtttcggctggngaaagggc

SEQ ID NO: 29535 - DNA, 1188 bp, Heterodera glycines
  unsure (1)..(1188): unsure at all n locations
aaattcatcattatanttggtgattttttaaattgtttcttttatcgactaattttgcaattttccttttaattcaccattgtgtattcattaattgccgcgttctaaaaagtatttccttcccactaattatgctttttcccacccaaaacgacatcttcttatcaattataatgctttatcagaaataaaattgttacaaagtgtgaccaaaattcaaaagtttgaagtttggaccaacaattcccttgcccataaatggtcgataacacttttgcataggcatagagacaacccgaccgccctccctgatgttcggtcgtaaaaaattaggataggtgacgatgatcggttcataatctcctctcttcgcatagttgatcacttcctatttgaaccgttcatagcacagtccctggttattgatcacgtcatagttgaacgtcatcccacggactttaagcacgtactccggttcaacatcgggtcccgctccctttcgccgcagacacaggccatagttaatccatttgttataacaatttttttaaaatgctcaaatttacctgttttgatcctccactacagtactccacgatgtcatggtcggggtattcatccgtaaactgacccaagtgtggaccagttttgagtgggcaacgctcttccggatgcacaaggatgagactgtcggtgtcttaaatttaagaaattatcttacattttttttgttcaagtacctgtgtacagtagctcacatcggtcagtcctgaccaccttttgcattgccttaagcaggacaagccgcgcagctgaagttgtccacaaagaaattactgtaatttattaactgaaaaaattttgaagagaatttgtcaccaatgtttgagcacgcgtgctcatgcacccagtccttcttatgcaggtatgtgatgagaatgtgcttctcatccagctgatcaatcgatgaaacttcaaattaaaaacttaattaaaacaaagtgtttacataaattatttaagcacagttttgcagaatatattttaataagaaataactaaatgatcatagaagcaaaagttaaatgataaaatgagaagcaaagaattataaatatatgaaagaaagcgataataaaaattaaagtcaagtaactgatgtgatgaaaataaaagaaataattaatt

SEQ ID NO: 29536 - DNA, 1253 bp, Heterodera glycines
  unsure (1)..(1253): unsure at all n locations
agagaaaagaccgaaggtggaagagagagaaggtggagggaagagagagagagagaagagagagagatggaggagagagagaggagagagatagagagagatggagaggagagagagaggaagtgagtagagtggaacgagaggagagataaaggagagagagggagagagcgagaaagagaaaccgcgatttttcttgagaaacttcactctcgaataaaaaccatgcctaattaagcagtttctgcctgccgtttcggccgccggcttattccaaacccaaacggctggcggcaacgctttgttcaatgcgggcgcaaccgcgatgccaagcgtggcggcaaattctcttcaaatgttgcagcaacaggccgctgccgcgcaacaatattccgccgccaccggcacgccctcattcattagcagtgtcagcggtggcaaatgcggcgccgaataccagacggtttccgtttccgcgtccggtacgcagccgcaagcgagcggcaacaatgcgtccggagacccggcaaccgctagtggagccggctatccgtcgggcgcgtcggttggcattgttggcggcagtggcgccaacggcaccagcggcgttacgccgtacgcgcagttgctggccatgggtggtggcggtactggtgccatggttgacccggctacggctgcaaccgctacgcttatggcacaacagcaggcggccgctgccgcggcaattatggcacaacagcaacaacaccagcaacaacaacagaaccagcagatcaactgtatgttgttggatttgtgctggaattttgggctagaaagttttgttcggttctgatcgggcctctgtgagatggtgccaccaatcaatccttgatcgaatcagaccttttgaagatatttcatgctctgatcaattttttagcaatcattgttctgatcgggaactttaagcaattccatgatttgctcgggctttttcagaacttgatctgatcagtcctgttttaagcatttccataatttgatcacctttcccagaaatcattgatctgattatatttttgagcaatctttgatctgagcaggccgaatcgttttttattccggcatgatttgatcaagatttagctttttgctcttcgatcacaactttctgtcattctacactcgctcaaaatctatcgtatatatatatatatgtaattnttttttcttactgtagcggccgccatgtacagttatgccctgca

SEQ ID NO: 29537 - DNA, 2232 bp, Heterodera glycines
  unsure (1)..(2232): unsure at all n locations
tgcaggtcaaanttgaaaaaatttcaaaatactacgncttttaaactaccttcaaaaattctcaagtttggcttttgaaaaagctgttttgtcattttaacttctaacctatcatatacaaaatggcacaaaatatttggctaactttcaaaagtgccgagaaaaaactttttgaaatggtttgagttcgaagtataattcttccgcctcgccccttccttacttgaaatcccttttgatatcatccaaattagcgtatccattgaagcgcgatgccaaggtgaacagcaactcctcctggatggtcttcagcctttggcacttctcctccttgctcattgtcatttgttgtgctcctccgctcattccgtcggacggtgccatttcaaatgccataggttcggctcgccccgtcggttggcttctcagttcctgctccatctcttcccaaaaagtgccgcttgtgctgttacttgccgtgtcattggccacgggcagcccattctcatcgatcaatggagtgctcacccaattcgaagaagcctcacccatcattaatgggcctcttcctccgtttgctttagcgaagttatcgaaaatacttggcattttcttaaaaacaaaataggtatacctaaccatccgattatgggtccacacatgtttaaatggtgggtcaactccgtgtccatgttttaaacaaaacaatcataacaccaaacctggccatatttgtgcaaaattcaaaatgcattgatcaatgccctttttaagatgttatttcgataggctatagctcgcttcagctttagctctaattaaactgaacaattttagtatcgaaagagatttctaagaaaaagcagaagatttattcgtaaaaaaaaagttaagatatttttttcgaattccgggtttataaatttttagtttgcagtcaaaattcagatgaagaagaaagtatcaaactatgaaaataatcccataaaacaaagaacaaaaaaaagcattttaaactcgagcaaagccaagacttaaaaagaagcataatgatatgaaaaaagcgaattatgaacttttaaaaaatgactaaagaggggaattcggcaatttggaatgttaattaattaggtaattaattattcataacaatctctgagtgttttattgccattgtccaaattgcctaaacatgccaagggcgaggaaggagcacaaagggagggaaagaggtgaaattggcgcgattcattgccatcccatcgcatcgtaagtcatttgtgcctgatttcgcctgccattctctttgtcggtttaatatttgttcccattgcgcgcgcatcgcttctcccaacgcattttccgtcatcggtcgaaatcgaacgatttctttttggtcttccgccattttcgtggccttccgaactttgccttctattacgggtcgtcctcaacggaagttccatctgatgggattccctcgcccatttctcaccctttgaagacatttgagcggagggcacttttggaaatgatttttggattaatgaacaaagacggaaagtcagcggagggacattgccgcagtgcaatttggggttgggatttgcggagtgccggtttctgaagggaaagggggcgagggaatggagggattgtggcacaagcggaccgactcctcctggatgagaacatcatctgacatccctccacggtgcatctgaaccgaacagtcggtggcactgggacagattcgcgcacccccttcccaaccccgttttaattgatcctctccctccttaattgccccttaattatcaaattaccccccccccccgcccacttgtgcatctctcgcaaatgcaccgcactgttgtgtatcttcagtgcgcccttgtcgcagaaactctttccgcactttgcgcatttcacccgcttcttctccgccttcgtccgcgcctcccttcgcttctgcgtctctctccgttccttctcctctttcttctctctcttagcaaatgcttttttgtcttttgttttcctaaatttacttaatatttacctttttggaagaaaaaccttcgcccataagaaattcaacagtaaaattttgtgacggcattttaggtgaaaaacgcacaaaaaaatgaggagggaatgttgtaatgagacatggaaatggcagggagacatggcactgacagacgacggacggcgggggggggggggggg

SEQ ID NO: 29538 - DNA, 1600 bp, Heterodera glycines
atcctcattcaccctctcctttccgaaaaattctttgcttttcgaagagtgattattatagcaattaccaaaattatatacaaatagaaatataattgagaaaattcggatgccattctgagtgattttgagttaattgtatatgaatttttaggtaatttattagccactataatttaataataataataattttatcaaacattcatgctaatctgcatttcattgtcagtttaactttgattttttttttaaattagcattaggcttgcttgggcctaggcctatgctttattttaaaagttatagttcaaccagatgatcaatttgatatctgttgagcatttcattcttacactgtattaatacaatactcttattgctaaattaatatttgtattttttctacatcatgtattttagcaaataattggaaaaaactgtttttcttgtaaattttcatcttttaagtgttagttcatataattaattacccccgagaaatgaaaatttccgattaataaaaaaaatttaattgaagatgaaaagcacaacaggattaaaagaacaattttatctgctgaatatttcttcttcaaagagttgccaaattgaacttaaaattgggcccaaaatttgcctcaatttggtcatcagtttcacgcaaagaaacgaatggatgaaaagaatcatcagcaaaagatggatcgtcgaaaaaaccagcagcggtatctttgaaaagtaatgaattttatcaacgatttaaacataaaaatcaattaaaatataggcaatttaaaattttgtttaattattttttatttgccaacccaaacgaaatccatttttggtgaaaaagagctgtcgagtgcttaaatgaacaccaattcctacggtatcaccaacaccgtaggaatatttggcaattgttcctttttcttttccgttggtccaaattttgccatcactttcatatgagtaaatgcccttttcattttgaattaatccatccaattttatctgctgtttgacggcgaatccaaagctgatgatatacaaactgcaaataaaaaattaataataaaggaatataattaataataattcaaattttataatctgattaattggaaaaatataaaaaataataattacttattcttatttttgactgaaatttcgtagtaaaaaatgttagatgaatccttgttgagcaaaatcgaatatttagcgaagacagaacaccaacctttttagaagaaatagaatttatttatataattttaaaaaataccataagaatttcttttataattgacaatcagacttttgttgtcaattatttcgagaaacctatgacaaacatttgcatcccaataatttggtagtggaaaattgagaattatcttaacatttatttcaattaaacaaattttaaaataattttgttctcttttttcacctgaacttttgcggggtcgaatttgaattgcggtccaaaatttgtctcaatcaaatcgccaaaatcactcaaagaaatgaacggaaacaatggaaaaatcaaatgagggcgaaagaataaatcggaagtatcttaaaa

SEQ ID NO: 29539 - DNA, 1725 bp, Heterodera glycines
  unsure (1)..(1725): unsure at all n locations
ggatattcaaatcggaaanatatttgacgaaaaatggcacaatatgcaaaaaaaaatctgaaaatatgttcaaaaaatggcaaaatatgcatgaaatatgcagaaaaacccaaaatatgcaataaaagttccgaacttttatatgcaaataccaaaaagaagatgtttttcctactaattagacaacgtagaatccaggaaaaaatatgcatttgcatatttttgacgccctggtttttacaccacaaatttttttttcatttttctaaaatatttgctaaatatttcggacttttcaatattttaccaatatttagttgactttttcgtaaataactgaaaagaaactttgttaaaaattatcaaattaaatttggaaggcaaaattaacctttgtttattaaatgatttgaatttccaattgtttgttcatcactttgctgcaattcttcttcattttgctgttcatttttaattggattttcacaaatttcttttttcatttcttcgcttttttctccctcaatttttataaatattttcccaaattttccctcataattttcattttccgattggttatttccgatctgttcattattcttcacccttttctgctgctgatcaccatctctttcttgctcctctttgatttttatttgttcaaatccgcccgatttttgttgatttgtttttaaatttccccaaagttgatcaaaaagggcatcattttcagtgtcctcaatagccattaatgatggaaaatgaaagcaacaaagaaaacttatgagaaaagaattgaaatgtttcatttattttgctttanaatgttagtactgtttttatttatgaaatgaaaaggataacatttatttattttgcaaatatttatatgaccagaatcaatgaaaatattttcattgttttgtcatctgttttataaaacgtggcaataagtaagtaagttagtggaccataaatgacagaggaaatttgtgaaaaaattgtgattttgcaaatttttaattgcttagccaaaagccatacatggatttcttgccggggattggatagagcgtgttgcgactttttcgccgctcagcaaaatcgacacttacgccgtaaaatttgcgcgcgacatttgcgcctggacacgcgccgccaagcaaaaatggacatttgcgtcgctcaccagtcaaaaaatattttaaataaaagatttcaccaaaaattgtcaaggggatcgaccacctaaactattatttcagcggctttgtttcgctgagaaatgcacgaaaaaataggtttttagctcccggaaattatcattttaatcggttacnnctcagttgggcgcgccacggttggacgccggcacatgtttttccactatatctcttttctttgacatccaattccaacaaacttggtttcattcaaaaactcttcacatactctactatcctgcattcaagacatttggctaattgtgaactcctcctatgtttcactaggtcggattctttgtctctatgaattcttgctgtgcccaactgctgcttccaacctatactatgtctttgtgatgtctctggacttctagacgatgcattcctcgttcacatggatatgattcccatgggcttcaatcaatcaaacaatcagttaattgacttattgataacaatttactagcttcacgctgcaccttctcaatcagatcaa

SEQ ID NO: 29540 - DNA, 869 bp, Heterodera glycines
cggtacattcctgacgccccgcccctcgcgcaccccaagacttgcgcagcaaaactcgcgcaacccttgtccgattgacttcaaatttcacaggtcgtcaatccagcagcctctaagctgaacgacgaaagaatttcatctctgacaccatttcgagcagtacattcccgacgccccgccccctcgcgcacccccgagacttgcgcagcaaaactcgcgcaccccttgtccgattgacttcaaatttcacaggtcgtcaatccagcagcctctaagctgaacgacgaaagaatttcatctctgacaccatttcgagcagtacattcccgacgccccgccccctcgcgcacccccgagacttgcgcagcaaaactcgcgcaccccttgtccgattgacttcaaatttcacaggtcgtcaatccagcagcctctaagctgaacgacgaaagaatttcagctctagcaccatttcaagcagtactttcctgacgccccgcccctcgcgcaccccaagacttgcgcagcaaaactcgcgcaacccttgtccgattgactttaaatttctcaggtcgtcaatccagcagcctctaagctgaacgacgaaagaatttcatctctgacaccatttcgagcagtacattcccgacgccccgccccctcgcgcacccccgagacttgcgcagcaaaactcgcgcaacccttgtccgattgacttcaaatttcacaggtcgtcaatccagcagcctctaagctgaacgacgaaagaatttcagctctagcaccatttcaagcagtactttcccgacgccccgccccctcgcgcacccccgagacttgcgaagcaaaagtcacgcaccccttgcccgatt

SEQ ID NO: 29541 - DNA, 1129 bp, Heterodera glycines
atagtattattatgatttaatataagtaatattaataatagcatatcaattaaaagatcttggcatgtatattcatcatatttgcgcagtgcttcataagtataattgattatataaataaacctggctacatataatctatgaattcatttaaaccctaaaaataaaaatagtaacgaactaaaacaattatttatttaatgaaaaaattaaaatttttgaaaataaaaagcactggaaataatatagaaaatgtattgatgtaaatatatttgctaaacaaaattgtattgggtttagaaaatttatattaataaacaaataccaaaattaaaaaattgaatttacaaagccaagactaaaaatgtaaagtcaatacactgaaattcgttaatgatgagtgttaagaaaatgggaattgatttttttacgaattttttaaaactgttcaaattttaatttttcttttgtatataaaaatataccattaaacaacaccatcagcaaattttttttaaacaaatattttattttaaatcatttaaaaatgaatttaatcgctgaaaatgtaataataatttgagtttaaaaaaatataaaataattatttttaaaagaattaaatataattcggtaaaagatcaagaaaattgaattattatcaacgagaaatgttttaaaaatgtatgtaaattttatttaaaaatttaagaatttaacagttataataatgtttaattttttcaaccataattaaaattaataaaaataaaattttaatttaaaaggttaaaatatttggacaaattatgtaatataaaagaaaaaaaagattaaatataatattgactaagtttataattcaataattaaaagtgcaaacgataaaaaattaatttttcagataaactattatatatttaattaataaaaaagcaagaaattttctttttaattaaatatcccattaattaaaaataaaattaattttatgccgaatctcaaagtcccattgaaagaatgaaacttcaaataaaatattaaataaaacccaaaaaacaataatccaaaaacatattatttctataatcacaatataaaaaatgaataattttatttattaattttt

SEQ ID NO: 29542 - DNA, 944 bp, Heterodera glycines
  unsure (1)..(944): unsure at all n locations
tagtctcagtgtcaataaaatatttaatttaatatacacaattcaattcggtctcgaaaaataataaatttaattcgacaattattttaaaaataaactaaaaaagaatactacaaaagcattccatctccgaacaaaaaaaaaaaaatttacttcaaaccaaaattttaatttcaaatcttgacccattaaattgattggcaagtaagtttactagagaatttttcatttttacaaaaaacaaatctactaacttttttctgaaagttcacccaatattaagtaataacttcttcattcgtttcttcataaatttcatgaattttttcgcttaatgatacgaaagctagcatttattttgagcagaatactggaagaaaaaacagtgaaaaaagttgaaccatgaaattacattattgttatttgaaaattgtaaaattatttattaatattcaattaaaaaacattgttttagaataattaaataaaaattttattcacaatgagactatttttggttcgccaacactgagattatttttcggtacgcctttactgagaacatttttcggttcgccttcgacctagcatataaaagcatattttgggggtcttcaagaataaatgcaaattttgccatttttgggcttttagaccatattttgggcattttttggaaattttcacaagaaaaatgcgaaaaaagcgaaaaatacacccttaaggatcgattttttggggatttttaaaaaaatacatccttaaaatcgataaactttagcttttgtataacttttggaaatttttttttatttatttaagaagtgtaattttgttttttcagcatatagtaaaaatttaaaaatttggaaattcaaaatttttgcaattgtctaaaaaaattgttagcctttgttttggtgttttcaantgtctattcttaa

SEQ ID NO: 29543 - DNA, 1199 bp, Heterodera glycines
cgccctcaaaggcttcgctcaatttcgcaatattagccacaattaccaccagcacagtaacattatcaccacatccctttcgcacagccgccgcactcatttcgtcggcaatttttgtccacagtccaacagaatccttctcctcgttgaactccgcagttttagcaagcattttgtactgtccgatcacaaaatcaatcgctgcgtcgggcgaaaaagccttccaaaggccatcacaagccaaaatgatgaaacttaatgcgaataaagaaaactattaatacaaataaacaccggaagagttacagatcgtctggggttaacgataacttcttgatgtccggggtgcaaattacgccatgtgccttcatttgaccgtcaccaatcgaacgagacacctctaaaatgccaaaaactcggccatccctaagggaataatcaaaaatttgatgaacattccttggatgagactgacttgactgttccgccggacttttgaatacgcattcgttcgtcaaaaacaagagggttgtggtccacagtgatttgcagcggaatatttgtgctcttttcagatttgtgtcgacaaacaatagcctaaacaatggtattatacaaataattgttttaaaataatcatgccaattaaaaaaaatataaaaagatacccaatttcaattttataaaaaggcttttggtttgcaagtttttctcttagtttgtggtgtattcccaaaggcttcgtaatcgctgatcacgaatttgacatccttttagaacaattccgaatagctacacggattaagtttccttttagtcgaaaatgcatgcgatttatgatcagtaatttttaaaatacatcatttttattagcgctaaaaacattaaccttcgagtcgccaatattagcacagtaaagcgttttatccaataaaaaaatggttgtcgccgttgtaccatctttcagcgttggtttcctaattaaattttagaaagcgtgaaatacattatttcttactgtcgtcttgcttcaacaaggaaaccatcatcgataccccttataagtatcgacaaatactttacgaatggatttctcgaatactgacatagcactctttgggggcacatctgtatatataaaaaataatgtttcatagaaattttcccacatttcttgaaaacagcaacgaacaatcgag

SEQ ID NO: 29544 - DNA, 594 bp, Heterodera glycines
ccccccccccccccccccaacggacccgaacaaaagacaaccgccgaacaacagccaagtgagcagaccggcggagtatttgactttggtcagcacctgttggcgacagttggagcaaaagacctaaaagtgccaaaaagggggttaaaacgaatcttttaatggcaaattatcagacattttgcggccgaggcccccagtggggctgtcccccgtccgccatgtacacgtaagtggtggtggtgttgccggccggcgcggcgcccggcgacggttgtggcggggcatgctgggggttgttcatgtttggctgataggcggcagctgtcaaacagagtcgggcataagcataaattgccattgagaggattgatccaattccttgccttgatcagttggaacatttgggttgggataggccgggtatttctgagcgtcgtctaaaacatatttttttagtttttaaaggcgaagaaatcgccaaccgtagggagggggtgcgtttggctgctgactcattttttgctgatgagaataatgaaagcttttctttgttgttgcaaattaagaatggactaaacagaaacatcaaat

SEQ ID NO: 29545 - DNA, 1578 bp, Heterodera glycines
  unsure (1)..(1578): unsure at all n locations
aaatgcaataaaaagaaaaatacaccctaagaacgacccaaaattttttcaaaaaaacatccntaagaatcgaccagaaaattttcaaaaatgcgcccctaagaaatgaaaaatttctcaaaaatttatctccaaaatttatttattttattttcttgacgataatttttgattttgaaaattatgtatatccttaatgacttggcaaaatatttttgctttttgatgaaaattttcgattttacacccctaaattcggaactttttggcacctattttcccatttttagcacctattttgggggttttttagaacctaaaacctacttattttggcagtttttagcacctaaaaatcgaagccctagtaattaattaatttaaacgaactgactcattggatggatctctgatgattcgtgcataaaattaatttggaaactattggcagcattgttcacagtgaaaaaaaaagtgatctgttcatcgtagttaaaaagacttgacaatgcaaatgaaaattggcctttttggctgacctgaaaatttaaatgaaaaattatttaaattttcattttgttcatttcgaataaacaattaattaatcacccagcaccctaattaattgcttcaaggcatatttaaaagcaaaaaatctaaggcaaatgccttcggatcaagattcaggactgtaaaaatgtcgggatcaagaattgggctcgcaatgtcaaatttttcgggtcggggcgacaaaaaaagtcgggattagcacagtcaaaatttttggtgtcggactcagtgatcgggacgagaaaatgaccgggatcgggatttgggtcggaaatccaaaatttcggggtctaacgtcgggcgggatttgtgacgtcccagaccatcagcaatttcaaaaattacttttggcacatttatttcaggctcggccaacaatgaaacatttccttgcacctggaaaacattgaaaaaaattttcatcaatttttttttcaaaaaaaattttacccgcataaaatttattgtccaaattggcattttgtttggaaaattttcgaagctttgcccgttcagcttcacttggtattccgtttcaaaaacggcaatatggatttcatatggttggtttgctttgaacgcataagctttgtagtccgaatcttgacgttttccatactaaaaaaaatcgtttatgagatttacttggataatggatttatttttatttatttatttatttttttgaaaatataggtggtttttgtccaaaatacatgaggatttttggttgtttttttatacgaattgtttgaaataaacttacgtaaaaaacttcaaagttgaccccggttttcggattgattttcatttgtaaaattgtcgccccaactgaaaaaataaaatttaattattaaatttggacaagctcccgaaatcaatcgaaattctttagatttaaacaaaaaaaaatatttttgaataatcttacatttatttaaatttagatcacttaaaacaaaatttttattagttcaaggataataaaatttcaacttaaagctaaag

SEQ ID NO: 29546 - DNA, 968 bp, Heterodera glycines
taaaaaaatgtattattaataaaaccaaacatttaaatttattaaaagtaatgaaaattaacccaaaaaatacaaagaaaaataatgtacaccgcccggcttcgaacttcgcccccccccaaaaaatgatgcctcagaatccccaatcacacagggattctgaggtctaaacgatgtcaaaagtaaaatctgatcacgtattcgtgatcagcggcccaaataacccctaaagacatgtttttggaagatttttgtttttttgaatttttaaaaaattattagaggtttttagtccacatcgaggctcaagacgggcgcttcgcgcccgtttttttaatttgttgaactcatacgggcgcttagcgcccgttttttagcttgttaggcgcttcgcgcccgtttttcaatttttgttggccttggacgggcgcttcgcgcccgtttttcaaattttgttggccttggacgggcgcttcgcgcccgtttttcaaattttgttctggttgtacgggcgcttcgcgcccgttttttaaatttggtgatttgttagaaaaggtattggaagaggtacaacagtgattagaagaggtacaacagcgattgaagagtgattagaagaggttcaacagtgattagaagtggtacaacagtgattagaagaggtacaacagcgattagaagaggtacaaccactgtcgaaaaggtacaataattgttggagaggtacaaaaattgttggaatggtacaataatggttaaaaagggtacaatcatggttttaaaattaaataattaaggaaatcgtttattaaaaagtaagattaaaaattgaatgtaattaataaatttttaaaaataaaataaatttccttttattaattaaaaaaagtgtttgaaaagtacaaggattgaatatttatttaatggagaaattaatataacaaattctaatttaaaaatacaggagt

SEQ ID NO: 29547 - DNA, 1201 bp, Heterodera glycines
  unsure (1)..(1201): unsure at all n locations
gaaatgaatcagtgtgcagaaagactcagtganntaaggtcaataatctcaactttactatnttcgcttaactaatttgtgaaattgttcacaatttcagctcctcattctaaaaatataaatggtatcagggttggggaaggaccgaatttataaaaagctcaacaaattcacatctacaatttctgttaatttctacaattatttttagaggagaagaaggtaaattttcgaactttcacaagggtgatcgggaaaattgaaaccggaaattgttgacgctaatcaactcggtccttctgcaccactgataatgtttaatatttagactgtaatgagatgagttttaataaatccaagagaatttcggagtttcgactccttaggctacaaaaatgaaatgaatcagtgttgcagaagaactcagttgataaggtcaataatctcaactttactattttcgcttaactaatttgtgaaattgttcacaatttcagctcctcattctaaaaatataaatggtatcagggttggggaaggaccgaatttataaaaagctcaacaaattcacatctacaatttctgttaatttctacaattatttttagaggagaagaaggtaaattttcgaactttcacaagggtgatcgggaaaattgaaaccggaaattgttgacgctaatcaactcggtccttctgcaccactgataatgtttaatatttagactgtaatgagatgatttttaataaatccaagagaatttcggagtttcgactccttaggctacaaaaatgaaatgaatcagtgttgcagaagaactcagttgataaggtcaataatctcaactttactattttcgcttaactaatttgtgaaattgttcacaatttcagctcctcattctaaaaatataaatggtatcagggttggggaaggaccgaatttataaaaagctcaacaaattcacatctacaatttctgttaatttctacaattatttttagaggagaagaaggtaaattttcgaactttcacaagggtgatcgggaaaattgaaaccggaaattgttgacgctaatcaactcggtccttctgcaccactgataatgtttaatatttagactgtaatgagatgagttttaatnatccaagagnaatttcggagtttcgactccttaggctacaaaatgaaatggatca

SEQ ID NO: 29548 - DNA, 1111 bp, Heterodera glycines
caatagggttcgagccccgcccccgcccccgcccccgggggcgggacaggttttttgggctcacccccgcccccgcccccgtgactctgacccccgcaacccccgcccccgcgaccttcacccccgcgggggcacgggggtgaaaatacacccctaagaatggcatattcgtgggaaataagacaaaaaatttagacaattttgaattttttttaactatcgagaaatttttatgaaataaaataaattttacttgttttttattttatttgtggattggtggatagtgcttcaatactaacagtacttttgtcatgagttcgattccggctaacgttttcctttaatttatttattttttctgattaatacagggtttctttatgttcttgtttctaagaaatgttctgatttgggggtaatgccttattttcatctaaaagaagaaaatttctgaaaaatttggctaagttctaacaaaattcatataaattcttaaaattttccccggtggcgcctatcggcaccgccggcccccaaaattcctatattttttcttaaaaattatcccaagctcgcgaattttgctcattttttgtacaaaatttgttaacaaattgcattcaaattttcaaaaaattttcccggcggcgcctatcggcaccgccggaactctcccctcgcacattcatcaagtatttttttgaaaaatgtgcctgcaagaaaaaaaatttaaaaaatctgagttccaattttgagtaaatcacgataatttaatatagttaaaaaacgaaaatttattgaaaaagtcttaatttttttggtgaatatctgttagaaataaatttaaaattcgcccctatcggcacgccccccccccaaaaaaaaatttttttttcttaaaaaaaattacccaaaaatccctaaattttggttactttttagtcgaaatctgtgcaatttatgtcaaaagaaatagtatcgaggcgatcaacaaataaaggaatgtggagccaaagaaatcattcttaaaaaatattttttttgtgagatttttggacctaattcaaagcaaacccccgcccccgtccccgtgggggcggaattatcg

SEQ ID NO: 29549 - DNA, 1596 bp, Heterodera glycines
aactcgctggggggttaagcggagcgggttggcgccgcttgtgcatttgtgtagtttttaaagctgcatccgatggcgttttcagattttgaaaattttcaaaatttttcgagctaggccccctcgaaaatttttcgtttttgaattttattattttttgccgatttttcccaggaaaacggagaccactttcaagcaaccgtttttcgagctctatcgattggtggcatttttgaaaaaatttcaaaattttccggaaatagaaaaattttttggcctgaccgggacatttcagtcccgggcctataactcgtcaggtgttgattttaacgaaaaatcgtccaagagcttttttgtagagaatttcgagctctatctaatgtgctttatccggtatttttatctttaatataaaaaaagatataaaataaaaatgaatttttaaatgcaaaaccaaaggggggaccccatggatttgcatttcatgagaaatttttttgctcctaaaattgccaaaaaatacttttctggggtagtttgaggtgctgaacacgaatatgcactttatattgcgttttggattttttggagggaggtaaaaaaattttgaaaaatcgtcaattttttggatttgggaatttaagtgattctttgaaaattcataactcgcctcaaaatggtccaattcagctcatttaaagcataaaaaatagcaaaaaatcgggagaattttatgagatttatttgaaatttataccgcaaaaacaaaaaaagttattccagaaattctggaaattttctatttttcagaaaaaaatttatatctcggttctgaaaagtcattagagaagagtaaaatactacaaaaatccgcaattttttgctctattatataaattttatttgacctttttatcatcttttaaaataaagatacaaaaataaaagtgattttggcattcgggaccaaagggggtggacatgatttttgagtgaaaaaattttttcaaaaaaatcttccaaaaacatgtctttatgggttatttgggccgctgatcacgaatacgtaatcagattttacttttgacatcgttaagacctcagaatccctgtgtgattggggattctgaggcatcattttgagggggcggggggcaagttcgaatccgggcggtaacacattatttttataagtatttttttttgcttatttttagatgtttttaatttatttaaaatagttttgatttattatttaatagtaaataaatttttaatttacatttttttatcaataattgttttaaattttaaaattcacattgtacctcttctaataaatagggatgcgatttttaggtaagaaaaatcccagaataggtacttaaataggtaaaaaaaaaatctcaaaataggtattaaataggtacaaaaattccaaaataggtaaataaaattttttattaacgatttttagtggaaaaaagcaaacaaaaggggaaaattttggttctatttcaattataaacgaataatttaaatatttttaatatgttcttagaaaacatagacattttaaattaaaaattttgttac

SEQ ID NO: 29550 - DNA, 1442 bp, Heterodera glycines
tgatcggaatggttggcttggccgggaatttgctggtcctcctcgtctacagccatctccaacaacgcttccactccatcagtgtttatctgatggcgttggctgtttcggattttctgatgatttgcactgcgatgtttttgtttgtgttggaggcgtggaggcatcacgggccaatgggtaagccaagggaaaggcggcgaccattggcatttttttcgtatttttcgttgctttttaggtttggcctatgcttacggaatcggcgcccccttcttcttcccgttggcctccattttccaaaccacttctgtttatttctgcgtcggtgctgccattgatgtcttcgtcagtgtcgcactgaaagggccaatcagcgagtcgtactgtacagtgaggtacggtagtacctactgtccgcccttttgtgcggattccgttgaaatttctaaatttaattctctccgaccctaagaattgcgcaaaagttcgttgtggtcacaacttgtctggctgtcctttacaacattccgcacttcttcgaacttcgctcaatcgactgcttcgagacaagggacggactgaacataaacagtctccaaatttgtccaacggaatttcggtaaaagagctgaaaatggacgctaaaatgtgaaaatgaccaattcatccatttaaagcatgagtcacgtgtattactccatttactacacgtacatgtacacggtaagcgatgccatcgcaaaaatgggcttctttgcttgaccatgccacccatttatgcaggtgttcatggccgttggtccgctcgttttgctaattgtgctcaacatttgcattgtggtcaatgtgctcagacgtccgcgcgacccaggtcaaaacagaacaatggcacttaaacatgcaaatggcactgccattaatttgatgcgatggaacatggacgaaggaagacattccgttcagattcggacatcgtttcgctgatcctcgtcgtttgtatgttcattttctgcaattttaccgcacttctcgtcaattttttggagctaacttttgctgaacagcttaaacatgtgcgttctcttatccatctttctgtacattttccgctttttccaggtgatcgtttatttggttgatctgagtaaccttctcgtggtgataaattgctccgccaatttctttgtctatctgatctttggccacagtttccagctgtacccatcacgggaaattttctttggaaaaatcgccgtccggcgcattggaggggaaatggccaacggcggagcacgtgccaatttgttggtaatggtggaaagtgaagaaaagagcaatggcagaagcaacaacaacgccacgtcaaagatcggctcggcgaaatgcttcaaagggacggagaagtcgtcaatttacaaatcattggacagactctagag

SEQ ID NO: 29551 - DNA, 903 bp, Heterodera glycines
tttaatttgtgcgtttttcagaggcgatcatttttatttttaaatgtttttacgaaattttgtaaaaagaattttccattaattttcattttaaacgactccgatttaaacgcctccggcataattttggtgtccatgaatttcgtcagctttaatcccttgctcttcctcctccttttgggtggcataagcgcggtaaatgacggaataaatccaaccgctgaacagcaaataaaccaacatcaaagcaagccaagccgacgcaattgcgcgagcctctgaaaatttttttttggaaacatttaaatttcatatatttttttgtttggtaaaaaaactctcagaaaatccgcaaattttcctgctcctggccttataatttattttgaaggaaaacgccggcgcgcgacagaatgccaaaaaaccggttagaaaagaaacaccaactatgcaagaaccagccaaccgggattttttgagattatttaaaaacggcgggatttccgttatctttgtttaaaataatcgaataccttagaactcctaatagctaagggatatttttgagaaaattttcagaattttccgctaagaattttttaattagagcgaaagttccgactaattaccgaaatgccgattcccggctctaatatgaaatatttcggctggaggagagcagcccttaacttttttttgtcaaaaaaaccaatttttaattgatattttttcgctaaataataaaaataatacataatttttacctgaatcgttcgttgctttgcccgggtgtgcttttcgccaattgtcgtcaagcagtgattgtgggtccgtaatcagaaagtacaaataggttaagcagccaaaaactgcaagagccaacgaaattccctaaataagtaa

SEQ ID NO: 29552 - DNA, 1085 bp, Heterodera glycines
  unsure (1)..(1085): unsure at all n locations
gggtttcagccaaatcgcattactatctacggctgagccctacaaatggtcggtttgaatttcnnatgtagggtaagaataggtattctcagaaaatggctatcccttttttctacatcatttgacatttgggtttcagccaaatcgcattactatctacggttgagctctacaaatggtcggtttgaaatttgcattgtaggtaagaataggtattctcagaaaatggctatcccttttttctacatcatttgacatttgggtttcagccaaatcgcattactatctacggctgagccctacaaatggtcggtttgaaattttcattgtaggtaagaataggtattctcagaaaatggctatcccttttttctacatcatttgacatttgggtttcagccaaatcgcattactatctacggctgagccctacaaatggtcggtttgaaattttcattgtaggtaagaataggtattctcagaaaatggctatcccttttttctacatcatttgacatttgggtttcagccaaatcgcattactatctacggctgagccctacaaatggtcggtttgaaattttcattgtaggtaagaataggtattctcagaaaatggctatcccttttttctacatcatttgacatttgggtttcagccaaatcgcattactatctacggttgagccctacaaatggtcggtttgaaatttgcattgtaggtaagaataggtattctcagaaaatggttatcccttttttctacatcattagacatgtgggtttcagccaaatcgcattactatctacggttgagacctacaaatggtcggtttgaaatttgcattgtaggtaagaataggtattctcagaaaatggctatcccttttttctacatcatttgacatttgggtttcagccaaatcgcattactatctacggttgagctctacaaatggtcggtttgaaatttgcattgtaggtaagaataggtattctcagaaaatggctatcccttttttctacatcattagacatctgagtttcagccaaatcgcattactatctacggctgagccctacaa

SEQ ID NO: 29553 - DNA, 1296 bp, Heterodera glycines
cccgttgaatcgaaaacccgattatcaatagttaaagtgctcagttagctagttgagtgcttccctttgttaattagtcacctaatcactctctaattactctttcaaatgctttttctctctcagttcgcttctgtgggctttgcgcgacttaaccgaaagtttggacaacgaattgctcttttcggcctctcttagcgacgtccgcgggcttaaggaacgaattgaaaaattggaaggaatcgtcgaaaaaacgcagcaaaaatttgcggacgaagcgaaatgaatggaaggaaaagcgaaggataggaaatagtcagaaaaagaaagaaactaagaaagataatgagaaaacggactgatcggtcgaccgcttggaaaaccatcgatcgatcactgcccaatcattggccattgatcagttccgaatcccactccgatcactgtccatccttggccaactgatcagttccgaattccgctccgatcacttcccccccccccctttccgcaacgaataaacccaaaagcactttcccaaaaggttgtccatcagcccaaaacccaaaaaaatctcataatttatgaaaaaccaccaaaaattcactcacttatgcttagtcttttcggtcgctttttctcttccgctctctcctctttcctcactctcttcccaattcatttgcctatttttacgcaattcgtccgtctcctttccatgtaaataaatgacgtcatttgaatgtttttgtattatttgtacctattaatgtaaattcgacaaaacctccgccaaaaaataaaaacctcaaaaacatgtaaattgtccttttgtatgaataaatttgtaaatgataacaaaaataaaattctttttttgtacatttacaataattacattagtaaaattccaatttaatttttggcttttgaggagaaatcattcgaattattaagcaaataggaaattggaaggaaaggaatggtccgccggcaaaagttaaaatggacggaaactttggcatttataggggggggggaaggtcaaaactttttgaattcgagagttacacggtcagtgccatcttcgcatcggaacacttgcttgccaagttcgtctcggaagtcggcgtgcggaagttcgaacaaacggacgtagcccaacttcgaaaagagctgaaaaggaattatgactattgttctttattctctgtccattcccttgaatcgatcggtcgatgattcaaccgattgacccatccatcggatctgtcggttgatctttcagcgaccgat

SEQ ID NO: 29554 - DNA, 1553 bp, Heterodera glycines
  unsure (1)..(1553): unsure at all n locations
cgcaaagcgatggttgatcaataccttaaaaagaaataaaacaaggagagagttgtggaaaaactagaaganaatggtgtcgacctaagcntaagggcgttagatagacacctttcaannaataagaagtagaatcggaaggaattcaagaggacatggaaaaagcagaagtgtcacaatgtttttcaaaatttgacaataagtttctcttcataattggtcacggtgatgaatatcgaaagtttaagcagactaatgaaagaaacggcgcaatttatatttattgcctgaaatgtgaaagttataggaagcaaaattctgatgggttgttagctttacatattttaatgattataaattatattaagtatcatcgcaagtgcaataataagagaaggtcaattagaccgaactcacaaaataattcataaccagcattgtaacggtgttccgcttgaacagcttactgctgaacaaattgatagaagccaaagaagagatttagcgcaatgttctacggatcctaaatctatatggcgagaagtattgtaaaattttaataaatcccaaatagaacattttagggatcagaccggtccagagaacatgatattgctgaggatattgggattgaagatacgactggaatatcatttaattacccgaattggcagacagtacggagtgcatataaccgtagaagaaaaaataatttaggggattcgttagacccctttaatgttcccgaaaggtttcaattgagtaaacgtggagcaatcaagttacttcttagaaaaaatatttctgaagaagacatgtaagtatgaatttcatggaatattaggtaagttgaaatattctaaggtggatgcgattcagagatagagaattaggcgtgatggtttttatatcggatacacaaaaaagagctgctagccattgcaaagttttagtatcagacggaacttttgaattggcacctttacagttccagcaaatttggacaattcatggattggtcagacttagattagatttatgtttaatagagaagtatttaagcttgagacagcaaatggtgctgaatggactccattacttctctctataatgaaaagacggtagtatatatttatttattcttttaataaatgaaattacagaactcaagcttcatatgaagcagtcctttcgcagttaaatgaaatatggggtgaagaaatttttgaaggaattgatagaattcatacagattaaaaacagctgaaatcaatgctttgacaaagcaatttggtattaaaaagtttatggatgtattgtccactatattagagcgactgtgcatcacataaaaacgaatttatcaaatttattcagagaattcaacgaaaaaaagaaatttggaaatgggtatattaaaaaacaataacttgatttaccctattttgttagattcgacgaatatttgcattaccttttcttcgtaaagacgaaattacaaaaatgtggtcaaatcttgtaaaattcaaaaacgattttgagggagtgattaa

SEQ ID NO: 29555 - DNA, 1566 bp, Heterodera glycines
  unsure (1)..(1566): unsure at all n locations
gcaaattccccatccaccgcgaaatgtgacttcaatttggatcaaattgtggttgctttttctcagtctctgggtgtttcttcagggcattcatgttcgacaaattcaacgggaatacgccgtaccgcaatttgcccatccgccgccaaacttgccgtatcatccaccagaaaacgttccggtagttgggtcttgtttttcgtgcgtttctcatattttcggatgcttattcaggcaatccaaccacagcaacgaccgcgccagctgagagacgtgccactattcgaccacccgctgccaaacggacaggtaatttcagaccctgtcttctacctaacaccgaaacatcttttctaagcaaatgcatcccaaccctccgagagtgctggaagtgatccgacggctgggcgagtggagaggaagaccaagggacccaagacgtccgcctcaatgaatgaatggaatttggattttgataaaatttgttgttttaattttttgaattgataagggttaaatcccgttacctaaattgtttgaaaagtattaaaattttaagaaattagatgctaaacctaacctttgacaaagattatgaaaaaatgaaaagaaatgacgaaatttttggaatgttccttctttttattatctatggatttttttttcatgtgcattattttggtgctagtaagatattgccgaatgaataattggtttttctcttcattttaaaacatttcacgtccccatgccctgcccacttcccgcggaattgatcaaggaaataattgacgctctcccccctccaaaaacacatcggcttttgcgcgtaaattttgttttggcatactttgttaaatgtcggttttattccatgatgagaagattgtttcgcccagagcatatttcaataccaatggcccgaagaaccggaatttatttctttttcgatgttcgtactccccctatttattttccactctaccaataataacatttaaataaaattataattttttatttcttatttgattaatttcgatcaatattttttgataattaaacaaattgtatttttcaaaaaagacctttctcgcagtagcaactcatcggcttttttttactcccttcataaaatgtctcgcttttgccccctcgcccaaatcaaggaatcgggtcggcataacaccccaaaggggaaattgagtgagttccaaacctaccaaattaaaataaagaattttgataaacgttttaggtcttttttacgctctggaaaatgctcgcaattaccaattgattggaaagggataacggaaaaaacttttcgttatctcatgaaaacggaaaagaaacaaagggaaatggccatggaattgatggaaaaggcagggataatcacggacgacaaaacttttggtacccaacaccttgaggctgtacaaaaatactgggacagggaatttccgggcatgtttcgcattgtggcttttgaaatggtaacaaaattcgcttgaaaaatataacgcattacttatttttagaagaccngggcttaggccaatt

SEQ ID NO: 29556 - DNA, 783 bp, Heterodera glycines
ggatgacatagaaaaaagttataaccaaaaacatccttgtgccgaaacgggagcgcctaaacgcgagcgctgaaactcagtggacccctccgggcataaccccgaaaaactgcttgaatttcttatggggtgctgctccctccacctattcaaaagcatttttgtgaactgaatgtaaacgaactcctccttctgctgttcaggtacgttgaccattccgtgctggcatttctccgtgccaatcagcatgtgtttgagcgagccggcaccatgttggaagtgaatgtgctttcaagaaaaatggtgcaattgttgcctggaatatgcccaatttttgcacaaaatattcgccattatgcctttgcggatggtgaagagccgttgctcaatttgcgtgaccagactgtgcccacaattctcacggattgtgcccgactgaattccatccattccaattgggtgttccccgacgcaattgctgatgatgcgccaaattcaagtccgcgtcaagcgttgtccatgtggttgcacacgccgagcagagacgggcagccgaagcaattgcgttgctatgtgtcagcgaaggcaaacatacaaatctggatcaacaagttcaaggaggtcgggccgggaatggccaccacctttctttcttcgtgcatttattattcgcgggttttagtagtgaatatcagtctcggtttgagaaaagtctcgggttttttttggtcccggtcttcgagaccgagactttgatgattgaaaactttaaaagcccgacct

SEQ ID NO: 29557 - DNA, 860 bp, Heterodera glycines
ggactcaccccaccagcatttcaaagtcatcccaatctctgggactcaatccaccagcatttcaatctctgggactcaacacaccagcatttcaatgtctgggactcaaatctccggcattccagacactgggactcaacccaccaacattcaatggcattgcaatctctgggactcaacccaccagcattccaatctctgagacaacccaccagcatttcaatctctgggactcaacacaccagcatttcaatctctgggactcaaatctccggcattccaaacactgggactcaacccaacaactttcaatgacattccaatcactgaaaatcaggccaccagcattccaatactgggactcaacccaccaactttcattgggattccaatctctgggactcaacccaccagcatttcaagctctgagactcaattctcaggctttccaatcgctgggactcaacccaccaacatttcaatctctgggactcaaatctccggcattccaaacactgggactcaacccaccaactttcattggcattccaatctctggaaatcaagccaccagcattccaatctctggactcaacccaccagcatttcaatctctgggactcaattctccggcattccaaacaatgaaatctccggcattccagacactgggactcaacccaccagcatttcaatctctgggactcaattctcaggctttccaatcactggaactcaaatctctggcattccaaacactgggactcaaatctccggcattccaaacactgggactcaaatctgcggcattctaaacatagggactcagcccaacaactttcaatgacattccaatcact

SEQ ID NO: 29558 - DNA, 1645 bp, Heterodera glycines
  unsure (1)..(1645): unsure at all n locations
acaccaccactctttgcacttaaaaaaatttcaaaaaactttcatttattcatagaaaatttaaattcataggtactactgctaaatcaacgcagagacgcctttccttgacctttttaggcccctgcaaaatctggtgcgcttctgatcactactcgaaaaatgagtgattgaattttcactaaaaagttaagcctaaactttttggcctgtttaaaaaggaattaaaaatttttaaaaattttattcatctccctttttgatagaaaaagcatcagagtgcctaaactaacatgtaaataaaatttggtgcgtttcagaaccctttctgaaaaaatatttatgaattaattatgcaaaaaacaaataaataatgaactctcttccttaataattttcctgcaccgaaggtactcactcggccgcttcgcggcctcgtggtgggccttcccgtaggtatatttgttgtgcaattttatagtccagccttcgctagggctctcaccgcggtgtattttaggtgtgtctttgatgtatcaaaatttctctcggccgtgttgttgactgaaaaataaaacgaacttaaattattgcaatattgtttatacgaagtcttttgatattattctgacgacttccatgataataaatacttatacaaagtttatctttttatatatttcctcatcccaaacatggatggaaaataggcaataaatcgacaaatattttcaagttttgccatgctatttatctttcgggactcaatttatgacgaaaatatgggctccaattattttttattttctactaacgcttttctagtggatcaatttatagattcaagaaattccttgcatgaattgaaaagtatttatttttattaaaatttgctgcttattttccgtaagaaagtttttggaggaatttcacaaccttgccataggaaaaactcatatctgactcgtaaaaacataactcgaacagtaggtatatttgttgtgcaattttatagtccagccttcgctagggctctcaccgcggtgttttttaggttgtctttgatgtatcaaaatttctctcggccgtgttgttgactgaaaaataaaacgaacttaaattattgcaatattgtttatacgaagtcttttgctattattctgacgacttccatgataataaatacttatacaaaggttatctttttatatatttccgcatcccaaacatggatggaaaataggcaataaatcgacaaatattttcaagttttgccattctatttatctttcgggactcaatttatgacgaaaatatgggctccaattattttttattttctactaacacttttctagtggatcaatttatagattcaggaaattcagtgcatgaattgaaaagtatttatttttattaaaatttgctgcttattttccgtaagaaagtttttgggaggaatttcacaaccttgccataggaaaaactcatatctgactcgtaaaaacataactcgaacagtaggtatatttgttgtgcaattttatagtccagcctttgctagggctctcaccgccggtggttttttaggntggcttttgatgtatccaaaatttctctncggcccgtgttgtttgactgaaaa

SEQ ID NO: 29559 - DNA, 1213 bp, Heterodera glycines
aaaaaacaaacaagcaattatcagatcaggtttcaggatactttttcagatcaggatcaggatctcgagaaaatcctgacaaattccgacccagttccagggatgaatgataaattatgctgtattacaaaaatgtatttttggaatttacaaattcgatgggcaacctggagtatcttcacccatttcgccaaattcgactgtgcattcccaattgcccacagcagaaaattttgtttgcaaatcctcttttgccagccggataaatctttcccaatcagtgccttctgaacacatccatcgatacagcgaagcttaattgtttattaaattgtccttccttattaagtagcgctgagcgggaccgggaattttgacaaaaaccggggccggcaattttcgggttgaaaaaccgggacttcggtactcagttgtacttgtacgtgtttttcagtaccagtcccggtcccgctcacaatcagctctattattaagcgatcaacaaagtgaataatgggtccaaattaattcacgaccataaaattaatcagagcaattttaggttaatttatccatgtacccgggtttggcttcttaactcgtctggctggaaccatgcgacttggtttttaaacttttttaattttattttaaaaattcaacaaaattttcatgcaaatattcaaaaatatttgcgcattcattagctgatacgttgagactttttcaacatcaatactataaataaatccatcgttgcacgtaagagctttaatataaaaaaaaaattaattactaaaaatattaattaattaacatttcaaatataaaaaattatttgccgagccgctgacaagttggctggcgaaaacaaaaccgcaaatgaagaacagccaaatcggaatcgggtgcatttttatttgaataagaatgtttttttcccaatcttataaatttgggctgcaaattttaggtaagaaaattgcaaaattagtcaattaattaggcagaaaacatacgagcaaaattgcttagaaaaacaggcgcaaagaacacaaaatagaggtcaaaatatgtgaataaaataatttatttatttatttttaggctagcaaaaatactcataaaaataaaggattttttttcaaaaattttgctcacaagtaaaattttttacttctgattatctttcatgagccttggtttttctctt

SEQ ID NO: 29560 - DNA, 1425 bp, Heterodera glycines
attttagattttggaagtcaaagtgaaagtcggtgatattgtgcaacccaaacaaacgctgttcattctttcggcaatgaaaatggaaatgaatgtcgactcgccaattgcgggcactgttaaggtaaataaagttaacagttcgttttttaactgtttctttgctactcaaaggctattcacttgaacaagggcgagaaagtctcacccaacgatttggttgtcgaagtcgaacagtgagattaatattatacaaataggttgtgattattgatcatccattcccttcactttgttcccctatttatttgtgttttgtttggttagaccccatccctcccttaaattaggttttatttgtattgtgtcatcacttatgcgatattttccgtgatattcaccgaatggaattgatttaacaatttattttaaagatgtgaatagacagggaacaataaagatatttatttgcgcactgtcgttaataatttaaaatctcggattgcaattttccccttaaaaattagccaaagcgttaattattagcctctttcaccaaacttcacttgaccttaggcaaaacatgtctgaaattggggtttgttaattagctgatttgtaatttgcgagttgtcaatttactgtgcaataagtgcgagcagaggagaagggaacgaagtgtttgggtactcccccatggatacgccaatgtccaaatgggtgtatttcaacggctgtgccgagtcaagcccagcctcgtcgatgcgcgagacgcgcatcagaaatgccgctgggcccatgtgccctcgtggcgttctcacgcttggcaaagcgttcgattgcatcaaatcggccgcttcgcatttcgcagagtgaaagtcgaagtcctggcaaaataagtgccaaattatataaaaagaaacaattcgctctaaattttccatggcaccgtttgttgagactctttctccattcgtttcgagtgcccaccatttggttttctgcacttgcctcactgaacagtcgcgacacttccaccggttgtccgaattcgtcgcccgttttcctcaattgttccgcgtaatttgccgccctcgccggtccgttgtccatcgcggcggagcaatggccataagtgagtatcaaatggccagtgagcgtagcgatggtgaacaaatgtgggttcttcgctttcatggcctagtgaaagttgccaatgtttgctctttctttggctttcggaatttcgtggcaaattcactttttctttggcctcggccaatgggtcggccattgccatccgaccttcggcgtcggtgttgtaaatgtggacgcgctttccgctacgggacttcaaaatggcaaagggtggccatgagtttcactctcgtccaacggggggagggggccttaccacgtattcgt

SEQ ID NO: 29561 - DNA, 1049 bp, Heterodera glycines
gtaatttgcagagactaaattgtaaatgtcattcactattgtttttaccgaattccgctttttcctttttggcatcaaaacggaacatcgcctcaatacatcggaagccaacttcaaaatgattctatgggctggcacaagcttaagaggattaaattttaaaaaacacaacaaaaattaccattcactaaattacccaatttataattaataaattaaatttttaatttgaagactcgcctcttttgcgtctccgtcgcccaccaaaaaataaacatccgcgtcctctcccgcgctcaacaaatgcttcattcgttcagccaacggtttggacatgctaagcaattccatcattcgtttaattatctatttaaatgcggtaaaattattggcaatttcaaaattggcaagaaataaaaaccacggcacaaaatcagcaaaactttatgttcagttgggctttgtgattattttgaggaaatttgtagcaaaaaaaacatgcaaatgtttcgttgtgctccttcccccccccctgtttttatgcattttttcatcgctttgccatcggtaaaaaaaaattgatccgactaaaatgcaaacgtaaacaaatatattttgaaaaatagatgcaatgtacgataaattacctaaacgtattaataaacaaagatatttttgtatttttggatagaaaaaaagtgggagaaaattgtgctctaatcgaaagcttaaaatttggggaagtttttgtatagcaaaattctggaataaaagcaaccgacaaaaaactatgcttgaatatatgcgaaaagttatgaatttcgggtttctcattgtaaattttttcttaatatatgtaagtatttgtttttttcttgtattaataaatacgctaaactttaagctttcgatgaataccaagaattttggattaccaagtaataaaaaagttatgatttaatcattggacgcgtaaatattgattggacgcgtaaactggaacagagccgaaaattgaatatattcaaataccattgggtaatgtgaaa

SEQ ID NO: 29562 - DNA, 1286 bp, Heterodera glycines
acgttttttgtcactgttctttcttctctttagtatccctggtcatttctcccctctccctaattaccccttaattacctcttaatccccccatattaattaattaatccttcacacccaacactttctccttcctttctctcttccattgtccttccttttggtgtctcttccccttttgaatgccttcgcttctcttcttccatgggaatgacttttcgccttttatggccaacataaaatgcaaattcaattaaatacattttcccctttctcccattttgttatgccattccatttttgtttgctttttctgtgggatttgtttggtccttttatgaccgaccattcctttgccactgcgatgcgcgggttgggggggggataatgttttggtgccccccgtccaaaatatttgttccatcctcgcgaaaaaagagaaataagcagcggacggtgggagagttgttgttgtttttttttcaattttttcatttcgcttgtgagtttttaaggtttgatttggggcggagttctttttttgtgcttttggtttggctcaaaggttcggtccaatcgatcgaatgacttttcccctccccctttttactaattagatgtcccccattttttttctgcttttccatgtgctttctcccctcattttcccatattgcctatttggttgcattatttatgcaaatttatagtgcaaaaagatcccaatcattcgcccccccccctcacattctccccttttcttggtccaatttgtcatcttttcaaaatccaattcatcactctgtgggctttggcttcttctccgaatgaccactaaacgtcgtcggattgtttggctttggtaaagtgacaaagaaaaccccgggatttaaggatttgtgacgaaatcaaatttgtgtgttttgctcttcgcttcgggagaatccttcggctttacgccgctctttcgctcgactcgcaatttgtccattagctagagttgaccttccgcttctccttccttctcctttttctcttttcctcctttttgcccctttctcccttttctttactgtttctctttttttatttttatttcaaatcgtcctttctcaacgtctcaactccagcgcgtcgcaatttccgatagagaacctcctttctatcaaacaaaaacattttgaaaaagactttgataaaaattaatcacttggctcccattttattatttgttgttcattgagcgactgcgccacggcttccgcaaccccctcaactctttttct

SEQ ID NO: 29563 - DNA, 896 bp, Heterodera glycines
ttttttttggtttcccaaaaatttcttcgaccctggcttttttttttttccctttcaaattccccccaaatttttttcaagcttaattaggcccttttaagctttttcccaaaaatttcgcatgaattctcattttaaattttttatagattttaaatgtttggattttttttggcttaccaaaacttcttcgaacctggctctttttattctcattcaaatcgccccaaattttttttacagcttaactaggccatattaagcttatttccagaaaatctcgcatgaattctcatttataaattttttataaaaaatgtttggattttttttggcttaccaaaacttcatcgaacctggctctttctattctcattcaaatcgccccaaattttttttacagcttaactaggcccaattaagcttatttccagaaaatctcgcatgaattgtcatttttaaattttttatagatttttaaatatttggatatttttttggcttaccaaaacttcatcgaacctggctctttctattctcattcaaatcgccccaaattttttttacagcttaactaggcccaattaagcttatttccagaaaatctcgcatgaattctcatttttaaattttttatagatttttaaatgtttggatttttttttggcttaacaaaacttcatcgaacctggttctttctattctctttcaaatcgccccaaattttttttacagcttaactaggcccaattaagcttatttccagaaaatctcgcatgaattctcatttttaaattttttatagatttttaaatgtttgcattttttttggcttaccaaaacttcatcgaacctggttctttctattctctttcaaatcgccccaaatttttttt

SEQ ID NO: 29564 - DNA, 1490 bp, Heterodera glycines
  unsure (1)..(1490): unsure at all n locations
tcctttagcatttccgccaaatgcgccagcagtggcctctatcttcgcaaattgcccgtcgtcgcttattccgccgcttgttcagtttcgtcggtagtgttggaattattgtcttctaattaccccttaattattccagaaactccctcccattggtctcgactcgtttttggatgcttttgcgaatatcatcgagaattcatcgcatttacacttgggattttaacacatttctcccttccctttgtccatcgtttcgcttttttcactttgattttttgtttgccccatttttaacaaataaaaaattaaattattttggaattcctatccaaaaaggatatttgcacactttttttgcgtgaattgtgaaggctttgtctgatttggtaaacacagctgcgttgaaataaaaaaaaaggggagggagcattttagactgactttccctctggcataacaatgagttaattaatgcactaattaccccccccccctttttcccttttattttgtttggttccatttaaagtcactggtttactacaattttatgccacttttcgaaatttctctaaaaattttcccgaaaactgtgctaatgaaaggccctttcacattctttttagtcctcctccatttctcctctaatttcgtcttcatccgtgctcaaacatgcaattacgcagctgtgcttggccgtacgtttttactagtaaatcccctacttttcccttttctcttccgtctgatcattcccttttctctctcttctcttcttttggtcatttcatttccctttctctctctttcttcccttttctctctctccccatttctctctgtcactgctttgtctgatctttcttcttccgccgatcaatcaaatcattcgctgtgtctaggacagactttttagggttagaagcttaattaagcctttcgtattttgataatttttgggcctgaaaatcctttcactgatcattcccacttttttaagcttgtttggccaacacttgtcctttgccgttcgcttgcgatttgctcactcaactttgttgtgtgttgcaatcgaacaatggcaatgattgcaaaaagagacgaaagcgattcgcgaggatggacagaaaaatgatagcgacggaaaattaatcatctccaatttatttgagaagatttatttctttgttatgtgtaaataaatacatgaaatttcatatttattaagggaaaaaaagaaataaaaattggaatttgaggcaaagctacgaaatttgaattaccataataattagataatttaaatatatttacaaaaataaggtgtcaaataaataaatgaaggtcaagcggatgtccgtcacattgggcacagaatttgttattttttaaatgagtggatttgtttgaacatgccaatgacagatgccgtgaagtgaagggncgcactttgngacggactcaattttcccgcccaaaacgacccc

SEQ ID NO: 29565 - DNA, 892 bp, Heterodera glycines
agccattagtttcgtggacacaaaaaccagtcaaaaatgactgtcaccacgcctagtcagagtgactagtctaattaattagcaatgtttgatcggtcgatgggtggcgagaatgactaataattgtgcgtgtgcgtttgccttttccacgttgatgatgcgccccttgaagttggagcggttcagcttctgtgcacacacattggccgtctccgcatcggccagcgtcacgtagccaaaacaggtgggcgactgtttgtttttggtggtgaaaatcttcgccgtgattactttgccgtgctttgagaacagcgccttaaaaacacagtgtttttgttgatgaaccatctcatcatcatccatccatttggtgtggaacacagatggggcatgtcatcagcacaaaagttgtacagagagcagttttatgcaagaaactgtttttggatacgccaatttttccaaaaaaaataaggaaccgaaacacttaaaaaaagagaaattctctggcattagaatttttttgtttggatatgaaaagtgatcatattttaaaccatgggaagaggtgtcattccgaattccatggctaattaatagccgatgaaggcaatgctaaaaaatgcaagtggaatgtgcctgtccgtactttgagatcggccgctttcgtcgtggtggtaatgttgcggatccacaggcttgacgacaaattgttcccgttcaccagctgtgccgtcgatgcaccgcccgttgttcctgtcggtgtggcagccgagtgcttcttcccgccggcggcatcatcgctcggctgggcagcaacagcgtccttttccttgccgattttgtcctggcgtaggtgctgttggtcgccgttgatcagtatcacgtcatc

SEQ ID NO: 29566 - DNA, 1448 bp, Heterodera glycines
  unsure (1)..(1448): unsure at all n locations
gtttatttgcaaaatttaattatataaattttataaatgatattctattttgtataaatntaaaaatataaaattttaaatataaaaatttttaaaatttataatgtgtataaatttcaaattattagtgcatttttatcgcataacaagcttgaatacagtctttttgcacaagttcaactcaattanagcgaagattcatgattattttgcatatttttaattacaaatttcgcgttttttttagcattttntaactgatttntattaatttttcattaaatatttataattataatntaacaatgtttatattttaataaatanattttaaataaaaatggttcccaaggtgttcaactgtaccattcgccgttcacttatgtgccgttggaccgggacgatgtggcggtgcaacggcagtcgctgagtcggctcgaatttgtggacattttgtacgccggatatgacagtaccacaaaaaatgtcaccccagcactgtatgtggagggcgtgccgccgttgatgaacggtatccgagtggagcgcagtgcatacgatggcatttacttttgggagccggaagtgagcataaaatatttacaactattatataagatatgttattcatacataatatttaaattttatcagtttaatatacaaatttataattatttaaaacctgggcctacagatatatatatatatatatatatatatatattatatttaccaaatacataacaaacgacaccgaagcaaatgagatttttaccataaaaattcagattttttttttgtctaaaaatgaataacgctacgcggggaaaattgagaatttttgccatttttaatagatttgcacaataaaagctaatttgatggattgttttgaaaaattttggaaaattttttgtgaaatttgcgtaagggagatattgggtagaataccaataagcaaaaacgaaaattttatccgccggtgatagattaagaaattttggcagatttagtaatatgttccaccaaaaaatgcctgcctatatgaatttaatcttttcattaatgatgaaataggaattcgtgcatcagctgtgcagatagatgaagctagaaaatttttgaatttttataatatttgctttaaaaatggcatttttctaaaaaaaatttctttgtcgagcgctcaaaattgaggaacaaaaaaaaaaaaactatatgaaaaggttgattcaacgaaattaaaaataaaaattctattttttttaaatgcctaaagaaacaatttaatgttttcaaaaaaaaaattttccccattttcagggtcccgttcttattgcgaactcaacaatttcacataatcgtggccatggaattgttattgagagcacattggatggacgagcattaggaaccaaagtcgaattgaggtagcaatttaaaaa

SEQ ID NO: 29567 - DNA, 1339 bp, Heterodera glycines
ccattttgaactttttccgtttcaccattttccattatttttttttgtacaattaattacatttggcccatttttctttcggttttcactattggtctcccattttcgcttattctttgatctttccgtttaggattttgatttctcttcacttttattcaaaccattttcagatgcttctttaaccaattctgcatttttggatgtttttatttctattaaaattaattagaaagcattataataaaacccttctaaatttgtctaatttcgagttttgactttccaaaaccatttacaaaatatttccctttttatgcctttggccaatcattttgcctattataaattaattcttcaatttgttttcacctgcttttccctcattttgttggtttgaaaatgcccttttcaccaatgtgcccgttttggacgccgttcgcttcaaattgtcgcccgccaccaaagcgacgtctttcaattccgggccgaaccctttcatacacctttgccccaattttataaattaataatttataatttttggtcgaactttgatcattgagaagtgcaaatggcgattgaaagtctttttgatgttcgccacattttccacctgtgcaatgccacgcacactgatctgtttccggcggtcaaaatcgtcgttcattttgatcgaaaatttaatattttgacctattaattatgatatcaaaagattataaaatgcatagagagaattaaaaaaattcggtattttattcaaaaaattatggtgagacgccgccggggaaaaaattgagaatttcgttccatatttacaacatttttgcaccagaaatgcaatttttgtgggttttttggaaaaatttggcgaaaatttttggttgaaatttgaatttcactgcatgtgcacttttttgcggcatatttttgctcccaagtttttttgaaaataagaataaaaaactcgaattctaaaaacaggatttccaataaaaagtccaagcgacgatcttttttgctttcactcaccttttttcggagcgcttaaaagattttgtcaaaaaatgacttatttagtgatttagagccaatttttttttaaattaaagtttttagtcagcctcgatgtatttacatcggtataatttattttcttgaaaaaagcacagatttttctaatttttctcccctatttaaccattttttcgtccctaggaatccattccctaatgattaacaacaaatgagtggtaattgtaatatttttcgtgtcacaacttttataaccttagaaaaaagcgatgtggtgaaaactgaagaatcgattaagtga

SEQ ID NO: 29568 - DNA, 808 bp, Heterodera glycines
ctctgatcaaatttgtctaattcttctgatcccccctctagggttttcattggtcaattgcccatttcttttgatctggttggcccaaatttatttttatcggatttttttttgggccacttcttttgatcaagttggcctttgtaccaccctgaggggttcacatattatctcacatttacgcgttatttttatgcgtttttgatcaatgccattcattcttctcttttctttgaccaatttgttccaaattttctgatcaatcccatccttccctcatttgatcaaatttggacattttatttgatcagttccatcatttccccattttcctttgatcaaattggccaagtcttccccaatcgcctttgaacgaccccattaatccgggatttttcactttaccaattcttcttttattttggtctcttctatttctgttcaacaccatccctcatttctggtcaacccatctctttcatttctggtcaaccccctttccccatttccctctcatctctcaaaatatttccttttaagtacaaatcagttccattttccccatttattttggtcaacttgccacaatcatttcgatcagtgccatccccgcccatttattgatcaaatggcataaatttcctttggtcaatgcaattcctccatttttctcaaattgcgcgtaattcttctgagcaacgtatccctttctccttgatcagtgccattctctcccctttttcttttttgatcaatttgtccctcattgattaaattcatttattttgatcaggttcaccccatttta

SEQ ID NO: 29569 - DNA, 1532 bp, Heterodera glycines
  unsure (1)..(1532): unsure at all n locations
gaaaaagtgagaaatcgctcttcgggactcagttgggcgtcgagaatttttttctatagttttcgcgaattctcctcaaaaagttgtaagacccttccactactttcatacccgtcccattagccgttaagctcaaattagtttttgaaacgacactccttgtcaatataacatatatattaattagggtgaccagttggctatggtgtgcatacgtggcttggtaatatatggccctcatttgttattttgaagcacacacgcacttaatttcattagtgtgctgttgtcaagttctcgccctcaatgcggcgcgttctcgcccgtcttttaattttttaggggatattcggccgcttcgcggcctcaggacgggcgctcccacccctcagaatccccaataacacggggattctgaggtcttaaccatgtctaaagtaaaatctgattacatattcgtgatcagcggcccaaataacccctaaaatcatatttttggaagatttttggtgaaaaaaattttccactcaaaaatcatggtcacacccctgtggtcccaaattacaaaatcacttttatttctataacttttttcaaaaaagtgataaaaagctaaattaaaatttataaaatagagcaaaaaattgcggattttttgagtatatcatttttataaaatactttttcagaatggagttatgaatttttttctgaaaaatcgaatttttccagaaattctggaataacttttttattttggaagatagaaattacaaataaatcgcataaaattctcctatttttttggtatttttcaaactttattacactaaatttgttacatattcgtgatcagcggcccaaataacccctaaaatcatatttttggaagttttttggtgaaaaaattttccactcaaaaaccatggtcacacccctgtggtcccaaattccaaaatcaatttatttctataacttttttcaaaaaagtgataaaaagctaaaataaaatttataaaatagagcaaaaaattgcggatttttgagtatattatttttataaaatactttttcataaccgagttcttaatttttttctgaaaaatcgaatttttccagaaattctggaataacttttttattttggaagatagaaattacaaataaatcgcataaaattctcctatttttttggtatttttcaaactttattacactaaatttgatcaaaaatgaagaaagttatgaattttctaaatttcactggattttccggggctcaaattttgacgatttttcaaaaaatttttaccaccttccaaaaaatctgaaacgcaaaataaagcgtatatacgtattcagcaccaaaaattaggccataaaaatgcattttggctaatttaggagcaaaaaaattttcatgaaatgcaaaaccatggggtcccccctttggttttgagtttcaaaatcacaattaattttataactttttttaaactcatggtatnaaacatgagataaagcacattaga

SEQ ID NO: 29570 - DNA, 1015 bp, Heterodera glycines
  unsure (1)..(1015): unsure at all n locations
tttcagcacaaaaaatcaccgattaagcactgtaaacatcaccaaattatctcaaaataagtatgaaaaaagcacaaaaaaggcaacagcacaaaaattcgaaaaaaataaaaaaaacacaaaaaagcaaaatcagcacaaaaattggaaaaaacataaaattaagggattaaaggcacaaaaaattgaaaaaaggaagcaaaaaaaaaaactttgttgcttcctgattataaaaacctccaaaatagttgctaaaaatggcaatgagatacacttttcggattgattcttaggggtgtatttttcaattttattgcatatttgttaataaattttttgaaaatcgcttaaaatattttagaaaattcctcaaaatgataaaacaacacaaaaaagttatttttaccacttgtgcagttcgtgatactgcagattaaatcaccttcctggcaatcttttgcagtgaaattttggtaaatttgagtgttcgaaatcgatccttcataacatttaagaccttaaaataatgttatttatcaattaatattttctttcagaaaaaccttcggagttgtccatcatcatacaaaacagaaaaagaaacatagcaatcggaatagaatacattgagttctttagaaataataaatgacttaaataattgaatttaatttggttttatttgataatataaaataatagcaatgattcgtatttattcaaatgcaaaccaataacttttttttgtacgaaaagtcataaaaatttcctatggttttggcccgaaataaacagtcatcccttgcattttcattgcttttaaatatntgaacaaatagtaaataatgcaggatcaaaaagtcctataaatcaaaaataatttgtcaaaaattacaaatttttcggtaccaggaacaagttcattgtcaaatacgtttagtaaaacataaaaaaagagagattaaggagaaatcggcataatataaaatgaaagtctggcagtcaaaatctgtgc

SEQ ID NO: 29571 - DNA, 1176 bp, Heterodera glycines
cagtccccccgaaccgatgcgcccagatttatggggagaccgaatctttcgggattagcttccctatagtctgtactttaattctgcgttggattttgctccccataattgcgtgagtaccccaaacggacacttgaataaatcgatttttttatttcataaatattttttcagaaagtgctctaaagcgcaccaaattttatttacaagtcaattttagcactctgatgctttagtatcaaaaaggaagatggagaaaaaattttttaaaaatttttccttatattttggttatatcgttttgcttttggtggggtgcttggaacagtggaatcatgcgcacccgtccgatctggcaagttatgcaacgattgctgactagccaaaaggttcggtgccgtgatgaaacgaaccagcactgcttaccccgcggcacccggcacggtcccccgaaggaatggatttaattaaattctctccttcggggatttttttccattaggtcgtccgttagcgttcgattgctctagtcaatttttcaaaatttttgttgaaatatttgtagtgctctgaagggcgtggggggggggggcgggggcccaccacgaggccgcgaagcggccgagtgagtaccttcggtgcaggaaaattattaaggaagagagttcattatttattttttttttgcataattaattcataaatatttttttcagaaaatgctctgaaacgcaccaaattttatttacatgttagtttaggcactctgatgctttttctatcaaaaagggagatgaataaattttaaaaaatttttaattcctttttaaacaggccaaaaagtttaggcttgtgtggtaagtgtgaagaactgtgttcctccaggcaaaaaattctaagaaaatttataagcatttgtagggttctcagcagtttccctgcaaaatttggtgagctttcgatcagtctagaacgttggggatcaaatgcaaaaaataattaaaaaaaaataatactggtgtggtaagtgtgaagaactgtgttcttccaggcaaaaaattctaagaaaatttataagcatttgaagggttctcagcagtttcccctgcaaatttggtgagctttcgatcagtctagaacgttgggtgatcaaatgcaaaaaataatttaaaaaaa

SEQ ID NO: 29572 - DNA, 1902 bp, Heterodera glycines
  unsure (1)..(1902): unsure at all n locations
aaaaagccattgattttctgcgccattttcaccgacttttcggcacgtgccaataaangttgagtattggaacaagcagcattttgcaaatgggattctttnattgtttcttatgnccaagaatcaaaaaccaaatatcattcattgaatttcgggatgaccaagcgttcagccgaatgcgagactttgcaccgtccatattcaatgaattgccttctctccgtatttttgagtcattggaagatcccttccccgcgtttcctgccatcgacagtaccagtgcggtaaatggacagctattggcacattggctgatcaaggcgcttccgaatgaaatccctaaaattgttcgttgttcaattgagtcatccgaaacggcgggtgatttgccagcaaaaattggcgcaattaaatcggtatataaaaaattgaaattatttctgtttgtaactaactgttaatccctttaggcattttcaaaatcttctttttctgccaatttcataatccaaatgacgatacctgatgaaacaatcattgcaccattcgatgtgttcaacaaaaaaactggaagacgtctattgctggatgattcccacgatcaaaatctgctgctaatttcatgcccaattaaacgggacaaaaaggcatggattaaatggagggaagaggctcttcaaggaagtgagaattacacgtggaatttaattgatctcaccgcgggggacgctgacattggcgaatggtgaaaaatcattttgtcaatgcataaatttttatttttaggaattgggcacaattccccgatttaatggcgaatatgcaaaagtgaaaggatggataaaaataattggagatttttatgatctattttttacatttcatttatcatttgatttttaaaaaatatattctgaaattgaattccttttctgaagttaaggcaattaagataaaatggttacgaacatttaaatatttcctatttaatacaaaattaggtcgataattcaaattcccggtttattaacaatcttaattaaataaattcaaaactaacaaaatgaatatcatttcttatccagtatgaacatttgccattgatctgtcgtccgtaatcatctataattagaacaaattccaatggtgttcggcttgccaaatgggctcgattctctttcccatttggcccatttttgctcatcacgcgcaattggacaacggaccagcaaaaaatgtttgatatgtttgatgccaatctttttcaatgcaaaacgttcccccgtcattctattgatcatttcaaatggcacaatataactaacatctctccatggaggaaacctaatagcaatgatgaaattcacgggagaagaagcattggcaaaagcctaaacggaaaaaaggttaaattagcaattaactattaggtggaacgcggacagaaaaattaagtgttttcttaataaattcgggataattaaattttataggtttctgagccaatttttagtcgatgacaattaatttatacgcaaaaattgatatgttccgttccaccctattttctgttactatcaccgatttaatgcttataattttcggcctccattggtcttctcgaatttgactgcacacaatcaactttggaattccatcagaacgtggcgtcaaaagccaactgaccagagcttgttcaatcgaagttttggcactttcatcggtcgaaaaacagggaaagtgccgataggaatagaacaagcgaagagtttggcactcgttgagaatggaagtgacaaattgtcgtatctgatgagactgtttgtttttcatgtggaaatagatcccgcggatattgtctttgatctttggccaaatgttgaggacgacaaattccaaaat

SEQ ID NO: 29573 - DNA, 990 bp, Heterodera glycines
tgaaaaatgctctactccaaagagacttagttgagcgcactgcaaggagaaccctaaacacagttcagcacaaaaaaatttaactattcacgcttgagaacgcgaagtttgctgcggagaatggcaattatatgcagaaagtcaagtgcatatatctcagcgcctagtgcatgaataggagcgtttttactgttttctgagagcgcctgaaagcagctttcgaatggtatagctgatttttttggatctggaattttcgcagagatatatgcaaattagtaaccagtgtttcgtttcaaattatttctcgtattctaacgaaataattttttactatgagtgtttggtttggaaactgtctaaaatgttccgggtcgcccacattgcacaattttcttgaaaataccatgaaaaatgctctaactccaagagacttagttgagcgcactgcaaggagaaccctaacacagttcagcacaaaaaaattaactattcacgcttgagaacgcgaagtttgctgcggagaatggcaattatatgcagaaagtcaagtgcatatatctcagcgcctagtgcatgaataggagcgtttttactgttttctgagagcgcctgaaagcagctttcgaatggtatagctgatttttttggatctggaattttcgcagagatatatgcaaattagtaaccagtgtttcgtttcaaattatttctcgtattctaacgaaataattttttactatgagtgtttggtttggaaactgtctaaaatgttccgggtcgcccacattgcacaattttcttgaaaataccatgaaaaatgctctaactccaagagacttagttgagcgcactgcaaggagaaccctaacacagttcagcacaaaaaaattaactattcacgcttgagaacgcgaagtttgctgcggagaatggcaattatatgcagaaaatgaagtgcatatatctcagcgcctagtgcatgaatag

SEQ ID NO: 29574 - DNA, 934 bp, Heterodera glycines
  unsure (1)..(934): unsure at all n locations
acttttttttataactggtcagaacgaccagatttgcgagagcatcaaaagcaaggaaagcactgtagatgctactccagtaatctgaattaaaatttttattaattttaaagcttcactattttatttttttgcaaaattaattcataagtattttttcagaaagtgctctgaaacgcaccaaatgttaattaaaagttaaataaggctctctgatgctttttctatcaaaagggagatgaataaatattttaaaaatttttaattcctttttaaacaggccaaaaagtttaggcttatattttaaaaagtttcatcgaacctagcgcactaaaatcgatataatctctccaaattttgcaggccttctccattgtaaaggactaacttaacctgaaaaaatgccaacgcttgttgtttttaaaatttttcgaaattctgactttttcattacttatttattttttgcaaaattaattcataagtattttttcagaaagtgctctgaaacgcaccaaatgttaattaaaagttaaataaggctctctgatgctttttctatcaaaagggagatgaataaatattttaaaaatttttaattcctttttaaacaggccaaaaagtttaggcttatattttaaaaagtttcatcgaacctagcgcactaaaatcgatataatctctccaaattttgcaggccttctccattgtaaaggactaacttaacctgaaaaaatgccaacgcttgttgtttttaaaatttttcgaaattctgactttttcattaattatttattattttgcaaaattaattcataaatattttttagaacgtgctctgaaacgcaccaaatgttaattaaaagttaaataaggctctctgatgctttttatagcaaaagggagatgannataaatattttaaaaattttta

SEQ ID NO: 29575 - DNA, 1624 bp, Heterodera glycines
atttaaggccaaatcaaataaaacttacaatattctccagaattttcccttcaaaatgagcataaaatggttttatttgatctattattaacaaagttataagctaaaaaaattacacaaaattatcgatgctgtacgtaaccaacgctttttgaatataattttttttgacacgaaaacttttacaataaaaaaataattcgtcttttttctttaaaagaataagttgaaaagaacacacaacatgcagtgggtttgaacctgagaccccccttttggtgactaacacacagaccacttcgacgaaaaatccaacttatttgcgcttggagcccaaaattgactcgccgtgaccagggatcggatagaaaattaaaaaaaaagattaatcaagtacaaaaatcagattccgtagtaaaaaacaagaacattttgcaaaattgtttcaaatttaaaatctattattttaacaatttatgcaacaattaaattttttctagtattttatatttatattttcatttatcctttattagcaaaagaaaaacctaattcaaataaattaatttaaaatttgtaaaaaacaaaaacttaacactacctttaatgtgcatcgaaaaacattaatcaatataaaaaaatattttaattgtaaaaaattatgtaaatgtctaaaatataaattaaaacttggttagacatattgctagctaaaacaacatacaaaatattttgaaatatgttcaaaaaggtaaatgcaattattgtaataaaataaaaacaatttatttgaattatcaaattttttgtcaataattttattaaaagcgttaaaaaactagcaaaatgccataattatgcattgccttgcgcctttttgcttatttaacaagcagaattgatgagaaatatgtatacagatatgaattattctataaataaaataaatctaacaaaaatttaatttttagttgaaaaagtgcaactttttatattaaataaatttttcttattaaccattacctatcaacgatttttaaatattattaaacgataaattagttaaaattaattttattattttctttatgtgcgctaatgcaagtcgtaaacacatttatttaaaaaggaaattaattaataataattgttaattattctaaaaactaatgtttatatataaaaataaaaattaatgaataaaatttattaacaaaagaatattattaatggttaagagaaatgttaattaaagaataaagaaaaccggaatttattttcttagataatgaaaataaatttcaagttcatcggttatgaaatacctacattgtacacgctagttcaagagaattaaattaaaaatattgataacacggggtttgatttatattagtttcaaaaatgctgcatttcataaaatgaacataaatatgctttttaatatctttgatttttgataaaatcgcataagtgataaaatatcagatataaaaattatagattaaaaaaattcacaattttataaaattgaaatgactcaataaataataataaatgctatattatttgaaaaagaatatacattatatttgcaatattttaaaattacttctatgcttta

SEQ ID NO: 29576 - DNA, 1500 bp, Heterodera glycines
cacatccaataagttacgccagaacatgcatcaaccacaaaatttttgtcggtgaaaaaattcaaaatcaaggtaaattcagaaacgctaggaaattgtaaaaaatttccgtgacaaccaactaggcttatctgaaagagcacaaaattattctctacaaaatgattatgaaaccgcagcaaatcctttacatgcagaaaggaaacgatatatatctctatttttgttgttttggacatttttggtagagtagagcgggaccgggaccgggccgggaattcccggtcatccgaggtcccggtcccggattttgaaaagctcaggtcccggtcccggtagggcaaccgggaaaaacaagcactggtaagaatgggggtctaagtgaaaaataggaacgaaacttcgagttaaaggaaaaaattttaaaaatatattaatatattctttaaaagtaacactgacaattgtgcaaatggcctagtggctagtatccttgactttcccttcttctttttccactggttcaatccctctacagaaattaaaatattttgaattttctttttgtatactcatggatttcctattgagaaaatatgattttatttttttaattgtgttttatcattttttaaagaaaatccgtacaaattgagcctagtaatcccaaaaccagccttttttgttgaaaatctgttaacaaatagcactcaaattttcaaaatttcccccggcggcgcctatcggcaccgccggacccacttctttcccaaaagttttggaaaaagcgctccgaaaaaagtgaagtgaaagcaaatctgaatttaaataatattcaatcatttagcccaaaaatgattattgtttgaaataatgaagaaaatctgatttgaaatttttaattaatttgattttgtattattttcacatgaaataaattacaatttgaatttttaaaatttcccaggttggtcccggttccggacaaaaaccgaggtcccggtcccggcttctcaggtcccggtcccagttttgccaaagattcctggtcccgtgacactaattttaagcgtcattactgggttgaaaaaaaacttttcttttgattttcaaaaatcagcctttaaactggtcattcagctcggagcaggacaaaacgtcgtcggccgaaacgtcgccggacgaattcttccgacgacgttttggggtgcaccgcattctgctaccctaatttaacttattttttttggctttctcaatagttttaccatattcttttcaattttaattcaccaaaattaattaagaaaaagtaaaattacttagattttaaataggtattatgcaaaacaaccgaataatttgtccagaaaatattaatttgaaaagttgtttttttttaatgatttttatttaaaattggtatcaaaaatgcttttaagaaaaatgaaaaatattcaagcaaaaatgggaaccaaaattatgccgaaattctgagaa

SEQ ID NO: 29577 - DNA, 1175 bp, Heterodera glycines
atgcgaatgccggacacctgcgctttcttgtccgttgttatgaatgaagatgtctgaattggagaaaatgaagtaacagattgctgaacatccgccaaatttgctaaaccttggccggttgaaacaggaagaccataattacgccaatactcaatagcccattttgaattcgcatggagtgtattaaaagctgaaaaagcatttatttcacagtggtttaaacaatgtgtacaaatggaataagatggtgatcaaaaaaatgttcaaaaacaagtttcctcgagttttcatgctcgctgatcatgaatctgagacccatctcgactaatttcgaaacgcgaccccgacaaaaattcttaatattcaaatttaaggacttagcacttatgtctcgaaaacggctttacatgaaaaaacagaaaaccatcatccctgcaacaaattgtaattttgttcgagtttgggtccggggttgggatttggtcgaaatgaatgttggattcgcggtcagcgactttgaaaatccaggaaacatgtctttatgaaaatggggtgggaagtgggaaaaaaatgtggagattgtggctagacaatgcagaattggcacattatatagaccaatttgagtggtggtggaaaaggcggacaaaccgacggaaatgcaaaaataacaaccgcacagccacatacatataaaacccacccattttcttctcacatacttattttgaaaatttagtcccagagatgtatgtacaagaaataagggtaggggtcactttggcgcgggccattttggcgccgcgaactttaaagtgttataacttttttcttatccaaccaaataaaataattttgataacattaaataggcctaagtgttctttattagcttgcaaaatattagaaaaaataaattctgtttgacaaaagatatagcgtgcggcgccaaaatggccagaaaaagtcagttttttgaggttttttggccataacttttttgtgtttcaattaaattttttgaaattttgcaggctattagggactatcaagcgctttaaaatgatatcaagcttatttaatttgaatgagaaataaaaatgttatagcgtttggcgccaaaatggctggcgccaaagtggccggttcccagaaataaataattttgatgattg

SEQ ID NO: 29578 - DNA, 1236 bp, Heterodera glycines
  unsure (1)..(1236): unsure at all n locations
attattgggtcgcatcatgatatgcatccatgaaattctcctactttttgggaacagttgtgaccctagagtcctcacttgtaattgtcctgaagggttgcgcattaaaaccagataatgggcgttcgctcttgccgttttaatgtcccgaccgtagagactctgggttacaaaaattacgcttacgttccaattatgggagcccctggtaaagagtaaatcgaggaaagtattctgcatgttaagcattaaatcgtcaagtatcagtaagaggggtttttcctgttctttaatcttattcatgtccggaatcccattaaaagtctcaacaccctccccgattaatcctaaaatactatcattcatctcaccataacaataaagaattttcttaggcggtggttcaattaaattcttatgatgttttaaaaaccgtaatagccaacgggtcttaccactcccggtagcccctgagagaattagagtgaacggaccgcgaaacatttttaattcctcttatttatttgacctatttatattttcatagggaacatgtttcgcgcatttggggcatagccagaaattatcaaaaaatgatgtaccgaaatgcaaaagactgtggcttttacatctcttacaaatctcgtaatgacaggggcagtaatgacaacacttaattttatgtggacagttcattttttcaatttaattttatttttggttgctatttatagaaggggtatataaagggagtgaaaggaccatttgattggtacattgtatcaaaaaatgcaaaaaccgataatcgtaaatataattgctctcgctaatctcggtaccggaattaaactaaactctctgacgatcaccgaatgcgaatttaagtataaccctagaaaattcaatgccgcggttatcaaatgtacaactccaatcaaagccaccgcgttattatgggaatccgggaaaatgatatgtctggggacgaaaagtctgatagactatgagaatgctataaaaatttttatagaaataattaagggctcggggtgtccgggggcttcttacacaggacacacggttgaaatattgtttcgaccattaaattcgcacatgaaatagaactgaacgaatttagaaaaaatcgtcgtgccttttatgaacccngaaatattttgcggtttaaatttcaaaagggtaaaagcatgactgctttaattttctggaccggtaaag

SEQ ID NO: 29579 - DNA, 1075 bp, Heterodera glycines
gccggccctccttgtcccccaaaagtcttggaaaaaacgtgccgcgtaaaaagcggtgttgaaagcaaaaaaaggtcattgatttacattaatttacatggccggagaccccttcgcaaaattggaaaattggctgctgaccccttgttttgcaataatctgaattttgaggtctatatctgaattttagtgttctttatcctgaatttgaaaaaaaaacttggtcaacctgaatatacatatacttctgaacaattctaatgctaaaaaacaggtactcgcgcgaaaactgaataaaaattttgtatttggaaaattttgtccaaaaatttttatgttctaaaattaccggtttttaccggtaccggtaccggtaccggttgaaaaagttggtaccggtaccggtaccggtttttgcagtaccggtcagtaccggtaccggtttttgcaattaccgattaccgctcaactctagattaaatgtatcaaaaaataatttaataaaaaattagttcctacattttagacactaaaacttacaaaaaaaaaatgaacattggttttggcaacctaaaagccaaaaacatttattcaaaagagatgacataactcttaattttaatattaaaaaaaactccaagactggtaaagaaacgagagagtacagagaagcaggaatatatttatttatttatttattaaatttaaaatgttttaaattttattattttatttaatgttcagataatcaatctgactattcagtggatattacaccaaatgcgccacacggtttataaattgataattttttgaatttaaattaaatttatttgcagattctgacagcgaatctgatcactcagtacaaatttcaacaaatgttcctcatggttttttaattatttaatgtttaattaatttttttaattgcaatttaattgttccattttagaaagtgataacgattcggatcattccgtggatatttcttcaacaaatttggaaggattaataatttcaagtaaaaagcaatacaaatttaaatacatattaataataaacttttaaatgc

SEQ ID NO: 29580 - DNA, 1286 bp, Heterodera glycines
ccctccccatttcattttttcctttccattcgcttccctcacattcgccgtcattccattcgttcttctttcatcattccaattccatttgtgtagattgacgaatggcgttgtctctttaatttatcaatttcttattttagatcattttgtgtgttaaggcggggagacgttcgatatttattgtgtgtgttagaagaggaagagaagaagcaggaagagtggaagatgagcgcgaatacggaatgctatcgttgccacgaattcggttggatggagagggagttggtggtgttggtgtgatttcgggtccgtccgggttctgttggtggtgttgagagagaaaactgttggtcctgtcggatggtgttagcacattgatgagaggagaaatgggaggaagaggtggtgtagagagaggtggtggtggtgtttggcttgctcttctctgttgttcctgggacttggccgtctgccggtcgtctggggaggcggggcggtgctgaaccaacgcccttcttaagggcacatttcgcgtgactgtcccaatgccggtcgtagtggtggtggtggtggtggcggtggcggctcgcgcggcggtggaggcggtgagcatttgttacagcaaccgactgatttgttttgtttttcagaaaccaagtgttataactgtgagttttgcttctgacaccgtttaattgggaatggaacataaattgtgatggtttttgtatcaatttttcaggtggacgttctggacattttgcccgtgaatgccgtgatgccggagaccgcgaccgtgggcgcggtggtggtggcgggggcggcggacgaggtggcgatgaccgcggcagcaaatgttacaactgcggtggttacgggcactttgcacgcgaatgtcgcgatgagagaagcgccagcggcggtggacgtggcggcagagacgacagggatgaccgaggcaacaaatgctacaattgtattggcacccgatttatataaccaaaaaatgaggaatttcactcgaacaaaaaggccctcagccaaaatcccactgataaatgacagtgagtgaaaagccacactaattgttgttctataaaacggtagagctgtttgaacattcttgttaaggtgggaaaagcggtcatttttcgcgcgagtgtccggagggaagcgaccgccgcggtggtggcggcggtgggcgcgaccgtgacgaccgtcgctgctacaactgcaatgagccaggtaagagggccagccgataaattccagattttttttgg

SEQ ID NO: 29581 - DNA, 964 bp, Heterodera glycines
agagaataaatttaaaaattccctgtagaatagaatggccattgctctccgcgcccctctgcccatgctgggaacatttgtatggtacaaaatttctcgcaaaaaagagatagccatttttctggcatagagaataaatttaaaaattccctgtagaatagaatggccattgctctccgcgcccctctgcccatgctgggaacatttgtatggtacaaaatttctcgcaaaaaagagatagccatttttctggcatagagaataaatttaaaaattccctgtagaatagaatggccattgctctccgcgcccctctgcccatgctgggaacatttgtatggtacaaaatttctcgcaaaaaagagatagccatttttctggcatagagaataaatttaaaaattccctgtagaatagaatggccattgctctccgcgcccctctgcccatgctgggaacatttgtatggtacaaaatttctcgcaaaaaagagatagccatttttctggcatagagaataaatttaaaaattccctgtagaatagaatggccattgctctctgcgcccctctgcccatgctgggaacatttgtatggtacaaaatttctcgcaaaaaagagatagccatttttctggcatagagaataaatttaaaaattccctgtagaatagaatggccattgctctccgcgcccctctgcccatgctgggaacatttgtatggtacaaaatttctcgcaaaaaagagatagccatttttctggcatagagaataaatttaaaaattccctgtagaatagaatggccattgctctccgcgcccctctgcccatgctgggaacatttgtatggtacaaaatttctcgcaaaaaagagatagccatttttctggcatagagaataaatttaaaaattccctgtagaatagaatggccattgctctccgcgcccctctgcccatgc

SEQ ID NO: 29582 - DNA, 1066 bp, Heterodera glycines
ttaaaaaataaacagaaaatcaattagaaaaatttcctaccttcattgtgatgagacttgcctttgtgctgaattcagagatttttaaaatgaatttttatttttcaattggtaaaaaataatttcatttaaggaaaattggcttatatttgccagatgaatcattaaatttttggtttggcactttcggtaaaaaccaatcagaaaatatttttgaattaaatatttccacgaatttttcaccattattgcttactttatgtttcttggaccgcttctgttcacatcattcatcatcaccaagttcgtggtatttggcggcattggcattcgttgtttcctatgtcattcccatttttaaactttggcattagtgatgacaattctatgccattttttaacttcccaatagtgccgttttgggttttttcaaaaatcggcatgcgtgccgacatttcgatgccactttgcaaatgccatggtgtcccgttttgtgccaatgcaagttctgtgccgttcccattttgatttatgccaaatgcgcccgttatcgaggccatcgccccaagtgtaccaaccacggcatttgaccaatatttttcaagtggccaaatgccacagtctcgactccttaaaagtcccgggctttttgggtcttggttttagtcactagagtatcaggaatttttcgatatcgagcatcactaaatattaaccaagctcccttatccccgtcgggataactcttgttggtgagcggggtccgtcagaatgacaagtcggggatgggtctaggacgtttctaaaatcggtattttaagcgaatttcgacgaaacattgcataacttttgctaagcgcatcaaattttcccggcagcgccaatcggcaacgcccggaagtgaaaattttgttaaaaaaaatgcatttaaattttcaaattttttcactgcggcgccctaccaacatcccccggccccctgttcccaaaaaacgtggcccaaaatttttttttttttttttttattggaaaaaatttttcaaaattgttgattttggattccaaa

SEQ ID NO: 29583 - DNA, 917 bp, Heterodera glycines
  unsure (1)..(917): unsure at all n locations
ttggtggattatttttgaaaatattattaaatctactaatttataaatgggacaaatatgggagcttaaaattatttttaataattactcttacgcgatttttccgtcttcaacgagaatgtccgcttggaacatttggtcatcatttaccacagtcccaccgaaaattaaaattttattagccataatttcaaaaaaaaacaataaaataatattcaaaatagctttaattatcaattaaatgaaataacatcaaataaatggtaatttaaaaaatatttccattaatttgtttataatttggccaatgggttaaaagttgtaaagtgtcaatttgggacaaaactaaaggagaggaaaagacagcagaagaagaacttcacaacaccaatcttctgaataaagtcgataaaacaaagacgaaaatgaaataaaagattgattttaaataaaaccaaattaaaaaagaatttttaaattgagaaaataaaaatgttattcgtaaaaaataaatagcaattaattagtggcaattatggaataaacaaacacatttcttatcagcagatgagataaccttttaatgggactatcatttgaaggaaaacatttaattttgctgtaaaatttcctttttcgatgtttgcaattgtggcttttcgtccttttcggcattccttcgtccccccccctccgccgccgcttttcccccgcttttcccatcttcgtctctttctacaacaattttgtgctttcgttgttgttccggtccttctgctttatttgcggtctgtgcagtgagccgcttgtggagctggtcgagtgcagcgaccggtgaaggtgtccgtccgcaaaagtggacagcgaaagtgccggcacttccatggccaaattgttgntgaacacactgctgcccg

SEQ ID NO: 29584 - DNA, 959 bp, Heterodera glycines
cctcccttttcattcactcatttttcttttatgagtgttttactatgttttttgtgaatttcataaacttcactgtttcaaaaagacatatttcttatcttaaccagtaaatacccaacccgaattccaaaaattatcgacatcgacctgaaagtttatcagagtttccctggcctatactaccaaatttgaacctaaatttatcaaatttttttttacaaaaactgcaatttccctatttttaaatttataattcatttcattatgtattgtttttatgttttttccttttttagaacagaactatttgcgtttatcatcatcatcatcccttcattgtgcaataacaacaacacttcaaaagcgacctcatcgccgtttctcatcgttcattcgtccgtccgtccttcacatcaattcgctcgccgttttcgcaatggcacgtcgacgcatccaaaaggtggcaaatgacaactctctgatcaaccaatgctttaaatgttttgatccatttgcaggaaatggcggagctgcatcaggaactggtcacgacgggttacaccgcggcaccgatggatgacggcagagacttgtaccattggaaggcctccatcaaaggaccgcccgagtcgccgtacgaaggaggcaccttccatttggacatcgttttccgtcgcgactacccattcactccgccaaatgtgaaattcgacacgatcatttaccatccgaacgttggagaaaggggcgacatttgtttggacattctgaagcagatgtgggcgccgtcgttgaccatttcgaaaggggaaagagcagacaaaacgccgacaaaatatcgacaagacaaaatggtccaattcaaaacgacagccaaaactgtactttttttggaagtgtgatatttttgtcgtttgaaaaatgggatttttcaatttcggaaatggcgttttaatcct

SEQ ID NO: 29585 - DNA, 743 bp, Heterodera glycines
ccgaaaccaaaaaatcgatttttcaagtgtccgttggggtctcaaaccattatgggaacaaaattccacgcggaattaagtacaggctatagggaacttattccggaaggttcggttctccccaataatctggggcgcatcggttcggggggacttcccccgaaacaaaaaaaatcgattttttcaagtgtccgttggggtactcaaacaattatggggagcaaaattccaacgcagaattaaagtacaggctatagggaagctattccggaaggattcggtctccccataaatctgggcgcatcggttcggggggactgccccgaaaacaaaaaaaatcgattttttcaagtgtccgtttggggtactcaaacaattatggggagcaaaaatccaacgcagaattaaagtacaggctatagggaagctattcccgaaggattcggtctccccataaatctgggcgcatcggttcggggggactgccccgaaaacaaaaaaatcgattttttcaagtgtccgtttggggtactcaaacaattatggggagcaaaaatccaacgcagaattaaagtacaggctatagggaagctattcccgaaggattcggtctccccataaatctgggcgcatcggttcggggggactgccccgaaaacaaaaaaatcgattttttcaagtgtccgtttggggtactcaaacaattatggggagcaaaaatccaacgcagaattaaagtacag

SEQ ID NO: 29586 - DNA, 1326 bp, Heterodera glycines
aaaaaagcgggacaaagagctggaacctaggtaaaacaacagtccacgcaagaagacaatttgttagaaaaagcaaaaaaggaaatagaccaaacagcacagaatgcagccctaaaagctgaatatattcgcacactagttgccaactcaaaacataatagaggcgttgcagaaggtaggcttaacacatattcaggtgtccctcaattcaacgaatggcttgaccaaattgttgaattagataagaagatagacgaattggcaaaaaaggtaggaaatgaaccgtcaaaggtaataaacgctaagcaacaatttgataaaccttatcgaatgaaaaatttgacagaagcgcgaaagctaatcgaagctgcaaaaaatgcgtttgaagttatactaaactattcactggaaataaaacagttgaataataaaatgcatgaattaaatgacaaattcactgttgcagtcaaagagaaggaagaagaagccaaagaaggtgcggcgattaatatacaacaagaaaagaagctagaaaaggaaattcctcaagtcttaaaggaactggagcgggaaaaaagtcagcatgatattaacaccactgctgagaacacggaaaccgaatttccctcctccgaatatgaaattgacgacagctctgagaagcagccggaacgaacggaacaacaggcagaggtatcatatgtattgaagaaaaaggaaggaaaattggaagaagaaaaaattgaaaccaaggatgataccaccattaatgaatttccaactacagaatatggaatagaagagagtgaaacggaggagacagagaaatggtcgccggatcaagctaaacaaaaaatattgaaaggaaacgaggagccgtttgagcagcccgatgaccaaaaagatgaagagacaattttggttatcggtaccgataaaaaaggagaagaatttccatctaaccaatatgagattgaagataattatccatcgtcatcatcatcatcatcatttattgcccaaaacgaagcatcggtaacgaccaaagatgaagaaggattgttaacggtccaaattaaaaaactaccaatgacaggggataatgagcaaaaaacaatacaaatggtaccatcagattttccttcatataatgacgatgatagcagagatactactgtcaatgaattgtcagaagaacagcttgcttatactgttcccgaagaagatatgccgaaatcggagccttatgatgtagatgagttcccagatctgcctgatcctcaaacgagtctgccaaggggagaggaggtgataaaaaaggagtaa

SEQ ID NO: 29587 - DNA, 869 bp, Heterodera glycines
cccccccccctgccccccccccccccctgttcaggtatggggggggggtgcgccggcgcaccccttgtacatgtatgtatatgttattgattgttttatttatttgtatttccaagcattttacaatgaatgacaaaaattcattcaaagaattcactcaaaaattttcatatttttattttttgagggaaaaaggaaaacgacggccggcaaatttttttttttatttaaacagatttaaattttattttcttacacttttcagttttttttaataattaaatttcccctaaaatttagcgcgtgttctgctggatttacaaggtgcttgccgatttggtcatgttactccatttctataatattaaatccgtttttcaaaaaaatagtagtcaattttctcgccgtatttcttttgtttttaaatggaaaagattggaatccaattaaaagcaaaatgtaattaattataaatttattcctggcctggattttcgtgtcaaatatgaaaaaaagatttgccacgaaaaatcgttgttttcgaacccttttgctttgattttttcaaacaaaatttcaaaaaaaggaaatccatataccatggttaaatgtctaggctttttttccaaaataccataccctcgagagattatattttctttttttttgtaaagcacgagggcaagcggatgaagcccgaactgcggtgccatgccgtgctctgtcgccgggcggacgagccccaacaaatgcaccaaacattgcgcagacatctccaatcggcactccaagtgagtaatcggaggggggggggggaatttattaaaaaactaaacattttccaaagtaagaaaaaatagtgaaattaa

SEQ ID NO: 29588 - DNA, 1344 bp, Heterodera glycines
cactattttcctttcttgatatggacaatcggtccctttcgatactattgatcaaattcattagcagccagcgccgctgattgacccgaaatgataatggcacaaatcaagagtccggatgatttttaatgttcttatgacacttcatcaagtgccagatttgaatggaaatgcaggagcgtactaagtcaatgcgttcttccatcaattagactcaatcagtgaggattgacctaacaaaaagcgtttaagcgcatttaaatcaaaatgctcgggtagagcagagcacgcatacatttctgcagttgtcaacaacccatttcggtatgaaaatatcagaaaggccattaagcagctactcgattctatagatgcgaagtcgactgatgactgggtttgcagaaggaacggcgatagcattgatgacttggcggaccgagtgtcatcattggtgtgaagagtttatccgggctcggtgaacatatgtattacgattattcgatttggcaccttatctaatcgctcaaaacagtcgttgggcgttggcatcgcccagttgtcacgcctggttatccctctctgctgtcaaatatccaccgcccctccccattcgataaatcctcattttctacttgtacaccgatcccaccgtcatcgccgtctgatccatgtccatccattccgcgtgcgtcgcccacactttgatatggtagcggtcgcactgtatctgctcgctgttgaacacaactttggtcggcctcgtccctttggtgaacgttttgaatttgtagtcactgtagtcttcagaaactgtccatttctccactgttttgccctcctcgtcaatttccagtatcgtatttttcattttatcttcatcacaaaacacgcggaagtggtaaaaaaggtcactcgtttccaacgcgggcccaatggtcagattgaaaaagttgccaaacataatccgcttgttcagcccgtcgtttggaatagcattttccagataaggagcaggcttaacaaatgtttaataaaaattttattttctgctgaacaaatttccccgaaaggttaaatattgaacatgttttacccatgtattcacgccatttcgtaaccgtgcatccattgcaattggcatttccgcattcattgcattttcgttgattgacatttccgtccagagcatccaaatgtacacgcgaaaataatcgcacactcttccagaacggaagttcagtgtgacactggccaagtcattcgcttgctcctccgcaaatgccgcttctccccccgcataaatctcctcactgtccccacaatgtccaagctctagagatcccc

SEQ ID NO: 29589 - DNA, 2035 bp, Heterodera glycines
  unsure (1)..(2035): unsure at all n locations
aatctcccggccgaaggccgggagcgccctgaaagtagtggatgggtcttacaactttttgaggcgcatctgggaaaaataagggttttccgctccggtggccaactgagtcccggcggctgatttctcacttttgcttgcgtttgatggcccataactttttttctaaaactctgatcaaaaaatgcttgctggtaggaaactaagttgaagtgttttctaattttcaaaaaaaattccaggcctctacctatacttggaagggctgcagaaattggcaacttttcagtaccaactttgcccagttcagtccccgttgaataactcattaggctttgacctgagcgcagggtggccagcagacttattgtagagctcggtgagctcgatttttccaaattttaaaatttcgaaaattttcaaaatttttcgagctaggcctaaaaaacggttttcgggtttttgaattttaggattttttaacgaattttcccagaaaaacgaagaccacttccaaaacatagtttttcgagctctatcgactggtatttttttcggaaaaatttcggttttttcccggaaatagaaaaattttttggcctcagcgggacatttgagtcccgggcccataacttgtcagggcttggatttagccaaaaatcgtcttagaacatttttgtagagaattttaagctctatcgaacggtgtgctatatgcccggaaaatttcaaaaattttcgagctaggccccctagaaattttcagaatttttttttgggttgaaaatgggggtgaaattttttttctgggttattttggggtgctgagtacgattatgatgtctattttaagtttcataatttttggaattttttaaaattcgaaaattttttaaatttttttggtccttggaaatttggattaaaatttgaaaattcataactcggtgatggtttcatcgatttaactataataaagccttaaaaatagcaaaaaatcgggagaattttatgggatttatttggttttataatgttcaaaagaaaaaaagttattccagaatttctggaaatttttgatttttcagaaaaaaattcataactcggttctgaaaagtcatactgtaaaagtaaaatactgcaaaaatccgcaatttcttgctctattatataaattttattttatatttttatcacatttttaaaaaaagatacaaaaataaaagtgattttgggattcgggaccaaagggggtggacaggatttttgagtgaaaaaattttttcgacaaaaatcttccaaaaacatgtctttaggggttatttgngccgctgatcacgaatacgtgatcagattttacttttgacatagtcaagacctcagaatccctgtgtgattggggattctgaggcatcattttgaggggggagggggcaggttcggatccggacggtgtacattaattttctaccatttattttctatttttcaatttttgttcatttaaaatatttttaattttattaataataaataaaaatttttcatttgaattaaattattttttggtgaaaattttattaaaaataatttttaaattttgaataaaaaattaaagaatatcatgtttcaatttacattgaatttgtaaaaaaataaaatttaaactgatgtacctcttctaattacccttctacctcttctaatcactgttgtacctcttccccgttgttgtacctcttctaatcacatttgtaccttttttaatcacagttgtacctcttctgatcactgttgtacctctcctaatcactattttacctcttctaccatttattgtacctcttataatccctgtaaggtcaacaaattttggaaaaacgggcgcgaagcgcccgactgaggccgcgaacggcataacaagctaaaaaacgggcacgaagcggccgactaaggctgagaagcgtcctaatttccctacaaagtttgaaaacggtcgcgaagcgcccgtcctgaggccgcgaagaggccgaat

SEQ ID NO: 29590 - DNA, 920 bp, Heterodera glycines
  unsure (1)..(920): unsure at all n locations
ttttcaaaatttgtcgaagatctgtctacctacaaaaacatgatgaattatagataggtatgtggtgctgaaaggtgccgttggcgggagaaaagtctgttttagtgaaatttgaacttttaaaacttatggggtaaagtgccgaaattgtcaaaatctataccaaaaaaaaaaatcagttagattgtcattgttttgttaattttttgtgaaaattctattatattagtgaaattgtaaaatccgttaaaaataatatataaatagtagtaaagtctaaattgttaaaataaattttaaaaaatcaaccaaattgtcatctctttgcgcattttgaaaaagtttatttaattgaaatttaataatgcttttaaaaataaagaaaataaggggaaatgtgtcaatttatagaaaaaaaatcagacaaaatgccattgctttgcgcttttttgaacgagcaattacttatccccccctcctcacaatggatgccacacagccacctacctactccaatttcacaaatattctcacacacgcaattcacattcattttgcacacaggcggcgacggcatttttgtgccgtgccatcgtcggtgcgtttggccggcgtggacggcacgcgcttaattttcgcgtaacggaattggcttttcgttccccccccccccccgcccggaggcgctgtgcgttgtgttgttagcgtgatatgtatgtatatgcttcacgggccacttggggggcttacatgtctcagcttttccttatcggcaccctcatccatgggttctgtgccattggacgagtgccgagaaggggggggggggggggcggacggcacttcaatttcgttggttttgtttttcaanaaagtatattgaaagtcgggggaaatgtgatgaaaagctaaaaagaatg

SEQ ID NO: 29591 - DNA, 1418 bp, Heterodera glycines
tttgcttcgtctagacagattttctctgcaatcctccggttgcttctctatgatgttcttgggtctcgataactcgtacagcgacgtccatccgaaggtttacctgcacatcgattcagttcgccacggcgcgggtcgaatggcttcacgtgttgcagaacgaagtgcagttgaacgtcaaaagcaccggcgattgtctgaatccgttggcactccgcatttcccccccccccccaatttcagacgtcgacgccctttacgctgcgttggacgcactgaaagtgcactttgacgacgcaaaagaggcgggcgaaacgatgagcggagcgacggtcactttggtgagcaatttgagcggattggacgacgagcgggaggtgatggacggagtgggtgacatcgcggccggcttcaaagcgttggactgcgatttgctaattgtgtgagtgaaagagtggggggggggggggtaggggggcggggacggcacattttataatggaaccgcaatttggcacaaatgccatgtccttcagtggccccgacctctcattggatgagtcccaactcacaaaggcgcagcgactcggccattccttcgccatgaaattgctggccaaaacgggcggaactgcgtacaattttcagtacgttctccacatagggccggcccccaattgacgaattcgtaattttttgcttcagcgaaggtctctcccatctgaagctgttcatcccaaagtccgtccacccccggggcacgcccttcgcttttgagttgggcaaggacttcgcagtcaaagtgcaaatgtacgtgaagaatgacgacaaaccggcacttccgctcaaattcaaccaggtggcatggcagaaaagtgccgagtctgaccaggcccaggaggtgaattgggcacaattggattaaaacagatatttccgctgatcagctgcaaaaagtgcgccgttatgagaccatttcggacgcctccgccgccgccaagaccatcagattcgaccaaatcgaccaggcgacggacgccgccatcgctgcttttaatcaagcggcgcccgccgcacttccgtccggtcgcttcgttgaaaaggaacaaatcacgcgggcgttccgttacggcaccacactggtgccgtttggcgaagaagtggccaaactggtggactacgaaagggagggcaagcagctgcaactgttgcaatttgtgcgcaaggaaaacgtcagttttggagaaaaaccgggaaatggcaaaacagtgaattaattgaacggtttacaaccacagattctgccccaattcatcatgagcagcagccgatacattttaccagcgcagggagacatggtaaggaaacggaaaggggggggggaacggtcgaatgacgagtcgaaaagggacctgcag

SEQ ID NO: 29592 - DNA, 1830 bp, Heterodera glycines
  unsure (1)..(1830): unsure at all n locations
ttttatatcatcttttagtagagttacactaggaaaattgagttaaaaattaaaaaaaatttttttaaggtggagtacaaaaatgactgttccgtgaatatttggagccattcctcattttgaatgccgactcggacacaatccttagcaaatgtagttattggcgaaaagtttgggtcataaaaaaattatgaaaaaaaggttttcttttttcgatttttgtgctccaaaatatttcaaaactaacattaaaacctaaatagcggtaactttcaatatatgtaattcaatacttaattgtttaatggttgtaaaaacatttttaattcaaaaacaaaatattggcttaaaacattggaagaaattcttatttaaaaaaattatggttgataaattcttaaataaaattttcataaaaactgaagaaattccattttaagcaaaaatagcatttacaaaaaaatcaaatccatacataaaatgtgtgaacgattaagtggtcaatctgacatcgataagtccgttaagtatcaattgggtttgcattcggccgtccggtcagggtcgttttcgcgccgccgttttcgctccaggtctgagaaaacatagatcgtaaatttttacaaagtaatgcctatttaggcgttggcccataagctttggcttgtttttgactggaaaatttaccacccaaaaatttgcaaaaaatgcactcgcgcgaaaacggaagcgtaaaaacaccctggggcgaaaatagcggcgcaaaaaccctggcccgcgtccgttacgtccctttgtaaaagagtttgtcttctggcattctaaataattggtagtagttatcaaaaaataaattatttaaattgatttataattaatttagaatcaaaatcgacacgcactttttaatttagtctgaatattaggagatgggtcctagaaaaagcaaataaggtccgagaactttaagggaaatcggggttgttatgccaacgtcaaaaagccggaacagagaccggtttttgaactagacataaaattcatcttttaaaataatagtgaatttttttcagacttactttgaaagttttgggaaaatgaaagggatattttcatcggctctcccgaaatggcactcgcacttagtggcaaatcttttgttgatttggtcgcaatacatttttgttgcttgagttatacagccccactcacgatgaaaagctgaaaattaaaaaggatatgggtaggaatagaacggagctattttagaataagttacaaacaaaattaaaattcgttaaaaacagcaataaaattttcattgttttctttcgaaaaattttgggtattattagttttattaaatacttacggttagtacaatttaaaaatgaacaatgtctctcgtggagatccgcattacaaaaaaccattgacagtgggtcctcaattcctgctgagttcattgacccacgtagacaaacgaccgcttaaaatgtggtaatagtgtactttgtccccaccacttttcgaaattttttgtttttaaaagtcatgcatttaagcaaatcggaaacgaatcaaggtcattatttttcggtaaaaggtcatttaattatttttagacacaaatctaaaactagtatatttgattttacgacttttggttcgaattcgagcttggaaatgccggactcggacccaaagaaccatggtatcatccgaaagcaaanacttaatgtagtcagcgaccccaaatttttgcatctttaaaaaaatgcactaaccctgcgtacgaggagtgatcaaaagagtaaacaacacatgcat

SEQ ID NO: 29593 - DNA, 1680 bp, Heterodera glycines
gatcagtgtacatgcattttgtcgaaatttgaaaatgttggctcttgggaaaagcttatttgcatttgatgatcaagccttaaatgtcgtgcaaaaatgtgtaatcaaaaataggcatctttccatttcttaccgtaatcctttgttccctttccgatcagacaggcaattgccatcatcggttgacgacggcgccattgccaaccgatcaacaccgccaagaacgacatcatcatcaacagcagcagaggaagcagcacagtggatcatccggggcttctggtacaaaatgctgcaaaacgaggcggccattttgaacggacgcattgacgccgcccgactcgtccaacagttcatcgacgcatatccactctgtcaaccgcacattgccgaatcacttttcccatttgccgcggcagttttcgccgaagtccaacagacgaaagccttgccgccatgtcccttcaaatagaaaagactaattagtttccgagattagcttctcctccatctactttatggcacatctctgtcccccattctctcctcattttgttaccaccgcaccacatcacgccccatttgccaatgttgaccaatcgtgccgtgccgtccccgttcctcgaccaatcaaaagatgttttcgtgccgtccccattcctctcgctctctctgccttcaaaaaacaaaaatttcaaaatatttttcaattgttgatcccttcccgccccctccaccacacctctcattatgatcctcaaccaccacaccacatccagtgcaaaagtgctgggaaatggattttcgcaaaaagcaaattatcttccatttttgccgttcaaagatgtgaaaatccgttttcttcaaagcatttccattttatatatgaatgatcttcaaaatacaaatcacagatatatttttgtttgtaatacatagtaccaaaagcttaatcagcattttcgcaaaaaaaaaatggaaattttcgaaaattctgttggctgattgtgcttttgcactgttactatttattacggccttccacatacatatgtattctcatgtgccatcaaaagacaaatcagaaaaaaatggaataaaatattttaaacccaaaaagaataaatatttttcaaactttggaacatttatttgaattaaggtcattataaagaataggcatttaatatttgcaaaaaatcgaaacaaaactgctcaaaaagtgaatttttcaagaaagtcacattctttatccatttcgcaagcacatgccaatcaaaagtatttcaatgctttttaaaatatttttctcgctctctaaaattgacttatttttcgggatttttggctaaaattcaaattttaccttaaaaagtaaaaaaaaaaaagtcatgaaaaaggtcagaaaaattgcaaaaaaagtcaccccaaaagtagaaaagtcaaaaaaaaaggtagaaaaaatgaaagaaaatttcgagctcgctcggattgaaaagaaaacttgtaaaaatgctgcttttgagcttctcatgcgataaaatatctgcaaaaaaatttccccaggatgaaaatcagaatttgagacgccctttgtcctgaattttgaaaaaaaacttgggaacattgttttaatattggatttgatttgatataccgtattttctctaatgatccccc

SEQ ID NO: 29594 - DNA, 979 bp, Heterodera glycines
  unsure (1)..(979): unsure at all n locations
aagagaagcatagaatgtcatttacggttactgatttactcattaaaaattccaaaagccgatttgacggatagaatttctaaaaattcaacaaaaggactaactattatttcttcccgtgtatccaacaagagaagcatagaatgtcatttacggttactgatttactcattaaaattccaaaagccgatttgacggatagaatttctaaaaattcaacaaaaggactaactattatttcttcccgtgtatccaacaagagaagcatagaatgtcatttacggttactgatttactcattaaaattccaaaagccgatttgacggatagaatttctaaaaattcaacaaaaggactaactattatttcttcccgtgtatccaacaagagaagcatagaatgtcatttacggttactgatttactcattaaaattccaaaagccgatttgacggataaaatttctaaaaattcaacaaaaggactaactattatttcttcccgtgtatccaacaagagaagcagagaatgtcatttacggttcctgatttactcattaaaattccaaaagccgatatgacggatagaatttctaaaaattcaacaaaaggactaactattatttcttcccgtgtatccaacaagagaagcatagaatgtcatttacggttcctgatttactcattaaaattccaaaagccgatttgacggatagaatttctaaaaattcaacaaaaggactaactattatttcttcccgtgtatccaacaagagaagcatagaatgtcatttacggttactgatttactcattanaattccaaaagccgatttgacggatagaatttctaaaaattcaacaaaaggactaactattatttcttccgtgtatccaacaagagaagcagagaatgtcatttacggttcctgatttactcattaaaattccaaagccgatatgacggatagaatttctaaaa

SEQ ID NO: 29595 - DNA, 1102 bp, Heterodera glycines
aaaaatttaaaaacgggcgcgaagcgcccgtcctgaggccgcgaaacggccggatccctaccacaaaattaaaaaacgggcgcgaagcgcccgtcctgaggccgcgaagcggccgaatatccccataaaatttaaaaacgggcgcgaagcgcccgtcctgaggccgcgaagcggctgaattagaccttagaatataaaagggcgcggagcaccctttgaggccgcgaagcggccgaattaaaccttaaatataaaaaaggcgcggatatggaagccgcgcatgcactagcaacgaagtcctttgcgcgaagcgctcatgtcagcgcccgcccatatataccaaaagtatactgtctacaccgagcaattactgtgcaaagcatactgtctacaccgagcaatcactgtgcaaagtatactgtctacaccgagcaactactgcgccacacgctagtttagatataactaaagaaacagatgaactcattgctaaaacaaaaatctcgggaaccgctggcgggagggactcgggagtgtggcattgcttaagcaactttttgaggcgcatccaggaaaactataggcattccggtccgagggccaactgagcgccagcggcgctgaaacggcttttttaaatttttttttgctgtttttgggattcaaaaattttttaaagtcctaaatgaaaaatcggcctcgataggaaatcaagttgggaggtttggcacaactttttgctcttcaccgacctcgtagggcctaccagtttttccgaaaaactgcgcaaaaattgcatacttttttggccatttcagcgccggcggaataactcgtcggggtttggagggaggaggtcggtgtaagcggcttttttgtacagctcgacgagctctatctaaccatgtttttggatttctgaaattttcagaaattttcgagctaggacccctcgaaaattttccgttttttaattttattattttttacagatttttccggggaatacggagaccactttcaagcaaccgtttttcatgctctatcgattggtggcattttcgagaaaaattttcaaagttttttttggaaatacaaaaat

SEQ ID NO: 29596 - DNA, 1718 bp, Heterodera glycines
  unsure (1)..(1718): unsure at all n locations
ccgcatgagttccattttgcttcgttgataaaacggagtccnacaaattatgtgncaaatttgacatgcctgagaaaaatgtatgtttaggggtggttatggaggctaaaattctaccaaaaatttcgcaaaaaaaatttccctagtcctgccgacccctgatgtataattactttattaattaccttgatggtatttttcggcctttgtcacctttatcttttcggcattgcctttaaaacacattaaaaataaaatagcaaaaaatatacgcatttttcaaaaacttctaaaaattctttaaaaaattgtaaaaaaggtaatataaaaatatttatgatttattaatattcacaacgaataaattaaggtaaatgcctaccaattctttcatgaatacagaaaattgaagctaatgtgccacgtgtaattgattttttccaatgaataaattttaaaaatatataaaattacgtgaattttttttaaatgaaactcagtgatttttttcgcaaaaattaaaccaaaacggttgagccaattaattaaatcaaacgaaaaaattaaatggcccgggtgttcagccttcaactttgataattgttcctttttttaataaagcactaatatcagggtagccagatctgaggatttatcctcattttgtggctttttgataggtcaatgaggattgttgaggttccatttgaattttaaattttttatgaatttttaattattcctattacccccgaggattggatttaattaaattctctgcttctgggatttttttccattaggtaactttatcttttgattgatctagtcaatttttgaactgaactatgaaaatgttagtaaaatttcctaggtggaaaattttttcaaaaaagaaacaaaaaaattatgcaaaagtggtgaatgcataaaaaaatttttcctcggatgaaaaattctgtgtaaaatttgtaaacatttgtattgttctaattgaacctgaaaatatatttatgcgtattggttttttaaaaaattttcgaaatcagagttttccgtttttttgcaaaattaattcataaatttttaaagaaagtgctcggtaaagcaaagttttactgaactgaactctttctataattaataaaaattcgcattaaattttatcggcttactccccggtacaggactagcctaacctgaaaatttcaacgcttattgggttaaaaaaaaaatttttttttaaattcagtgttttacatgaattaatgcttacatatatatagaaagaagtcaggggtgggacaactctcgcctcttgcctctcacctctcgttttttgggacgagaggcgagaggtgaaaatacaccactaaagattgaacttttgagcagtagaaaaatattcaaatttacgcgaaaaaacatgctaaatctctttttatgcttccttaatgtcttaaaatcaaggaatatatttttggatgatcctaaatttaagtgtggtctggtgtctaaaccttctgactttcattatttttcgcttgggttcaattccccaacggaacagaattttttttataatttttatattatttcaattgaaatttaattaataaaaatatttcaacttaaaaattattattttttttaacagtctaaaccgcaaatttaccaagactttgatcagcttttgacaaattctgttaacatatctc

SEQ ID NO: 29597 - DNA, 891 bp, Heterodera glycines
attcataattatttttttcagaaagtgctctgaaacccctttaattttatttacaagctattttaggcactctgatgctttttctatcaaaaagggagatgaataaatttttaaaaatttttaattcctttttaaacaggccaaaaagttttggcttaactttttttttcagaaactgatcagaagcgcaccaaactttgcagggaaactccccggtaaaggactaacttacactgaaatgagcgccgagctagctgggtttaaaaattttttcgaaaatcagagtctttcgtttttatttaattatttattattttttgcaaaattaattcataattattttttcagaaagtgctctgaaacgcaccaaattttatttacaagctattttaggcactctgatgctttttctatcaaaaagggagatgaataaattttaaaaaatttttaattcctctttaaacaggccaaaaagtttaggcttaactttttagtgaaaattaatttactcatttttcgagtagtgatcagaagtgcaccaggttttgcaggagcctaaaaaggtcaaggaaaggcgtctctgcgttgatttagcagtagtacctatgaatttaaatttcctatgaatttttaaaggttcacaatttatttattttttgcaaaattaattcataattattttttcaaaaagtgctcttaaacgcaccaaattctatttacatgttaaataaggctctctgatgctttttctatcaaaaaggaagatgaaaaaaattttttaaaatttttaattcctctttaacaggccaaaaagcttaggcttaactttttagtgaaaattaatatactcatttttcgagtagtgctcagaagcgcaccaggttttgcagg

SEQ ID NO: 29598 - DNA, 983 bp, Heterodera glycines
  unsure (1)..(983): unsure at all n locations
gggggcaaacgaaataaatattaggcaaaacaatttcaaagaaaagccatgaaaaggaagcagaaagggggaaggcgccctctttgatgaagccgtttcaaattgcattttaatacgaaagggggagaaaaggtgaaacaatggatgggggggggaaaggcagaaaaatgggataagtgttggaagtaaaaaagagaaaaagtcgagaattggccaagtggaaaagggaagggagggattagagagacggggaaaaagggggaataaaccaacggtgagggcgagggcaaattcggattgaagcggaagagaataaacgacgcactggcagttgctttgcctcgagacaaatgaaatgaaggaaaggacaaagttggggggagtgaaaggcggggcgacatgcgccagagattagacccgaaaatttgccggaaaatactaaactacagtgtcttggtcatatttttaagaatcattagatattagcattccgagactgtatcgtgtaaaaacctctagatgtgtccaaaaactaaaagattacaaaaatttttttgtttcgtgaacccaccgggaagaaagaaagggggtgggggaggagtgactctcatccaacattattcttcatcccttcacgacggggaaggggggggagaccccacccctaataacccgaattcgaatgtcgtgataatttgtccccgccctccatcggcccttcctcctccgttaatttgtccgcttttcctctccaaatttattttttctggcaaaagtacgtaatttgttttgtcttaaagtaaatcaacagatgtttaaatttcgttcggttattttactttcattttatcgatctttttctttaataattggaaatttgccttcgttgttcaagaaaaataacgaacaanaattgcatgtgaatgaaatgccacggacggtccattaatgcacgaatatttgtccatttcattgccatttcc

SEQ ID NO: 29599 - DNA, 1019 bp, Heterodera glycines
caccaagacatttagttgattagccaattaagaaataagtaaatttctaaccaaaaataacttacgattcgtcccaatgaaagcacagtgacacaaacggagtacaggtcgcgagcctcgaacaagtcgacactctgaaaaggtgcaattaaccagtgaatgccaaatttaaatatccaatgaatggcacctgaaaagtttcctccgttggcactccttgggccttggcaaatgacacaaaagcgttgatgttctaaaggggagttattcgtcttctgatgcttctccctcctttctccactcacttccatacaggcgaaattgccggtcggttgttgaattttcttgaccgatccgggctgaatgccgttggccaatctgatcagataggcaggctttcgcattagtaaaatccctctaaatgtcactaacttgcacaacaaagtgccatccttcaacaatttatagaaattctcacggctctgaaaagattcgtttcaaatttggattttgccatatccaattaattcgtcaccccatccgtgctgaagttttcaccacttagctttttgacccagtccaggatcagcttgccctcttggtcattgaatttgctggcttgctaaatgttaatgaactcaatccgttagtgaacattttctgtgtttgaacctttgccaccacttggaagccaatgccaccgggggtcgcgcgagaagacattttgggagagggaacaaagggaaaactgaaaatggaaagaaatgaaaggatgaaatgaggtgattgaaatgaagggggagggggaagaaagagtgattgaatttcagcaaacatcggaaaagggggggggacaaatgctttgagaaaacaattagcttcaaaggaccatcggagggaaaggaaatgagtgagcatttggccatggacaattaattgaggaggcgagaaaaggcggaatgagttgagcacaagcagagcagaagaagaagagcagcagaagcatgagaaagatgaaa

SEQ ID NO: 29600 - DNA, 787 bp, Heterodera glycines
ttattcatcattcatttaagcaaaaataataataatttttttttttttttgttatttttttagcaaaaaagaaaactgaagtgcaaaagtgccaaaaactgtcttataatttgccctcaacaaaatgtcagaccgcagaaaagaagctgaggaaaaaatgggaaaagcaatgtaaaattaaaaatgccaattttcaatttcacttttaaatttaattttaaatccaattttaaattttgttttccttttttttcagttttatctccgccgattgttggctcaaagtgttcgatttgctgccaccttcacaacttggcctcggaattgcgctgatcagccgacgatttgacttttacatggacgaacacttcaaaactcgccgctgggcattgaaatcaattcaaattcaaagaaaaattggaaagaatggcaccaaggaaatggaaattgccaattacgacggaaaaccaatgccaactccgcaaattcaattgccacgcaaagtcagcggattcgaacggatcaacatcacgtaaaattgggtttatatataaaaatatttgacaaggaaaggacgaaggacacaagtatcaatggtcgaatatttaaatttaattattattttttaattttatttaaaatctaagtttgttaaatgcatgaaaattgctcaaaattcaattaattcataacattctttatatgattcgatagcccaaagatttctctgttattctgttaaattcaaaaaattttgtagagttttttaaaaattagggtcaaaatt

SEQ ID NO: 29601 - DNA, 1215 bp, Heterodera glycines
ccctccacaaaattatgaatgcgtcctcgcgatgcctgtagaccaaaatcccttatcacatccataaattcatttcaaaaccgcgcatgcactagcaacgaagtcctttgcgcgaagcgctcatgtcagcgcccgcccatatataccaaaagcatactgtctacaccgagcaactactgcgccacacgctagtttatatatatatagagaaaaagggggtttcgtcttaaaaactaatttgagtcgaacggctgtcgggaggggtctgaaagtggtggaagggtcttacaactttttgaggcgcatctgggaaaactataggttttccgctccggtggccaactgagtcccggcggctaatttctcacttttgcttgcgtttgaaggcccgtaactttttttctaaaactctgatcaaaaaatgcttgctggtaggaaactaagttgaagtgttttctaattttaaaaaaaaattccaggcctctacctatacttggaagagctgcagaaattggcaacttttcagtaccaactttttccagttcagtccccgttgaataactcattaggctttgacctgagcgcagggtggccagcagacttattgtagagctttggaagctcgattttctgaaatttaaaaatttcgaaaattttaaaaatttttcgagctaggcctaaaaaacggttttttggtttttgaattttaagaatttttaacgatttttcccagaaaaacgaagaccacttccaaaacatagtttttcgagctctatcgactggtatttttttcagaaaaatttcgattttttcccggaaatagaaaaaaattttggcctgagcgggacatttgagtcccgggcccataactcgtcaggagttggttttagccaaaaatgacctcagagcaaaattgtagagctttttaagctctatcgaatggtgtactacatgtttggaaattttcaaaaattttcgagctaggccccctagaaattttcgaaaattttttttgggttgaaaatgggggtcaaaaatatttttctggggtaaaataaggtgctgagtacgaatatgatgtctattttaagtttcataatttttggaattttttaaaaattctttattttttggcaattttttggccctcgggattttggcctaatatttgaaaattcataacaaatcgaagggttgatcaaattttaaggaata

SEQ ID NO: 29602 - DNA, 839 bp, Heterodera glycines
aattattcaaatttatatttttcaataaaataataaatgattggtagatttttgtaatttaattttttatatgaggtttttccaaaaaattttattcacccacagagatgtatcatgccgtttaattacgatacacaattatacttatatacatattaaattcaatgtaattattagctcaagattcgaaaaagtactttttctgctatatcttattatatttgataattttatttaaatttagtaggctaatagaaatacattttcttttcattagagctctaacatagtgcaaataatcaaaaaaatgatcgatcaaattaatatataaatggagaccgttaaaaataaaattaaataaaaaattaaaataaaattgtaatatttcacagctgattaaatattaaagtaaatgtgtcatattaacaaaggaaccaaaatttccaaaaaattaaagtttttgatccaaaaatctgatctttttttggcttgaatctatggttacgaaggttttttgatacaccctggttatgctctatctatttaccccgtttaagaaatttctactaatgacatgaaataaaattctgaagaaataacgacaaaaaatattcaatgctaaataattaattataatatatgtaattttaattaatttctaaatcaacaaatataattaatattaaagtttaattgctaatatgattcataaaacaaataaattatttgtatttttatagaaatgaatatgaaataaaatgaaaaaataattgtaacaattaaaaaatttaaaacaaataaaaaatcacccaagagtatcgcctagatattgaactcta

SEQ ID NO: 29603 - DNA, 1030 bp, Heterodera glycines
  unsure (1)..(1030): unsure at all n locations
actttataatttttggagagcgttgctatttctactancaatcaaaatataggctcaaatcatttaaaatttgaccatatgtatattcttatacatataaaacaaaatttccatttccaatgatcgcttcagcagcaaagaaatttgtacagattgggcaattcattcgcatcaatcaaagagcaaaacctaagaggggatgtttggttttggtgctcctttgtctttttgatcacattttgctcggtcggaggaagtcgctttcttcgcagttggcctttgacttcttccgccggtcgtttcccctcggtggccacggcattctccgccgttttttctccctactatttttgctgttgtctccgttctccttccttttctttccagcagaggtcgactcccaatttgcagaggtcgcactgacaaaacgaaataattatcccattaattcgaatatttcggtttaaaacaaagaagcattttcaatttattattgaaaagtaattttcaagtctaagaaaaagtagtatttgatttatgcattgccgtacttaaatcctctccccatgcattttgtgcacttataaattgcgcagatcttacggtaatcacttggcgaagcgtctttgacagtaccaatcaaattctgtgggtttcaattttgaaaatagttatcaggcattcatgagtaaacagttgcctggtatcttttgtccatagtctccattgttgtcaaaccgttcctccgcgcaccggactccttaccgtaatgcattacgctgaggtagtcgtacggtacgttgtacgttgtactctcatattggccaattttgcgaaactgagcgtggaaatctgaaagaaaatgtgctggttttatttatttttgctgctttgacctggcggaatgttctcaaagtgcactttgatgtgatcgtcgcggtcgaagcgcatgtgctcatgccaaaggccgactttgtgcagcaattcgtggacaattgtcgcgtgtttgacacagccggngaacgctgaa

SEQ ID NO: 29604 - DNA, 901 bp, Heterodera glycines
ccatgcgaatgtctggttgaagtggttccaaagagcgtaagcatccatctgcccatagcgacgtacgttcaacctcttcgaagaagccatagctaaaggaagcagaaaattagttcccccaggcctcgtccaattccaaactcacgctcggttcatgttgctgcactcgtggttcccgcgcagaaggatgacactgtccggatatttcaccttaaaaagtggacaattaaaacgattctcgctcaacccgcctcagcaaactcactttgtagcagaagagcaggaccattgtttccaggctttgcgtgccgcggtcgacgtaatccccgaggaagaggtgcttcttgtccggcggaaagcccatcgtcgtgaagattctcagcaagtcgcgaaattggccatggatgtcgccgcaaaggacgacaggaggctgcagacggatgagcattgactgttgctggagaacactgacggtgatatcgcaaagcttgtgaatgtcctgagcactgacctgaagagagttgaaatgaaagaacggataaaatgaacgcatcacttacttcggaagtgaactgctcgaaagtcgtgcgcgaaagtttggcgatgagcgtgtccacaaggctgttcggttgctcgtccactggtcggaagtttgtttgggcccagctctgtgcaacagcagtcgaagcagagaagcagtattcctcgttcatcgtacgcgtcgtgtcgtagtcggtcgaacgtcgttgaggaaaatgtgtgtgtgtcgttggccagcaaaaggcagaatgacgaaaatgaatattagtgagggattggaggagatttgttgcttttatattctttttttgggaatgaatttctttttggaaatttagccatataaaaggcgttgaatttt

SEQ ID NO: 29605 - DNA, 532 bp, Heterodera glycines
tttcaaattttatgatgaactagtaagtttttccaaaaaatcgcagaaaaacttttttttcaaaattttttgaaaaatttctaggtttgaaaatttttaaataaaattttttcggggggaaatgacggttggggaaatgaagtgcactctttccgacccgttcgccgtccgaccccgccggcggtgtgatggatgatgatgacccaatccaccccctcctcctccctttataacgcgaatagttctgctgcggccacaattcttcgtccattcattcctcagacatttgcccgttcatcccctcttttcataactcacaaatcaataaaataaccgttactttgctttaaagcaactaaatactaatgctatatgattatattagcaattaaaaattcagttgctttaaagcaaagttacaagcattttttttatttttgtcaattttaacctgaatatataattccaggcttttttaaggcctcccaaatcaatttttatttttatatagcaattcacagtttttaattaa

SEQ ID NO: 29606 - DNA, 1103 bp, Heterodera glycines
ggggggagggggggggggggggaaagaggattttttttttttgggggggttttttttttttttttttttcccaaaaaaagtttttttttttttttggggaaattttttccccaaaaaaattttcccaaagggggggggggggggggagaaaaagccttttttttttcggggggattttttatttttttttttatcgaaaaaaaatttttttttttttttgggaaaaaattttttcccaaaaaaatttttcccaattggggagggggggcggggaaaaaaatgcccctttttttttcccagggaatttttaaattttttttttttttccccaaaaaatggtttattttttttttgagaaaaattttttaaccatacaaaatttggaaaatttttgctatttagtggaggactgcagcaaaggtctctcaaagggttttgtgggctgtataatccgattttaacctctattcaacccaaaattccaacataaaccaaaaatcctttttcagaaaattaatttgagtaaaaaatggagaaaacaacgctttcgaatccatattaattgtaagtattttaatttgattggctacatatgaaaaaaaatcgtataacggcttacaatacagtaataaatggactagtacaaaccgtaatttattattctaaaaaaactaaaaatgttgatcttgtgtcaaaacccataaaaatcatccgtccagaaagaatcgttcgtagttcagtcggttatatttcatttcacggtatggaaaggaaatgatttttgttggtcgattcattaggtttgattgataaagaacactgagcaccgcaacagttatttgtggagaacggaattaaaaaaaaaagaaacccggactcggacaaggaccctggttacagaccggactagggctctggaaaaatcctgtacagtacccggtggtaaagactaaaacttaccaattcgtgcaaaagattcccctgtaaattttaaattttgaattatatttagaattggcattttatagatcgattaattttggtatttttcacatactaatcttagaaggtgaagaatgcatttgcttcgtgtttcatagaaa

SEQ ID NO: 29607 - DNA, 390 bp, Heterodera glycines
cgggagcctagggaagaaaaattaatttaattgagataggtatcccctcattcattcagttgctttttatgcacttatttcacttcgcctaaatatttgttctcctccaatttatttattccgcttccgacttcgcctatttatttaaattgtttaatttatttgttctacaaataaacattttattgagtcggttcaaagaccgaacaattggcgacgcctctcttcgactcaagccgggttggctgagcatcatcgtctaaagccgagtcggcaatcaacaattttgaaattctaaagccgagttggctgtcatcgaatttcataagccgagtcggccatcatccaattttgaaattctaaagccgagttggctgtcatcgaatttca

SEQ ID NO: 29608 - DNA, 1720 bp, Heterodera glycines
gacaaggaaaagcactgcgatgatgctaactccagtaattctgaattaaacatatgctagtaattttaaacgcttctctattttatttttttagcaaaattaattcataaatattttttcacaaactgctctgaaacgcaccaaattttatttacaagttattttaggcactcagatgctttcactatcaaaaagggagatgaataaaaatctaaaaatttttaattgctttttaaatatgcgaaaaattttaggcttaactttttttttataaactgatcagaagcgaaccagattttgcgagagcatcaaaaagacaaggaaaagcactgctatgatgctaactccagtaattctgaatttaaaattttttattaatttttaaagcttcactattttatttttttagcaaaattaattcataaatattttttcagaaactgctctgaaacgcaccaaatgttaatttaaagttaaataaggctctctgatgctttttctatcaaaagggagatgaataaaatttttaaaaatttttaattcctttttaaacaggccaaaaagtttaggcttatattttaaaaagtttcatcgaacctagcgcactaacatcgatataatctctccaaattttgcaggccttctccattgtaaaggactaacttaacctgaaaaaatggccaacgcttgttgtttttaaaatttttcgaaattctgactttttcattaattatttattttttgcaaaattaattcataagtattttttcagaaagtgctctgaaacacacaaaactttatttacaggttagtttaggcactctgatgctttttctatcaaaaagggagatgaataaaatttttaattcctttttaacaggccaaaaagtttaggcttaacttttttttcagaaactgatcagaagcgcaccaaactttgcagggatactgaaaggaagagaaataacctattttaaatattatctagtcagttcatttaaataatttttatccaaaaaatttttttttgggttttcggggcagtccccctgaaccgatgcgcccagatttatggggagaccgaatccttccggaatagcttcactatagcctgtactttaattctgcgttggatttttgctccccataattgtttgagtaccccaaacggacacttgaaaaaatcgatttatttttgttttcggggcagtccccccgaaccgatgcgcccagatttatggggagaccgaatccttcgggaatagcttccctatagcctgtactttaattctgcgttggatttttgctccccataattgtttgagtaccccaaacggacacttgaaaaaatcgatttttttgttttcggggcagtccccccgaaccgatgcgcccagatttatggggagaccgaatccttcgggaatagcttccctatagcctgtactttaattctgcgttggatttttgctccccataattgtttgagtaccccaaacggacacttgaaaaaatcgatttttttgttttcggggcagtccccccgagccgatgcgcccagatttatggggagaccgaatccttccggaatagcttccctatagcctgtactttaattctgcgttggatttttgctctccataattgtttgagtaccccaaacggacacttgaaaaaatcgatttttttgttttcggggcagtccccccgaaccgatgcg

SEQ ID NO: 29609 - DNA, 992 bp, Heterodera glycines
taaatttgataatttttaccggaataaataatcataaaaatttgacgattaaaatcaaatataataatattaataaaaaattatttaaattattaaacgactagccatattaaatataattagtttagaaaaattattttgaataaaacaaaatcttttatataaattaatttatatttattttgcttaataaaattgcttttgctttgctttattgctgtggcttgtgtgtctacggataagggcctaaacacacggaataattattttattaagttttaataaaaagaggacaccgtactgaagaggcccagtctctttttattaatttttgcacttttcgcgaaacgcccatttttgcacttttcgcgaaacgcccatttttgcacttttcgcgaaacgcccattttgcacttttcgcgagaaaggggacacacccatcgcctgcgtaaaattggggaccttcgtatgaaatttggtcctgctgacgggtgccggcgggtcgttactcaaaaaccatcaaaataaaaaaatttttgacagattaacgaattttttgtttgtttgtaagtttgcagtataatagaaaacaattttatatttgttcctcaatttacaggtgcgatttatccgacaatgttcttcactggcaccgaccgactgtttgtcataatttttgatgaaatgtaagaaaaaattttatttataattgctcatttaaatttttaattagcgcttttttaggaaagacaaacgcaaaatcctactgtatttgactacgataacaattgtttgttttgcttgctcattggatttgtgttttgtgttctaccaaaatatgttttgtttggtgatcagatgatcaccggttcaattggcgattttttcaaggcatttttcatgaatttttcacgagccaaaattttcaaaaaataaaaagaatgatttttcggcgagaatgcactttatgagtccaatcgagttttatgagt

SEQ ID NO: 29610 - DNA, 1004 bp, Heterodera glycines
aggagcgtttttactgttttctgagagcgcctgaaagcagctttcgaatggtatagctgatttttttggatctggaattttcgcagagatatatgcaaattagtaaccagtgtttcgtttcaaattatttctcgtattctaacgaaataattttttactatgagtgtttggtttggaaactgtctaaaatgttccgggtcgcccacattgcacaattttcttgaaaataccatgaaaaatgctctaactccaagagacttagttgagcgcactgcaaggagaaccctaacacagttcagcacaaaaaaattaactattcacgcttgagaacgcgaagtttgctgcggagaatggcaattatatgcagaaagtcaagtgcatatatctcagcgcctagtgcatgaataggagcgtttttactgttttctgagagcgcctgaaagcagctttcgaatggtatagctgatttttttggatctggaattttcgcagagatatatgcaaattagtaaccagtgtttcgtttcaaattatttctcgtattctaacgaaataattttttactatgagtgtttggtttggaaactgtctaaaatgttccgggtcgcccacattgcacaattttcttgaaaataccatgaaaaatgctctaactccaagagacttagttgagcgcactgcaaggagaaccctaacacagttcagcacaaaaaaattaactattcacgcttgagaacgcgaagtttgctgcggagaatggcaattatatgcagaaagtcaagtgcatatatctcagcgcctagtgcatgaataggagcgtttttactgttttctgagagcgcctgaaagcagctttcgaatggtatagctgatttttttggatctggaattttcgcagagatatatgcaaattagtaaccagtgtttcgtttcaaattatttctcgtattctaacggaataattttttactatgaagtgtttggtttggaaactgtctaaaatg

SEQ ID NO: 29611 - DNA, 674 bp, Heterodera glycines
aatgttttgcttcagatcggtccgcagagggaggaagttggagcagtccacccatcaagcagcagtccatcggcctccaaaaagaacaaagagacgagcggaaattccaaaatcgcattgccacccccaaaattggccataatcgttgaggccaccgaaacattggacattaccatcaccaaatcattcctccaacagcttatccaactctctgaagtatgttatttgtactttctattccttttttcttttaggccttcgaaaacgcttccaaacatatcagtacccctcggcgtgaattgcccggcacttcctcccatttattgcgcaatgacactgggctttgcgtcagtgtgagcagcagcaccaaatcggtgaaggtaaatggtggcctgcctaaagtagcgattttgtcattgcctcctcccccttcgatggttgtccattttagtgttgcgccggccaatacgtaccgatggattgcgtcgcttcgtcggcggaatcgagtcgcgagattaaatggcaaatgaaagaggaccaacgcaaaattcagcttcaattggcattttccgacccggacacggaacgaacggtgaacatcacacggacggcgaaacaatacgtccatttgccacgaagggcggattcgggtacgaatttgtacaaaattggaa

SEQ ID NO: 29612 - DNA, 651 bp, Heterodera glycines
  unsure (1)..(651): unsure at all n locations
ataaatcagagcttcgatctcaaaatactgaaaatccacatttcagccataaaaaatcctcatttgccattaaaatacctcaaaaaaatcctcatttggcatgaaaaatcctcattttttaaaacatcataaaattgctaacaaaatcagttaactgccatatttttcgtttgaaaccatcacggcgcctatcagcgccgccggaccccaataattcctattttttcttaaaaaattagcccaaaataacaaaattggtaatttttggtaaaaatcttaactaatcttatttaaaacctccaaaaaaaattttaaaagaaaatcaatttatattcttttaataaattgacaaatctcttaatttttttttgcttttaaattgtttttttttgttttgtcaaaaaatgattttgaccccctctattgaattcccgattattttttttgtataaaattggaaattaattaaatttattgcaaaatgaggatttttcgaaaaaatgtttaagatttgaagaaaaaagtcgaacattttgccaatatacctaatttttcaaaaaatcatgcgtttttgtcattttttaatcaaaggaccacaaaaatcctaaaatttctcaaaaggncacaaaaatccgcaaatcctcattttcc

SEQ ID NO: 29613 - DNA, 1332 bp, Heterodera glycines
  unsure (1)..(1332): unsure at all n locations
tttagaacctatttttaggagggttcaaaactcgaaaaattgagagatttgacacttctaacttttttaaaacgatcgaatcttgataaatttggtatcatccgaaagctcttgacgagctgtctaaaaattttttggtacggagatggtccaaatgccttagtaaggaattggctggtagggaattggcggtagggaattggctcgatcccattttactcatctatagatagacatttttcgcattatttctattcatgttcatttcataattttcagattttgaaagtcagcaaaacatgtcgggaacaagaggaaaaacaggaagatacagcgggtcgggacgagccacatcctcaagagtgagtctcggaataacactaaaattggatttgaagaatactgtancataccagggacaacctcgtttgggcgccagcccagtttttggactataactttttttctttgtcaatcatagtccctaaggcatttggtcaccactcccggggtcatacctcttgcacaaaaagctttcagtcaaaatcaaaaaattctttcggaatggtggcttttcaactgccaggccagggtttggaatgacaaaaataaatttgttaaggaccaaccccccctaaagtgtattggccaaaggcctttcaaccccccccccccccctttttgttttcccccaaaaacccccccattttttttggttttccccccaaaccccccccccccctttttttcccccccccccccccctttttttttttctttttttagggtttttttcacaaaaaaaaaaaagggtttaacccccccgttggttttgaaaaaccccccccccccccctctcaaacccaaaaaaggggggcccgaaaaaaaaaaaaaaaattttttataacaaggggggggggaccccccccccccccccaaaaaaaaaattttctcgggggggggggggaaaaaaaatttttttctttttttttttttttttatttttttttgggcgcccccccccccccgcccccgcccccacacaaaaaaaaaaaaaaaaatttttttttttttttttttaaataaaaaaaaaaaaaaaaaaattttttttttttttttttttttttttttttttttttttttttaaaaaatattcttttttttttttcccccccccccccccccccccggggaggttttttgtggcggcggccaaaataatttttttttttttttttttttttttcccaccaaaaaaaaaaaaaaaccccccccccccccatttttttttattttttttaaaaaaaaaaaatttttttttttttttttttt

SEQ ID NO: 29614 - DNA, 2492 bp, Heterodera glycines
  unsure (1)..(2492): unsure at all n locations
atcttttttatatctaaccgaaatctaaagattaaaaaaacttaatttaccatattgttaatccttctgtattatttggcattataatattaattgaaaacaggtctgcgttctctgtatgggcaggaaaaaatgctgcacaacgcctaagatatacgtagaaatcggttattcctgaaacaggaattccgaatccttgcggcgggtccaaaatttgatgttctagtaccgcccctaacggcgccttccagtttttatcaatatgtttcggctcttgttcttgagcatatatngaaactgtttccgaatttgcatntttcagttgattccagaattcgcttaaagntnngaacgntaatttctcattnnnatatacncnnattttttgaaatttcgcanccatatgccctgcccactccccgccgaactgatncaggaatagntgatgctcttccccctcaaaaacccatcggctcctgctcgaaaattttgttttggatccctttgtaaatgccgttctataccctgaaggaaaaaatggttccgaccaacccttttttaaatgccaatggccccaaaaaaaggaattttttatttttccaagtttttttttcccccccccccccccaaaaattaaacccaaaaaccttggaaaaaaaaaaaatttttttttttttttaaaggaaaaaggggtttaaaacattttttttaggggcaaagggggtttttttttaaaaaaaatttttttgtaaaaaaaaaaaaaaaaccccccgcgggcggaaaaaaaaaatttgttggaaaaaattttttttttaaaaaaaaaaaatttttttttggggaggactaaaaaaaaaaaaaaaaaaaaaagtgcgtttttttttctcccaaaaaaaaggactaaaaaaaaagaaaaacatctttataaaaaaaaaaaagcttttcttctcctccccaagagagagggggtggagaagaaaaactttcttaaaaaaaaaaaaaaaaacccccgggcggggggggtttttttctttctcctcccagaagagagggggggggggccccttttttttatttttgtgggggggcgcgcctttcttttttttttctccccccccccaccccccccgtttgtttttatttaaaaaaaaaaaaaaaaagggtgggtgtgtttgtaaaaaaaaaaaaaaaaaaaaaaaaagaaaaaaaaaagaagggaggggggggggcgccccccccccccccccccccccccccccccccccccgcgggcgggggggggggggtgttttttttttttttttttttttttttttttttttttttttttttttctatcaaatacagacaggggggggggggggggggggggggtgtttttgtttttttttttttttttttttatttattttattttttttttttttttttatttattatcaccccacggggcggggggggggggcggggcggccccttttttttttttttttgttatttttttttttttcaacaaaacaaattttttttttttttattaatatcacaaaaaaccacggggggggggagggggggggggggcccttttttttttttttgggggttttttttttttatttttcacaaaaaaattttttttttttttttattttatacaaaaaaaaatttggggagggggggggggggggcacttttttttttttggggggattttttttttttttctcccaaaaaaattttttttttttttgaaaatttttccctaaaaaagtttggggaagaagggggggggggcccaatcccttttttttttggggggttttttattttgggttttccccaaaaaagggtttttttttttttgaaaatttttaaccccacaaaaactttgggccaagaaggggggggggggccaatatcctttttttttgggggatttttaaatttttttttttttcaaaaaaagggttttttttttttgaaaaattttatccccatcaaatgctttgagccagatagggagggccgtgcccaattggatttttatttttgagggattttttaattttatatttttcccaagaaaaatggctattctttttttgagaaattttatacccacaaaagcgctttgcgtatgagacgaaaggctgtgcacaatcgccatttantttcacagaggattttnatatttagagttatcccagaaaaaatgctatctctttttttgataattttatacacatacaaatgctctcgagcatgatagggaggcggtgcgcaatagaccttttattctcgagggaatttttatatttatactctatcncagaaaaatggctatctctttttntgataaattttatacacatacaaatgctctcgagcatgatagggagggcggtgcgcaatttaccttttatttttgagggaatttttaaatttatactctatcccagaaaaatggctatctctttttttgagaaattttatac

SEQ ID NO: 29615 - DNA, 1143 bp, Heterodera glycines
aaaatggtaaaaaatttaaaacatcattttaattatttaaaaatgtaaaaaaatttaaatattatttaaaatatttaaaaaataggaaaaacagaaaattttttaattatggaaaaatagtaaaattatattttattatttaaaaattggaaaaaatttaaaaaatatgaaaaacagaaatttttttaattatttaaaaaaattttttaaatggtaaaaaatttaaacttttttattcgatttaactttattttcaattaataattttttcacattttttgagctttttgtattattttaccgccatttaaacgaataatttcttcatttccattgaaatagggaaggcaacttttttgtcgtatttccataattaattcgatggtcgttttgttgccaaattcttcccactttttgtgcacccatttgggctgaggcaaattgtgaattatcttaaagaattaatcgttttaaaattttaattgattaaaatatttccattaaattgttttctattttattttttgtttttgttggtcaataatttgtccattaatttctcaggcgacggaatggcatttgcattttggcattttgccaagagttcgcttttacttcgggctttatgtgacgaagtgccaccagttgaaccatttttattggcttttcctttgaaatgttcaggtggggacggacaaagtccaccaacgggcgatatttgtccaacaaatgggcataatctcatcagcaacaatttggcgaagatgcttataacgcgcgcacggaaaaccggacggatttagcaactgaaaaatataaaataaaatcttttttaaaggataacccaattaatttccgtgcgtaggccgtgccatgtattaaaaatgctcccaatttccaaattaaacaaaaaaatttaacatattaaatgaacaaagcaattttaatttattggtatgtccgtcccatttcttcaaactctgtctcaccggtgcagtgacaaaggacccacggacaaaggacccacaaagacaaaggacttacaaaaaaataataataataatgcaatttctttatagatttacaccaaaaaggatctttttccggattttaagaatttttgagaaaaaaaaaagtattgag

SEQ ID NO: 29616 - DNA, 1001 bp, Heterodera glycines
cctgagcgcacgtgcacagcaatgtctgcaaaacgacgttgtcatgacaacgcatacaaaaggtaacccgttcatttttgtacaaaaggcaacgtgtacaattgcttggttattaggattatgtttaggcgtaagctttaagctatacctaggcttagcttgcttgggcctaggcttaggcttatgcgtaggctttttgtaaaatatgagttgacttttgtacgaggtgccattgaccccaaatatacgatggaatggaacttattttattagcctttgtcagggatgcgattggttaaattattaataatattatggatgggttttacaaattgaaatagggggaaaagattcacttaagcgctgatgtcgaaattttgaaaattttagcgtgattttaagagattttgcaatttcggcataaataaacttaaaaaatttggtagaatcgtaaaacccttacccaacgacatgtatgtactatttggcaaagttttacattttggttcttgcctggttttgtttgccgtggccaacatttgacaaggccaagcagacagctacaatgaacaaaaaggtcattctcacaacaaatcgaagacagatggtatataaaaaagcaatgattaaaaactaatttattttaccaaaaatttatctaacaataaattaaataaataaatttattcaattaaaacaggaaaaattcgtgagttttttgtataatccaaaagcaatgaaataattttttaaggtcacgttagtaaattaggcggctttttaagaacacaaaatttaaattggccccgcaggaaatggagtaaaaaaaaacttttttttagaaatgttaaattagccatagaccaaaaaagtataattattttattttacattggcaacaaaatgcacagccggagcattattagaataatcactcgccacacattaataaatggggggaaaaggtcaaatggaaggagggcgaggtgaataattgaaga

SEQ ID NO: 29617 - DNA, 1245 bp, Heterodera glycines
tcaaccacgagccaattcacgaatggctcaagcgggtttcagcgatcacttgcttgtccacttgtgtgtccatgaatcggtgttgacagaacacaacggtcccgacgtggcccacatatttgacatcctgcagttgccctcttccatttgccgttttgaatgcagtcggggcatgcaacccggggcagcaatgaagtttggctgatgttccttcttttcaggttgttgggggtccaacgcttggtgttgcatagtctccaagtcaaaggccacaatgctgtaagggtcttgttccttcggctcaattggttggatgaaacagccccgctcgggattgtggtaagtgttgcacaattggcaatacgtctcgtggcattggtgaccctaaaagaattatttttttaaaaaatttttaaattattttacttttcttccattacggttgttgtcacgaacattccaaataactccgcactctttgcattgttttgactctgcacaaaaattggatctcaagctttacaagaatttggatgtcttgatggtcgctggtatggcttctcacattctaggcagtagtgttgtccaaataagccatactccttctgcacaccatcaaaatgggcgttgtttaggtagagtgagattcgtgtgtcgtaatagttgttgatgtatttgtacagcggcttgtactgaccagttgatccaaaaataaacacagaaaaacgatgtcgttgctggctgttgttccaatgatccaccactcggggcacaacaatttcagcatcatacgcattaagtccaggccgtgcgccaatttgttgcataagttgcaaagcatccctttgaagacagccctgttgaccgtgttggctgtgcacgtagcggcggaacttccaacttgccctgccacggcttttagccaccattgttgcttgtaaggcataaaataacaatagctgcgctcatcaggattgtttatcttaaaaaacccatcaaaactgttgctttaacatggaccggaccttaatcaaactccgatcattaatacgatggtgaacaggtgctagagctcgtcgtgcgcctcccttcagcgttcttttggtcggcagtccaggtcgattaactgttgtcacaactacggtaaacggttcaccccacagtgtgacattctgttgcttcttgctctgtgccactttgatgggaggatttaagatggtgttaactagtgttgtctgtgatttg

SEQ ID NO: 29618 - DNA, 987 bp, Heterodera glycines
gggttacgagatagaaaattgtcctaaaaagagatagccttcttttgctgagaattaattcacaatttccgcaactcttgcggtaatggaaaaaattttgaagaggctctgcggaacggattagcatcggggttacgagatagaaaattgtcctaaaaagagatagccatttttctgagaattaattcacaatttccgcaactcttgcggtaatggaaaaaattttgaagaggctctgcggaacggattagcatcggggttacgagatagaaaattgtcctaaaaagagatagccatttttctgagaattaattcacaatttccgcagctcttgcggtaatggaaaaaattttgaagaggctctgcggaacggattagcatcggggttacgagatagaaaattgtcctaaaaagagatagccatttttctgagaattaattcacaatttccgcaactcttgcggtaatggaaaaaattttgaagaggctctgcggaacggattagcatcggggttacgagatagaaaattgtcctaaaaagagatagccatttttctgagaattaattcacaatttccgcaactcttgcggtaatggaaaaaattttgaagaggctctgcggaacggattagcatcggggttacgagatagaaaattgtcctaaaaagagatagccatttttctgagaattaattcacaatttccgcagctcttgcggtaatggaaaaaattttgaagaggctctgcggaacggattagcatcggggttacgagatagaaaattgtcctaaaaagagatagccatttttctgagaattaattcacaatttccgcagctcttgcggtaatggaaaaaattttgaagaggctctgcggaacggattagcatcgggggtacgagatagaaaattgtcctaaaaagagatagccatttttctgagaattattcacaaattccgcaactcttgcggtaatggaaaaattttg

SEQ ID NO: 29619 - DNA, 992 bp, Heterodera glycines
  unsure (1)..(992): unsure at all n locations
ttgtaggagatagaattaaaaacaaaattatttctatatttttattcactataaaaggtttccatagcaaaaataaattcttaatgatttttaaaaataatatcgtgcatcataatggcacaataaatactgcagattaaatgcggcgcctgatgaacatttgatctggttcatattattattaactctatttctcgttacaaagtaatttttaaaaacgaaggaccaggtaaattcaaattttttactcttttctaaaattcacgacaaagccttaaatcattttagaaaattaattgatatggctgaatctgttgtcgaagatagaattaaaaacaaaattatttctatatttttattcactataaaaggtttccatagcaaaaataaattcttaatgatttttaaaaatcataccgtgtatcagaatgacacaataaatactgcagattaaatgaggtgcctgatgaacatttgttctggttcatattattattaactctatttctcgttacaaagtaatttttaaaaacgaaggaccaggtaatcaaattttttactcttttctaaaattcacgacaaagccttaaatcattttagaaaattaattgatatggctgaatctgttgtcgaagatagaattaaaaacaaaattatttctatatttttattcactataaaagtttccatagcaaaaataaattcttaatgatttttaaaaataatatcgtgcatcataatggcacaataaatactgcagattaaatgcggcgcctgatgaacatttgatctggttcatattattattaactctatttctcgttacaaagtaatttttataaacgaaggaccaggtaaattcaaattttttactcatttctanaattcacgacaaagccttanatcattttagaaaatanatgatatggctataccctgtgtangagatagaattaaaacaaaatatttctatattttattcactataaaag

SEQ ID NO: 29620 - DNA, 996 bp, Heterodera glycines
aacctttcaacatttaaatcaaaatcctaataaaaatttcgttgaattttttcgcctcttatttgtgcaaattttgaaaaagtaattttttattaaaaataaaaaattcagaagcaaattcaagaattttttttatttttaaatgcattttttaccacatgaattatgtttaaatttttgcgtttcgaattcattttggaattaagaaaaataaaaattgataatcatttgatcatttttagcgcactttaagcaccgccgttaggcagcgcagttccaaaatttattccatgccacagatattatgggcaggacacgccaagtacctcaaacttgggtaattaaaccgaagaaagaagtgcagtggggaagaatgacgcccaaaatgaaggaaatattcgatgctgtgcgaactctttgtgacccctctctgactctgccaatgcagcagtttaccatttttacaactatttttctctcactcatcgtctgctcgtctctcctttattataagctattttcctaagccaacaacgcccttttctccctcttttctgttagtcatttctcattggtgttgacgatctaacattcagtgtacaaatttgttaaacctctcaacatttttaaatcaaaatcctaataaaaatttcgttgaatttcttcgcctcttatttgtgcaaaattttcgaaaaagtaattttctatttaaaattaaaaaattcagaagcaaattcaagaattttttttatttttaaatgcattttttaccacatgaattatgattaaatttttgcgtttcgaattcattttggaattaagaaaaataaaaattgataatcatttgatcatttttagcgcactttaagcaccgccgttaggcagcgcagttccaaaatttattccatgccacagatattatgggcaggacacgccaagtacctcaaacttgggtaattaaaccgaagaaagaagtgcagtggggaagaatgacgc

SEQ ID NO: 29621 - DNA, 1244 bp, Heterodera glycines
  unsure (1)..(1244): unsure at all n locations
cgttttagaaatagcgtagaaaacagcttcgatatcaagaaaccaagtcaagtccagaaaggaatattttaaaacgatttcgttttgttttggcattatgatacgaaataactttcggaaattatggaaacaaaattggagaaattcgaataatttttgactgcaaatttttttccttttttgaattgggttcaaaaaaattntaagagaatttttgattattattttgaagtcttgaatttatttgacaaatccaagacttaaaactgggagaagcaaggggctgtggctgggggcctaaaatttgggccacattggagaattaattctgatttctgaaaaagtcccagaaataactattttttctttccatacattcttgtagagctcgagctgctctttccaatggtcttatcccggtctcgatccgtgccgaactcacaaagttatggagtgaaatgtgaaatattgttttcaccacaaggcattttttctgaaaaccggattcaaaaatctggggtttggtataaccgttttagaaatagcgtagaaaacagcttcgatatcaagaaaccaagtcaagtccagaaaggaatattttaaaacgatttcgttttgttttggcattatgataccgaataactttcggaaattatggaaacaaaattggagaaattcgaataattttttgactgcaaatttttttccttttttgaattgggttcaaaaaaattttaagagaatttttgattattattttgaagtcttgaatttatttgacaaatccaagacttaaaactgggagaagcaaggggctgtggctgggggcctaaaatttgggccacattggagaattaattctgatttctgaaaaagtcccagaaataactattttttctttccataccttcttgtagagctcgagctgctctttccaatggtcttatcccggtctcgatccgtgccgaactcacaaagttatggagtgaaatgtgaaatattgttttcaccacaaggcattttttctgaaaaccggattcaaaaatctggggtttggtataaccgttttagaaatagcgtagaaaacagcttcgatatcaagaaaccaagtcaagtccagaaaggaatattttaaaacgatttcgtttttgtttggcattatgataccgaataactttcggaaatatggaaacaaaattggagaaattcgataaatttttgactgcaaattttttttccttttt

SEQ ID NO: 29622 - DNA, 1713 bp, Heterodera glycines
taaaaaagagatagccatttttctggcatggagaataaatgtaaaaattccctgtagaatagaatggccattgctctccgcgcccctctgcccatgctgggaacatttgtatggtacaaaatttctcgcaaaaaagagatagccatttttctggcatagagaataaatttaaaaattccctgtagaatagaatggccattgctctccgcgcccctctgcccacgctgggaacatttgtatggtacaaaatttctcgcaaaaaagagagccatttttgtggcatagagaataaatttaaaaattccctgtagaatagaatggccattgctctccgcgcccctctgcccatgctgggaacatttgtatggtacaaaatttctcgcaaaaaagagatagccatttttctggcatagagaataaatttaaaaattccctgtagaatagaatggccattgctctccgcgcccctaggcccatgctgggaacttgcgtatggttcaaaacttgttggagacaagagagccattcttctggcattgggaatggagggaaaaaggtcgtgtagaacagcatcaccggcgccccccgaaagccttagcccatgctgggaaaaatttctgccccaaaggagatatccccctctagcacaggggggatcacggaagggggggggattaaaacagggggtgcgccactagacaaagagggagaggtccctcggccacacgaagaaggggcatagaggggagagggggggggggggggaggcctccctatcatgctcgagagcatttgtatgtgtataaaatttatcaaaaaaagagatagccatttttctgggatagagtataaatttaaaaattccctcaaaaataaaaggtctattgcgcaccgccctccctatcatgctcgagagcatttgtatgtgtataaaatttatcaaaaaaagagatagccatttttctgggataacctctaaatataaaaatcctctgtgaaataaaatggcgattgtgcacagccctccgtctcatacgcaagcgcttttgtgaggtataaaatttctcaaaaaaagagatagccatttttctgggatagagtataaatttaaaaattccctcaaaaataaaaggtctattgcgcaccgccctccctatcatgctcgagagcatttgtatgtgtataaaatttatcaaaaaaagagatagccatttttctgggatagagtataaatttaaaaattccctcaaaaataaaaggtctattgcgcaccgccctccctatcatgctcgagagcatttgtatgtgtataaaatttatcaaaaaaagagatagccatttttctgggataacctctaaatataaaaatcctctgtgaaataaaatggcgattgtgcacagccctccgtctcatacgcaagcgcttttgtgaggtataaaatttctcaaaaaaagagatagccatttttctgggatagagtataaatttaaaaattccctcaaaaataaaaggtaaattgcgcaccgccctccctatcatgctcgagagcatttgtatgtgtataaaatttatcaaaaaaaagagatagccatttttctgggatagagtataaatttaaaaaattccctcaaaaaataaaaaggcttattgcgcaccgcccctccccatcatgctcgagagcatttggattgtgataaaatttatcaaaaaaa

SEQ ID NO: 29623 - DNA, 1133 bp, Heterodera glycines
  unsure (1)..(1133): unsure at all n locations
tccgtcgccccttcggcttaattcctccaaataaaaatgtgcttctcatcagaatttgaagacacacgcactaagagcagatttatgttcgagcaaccttgtcattgccctaccaaccaactcgaggccatcaaattcagcaaggtgtggaaaatttcaaaattcttttaaatccacgcaatttgtaaaaccctttcaactctacatttgttaaggtgataggcgcggaagacaacagtctgtgctgtgtttgtgcaggtccagtaaatacaccatataagaaattgtttttacataccatttttgttacagaggaatacggtcacaggtcgttggaagtgctgtacaaatgttcgacgtgttacaaagaaacgcacagaacttatgagtgcttcagtacgtcaaatttttaccacatcccctcaattacataaattgtccgggtttcagttgacgtcgattattacagcagccgtcgttacgactgctcggaccgtgattacgatactcgcatccgctctcgctaccgtactcgaacgtacagtgcgtggggacagtacacggcaaatgtcgcaaaaatggcactgctggggcggatgaccatgaacaattttgaggcggtggagcgcaaattcgatgtgatgagcattgttcaggacaattattacaagacaaccgatgattggaccgacactttgataaggcgtcttgaataaataggcatgccaaatggcaacactttattgtataactgtattatatatatgcgtatttctcgtataactgtattacctacgctctagaaataatctctaaataaatgttatacggtcttttttttgtcaaaagagtacatttcattccccatggctttcccccctctcaatccggaaaaaatcgtcactatttctaaatttttgtcactattttggcatttcctcaatattttagttaataatttcgagatttttcgtaattgaaagtctcgaatttctagagatatgagtgaaccaaatagcaataaaagttccatttgtttgtgagtttattctccgtatgaaatggacgcgacgcatacnatacaatgtgaaaacagagcaacaaacaactatttaccatatgtcatcatcatc

SEQ ID NO: 29624 - DNA, 981 bp, Heterodera glycines
ctcttctttgacttggccggtgcactgaagatcattcgactcagcacgtcgatgcagaccaataaatatttataaccgtcgttatgctttttcaactggtcaaatatgcacaaatcgcactgccaatcggtatggaagccacttggtatcgtctttagtctcgggaatcttttcctgatgggcttgtgaatcgtgtatgttttctgcttttctaggattttattaacgtcatcggtcgtaattttcgggtcaatctttttggcctcatttaaaattttttgaattccagcaaaacttgccggagattttaaattaaaataaattttcgataaaattttctctacagtcttgcccatattagtggtttgaagggtttcttctctcgcactatgccgggtgtttttatagattttattgcctttttccttccacgtccccacatgacctttgatttatcaaccatgtcttttactgttggatccttcagtaaccgatctttgagaaattttgcaccgcgcggcgtttcatctttcttccctgcgagatacaacaaaacatctctataattactgttttcaatcggcaaattcatgttcgactgtacctttccggccgccgtaattttaaataaatctttgttttccttcacgtacctaaaaagaccgtttaaaagggtcgggtgtataatagttttgatcggaacgggtgttttgagtgtggatgttgtttggggctccggagttaactcctcaagtgtatcattatctgattcaggatcaggagtttgctctttaagtcttttcctaggaataattattttccgtggttcttcggtctcctgtggtttggattggttattgaggcccagatatggtgcaacatttggacctggtacatgattctcaatcactaccttctgtggtctattttcaagtatcccctttaccgtacgcctttcttttataaagccaatcatgtctc

SEQ ID NO: 29625 - DNA, 1199 bp, Heterodera glycines
aagtgataaaaataccaaataaaatttatataatagagcaaaaaattgcggatttttgtagtattttacttttacagaatgacttttcagaagcgagttctgaatttttttctgaaaaatctaaaatttccagaatttctggaataacttttttcatattgatgttagaaaacctaaataaatcccataaaattctcctgatttttctctatttttaaagctttatttgctcaaaattggtcaacccttaggctagatatgaattttccaatattagcccaaatttccaagggccaaaaaattgccaaaaaataaagaatttttaaaaaattccaaaaattttgaaacgaaaaataaacatcatattcgtgctcagcacctcaaaatagcccagaaaaatatttttcacaccctttttcgaccccaaaaaaatttttgaaaatttctaggggggctagctcgaaaaattttgaaaatttcaaaaaataaaatacaccattcgatagcatttcaaaagctctacaattttgctctaaggcaatttttcgctaaaaccaacccctgacgagttatgggcccgggactcaaatgtcccgctcaggccaaaaattttttcaatttccgggaaaaaatcgaaatttttccgaaaaaattaccagtcgatagagctcgaaaaactatgttttggaagtggtctccgtttctctgggaaaaatcgttaaaaaatcctaaaattcaaaaacccgaaaaccgttttttaggcctagctcgaaaaattttgaaaattttcgaaattttaaaatctggaaaaatcgggcttttaaagctctacaataagtctgctggccaccctgcgctcaggtcaaagcctaatgagttattcaacggggactgaactggacaaagttggtactgaatttttgtagaagcacacaggccaggaggttagagatagaggcctggaattttttttaacttttagccaacacttcaacttagggccctcacagcgggaattttttgatccgagttttagaaaaaaagttacgggccccaaactgcgagaaaaagtgagaaatcgcttctcgggactcagtcgtccgcgcagaatttttctctatatttttcccggatgcgccgtgaaaagttgtaagacccttccaccactttcagggcgctcccggccttcggccgggaga

SEQ ID NO: 29626 - DNA, 1337 bp, Heterodera glycines
ggtcagttttgcatatttattactaatcttccatttttattccgtttcccctttttttggtcaaataggactgatgatgtcatcacttttttttcaaaaaaataaaatttttcctaaatgtgatttgtttcccccctttttcccctccctttttcaactttcttctgtccctttccgatggtccttcttcgcgtcgtccctatttgttttcgttgcttcaaaacccttctcccattccctgccctttgccttcgcaatttccgcccggccaaattcaccgtgaagaaaatatggccattcgctacagacttttcaaccgattggaccccggcggttcgcatttggtcagtgcccctgaaaatgccccctttaaatcgcattttgtgcctttccatcttttcagagaatgccttcccatgtgattcccgccatatttttctccattttgccctttgacgacttcaaagacgtggagggcaagcagagcagtttagtcacaatgtaaaaacaatggcacaattaaaatttaattgttttaccaatatttgtgcccctttttcagattttccatttggaacacaatgatgggcacaaggtaagcaattgcattcgcttgtcctccgccgtccgttttgtaatttccgtttcttcgcttttcgtctcctcaccattccctgggccattcaccagtccggctttctcctgggcctctttctgatgcttctgatggccgccctcgccttttacaccgcttttcgcgtggtcgaaagtccgaattcgttgggtgaccgccgcttttccttcctttcaccccaatttctctcttttttagccctcgacagaacgggcgccgacttttcggacgtttgccgtttcttttgggggagacgtggcgaatatttctccgtttttttctccattttggtcctcgtcggcggcgtcattctttacttcgtgttgatgtccaactttctgttttacaccggaaacattgtcaacggttgtcccatttcacttccaattcatttgactaattgaagaggcattgcagccgaactcgtcgatcattccgattatggtcaacggcactctcagctgcgacggtcagtcagctcaccgccccccccccccccagccgcaccatccctcgcattgtttcaccccgacaaaattaaaaaaagcgagaattttcgttttcaaatttcttagagagaggcttttttctagtatttttagaaaatggcattttttattttagttttctttgagctaacccccccccccatatcataaaaagcagttagtaaaataaaactgtttagttttctgtctcgaaa

SEQ ID NO: 29627 - DNA, 1191 bp, Heterodera glycines
  unsure (1)..(1191): unsure at all n locations
tttttacaccacatattgccaatctattttctgcagatgaaagccatccatcgcctgcggttctcggcacagcaaagcactaatacgtgtttgactcactcaaaaaaataattccatacncaaaagtttttacaaccacataatgccaatntaatttcttgcagatntaaagccatccattgcctgccggttctcggcacagcaaagcactaatacggtgtttgactcacttcaaaaaataattccttacacaaaagttttttacaaccacttattgccaatctaatttcttgcagattgaaagccatccattgcctgccggttctcggcacagcaaagcactaatagggtgtttgactcacttcaaaaaataattcattacccaaaagttttttacaaccacttattgccaatataatttcttgcagattgaaagccatccattgcctgccggttctcggcacagcaaagcactaatagggtgtttgactcacttcaaaaaataattccatacccaaaagttttttacaaccacatattgccaatctaatttcttgcagattgaaagccatccattgcctgccggttctcggcacagcaaagcactaatagggtgtttgactcacttcaaaaaataattcattacccaaaagttttttacaaccacttattgccaatctaatttcttgcagattgaaagccatccattgcctgccggttctcggcacagcaaagcactaatacggtgtttgactcacttcaaaaaataattccatacccaaaagttttttacaaccacatattgccaatctaatttcttgcagattgaaagccatccattgcctgccggttctcggcacagcaaagcactaatagggtgtttgactcacttcaaaaaataattccatacccaaaagttttttacaaccacatattgccaatctaatttcttgcagattgaaagccatccattgcctgccggttctcggcacagcaaagcactaatacggggtttgactcacttcaaaaaataattcattacccaaaagtttttaacacccccttttgccaatctaatttcctggcaatttaaaaccaaccattgcctgccggttctcggcacaacaaaacactaataaggagtttgactcatttcaaaaaataattccttacccaaaagttttttacaac

SEQ ID NO: 29628 - DNA, 1258 bp, Heterodera glycines
gccagacaaagcagagtgggggataacacgaattttttatcttggtatttcctctattttgagcctgctctacatttatgtatgagccaatatgcctattgcaactgaaatttattcatctttcccgacaaattgttgagataattattctagacgatttttttatatctcagtgcttaaccattgccttttgtaatgataaatggtagatattgggagtgataaaaagtttgtttgtgactatttacaataaaaatttatgcagcatttctaaaaaggatgtaaaaataatttcttgcgtaatattttttacattatgttgttgaagaatttgagtctgcatctgatgcaattggaaaatttttcagcttttttttcccagaaaaaggatggggcaaataaaaaactaaacatctctcatcaccattttaaattcccttacattttgggtttactttactatgctggcccataaaaaaatggagtttttttggtgacaaatttttgtgaattttctttcggcgcgtcataagcggattgtttgggggcaaatgaaaacaaattttgtgttattcgaatgcgctagccgagctctacattttcaaatgtatcaacaaagggtctatctccactctctggcgagttatggccagccaaagcagagtgggggataaacacgaattttttaatcttggtatttcctctattttgagcctgctctacatttatgtattgagccaatatgcctattgcaactgaaatttattcatctttcccgacaaattgttgagataattattctagacgatttttttatatctcagtgcttaaccattgccttttgtaatgataaatggtagatattgggagtgataaaaagtttgtttgtgactatttacaataaaaatttatgcagcatttctaaaaaggatgtaaaaataatttcttgcgtaatattttttacattatgttgttgaagaatttgagtctgcatctgatgcaattggaaaatttttcagcttttttttcccagaaaaaggatggggcaaataaaaaactaaacatctctcatcaccaatttaaattcccttacattttgggtttactttactatgctgggcccataaaaaaaatggagttttttccggtgccaaatttttgtgaattttctttcggcgcgtcataagcggattgttggggggcaaatgaaaacaaattttggtgttttccaaatgcgttagccgagctcttaattttc

SEQ ID NO: 29629 - DNA, 997 bp, Heterodera glycines
  unsure (1)..(997): unsure at all n locations
aaaatgaaattatttctgctaatgncgtataattaatttttgataatattntagtcgtccgacggtgcctttgagttggacaacgctttgctcggccagccgaccatcagctgtcacccggacaccatcgaaatgcgtttccgcacccaacgaccgttcaccggcaaaatttacgtgcagggacactacgccaaccccgactgccgtgtcgatttctccgaggcgggcggcgcggaccacgacggacggggcggcatccgactgcaccacgggtcatgcgacatggacagaaaacgaatggtgggcccggagggcggcaccggcatggaattctccacggttttggtcatctctttccatccggtgagcggagagggaggagattcttaacgagcgaattacaatttgttaattgcgtaatcattggcagttatttgtcaccaaaactgaccgtgcctttcacatcaactgcctttacaaggaggccgatcggaatgtcggcgtggacataaacgttgggtgagagaagggatgggtcgactctgttctctgctgagggaaaaggggcataatttgaggggaatgggggaggggtaatttggcagtttttatttgggggggggggtaattaggcggaccattctcccaatcattgccatttcgtccatttttcttgtccatttgccccaccccactgttccaattgtccgtttgaccattgttttgtttttcgtctccatggagcatgacgaacgatggtgtgcccatggacatgaatctgttgccatgggctttttccattctttggcttggctttggctggtcattatgccgtcccaatggtctttccgccttttgccctccgccgtttcctccctctttcccttctcttcggccatttctcccctttccctttccccaaaagtgacgtcaccccggccaacatccaaaatgacatgccaatccctcaatgtaaatacacaattcgcaaagacga

SEQ ID NO: 29630 - DNA, 940 bp, Heterodera glycines
gccattgacgacggacttttggcattggcactttgtgctcagtcgcgaaaagtcattttgcagctcaaattcatctgcaatttttgcaaatcaatttttaattttattaactttttactgctttttaatattaaatttttattaagattaaaaatcgttttataatccataagataaatgatcattagttaatttgctcgtttaaatgcttaattggcggattgtttgccttggccagcagtgggaagcatgccgtgtgtgccacaatgtgacagccgctgcagcggcgcttctctcccatcttctggcagtccttctcgcccaaataacattcggtgtccacggcggacgaagaagcggatgaagcggaggagggcagccaaatgtgctcagagggactcaactaaactgggccgaaatggcagggcgctaattggccaattagggaaagggccaaaacaattaattattgtgtaaacaattaacaaaaaatatatttgttaattaatgtagaataaaagcgaaggagcataataattcccaattgttaatgattaaggaataattaacaaaattggcgaaaaactttgcttatttaattgattataactgtatttttgattaaaaaaaagttgttatatttctttttaatcaaattgcattatttaaattaaacatccaaaatccgtcccacctgttcatccagccaatatctgctcgtcctgtgcttgctgacccgcttctgctcctgctcctgaatggcggcggctcgcttcaccacgggcgatttggctaatgctcttctgaacacaaaaaaagaaaaatcatttttttatttgattttaataaaattaaatttgttcgatgagaattgagaaacaaaatgggataaagaagtgaagagaaaagaaaagaaaatagaagaaaaaggataaaagaa

SEQ ID NO: 29631 - DNA, 1325 bp, Heterodera glycines
agataaacattttttggtcaaagaaattttttttgtttgcgtttcaaatatcgtaagattgtttgatagggccagacaagagaaggcaactgttggtatcaattttgcggtaaaaaaatgagaaaaaagagataaccatttttggtcaagaattttttttgtttgcgtttcaaatatcgtaagattgtttgatagggccagacaagagaaggcaactgttggtaccaattttgcggtaaaaaaatgagaaaaaagagatagacattttttggtcaagaattttttttgtttgcgtttcaaatatagtaagattgtttgatagggccagacaagagaaggcaactgttggtaccaagtttgcggtaaaaaaatgagaaaatagccattttttggtcaagaattttttttgtttgagtttcaaatatcgtaagattgtttgatagggccagacaaaagaaggcaactgttggtaccaagtttgcggtaaaaaaatgagaaaaaagatgtttgatagggccagacaagagaaggcaactgtttgtaccaagtttgcggtaaaaaaatgagaaaaaagagataaccatttttggtcaagaattttttttgtttgcgtttcaaatatcgtaagattgtttgatagggccagacaagagaaggcaactgttggtaccaattttgcggtaaaaaaatgagaaaaaagagataaccatttttggtcaagaattttttttgtttgcgtttcaaatatcgtaagattgtttgatagggccagacaagagaaggcaactgttggtaccaattttgcggtaaaaaaatgagaaaaaagagatagacattttttggtcaagaatttttttgtttgcgtttcaaatatcgtaagattgtttgatagggccaacaagagaaggcaactgttggtaccaagtttgcggtaaaaaaatgagaaaaaagagataaccatttttggtcaagaattttttttgtttgcgtttcaaatatcgtaagattgtttgatagggccagacaagagaaggcaactgttggtaccaattttgcggtaaaaaaatgagaaaaaagagatagacattttttggtcaagaattttttttgtttgcgtttcaaatatcgtaagattgtttgatagggccagacaagagaaggcaactgttggtaccaagtttgcggtaaaaaaatgagaaaaaagagatagccattttttggtcaagaattttttttgtttgcgtttcaaatatcgtaagattgtttgatagggccagacaagagggggcaactgtttgcacctaagtttgcggtaaaaaaatgag

SEQ ID NO: 29632 - DNA, 1581 bp, Heterodera glycines
aaaaagcaattaaaaaattttcattcttgaataattttcctgcaccgaaggtactcactcggcctcttcgcggcctcgtggtgggccttcgccccccccccccctcccacgcccttcagagcacgacaaatatttcaacaaaaattttgaaaaattgactagagcaatcgaacgctaacggacgacctaatggaaaaaaatccccgaaggagagaatttaattaaatccattccttcgggggaccgtgccgggtgccgcggggtaagcagtgctggttcgtttcatcacggcaccgaaccttttggctagtcagcaatcgttgcttaacttgccagatcggacgggtgcgcatgattccactgttccaagcaccccaccaaaagcaaaacgatataaccaaaatataaggaaaaattttttaaaaaattttttctccatcttcctttttgatactaaagcatcagagtgctaaaattaagttgtaaataaaatttggtgcgctttagagcactttctgaaaaaaatatttatgaaacaaaaaaatcgattttttcaagtgtccgtttggggtactcaaacatttatggggagcaaaaatccaacgcagaattaaagtacaggctatagggaagctattcccgaaggattcggtctccccataaatctgggcgcatcggttcggggggactgccccgaaaacaaaaaaatcgattttttcaagtgtccgtttggggtactcaaacaattatggggagcaaaaatccaacgcagaattaaagtacaggctatagggaagctattccggaaggattcgttctccccataaatctgggcgcatcggttcggggggactgccccgaaaacaaaaaaatcgattttttcaagtgtccgtttggggtactcaaacaattatggggagcaaaaatccaacgcagaattaaagtacaggctatagggaagctattccggaaggattcggtctccccataaatctgggcgcatcggttcggggggactgccccgaaaacaaaaaaatcgattttttcaagtgtccgtttggggtactcaaacaattatggggagcaaaaatccaacgcagaattaaagtacaggctatagggaagctattcccgaaggattcggtctccccataaatctgggcgcatcggttcggggggactgccccgaaaacaaaaaaatcgattttttcaagtgtccgtttggggtactcaaacaattatggggagcaaaaatccaacgcagaattaaagtacagactatagggaagctattcccgaaggattcggtctccccataaatctgggcgcatcggttcagggggactgccccgaaaacccaaaaaaaaattttttggataaaaattatttaaatgaactgactagataatatttaaaataggttatttctcttcctttcagtatccctgcaaagtttggcgcgcttctgatcagtttctgaaaaaaaagttaagcctaaggtgttgtcctgtttaaaaaggaattaaaaatttctttaaatgatatcatctccctttttgatagaaaaagcatcagaggacc

SEQ ID NO: 29633 - DNA, 1891 bp, Heterodera glycines
  unsure (1)..(1891): unsure at all n locations
ttttggaaaatacaggatttacaggatttgcaggattaatcctgccggatccctgtcctgtaaaaaaatttgaaattcaattcctgcaacaggacccgcaaattggatttttatgcaggattcagcaggatcatgcattggattttttgaaaattcttaaaaatagaatgccaaatattcagaaaactttcttttttcaaaaatttttttattaataaaaatttttcgtgtaaaaacttatccttattcgaaaaaagtttatacaattgaattttttatgtgttttgttacctaaaaagcgttaataatttttttttactattttcgtgcctattttaggatttttctgcctttttaagtgcctatttcgcgattttttgtgcctaaaaatcccatccctatacattatggattatggcttttttgcaaagaaatttaaatacaaattattttactttaatttaagctattattatgagccacccaatttggcaaatcggtctttttaaacgcattaaagaagattcagtcgattgcttggagtgtaagcaaaaaaacgttattaattttcatcttcatcattttttggtttaaaaatatatttgaatacttttttatgccccccgccccccccccccgcccttcagagcacgacaaatatttcaacaaaaatttttaaaaattgactagagcaatcgaacgctaacggacgacctaatggaaaaaaatccccgaaggagagaatttaattaaatccattccttcgggggaccgtgccgggtgccgcggggtaagcagtgctggttcgtttcatcacggcaccgaaccttttggctagtcagcaatcgttgcttaacttgccagatcggacgggtgcgcatgattccactgttccaagcaccccaccaaaagcaaaacgatataaccaaaatataaggaaaaatttttttctccatcttccttttttgatactaaagcatcagagtgctaaaaattaagttgtaaataaaaatttgggtgcactttagagcactttctgaaaaaaaatatttatgaaacaaaaaaatcgatttttcaagtgtccgtttgggtactcaaacatttatggggagcaaaaatccaacgcagaattaaagtacaggctatagggaagctattcccgagggattcggtctccccataaatctgggcgcatcggttcggggggaatgccccgaaaacaaaaaatcgattttttcaagtgtccgtttggggtactcaaacaattatggggagcaaaaatccaacgcagaattaaagtacaggctatagggaagctattcccgaaggattcggtctccccataaatctgggcgcatcggttcggggggactgccccgaaaacaaaaaaatcgattttttcaagtgtccgtttggggtactcaaacaattatggggagcaaaaatccaaagcagaattaaagtacaggctatagggaagctattcccgaaggattcggcctccccataaatctgggcgcatcggttcggggggactgccccgaaaacaaaaaaatcgattttttcaagtgtccgtttggggtactcaaacaattatggggagcaaaaatccaacgcagaattaaagtacaggctatagggaagctattcccgaaggattcggtctccccataaatctgggcgcatcggttcggggggactgccccgaaaacaaaaaaatcgattttttcaagtgtccgtttggggtactcaaacaattattaaaaatttttagatttttattcatctccctttttgatagtgaaagcatctgattgcaagaaatnncttgtnaatnnnntttggtgcgtttcacctttattaggaaaaaatatttagaattaattttgct

SEQ ID NO: 29634 - DNA, 647 bp, Heterodera glycines
tacaggctatagtgaagctattccggaaggattcggtctccccataaatctgggcgcatcggttcggggggactgccccgaaaacaaaaaaatcgattttttcaagtgtccgtttggggtactcaaacaattatggggagcaaaaatccaacgcagaattaaagtacaggctatagggaagctattccggaaggattcggtctccccataaatctgggcgcatcggttcggggggactgccccgaaaacaaaaaaatcgattttttcaagtgtccgtttggggtactcaaacaattatggggagcaaaaatccaacgcagaattaaagtacaggctatagggaagctattccggaaggattcggtctccccataaatctgggcgcatcggttcggggggactgccccgaaaacaaaaaaatcgattttttcaagtgtccgtttggggtactcaaacaattatgagggagcaaaatccaacgcagaattaaagtacaggctatagggaagctattccgaaaggatccgtctcccataaatctgggcgcatcggctcggggggactgccccgaaacaaaaaaatcgattttttcagtgtccgtttgggtactccaacaatatggggagcaaaatccaaccagaataaag

SEQ ID NO: 29635 - DNA, 950 bp, Heterodera glycines
tttgattgtgaaaaatttaggaaaaccgcttatctcttttttctcctcaacactctagacaattccaaccccatttacggaataatagcgccaaccctaatttttccggaatttctttttgggcgagtttgattgtgaaaattttggaaaaacgcctatctctttttctgctcaacactctagacaattccaaccccatttacggaataatagcgccaaccctaatttttccggaatttctttctgggcgagtttgattgtgaaaattttggaaaaacgcctatctctttttctgctcaacactctagacaattccaaccccatttacggaataatagcgccaaccctaatttttccggaatttctttctgggcgagtttgattgtgaaaattttggaaaaacgcctatctctttttctgctcaacactctagacaattccaaccccatttacggaataatagcgccaaccctaatttttccggaatttctttctgggcgagtttgattgtgaaaattttggaaaaacgcctatctctttttctgctcaacactctagacaattccaaccccatttacggaatgatagcgccaaccctaatttttccggaatttctttctgggcgagtttgattgtgaaaattttggaaaaacgcctatctctttttctgctcaacactctagacaattccaaccccatttacggaataatagcgccaaccctaatttttccggaatttctttctgggcgagtttgattgggaaaattttggaaaaacgcctatctctttttctgctcaaactctagaccattccaaccccatttacggaataatagcggcaaccctaatttttccggaatttctttctgggcgaggttgattgggaaaattttggaaaaacgcctatctctttttctgctcaacactctagacaattccaaccccattt

SEQ ID NO: 29636 - DNA, 1646 bp, Heterodera glycines
  unsure (1)..(1646): unsure at all n locations
agacacaccaaacaagaaagctcacagcaataaataaatttctaataggaagcataaataaggagcaaaaagcaaatgcataagttgagaaagctataattatgttattttattggttgttgaaggccaatcaacagcttctacgaatcaacttattaacacaaaaataactcaagattttttccattcatcaaaaaatttcttgaaggctcattaatgtttttaaatttggatcaggcgatgcttctatatgttcgtttcttgtcactattgttaattttgataaataagtttttaaggtccgaagacttatctttgttccttgttcttgcagttttgagtgaagatcattaatagttttaatagtttttttcgatttgtattccttcacaagttccatcacaccatttttttgtataaaatcatcaaaccctgatttagagcctaatgggaactcgtagacaaatagtgcgataatcaaaatatgaataataatattcattattctaaaataataaataacgaaaatgagcttctcagaatcattcacgtttataactacccatgaattttctataaaaatatttttgttgcactatttatctatttgccaacattaaatattttaataaaaaatgagaaaacaaaagtgcatgccaactttaatattttaataaaaatgagaaaacaaaaaatgtccgttttattgagatttaaaaatattataaaataaacgaattaattatgtaagtagattattattatttaaaataattattttaattttaattttttaataattattttacttgctttaatttgatcagtgatcactttgcactttttcgtgcttcgactcagcacggttgctgctgtacagcactggcgtgtttcttcgctgacctttatggcaattgaaaggtgtgcaaaagcggcacacatttgcaggtgaatccctcctccaaatcctcgcagatggcattttccttgtcgcagtcgttgtctttttggttggcacattcgtcgaaacagcacatccggcctggtttttcctttggcccttcgtccacataaggaggcttacaaacgcaggtctgaaaacccccccaaaatagataggcttttaatattttttttacatatccatcgggcaaatcgatgcaattcgcgtgcggactgcaatcattgatagcggagaatttgcattcattgatcactgacaatagtttaaacagataaaaagaaaattaaaatggtttctgtttacattgtctgcatgaagtgccaggatttgccgggttctcatcgcggaacccaggacggcacacacactcatagccttccgtctgaagcattattctcgtttatagttttcattattctccttccccgccttgtcaatacaatccgcgaatcggctgcaattgttctccgcggggttcaaacattcgttcttcaacagtttgcactttcttcccggcttttccggcatcggcgattgatcgatggaataagtcggacatgtgcaattgtacccgtcggccaattcctcgcaaaatgcgatcacatcacagtcattcagcgaacggtccatacagtaattgaccttggcatgttttattggttttggcaaaangtgccgacct

SEQ ID NO: 29637 - DNA, 1607 bp, Heterodera glycines
  unsure (1)..(1607): unsure at all n locations
tcgcgtagtctggccatgacgtgtaggagggtcgtcccccctgcgttgaaggctttgggcgtgggcccggccggagcttccaccagtgcagatcttggtggtagtagcaaatattcaagtgagatccttgaagactgaagtggagaagggttccacgtgaacagcagttgaatgtgggtcagccgatcctaaggcaccggctaacgccgtaacacactacggatgacgacttttctgtgcttgcgcagttggtccatccggttgccgaaagggaagtgggttaacattcccacgccaggctagggaaatgacggttcgcaagagctgttttgcgcggtaacgcaaatgaactcgcagacgtcgtgtggagtccgagccagagttctcttttctggtttagggtgtgcgtgcctggaagtggctcagcctgagatagggatgttgcgcccgtaaagcaccacggttcctgtggtgtctcgtgcgctccacacggcccttgaaaatgcgagggaagctatttgaatctcctgcctgatcgtaccgatatccgcagcaggtctccaaggtgaacagcctctagtcgatagaataatgtaggtaagggaagtcggcaaattagattcgtaacttcgggaaaagaattggctctaaaggtcgggtcagccgggctgttgcgtgaaacaggcggcttttgcccgtggctgtgtgctgttctttcggggatggtgcgtggactagtggtgagagctgcttgtggagcgcttcagctgcgtgtatgctcgtcagggtatgcacttcggttggcgctgaacgaccagtntagaactggcacgacttcggggaatccgactgtctaataaaacagaggagacggatggtccttgtggacgttgaccgtgtctgatttctgcccagtgctctgaatgttaagccaaggaaacttgattaagcgcgggtaaacggcgggagtaactatgactctcttaaggtagccaaatgcctcgtcggctaactaccgacgcgcacgaatggatcaacgagattcccactgtccctatctactatctagcgaaaccacagccaagggaacgggcttggcaaatttagcggggaaagaagaccctgttgagcttgactctagtctgactttgtgaagaatcatgagaggtgtagcataagtgggagccgcaaggcgccagtgaaataccactactttcatcgattccttacttaatcggtaaaacgggagtgcgcccgaaagggtgtccattttggtgttaagtcgggccacccggtggcccggcgacccgcgccgatgacagtgtcaggcggggagtttgactggggcggtacatctgtcaaagcgtaacgcaggtgtcctaaggcaagctcagagaggacggaaacctctcgtagagcaaaaaggcaaatgcttacttgatcctgattttcagtacgaatacggaccgcgaaagcgtggcttatcgatccttttgaatgtgtaaagtttccagcaagaggtgtcagaaaagttaccacagggataactggcttgtggcggccaagcgacgatagcgacgtcgctttttgatccttcgatgtcggct

SEQ ID NO: 29638 - DNA, 1577 bp, Heterodera glycines
  unsure (1)..(1577): unsure at all n locations
acgtggtaattaccatcattggctgttgttgttgtggatgaggatactgacgatgccgaagctgttgctgcgcttggtcagactttagggaaaaagccatagcatgaataatttttcacaataataaaattaaattttgaaattttaaccatttttaagattgtcccaaattttggtttcctgttgaatccttcgttgtttttttctctgatcgcttacctccttccttctctttactctctttccccttcccctgatcactctctcgccctttcttctccctgatccctttctcttttctttaactgatcacacttttcctctctctttctccccctctctccacctgctgctgcttctgttgtttcttcagctgttgttgttgtcgtaccttcttgcctagccaactcgctgctgtgctcgccggctttgccaaaatgcccgaattcgatgccttttttcgatttttgttcactttatgtgccaatggctctcaaattacctccgagtcccttctgtgctcagtttcgggcattttctgaaacacaaccaccggcctttgttcgctccgttcggttgggccgcggatggccaattggtcgcgttggtctttgatgaagctgaacaaatcgtctggtcatttgccaatgtttcaattgcgctaattatgacaaatgccgttttctctccgttttgccattcttcgcttgcctcgtgcgcagcaacagtcttctcgggatggataacatcagcacaacgtcgtcgatggccatctcgcgcaccaaaacattgttaaccaccagaatttggtcgcccggcctcagaatgtcgccgcacttttgcaactccgacttttcgccaaagcgcgacacgaaaacgccggtgaactgatcaatgcctttgggacaagaagaaatcaatgccactttcaatggacagaacgcaccattgccctcacgcaaatacagcccaagtgattggcctggctntttgatgatctccacaagttggacaacgcgaatttcacacgtaccgcccgaaccgtactttggcgttttgtactcctccctgaattcaaatggtcaaatcacacccctttctatgcccaggtttctccacctgttcagcactcgggccgagaagccttggacccctcgtagccgtcaagtgctcgtctgctgntcgacttcgcgcaattgccgataaacgccctcgggcaattcccccgcaaaggcactgctggacggaccgggcactaaaaaaatgagaaaaaagtggcaaatccgagggaaatgagtgaatggcaaatggaatttagattcaccatgttcacagagttggggctgtttcatttggcgatttgccatgtgaaaaattgaaaatgaacgtacgcctgggacaaagccaaaaatggggcacaattttgaatttattacaaaaaaacatttcgagaaaaaatcatggcacgactttaggttgagttttgctctgaaaagaaggtaaagtgggtaattagggtcaaatgagggaaatgaatttgaagagcggcgggtgagggaagatgagaaagtcccgcc

SEQ ID NO: 29639 - DNA, 963 bp, Heterodera glycines
ggattcggtctcccccataaatctgggcgcatcggttcggggggactgccccgaaaacaaaaaaaatcgattttttcaagtgttcgttgggggtactcaaacaattatggggagcaaaaatccaacgcagaattaaagtacaggctatagggaagctactcccgaaggattcggtctccccataaatctgggcgcatcggttcggggggactgccccgaaaacaaaaaaatcgattttttcaagtgtccgtttggggtactcaaacaattatggggagcaaaaatccaacgcagaattaaagtacaggctatagggaagctattcccgaaggattcggtctccccataaatctgggcgcatcggttcggggggactgccccgaaaacaaaaaaatcgattttttcaagtgtccgtttggggtactcaaacaattatggggagcaaaaatccaacgcagaattaaagtacaggctatagggaagctattcccgaaggattcggtctccccataaatctgggcgcatcggttcggggggactgccccgaaaacaaaaaaatcgattttttcaagtgtccgtttggggtactcaaacaattatggggagcaaaaatccaacgcagaattaaagtacaggctatagggaagctattcccgaaggattcggtctccccataaatctgggcgcatcggttcggggggactgccccgaaaacaaaaaaatcgattttttcaagtgtccgtttggggtactcaaacaattatggggagcaaaaatccaacgcagaattaaagtacaggctatagggaagctattccggaaggattcggtctccccataaatctgggcgcatcggctcggggggactgccccgaaaacaaaaaaatcgattttttcaagtgtccgtttggggtactcaaacaattatggggagcaaaaatccaacgcagaattaaagtacag

SEQ ID NO: 29640 - DNA, 844 bp, Heterodera glycines
aggtaaagtgaggtctgcatggaagcatggaagtttgtggtgggggggggagggtggtaaatgttggacggacggcaagaacctgatccaataagcaacggaagtcctgctgattgaccgctgctgatcaaagcgacaaatgcgcgacattttaatcggataaaatcatcaatgggcacaaaatgatgaaggaataaaaaaaatgcgaaatatcactaaaataaaataaaatgaaaaataagtaaatattaaagtacggaatttggtgtgagttcacaatttttgtttattaccaaatttttaaagttcctataaattttaatcgtatatgacttgtccttcctaccatttgccgaaaagctaattttcaaaattttatcccttttccaccatttgtcaatcaatgttcttttttttcaatcggcgccttcataatatttatttaataagcattagcagcattcttagttttgcgaaagtgaatcaccaaaaacggcagagacatttcgttcattttgttaatggggacggggcattatttgtccccaaatgctttattatttgatttaatcttacttccatttaaatgggcaaaaagttattggacttccgtcaacgtcgccgtcgaaattccttctcaagtagttcaagcagaacaactaccaacttgacgctgatcagtcgcttaaggataagcaacactttggtagcgacaatccacaagcgatcggtgattactcgagattgcatcagatcacaactatttgacgagggatcaggtgacgcaaaagcaacaaaaccaaccgagctgctgacaatcatcatgccatcggccatgctaaga

SEQ ID NO: 29641 - DNA, 824 bp, Heterodera glycines
  unsure (1)..(824): unsure at all n locations
cccaaaaatgtcggaagtcggaactcggaagtcggaattccgtgccatccctggtatggatgaatgaaatgacgcggttaagaatggacaagcaaaaatctttcgcctttagagaactcataaacccaaaatacgactaataattctatttcccaaataaacaatatttataagaaaatttaaaaattcttaaaataacaataattatgttcattagtaaagctgtttggaagggatatgcgaacagaggtgaatggggcgcattgttattttatttattaatggataaataatttaaattaaaaattatatctcaacaatttaattaggttttgatgcgagaactcggttcaaaaaatctttttatattaaaaaaatattgcaattcgccagggcataatttcaatgtctttttacccaattaacagccccctcggcacttcttaaatggtaatcgctaatgatgataacggatcacaatttttcgtcgcattgaaaattgcttctcgtctctgctgttccacaaaatgttggtcgtccacccacacaactggcaacaccgtttcttaaatttaaatttttaataatttaatttttaaatttacgcaccaaaaagggcaaggaatgcgcacacggccaaaatgtagaggaaggtgaacaggaaaagctccatgccgcggagtgtgtgctcatgctcaggcttattgaacgggtcgcgatagaatgccacactntctgcaaattttgaattccatgcattttgatttatattgatagaaataaaaagtaaaaaattggaattntctaggcttatgaatcggatc

SEQ ID NO: 29642 - DNA, 915 bp, Heterodera glycines
tttttcttttctaatctctcctcacagcaaatttactcctaacagaacaccacattcaaaccatgttacatacgggacacacgcgtttcgggcaaaaatttcaaaaatggcaaaaaacgcggcgaaacttagccacttaaaaaaatgtaaatttgcgtaaaaaatcaaaaagctagagatcggagcggggccatatcccgcgcgggattttgcgggaattccagtccgaatcccgcacctttttttggaaaaagcgggatttcgagaatgcgagatttgcgggattactcgagggatttcgtcccgaaaaaattttgaatcccaatgccgcggggcagcgagacccgcaagtttgaacttttcaggctctatagcagaccatttttcaacctattttataaaattattaaaagtacgtaaattttttcataaaatcatttatgaaaaaattgaattaaaatttgttaccaaattagtcagaaaaacaaaaaatttgtcaggcgatgtccataggtccgctgggaaaattttgaaaatcaatcgtaatttttttttaatagatttttggacaaaaatggcaaatttcgagttttaagttcgtttttttcaaaaatgtgccgccagggcgtcgtcgggggaaaaggtaatttttttaaatgaaattgttaaggaattatgccgattttgagtgaaaaacgcaaaaaatgcggcacggacccctaaaaggctgtaaatgtcgcgcgtaccgcaccaaagtataaatcctgccgagaatattccatcatcgcataaaataatacaatgccattcagcatcaagcccagtggtctgtatgggcaccgacgcgtgttagtcgagacgacaaatgctgtgaagggtggtaattatcacgcccttctgtacgcaattgtgcga

SEQ ID NO: 29643 - DNA, 1497 bp, Heterodera glycines
  unsure (1)..(1497): unsure at all n locations
ttctcaataatataccaaataattcaaatttaattgactaactagttcataagntaataatgggtatttgtggtagaccttttgaatgagttnggnatttttatntnngattaattnattaaaggtttttttggataaagttttnaaaaagtttatttgatgatgaaaattattggattttaataaanngangttnntaaggnggtaagttaattnattttnnnaanttgatttattgnaatnaaaaatatgagngaatttntttttatnatttagtttgttaaaatttgttaatgttttttnnaanaaaaaataatggnnatttgnnatgtattgnggaaatttggaaagtnaatttttatnattaanataagaatgaaaaagataaggggcgtcaaaattagcaaatttattttatttaaaattcatgcaaattttaatttaaaaaaacggaaatgaaggaatatagtgattaaaaaaatgaaaattgttattaaatgaaattggtctcaaataatgtaaaatcaacaataaaattttcaagatacaaattcgaataatttcattgaaatgaggcaaaggtggatgatgagccgaatttgaggatccaaaaggttccccaaatttcaaatcaccaaaggttgagtgaccgaggctaatatggatatttcaaaggaaacttctattttatagaaatcgcaaatagaaaatgaattttggtatttttagggtattattttaaagaatttcgttaaggcgtgcgcaatattttttgattgttctacttttatatataattgcgaaaatttggtcaaataatgttttgagactcaaatagtcaaagcaaaaaattttaaaaaacaaaaaaaacagcgaaaaaacggtcggttaagacatttatttatttttaatacagtaatctttgaacttttgcacaatttttaaattatatttaaaaaaatttacttttgcagaagaatactcctaatataaaggtatttatgttaaaaatttcaacggtttctgttcggtctgtttgaattataaaattattaattttccattgccgtgagttttgggcctttttctgtcgcccttataaaaaatcaccgatttttggatgagtttaagctgatcacatctttttagctccaaaaagatgccgaaatgttcagttccaacagctacaacagttttgtccatttgttcaagcttgacgaaggtttcatagatctttttgacatttcgatacagtacccaatagcggcaaacgtcttggtctcgaaactgattggtgttcttcgactgaaccaaattaataaacaattttaatgaaacaaaatgtagaaatttttagctctgtgcaatgcgtttcgtanaaagggaaaacccgagtttttttcataaaaattttcatttaaatttttgtatattttaattaaaattccttttggcccaactcaccatgacatatttatcatgtctttcccatcatcg

SEQ ID NO: 29644 - DNA, 1456 bp, Heterodera glycines
atacagaatgaaataagcaaaaacttgtcaaataaataaaaaatatttttcaaaattttttgagagttttagcacaacaaaaaatgagaatacatatttctaaataattaccataggatcccatgacataacggttatacaaatatttttaaaatttagagcttagaaacggcccatgaaaatttaaaacataattaattttaaagagggaataattaataattaatttaaaaatataaaaaattaaaaaatacagatttataaatgttacttataattctttttgtaaataaaattgaaacctttaattttttagtggacaaagtataattaaatattaaaaactaaaattaaataaattattctaacgataatcttaccgtttataatgtgaggtaagcgtcaaaaaacaattttcacccaaaccaccgcctaatgatgtaaaaatgacgccaattaatgactgtgtgaaagagttggaaaatgccacaatgataaagctgagtgcttgcattatgcacacaagaaaatgacggaagctaataaataaataaaataataactttaattaattaataacccaaatggcactcgatcaaaaacaaatgggcacattagtttaatgaccaatgcagggatgataatggccaataaaatggcacctgttgatatgctattacagcttggctttggtagaacatgctgaaaatatttaaaatttatgaaaatacaaataaaaataggtaaaattaaaatcaaataattaatttttaattacccgacataaattttcggaagacaaatttgttgttgcgttatttaaatttgcggattctttcgtcggtcctttgattatatcttttgcagcacttagcataaccacaaaagcaaaattgtttgctaatccaaaaatcctgaatttataatgaattaagctaggattttaggtgctaaaaatgctaaaacttaaaatgctggaataggtactaaaatagttgccaaaaaagtgcaaaataggtgctaaaaacgcccaaaatacgcaaaaagttgcgaaaataggtgttaaaattggaaaaacccagtgtctatatgcacaaattccaaaattgactcatttttttttatcaatttcacccgcactttgaaacttgtcaagaaataaataaataaattttggagacgaatgaatttttcagaataaaaacctaaaaattctatttctctaataatgaatttaatataaaaaacactttatttattttttataatattaatatgcttttgtttccaaaaacaggtcaaaatttatcgagaccaacaaagccaggtcaagaatgacctttcagtaggaaatatttttttttaatataaaatatcatataattaaattaaataatagttccgcctttctttttaattgttgatcatgttccaaaaaaacaatttattattttct

SEQ ID NO: 29645 - DNA, 1227 bp, Heterodera glycines
ttgcaaattaattcttaaatattttttcagaaagggttctgaaacgcaccaaattttatttacatgttagtttaggcactctgatgctttttctatcaaaaagggagatgaataaaatttttaaaaatttttaattcctttttaaacaggccaaaaagtttaggcttaacttttttttcagaaactgatcagaagcgcaccaaactttgcagggatactgaaaggaagagaaataacctattttaaatattatctagtcagttcatttaaataatttttatccaaaaaatttttttttgggttttcggggcagtccccctgaaccgatgcgcccagatttatggggagaccgaatccttccggaatagcttcactatagcctgtactttaattctgcgttggatttttgctccccataattgtttgagtaccccaaacggacacttgaaaaaatcgattttttttgttttcggggcagtccccccgaaccgatgcgcccagatttatggggagaccgaatccttcgggaatagcttccctatagcctgtactttaattctgcgttggatttttgctccccataattgtttgagtaccccaaacggacacttgaaaaaatcgattttttgttttcggggcattccccccgaaccgatgcgcccagatttatggggagaccgaatccctcgggaatagcttccctatagcctgtactttaattctgcgttggatttttgctccccataaatgtttgagtaccccaaacggacacttgaaaaaatcgatttttttgtttcataaatatttttttcagaaagtgctctaaagtgcaccaaaattttatttacaacttaattttagcactctgatgctttagtatcaaaaaggaagatggagaaaaaatttttccttatattttggttatatcgttttgcttttggtggggtgcttggaacagtggaatcatgcgcacccgtccgatctggcaagttaagcaacgattgctgactagccaaaaggttcggtgccgtgatgaaacgaaccagcactgcttaccccgcggcacccggcacggtcccccgaaggaatggatttaattaaattctctccttcggggatttttttccattaggtcgtccgagacccttcgattgctctagtcaatttttaaaaatttttgttgtcggggaggcccccccaaaccgcaggcccccaaatttaggggga

SEQ ID NO: 29646 - DNA, 1155 bp, Heterodera glycines
ttacctcaacagaatatgatgtaaatttcatgtggccgggaataaaattgatttccaacacagttgcaccgactaaaaaaatcatttaaaatgacataatatatataaatataattaagttaattagcggaaaattgatcattgatcagctaaggttcacaaggaagtgcgtcagtgaaactttttaaatcataatcataaatcccaggtttttgagttttaaaaattacatgaattaggttgggtatgtcctcctctgtcaacattaatgatttaaatttcagacggattattcatacactgatcggatttctgattagatcagttatcagatcaagctcattccttattgctgataatgatcacacctttttcatggattatgtctttaccaatttctgatccttttttggatatgtatgacaaattaaactaatgattttgctcatcagaattttggtccttgcatgaattctgattagcacgcttgaactgttgaaaacttcaagactcttggtcggaattataccgtactttcgtctgatttgtaccgtactttttaagtggctctctggcctgtcatgaagcaacgagacagtgaaattgtatttgtttatgtcggtcaatgaaattttgaagtttatttctgtatcaatttcaacgctgggaatggccatgaaaaatggcaatggaatcatcggtgattcctttaaaattaaaattattttaatttaatttaatttaacatacataattagtgtcaatggtgacaaatggcatccatggtggaggatcgttgaccaacagagcagcagcactaatcttaaaaaaaccgaatttataattaccaaataaattttcgcgattgtcgagactctcgagagccaacaaaacctgaaatgacgtcattcgttcaaattgctttttcatttcctttggctccgtccaattaatgggaaaaaattcttcgccctctttgagataattgctctgcacaaatttgccatttaattttatgccataactgtggccagtgaatgcaaaaatgaactcaagcaactgagtttgcgtcgtattttctaatgggttgataattggcacaattcttggcgaatagccctaaaatttttttatatgtaattttgaaaaattcaa

SEQ ID NO: 29647 - DNA, 2478 bp, Heterodera glycines
ttaattataaattagataatttttttaaatttcttccttttgttgaagccatacatttgtggtcataatctgctgtttttcatgctaaaaaattattgaaatttttaggttgttttaaaaaaatatatatttggggaaagcaaaaaaactttcaaagtaggcagggactgaaaattttgtcgggaaataggctaacatataaaaaaaactttggagaggtgaaaaagaggggaaattttgtgttccgaagattttgggtaaaaccgatgaaaaaacttttggtaaatttgcggaaaattaaaaaaaacaaatcccagaaaatccctggggataaaagcaatttgccatgacgctgtaccaacacgcacacataaaacaaaatattttggttgacaacagcgaaaaacattttgatgggctgacagacagatgagggataacaatgaaaaatgcccaaaaatccaattcgacttggaatttctgtctcatcagtcaatcaatcagtcgaccgacccctgggggcaggaatttatgagaggggaaagggcggcttcttgcccgtggcaaaaacatttggctctaaggaatttgatcagaaagaaaatgttggaatttgatgttgcaataatgaaatttaaaaaaatgccaaattgaagcagaaattggcactgaatttttcgatcaattgggaaagcagctaagcttttagtttttttcgatttcaacatttgaaattgaattccttgcccagtaggtccccctagtttccaagtttttgagagataatgcaattcaaaaacaagagaattggccaagattctcgaggccgattttttgaaatttgtcaagaaaaaatttgataaactccatttcaaaattataatgtaaaaaaaaaattgttagtcacttaactattctcatggaaaaattgagctgaaattttcaccaagcgtactttcttataaatattaaaaatcatagacaaaaaaaaaattggaaagtgtaaaagaaaaaaaattttcggattttttcacgaagattgctctaattttgttcaaaatggagtgttaatattttttgaacacttccgatcactctgaagaagaactgctggtcgtctgtcacggaggtataattggttttttcgttcagttttgaaaatatttagcattccggtggttttttgaaatgtaggggatttatttgaaaattttttccaataaaaaattcttacaacgtcgagcagttggctgagcttcagcttgaacttgaccaccagtgttgcgttgttctcgtctaccggcctgaccagcttgttgtagtcggccaacaactcctcaaacagttgggccgcgtcctgattgccgcgcgacggatgcacaaccatggccaagagcagaagtggcacaacggaagaccagcagcagaagcaatggagcagaggggcgacggaaaaaacagcgcacttggcaaacgatgccgatgatgaggagggggagggatgatgaagcacggatttagtggtggaagatgctaaaacggatgatgatgataaagatgatggtggtggataatcaaacagaggaaaatagggtttagaagatgaagcggaagatgtgtggcagctaattgacggcggtgattgggtcaataatgaaaaggatgatgatgataatggggattaatggggtggagggtgaagcaattagcggtttggatgatgataattgggatgataattgacggttgctgctaatgatgtcaatgttaaagttgtcgttgttgtttctgctgggccaacagcagccgatcatgcccaacggtcgtggtattgtagttgcagcaacggctgattacggtcgtcgtttggaaaaacaacagcgacaacaaagggaacaactctaatgatgaagatgatgacggtagcggcaagttttcgttgcgacaaataatgttagacgacgacggcataaagcggaaggcggcacagtgtgacaatcgaagaatggtagtggtgatggtggtactgtagcagcggcggcggctcggttctactgtagctgatgtacagtgggaaaactgtttgttgttgatgttgctggagcgcatgcgcggcgccaatgcgaagcgaatgcgttgatgatacggtaggagttcgtgcactacagtaatggcaccatgacgaattagttaattgtattaatttatatgtaagtgctgctgtactgaattaattatgggtgtgatacagggagatgaagcagaattcgaatttaaaatattacaaacatacaagggacctgtggcaagaaaagtcttgaaacattgtcaaaaaatgtttaaacccgagttttgtgccaaatatctcttaaaaaaagtttttaaagcacgaaccttaggcctaaatatctctaaaaatcttaaaaatcctaactttaggtccagtaccttcaataatttttaaaatacgtcctaatc

SEQ ID NO: 29648 - DNA, 1443 bp, Heterodera glycines
ccgttctccgtccattcggtgctttcacgcgcgggcttcaatttcgatggtcagccaatgttcgcgtccaatccgatcgaaaatgacgtgagtctgacaaatccatccgaatggcccactgtatggcataaaaagcgaatgatcgtgacgcaaaatgccaaatttctgaaaaatgtcccaaatttgggttttttccactctcacccgactttttccgctaatttaccacaaattcggcctcacaaagatcgatgacattcagtttgaaccacaaccagcgcacgcgtctttcgccgtaaaagtgcgctgttcgcagcatccgctcaatcaattcggccgcgtatgcgacggcgtccgcgaaaagtgccacggcacaatcggagggagaagtcatcgcaaaaggtgaccaacgaagggcaggcggaacgaaggacagtgccaatgtgagagtggacagacgggggcagacaaagcacaaaatggagagcaaacggagccaatggtcgacgacgagccaatggaggaagaacggctcaaggagagggaggtggacacggaggaacagctccaactcaacggcttcagaagggacgacggaaaaatatctgagaatgacggggggggggggggaagcattgaagtaatgggcaagcaatcaatggtaatgccactccacctgcattttgtgccggttctgtgggtttcgtccctctcttcaacggtaaattcgatgatttgcggatggaaccgaccgctttccgcgagttcgtagaccaaagccgtgctggcacgacacacctccttaaataaaattttttaaaaatctcattgtgttttcacttgccatgaccacacagagagacggcgaatattcagtgccatcgcgaacattcagtgccatcgatggcgtgcagaacagcagccattcgcgcagtgcgccgtcagcgccaattcggcaacgtgcccccgtgacgacggactgtcgttgttcaaattgtacagcgagcgaagacattcaaagaaagtgaaaaggaaaagcacttaaagaaagaaggaaaaaatagcaaaaattataaatattcgaaaactaaaatgtaaatttttctgaaaaacggtttaaacttttttattgattgatttaatatcattttgataaggacactatgggtacgccccagtgtcagacaaaattgctcataacgccaaatagcgcatttggcgtaaatttttgcccgctatttcaaaatttacactgaaaaatgccttttttgtattttttattttgatctgctataactagggttgtaaattatatggactaaaaaacgcgaaatatggacattaaatatggactaaaaagcccgaaatatggactaaaaaggccaaaaatggccaaatatggaccaaaatatggataaaaaatgccaaaatatatattgtaaa

SEQ ID NO: 29649 - DNA, 1300 bp, Heterodera glycines
  unsure (1)..(1300): unsure at all n locations
tccggattttaagcccgagtgttgaattttcttgtgattctcctataattttcagttaataagttgtcagttttattctttaattctataagtaaatcccgaaaacattgcaccaattgacttttctccggattttaagcccgagtgttgaattttcttgtgattcacctataattttcagttaataagttgtcagttttattctttaattctataggtaaatcccgaaaacattgcaccaattgacttttctacgataggtaaatcccgaaaacattgcaccaattgacttttctccggattttaagcccaagtgttgaattttcttgtgattcacctataattttcagttaataagttgtcagttttattctttaattctataggtaaatcccgaaaacattgcgccaattgacttttctccggattttaagcccaaatgttgaattttcttgtgattcacctataattttcagttaataagttgtcagttttattctttaattctataggtaaatcccgaaaacattgcgccaattgacttttctccggattttaagcccaaatgttgaattttcttgtgattcacctataattttcagttaataagttgtcagttttattctttaattctataggtaaatcccgaaaacattgcgccaattgacttttctccggattttaagcccaaatgttgaattttcttgtgattcaccaataattttcagttaataagttgtcagttttattctttaattctataggtaaatcccgaaaacattgcgccaattgacttttctccggattttaagcccaaatgttgaattttcttgtgattcacctataattttcagttaataagttgtcagttttattctttaattctataggtaaatcccgaaaacattgcgccaattgacttttctccggattttaagcctgaatgttgaattttcttgtgattcaccaataattttcagttaataagttgtcagttttattctttaattctataggtaaatcccgaaaacattgcgccaattgacttttctccggattttaagcccaaatgttgaattttcttgtgattcacctataattttcagttaataaatttgtcagttttattttcttaattctataggtaaatcccgaaaacattgcgccaattgacttttctccggattttaagcctaaatggtgaattttcttgtgattcactataattntcagttaataagttgtcagttttattctttattctataggtaaatcccgaaaacatgccccaattgacttt

SEQ ID NO: 29650 - DNA, 1657 bp, Heterodera glycines
  unsure (1)..(1657): unsure at all n locations
tatatagctaaaccataatttccctatttcagaagatccgtcgtccctttcggcttaattcctccaaataaaaatgtgcttctcatccgaaattgaaaacacacgcaaaaattgcaaatttgtcttcgagcaaccttgtcaatgtcctcccaaccaactcgaggccatcaaattcagcaaggtgtggaaaatttcaaaaaaacccaaagtttttttctaagcaaatccctttcccctctccgtttgttaaggtgacaaccgggcgaaaaggcggtggacaggcttgctgcttgattatgtgtggcatttttggccttgtaagttttcagtttttgccgaaatttgtatcaaatttcactgcccccccctccatattttcggcgttggtcgtgggattgtcggtgatgctctacgtctgcatatcccgtaattatggtccagatgagatgccatatatactgtttgtgtccaccatcattgttgcgtgttgcgttattgtatgctgtgctgctgcaggtccagtaaatacgccgaataatatttattgtttttcatggtccgttattgatcagtcactgatcaagaaatatgatgttacttccatccattctgagactaaaacccgccaaatccgaatcatttgaattcgaatgtgtataaagagtcgaatttctcgaaacaaattgggtgggctttttggtatggataattctttgtaaataaggcaccattttctgtcgttgtaattgtttatttatgtattttacccaagtcccatttttgttacagtcggaggcggtcacagttcgttggaagtactgtaccgatgttcaccgtgtggcaaagatacgcacagaatttatgagtgcttcagtacgtcaatttttaccacatcccctcaattacaataaattttgtcctgatttaagttgaggtcgattacttcggcgagagaagccgtcgctacgactattgggacaattcttaccgcactcgccaccgtactacctaccgtactcgaacgtacagtgcgtggggacagtacacggacaaagtcgaaaaatgtgaactgcaacagggacggatgaccatgaagaacttcgatacggtggagcgcaaattcgatgtgatgagcattgttcaggacaattattacaagacaaccgatgattggaccaacacttttataaggcaccttgaataggcatgccaaatggcaacactttattgtataactgtattatatatatgcgtatttctcgtataactgtattatatttgtatatgtgaataatactgtgttgtctgaatgaatgttatacggtcttttttgtccaaaatgagtacgtttcattccccaatgtctttcacccttccaatccgaaaagatagcaatcggagacgcaaaaccgctcaactaacaaaaatgagaagaaaaattgcagccaaacctacatagttttgtaccaaatancaatttgatagttttttccttcgttttttggcaatggataactgagtccccctttgaaaagagacacttcagtatccgattttttacatgaaaatggcaaatacgcccctaatttgcatttttctcatcatacaaaaacggcttacctanatacacgtaaacaaactgaaagccatgccaatt

SEQ ID NO: 29651 - DNA, 973 bp, Heterodera glycines
actgagtataggcctcaatttttattttttcagcgtttttggtcattttcttgtccaattgagcgccggcgctttgtctattctaaaaatttatttccggaatttccaacgaaaaatgccaacccccttccctgcccgtgtttttagtcctcctacacatgccaattgtctaatgtgctgaaccggtacgtgtgctgtggcacacccgctgccgtggtgttgtgcgcagacgggcgcgagacgtaccaacaggagccgggtcagtcacccgcgtcaagagtcagaaattcttgaatttttggaaataaattaccctaactacacttcagcctccctttaaaagggcacaatgcttagcttatcaaatttttatcaaaattttatcacggcaaggacattcttggaattaaggacgttttgtcaaggacagaataaagaccagcaaagactttcaaggacgtccttggcacccaaggccgacgaactctagttcaaaaaaaatccttctctcccctcaggcagagtcgtacaatgcaacccgatcacatggccaagtgaatgcccggccggctacgagtgcggtaaaatcttgctaattgccaaaaattttataggagctatttctttggaattttgcacattttaaaatgctgatctccggcttatttaaaaattgatccgccccattccagtacaaaacttcttggactataacttttgatagagacatcgcaaaccctaaaaacctataaccattcggttcctctcgacgagaggaaccgattgatatgcgatatgataagttatctctttgtgttaaaatcattgacaaaatagtttgataaaatcatcgataaaagcataaatttttgcttcgacgccagattttggtcaggcctaaaattaccctcgaaaattgatttcctttgtcgggatcatgggttttttattggggggggggcataacgaaaaa

SEQ ID NO: 29652 - DNA, 1000 bp, Heterodera glycines
  unsure (1)..(1000): unsure at all n locations
aaatttggaaaattggctatctctttttctgctcaacagtaataggaattccaaccgcattctcagaataattacgccgatactaattgttctggaatttgtttctcggcgcgtttgtttgggaaaaatttggaaaattggctatctctttttctgctcaacagtaataggaattccaaccgcattctcagaataattacgccgatactaattgttctggaatttgtttctcggcgcgtttgtttgggaaaaatttggaaaattggctatctctttttctgctcaacagtaataggaattccaaccgcattctcagaataattacgccgatactaattgttctggaatttgtttctctgcgcgtttgtttgggaaaaatttggaaaattggatatctctttttctgctcaacagtaataggaattccaaccgcattctcagaataattacgccgatactaattgttctggaatttgtttctctgcgcgtttgtttgggaaaaatttggaaaattggctatctctttttctgctcaacagtaataggaattccaaccgcattctcagaataattacgccgatactaattgttctggaatttgtttctctgcgcgtttgtttgggaaaaatttggaaaattggctatctctttttctgctcaacagtaataggaattccaaccgcattctcagaataattacgccgatactaattgttctggaatttgtttctcggcgcgtttgtttgggaaaaatttggaaaattggctatctctttttctgctcaacagtaataggaattccaaccgcattctcagaataattacgccgatactaattgttctggaatttgtttctctgcgcgtttgtttgggaaaatttggaaaatggctatctctttttctgctncacagtaatagggattccaaccgcattctcagaataattacgccgatactaattgttctggaatttgtttctcggcgcgtttgtttgggaaaa

SEQ ID NO: 29653 - DNA, 1175 bp, Heterodera glycines
ttggctttagcctcggcatcctttggagcctttttttctgcatcttcttgggtttagtctcggcatccgttttagccttcttttctgcgtctttcttggctttagcctcggtatccttctgagctttctcttctgcgtctttttgggctttagtctcggcatcctttttagccttctcttctgcgtctttcttggctttagtctcggcatccgttttagccttctcttctgcgtctttcttggctttagtctcggcatcctttttagccttctcttctgcgtctttcttggctttaacctcggcctcctttttagccttctcttctgcgtctttcttggctttagcctcggcatccttctgagccttctcttctgcgtctttcttggctttagtctcggcatccgttttagccttctcttctgcgtctttcttggctttagcctcggcatccttctgagccttcttctcctcagcctcttttctcttcttttctgctggagatggtggtacttccactggtttctcttcctgcttcagcctttcctttgtctcttccgccttcttcgcttccggcactacggctacgccttcggcaggtgcctcaggcttttcttcgggcttagccttttgcttcttcatttcttcctcctttttctttgcttctgcgtctttcttggctttaacctcggcatccgttttagccttctcttctgcgtctttcttggctttaacctcggcatccgttttagccttctcttctgcgtctttcttggctttagcctcggcatccgttttagccttctcttctgcgtctttcttggctttagtctcggcatcctttttagccttctcttctgcatctttcttggctttagcctcggcctcctttttagccttctcttctgcgtctttcttggctttagcctcggcatccgttttagccttctcttctgcgtctttcttggctttagtctcggcatccgttttagccttctcttctgcgtctttcttggctttagcctcggcatccttctgagccttctcttctgcgtctttcttggctttaacctcggcatccgttttagccttctcttctgcgtctttcttggctttaacctcggcctcctttttagccttctcatctgcgtctttcttgactttagtctcggcatcc

SEQ ID NO: 29654 - DNA, 1674 bp, Heterodera glycines
cctgaactcggatcaaaaaattcccgctgtgagggcactccgcagaagtgtcctctataatacagtattttttattttttgatcagaccaaatcccggacctgtacagacacggagactcagttaatttttttttcccacttcagtaccaggcgaataactcattagggtttgacctgagcgcaggtggccagcagacttattgtagagctcaatgagctcgatttttccagattttaaaatttcgaaaattttcaaaatttttcgagttaggcctaaaaaacggttttcgggttttttaattttatgattttttaacgaattttcacagaaaaacggagaccacttccaaaacatagtttttcgagctctatcgactggtatttttttcggaaaaatttcgattttttcccggaaatagaaaaaaattttggcctgagcgggacatttgagtcccggctccataactcgttaggggttggttttatcgaaaaaacgccttagggcaaaattgtagagctttttaagctctatctaatggtatactatatgaagggaaattttcaaaaattttcgagctaggccccctagaaattttcaaaaattttttttgggttgaaaaagagggtgaaaaatatttttctggggtattttgatgtgctgagcacgaatctgatgtttgttttacgtttcagaatttttggaattttttaaaaattttttattttttggcaattttttggccctcgggattttggcctaatatttaaaaattcataacaaatcgaagggttgatcaattttacaggattaaagccttaaaaatagagaaaaatcaggagaattttatggactttatttggaatttctatctaaaaaaggaaaaaagttattccagaatttctggaaaaattcgaattttcagaaaaaaatttataactcgcttctgaaaagatattcaggaaaagtaaaatgctacaaaaatccgcaatttttagctctattttataaattttatttcacatttttatcacttttttgaaaaatgttataaaaataaaagtgattttgggattccagaccaaagggggtggacaggatttttgagtgaaaattttttttcaataaaaatcttccaaaaacatgtctttatgggttatttgggcggctgatcacgaatacgtaatcagattttacttttgacatcgataagacctcagaatccctgtgtgattggggattctgaggcatcattttgagggggggggggggggggaaaaatacacttgtcctttattgttcaaaataggcaaataatattttacattttgggctttacattaaagttccactatgatgtctttaattttgtacatcaaacaaaataaatgatcataagaagaaaatcttaatataattgggtgatttaaattgattacttcgaatgaatgaagtaatgagttgtttttattcacatttgctacgacaaatttttaaaaatatatcatttcaatgtttcggcgatgaatatttaatgatactatgacacaatccaactttggcaattcagctttatctcaaatccctgcccaaatgcatttaattaatttttaaaattttattaaaaaaattcaatagaccttttaaagcatttttaaagcaaattaaaaagatt

SEQ ID NO: 29655 - DNA, 1396 bp, Heterodera glycines
  unsure (1)..(1396): unsure at all n locations
accatgtatgtgacttttctaagcaatctaagatgatttaaaaaaaaaaatttttaatttgtggcgtacgaaccatataagtaccgaaccatggtccagggatgcaatttttcccgcttttggaagcatatatttattcatttttttagtcttttagagtgtcataaaaaatgcgaaaattgatgcgtttcttcaacattttttttccacgttatgagacatggcgtgccacacatacacattcttgactttgaaaggaccactccaacccaaaacaaacacaataacttacttttgacattaaatttgcgctgttttgacggcggcatttttctgcaattatctgtaaaaatttgtgtgtgctttaaatgtgaaaagtgtgtcaaagaaaataaaaatatataggtaataattcattttgaaatgggaactttatacgttttttgtggcatattttaataatatttattgaaaataattaagcgaaaagtttaaattgttagtaagcagcaattaggaggacaaaaaattacaacacaaaaattaaattatggcgaaagaaaaattgcgtaaaaatataataaaatgaaagtaaagcttcgtggaatggaaaataaaatcaaaaagtcacagaataacaaggaaaaaatatattatacaacatttcggaaaaagcctgacattagcctggggaaaaatttcgattattgcagccataatttttggaaaattaccaaggaaaacccaaaaattcggggaacaaaaaagttttcgggttgacccatcaaaattttttttccttggttaacgacatgttcagagcaatgccaataaaaaaagttttttgtctccgatcagccgtcagtatgcaactcggccaacggcataatgctgctgcggctgcactgcttggttgtgccgatggccggtaacaacggcggcggcggtggcggtgccgtcggagtaacagttcagccaattgttgctgccgtgcaacgatgtttggtaggaatttcggcgaacacttgccaatgtggcgccaacacttcgcttctcggcacgtctttctaaaaaatgcaaaaaaaaagcatgaaattttcaacaaatgattttttgaaaaattaaaaaaaaaatttttttgggaaatttgggtgagggaggccttgttaagattttgtgtaaaaacgaccgaattttgcgatttttagccgatttgatgctttttattaacaaattttcactaaaaaagtgtataatttcgaaaaaaaaattacgaaatagaaaaacgaaatcgtaaactattttaaagaaatgcaattcgaaatcataaaaatgttgactttttggcacagtgttccccgggtgctttctgtacatacattnttttagggggggg

SEQ ID NO: 29656 - DNA, 736 bp, Heterodera glycines
  unsure (1)..(736): unsure at all n locations
ctgtgccacacacgctagtttatatatacctaaagaaacaaggcaactcatttccaaaactaaaatctccttacggtttgccgggaggggttcgaaatttcgaccttgggggtaacttttgacggcgcattcaggaaaactatagattttccgatccgagggccaactgagcgccaggcgctgaaaagtcactttttaaaaaatttttttgctctttttgggattcaaaaattttttaaaggcctaaatgaaaaatcggcctcgataggattttaagttggacttttttggattttttttgtttcttgaccgaaccccaaggtcttgtcagtttttccgaaaaactggctaaaaattgcatacttttttgggccatttcagcgccggtggaataactccccggcttttgattggaggaggtcggtgtaagcggcttttttgtagagctcgacgagctctatccaaccatgtttttagatttcagaaattttcagaaattttcgagctaggccccctcgaaaattttccgtttttgaattttattattttttacagatttttccggggaaaacggagaccactttcaagcaaccgtttttcatgctctatcgattggtgtcattttcagaaaaaattttaaaaatttttttggaaatagaaaattttggttgctaggcctcaatttcagttctatggctatatcttctcaganggttgattttagcanaaaattcat

SEQ ID NO: 29657 - DNA, 1149 bp, Heterodera glycines
  unsure (1)..(1149): unsure at all n locations
agggaatccgcggaagagatggtgtccgcgctgccccgcgaaatgcggtgacgaccagcggggagggggtcgcgccttttaacgcaaaataacacgaccccgcccattccatcggtggccgactggttaacgcctcggcacaaccaccatctcgggttcaatcccgcgcggcgaaactcccgcgcatttaacccccacggcccaaaatctcgcacaacccccttcccacacccccaaattccgaccccacaccatcccgcgcacctaccaccatcccgaacccacatctcccgacgcatccccccaccccattcccgtcagagacgcagacacaaccacctaataggcacggacccgcccgctcatcctctctgcgctcagcggagaaaatcaatcaatagttaaggtggtctccccatgtagtacgggtgtctgtattaacaatttaatttttttttatcattatttcactcattactgacggtggcagttttcggaacaatgaatgctttcgtaacgagaaagtttaattcaaacaaaactggataagaaattaaaattaaaatattcattaaatattgaaaaaaaattaaatataaagtgaaaatattcaattacgaatataacaacagtattttcattatggaatttgttaaaaaaatcaaaaaaagatgtgtgatataaattttaaagtactcattttccataatggaatctgaatagtaattaaaaaatattaaattaaaagcttctcccatttaatattaattaaaattataacaatcaataaaaatctgaaccattttgatttggtattggttgctaccttatttcaattgaaacaaaaatggcctgacaagagaaataaattatagctaaaattattcacaacttcaaagatgttaataaacaaaaaatcgcacagtgaaattttagtatttaaatgaatacaaaattaaatattccccaaaaacatcttcttgcctttgtgaatgaattgtaaaagttcactacaagtttcttaatgtatttaaatagactaaaatgactaataaaattaacataaagtaaaataaaaaaaaaggttattaatccanaaattttaaatattaaaaattgttttgatacaaatactnnatatgacctgca

SEQ ID NO: 29658 - DNA, 1616 bp, Heterodera glycines
  unsure (1)..(1616): unsure at all n locations
aaataatgaattgtttcactttatcttgcttctttactgtaatgcgggtccggagaagcaatttccaccatttctcttattttgttggcgtattccgttacactttctgtgcccattttaatttttgcctacatttttcgcgcccacatcgggccatccaattttttggtcattgcggccaattcctccgttaaggaacgccaattattcttttatttgccgggatattttgataaatctccttggcttccccttctaagaataatggcaaaagacggatgcagtccggtggatgccagttcgatgctgtcgccagcatattaaattcacggagaaatttgtgaaaatccccgattccgtcaaatttcggaattttgccttctcttatctctttcttgcctacttagttccttatttttaaagggtctggaatattccgaagtcgattcaattttgtttcccttttgtgattttttaattcaccggaaaaatttaactcaatttacaggtgtaaccgtccaattattttaatttttccgtttgctcagctttgtgtgaatttggtcagaaaattccacctgcacaattngtcctgtgtgtccttgtcgcaattcctccggcgattgtgtccaccaattcacgtttgaacggtttattgagagaatttgacaaatttgaaatgtctaaattataaaatgttacggtagaacaaaattactgtattgcagataattaaaaaaaaataatttagaaattatttaatttttattattattttctaatatgtgattttcgacaagaggagcaatttgtcgaatttttcgccaattagttattccaccgttaaaatgagtgcctagggctttcgagggcccattaaaactttaatctttcatcattttttagtctgtcattaatgtgatatcggccgataattagctaattaattgtgcttaattgctttaatgctttttcatttctttcaattgttccaattttcttattttctcgtgatcacccgggaagatttttcttattctttgctcattattactcgctgatctcttcttttccctcgaaatttgcccaggcgaccccttgtgatcaccagtcggcgcctgacttataatcacaggtcatcgttcggcaccaaatcaacggttttattgcttttggcgaattccaaactattacgaaattagaaaatttgactaattgatttgtgtgaagtatgaaaaaaaaataccgtatttgcaatttaaacttgaattacttttatttggaaatgttagcatgtcggcaattaaaactcgaattaatttttatgtctttatttagaattattttaattttcaatttttcgcattttctctctctttgacttgtttttaacatctgccaatgtcgtcgcgtttctcatcatttacaaaagaatttaatgaatagaatttgcaaataattaagggaaaaaatcgtttgcattttanattaatttgaattcgtcgccgtatctccgttctttcatagagcattcattttgttgagctcgacaatttttgtgtacttttggatttatttaatttttgtccanattcccatttttttatttttaatta

SEQ ID NO: 29659 - DNA, 937 bp, Heterodera glycines
tatattattttagcaaattttcattttccattacccttctttaaattttacaaggataatggcgcatactgtactaatttacctctgagatttgcatccaatagttttgcttaaatttttacgaattttcgacttttaaacctattgttttttatgctttcctgtaactctaaataatttgatcatttttttcagttttatgccgacaatcattgcctttttgaacaaatgtttgccaaattcggtgaaaaaaattggcacaacgcaaatcaatttggatgaaaatggcataaaaattggttttgaagcaacggcaggagcggtcgcaaattcgctagaaacttcaacggcaacagcgattgacgaattttcaacggttgcaaatctgtcgcaaatgcttggcgaaacggacaatactgaatcggcgaacaaaaacaacagcaacaacgacattccgccaacgtctggcggccaagcggaagtggcatccatttcaaattcaaatttgacttcatccgctgatgatggacaaaatgccacgggaggagggccgctcaccaaattggaaaaacgagataagccagaaaatcggcgaattctggtggacaatgagcgtgatgagcccataaaagcggaggaagaagacgaaaaaaaggatcgagaagaaagtgccaaagcggagagggaccaacaaacattgaggaaaattgttcctgacagggtaaaagtaaatttctttttaatattttttgaaaaaggaatttttttacttccgctccggaccaccattttttcatatttttgaaaatttgatccaaaatggcaaaaattggtcatttttttggcgaaaatggcaacaaattccctgttttttgtctaggcgatgaaacttttaaaatttattggagaaaaaaattttggagtctaagcccaaaaa

SEQ ID NO: 29660 - DNA, 1495 bp, Heterodera glycines
  unsure (1)..(1495): unsure at all n locations
cccatcgtaaacaacctggaaatggtttaaaaaatatctcatttaattgcttacaattagtacccctccccctccctggacatactgcttcatcgtataaagtggaattgccatgatggcttttgtttgagtgaaacatgcgaaaatggacaacgaatgggtgcggaaattgaattggcaaagtggaatttggcattccttcacaaaacactcctcgagggggctaaaggggcaaaaaagaaagaattggctttggaaatgcattaattaccgtggcaattaattctttgttttcgccatttgcagcgtccaatgtgacaatgtcagcagaaaaataatcgtaaacgcgagaattattgccgtcgactaaaaacaaaacaaattaaaaatgaaattttatgtatttcaccgtcgtaagtcaacactcggattgtgtacagcgacggattgtgccaatggcggctgtacggttgctgaggcgtcatatcggccgcgtattcgagttcaatctgacgagagaaaaacgcgataattctgttaaaaccacataaaatacacgattagagaatttggcggccttaaattccaattcggtctatgcatttccaaattttaaattccatcggtttgctttcttttgcgtgtccctctcataattaattacctgcaaacgcagtgccccgtccccggtgaagttgcgcttgcaccccgtgtagccaattgtttcgattccgttcgttagcaatttgtcgctgtgcaaagtgccgttccatccgccgcctatgcgttcgagcagtgccaacagttggccaatgccttcgccgtttaggcccgtgccattggtcatttgtggggacagaccgagcacattgacagtgacatttggtagcacagaactgccaaaaacatttttaagggaatttaaatttcaaaagcatgccaaaggctgtgcacattcgtcccccaaaacctttcatttgcttttccaatggccacgcattctttgtgatgactcattcgttgctctttgcttttgttgtcccatttgtactgatctgagaattaaattattataaaagatacaatccggtttgtatcccatttttgggttaaatttttctttattattgtcagaattaccttttgactaatggaaacgcttaaaaattttagtcttgctgatttattcaaagttttgaccctccctgacagcgatttcgaaaagtttggccacatagataacttttttccacatctatttcatttgacccaaaaatgggatacaaatcggactacgttagtaccttataagaatggcaaaaacattcttaaaaggaccttcgtaataaattgttctgttgaacacttgcacttccttctctctgccccattttttgactaccaaaacatcttccaaatgtttttcaacaatttttgccgtggcatttccatgtaaaaaatncggtgaatcgaagggtcgtctaaaatggatgat

SEQ ID NO: 29661 - DNA, 1126 bp, Heterodera glycines
catgcccattcgccaagccctcgctttccgactgctcacgggtgccacgcatgcccattcgccaagccctcgggttccaactgttcacgggtgccacgcatgcccattcgccaagcctcgggttccaactgttcacgggtgccacgcatgcccattcgccaagccctcgggttccaactgttcacgggtgcacgcatgcccattccaactgctcacgggtgccacgcatgcccattccaactgctcacgggtgccacgcatgcccattccaactgctcacgggtgccatgcatgcccatacgccaagccctcgttttccaactgctcacgggtgccacgcatgcccattccaactgctcacgggtgccacgcatgcccattcgccaagccctcgggttccaactgctcacgggcgccacgcatgcccattcgccaagccctcgggttccaactgagcacgggtgccacgcatgcccattccaactgagcacgggtgccacgcatgcccattccaactgctcgctttcctgctcacgggtgccacgcatgcccataagccaagccctcgggttccaactgctcacgggtgccacgcatgcccattccaactgctcgtacgggtgccacgcatgcccataagccaagccctcgggttccaactgctcacgggtgccacacatgccttcgccaagccctgggttccaactgttcacgggtgcacgcatgcccattccaactgctcacgggtgccacgcatgcccattccaactgctcacgggtgccacgcatgcccattcgccaagccctcgggttccaactgttcacgggtgccacgcatgccattcgccaagcaactgttcacgggtgccacgcatgcccattcgccaagccctcgggttccaactgctcacgggcgccacgcatgcccattccccaagccctcgggttccaactgagcacgggtgccacgcatgcccattccaactgaacacgggtgccacgcatgcccattccaactgctcacgggtgccacgcatgcccataaaaaaaagcacctccggttcccactgctcacgggtgccacgcatgcccattccaaatggatcacgggtgccaacgcatgccc

SEQ ID NO: 29662 - DNA, 1175 bp, Heterodera glycines
cgatccaaatgactccgggccccaggaggacaagtgcgcaacaccgccaatgatgcagtagttcatcaacgaagtatagaactttgcgaagaacattttggaacgaaatcgagcaaaaattgaaaggaaaaaatatggccaaaagagattgcaatatcatttttaaaatttaagactttattttgtatcatatagaaccgattggataaatagcaaatatgtttggacgaagaacgatttgttttggccgaaactaaaaaatggtaaaatataattggtgcagtgggaacaaagaagtgtagcaaaaatgacagtgccaaaatcgaatttttgtcgctgattgtagatggataagtgactccaccgataataaaatcaaaaaatgaacaagaatggcgccacaattaatttgtccctgcatatagattgtataagtgattcgattgagattttcaagaaaaccgaaaaatatgttaagaaaaaattatacgccgtttttcgataaatatcgactgaataaatcattactgccttttttatctgactaatatttcgttttacactaactcgatcagaacattccctcatggtgatttcgccatccggaatatttttatttattaaaaaaaggattaaacaaaaactcaacaatatgcaaaagatcgcaaatcactacgatttacacatacccgctgaaactcaaatttttacgaaatgacctttcattcgtcactcagaaagtctcggagatagggcgttgatgggaaatctaatttaataacgcatacattgtaccaccaaattttatcagatcgttatcattcgaactccaactaaattggccgttaaagttttggccattaatccaatcattttttaatttgcgtgccctttctctctctcctctctcatttatatcagtcggtcgtcgtcagttggcttttttggcgggactttaaattgtcggaaattctccacttcttttctcacctaatgggggcttcttcgtcataaaatgaatgaacggatgaattggattgcatggaccgcacgctcacacgcactttcacacataatatacgacatacaaatacagcatacattcgtcggcaaaagcttataacaattttgtctgactgtctgtctgctcgttctcttcgtctacaaaactctct

SEQ ID NO: 29663 - DNA, 1063 bp, Heterodera glycines
cgttaaaaaggcaaaattttggcccaccctgagggggggcacataaaattgcctttctttgtcggcattattttattatatcccccttttaaattcttttgtttttgaattggaaaatgcccttccaatcggtgtccaatttcctcgattgaccttcttctgtcagcccattcggcaactttacccaccacaactatcagcagcatttctccgtctctcccctttgatttcgttgccgtccatccgccgtcggctttttctccgctaaatttggcaaaaaatggcaattttttgttctctatggcatttgctccgtttcaattttggtggcgtccctccatttccgcgtccgaccttccctcaactccatcatcaagttcaagcagcacagcaagcatcgtcagaagaagaaagtcagcggcaactgttcctcctcctccaccttctcctcttccttcgttttcgtcagttgtcgcgccgtcgtccgcccattcgtcggccgtgcttaaattcggtcatgaaacacttttgccgaaacatcagaataaattagacttgaattgcttcaagtttttgccgcctaaactaaaaatttgacctttaattaaccatactaatttgatgtgtgactatgtatgtcaaactttgaatggattatttttcgaagcgaaagtctttgaaaaaaagaaaacaaaaaatgaggtatttatgtaaacaaaaaaacacaggagatagtgttgagaaaaagataaacaaaaagagaaaaagaaagagaactaaaggaaaaaagaaagggagggaagttggggtgaaaggaaggaagcgagagaatttaatgaaaagagagagagaaagagggagaagagagagaaagagggagagagtagagaaagagagaatggtagagcgaagagatgtttagtaaattatgacatagagacaaaagaaagagacaggaagagaaaaggagacaaagaggagagaaacgagacttggatgaaaaacgtatttattgattaaactactatcaaattttatttaaaattatttgaaaaaaccccga

SEQ ID NO: 29664 - DNA, 1150 bp, Heterodera glycines
aaaatggaaaaagaagcaaaaatctaattttctgaaagaaaaaacttattttttttcattcaaaatgattaattttttgtaattataattgcttaataagttatttacatcgatttcaatttatttcattgaaaaaagtacagattttttaaaatatttcgcccctattttaccattattttgttgcttagaatttataataaatttattttgaaagtcttttggctttaaattttaacgatttgtatttattaaataaatttttatcaaaaaaacttatcttcacagaccaatataattgatgaatacgtatttttacggattaaaggtttcaagtggggagcaacaccctcgtcatggaataacttttcataaaaagtcaaaaaaagataaattccaaaaagatctttgaaactctttgttcactaattgttagactgaaatttatgtctttaaaaaagtttcagctctaaatgctccggttaagaggaaaaattgcgaccaggccttttggggtattgttaaagaattaaaaatattgaaaattataaaaataaaaaaattcttttcatttaaatttgtatattttttatgtaatgtatttatttatttatttttttttgctcattgctgctgaagcatatgacccacggtttggccctaagttgagcggtagtcttccagatggcgacgcatttgatgccgaaacatttgacaaattgtattccaatgccggcatcgcaaagttgtatggttgttgcctcccagatgacgactcaattgatgctgaaacatttagtgcaatgccgaagtgaaaaagtataggtgtgtagcaggggtgggacaactctcgcctctcgtctctcgcctctcgccaactctcgccatttttggtactctcgcctctcgtctctcgcctctcgttttttgggacgagaggcgagagttgaaaatacacccctaaagattgaacttttgagcagccagaaaaattttcaaatttacgcgaaaaaaaaatcttaaatctctttctttccttccttaatgttttctctatttttggatagctccaaaatttaaaaaacaagttttggtcattttttgaataaaatctgttaacaaatccgaagacaattttcaaaattttttc

SEQ ID NO: 29665 - DNA, 1057 bp, Heterodera glycines
taaggaagcggggggtggggggtgttcgatgctttcatcaactctttacgaactcaattgtcggggcgggggaagtcggtttccggcgccgattctgaacagacggcgcggaagaggaaatggcggcgaagagaaacgaaaccatcgattgcttccgggggtgacttccgccacttttcttcctccgtgcgcccgacctggcaaatgcgtggcaaatcattcgtgcttattccgaatgtgtaaatgcttctcaacccgaccggcttctgccgttgttcggtgctttggtgccccccgcttcggcttctcctccgttcgtttcccttttgtttcgccccctttccattgtgctgcaccctttcagcgcggggtaatcgttcacagccacacaattggcaccagcagaagaagccgatgccatcaccaacgggctgcctgctcgggcaaattgcgacggaatatttgcactaccgccgctgcgacgtcgccctccaccggcgattgccatttggccgctgtcggctatttgtggacgctgctgcttggcggaaaagcccgagaccgaagcacgccgagaggccgcccctccgctgggataaagcacacgttcaaaagtctccaggacgagattcattggggaaaagcaatcccttcggaaaagtgggaaagggagggacaaaatcggacagaaaacaagcggaaaagggacagagagaagacaacaaaggccggaaaagcagcaggtgggcggagcaattggaattgtgccgggggagagagagcacttttgggaatgaatgaatgaattatttaaataggtaaaagggaaaaggggaggagacaatggaaaacaatggaggaaagaaaagaaaggtaaacgaagtgaaaaggtaacaagggtaaaaaaaaaagggaaggacccaaaaaagggcgaaaagtgacggcaaaaaataaagaaaagcgaatattaaaaggtcagtggtgaaggggggggggaagtgataacaaacaaatttatgaaacactcccccggcgctttttcactttctttcctccg

SEQ ID NO: 29666 - DNA, 760 bp, Heterodera glycines
  unsure (1)..(760): unsure at all n locations
cgcagaattaaattataggctatagggaagctattccccttgaattcgcgactccccataaaacagggcgcagcggcccccttggaccgccccgaaaacaaaaaaaacganaagngcaagggnccgaacggggaacacaaacagaaaaggggagcaaaaagccaacgcagaangaaagnacagaccagagggaagcgagacccgaaggangcggncaccccanaaacccgggcgcagacggacggggggacagccccgaaaacaaaaaaancgaacaacacaagagaccgaaagggggacgcaaacaaagaaggggagcaaaaaaccaacgcagaagcaaagaacagacgaaagggaagaagagccggaaggaagcgggcgccccacaaagcagggcgcagcggcgcggggggacagccccgaaaacaaaaaaaacgacggnaacaagagaccgnggggggaacncaaacaaacacggggagcaaaaacacaacgcagaaagaaaggacagacgacagggaagcgaaacccgaaggaggcggccaccccacaaaacagggcgcagcggaacgggggaacggccccgaaaacaaaaaaagcgacaacgacaagggcgcgcaagggggacacaaacaccgagggggagcaaaaagccaacgcagaaaacaagcacagacgagagggaagcgaatcccgaaggagacggccaccccacaaaaccgggcgcaacggagcggggggacagccccgaaaacaaaaa

SEQ ID NO: 29667 - DNA, 1893 bp, Heterodera glycines
  unsure (1)..(1893): unsure at all n locations
tgtgatattgttgaatattcggacgatgaaggttgaccgagatacagggacaaggaggaccccgccttggaaccaagacgagcaacacaagcaccagncgacggcgagcccaaaaaagaacaaaccggaacacaaccaaacgcaaaggacgacgagcacggcgaggacaaaacaacaggaacccacgagagaagcggagagccaaggcggggaaanccggaacacggacacggacagcangcnaggcgagcacgacagggaaggggagccgancacgacggggaanagacagggacagaagagcgaggagnacgggggcgangagaangaagaagagaggcgcggaggagcgaagcagnacgcgncgaagacgaaaaacaagcagacgggggagaccgaacagcgcacgaaaanncgggggaacacanccgacgnggacaacaggaaaacancgcacnacganacgaacagggagacgganangaannangggaaaggggaggnagacccggcanncnacgncaacaaaaaggannacgggnacganngaaaaangaagagcnncannaagaaaccaagaggcaggccaacgagggacncgaaagtgggtgacgagggagaagtacaaaatgtacaggccggtctgtcagaagggtatcatcgatgaggagcttaatgtgatgccatttggattttgttaattttgtattttatttttgttttttgttaaataaagttgaataaaaattaaagtgatattaggactagcgggggtggaacggtctaacgtgaaggcccactgctgttagccgtaatatttttataaaaaatccaaaagttcaaggggaaaatagcatctatgaccgttattctggtacatagttatacatgggagttgagggaattgtagtttgaccctgtgtcttgaatagaggtgctgctcgacagtaaccccgaggaaacctcggtaggcaaaaagcctattggaacctctaaatgcgatgtcatccggtgagataaactgattgtgcctaaggtgtctcgttataagggcgtgtcttctcaaaaatttctaattttgtttcttccgcagtcgtagaatttcagatagctcgtgaggttcgcattcgttaaaatcgcatagaatttcaatgagagaattcattttgagcaccagtaggcattttcatattcgttgcaaatccttatataccgttacctcaccgccgtatgatgaatttttaccttttctctttatttttaaaattctgagaactgaaatacagatgatgaccactaccaaatcgataattgacaaaaaatatacccaaatatttgaacttgaaactttaattttctcaaattctttgaacacgacaaaattaaagaattcactatttgtgtctgccacatatttgggaagtatttcgtttgagtcaaatcgatctttgtatattttcttctctttaattagataaatttgtccctcaattattagtaagtcggtaaatgatgatggcatagatccgatcggtttagtaataatttcggtgccattatgatgtgtccataaattctctattgtactaatgttaatctcgtctattcgatcgtctctgattacaaaaagtcgaccatcaatatgatcaaatctaaggtccccactgggaaaattcctaacaaccttttcttgactccctcttgttatcgaagtttcatttgtattttcgttttggaaaattaaataactatgatcggtgcaataaaaacacgctcggggctttaattgtcgaaaatcctgataaagcttaacatttgttggtccgcctcttttctattgaattagtttctatggattgatacactccaaccctgaaatacgattcctattta

SEQ ID NO: 29668 - DNA, 1573 bp, Heterodera glycines
ttgttgttgctgtgtgttttgctgttgttgttagtgccatgcttctgcttttgttgctgctggtattgactaacaatggcggcggacgcggtcaaatggcgccaaattcggttgaaatttgttccactatttaatataaaaataaataaaatgaaataatgatttttaataattaaaaaaaaaaattttacaaactttacacatgctccataaaaataataaaatccaaaaaaattcgttaaaaaattgtttttttttatatccgccctcgtatgaaatgaagaataaaaaaaattgccatcccatccccaaacatatcccatgaaatcgagcgccatgagtttacatataaatactctctccaaaggcatttaattttaattaaaaaaacaacaacaatcagctgatcaatcagtgatctgcatagagaaagaatacttacggcgatatgctgcccaactgctgttggtgcatgaacgatggccgcttgacggcgtcctcaagcagcaagtcttggcgttcagcggagcactggtgcatcaacgaatggatggaacgacgagcccacatggaccgaccagcatcagcagcagcgaacagcttgaggatggtgatcagtagggacgtgaattttagtgaagaaaaacttgcacaaattgccaagcggaattttctaactcagctcattgttttcagaagagtttgaaattttgcattaaaatactttggtataaggtctagcagcttgccaaattttagaattttttatgcactcagagatttttaataaaatccgctttttccagcctgaacgccaactttgtggtcaagttttgaaaacaggcagttttttgtaaaaaagttttaacaatattaaaaattctgaaatttaccatagtgctaggtctcatgccaacgtattttcatgcaaaatttcaagctattctgagaacgctgaaccgaattacaaaaatcaacatgagcaaaattcaaacttttattcactaaaattcacgtccctattcataagagaaggcaaattttgaatgagaatttaatcattttttcaactatattttttgaattttatataaaattaattatcaatgataataggttttaatttaaaaaaaatatatttgcgaaatttaacgagataactaagaaagaatcctaaaaaataattaattattctttttctttaaataaaactagtaaaaagttaaaataatttaattaaagtagatgttaaaatttaaaaaaaaattagttttatttattaattagtcgtgccgatttttttggagaacaatcactgggatggtctgaagaattacgtctgtttttttaatcgttggaggaaattctgcattgactgcgagtgcttttttgacaaggatatttaccatacatttgagtgccggcaaggtgttattactgcaacagagtgggcggatttccgtgccaaaaggagagtggagtgaagattgagtgcccgctgtgtcgacgttacttttataattgggaatgctacaactatcatatggggcacccagacttgcaaattgtggag

SEQ ID NO: 29669 - DNA, 2306 bp, Heterodera glycines
  unsure (1)..(2306): unsure at all n locations
gcaggtcgaaaacnttgttaatcaattagtattantttagcaacaaatccacatgtgaatatttcatatttataaaataaaattattcaatttattcattaattatttaaaataagtgaagtgaccgagtggggcaatcttctaggctttataatttttacaaaattttatcacaaaaatttaccttattcttaaactttttaataaattataaagaaatataaaaaattatcaaactttttttttgaaattcacttttttatgttatttattcttaaataaattttaattacttttagttagtttatttatattatgtgttgaatattatctttctctaaatagttccaatctttttactgttgttccaattattgattaatatatgttgattcgatttttattttatatcatttttaacaagcaatttagaaagtgcaatgaaattaaaagatattgttattttgttattgcatatgcggtatccatgaatatttagaagagaatggaccgcaacggatacggtaccggatttttctggattagaatccggtccggtgatttttttgaaaatagggattagtgttttttataatattgatttcaaaaaaaatttcattaatatgaattgtaatttttaattaaaaatgatatatttttacattaatttgaataattctctgcttttttactaattaaacagtttaatttggaataacaatatttaagaatgatgatgtttttcttctgaattttgtacccattaatattaacttaatattaatgtataaattaaacttttttatttatatttataaatgataattgttaagattgaataattgttttcattaaattttgccataatagtaagaatgcttaaaaataaggaatttaataatataaatatatatttgtcttccaaaatacatagaaaatatttttttatacaaattaaattaattcatttcattatataatggaagaaattattgctagttgtgctttaaaaattaatttaattgagtattaggattaataaaaataagattatattaatacttgaacaccaatctagtgcagtatgagtgttgacgaatgtatgtgacattaaatcagactatttgttctctgaacattgcaaccattttttatataaaataaaccttaaagccatatttatataattgttctttttttaattaatttaagatggaaatacatttgcgattagaaatcaagaataattaaatatttaaaaaataaatcgttaataaaacccaaacaaaattgtatatatttaaatttttcattatttatcggttaatttaattgatttcctattcacattcgacttgtccttcatctatttaaatatattttaattttattaaataaagttcatatttctttttttcatttgttctttatgaatttttaattacttattttgtacaattttttccatgcaatattcccgttattgggttcatttcttgtgctgcctgcacccaataattttttatagataattaatttaaaataatttttatgtttttaaatatttgaattaataaataatttatttgctaaatattcaaaaattccagttttgttttttgtttttagtttctattgtataaaaagtttggtaaaattctaaaaattttattacatttttaattttcaaagaaactaatcagtcaaaaatccaatcctgaaaagattttggtgctaggtcgtttcttaaatccgctaaggggtaggaaaacaaaaaattttttgtccaggtaaatcttgactcagaatttctggtacataaatttttttcaattttgtaagaaattttaaaattatattctgatatcacctttccaagaactctagaaaaaattacgtgaaaattatttgagtaaaaatttttattcaaataattgtttttaaagcactacaaattgaattttaaaaaaataatattaaaaatattataatatagcttatttcgatcgcagttgaacgtcaataaattgaattttttcatcgtgaagtcgagaaaattcaagaaattaaatatctcaaatttaaaaaaataataaaaaaaattcaaagaacattttataactaaaaccataatttaatcaaagacaatttttaaaaaaatctattaattaataaaaacagaaatctaattaaaaacaaaagcataaatttaataactttcaaattcaatattcctaacattaatttattcagccgaacaaagaaagaagcaaataaaatatcctgataaagtaaatttagataaa

SEQ ID NO: 29670 - DNA, 821 bp, Heterodera glycines
  unsure (1)..(821): unsure at all n locations
aaaaaattttttttagtgttttaggagcattcccccagaatctgatgcgaacagatttatgaggagacggaatcattcgggaatagcttccctataacctgtactttaattgtgcgttggattttttgctccccatattgtttggagtacccaaaccgatcacttgaaaaaatcgatttttttgttttcggggcagtccccccgaaccgacgcgcccagatttatggggagaccgaatccttcgggagtagcttccctatagcctgtactttaattctgcgttggatttttgctccccataattgtttgagtaccccaaacggacacttgaaaaaatcgatttttttgttttcggggcagtccccccgaaccgatgcgcccagatttatggggagaccgaatccttcgggaatagcttccctatagcctgtactttaattctgcgttggatttttgctccccataattgtttgagtaccccaaacggacacttgaaaaaatcgatttttttgttttcggggcagtccccccgaaccgatgcgcccagatttatggggagaccgaatccttcgggagtagcttccctatagcctgtactttaattctgcgttggatttttgctccccataattgtttgagtaccccaaacggacacttgaaaaaatcgatttttttgttttcggggcagtccccccgaaccgatgcgcccagatttatggggagaccgaatccttcgggagtagcttccctatagcctgtactttaattctgcgttggatttttgctcccccaataattgtttgagtaccccnaaacggaca

SEQ ID NO: 29671 - DNA, 1689 bp, Heterodera glycines
  unsure (1)..(1689): unsure at all n locations
cgtggcttgcaacgcacgaaaaacatgtttcgttggggtgttgctaagctacttttcgagttatcagcacctattttctaggtttttatttttagcacctaaaaaacctaaaaaaattttaaaaaacttattttcacctattttggtgttttgcccaaaatttgttaacaaaaatgcaataaaaaagaaaaatacacccctaagaaccgacccaaaattttttttcaaaaaatacatccctaagaatcgaccagaaaattttcaaaaatgcgcccctaagaaatgaaaaatttctcaaaaatttatctccaaaatttatttattttattttcttgtcgatagtttttgattttgaaaattatgtatatccttaatgacttgacaaaatatttttgcttttaaaagaaaattttcgattttagacccctaaattcggaactttttgtcacctattttcccatttttagcacctattttgcgggttttttagaacctaaaacctacctattttgccagtttttagcacctaaaaatatcatccctagttataaataaataaattacccatattttcggcaaatatttgaatttctcctgctgatggtcttggcgtactgtttttgttcagagaattcacttcaccgtcaaccaaaaacaaaggcactgctgctgatggggtgacggcattggcatttcggcaatacattctccttattgacacgaggaaaagcagcaaactgtgaaattatcagccaattaaaaaattccccttttttgaatataaaaaagttttaataattttggttttgagaaaaatccttgcgaataaaatatgtaagaaaaatttccaacaccctgcctgatccaaaggtaaaacaccaaatttacttgaattcgagcctctgtggggatctatttttcagttccttcaaaatggggcttttatttctgggaccgggctttatgggtttaaatcccgttacttatctcggcctgatgccaatccagatcccgactttttcaaaattctgggctctataaatcagaatgtacataaaatattcaattacctgaacaaattaagcgattgtcgttcaagcatttgaaaagccattttttaattgaaagattgatgaaatgaacactaatttttaatttctttttaattattattattactgtatgtaaatgtaaaatggggaaagtgtttcaatgggttttgcagcagattatgggaatataataatccaattgaagatgaagcaacaacaaacaaagatgaaacaagtggtcaaacaagtggcataacataaatgtgtgtgtacacataccttagttgatcaagttacgcctccggaaatgtaaaactggattatcagatatgggaattttttggagatctacatacctaattaggtaaaataaatacagtctattaatcaaaaaatttttttaaagcacttcacctatttcaactagcccaatcaagctgagttttttttaccaatcataccttccacataaacatttagaacacacaaaaaatctgatagtttagaagatacaaaaaattctagtatgaattttatagatttagttggtctgtaaaaaatgttttgngcattttanatttagaacatannattttttgttctcctctcatatttttgtatgtttcttaacatttat

SEQ ID NO: 29672 - DNA, 936 bp, Heterodera glycines
ggaaacactgggacaattccaacgacttcataagcactgactcatcagcagagactgtgagtgatgagctcgacgagttcaagccgccttccggcgaacggaaacggcccgtgccgaatggaatggaacgcccgcgacgactcgtcggcattcgacgatccgttgacacaactcaacagctccaattgaggaaaagcacaaggaagaaatcgctgttgccgaaaagcactgcaacaacacaaaatgagtttctgaacggaagaaagcattcgtcggtcattgaagaaaggacaacaggaaggccgacgagtaactgcaacacaaccaccacagcaaaacgaacggcgagaaggccagcgagagacgacagcaacagcagcattggctcatcatcttctgcattgtcatccctgtcgtccgcaattggactggcagaggcggcggatgacccaccaggggccagcagtggaagaagagtgcttttttcgcctgttcgtagagggcggagggcgggtcatccgcgtggtggcggagggcgtctttcatcactccaaacaacggcatctgccgacaaaatcaatgatgacaacgacgcaccggcgctgagattgagcaccaccggcagagcaacaacaattgggagccgcaggagagggggaggaggcatggcaagacggagcagaggcggacccatcactttggaaacagtggcgatgggaaacgatgtgccctctgaaactgagcaaatggaagggaagggagggcgagcagtacgacgccaacagcgaagcagaggaggaagaagaggagggggcgggagacagcgccgagttgggggacatgtcggaagaggcagcagcagaacgacgcaagaggggcacaatcagacgatgaaatagacaggagaatcatcggtgtcagaaaaagaggacaacg

SEQ ID NO: 29673 - DNA, 1861 bp, Heterodera glycines
agatgtgtaccaataaatagagaatgccagagaaaaacattatctttttttctctaattttttgtctccttttggcgtactatctaatatttttgttattaggaaaaacaacatttatttcgtgacgtttaacttttttcctgcacgttaaatacacaccaaattttgcatgtcgatagagaaaaaaattctgcatcgattcatctgttattttttgattctatctgttagtttatgaattatttagtcattaataacaaattatccaattatagctttcatggataatataaagcaaaatttgcgaactaaaaacgcacgacaacaacgttgggacaaggccaagcgagaggagagaaaagcgcagacgcagagggcgacagaagcacggctggccaagaaaagtgagttttttcatcaattttaactcaaaaaaatcattttttgaatttcagccgctccactgccgaatcccaatgccgaagtgccacagcaggacgaagcagggccgtcaacatctgctgcaccgacagaagaagcgatggagccgcctccaccaactccaggaccagtgccaacgccagaaatggacgaggaaattttggaattcgacgacccgccgccgtcgacacctgccacaccaattggcgatttggtgccgtttccgtcaacaccaactgcgccaatggacaccggagagacgaccccgccaccgctggccattgacgagcgatcagagcgcatcgaacagctggaaaagcaactgaaggaccgggatgacaccattcaatttctgcgcgagcaggtgcgcaatcgagaagcgctgatcagtgatctgcgtcggcagctggacgagcacattgtaccaccgatggcaccaccaacgaccagcaaaagtgagtgaaaatctcacattttaattttaaaaaaccttcatttttcatttaaatttcaaaaaacccatttcattgaattttagcgcctccaaacagaggaagaccgagaaaaggggtggatgaactccagcgcagcgccaggcgcgacatcgtcgacgcaattgtgggcgtcatcgatcgtgatcgctcgcgttccgcgagccgcgcatcgctggatcggatccatcgggatatccggcacaaattcgcgcactacacgccaaagaagggccaggagcggaaggagtggatggaagctgaggatgggctcctgctgcttgcccagcttgggacacagatggcttacagacggatgcaggcgactctgagcctcatcagcaggcgctttgacaccttcagcctcattgataaaaggtacagattatcaggaattcagtcatcgcgacatacttttttctgggtgatcatcatcaaatatcccccccccccccctcccgcccccctctctaaataaatgccccctttttgagatggattgaaatattttaagggatattagggatttgccagagtctcggttctcgactcaaaccaaattaacatgacttaccacattttttgtttaaattaaagggaattaataaataaattgaataaaataaaattttaaaaaatttgttaggaaaatcttaaaatttattcttaaattaattattttattctattttttaattgaataagattttttaaaagtcttagtcattgagaaatttcgagttttttggggggtctaagtttctcgattccctggaccataaatcaattttatgtagagaaaaagaaaaattcagaaaaaaggaatacagtagtcatacagtaaataataaattgttttctgtattcaaaacaaaaattttatgatcgaaaatttctaagtatctaaaaattttgttgacccggataaa

SEQ ID NO: 29674 - DNA, 967 bp, Heterodera glycines
accgtttctataaagctagagacatatgcgctaaccataaaaaagatgaatcattttttgaaaaatttatatagttcgactaaatttgcaaatcgatttatggtgtacaggatgtttgtcgaaacataactcgtcaggcctttaagatagacctgccattgctattcctgcaaatatggagtctagtcagcccaatcgattgctattcgaatggtttggggtcgttggcccaaacaaaagttgtgctgcttcttgcaaagaagactaagccaattgtaaacagcaagccatccaaatgcttcaatgtaaaaaaaaattacatttggatgcaacctttatttttcctcgcctctcttttcgaaaagaaaagctattagcaagcgtgtttggaccaattctaaaacaaatcggggtaattaatttaatctgactttataagataaatgggaatttaagcgaaggattcatgcaaaataataatctatagaaattctcaaaaaagtagttcctcgcagattcggggaccgtttctataaagctagagacatatgcgctaaccataaaaaagatgaatcattttttgaaaaatttatatagttcgactaaatttgcaaatcgatttatggtgtacaggatgtttgtcgaaacataactcgtcaggcctttaagatagacctgccattgctattcctgcaaatatggagtctagtcagcccaatcgattgctattcgaatggtttggggtcgttggcccaaacaaaagttgtgctgcttcttgcaaagaagacttagccaactgtaaacagcaagccatccaaatgcttcaatgtaaaaaaaaattacatttggatgcaacctttatttttcctcgcctctcttttcgaaaaaaaaagctattagcaagcgtgtttggacaattctaaaacaaatcggggtaattaatttaatctgactttataagataaat

SEQ ID NO: 29675 - DNA, 1297 bp, Heterodera glycines
  unsure (1)..(1297): unsure at all n locations
tttttttttaaattaaaacaaaaaaaattatgatttttttgcaataaaaatttcttagaaaagcgtttacacgtattatttttaaaaattcaattttttaatttatctttttccaaaaaatcgacttttaagagtatatttcaaattttttatcaaaaatcctaaatggtccaaaaatttatttagaaaattgagaagccagaaaaaaaatatatgtatttactttacatgaaaattaaaatccctattaattatgctatgggtatgtcctccacctgctgctgctgttgttgttgttgtgctcacaaatatttgctggttatagaccggctcaaattggttgttgttgctgcccttccgttgtcgcatttgtcttgcttgtgactggtctcgtgaggtgggcattgaagcagcaacctcttccattggtcgattttcattgtcatcataactttttgcccgttttccatctcggcctgggagcaatcggactgggcctaaattaaattgggtttccatatttggtggttttattttcagctctcccttccaccccccatcgaaaggaggggctcccggaaaatgctaaatgcgtcagtaatacagtattttcatataaaatactgtgtatcaagtaataatactaccgtttatcattttcaagaagtcctgattcactgttcaacttgcgaattttccactgacccattttctggtcacggaaaggagtggtcttttataccggactgattgtgaggggtggggagaaaatttaaaaggaagggctcagtgctttgggagatacggtatcgaaatgcctttccaaaaagtacttacgggttcgatcagagcctaattttgtagtgaggattaggaatccggattattttagaaaatttgctaaaattaagataaatttttatttacctgccagtctggcacggacttgctcaaaaaaggatcgctctcgcttttttggcgctgctttgcgatcgcgttctttagaatgaatgaaaaatgttttgttgcggtatttaatgttaatgaatttattaatcaatttctatgataaaataattattgaatttattagggatgtgcgagaaatgattttaccgagaatcgagaaccaagaccgagaccgggaatttttgtcattttggtctccatttttcaaataaatgataaaatgtgggtccggtggtgccgttaggcgccgccgaggaaaattttgagaattttaatgccatttgttactaaaattgctntaaatttcaaanaatttgctgaaattttt

SEQ ID NO: 29676 - DNA, 904 bp, Heterodera glycines
aaaaatctttttttttttttcggggcatcccccccgacccgatgcgcccagatttatggggaggccgaatctttcgggaatagcttccctataccctgtactataattgtgcgtgggatttttgctccccataattgttggagtcccccaagcgcacactagaaaaaatcgatttttttgttttcggggcagtccccccgaaccgatgcgcccagatttatggggagaccgaatccttcgggaatagcttccctatagcctgtactttaattctgcgttggatttttgctccccataattgtttgagtcccccaagcggacacttgaaaaaatcgatttttttgttttcggggcagtccccccgaaccgatgcgcccagatttatggggagaccgaatccttcgggaatagcttccctatagcctgtactttaattctgcgttggatttttgctccccataattgtttgagtaccccaaacggacacttgaaaaaatcgatttttttgttttcggggcagtccccccgaaccgatgcgcccagatttatggggagaccgaatccttcgggaatagcttccctatagcctgtactttaattctgcgttggatttttgctccccataattgtttgagtaccccaaacggacacttgaaaaaatcgattttttttgttttcggggcagtccccccgaaccgatgcgcccagatttatggggagaccgaatccttcgggaatagcttccctatagcctgtactttaattctgcgttggatttttgctccccataattgtttgagtaccccaaacggacacttgaaaaaatcgatttatttttgttttcggggcagtccccctgaccctgaaggccagatttatggggagaccgaatccttcgggaata

SEQ ID NO: 29677 - DNA, 1225 bp, Heterodera glycines
  unsure (1)..(1225): unsure at all n locations
gtcgaacttggcgggtcctngaagaagttttgagcaatcctctcaatgcctttttcctgtacttaatgacttaccaattcgttttgtctcatttcgctgatgtcaatgttctgtgaaatgaaacggtcataccgtattgtcctattacagtatcatccaccctttcgaggtcatccaccaaattggcgtccatataaacacattgggcacagtacgaacggtccgaatcggtgacgaacaacggatggatctgttatgagtaattaataaacccatccatccacaatttaattcctaattgtaagttcagtttcgatgggtcgcctcattacctgcacagatagacagatgcgatacattgttcctgccgggttttccttggcgttttgtccgttttaaattcaaagtttcccttttctcaccagtctttccctggtcattccgcagtcgttgtgtgggaatgcgattctgttctgatttcggaccctaaactcttcccaattccaattccttctctccccccctcctctcacatgcatttggccgtttcgtgaaagtcttgcgcgtaaatatgcgaaggattggcactcgaagttcgtatctttaataattgcaattaatttaatttatttttcgctaattaaatttacatttaatttgattttaatttccttcccattttcccaccttgaccacaatattttcctgctcacagcttacaattggcgtgtcaattatttcatttgggtattttgagccgtcggcaccgtaacacagaacacagtagccgaggaacagtaccgtacaccggcacatgagcattaatggaactttagtgttgggtatgggaggcattcggccgatactttggctggcgattgatttggtaatgcttttgtggcgcaattaaatgccaaaacaaattatgggcggtaagaaaatgaggggaaagggagggacaaagggaggcggggagggaaagtgagcagcatcatcatcattatttaagaaaaagagtatttcttttcttggggaaaaaaaatccccggaaaaaaaaaaaaaaaaaaggggggccgggaccccccttttttgttcccccttttttttgtgaaaacgaaaaaaagaaaaaggggttttccaaaaaagggggggcgccccttccccccccccgcgaaaaaaaaaaccaccccccccccggggggggggggggggggggggggggggg

SEQ ID NO: 29678 - DNA, 1567 bp, Heterodera glycines
gggctcaaattttggagggttttagttccaactttgttggtttttgaggctcttttgtggggggtaggacccggttggggtttcaatttttgctttccccgaaggggggagcgggattgggggaggtgaaggagggtaataaacccgttattttttgcggtccgaatcatcatatgcttcgtccttttttaattttcttctgatggcaattctgtgctgagcagcagtgtccatctgctcaattttgatgttggtatggccccacaggcaaagtccccatagtatggggatggtgttgacagcgctaacccactctccaacatgtactcatcatctgtatcactttccggtaagggggcagcagctgcttccgcaagaggtcccgcacaaccggccgccgtcgttgtatatcgtgtcgccttttctcccactgctccaaacgaccatttctccgagaagccctagtcggtctgggaggacgttgcgggcgaggcggaggacttcctggtggggacggagcgcgacccggaggacttggttggcgccgaggacgtcttccaggtggtggtggtggtggtggtgggggaggccgaggtggtgtgtccacaacttcaccctcttcatcttcagcacctctcctcaacagcacgcttatccctttggtgagctcaactttggccggtctgtctgctagctctcgccgcatttttaaatatcgcctaagctgctggttgtagttgacattttttcgagagggatgtgctcgttcggcccgggcacggttcaaatcgtgtcgaacagcatccaagtttaaatcgcccgtgtccgtcgcagtggtgagaccccgataaatttcttgaggaacaagtagaaatttatttgccatgaataatgaatgattggtgcatgaaaattacaacaatgatgaggggggtatttatgcatttttgctcacaacattctttgccaattcaaccaaaacgggtgttaaaagagcagcgaacaatccgccaaatcctgcgcctttctggacaagcacgcgcctggcgccccgctcacttctcgctctgctcattcggcgtacagtgttcacatggggcattaatcgctttttctgtcgggttgtaagtcggaagcgcgaagcgacgagattcaaacaaatttcaacaagtgagagcagctgttcggtgcttgccattcgaatcagctttttacattttttggcggatttcgttctggccagtgcacagagccaatgcgcattttcttttatcagttgtccaacccttacttgttgttgttgttgttgttgcttatgccgctccatttttaggaatgaacacaactgtcccttcatcttcctcctgctcatccttaaatatatttgtgcgaagccgtaacgatgggtccgatgctgcatgcatgtcgatcaacagataaccatagggccgggcggtcgccttacggtaggcgtcaagaaaaaagtcaagctgacgcggaaagagctgcacgcccatgttgcggatgcacagcagtgaatttggggcacgcatcagtaccaagtact

SEQ ID NO: 29679 - DNA, 1233 bp, Heterodera glycines
  unsure (1)..(1233): unsure at all n locations
tagatattcgataaacttatagcaagatttcctatttttaaattccgaaattccagccgtctctcctctgatggaataccaattgagtctctttatccatatacgagtggcaaaacaggtcagggactcaatttttgcccataatgctggactctgatttagtttcgtaaaatctggcaaaaccattctttggacaaaaaattgcaataaattgaataataaattcaatttttgcattctttattatgtattagccgaattattcactactctttaatttccaaaatttataaatcgaaaaaaataaaattcgtatctataaacatacaaaaatgcctaatttgagtgcctttttgcaaacttagtcaatttactttgggtgatcagtccataaaacaggtgtgcccggtgaatgcggagctgcaggcgtgacggcgctcgtccggacgaagcggcaggggctcttatacaaaccaatggtggggcagttcggctttgtttatgggttggaagcacagatggcttatttgacgactcaccgactgccaatagccgcgcgtatgttttttaagagacgcaaaaaccattaataccaaacctgaggggtattttctaatttttataaaattaaattttttaattttgataacttttatttattttttatttttggggtcgatcatttagcagtgactatttaaagataatactgggactttttttagttaaaaaaccttatcagcgcaaaatgtggtaatgttaaatttagggttgctcctcgacccctcggcgggggggggcaaaatgtcgggggccggggacctcgggggcgacatgtcggggcggggaggagctcaattgtcggggcggggaggagctcaattgtcggggcgtggaggagctcaattgtcgggggtcggggcggggaggagctcaattgtcgggggtcggggaccccgatcggggaatgaccaaattttattttaacccaaaaaaaattttctttttaaatgttcgtaaatgttcgttttttcactttaatcatctgatttcgttagcgccagtaagagtgagtccatgctggcgcctttaaacctgagcttccatttgttcttatttataagaatgttctgattcccagcgactaaaattattctaatttcttanatatacttatagtttaaaattttatggcataatgtcactatttttataaagaaattttaaggtctg

SEQ ID NO: 29680 - DNA, 1218 bp, Heterodera glycines
tgttgtgatcatatttgtatcccattgttcggttatgcgtatgtatttgtacaatggaatgtatgttcttatatgtactctgtatgtacagtatgtataatactcgtcagtaaaatactctccttgttctatgcagtttctgaactttattgcgagaaaatcataatttacatgtcccaaaaaaattatatgttcatgtccattggtttttatgcgtcccatggaattttagtttaagttatgatagtgagcggaccgccactaacggacaactgttaacagaccgaagtcgggtcggcgtcccgcttattactcagatcgctaacagctctgtccgttaacgttcccagttaccgatcaaaatcacttaagaccagctccattaagaacaatttattggggtttctgggtcgctgatcacgaaattttagacatctattttgtgtgggaagaacacgtaaatttttgaagagcatccaaacatttattacatataaaagcatccaaacattatacattaactaattgcaccatcaaaaaattagatgtttatgccgactcggcagaatccttcttcttcgattcctcaattttcttcttttgcactgcttcggtaacaagtggcacaagtttgccttcacgggccaggcatttcaacagcttgacaagaaatggcatgtaattgtgccggcgccgattaacctgatgaaaagggaaatgatcaatcaaaatcatatgtggggggggggaggagaatctaagtaaatttgtgatctgaaggtgccactggagaaaatggaaacggagttgtcttgattttattttttaacgaaaattgtataagttttgaaatttatcccaactccctctttttcattcagtgagtcaccctttgtcactcgttttgttttcctgtccacctcaattttgtagttcctcaacttttcctcctcgccactgatcatcatgtgcagttcattcagttcttttgtcacttcttccgagtccatcccggcctaaaaaattaattaatatggtcagttttttctattttgcgcctaaaaacacgagtgaattgtataaaaaatcaggaactgaaaaccctttttgccaatgccgcacgggaaatttaaatttttaatgaaattagaacatcgacataaattttcaaaaaggacccaaaggaccgaattcagctcggcaacccgctgctcatat

SEQ ID NO: 29681 - DNA, 1575 bp, Heterodera glycines
gttttaaagcttcatcagtttttgtttgcacttcttcactgtttccatcgtttttgtaactatttaaaatgcttattaattaattaattaattatttaattttaattatttccttactcttttcccgcttcgttttcctttttctgttttatttttttctttctgtttttcttttttgttgcttttcctttttcttcttccacccattgctcttcttttgcttcgttttctcttttacaaattcgtaaaatttcatccgttctttcatttccaaatgtttttatcaattgctcagttcccaatccttaattaattaattaattatatttttttaatccattatatttattaacctttcattaatttaattttcagcgcttcatttgaaataattaatgtttttaatgtttcaaaacgtaaatttataaatgaaaaagttccttttatccttccaaacttcataaatttctgcatcaattttaaaaattcctccagtttcattggcgtttcgttcagatcgctttcgaacatttggtcatacaattcaaaaaataaatatttttgcgtttcccaaaattcactaaatgtttcttcaaaatattgtttaattggcacttcattttcccctcccgcctctttttgctgctcattttgcactttttcttcttcctctctctctttttcctcctttaatataattgtctccacaattgtgacccaaaaaatgatgtctaactttagccattcggcacaccgtttttcggcatttccatcaaacaaagcgacctcataaaattcgaccaccggcgcatagaaaaatgcttaaattggacaaagattaattcccaatttactggcttttttaatgttaatgacctctttcaaagtatctttgagttctgaacattgccatgatttggtcggcgtttgccctctcttctgccgtcgtccctttggcactttcgtcgcttagcaatttccgaatccgcgccttcgcccctttgagctcgttaaatgagctcacatacacttcttccgccaaaatcctcttcaaatagtcaaaatggactggtcgcatgcgcactttctgctgcgcaaatgccttttgaatttcgttttccgtttcgcattcgcttggccaccattcatcaatcgttcgcatttttaaatttctggccaactttttgtctttcattcgcttaattaattgctcaacgtaattaattgttctaatgagccgacaaacgtccgtccgttgagaaataaaacaaaaatcgttttccctttttatgttcgcaaaaaaatcatttgatatttcaatgatcaattttatgagtttatttctgacatttgttgaagtatccaaaaggggagcttcgttcagcattttaatgtaattttgcaattcctttattaaaaatgggcccataattcgtccctcgtaaatttgcgcatcgaaagaatcacttttgaagttcaactgactcatcagaagcaaagcgtaaaccgagtcgagaagaagttctcaaaaatgcagcgattaaattaaaaagatttaaaatgaatgggaattaa

SEQ ID NO: 29682 - DNA, 1510 bp, Heterodera glycines
  unsure (1)..(1510): unsure at all n locations
tgctttatgctttttattaagcaaatcaaaattaaaaatgttttaatattttgagcaagatcagcaaattcaacccacatcaattggcctataaatatttaaaaagatttgtttatttgccagttaaaatgcgcatgtacaaaaagaacaaagaaataaataaagagatgtcagcagaatcgagcaagcaaaaagtgatgaaatgtgtgtaaagccataggaaaaagaattacgaggaaattgaatttaaattttgaggaatttacacagtcatggatcggattgaggggttaagttataggccattccattctctgtttttacaatacggtcgcctcccactttcctgtctctgccccccccccctcctcttctgtcttatgtcgccccattcatctgacaattgactgcaccaggtgtcccccttctcggccccctcggctggaggtcggcgttgtctgccactgctgtttcggcaccggcacttccccactgcccagctgggccggaccatcgtacatttctgtccaataggccttggaagaaaaaaaaacaatttcaactttttcagttgtgaaattccacttttcagccccatagcataaatgccgttcgaaaaattttatggagaatttctaagctgaaaaaattgttttttaattttctcgtggagggaaacgacggggagggggggaaataatgcgcccccaatttaaatggctcgaccaccttgacaaaggtttgattgacctccaactatttattaatgtattccccctccccataaaaaagcctcacatggtccatgttgagcagtgcctgcatgatttggatctgattggtggcctccgtcatgtacgcggtcccctgttgctgctgtttgtcctgcatggtctgcagccgcgagttggtgcccaccacagtcgggccgagcactttggccaaattggacaacggcatctgtgtgattgaaataaaaagtgttactgtaataaaaggtattcagttgctttatttatgaaatgaagagaatttaaaataaatttgaataatttaatgagcgatttttgcaattttttcacctgattttcgttggaatgcatcgccaccctttgccaatgcgcacacaaaaaggccaactgaaaagccacgacacaaattataaatttaaaaatggacaggcttcgtattgttgggacatgtagtgaaaggtcggagacgaaaataaatgtataaaatttgaaaaatttgcaagaaaatccatgcaattgcagcataaataattttgttaaacattgaattttttcaagatagcagtaaggaaattgtttanaaacccctttaaaagcaatattcgacttaaataattgacattttccagcatcgttccgtctttccccttgtttcaccaaacatttttagatgaaacccatgatgaaaatggacgagttatttcggacaanaanttggtttcagtgaaggccataagcaaagaaaagtttcactgatt

SEQ ID NO: 29683 - DNA, 1331 bp, Heterodera glycines
  unsure (1)..(1331): unsure at all n locations
ataaatatacacttatgggttggcatatgcataagagtgcaccttcataaatatatacataggagaggcacatgcgtaaaacgtgcatattcacaaaatctatacatatgaaatggcatatgctgcataaaaatgtatattcataaatatacacttatgggatggtatatgcataagagtgcatcttcataaatatatacagaggagaggcacatgcgtaaaacgtgcatattcacaaaatctatacatatgaaatggcatatgctgcataaaaatgcatattcataaatataaataatacaccagccccttttaacaaaattggacatcactttgtcgaattcttcatcaaaaataaattgtctttgcactgccaaacatcaacgagaggtacagagctattagacctatgcctgacaaatgatcaccgactatcacttgaagccgaaactagggatagcttgataaattctgaccatgaatcgatctatctcaacctatctatctctctaataaaaaatccctgtacaaacatttctttccgtaaatttgattcaaaaaatactagtttaataaacgcattcctaacacacaatttagaaaatgtcacccaaacagaatataacatagaaaataaatacagtcgatttgttaaagaatctctaaacgggctaaacctttttgccccaaagataaacttcgaaaagaaacctaaatcagtcaattatcctaccgctcttaaagcatcaattaaagaaaaggcagctctttggaagaaactcaaaaaagaacctgaaaaatatcttcccctatataaatccatagcactccacatcaaaattcaaactaggaaattccaggaaaaacaggaaaaaaaattcttagaccaaaaccccggaaatatatataaatatattggaaaagattttcagcgttgggaaataccacccatctctcacaaccaacaaatcataactgatgacaaaactaaagctgacatttttgcaaaccatttttctgaatccttccaaaatttatcagaataccccaaacctcctccaataatttctgttaatcaaccttcaatttctgacgttcatttcaatgttttagatgttctcgaaattttaacccaccttccaaacaaaaataatacatctcctgacgatttaagttttaattttctgaaacgttttcatctaattttaaccagaccctctacagatttattccaattgtctctaaaatccgggtaactaccaaaattttggaaaacctcaattattctaccccactattaaaacgnagataagaatctagcatcaaacttc

SEQ ID NO: 29684 - DNA, 1428 bp, Heterodera glycines
  unsure (1)..(1428): unsure at all n locations
agggatcacacatcagctcgtaaagaagccttcactttcattgcgccttggggtttgaacacccaatgacttgcgcatacgctaaactccttggtccgtgtttcaagacgggtcgaacagatgaccggcttttacaccgagaacgcacaactgagagcccgagctggaccgaactggttgctggtacgtgtcgcacgcgaccgccaccgacccncagctcgagtcaacacggacccgaaaccattgcacaattcacccagagtaaacagcactcccccgatccgggtaccagaccccgaaaggctggcctcaagaccgagctcacgcagctactccgagcatctcagcgcactccgcctgcaaatgccccattcgccactgaacagaaagaaggacagcaaaccccagtctggaggctagcagcccaacgtacagcaacaaacgggtgaatgcagaccagatacgccagctctgtccgtttccacctcatcggtttcacgtcctctttaactctctcttcaaagtgctttgcaactttcccacacggtacttgttcgctatcggactcttggccgtatttagtcttagatgaagtttaccacctgatttgggctgcgatcccaaacaacccgactccaagacacgtaaagatgggtaggcaccgccagttggacaggtcttgcaccttctctggagccccggtcaagggaaacttgaacaagcgggccaacccaagctcacggtctatacgctacacctcgcaaccctagaggagctgcgattcagcgctggactcttcccagttcactcgccgttagtacgggaatcctcgttagtttcttttcctccgcttactgatatgcttaagttcagcgggtgttcacgtctgagttcaggtcgaaaaatcaaagcaggaatgccagtaatccaggcactccgccacagcatgcgaagcattggtgcgcccgagttacggtccgtaaaacgcgaattagaaccacaagttcgcgcctgcacaccaaaaccccacagccgagccgagcaagtaacgtaagaacacgtacaagtacatgatcccacgaagcaacgcacaagcagtgcattttatgttgttggcacaaaaagtaaagggggaaaaagaagacaaatcatccgatcaagggctaagtctcaacagatcgcagtgtaaaagctgctctactgctaacaaccccctgaccagtagtcaagtcgtatacaagtgattttgcgccccgacgttccaccatggcacacgagtgctacggctttggcaatgtgcgagcaattaagcacgcacatcgggccagatgctggggcatttgtgctgcaccgcaagcggcgcataagtagtgcctcccgacaccggggagcaagaatattgctatcttgccctagcgggattctgac

SEQ ID NO: 29685 - DNA, 1733 bp, Heterodera glycines
  unsure (1)..(1733): unsure at all n locations
ttatttcattatatttgtgtaacagagatttgtcctttgaaagctgtttgtgcacagagcataaacgccccncaacaaagaccaaaatttgagggaagaggaaggctatgggggtctgctttaaagggtaatttaacttggtaacggtttccgattaattcaatggattggttaaatgtttgtaatacttctgactcagtttgagggggctcgggggaatccttaattccaattccttccaatgtaaagaagtcaggggagataaaattgtcgttaagttcttgagaggaaaaattaatcattttcacattcgaatgacaggaaggaaaattgggttttccggccactagagggcccaataaagtttggacgaaatggtatccggagggtaagcgttggactacggtaggctccatttcatagtaatagtcagcacccaaaagaataatgggactttttgattggaattttggaagaaattcggagtacgttaaaagagttggtgaataggctaaatatggggttgggcgagttaaaggatgcattgcattagcggttacaacgattgaacgaccgtcaataagccttaggccgaaattagtggtgtaagcggggaccgatctacaatttgtgctgttaaaaactcccaaattaatggacgaaggtacaagggaaagatttagaaattgtgcctcgttcaggggccttatgctcgtctcgcggtttagagctaaaccacggttaacggcgttaaccgtggttaagaatccttaaccggtatgctcgtccttccctttttaaccgtggttaaggctaaaccacggttgagttaaccgtggtttactccctccttaaccacggatttcaagcttaagcttctccatttccaaatccagtttggcactttctttttcaagcactttaatctgtaaatcgcgtgcagttgctgttgatgatgctgctggaaatatttccacaatttcttttctttcggcagacatgtaatcagcagcagcagaagcagtagaaaattttcgttttttgctactgatcacgccgcccgattgatgacgaatcggtgtcaaatctgtaaatgatggcggaacagcagcagcagaataagtctccgatccggagcaaaagcttgagtcgataattgcaggagatgatttggggcgttcccctatgccaatttataaattagaaaaatgtcaattgattgagatttaacctagttcaatagggttttcgccaatgatgccaacaattcgcgtgtcctccgccataaattgatcaaaaagatcaaaaaaaggcttccgctcagtcggtctcccaccaccagttggtggcatttttgtttcagcaatgaagtttttgtattgcttcagcatgtttctgtagcgttgcttaatttgctcttgatcacgcactgatcgagcgtcctaaatttacccatagaatattgcttaagtttagctctttttttcttacaacggcattcactgcttgtgtgacttcatcccacgcatttttcttttcctttgttgttaaagttgccgaaaaacttccttcgattatggattttcgagcaaaataagccgagattaacgcgttgtcttcttggggactanagagaattccccttttgcgatcaatgctttcatccatttaattttgtatgcaaaaaacaaatgtgtatttgtcaaaatatgtgaccgttcaataatgactct

SEQ ID NO: 29686 - DNA, 659 bp, Heterodera glycines
accagggatgggccaaattgaaaaataaaaagcgaaatgcgaaaagccaaaatatgcgaaaagcgaaatgcgaaaagcgaaattttttctacaactttttaatagttaaaatcataaagcaaaaatcattttttaaaattttattccaaatttaaaaatcaataaaacgcttttttgaggcgcgctttttccaaaaaaactttttgggaagagggggcaggcgccgccgggaaaatttttgaaaatttgattaaaatttgttgacagattttcactaaaaaatgatcaaattttgtgatttttatcatttttctaatgagaaataagagttttggggcgccgctgagaacagtttttcatcaaattaccaaattttgcgattttgggccattttctaagaaaaaaaataggagttttgggggcgcggcggtgccgatagacgccgccagggaaaaaaataattggaaattttgatcatttataaacaggttttcactgaaaattagccaatttataggtaaaatttttaaaaattttttgggaatttaatccaattcttaggggtgtaaaagtcgcttttcgcgccaaaaagcgaaatgcgaaatgcgaaacgccaaaaaatgcgaaaggcgaaatgcgaaacctaggcacatccctgc

SEQ ID NO: 29687 - DNA, 1045 bp, Heterodera glycines
ttgagtagatagactagaaaaaatgaaaatttgaaatcatgttccccctcccttctcccaggggtattattttgtaaagtcttttttccccaataaactgtcaaaaccccatttttcgcaccgtgaatgttatttttattgaattctgaaccgttttgagtagattagactagaaaaaattgaaaattttgaaatcatgtttcccactcccttctcccaggggtattattttgtaaagtctttttttccccaataaacttttcaaaccccatttttcgcaccgtgaatgttatttttattgaattctgaaccgttttgagtagattagactagaaaaaattgaaaattttgaaatcatgtttcccactcccttctcccaggggtattattttgtaaagtctttttttccccaataaacttgtcaaaccccatttttcgcaccgtgaatgttatttttattgaattctgaaccggtttgagtagattagactagaaaaaattgaaaattttgaaatcatgtttcccactcccttctcccaggggtattattttgtaaagtcttttttccccaataaacttgtcaaaccccatttttcgcaccgtgaatgttatttttattgaattctgagccgttttgagtagattagactagaaaaaattgaaaattttgaaatcatgtttcccactcccttctcccaggggtattattttgtaaagtctttttttccccaataaacttttcataccccatttttcgcaccgtgaatgttatttttattgaattctgaaccggtttgagtagattagactagaaaaaattgaaaattttgaaatcatgtttcccactcccttctcccaggggtattattttgtagtctttttttccccaataaacttttcaaaccccatttttcgcaccgtgaatggtatttttattgaattctgaaccggtttgagtaaattaaactaaaaaaaattgaaaatttttgaatcatggttcccactcccttctcccaggggtattattttggaaagtctttttttc

SEQ ID NO: 29688 - DNA, 1126 bp, Heterodera glycines
  unsure (1)..(1126): unsure at all n locations
tggcacaaataattgcccagcaaagtgcgcagccatgacacatttttggcattcgcatccttttccttcgccttctccgtcttcttttgctcctccagtctttccttctcctcctctttgtcctctttcttttcaaggctttcctcccataagacttctggtacggcaccacctttcttctcgacgaataactcattgaactcattttcatgcttttcacacaattcttccacgctttgccctttggcaatgcaaagtaaaattgagaggaggacgggcaacgtgagcagttttgttgataaaataatcattttatcagcgaattcggagaggaggagtgaagctgaagctcaattaaacaaagcacagcaagcagttgataatgaataattttcttgtttttgaagcggcttttataggcaaaaaataatcaatagtaactgaattacggcaaaggtaacaccaaagaaaaaaggtgaaaatattgtaggagcgagagaaatagacaaatataacattatggtatttttaaagtaaattgcctgcgttgtaagcaataaatatacacatggacagagaaggcataattcccccaaaggcaggggggaatttggagtgatatcaacgtaaagcaaaagatgggccctctgagtagggaggataaggcgaaaaagctcaacagctttgtcaaatcattgaagagcactttggagttgggccaatcctactgccaaaatgagggatccctactaatcgaaaaagcccaacaattttggctatccattggataagcataatgccaatcctactgccaaaatgagggatccctactaatcgaaaaagcccaacaattttggctatccattggataagcataatgccaatcctactgctcgcctccatcactttgccaacgtgccatgtgattaaatgcactttcccttatgccttaaatagaaacaaagaaatggcaaaagtaatgtgaattgattttttaaattcgctgcttgtaattgccattctgtttttgtaaaatgccattaganattaattgtgacatttgttataccctttttgtgcagaacctccacccgtctattcgtaccnttgggtgttttgatcattt

SEQ ID NO: 29689 - DNA, 1886 bp, Heterodera glycines
  unsure (1)..(1886): unsure at all n locations
atttttgtgtccaccagcgattcgtcgtcgtcattgctgctagctgttgtggctgcatttgttggttggtggtccatgatttgacaccccaacagcaaactgtagtcattcagtccattggtgacaaagtactgtaaaagggactgagatagggtcggtagttcagctggtagaacactggtccggaaagcctgagacgccggttcaaatccggcccgccccatagtttttccctgaaaatcttcncagctcgttcatatattcagcaggacaaatgggctaatgtgaacattcctgctcgtttctattaattagggttttgcctcgactccccaatttttcccggttccaaaactctacgatccgctagtcccgaccaattcccagcattgccatcccagatgtctcggtgccaacacacgatcccgccatttttcgacttctattttcgatcgccgacattgctatatattcgacatccctgctgatccccgcagtgtttacccctccaaattcccaactttccccggtcacaaaactcaacgatccccgaaagttttggcactttaccagtcctgagctattccgaacattgccatgcccgatatacccgcctttttagccatccattttcgacaacctccataatttgatccccttcatccctaaaataatgcaccccctaaatctaaaatgtcctctaaaatttggattttttaagaatttctagtgcatacgcgcgcatctcgcttcactctgtcggccaattgtccatacgcttcagcagacaattgaataccctccgggaaaaaggcggcgacctcaactccaccacgggacaaaccgaaaaagtcgaattcccgataaatacacttttgccaacccttctctcctctacactgtttgcgggtgtactggacggcataggccagcgaaaaaacgcctttgatgtcaaacttcagcaaattgtcctcattgatcccctcaaatacgttgttcagcaccacaaattgtaactcgtgtagccgaattaccttaaatgaggagaaacattgctgaaatagagttggtcggaagcgggaatttttagggaaacccgggaaatgccgaaacagcagatgactcgggacctggaccaaaattcgattttgatcagattaataaacgggagtaactaatcgggagacttaatcccgacgaaaaaaatgaaaattttattaaaattcaaatattcgttttaattcgaaattttcattaaaaaagcatttaaatatttttaagtgaaaaattgatgctgataacaatttaaattgacttagattgtcagaaatttcttcaattttagtgcgaataaatttaatattaaaatttaattgaaaaagtttacaaattaaattcaattaaattgcaataacattcaaattaataaattttcctattctcacatttttttcaaaatattgtttaagcgataaaaaaattaggtactaataatagcttctaaacatttttcgaactttgacttggattgttaaaaaattatgaaattttaatggaataatttataattaatcaaaaaaacaaaaacaaataaattcaaacagcagaattttatatatttaaaaatattttatgatactctcctcacttttatcctctcatttccatagtcctccctcagcttggcgtacagcttcattttgaagcacatgaacatggtgttcatcatggatttgttgacactgtttctgttaatctccgtggactgctcgcccttcacggacgactgattgttgatcactccgtcgatcacataagccgcatatttgtccaacacgtcatccatttttgcaggctcatcatgcaccgggttcagattctttaaa

SEQ ID NO: 29690 - DNA, 1717 bp, Heterodera glycines
  unsure (1)..(1717): unsure at all n locations
cagcgtgctttgcaggaattgagatgtgttgatggtcgttgatatgcttctcacattcaaggcagtagtgtgaccaaacaatccatattctttctgtacgccgtcaaaatgaccattgttcagatatagcacaatgggtgtgtcgtagtgattgttgttgttgatgtatttgtacagcggcttgtactgacccgtggagccaaaaataaatactgcaaaacgatgctgttgctgcgtgttgttccaatgatccaccacacgcggcacacaaatttctgcatcataagcattgagcccacgccgcacgccaatttgctccatcagctgtagagcatctcgctgcaaacgcccttgttgaccatatcgattgtgcgtatagtcgtaaagcttccaactggcccagccacgggtttttgccaccatcgttgcttgcaaagcataaaagaggcagtagttgcggtcatcaggattgtttatcttaaacctttctcatcagaattggttttttttttttttgaatgggcggacctttatcaaactccgatcattgacccgatggtgaacaggtgccagagcccgtcgtgcgccacctttaagtgatcttttggtagggagtccgcggcgatcaactgttgtaacaacaacggtgaatggctctccccaaagcgtaacgttctgttgtttcttgctttgggccactttgagaaattggttcaagatggtgttgaccgtgttatccgtgatttgccggatggggattggaatgtccccgccagtgagcaatgggctgctgatgagacagccgagatgtgttggccgaaccccgcgctcatgactgtccgccaccgctgcgtcaatactgtattggaggattccggcaagaagtccctcgggattggctgggacgtcttcaatgctgaaccgcgacttgactttggtgtattggaagcgtggtacatgttcgatggtgttgtccagctttcgtacgtagtctttggttgttttgnaagaagatgagggtgttccagcaccttcttggaccatttctcccaacaattggttgatgagaaagccgcgccgcggctttttattagggatagacagcaggtattcaatagaaaaattggagggacgtttgggaggctgattttgcatttttttttcaaaatcttaaaagggagggaaatggcgttgtgaatgattaggtgagccgaaaatgcgctattttatagcacgcgcatgggcatgggcacacattacgatataaattaacataaaatttgaaaattcgtaaccaactatgacccgaagagcagcgcactgccacccatgaagcacaagacgacagggcacctaaacggcacggaaaattagaaatgtttgacgcactacctcaagctctaaaaggcaattaaaattgctgccaggataaacggagctcagtaggttgagcaaccgccctggttaacagcacgtttcaaaacaattttttcacatttatttattaaagtatttttattactaattaattattacaaaccaaccatgacccgatgagcagcgcactgccacccatgaagcacaagacgacagggcacctaaacgacacgaaaaattagaaatgtttaacgcactacctcaagctctaaaaggcaattaaaaattgctgccaggataaacggagctctgtaagtcgaacaaccgccctggttaacag

SEQ ID NO: 29691 - DNA, 1340 bp, Heterodera glycines
  unsure (1)..(1340): unsure at all n locations
atttttccagcaaaatgatagaaattcttcaaattttaatgaatgtaaaatttatttttttatttaaaacaattttcgttttcagcataaagttgcccacattcaacaaaacccaaactttttcatggccagaaggaaaaagcgtgcttctgtcttcggtggctgcttctttggattgcttttagcactgatcgctaccgtacctttttatagctaccgtttcaaaaaacgagatgtgtaccaataaatagagagtgccagagaaaaacattatctttttttctctaattttttgtcttcttttggcgtactatctaatatttttattattaggaaaaacaacatttatttcgccacatataactttttttctactcatacaatttacaccaaattttgcatatcgatagagaaaaaaattctgcatcgaacgtatcaaatatttttttaggttatacatcccattttttcaataaaattcattttatagcttttaatatattcttttttgttctatgggtaaaagaaatttaccacgcaagcttaattgcaaaaaggcgttgaaagagcgtgagaagaagcgggaggagagaaaagcaagaatggcaaaggcgacgaaagcccggctggccaagaaaagtgagttttttcaccaatttttaattcaaaaataatttttttaaatttcagccgctccaccgccgaaccccaatgccgaaacgccacagcaagacgaagtagggccgtcaacatctgctgcaccggccgaagaagcgatggagccgccgccaccaactccaggaccagtgccaacgccagaaatggacgaggaaattttggaatttggcgattcgctgccgtcgacatcagcgacgccaatcggcgatttggtgccgttcccgtcgacacccactgcaccaatggacactggagagatgacaccgccaccagtggccatcgacgagcgatcaccgcgcatcgaacagctggaaaaacaactgaaggaccgggatgacaccattcaatttctgcgcgagcaggtccgaaaccgagaagcgctgatcagtgatctgcgtcgtcagctggagcaatgtgcggcaccaccaacggcgacaccaaccaccagcaaaagtgagtgaaatttcgatgccttctcttttcccaattaattttctcaaaaattgatcattcattttttgtcaattttagcaacgccaaacagaggaagaccaaggaaggccatcgacgaactccaacgcagctcgcgaaagcaaaattcaaaacttttcaaaagtgttttatccganttttattgaaataaaatcataaattttaggcac

SEQ ID NO: 29692 - DNA, 1073 bp, Heterodera glycines
tgaatgacagcaccctatcgacggtgtccttcttcatcagtagttgttcaggatttgttgttgactttgagcactctggcattaatgtacttgccgcttttgtcgtaatcgctttcatccaggtccaatgttaggtcaccaccgtccaattcgttcaaattcaacatgagtcggcgaatctgaaaaatcatcaatgcaaaagcgtaaaagtgacaattttcgacacgaacatttgagcaattttaatgtgttcacacggaccggctcagttcggccccgcacggttcggccccagcccagtttttgatctaacgtttttctttgtcaactaaatgcaacattgttggtatcaagctcttcacatactctattagccttagaaaaagcaaaaaaattttaagatttgaaaaaatttatgaagaaaaacttcaaaatattgattttttaaaattgcatgttataaattttttgaaatttgtctaattgccaagcaatagcttagaaaaagcttctaaacacattaagctttcgaatgataccaagattgttatatttggttgaaaaagaaaaaagttgtatttataacatgaagattgcaaaagtaaaattaaattttttttttcttaataacttttttatatgctagaaaatcttagtttttttttgtgaggctatatagaatgtgaagagctttcgaatgatacaaggattgtcgcatttggatgacaaagaaaaaagttatagcctaaaacatgctgacaagggaacattccgaaatcacgttaaaaccacttttatcgtgtagagcatagtcgatttgctatagccaattttcaacttttttggtcctgaccccaaaactgatcagaaaaaagtgatcaaagtttcgaaaaatcggtaaaaatatcaaaatttttcaaaaatcataaaaaattcaaagataatgatagagtcattaaacattttttaaaatgatcagcaaacaattctctatcaaatagcattataaaagaaattaaaataactgaataaaaatatgttaggtggaaggatagttgaaaaaaattcaaaat

SEQ ID NO: 29693 - DNA, 1271 bp, Heterodera glycines
cttaatcaaagagtaaatttcactttggtgaaggcatggtttatgccggagcaggacaaaacgtcgtcggcacaaaaggtcgtataccaaaaagcgccgaaaattacaaaaaatttactaaccagaaatttttcaaagaaaatatttacaaaatttttttaatagaatttccacgaaaaaattttctaagatttttatggcgaattactgatttttcaaaaaaaaatctttttaattttctcgagacttttttcatagaattcttttaaaaaactttctttctaagttagtaaatttttcgggatttttcagcgctttttggcatgacgacgtttcggccgacgacgttttggagtgtgcaccgggtttgttatgccttgtcaggcgtaaaagttgagaatgatgaaatttatgattttgtaggttgtttcattaagaggattatcataattgcggatatttagaaggtgtgaggtatctcatccaaaagttgttccctttttaaaacagaatatccaatcaattttcgctgtttcggcttcaccttttccatttctggtcgctttatacgtaattccaccagttttcttttctgagtattctgtgtaaagttcatgccgcgccttttgctttgtctcgaacatttgtcgaatgtcggcaccaaaaaagggcaattcgcacagctcatcgaagaacttcttcacattctccgccgttataacagttggtccattggaatcgtccgcagttgcattgtcaatgagttccttctcttcttggtagagacggagagattccttgaattttaattagtttaattaaacagtcaatcagttcgataatttcatttaattgttttccgttcggactgactcgaagtcccttcagtttgtcctcctgaagcttctcatccgctgcccctttgcattccgcgaccactttttctgcatgctcaatggacatgttgatgtacgcctccatgctgtcgttgtacggcttcagcgcccatttcgataggaagacacaaaaatgtgccgcctgacaaatatcactcacgacaaatgaaatttgactggttaaaatgcctttttataaatgatccctcgctcttccaacatttgcttctgtacgttctccgaggctgacaaccccacacgttggtgaccaacgagcttttgttccaactcttcaatggtgaaagttttctggcgttgatcaaaaacatagtgtatgtgcacgctccaatcgcatccacaccgctaaaatagatt

SEQ ID NO: 29694 - DNA, 879 bp, Heterodera glycines
aattatcaaatttccagaaaatttcccttttcgtgaaaaaggtacataaaacgtgcaaaaaaaggatgaacattagaattaattattttttctttagaaattttggagatttttcattatgccattgactcgtctgcccccccccctacaattagtcaattcccagaagcccctcctctaattggacacctgcgcaagtgcgagtgccgtcagcggagtgtcctccgccggtttcaccaccaccgtacagccgactgccagcgcggccgccgctttgcgaataatcatcgccgccggaaaattccacggagtgatcagaagacagacgccgcacggctcacgcaaatggacgtgagaacggaacggtttcgacgcgggcaccacttggccatagcagcgccgcgcctcggccgcgtaccaatccaagtaggaggcggcgtattggatttcgccacgcgactcggccaacggcttaccctgtgaacagtgcgaagcgatatgagtacggcaaaacatgaaaataacaaaggccgagggctctcaatttataaaaataatgccagcgcattttggcaacaccaaaagagtccaaattccatcatttttcaaaattctatcactcccagacccacaactctgacatttgtggttgaaaatagcaactatattttttgtcgtcttttaacactggattgggttttatttgtcttctcactgaacctgttccctggtcagtagttcggccaattgcttttccctttcgccgagcaattcgcaccatttgcgcaaaatggcgccccgttctttggccgtatattcgaacgcccaacgcggaaacttttgtctggcggcagcaaccgcctgaacacaacagcaaat

SEQ ID NO: 29695 - DNA, 1845 bp, Heterodera glycines
ccatttcccattctgccattgccgtttcccattgccttctttcaaaatgccacccttttctcactcatttcccaattgtgccattgtcgtttcccatcccgctctttcaaaatgccacccctttctcacccatttccaattgtgccaccgccgtttcccattgtgccaaatatttcgcaaattccttcctcttcccttctttgcaccttttgttagcttcttccatccaaaaaattgcgcttaatgtgttaatttggcgctctttgctcaaaatgtgccaaatttcggccgttttcccatttttcgtcatactttttgcgaacttgtttcgttgtaattgcattaattgctctttttcgcccgtttcgttgattttttcttcaacattttctccatttcccaaattggccattaattgctttaaaaatgccctcattttgcctattttcttccaattttccttctgttggtcaattcccactttttcttcctccgctttttcccatttattcgccaaattttccacttttttcccaaattcaaattgaaattccttcccaatttctttcaacgcttcaattcgttgccaaatttcattagcgtaaacacttaactcgagaagtattttggaattggttggccattcgcccacagattttgaaacgaattccaaatatttttgtgaaataaattcgtccgattgcaactcttaaattacacatttataaatgctcattaaactccaatcgccccttctctaaccttttattccaatctctcttttttctctcatttcttcctttttctcctcactttttcctttcccttttgtcttttgctcttttcctcccttttctctttttgcctttctttttgttccttcttttgactcttttttcacttcattattccccctttccttcctttggttcttttccttttcttcttcctcctttctctcgttctcccctgtgtcataattctctcctatttctgtgtccattttaatattatttattttttcttccttttcctctcctttttctcttttttcttcctcctcttccttttcctcttcgtctcttctcttttcctctccatttcctttcttttcttctttttccttcttttcttccttttcctcttctttttccttcttttcttccttttcctcgctgtctttggctcttttccctccttttccctctcctctatttttcttcctgtttctctctttccttttctctttcttttccattccctcagcttcgcttttttgctttttttcattaaattgaaattccttctcattaaattccatttcgatcgatttgaatatttcttttaccgtttccattctcagaaagtaccataaacgcagtcgagcatcagttgattttttcagtcctaaattaggagtgtttttcccattgatccatccgatcgattgatcagtgcttcgcactgtctgcttcttttctccgttgtcttacccattctcagtgtctctctgaactgtttctgatcggtctgctgctgctttcccatcgtttccaattcgcttttgcccccgtcttccgtcggtgtttcggccatgcccagcatttgcctgaacttccgctcgtgtctgtccctaacccattctggcaccgttattctgatcattttccgctccgtgtcgaagcttttcgccgcgtcactttccgcctttctcttcgccttttgccacccgtctttcaacacgtttgcattcgctgcgtttcgctgtgccaccaaaaagttgcgcagtcgttcaaaaagcttctcatagatggggagcatcatcaccaaattctccactctcat

SEQ ID NO: 29696 - DNA, 2132 bp, Heterodera glycines
  unsure (1)..(2132): unsure at all n locations
agcgctccacaagcagctctcaccactagtccacgcaccatccccgaaagaacagcacgcagccacgggcaaaagccgcctgtttcacgcaacagcccggctgacccgaccttnagagccaattcttttcccgaagttacgaatctaatttgccgacttcccttacctacattattctatcgactagaggctgttcaccttggagacctgctgcggatatcggtacgatcaggcaggagattcaaatagcttccctcgcattttcaagggccgtgtggagcgcacgagacaccacaggaaccgcggtgctttacgggcgcaacatccctatctcaggctgagccacttccaggcacgcacaccctaaaccagaaaagagaactctggctcggactccacacgacgtctgcgagttcatttgcgttaccgcgcaaaacagctcttgcgaaccgtcatttccctagcctggcgtgggaatgttaacccacttccctttcggcaaccggatggaccaactgcgcaagcacagaaaagtcgtcatccgtagtgtgttacggcgttagccggtgccttaggatcggctgacccacattcaactgctgttcacgtggaacccttctccacttcagtcttcaaggatctcacttgaatatttgctactaccaccaagatctgcactggtggaagctccggccgggcccacgcccaaagccttcaacgcaaccaccacgaccctcctacacgtcatggccagactacgcgacaagcacgtgtacaagccaatgacggtggagtataggtggcccgctccagcgccatccattttcagggctagttgattcggcaggtgagttgttacacactccttaagcgatttccgacttccatgnccaccgtcctgctgtctatatcaaccaacaccttnttatgaggtctaatgagcgggcactttggcaccttaactccacgtttggttcatcccacatcgccagttctgcttaccaaaaatggcccacttggagctcaaacattcaacgcctgggttcagagtcaagcaaccctggcttcatacccatttagagtttgagaataggttaaggacatttcgtccccaagtcctctaatcattcgctttaccgagtataactgcttaacgagctccagctatcctgggggaaacttcggagggaaccagctactagatggttcgattagtctttcgcccctatacccaagtcagacgatcgatttgcacgtcagaatcgcttcggacttccaccagagtttcctctggcttcatcctgctcaggaatagttcaccatctttcgggtctcagcgcatacgctctgtctccgccccatcgcatgcgatcgagacgggactatgttgcgccccaacaccgcagtgccagggatcacacatcagctccgtaagaagccttcactttcattgcgcctttgggttttgaacacccaatgacttgcgcatacgctaaactccttggtccgtgtttcaagacgggtcgaacagatgaccggcttttacaccgagaacgcacaactgagagcccgagctggaccgaactggttgctggtacgtgtcgcacgcgaccgccaccgacccccagctcgagtcaacacggacccgaaaccattgcacaattcacccagagtaaacagcactcccccgatccgggtaccagaccccgaaaggctggcctcaagaccgagctcacgcagctactccgagcatctcagcgcactccgcctgcaaatgccccattcgccactgaacagaaggacagcaaaccccagtctggaggctagcaggccaacgtacagcaacaaacgggtgaatgcagaccagatacgccagctctgtccgtttccacctcatcggtttcacgtcctctttaactctctcttcaaagtgctttgcaactttccctcacggtacttgttcgctatcggactcgtggccgtatttagtcttagatgaagtttaccacctgatttgggctgcgatcccaaacaacccgactccaagacacgtaaagatgggtaggcaccgccagttggacaggtcttgcacaatcgctggagccccggtcaagggaaactgaacaagcggg

SEQ ID NO: 29697 - DNA, 1659 bp, Heterodera glycines
  unsure (1)..(1659): unsure at all n locations
ttcgttcgagtcaaacagttgttctgcaaccaaagaccaaatattgtccactctgtgcccatcgctttactaaaaagtcttcagtctttaccgttcgacgcagcaaattgtgatgaagcgaaagggcgccgagtggaaaggtcctcgtggtctgaaaaaggcattgtcaattagcctttgccattcggtgtttgttttgccctttttctactgaccactaattgtcatcacccgtttgatcttcttcgcttgtatgttcatcattctctcctctttactctcccttttcgtcttcactttttcttgctgcccttcttcttccgtttcgatgtctttttcttcgtcgtccactggctttttgcgctttttcgtcggtgtttcggttcgattttttggggagggaggcgaagtggtgcgcacaaattcgggaggaagagtggactttttgggagttgaacagttaaaactttgaattggaattggcattttgtaccgatgtttgttctctgatgaaacgatcgcgcgcctcaaaggtcgggttctggtcgaggaacgaagtgactgaagaaaatgattagaacaaatatgggggtatgaagtgaagcgcgagagtttacgcgaatcgaggaaagagacggagtcggaagccttcagacgaccgctcacttcctcaccggtgcgcgggtcgacgatgaaaatagcggggaaggaggagaggctggaagagaaagaaacaccaaaaagtcattccatggattgttgccaaatttatttatccaattattattacccgtaataattacgaatccgagcgccgtcggccgagtcatggtacacctaaggggtgacaatggttgaagaggaacccaaaaagcagaagcattcgcaacctgccaaaagaggaagttggagcggaccacctcgcgcacagtctccacactccaaatgtcccggttgagcaccgcacacgcaaattcagacgcttcctgaacattgacgagcagccaaacgcccttctgacgcgccgcttggagggccttaaaaattccgcggtatttaactcaaattctaagtcctgtcccattttctcgcctggtcccaatcgccttggaacatcagttcgaccgggggtcgaaacagagtctgcaatgttttgcgatgatgcgaatgggttggcctcccgtcattttcgtcggcatcgttttggttgagtggaaccactgataagggcgccaacggcgcacgggccgatggccgaacggcgaactgttcgcccaggtcaatgcgattctgaaagtcatttggggccgaatttgattatgtaatcaaaacgagattttatgcgtttccaactaccaaaacattgcaaaacgtacatttgcaccgtttgctctgcgtgataagaatgaagccgccgcagatgacgaggagggctgttgatggtcttggcgatactgctcgaacaccgggttccaaaggcgttctcgattttcttagaaagaaatttgaactaaatcacgccatccatgataaaattgtaaatgtttttctatctaaattttgccaattaaaagcttttaggtgattacacgattaattgtaagaatggggagggccattttaccnncacagacttacgatatgtctcgcggaatgact

SEQ ID NO: 29698 - DNA, 1091 bp, Heterodera glycines
  unsure (1)..(1091): unsure at all n locations
cattttccctttgatcggtacanaattgnccgaaaaagagatagccattttctgagccccgaagggaaaatttgagagggctaatttatatgtaatattcgaaagtgccaagctaattagcgattcaggcgcacattggggcctgaattaagccattttcccttgatcgggtacaaaattgggccgaaaaagagatagccattttctgaggccagaaggaaaatttgagagggctaatttatatgtaatattcgaaagtgccaagctaattagcgattcaggcgcacattggggcctgaattaagccattttccctttgatcggtacaaaattggccgaaaaagagatagccattttctgaggcccgaaggaaaatttgagagggctaatttatatgtaatattcgaaagtgccaagctaattagcgattcaggcgcacattggggcctgaattaagccattttccctttgatcggtacaaaattggccgaaaaagagatagccattttctgaggcccgaaggaaaatttgagagggctaatttatatgtaatattcgaaagtgccaagctaattagcgattcaggcgcacattggggcctgaattaagccattttccctttgatcggtacaaaattggccgaaaaagagatagccattttctgaggcccgaaggaaaatttgagagggctaatttatatgtaatattcgaaagtgccaagctaattagcgattcaggcgcacattggggcctgaattaagccattttccctttgatcggtacaaaattggccgaaaaagagatagccattttctgaggcccgaaggaaaatttgagagggctaatttatatgtaatattcgaaagtgccaagctaattagcgattcaggcgcacattggggcctgaattaagccattttccctttgatcggtacaaaattggccgaaaaagagatagccattttctgaggcccgaaggaaaatttgagagggctaatttatatgtaatattcgaaagtgccaagctaattagcgattcangcgcacattggggcctgaattaagccattttccctttgatcggtactaaa

SEQ ID NO: 29699 - DNA, 959 bp, Heterodera glycines
  unsure (1)..(959): unsure at all n locations
acaataattccgatgggtgttctcagcgaatttatttaagagaaaataaaatgaaatagtgaaaagtgattttaaaaattaataataatgaagcctcataaatcaaaatttgcttcattcactgttcactttttcttcatgggtgcaatgaagtcagtggctcggcaattggcccgcacgcattcctgacatagctcaaagttcacagaaaagcggtcgtcgtccaggcgcttcaccttctgctgatggtggtacaatcggttccaatcgtcttaagatattaaattaaaataatattttgtctattgctattgtacctgggcacagatatgtagtaagcaaatattttcttttcgctaattcccacaaatctcggtcctacaccgcgcgctttntggtggcggtgacnccttcttctcatgatctggctcagcttccaaatgagttggaatgggttcagttttattctcatactgatttggatcggcagcagcagcagcagccgagagagtagcagcggatctcttcattttgtataaaataattttggtctttttgttaaggatgattttgggtttgaagagagaaattaaaaaggattgcggtttttagtcaggtgaattatttaggtgagagtgggcggggctattaaggaactaaatgatggggcgtcgtccatcttttgatcgtatataaaagtgaaattagtcgttataactttcattcttgctgaaatggtgctcgtcagcgttttctgtgctcagctgcttaactgccctgtcaaatcgttgcgcgatcggctcaatcatcccgaggatcggagcattgtactgaaacatctcattgggcgaaaagtgcgtacaacatacaacgaccgtaatgggatgcggaaaacattttacgtcagtggaatttcggaccaaggggccgccttccttcccgcatacggtcatttgcgc

SEQ ID NO: 29700 - DNA, 1131 bp, Heterodera glycines
tttgtccattttggtgtatcatttgtcttttttcttccatttgtccatcatttccatttgtccccccttttgaccccaccttcgtcttctccgtgattggccatgccctcctcgtccgtgtggtcatcgacggcgtccgcttttcctccgccgttgtcaaagcgggcggcaaatgcgtggaggacaaagaccaatgcttcagcttcacttgaataatgccgatgttcatatctgtgagcatttgctaaacattattatgagcacttttttattttccttttaaaattcatttttttaatttaattatttttggcgcacttttttccggctgatcggccgaaatttgttgacgaaatacgcggagatttgttgatccatcgttgggagaggcatctgaagggatttgaataaaaaaaacagtaaaatatgtcaaataatcagagaattaaaaaataagatcaaatatccagagaacagatcagacaaaaaagcagatgagaccaatctcaaagtctgatcagatcagtcaaagactagatcagaccgatagaagacatgatcagagcaattggagagataatcaaataaaaaaagattaaactgacaatcagagagacatgatcagtcaaagaacagatcagagaaacacactgatcagagactaatgattttcccgaattcacttaatcagtcagtcacttgctttggctcattgtcagcaaaatgagcagcgacagaattgagctgcccgccgggttacggtattgtttgggtacagtatgagggcaggaaagagatacggtcgtcgctgttgttgtggttgtcctcaacggataatgacggcggcacattttgttgagaatgccggcgaatttgcatcgatttgcttttctgagataaaagccaatttatttttttatttttgggcgagagcggtaataaaatttgcaatgttttcaatttccaaaattagggaggaattttaagggcgaagcgcaaatgaataggaggaggagaaggaccacactcgcgcgcataataaacccagtgaatttgtgttgtgatcgattcgcttccttcatgcggcagaaaaggggcgaaaaacggggggaaagggcgaaaagggggggg

SEQ ID NO: 29701 - DNA, 1808 bp, Heterodera glycines
  unsure (1)..(1808): unsure at all n locations
tacacaccgagtcaaaaaacgagacatgtgtcaataaagagagagtgcagagaaaaaaacatctctcattttggcgtactatttttttatctctgtcaatagagaaaaaccgattttacttcgctacgtttaattttttttctatacgttagatccactccaaaatttgncatatcgatagagaaaanaattacaaacaaaatgtaagggttttaaacgcaaaaaaagggttaactaaaaagttattcgagaaacaaaatttcgaaccctcatatcttttttctaatcaatccaattgcttagcagttgcttagaaaaagcttctccccatcaagggctttcgaatgataccaagatttaccaatttggttggcaaaaagcttcaaaaataattcccaaaattcgtcattttttaatattttggacaaaaataaataaaaatattcatgttgcacaacggactcgaaccaccatccattgtccttttactatcttacaaaaaccactgagccacacatgcatttactttttgaactagtggctcaaaattgactcggtgtgtctatcctcgtcgctctacaattgtgtatacctatgacaacaaatgcatagttcttccactttttataataaagaattttttgaaatttttattttatttgtcacgaaaattgaactgaaaaaaacgtttctaccaccgagcttagaggccaaaaaattgttaaaaattggccgtaattgtgaaaaatccacttccataacaagaaggctgaatacaatttttaaaatttcaagcataataaatttaaatgttaaatttattttttttaaatcgagaaaaaaactgaaaaaatgaccatataataaacgtaaaagaaatctgtgaatttgtccagaaaaaaaaaattctttttttttttgttttttcacaaattttttggtacccgagaaaaaccttcgagcaataaaaaataaatgaatatgcagtgaaatgctggagaaaaagtgtgagaatacaaccaaagcagtaacaaattatgtgataatttctgtataatattggccttgactcggtgtaacacagcataacaattggaaattttccgaatccgaaaaagcataattaaataaaaacaattcggatttggacaaatattagggcagtcaaacggtttgtcattggcaactcgttcaatgggcaattcaaaaacaatatttttcaagaaaaattttaatttttgaagaaatcttaaatttttttttgaaaaatatgaaaaaactgtgaacgagttgccatccctgttgacctatcaaactccccccttcgccgtccgtctattttttcaaattgattcacattttttttaaattttaaaaatacaaatgtgaaaaactggcatgagagaaaaggtggtaaggaaaaaggaaatggtagcaaacaaattggagaaaaaaaggaaatgtaacatagaacaacagcaacaataacaacaggcccgtaaccaaggggagtgtaaattttccgaaaattttgaccaattatgaaaaaaatttcgctttttccgccaaaatcctctcaaaattgatcattttggaccaaaatcagttagcaaattgccaaaaatgccatttttttttctccgacggcatttaatttttttgggctacggacccgacaaaacgaaaaaaaatggtgaacaaaataaggcgtacccaaagaaatttacaattgttttttgtgcaacaacatttggttttttcattttccaatgggaaataatgcaatggtttttttccatccctccggc

SEQ ID NO: 29702 - DNA, 1561 bp, Heterodera glycines
aaaaaataaatcatacatgaaaaaagggggaaaagaggaatttctgaaatgtttgccattttcttacaaattacacattcataatttttattgcggtttttttttcactgaacgcacaccttttggcaccgcccaccaccaaattcttagtttttttttctttaaaattaattcaaattctaaaatttttttgttggaaaaaccccttttcgtcgttgttatctgttggcaccatcggggcctcacccttccccagatgcattttattcataccagggttgttccgggtgcactgtccgtgcacaatttgttgggagagatttggccaaggagccttttgttttactcccaattaatccccgggtttactcctaagtttgccaagaaatggaaaagaagtttatttaagtaggatgggaaaggtatgaagaaattaaaggtgaaagtgtataagtggtaggattggataggaaaaggaagacaaaaagaaaagccaagagtcaatggggacagagtttaaataggcaaggacaagaagagaggatgccgacataattcttatcagacggggaattcaaagggagagagcaaaggcacacattaaaagggggaaaaattacataataaatttgctgggtcaagagtcgggagtgatcatcaaaggaaacggcaaattggtcaaaaattgcagattggggaacagtccaatccttccctctttttgaaatctgcggctgtttctcaacgcggagcatacggacggaagcggcgtccaaagtggtggttcggcggctgacaatcatggcatcggcaatgtcctggggcaggatgacggtggttgtggtgctggtggtgcgctcgatgtccttggcgcatgttgaaataatggcgcgcatgggcggctgccccagtagcggtcccacggccatgtcccccacgccctctgatgaatgcgcgcccctggccggtgcctcgcccccgctcacgggcggattgctcctgcggcagtgagatgcctttcggtcccgggtgggtttctccctgcccattctccccctcagtcgggctctcgggttctttcccggtttctctggcctcaacgctcaccgcttccaactccgggtcatcgagcgacatttgttccatttcttcccgcgctcggttttcatccagcacattagccatttggttgatggccgcggtaaagccttccattccccggttaacagtactcatagcctcgccaatgtattttgcaacggcggaaaggatttcctcctttgcgttgcccagctccatttggatctcggccatattggccggtgagactttaggcttattcgagcccttcgttttcgaggcttttgctcccgcttcgggatcggcattctccttaggtccgagaatggcatcaattggagaagacattgggatggaacagaaattacaaaaacaggaaattgggtggaggaacaaaatggaaattagatagaaaagacaatgcttacaaaatgaggatagggccaagaaaataaatgccaaaaatgtaaattacggaaag

SEQ ID NO: 29703 - DNA, 1728 bp, Heterodera glycines
tttccaacactgaaccgattttgccactgatttaacaacagaagcgaattttttgaaaaccaaaaaaaatatgcgagattttgtgcattttatgctgactggaaaaatgtttgttgtcaatttgaataaacaccttattcatcaaattttgtttgagtttaagttattgttatcatcatcagcaacagatgcttcttttaatagcttgatttaatgatttcaaagctatttgattttcatgtttaaggtgtctcgaaatcaaagagagtcggaatcttaagcctatcccaaaaattttgaaaaattttgaaaattttatttgaactttaagcttattttcaaaataatacctactaaaaattcaaatttttcaatttccttggatcaattttttcttttataggtgttcttttcaattttattagaaacctaaaattaaatataattttgtatttttgtaataaaaatatatgttaaaaaattgcctaataaaatcatttttttcaaattatgcaagagaaataaaaaaaaagtttatgcacagacacataataaaatgcataatcgtaaaataaaaagaactccaataggacaaactgaaaagatagcaaaaagaaaggacaaaggggaaaaggacaattcaaggacagaaaaaagaaaagcccaaggacagccgaagacagaagcaaatgataaaagataatgaaaatccaaagaaaatcccaagggttttgttaacagagaaaaagcgcaacgttaatgtccttaaaaataaggacagaactgcccagtgaaatgcaaaatgatcattggaacaatttttgaaattcataaaatgccttttttcttctgttaacattgccaaaaagcccgaaaaactatcagcagaaatcactcaatccatttttttggggggggggaatgaatgaattagtcaattcctttttttgaaggctcttcattcggcttctcctcctccgccatttctttgttgttgttgttgttgttggcattggcaattatgccctggctgccatttttggacaatttttcatgtttaaaaaatggatgtccttgccattgtacctcgaaaaatccttccttcatcgccatcgctttgtcattgaccagttcaatggctttctgcgcaaattcttccaactttttgtcaaattcggcacgaagaattttcaaatgatcaccaacagcagaagcagatgctgcttcttcttttcgctccatgtcaagattaaatttgtttgcacgcaaatatggtggttttgtaaacatatttttgatggcatttttcgttctcaatcgaaccttggacgttcaatgtttgctaaaattgtggttaaaaatggagagatcgcctgaattttcaaatttgccgctcgatcccgcttcgggattggaaatcaaaatttttattttattttttttctgcacgggatcccgcgggattaatccagcaaatcccgcatttccaatttgcgggaccccacacggcattgtgggattgtaaatttgcccatcgggtcacgttgcgggattggaattgttagctgtacgggatatagcaggattaacccagcaaatcacgcatttcccatttgtgaggttccgcgccgcattccggggattagtgaattttcgaaaaatttaaacttaaataaaaagaattcatcaaaaagcgcaaatatatatatcctaaattgcctgggaaaa

SEQ ID NO: 29704 - DNA, 1812 bp, Heterodera glycines
catgtttttaggatttttaaatacaaaaatttttcgaaaaaggggagggggcaaagcactaaaaaaatccataaatattggaaaaacaacgataagagggagaacaggaacagcagaagggcacgaagcgaaaaagggctggctggtgcaaagcaaaagcttgatcaatgaaagccaagcgaaagcaaaatgttaaatgggacaaaattccaaaaaagtattcgttcaaataatttccagaaataaagcgagccacataaacatattgaaaaattaaggcgttatttttgatggattttctaaacatttttcagcaggcctctctaaaaaaaaaagaaaatttttattatgaattactgcgaaaatttggctctgacaattgaattcgacagaattttcatcaacttattttatgtgaacggtggctggacgtttcgacaataccttttcgacaatgccgtttcgacaatgccgtttcgacaatgaccatttacgactatatcatatcgccaaaatttaaaatatcaaattaaatataataaaatgaatataaaaaataataaattaattaaaaaaaatattgatgaaatttaaagagaaaaatttaattaggtagttatattttttaaatttaatgaatgcattatctatcgcctattgtgtatgattattaatagttaggagttggatttttaggtttttacctatttctagattttttcaatttttaacacctattttcgcacctattttggccttttttggggtttttagcacctattttgcacttttttagcacctattttagtacctatttagggatttttagcacctaaaaatccgagccctattaatagtgaagaaagaagacaaaatgagacggacctataatataaatccaaaatgaaaccatttatttaacttaatgtagtgtcctctttttacccaggcggcaatcctgaagaatggttgtccctaattttcatttttttaaattttgtgctcaaaaccagtttttaggcgtttttgagggtgctgataacggatcttaactcgggtttgcccaattccgaactccagacccgaattcgaacaaaaaaaattgtttttttaatcaagaatagttttttcagggtaaaagcttctaattcattatcaactatttaggtgtaaaacaatgtttcaatttttaattaaaaaaaaataagcaatttgcgccgaaaattgacaaactaaagccattctcataatgctattttgaaaaaaacgaaaaaaaaacttttatattgatcccaaatccgcaccatataattttgcagaaatttgaattttatttaaaaaaatatatttaattttattgtcgaaatgtccgggagccagcgggggcccaaacgctctggtccctccgatatatacatatatataaaacaatcgcttcataattttttttgtccaaatcgccgccccaaaattccgcgagtcgcgcatcgcggaaaaaaggccgcgaaaaaatctaagtcgcaaatgtctggacacgatggtgctgggacgttagtcaaaaaccatcaaaatgggcgttagtcaaaaaaccatcaaatggaaaatttttgacagaaaattattcataaatttttcgatagccctaagtgttttctattatcctccaaaatttttaaaaaattctttaagtttaaaaaaagttatgagctgagaagctcaaaaacccaggtttttttgaacatttttagtcataactttcttgaaacttaatgaaacttaaagaaattttgtaggctaatagaaaacacttag

SEQ ID NO: 29705 - DNA, 1080 bp, Heterodera glycines
aacactccggcagtgatcgcaatgataagacagatcagtgtggacacgtgccaagctaattaattagtgggaggacaattattggaaaaattgcgaaaaatttaaattttttgaattaagtccataaaatttgttcgaatgaattaaaatgggaaagaagctatacaagcttaattaagaataaaaatatgaaataacaataaagttaattgtgttttcttgtaaaaaacaaaatttttttgaataaaataattttattttttatttgcataaattttgttttattatttttttaatttttccaaataattcggagaaaaatattaaaattaaagcatttaaagtcaattaatttaattaaagttagtatataagccctgaaaaaaattaatttttatttaaatgtaacagtttcaaaaattattcaaaaataatttaagcaaaataatttttttaaagtttaatgtaataataaatgttgattatattagcattaatattattatcatttttcacccaaaaatcggtgctgtgaataatccgtttggaataagctgctcattgcactgtaaccgcccgaattggaaaggtacgggtccatgccgccgccaccgcccccaccgccgtacggagacgggtcaatgttcactaattgacaaattaaaatttcaaaataaaaagccaattagtagtatccactcaagaaaaaaatgaatttgaatttcaaaagaaaggatggcattttgttatgaaaactacggcatttttcaggcttttgagggtccgtttgtgctgagttttgaaaaattttgtcactttttatgtgagtgagtttttgccaaatttttaaaattttgtaagtttttgagaattttttattaaattaccccatttgtattcgcattggtcacttgtcacgccccagttgaagtaagaagattgggcttaagaaaatttaaaatattaaatttgttttacattcaaagataatacataaatttaaaatttatctaatttttaaaaataatttattctcgtttatgttttaagaatttgttttttaaaactatatctttttaa

SEQ ID NO: 29706 - DNA, 1277 bp, Heterodera glycines
ccccccctccccctccccccgcccatagcccaaaaattttccgaaattgttttccaaaaattatgctatcaaaaaaataacccaattttgttaaattctatcaggactgaataaatttgttttctttacttatttaattttggattttctgtaaatataaatcctagccttagatattacatacaaaaaaataaatttagatattaagccagtaaaaaaaacattcacaaaatgcgcaatattaaattggcgatacggcaaaatcccagcccgacaaaatcccgctaacataaaaacaacaaaatctcgactcagccaaaatggatttcgtcttttttttttggttgagtcgggattttgttgttttttaggttactgggattttattgggttgggttgggatttgggtcgggattttgtcggcacacgatcactcctccatctcctccatgcggccaccacgaaatgaacagcggccacacttctccggctgcttgtcgaacaattcgacatggcagcggaagcagagcgctaattgccctttcttgccacccggcgccgccaatggtgctacaatttgtagtgccgccatcaggtcacagggcggcggcggaggtggcggcggaggcggcggcaacggcgggccatgatgaaccacaatggctgctctcagagggccctgaatttaataaatgtaaaataaataaaattaaatattaaaaattttacccgtccatttggcaaaagccaaaggctgatgcctttcttcctcttcaaaaagaagttgccggagtttatcgctgctctcgccaatccgagatccattttgagacgggccaaggcttttttgcgcagctgggtagccgatcggcgcttgatgcgtgcctctactgcgatcgctttggacaaacagatgtccgcttgtcggttggcacactgtgaacgacgtatcgcccgttcatatcgtgctgcggcagaatttgtcgatggcatcggggggggggggagattgatcaggcaggagattcaaattgttttgggcgatcaggcaggagattcaaattgcttttgggcgatcaggcaggagattcaaatttgttttgggcgatcaggcaggagattcaaattgctttttgggcgatcaggcaagaaactcagtggttacccatacgaaggcatgccttttatataggcgaggacgtcaattagccggggggggggacacacattttttaaagttggagcgggtgcaaaaagtttttttggcgcaatcgggg

SEQ ID NO: 29707 - DNA, 880 bp, Heterodera glycines
  unsure (1)..(880): unsure at all n locations
ccatatttgtttgagacccccaaacggacacttgaaaaaatctatttatttttgttttcggcacagtccccccgaaccgatgcgcccagatttatggggagaccgaatccttcgggaatagcttccctatagcctgtactataattgtgcgttggatttttgctccccataattgtttgagtaccccaaacggacacttgaaaaaatcgatttttttgttttcggggcagtccccccgaaccgatgcgcccagatttatggggagaccgaatccttcgggaatagcttccctatagcctgtactttaattctgcgttggatttttgctccccataattgtttgagtaccccaaacggacacttgaaaaaatcgatttttttgttttcggggcagtccccccgagccgatgcgcccagatttatggggagaccgaatccttccggaatagcttccctatagcctgtactttaattctgcgttggatttttgctccccataattgtttgagtaccccaaacggacacttgaaaaaatcgatttttttgttttcggggcagtccccccgagccgatgcgcccagatttatggggagaccgaatccttccggaatagcttccctatagcctgtactttaattctgcgttggatttttgctccccataattgtttgagtaccccaaacggacacttgaaaaaatcgatttttttgttttcggggcagtccccccgagccgatgcgcccagatttatggggagaccgaatccttccggaatagcttccctatagcctgtactttaattctgcgttggatttttgctccccataaatgtttgagtaccccaaacggacaacttgaaaaannatcgatttttttgttt

SEQ ID NO: 29708 - DNA, 1284 bp, Heterodera glycines
gaaaagcgatgcgcaacaccgaaacgcttgtgttgccaatagtggaaaatgaaccggaggagcaggaactgcttgtaaaagcaacgtcagaaaaaccatttatcttttccccggaattttggtttagcccgcgttggcaaaggctgttgacgatttcccaatgacttgtgccattttggtgcgccggcacggacttttcgtttggggaccgaattggcaaaaaaccaaagtgatgctggaatgtgttgaatatttgttggaaatatgctgggagatgagaagaaatggaatgtgatgttcaattgtttaaacggattacaatttgtttatttgattcacaaaaaaaatcaaaacattaggttttattttattaggtatttctcatttttctttcattttccatagttaataaaatttggtatccgacttgcctatgttggacaccgcgattcaattttgggctcccagtgcaaataagtttattatttatttagtaatcagaacgccaaaactttgcaaaacttaaaattttcttgggattttcccttgtaaaaatggaagagccgatctcgagttaaaaactagacagctaaaaaataaactgtgattcgatagagggtcaaaatatgggcctatgcaaatttcaaagaaaatcacaactgtagaaaaaaaaattcaactggcaaagttttttctttttctctcattttgacgcactatttccattagatttattttctttaattagttagctaaaattctcaatggatgatttgttaaatgacatcgatgaagatcagcagcaaagcgaaagtgggagcagttcgcttccaccgcagtctgttaacacgatggcttggctggaacaaaacaaacagaaccaagcgcgggcattctccgagaatttgttgaaagatttgagcgctgtttcagagacgggcaaatgtatgggggggggggagctttttttgtatttcaaaagaatgagttttttgtgattaaaaattgcattggagttttttgtccttttttcttcaagctctaaaacagcaaaaatattctttttttggcaagggtgaccttcgttattgactgacaatgaggcgcattttatttatttttccctattttagctgctgaatttaacgtcaaagatgaaatggaaggcgaagcaggagacgaagaggagaatcagttcattcagaattgtcagcggattcgttcttaccaagtggcttccgagaagaattgcaaccacgaggtgcgtcccatatataaaatagt

SEQ ID NO: 29709 - DNA, 1514 bp, Heterodera glycines
  unsure (1)..(1514): unsure at all n locations
gaaaaatttggaaaattggctatctctttttctgctcaacagtaataggaattccaaccgcattctcagaataattacgccgatactaattgttctggaatttgtttctcggcgcgtttgtttgggaaaaatttggaaaattggctatctctttttctgctcaacagtaataggaattccaaccgcattctcagaataattacgccgttctggaatttgtttctcggcgcgtttgtttgggaaaaatttggaaaattggctatctctttttctgctcaacagtaataggaattccaaccgcattctcagaataattacgccgttctggaatttgtttctcggcgcgtttgtttgggaaaaatttggaaaattggctatctctttttctgctcaacagtaataggaattccaaccgcattctcagaataattacgccgttctggaatttgtttctcggcgcgtttgtttgggaaaaatttgaaaaattggctatctctttttctgctcaacagtaataggaattccaaccgcattctcagaataattacgccgttctggaatttgtttctcggcgcgtttgtttgggaaaaatttggaaaattggctatctctttttctgctcaacagtaataggaattccaaccgcattctcagaataattacgccgatactaattgttctggaatttgtttctctgtcgcgacaacgcgaaatcctaagataaaacccaaaataaaaaagggaaaaaataaaaaacaatagaaaataaaatggggaaaaataaaacataaataataaaaaatatttttacatttattttggaaaaataatattataaaaaactattcaaaatataattacataaaaatgggaaaaccttttgaaatgaataacggaaaattgtttgaaaagggaaagtgcatttcctcaggaatgaaaggaacgaaaattaattaatattaaatgattaatatgaaagggcgaattcggttaaggaattgcgttcgtaaacaaattattaataattaattaaatatattaaagaaactagcgggtgtgtgcatgcgagggtggcgcttgggaaagcgctgcgcgcttcttgagcttcgctacctaggcgcgttttagtctgttagggtctttgcgtcagccgacatgcacttggtttcctccaataattggagttgacacatcgcataatgcaatggaaaccggaagtgccctaacgttgcacgtcatggccctcctccctcccttaatccaggcgttggcacgttattgggttgagcgctaaatggcaattcacctgtaggccctaaagagggctgaccggtccatgtcccggatccaagcttctcaccattttcgcacccaacatagtgcagatgngaatgggattggcatctctccaaaaaccatgtgcccaactgctctggactaagccatttattgtaacttgagcatattagtagctacaatattcagcactttggctcgcncttgggcatcaattt

SEQ ID NO: 29710 - DNA, 1316 bp, Heterodera glycines
aagctttttctctattagcctgcaaaatttcagaaaaatttgtcaactttataaaaaagttgtatgaaaataagtaatatttctgccaaaacttatattaaatttgataattttgtttgaaattctgcaggctaatagagaaaaagcttggctatcgaatattacaaagaatgtaaaatttggttgcctttaagcaaagttataccatgttttgtcgaaaaattcgctaaaatggcggattttgtgaaatgacccagcacgttatttttgaaatcatttgttctgttcgtgaaaatttgaagcgcaatttaagcactttggaaaagtcattttcactttggaaaagtttgcagtgaaggtttttagaatatatttgaaagttttttaatttgttcatgggtattaatgaaaaaattttttgattatagttaatctgagaaaataaaatttacggaattaccaaaaaatggaatcatttctattgatcggcccttttcaaatccagagtgaacttgacaaaaaagaccatctgctgtccatcaacgcgctgttccaacaagctgatcaaaaatgggcattggagaatcaaacggaaagctggcgatgctccagatacagggaaaattgcaaaattattatctaaactaaaaaggcaaaaaatccaaaatggtggtaaaacatagaaaaattgacacgaagtcgttttttattttagaatttgttaatacttattaacatctaggtaatttgcacctttgatttttcaaaatataatatatatagctcatctcgacttagaatctaatggcatcatttttatgccaaataatttataataaaaaagcattaacaataggccatgagaaaatgatggcgtttaagaagattggaacgaaaagataaaagatttcatttcatttgaaaatttgcaaaaattcggcgttgcaaatacggtaaaaatgacataaacgagaaaaaaaaattaatcattaaaatttaaaatgttctcgtcgcgttaaagggccgtaacactccggcacgggaagccttccacctttgttgtactgattactcttctcaaaaaacccagcggcaattgaggccaaaagaatttagaaaattatagtcgcgctggtgttcggccaacttaaatggaacccgcttcggctgtagtcaattggtgagtttgctaccgctgtgtttcatcctttgacttctagatttttcgtctacccaccagtgatgccgcgggttgagaaaaatttcgggttcgggtttcgagtcgggcactcaaaaaatttcgggttcgggtttcg

SEQ ID NO: 29711 - DNA, 1297 bp, Heterodera glycines
tgattagaagaggtacaatggtgattagaagaggtaaaatggtgattagaagaggtacaatggtgattagaagaggtacaacagtgatcagaagaggtacaacagtgatcagaagaggtacaactgtgattagaagaggtacaactgtgattagaagaggtacaacagtaattagaagaggtacaaaagtgattagaagaggtacaaaagtgattagaagaggtacaaaagtgattagaagaggtacaaaagtgatcagaagaggtacaacagtgattagaagaggtacaacagtgatcagaagaggtacaacagtgatcaaaagaggtacaacagtgatcaaaagaggtacaacagtgattagaagaggtgcaacagtgattagaagaggtacaaccactgtcgaaaatgtacaataattgttggagaggtacaaaaattgttggaattgtacaacaatggttaaaaagggtacaatcatggttttaaaattaaataattaaggaaatcgtttattaaaaagtaagattaaaaattgaatgtaattaataaatttttaaaaataaaataaatttccttttattaattaaaaagagagtttgaaaagtacagggattgaatatttatttaaattgaaattaagaaattaatattacaaattctaatttaaagtatccgggtcccggattttgaaaagctcaggtcccggtcccggtcccggtagggcaaccgggaaccgggaaaaacaagcactggtaagaatgggggtctgagtgaaaaattagtgaagaaaattggagttaaaggaaaaagagattcatatttgaactgatgaacatttcgccaaatttctttctttcatacatttttaacttttacatttcgcaattgcgaaatcggttgaaaaagtattaaaaaatttttgatttatgttctttttagtctgagtggtgccatggcagaaaaaattttgtttataaaaggaaatttgggtcgtttaactttggcaccatcggcagaacctgatgaagatgatgaagaattgctgacattggatgagttggaaataattgaaaattaaatccgatccaaatatatttttacaaaatattttcttgctttaaaatgtaagagttatttttggttttccttttgaaataaaaagaagcaaattataaatttaaatttgtatttacaaaattaaatttaattttgtattattttcagttgaaaaaaaattaaaatttgaattttttttaaaatttttgaatttttaaaaattccacggttggtcccg

SEQ ID NO: 29712 - DNA, 994 bp, Heterodera glycines
cggtttcgatatgttggaccggttaatttcggcattcaaactctgttcttgaggctcatcgtcaaatgtcgcgcgacggcggggattcgcatcctatggggggaaggtaagcatttcagtgagatttgtatggcccaatgaatgccaatgccatgctccaccccctcaccttctgctgaagccctcccgtgccgttctgtccctccctcctcccattttggtccatcaaagtcacgtccgaccgtgcgtcctcctcctcctcgttgtccgcctcttcctcctccgagtccgtgtaagtgccggtgttccgtgaagtgtactgaatgaactctccgttcttttcccgtccctccccttccatctttcccactttctttttgctgctgttctccttcgtttttccattgtttttgcttccattcgtcgtctgttcctttccctcccctccgcccgttccgtcgtaatgcgccagcgattgtccgtcccaattgacgcgcggcgttctttggctgtgttcattcgctgctgttttcgaaatgttcttcgtccaatccgaattcgactcgttcacatcgttcggaagttcaaattttgttttggaagaagaaaagcaacttaaatgattgaatgactttttttgaatatttattttgactgcactttctatccgaaggcatttgagggggcgaaggcgtccgtccgactccgtcgttgggcaaagtcgacggcttttcggaggaattcgcattatttggcgggagaggttttgcagtgttttgggaagtgctctgctcataaaacacactttggtcgacggtgggcgcgaaaagagaattgacgggacgaaacttttcttccatagtctgaaaatcattccaattttaaaatgtaataaaaaataaataaaaattcaccaatttggccctgtgattccctccgttgtgatgggactgactgttgttggcacggaatttcttaattgcttcttgctgag

SEQ ID NO: 29713 - DNA, 433 bp, Heterodera glycines
tttggtgcatattttatgcgcatattttacgattttatgtgcatataattttacaccctagtcattatttttcaagaaatttaatgctccgcaaattttttttttgatcccgaatttactgaaatttataattttgcattttcctccccaaaattatcaaaattgataataggagactaaaaaaataaaatttgatcgaataaattggaaaaataactgattagaaaaatttttgatactaaaatcttattttgggcttggtgttttattttgaaaaattttcgatggaagccctggtttaaaaatacgtgaaaaggtgtggggtttaaccgaaatttttgcgaacccacctcaacatcgaatttgacggtgctaggtcaggttgtttcgtaaaatccgccaccttgagcgtgtcgtaaaatccgccatttta

SEQ ID NO: 29714 - DNA, 926 bp, Heterodera glycines
tggaatcctccattagatttttcaggtataaagaaaggcctgataagttttttctggaaaaaggtctaaagaagttagttttcctggataaaggcctgccccaccccatttccgaaacctttcaactgtgaacactctctctgcgcgttgacttggttgtccccgttgcgtacacagtggtggtcaaactgtgcccatgtcatgttcgttatctcttcagcggcgtcataggaagacgggttttggtagagaaacgaaatgaccatcagagaagcgaagaaataggcgaagagaagggcccacacttttttggagccattttggaacactgacaacaacaaaaaaaatgtgaatttttttaataaaaatatgtaattttgacatttgttggatcagagccccccgggggcttttatttttcaacccttctcccctcaaaatgagagttttattttaggggggagagggggctcaaattcagtaaatgcggtttttgttggactgcgtattacgtttgaaattgaactgtttggcgatgattgaatagcattttcggaccaggaaaggcatgacgaacacgagcacagtggcggacactttcagcgcggttatctaaatgcacatgaaatcataataagaaaaagggatttcaaaaaattctgggcctggatccggaaaagctacatggaatggatatctggatccatatccgggcacgttttccaacaagtacccgggtttgaaatccaaacgggtgcactttatttcccccgggtgcgctacgtttcccccccgagaaaattttttaaaaaaaatttctcgggggggaaacgatgcggggggggaaccgagctgggggggaactgatacgggggggaaacggcgggggggaaaacggggggggggaaaacgcagggggggggggg

SEQ ID NO: 29715 - DNA, 1706 bp, Heterodera glycines
attaaaaacccttcaatttgctctcgtaaatgaatttgcgaatagatccttccttttttctgctttattgagtatttctgcagcctctgcatgataaaaattcatttactgtcgtaataaatagaaaaactaaaaacattttttagatactaaaattgtttagttggttggacataaagcgagttacggctgattaaaataaacaatacaaaaaaggcatttaccagtgtaaattttaaattagtgcgcaaaattacacaaattatactatttggcgtttcgtaattggcgtaaacttctgcgcgctaattcaaaaaaacactgataaatgcctttttttagttgttgggacgaattggcgaagtccatttgcccaaggggacatccgtagcggaaatgcgctgattgatgggaaaattaaaaatgcttggatttctacgtttgaatttcaatgcttttcccttttctttgctcattgatctccattattttcttttgtgcttgtctcgctcccttcacattaattgagtgggtaaactgtgaattgccaattaattaattggtccagacggaaatattcttcatttacttataatttacaaattgcttatgttttcaacaaaattcggaaatgtataaatttctcatttctaagccgcaattgctcagaaaaatagttggcggcgagaaatatgttgcaatgcttgattttgtttaataaaatgcgatttagagttttggatgcgtgtttaaaaaatgtccttttttaccctaaaatttgacgtgccgatccgtccgatgtgtgtctattatgaggaaattgatgaccaccgatgttagatgctgtaattgtcacatgttattgtctgttttctattgtatgtatttgttttttgtcagtgtgagtccatttcagaaaaattcctttggatcggattaataatttttttgtgtcttggatttataggtgctaggaaattggtaaaaatttacaaaaagttgtaatcaaaaaagctcgaaaaatttagaccgaacaattttgaccctaacttttttgaaattcaataaaatttttcgaactttaacaaaataatagagaaatctttgggctatctaattatataaatacaattaaaattggttctttcagaaaaaagttttgaaggaatgaagagtataatattcttatgtgaatccttaaaatggaaggtcgcttaaatgcgtggaacttgcacataccttcaatcctcttccgacatgggagataaaaagaattgcaaaaaaggatgtcacagtgccgatggaattcgaattttatgactaaaggtacagtactttaagacacgatagtttagaataaataattttgaaaataatttttccccttccccatttttcacaggtggtttcaggcctttcacagctcaggcaaatgtccaccgatctgttcgggacatgctcaaccgccggtattttcacacggaacgatgatcattgacacctctgtgcgccctcatccatcaacatgatcgccggtcacacaatgtcaatgtctgcaaatcgccctggcccagaacgcgaatgacgccgaatccgccacaatatttgcagtcatacgccgaagccgcccaacaggccccgtcaggcacgaacagcaaccgaagaatcgatgtgaagtgccataaatgcggcaaaatcggaaactt

SEQ ID NO: 29716 - DNA, 1131 bp, Heterodera glycines
  unsure (1)..(1131): unsure at all n locations
ggaacagtccatcaaaaattcacagtacgactccccgagactttggaattggcacaaattggtcagtagctctctcatcaattatttacccctactcattcaccgcactcggtataacgggtcaagagtttatanaagtatgggaaaacgacagcagtgtcccgactcaagtttatttaccggacatgaattttaaaaccgccgggggcctgggaaataaaattaacgaggcattcagccatcattacaaaatcaaaaaacaacgtggaaggagagaagccaaggctgaagataccaaagattcaaaaattgatgtcgcaaagagggccgcagcacgcgccgggagagacgtagaaagacattttaatcagatcaacaatatctcaaattccatccaaacccaactaaacacactacgagaaacaaatcctcacattttagaagagcctgatataaaaatttggtttgacaaaatggttgagatgggaaccgaaattcaaacatcccgaaatgaacttaagtcttttcaagaagaagtagataaagccaaaaacataacattggagcatgtggaaaagaatgacttgaaaaaagcaaagaaatcagccgacgtcgcaaagggaatcgccagacaggcaaagaccaaatatacatcaactctcgagggatataatgataaatcggaaaagggttttagcgggatagtgaataggcttaatgaggcgctcggtgagcatattaaacgtaaagatattgaaaatagacaagtatctgaagctgagaaaggaccacaaaaaagagagagattagccaatgaggatgttcaatttcaatatgacagtattgatcaaaaatttattgtctatctttccgctgctgtctcccatatagatttgtcaaaacacctcgcatatgttctagggtttaagaatacaaggctatttcacgcggaagaggcgacttatatgccggatttgacgggaggtgtaaggcagctatacatttatgcaccaaatttaatcgaaaacacaattatcggcaaccagatggccccactcttaagaatagttaacgtcgtcgatgacccaggatcgattagtgaagttatatatagcaccgagtatntttcat

SEQ ID NO: 29717 - DNA, 1040 bp, Heterodera glycines
cagagaatttttaaatttatcttatatccaagaaaaatgactatctcttattttgagaaattttatacgttacaaatgctctcgagcatgataggaagggcggtgcgcaatcgccattaatttctcagagaatttttaaatttatcttatatccaagaaaaatgactatctcttattttgagaaattttatacgttacaaaacgctcgagcgtgagagggagggcggtgcgcaatcgccatttaatttctcagagaatttttaaatttatcttatatccaagaaaatgactatctcttattttgagaaattttatacgttacaaatgctctcgagcttgataggaagggcggtgcgcaatcgccatttaatttctcggagaatttttaaatttatcttatatccaagaaaaatgactatctcttattttgagaaattttatacgttacaaaagcgctcgagcgtgagagggagggcggtgcgcaatcgccatttaatttctcagagaatttttaaatttatcttatatccaagaaaaatgactatctcttattttgagaaattttatacgttacaaatgctctcgagcatgataggaggggcggtgcgcaatcgccatttaatttctcagagaatttttaaatttatcttatatccaagaaaaatgactatctcttattttgagaaattttatacgttacaaaagcgctcgagcgtgagagggagggcggtgcgcaatcgccatttaatttctcagagaatttttaaatttatcttatatccaagaaaaatgactatctcttattttgagaaattttatacgttacaaaagctctcgagcatgataggaggggcggtgcgcaatcgccatttaatttctcagagaatttttaaatttatcttatatccaagaaaaatgactatctcttattttgagaaattttatacgttacaaatgctctcgagcatgataggaagggcggtgcgcaatcgccatttaatttctcagagaatttttaaatttatcttatatccaagaaa

SEQ ID NO: 29718 - DNA, 1399 bp, Heterodera glycines
  unsure (1)..(1399): unsure at all n locations
catcagaatcatctaatttttcccccagtgattgtgagtgatagaaaataaaagaattcagggataattcctgaggatttccaaggaccacgtgcatcattgctacancggtgccttaatggcattttaatgtcaaaatgcccgacactagcgcatttctttagacaacgaaaattaattcctgaggaatttcccaaagccatgcgcagctttgttagaccgatgccgaaatggcaatataattggaaaaggacagacaacaatgcttttctttatatcagctgatggtttatttacaaaaatcgaaatacttcctgattactttccaagaaccatgagaataaatatcgcattagcgccaaaatcgaacaagaacgctaatcatcagaatcatcttaattttcccacagtgatttgtgagtgataagaaaatagaagaaattcagggattaattcctgaggaatttccaaggaccacgtgcatcattgctacaacggtgccttaatggctttttaatgtcaaaatgcccgacactagcgcatttctttagacaacgaaaattaattcctgaggaatttcccaaagccatgcgcagctttgttagaccgatgccgaaatggcaatataattggaaaaggacagacaacaatgcttttctttatatcagctgatggtttacaaaaatcgaaatacttcctgagtactttccaagaaccatgagaataaatatcgcactagcgccaaaatcgaacaagaacgctaatcatcagaatcatcttaattttcccacagtgatttgtgagtgataagaaaatagaagaaattcagggattaattcctgaggaatttccaaggaccacgtgcatcattgctacaacggtgccttaatggctttttaatgtcaaaatgcccgacactagcgcatttctttagacaacgaaaattaattcctgaggaatttcccaaagccatgcgcagctttgttagaccgatgccgaaatggcaatataattggaaaaggacagacaagaatgcttttctttatatcagctgatggtttatttacaaaaatcgaaatacttcctgagtactttccaagaaccatgagaataaatatcgcaccagcgccaaaattgaacaagaacgctaatcatcagaatcatcttaattttccccagtgatttgtgagtgataagaaaatagaagaaattcaaggaataattcctgaagtattttccaagaccacgtgcatcattgctacaacggtgccttaatggctttttatggcaaaatgcccgaaactagcgcatttctttaaaacaagaaaattaatttcctgaggaatttcccaaagccctgcccaacttttgttaaaccgaatgccaaatggcaaaataa

SEQ ID NO: 29719 - DNA, 897 bp, Heterodera glycines
aattgatctcaaataaataaaattaaagccgaattttcgtatatacaaaaaaatatcattttgatttaaaacgaacgtgcgtagttttatgaaatcggctgaattggcaaacagcatggtttgggcaaccagctgcagaaaggcggacattgtcttggcgaagcgaattgggcaaatgttgttgttgttgtttttgtaagtgtttgaggcggtctatcaaaagatgaattaatagagttcattaattaattgaaacaaattgattaattttggtactacagattgtggcaattcgtttattgaaaattcatttttgcatttgcctatacaatgtgtatttagtgtgtaaaattttttgttactcggaatgcttctgatggtataaaactaaagatttgcaaagtatgctttttgggtcaaattgaattttggtccagctctgaattggcgcagccgtggaaaaactccggatttttaaaataattttattagaaattcgcaaattttcacaatttttcaaattcgcaaattttcacaatttttctattttcatacctggcaaaccccttctcccttcccttttttagagccccattactcactgcaaaacatgtccctcgttttagttattgaaatatcaaattaatggcgatggtacctcctttcgtaagtccccaaccaattattgtcgctggttcaatactcgctggctcttttttgccaaggcaaatccgcgaaacgtccgggccaaattcaagtggaacgttcaacttttaatattgcattaatttaaattattgaattatttttattttgaaaagtcttgcaaattaattttaatttcattaagtaattaaattataaataacagctgcgggtcgtttggcgctgtttttt

SEQ ID NO: 29720 - DNA, 1758 bp, Heterodera glycines
gattaaaagtatatatatatatattttttaattaacttgctcggaagtcaatttcaggagatgatatcgatgattacattttttactatattaatataattacctttttttataattacacatatttattggattgataaatattataaaatgttattttaggtgcaataatttttttcaaacattaatagaatttgtattatagtataaatattcataattcatatattaatcattaaattttcttgatttgatcgtttacataacttctttacttgggaacaatgtccacattatgaactgtattttcaatttaatcagtgaaatgataaaatttatgcttttgtcgccctttgtttattaaatatttttatttcttatagtttagtttattcaaataatgaatttttattttttaataaattaaattaaataaaaaattagcgaatataattttattatcttaattaactcgacgagaacggtgctaggtcgttccacaaaaaagctcaatgattgataaaataaaataataaatttaattattggattgccaaaatccacgtatgaaatcaataaccctcaacacgtattttaggctaccactgtaaatgtaaaatatgatgaattttttatatatctttaatacatattataatttattataatttaaaaaaatgaataagatttatatttttattttttcttatttctatgagtattcgaccgctattaattccggttttggagaatttataaaaaatcacgaagctatataacttgtcaaaagctatcaaaataaagaaattaaaacattaaaaaagcttcatgaacaaatgcaacaaaaagatattaagataagtttttgtacattaaaccgttacatgcataagctaattgttgtttcaggtctcgttcatttcgagatttggcattttcagtaatgttttcagcagaatttggtgtgcaaatcaagaaaattagaagaataatttttattggaagcatttttgagactcatgatggaaagaccatattgttacttatatatatatacccattttttgttttattcaacatttcattctcatcgaatgcaatttttgctcctaggatttcaagccattccattttattttactattttttcaattttagtatgaaatttcatgccattccttttgtttacctttttttttgaatttttagcccatagattaagccatttttgctcctagaatttcagccattccattttattttattattttttcaattttagtatgaaatttcatgccattccttttgtttaccctttttttgcattttttgccataaatgacaaaagatatttatgcaaaaaattaaaacaaaaatgacaaatttttatttgttctttttaaatttatcttgaaatataatggtataaaataaatttaattataattaattcagtgacacgttctatataattaaaattaattatttaattattcactgagattttttgtggatcgcccacactgagtttttttgcggatcgcccacactgagtttttttgtggatcgcccacactgagattttttgtggatcgcccacactgagtttttttgtggatcacccacactgagattttttgtggatcgcccacactgagtttttttgtggatcaccaacactgatattttttgtggatcgcccacactgagtttttttgtggatcgcccacactgagttttttgtggatcgcccacact

SEQ ID NO: 29721 - DNA, 1172 bp, Heterodera glycines
aaaagataaaaaggggattttagtttcactcacttttgctggggtcggtgtctccatcggtggtgccatcttttcctccaatgacgggcgcagatcagcgatcattgcgtctctgttgcggacctgcagtcgtagaaagctgatcgtttgtccctgctccttcagctatttgtccaactgctcggtttgtgtcgcggcgtcctcatatgccaagtccacgtcagttgccttgtccatcgttgtcaaatccatgtgtgttgcattgtcggtagttgtaaagtccatgtttgttgctttgtcggtagtttttggacggacacgcacatggtgcctgaccggagtcgctgacaatggacttgggcttgaacgcgggccttaatttaagttttgcttctaaaatattgtttttttttgacttacgaaggtccaaagttgacgttgatgacccactttcggcggcttgggtcgatgtcccctctccatctgctgttggcacggttacgtctgctttagccctgaaaaatgcagtgttttaaaataaaattaatttgtttaattttcgtcactttttggcgtcgaaccgcctttttgagcaagctcctgccgccattcctttcgctttcgtcttgcttctgcatagaagaccaaaatggctttggttgatttggcattattgaaatgaatattaaaatttctggaaaatgagttaaatgttcgtccctttcaaaaaaaatttctagcttttaaaatttcttcaaattttgcatatgcccatattttgacctcctctatcgaatcacagttaattttttagctgtctagtttttaactcgagatcggctcttatatttttacaagggaaaatccccaaaaaattttaagttttgcaaagttttggcgttctgattactaaataaataataaacctatttgcactgagagcccaaaattgggccgctgtgtataataaatggaattaatgaatattcattgtcctaaaatcaattttatggatattttttgacaaaacaaataaatggaataaaaattgcagcaattggatcgccaaattcatgagaagcagcaacgagcggaccaattgcgacaacaaattgcacgtgaaaataacccgacgattaagcagtcggacatgcgcataagagacggaccgg

SEQ ID NO: 29722 - DNA, 1486 bp, Heterodera glycines
aaattaaatatatagattgttattgcattctgcatattatttttcaaatttataattatttttgatttgaaaaattttttataagatatatttgagtttgtttaaataaatttttcttatttttcgaacaaatatgctttcattaagatgtggaatgatgatttagaaagtcacatttaataggatttaaaatttataagattgtacacatgttttctttaatggttactattctttgcagcaagatattcattaatatttcattatttacatttaataaatatagtgatgaatgaagttcaatttatgtgggttgttcaatttcgccattaatgttcttcctttaaatattatattttaataccttaactgctacactattgtgttttttttaatacaaatgcacacatgtgtgcgaaagtgttcttactccagcttctgccaaccaccgcctggcgcgatcggttccttgaattcgcagatgcgtggcaaaaatttcagtgtttttttgtactaaacgcttttttcccttttcgttttagtaaaacagaaattgtttgtttcattttatttttggtttttaaatattttttttttgttttcgtgaaataaatatttttcctttctttttgatttcaatttgggtttagttttataactaattttaaatgttgacacttcatggcgtcttgccatgactatttcgagagcccacattgcgaggcttgtgtaagtaagttctcatcggagctaatatttttaaatgaattttattcagtaattattttcaaaatagttcgacaatcattttgaattggcagtaattacattgccgtcgtgatttgtgacggtcggctttggcggaaaaaggctattatgttagtttctttttttttgtttataatttattgtatattttatgactactgtattttgttagttacctttttagaaaatatatattagtgtttaatcatattttacgataaaattaaatgttaatgtttctttcaagatttccaatccaaattgaaagtagtataaaataaaactaattaatttgtaaataatcaataatttttttttgattaatcttttgttgattgattcataatcttgggatttatgtatttacaaaattcaaaattcacatttaaataatgttttatatgtagaaaaatttattttacaatttctttagacaacatttcgatttgacgttctatttcagacatatgacgtttgttagcagaagaggtagttattttgtaatttttcaaaaaatttatagtttatgtaatgtttttaaagttttttcttttatctggaatatggatttaaattttaaaatgtttagtttaagtggcaaaaatgtaaatgatttagtaattttttaattaagttttttctgttaattattaaagtaaatttttatatatatttatttttttaccagttgaataaaatgtatttttatcgacctgca

SEQ ID NO: 29723 - DNA, 767 bp, Heterodera glycines
acaagctaatgtgataaaacagtttaattcttttcctttcagtatccctgcaaagtttggggcgcttctgataagtttctgaaaaaaaagttaagcctaaactttttggcctgtttaaaaaggaattaaaaatatttaaatatttattcatctccctttttgataatataagagtcagagtgccttattcaacttgtaaataaattttggtgcgtttcagagcagtttctgaaaaaaaatttatgaattaattttgcaaaaataaataaataatgaaccctcctccttaataattttcctgcgcccatggtactcactcggccgcttcgcggcctcgaggggtccttcggcccacccccgcggggccttcggtcctcctcggcgtgttctcggagaagaaggccggacagttcgaggcggcggcggagttaggtgagaccggccatggttgcagatgcggaaacaactgcaagtgctgcccctggaactgatgatgattggcttcttcctaggagaaggatgaagcatgctgctactactctgattgtcttgcgtgtgatgactgattgaacaacaataaggatgagccaagttgatgtgagtatcgctttggctccatctccagcatgcatgtgtgtgttttgctactataccttgtgatcatgtatgtgtgaatgtgtgtgtgatgatcgatacaaatgaaatcatgtatgcatctctgtatgtgctcatgtgtctttggaatgaacagaccagagcgatgaata

SEQ ID NO: 29724 - DNA, 1533 bp, Heterodera glycines
  unsure (1)..(1533): unsure at all n locations
attattttgagttcattcccatgcactcattcattcaactgtatatcataaacatcatctcataacaatgaaaataacaaacaattcgttttgaaaaattcagcacatgagttatctctaaaacatgagagacaaagtagtttgcatctcataacaatacattttaaaaaactgactaatttcacttctgtgtaacactattgttttgtcaaaaaattgacacatattattgtgtcacacaaagtcacacaacacactattgtctaacataaagcacacaccacactaatgtggttgactgcacactaatatctggcataaaccacatacagtcatggtcataagtgttgtcccatcatgctttgaaaaaaataattgcgtataaaattgtcattttccaatttcaacagataagtagcataccattggatagcattttttatgggctttccaatgataccatatttgcatttgtgacataaacatttatttgatttatttgcatgacacacattagtgtctcacacgaaagtcacagaacaaaccactaatgttttatcaaaagcatgacacacattagtgtctcacacgaaagtcacagaacaaaccaaagatatgcatttctatttcattaaaagttcaaataacattaagcataagcataattatttcacgtaaagaacacaaaaacaaaataaacaaacaaacaaacaacaaccactaaatcaaactcaaacaatatactgataaattttttcgtttacaaaaaacaaatttatataacaaataacttaataaactatgaacatagataaaaaagcaaataaataggtacaattttaagaatgtttattgcaaaacaaattgaaaaatcaaaaccattttcattttcaaatcatttaacgcaaaacaaatacaaaacgccacgccaattcaaaccatggcggataaccacactcatctttattatataagataggaaaattctcactgaagcgaaaacagaaataaaaaaactctcatttccctttcttttattaaaataaaaaatgggatgtaaataaggaagagatgcgagacaaattttcaattgttctctccctttcatttcttttctcttatttcttttacttttccacttaatctctctttttccnncactcccctccctcccacacaccacgcacgcgtccaacagactgctgctgcacagcagccacagcagcacgcgtctgttcactgtctgcccctcccatctgccgctgcccgcatagacagacagtcatacagtgcactatttcccaccatccctccctctaacctctacatcctaggaggagaaatcttttaccttctttttctgtgctatttcttttgccttcttcttcttcttcttaactatttattttcgtctcttttctttatattctcttctttttcaaaacaatttcttttcatctcttttcaaactcatttttaacgcaaaataataacaaaacgccacacaaattcaaaaatccgtacatacagaca

SEQ ID NO: 29725 - DNA, 842 bp, Heterodera glycines
  unsure (1)..(842): unsure at all n locations
tgcaggtnncggccacgtcttccatcaaccgccactcatctttcaattgcaatatagtacacaaacactttcaaatatctttcaaacaatttttttatagtttctaaagaaaataaaaagtcgtttttttcaacaaaaaaaatttttttctcagaaacctctaaatgaaaaactgaaaaacatttttttgaaaaaagttttccggagggagggaatcggcaggggctatgcactctttggcggcaacgaaatgatttcgaccggacaaaagtcacgcaattgcatgatttttaatttagcctgaccaacttggggcccatgaacagaggatggaggaaacggcactgagtttggctcggttgcgcgagaaagcgccgccgatgaaagcaaagggaagggtagtccacgagtacttctacaaagagcgattcttggaaacagaggcaaaaccaaccaattttttgatgactaattaatttttcagaagaatcgttacgccgtgtacgtctccattttgaggtgctttgaaaggattcctttaaagtgaatgaaaaatcactccgaatagagacaaattgacccgtgcttcgtccgtcctccgttgtggcggttcgttcgtttcacacgcagtgcaaaacacttttaacccctcagtcttcgaaggtgaatttcacattgcttggccatttcggccggaaatcattttattatttgaagaaatgagtcgcgggggtcgcccgtgcagtagcgttacaagcacaatggacacagcggaggaccaaaacgaagacggcacaaccgcaacgaccacaacggctgacattggcacggcaatctgaaaa

SEQ ID NO: 29726 - DNA, 1330 bp, Heterodera glycines
gggggggggggcgaagccccaccacgaggccgcgaagaggccgagtgagtaccttcggtgcaggaaaattattaaattttaaaaattttttaattgctttttaaatatgccaaaaaatgtaggcttaacttttttagtgaaaattcgatcactcatattttttgctaattgagcagaagcgtaccaaactttgcagggatactccccggtaaaggactaacttacactgaaatgagcgccgagctagctggctcaaaaaaattttcgaaaatctgagtctttcgtttttatttattttttgcaaaattaattcttaaatattttttcagaaagggttctgaaacgcaccaaattttatttacatgttagtttaggcactctgatgctttttctatcaaaaagggagatgaataaaatttttaaaaatttttaattcctttttaaacaggccaaaaagtttaggcttaacttttttttcagaaactgatcagaagcgcaccaaactttgcagggatactgaaaggaagagaaataacctattttaaatattatctagtcagttcatttaaataatttttatccaaaaaatttttttttgggttttcggggcagtccccctgaaccgatgcgcccagatttatggggagaccgaatccttccggaatagcttcactatagcctgtactttaattctgcgttggatttttgctccccataattgtttgagtaccccaaacggacacttgaaaaaatcgatttatttttggtttcggggcagtccccccgaaccgatgcgcccatatttatggggagagcgaatccttcgggagtagcttccctatatgctgcactttaattctgcgatggattttggctccccataattgtttgagtaccccaaagggacacttgaaaaaatcgattgatttttgttttcggcgtcgtccccccgaaccgatgcacccagatttatggagagagcgaatacttctgcaatagcttccctatagtctgtactttaactctgcgtatggatattttggtccccataaatgtaagagtacccgcaacggacacttgataaaatatatctttttggtttcggcgcacacaccccgaaaccatgcgcatagagctatagagagacggaatacccctaagaaagatgtactcatattctgaacattaatacagcgctgctaatttggtccccctatttatgttgaacaggatgtttgacgaatataactcttcatgtctttaagatagaactgtcattgctattcctgcaaatatggagtctagtcagcccaatcgattgctattcgaa

SEQ ID NO: 29727 - DNA, 457 bp, Heterodera glycines
ggcgcgaagcgcccgtcctgaggccgcgaagcggccgaattaaaccttaaatataaaaaaggcgcgtaggaagccgcgcatgcactagcaacgaagtcctttgcgcgaagcgctcatgtcagcgcccgtccatacatataaaaagcatactgcctacacaccgagcaatcactgtgcaaagcatactgtctacaccgagcaattactgcgccgcgacacgctagtttatattaccatagagaaaagttgcatttcgtttcaaaaaacaaaatctcccggccgaaggccgggagcgccctgaaagtagtggaagggtcttacaactttttgaggcgcatctgggaaaaataagggttttccgctccggtggccaactgagtcccggcggctaatttctcacttttgcttgcgtttgatggcccataactttttttctaaaactcgaatcaaaaaatgc

SEQ ID NO: 29728 - DNA, 2440 bp, Heterodera glycines
  unsure (1)..(2440): unsure at all n locations
aaaaagtgcaaaaaaactgatttttttccctagatttttttatcattttttgaaattagaaatatgttaaatnntnaataaaatgnatgcttaagtacccattcttaaaaaagtgttttttgatctgnaataaaattataaagtacattacgaatggactaaaatttaaaaaattaaataaattatagaaaaactggaaatgtttatatggaaatgtattctcttcaactcaagctaaattagggaccagtattatgcttagactttattttgtaaaatttataaacgccattaaaacgttaattatttaaataattcagagtaatctggtaattacttcgagatctaaaaaacatagaataatgtgtatttaagcataaattacttatttcaacctatttataatttaaaaaatttacaaaaaatcataggaaaaataagattttcgttttttgtactttttggaatcaacatagcaccgtttaaattaataacaaatataaatgcgcgctatgccatttatgacttgaaaaaacgacattaaatgatctaattttaacagaaaggattgcaattaaaagtaccaaaataaatattataattatcaactacacgaaaaaaatacgggtgcatcagcgaaaataatattacaattcttttgacaacgcaagatatttctcgtgggaaaacttatacaatttaaaaattcctaatgaataatacaaatattatagctaaataataaaatagctcattaaaaatgctattcttgaatgaaaaatataaattgatttttattcataaaaccaatgtgttaactgagaagaaaactcgtcggtaaaaaaataaaaatatacttaaacgtcaatttttcaaaaaagatgaaatataatataaaagaataaatgtcagaagaaaatcaataaaatatttaattccatgaaccgaataatgcttctgaatgtcaatttttttttgtagcatcgtctcatgaatgtatgaattaagtattaaattttaaataaattaacaatatttaaacagcacaaaaatattatattgtaaataataaaataataatgaagtggacattttatttataaaggagaaaaatagaatcgaaaaacacgtaaaaaaagtttatcatagataaaattttcagaattagtttatcgaaataaaacattttaaattgcaagaataaaaacccaaactcaaaaaaatattcaaatccattaatttgaattaaaagcaattaatattaagctaattgcgaaaaaattataacttaacacggataattagttgctaagaactagaaaaacacgaaaaaataaagcccaaaaagatgaatttatgtttgaaaaaataacatcaaccttaaaaaaatatgaataagagaatgattacagttttcaagaaaataaaaatattattcgtatacattttaagcacataatcatttaatatgatttaaaaagtcaatcattaaataagaatttacccaatttttttaagttgagcattatttttagaattaaaaaggtaaaaatcttataaaatcaaataattgtcataattggaaaaaactcttttgaataataaccagtgaaaattttgtatttggggaaaatacattctttcgatttaatttaatttttaataaatagttttagtgatcaagagaattgaaaaatgcgtattaaaagaattgataaaaatataatataataatatcaaataaaatttttgctataatataactttaaagaacagcatagtagaaccaatataatgaaattagtaaaattattaatattccacaataattatttctataaatatttattaaactctgtcataaactacaataaagttgcaaaatcaaattaaaatatcctattaataatacttaaaaggaataaattactgacttgataatcgaataaagaatttcaaaaaattattttaaattatcagatttaattaaaaaactaataaaattaaaagatataaatatatcttataagtatcaattaaatgaaaataattttcaaagattagaaaacaaaatcttatattaaatatgcttttcttggatttcttcttgaccgataataacttaaaaaacaaactataatcatatttttcaccaagggaatattgcaacaacacgaagataacaagaaaatacaaataaatggaaaactggtaataaattatttaaatgatttttaacaaaattataaaataaaatttaaaatgaacacccaaaataaaaagcaatctgacaataatgagggcaaaattaacgaatttaactagaaaataaagtttttatataaaaactagatacagaatttanaaagaaaagtttnnaatacaaggaattttaatactaaaaatattatacaaatttttatcttgcgaattcttatta

SEQ ID NO: 29729 - DNA, 944 bp, Heterodera glycines
ggaggaggggaggaacgagtttgttgtagtcgttgttgtgtccgccggctgctgctcgtcgcaatgtccaccccacagcaaaaagatgatggagtcaccaatcaacacccagaaaatcctcaacattatcgacaaccccccccccccttcccctccccccaaatgcccaatgtccggcccaacaaatgatccatccttcgcataaatgcggcgatatttgcaggataagcgatcggctgacaatgagttactaattgtggggaatatccaaaagtaaaatgaaaagtgaaaaaaggaaaaatcaaacagaaggaaaccatattttgagtttaatcgagaaaaaatgagatgaaaggatttgcgcgatgggtcactgcccccgcccctccaatcccttcgtttgatcagccgatcactttgctcgtttatcccccccccttccgcctgatcagccgatcccttttctggtcagtgctgtgatttctctgctgtcattccgttccattaccccccccccccgttggttttcctctcaaaatgcgattttgttcatggattgtggtggaaagccctttcatgcttctgtttggtgggagtatggcgctcgttagtgccgccaatgacccggatacacacgcaaatggtggggagggggggggggggggaatcgaatctatgaagtttgaggggattctgctgttttgttgaatcggagcacctgcgctttttttttgggggggggggttggtagtgacgagcggtggagaaggggcaacaaaaacggagcagcgcactgagaaacgctcaaacatttcgccacggcggagagaagcaattatgcacgccttgtcgtacccattttgtgttttatggcgaaggcaaaaggtttttaaaaattggacaacataaaaggcaggcgggccatccattttggcattcgccgt

SEQ ID NO: 29730 - DNA, 910 bp, Heterodera glycines
cacgaatatttcactctgtttattgcattgatctcagtcagtcaaattttgaaataaatcaatttttggtctcgagcattgtaatgaattttgggaggatcccgaaccttgccacaaatccttggtccccatggcatttgaattttagggggatcccaatcttggcactaaccctttatgatattcattcttgcttggcaatagtcgtcctctactgctgttggccgtgttttcacccaaaaataataggcgttgctaaatggttgcggctttcggcgccccgtcggcggagtctctcctccccccggagcgctcgccgttttcaattgactgaacacagcgaggagtacggggctacctccagcagcagaggagcgagccaaaaaaccattcaccaacaattttgggcacccgagggaggcggggggaatttcgaaattggtggacggagaaaaaaggatgggacgggggacacatgaggggcttggatggacaaaaatttaccggcataacacctccagcatagggtaagggcatggcatggaatggcattttgaatgttaggccaaagaggcaaagggtgtagccaattgtgggcctaatttttttttggggggggggcggggcaaattattattttttgatttacacccaatcaaattaaacattattggtttatcatttgatagctcattgccagtgctctattatcatgtttttgaagctaaaccgttataaatagtcggccaaaaaagtgatgtgcttggttagttttcatcaaaaccattgcgccgccgggcaaaggtacattaattaaaaaaacggggcgggggggggggcaatttagggccatggaaaatgaaaattttttcaaatgcaattaattgactccacaaaaataggcgctctt

SEQ ID NO: 29731 - DNA, 274 bp, Heterodera glycines
aatcttctaccgacacgacggctcagaaactctttctgattttgtggaacttcgggtgacaaattcatcagacaattggaaaaatcccagaaacaattgaccaaattcagcctttgcgcttcgcggaagagctcggcacaagttcggactctgtttcgattcccattaaaattgtgccgattaatgacgccccgtcacttcactacggcacaaaaggcccagtcatttttattgagcccgagtcaaggtaaagcatctgtggaaaaaagcataa

SEQ ID NO: 29732 - DNA, 1057 bp, Heterodera glycines
atgagacgccgctgctgatgagatgaggtgatattgagcaaaatgaaaggaaagggagagaaaaaataagggtgaggaagaacgaatgattcattcgttccatgcgaatgtttgttttggttggcattgatcgttccgctgactcaccccccccccccccccctctccacgatttttgatttcacccgtcacagcgagtaactcattttcaatttttagtgtatgaatattaattattgagaatgtactaatagtctctaaataataattttgaaaaacccccaaaaccgatgaaagaccaacacaaaaaagttagttcgagatttcaaactaattgtaagctttgagtaatagcttttataaaataaaatacatatatttcattttagttgtatctggataccaaaccaaaaaacataaataaaatttatttacctaactaattttattattttattctaacaaatttaaatataaagttaaaaaatattttttaagcaattttaaaattttcgggcaaaaaattcaatgaatattctcattttttttagtttgccgatgccaatctgcatttatgacggcaattctaataaaaatcgaattaccattttaaccgggccattttaattctattaatggtttgtggacacaatctgatggatcactgattagaaataaaccaatgctgacatggcagtgtgttgctggcgattaatctcctcaaaaagcccgtcaaaagcgcaacgcttatgccataattctccatcttctaaatagttagaaagccctcaacaacagtaacattataatccaaaacgatcacaattatatgcttgttaatttttctgcactttcaattgtatttcccaaattgaaatttattttaaggctctgaatagaaggaaaaacacttttcataaatatggaataccagcagcagtagaacggacatagggttgtgaagatttgcctgaggcgtcagctacccctaaattagagaaagtcaaatcaacatttttctcttagaaacattgttttaataatacggaggcgtttg

SEQ ID NO: 29733 - DNA, 758 bp, Heterodera glycines
  unsure (1)..(758): unsure at all n locations
aaaatgtattttaccacggaaatattctttaatattaagtcatatgcattcgctgtgaagaaaagctaaaaaatggaagaaaataattgaaaatccaaatgaatgcaaaaattacggcgctgagcagaaacaaattgaaaggtatcatagccattgaatcttcaaaatgaatgaaataaatttagggttctgtctctgagaataaatattaaaatttatgtggaaataatcaaaagtttgcgaaagaatttgtgggcaaaagagtgagtgattcggccgatcactcatcgcattcatcgaattgttgggccccaatttgttgggggaagaaacgatggatgcctcatcatcaatcacaagaaatgagtgataaatataaataaaaataataaaacgttaatacctccgccgacgatggaatcagtgaacaatgaaatgaattggggggggggggggaaatcggcgaatgaataaacggacggatgggggggggggagggacggtgaatcatttgaggtggcaagcaaacaaaaaaaagtgggggaagaagtgggaaataaggggnggggggggagcaacaaaatgtcaacatccccccagggggggaaggggtgtgatcggaagaggagggggaggggggaggacgatcaccgatcacacaccacgcgacggatggcaattgccgaagagagtgcgcgaggagcggaccaaaacggagatgtcaatttgttgacggactgatgataatgatgatgatg

SEQ ID NO: 29734 - DNA, 63 bp, Heterodera glycines
cctgcccggcgtgccgcgccagcaggcattcgcccggctgcagtggacgccgggcgaatggca

SEQ ID NO: 29735 - DNA, 1855 bp, Heterodera glycines
ggtaagcctagaggccaaagaatggagcggggggcgttagtgtcggatgggtctgcgaaatctgtgtttagggagccgtagagggaggggggagttcaaattttaatgaatgagtatttgggggagggggaaacagaaagctatgggatatgtaagattttggagggattggcaaatatcgaatgggcaagggagctaagagtaaaagtgtaaatgaccgcattgcaaaggggggggggattttaaattctatgaatgtgctgaagagggaggcgggggaagggtagacaaggatttgatggggcgggggttaagagtagagatcggcattttgcgaaaatgcggacccggaccaggactacggactaggcacccatacgggctacggacttatgactaaaaacccgtaaaacccttactccgtataagtccgtatcggtccaagaaaatacggactacggacccgtaaaaacccgtatacgggtccgacccgtagccgatctctagttaagagagataaacaaacaaagaagtgaatgggacgacggcttaaacaagcttagcgactaagaaagtgatgtgagagtggggttaaggggggggggattaaggaagccagcgcttcgaaggatgaacttgcttaaagaaggcttcttagagcactgctggtgaaaaaaaattgaatggggttcaaggccaaagggagtggggggctaatcgactgaacaatgggagagatttttcgtttttaacggacaattgccagaggattagggacacagcggcggatttagacggttatagggtcaacttggccctaatcatatttagaatacctaattttcgtggttgacgaatttaataataatgccgggattttcaaatggccgggaccgggtcccgggttctcgacattggcgacttcagtggtaggaggacgcagaaatataaaataaaatagaacagaatgaataggcttttcagataaaagccagagcggttcgagactaaagaatactagggcatgagagtaatctgccaggagttcaatggaattcactaatttgtaatatgaagaatggtgctggggtggggagagaagggatccttttctgtcctaaaaaatgcatttttttgagtgggttatgctaacaactaaactagccgagagtgttggggccaggggggggaggcgggagcgtgttatgtaagctgatccctaccgatcacccgcccagggcgctgggaggtgacactgaatgtaagccaagtcgagggctaacgggacaagcaaaaatgatctttagcattttttttctggctttccccctaccctccatcaatgcttcatccttcttctccttttactggtgacgtccaaaaaatgcttctcgactgaaaagcatacctatcagcagcaggggtgaaagcatcattgcttagattagtagtaattggttctgcttgctgcgcgagcgaatttttcaaaattttgtgtaccgtccccttttttggcacaaatgggaaatgccattttcgatccgtcgccgtgcccttgccgggaaagtgtaagtgccgactatggtcgattgaaaaaatgtgaaagagtttgacaaaacagattaattaacttaatggtctctattatatccaatagatggaatccaagtttattccctaattaaaacagctaattacctatcccacccccctaatatggaagcttatcatatgttttcaatttttttgaattttaaatatttttttgtcaaattttattttaattttagttgccggggggcttttacttttttctaatactatatacaattttaatggcgttttaacaaataaa

SEQ ID NO: 29736 - DNA, 670 bp, Heterodera glycines
agaattaaagtacaggctatagtgaagctattccgaaggattcggtctccccataaatctgggcgcatcggttcagggggactgccccgaaaacccaaaaaaaaattttttggataaaaattatttaaatgaactgactagataatatttaaaataggttatttctcttcctttcagtatccctgcaaagtttggtgcgcttctgatcagtttctgaaaaaaaagttaagcctaaactttttggcctgtttaaaaaggaattaaaaatttttaaaaattttattcatctccctttttgatagaaaaagcatcagagtgcctaaactaacatgtaaataaaatttggtgcgtttcagaaccctttctgaaaaaatatttaagaattaattttgcaaaaaataaataaaaacgaaagactcagattttcgaaaatttttttgagccagctagctcggcgctcatttcagtgtaagttagtcctttaccggggagtatccctgcaaagtttggtacgcttctgctcaattagcaaaaaatatgagtgatcgaattttcactaaaaaagttaagcctacattttttggcatatttaaaaagcaattaaaaaatttttaaaatttaataattttcctgcaccgaaggtactcactcggcctcttcgcggcctcgt

SEQ ID NO: 29737 - DNA, 989 bp, Heterodera glycines
caaaagggaaattgtctcaacataaactttttccaaattaatccttccctgtttagacacatttctaaacgctcaaaatgactgatattcaggcatatgctggcccatttatagtgaatgacgtcgtttcctattttttaaaggtttttattaccgtttttatgcatatcatgtattaatttcttccttgtttttattttgccacgtttattttgttaattggtaatttttcaggatggcgtctggtactaccgaaacgcgttcattccgatcaatttggagtgcaagcagccaccgccggcggagattgtcaaagagtggatggacaagtacggttccgcagcgccaaaatcgacaaagcaggccaaacaaaaagtggccacaccattgaaaaagtcgtcacacaaaccgaagttgtccagtgccgacaaggacagcgaaatgctcaagaggaagaggaagcatgagcaggtttttcaaaaagggtggtgaaattggggtttcgggatcagaaaattgttggcttcgggatccaatttttgaccgggaacccgcccgaagaataggggtgagcatctcatacaaatctttttgaactcgtattgatctattgcaatttacccgtccataaaaatttgtggattgaataattccacttccttaaagtaacattgaaaactgctatataaatgagtggaaaggtggacacagagagatcggtcaatgtttttaactgcctttttagatgctttccaattcttcaacttcatcatcatccacatccaaaccgttgcctgtctctgcacaaaaagtggtgtcgtcctcggcactgccaacgccgggtgcgccgtcgccaaacattcccaagcaaaaacagccggcaagaccctcctccgctccaacaccaaaaacggcactgtcctcaaatgctatcaacgaaactccaacaaaggtgcaactgtcaaattaactttgcaaaaaactactct

SEQ ID NO: 29738 - DNA, 1332 bp, Heterodera glycines
  unsure (1)..(1332): unsure at all n locations
aatcttttgaattctaagaaaataaacctgtaatttttagaacaattaattctctgaagtttttaactatgtttttaagtcccaccgtgaggcgagacagttcccaaaatttgtaccacattttactgtggagagtccaagtaccttatttggacaattaattgtcaacgaacacagtcgcctttggccagttgtggaacggaaaaatgggaatatcagatggggtgcgcgtcccttcctaaaaatttctcttttcgtctaaccatcccccctttttgtgcactatttcgttttaaaaattgggaacatttttttgtttgtttttttgaaactaaaatgtaaaaaattttaaaaaattatttctgattttaaataatgcttctgtttcgaatcttttgactctaagaaattaaactgtaaattttagaacaaataattctctgaagtttttaactatgtttttaagtcccaccgtgaggcgagacagttccaaaatttgtaccacattttactgtggaaagtccaagtaccttatttggacaattaattgtcaacgaacaaagtcgcctctggcctcttatggagcagaaaaggggaaatatcagatggggtgcgcgtcccttcctaaaaatttctcttttcgtctaaccatcccccctttttgtgcactatttcgttttaaaaattgggaacatttttttgtttgtttttttgaaactaaaatgtaaaaaattttaaaaaattatttctgattttaaataatgcttctgtttcgaatcttttgactctaagaaattaaactgtaatttttagaacaaataattctctgaagtttttaactatgtttttaagtcccaccgtgaggcgagacagttccaaaatttgtaccacattttactgtggaaagtccaagtaccttatttggacaattaattgtcaacgaacacagtcgcctttggcctcttatggagcagaaaaggggaaatatcagatggggtgcgcgtcccttcctaaaaatttctcttttcgtctaaccatcccccctttttgtgcactatttcgttttaaaaattgggaacatttttttgtttgtttttttgaaactaaaatgtaaaaaattttaaaaaattatttctgattttaaataatgcttctgtttcgaatcttttgactctaagaaattaaactgcaatttttagaacaaataattctctgaagttttgaacttggctgttcagtgtttctaagcccaccgtgaggcgcgacagttccaacatttgtaccacattttactgctggaaagtccaagtaccttnatttgtacaattaatt

SEQ ID NO: 29739 - DNA, 1096 bp, Heterodera glycines
ggcggaggcgaccaacaccggtgggacagcggcggatggagctcgtgccgcggagtagaagcaatggaagaacaccaacaatggataaatggatgatgacgaatcggatgagaagcgattttccagcagaaattaaccgtatttttgtctccatcataattatatgttgagagtggccctctttctccaattgtttgtgttgtacaatattcctttcctataagcccgtgagatgcttgccacacctccgttgtatgaattccccttatgtcagtcattctgatgttgtattgtcgatttaatcgctatgtgttgtctctcaattatgtttgctctaccataataaacgataaaggctcttctgtgacaaacagtggaaatgaattggcactttatatagggcttatatttttaggcttttctctttgctcgttttttactaaatagcaaaattcgttccattttcattcaaattttgcattgttttcggattaaattttacaatggcacttttcgcaaagcaaaaatttccgcctgttaacatggtgaaacccactaaaaaccccggaaactggttttgaacccaaaataaaaacattaaattagggacccccattctttacgattgtcgggaatttcatatagggagcgaggcgatcatgaaaataaaattggataggacgaaaaaattgggtactttccacacgaaaatttttaaaaatcaacaaaaaatacgcacaattaagaaattttagaaaaaatttatttaaataaaaaaataataattttattttggcatataataaaaatttaaaaattcgaaattgcatatataaattttgaaattttgaaaatgaaattttttgcaattgtctaaaatgctctttacaggcgctatattaaaagtgggcctttttgaaaattttttcaaaatgggggacccttttgttttgcaaaattttttttgtgatagtcataaaaatttattctctggggtttttggggtccccgatcacgaatccttcaattattttgatcaattccgatttcctaatctaaatttgaacaaaaaatcataatttgaaaaattcaaaat

SEQ ID NO: 29740 - DNA, 980 bp, Heterodera glycines
  unsure (1)..(980): unsure at all n locations
ccttcgggggaccgtgccgggtgccgcggggtaagccatcatgggtcgnttcatcacggcaccgaaccttttggctactttcaatcgttgcttaacttgccagatcggacgggtgcgcatgattccactgttccaagcaccccaccaaaagcaaaacgatataaccaaaatataaggaaaaattttttaaaaaattttttctccatcttcctttttgatactaaagcatcagagtgctaaaattaagttgtaaataaaatttggtgcgctttagagcactttctgaaaaaaatatttatgaaacaaaaaaatcgattttttcaagtgtccgtttggggtactcaaacatttatggggagcaaaaatccaacgcagaattaaagtacaggctatagggaagctattcccgaaggattcggtctccccataaatctgggcgcatcggttcggggggactgccccgaaaacaaaaaaatcgattttttcaagtgtccgtttggggtactcaaacaattatggggagcaaaaatccaacgcagaattaaagtacaggctatagggaagctattcccgaaggattcggtctccccataaatctgggcgcatcggttcggggggactgccccgaaaacaaaaaaatcgattttttcaagtgtccgtttggggtactcaaacaattatggggagcaaaaatccaacgcagaattaaagtacaggctatagggaagctattccggaaggattcggtctccccataaatctgggcgcatcggctcggggggactgccccgaaaacaaaaaaatcgattttttcagtgtccgtttggggtactcaaacaattatggggagcaaaaatccaacgcagaattaaagtacaggctataggggagctattccggaaagaatcggtcttccccataaatctgggcgcatcggttcgggggggactgcccccgaaaaaaaaaaaatcgattttttc

SEQ ID NO: 29741 - DNA, 1021 bp, Heterodera glycines
  unsure (1)..(1021): unsure at all n locations
aaaaaattaatttaatataattttttatttattaactcaacaaaatattttaaattaattaaaagcattaaaataagcaaaaaataaatagaaaataatgtacaccgtccggattcgaacctgccccccccccccctcagaacatgtcccagaatccccaatcacacagggattctgaggtcttgacgatgacaaaagtaaaatctgatcacgtattcgtgatcagcgtcctaaattggccctaaagacatgttttttgaaggtttttaatgaaaaaattttttcactcaaaaatcctggtcacccccctttggtctggaatcccaaaatcacttttatttttataacatttttcaaaaaagtgataaaaatgtgaaataaaatttatataatagagcaaaaaattgcggatttttgtagtattttacttttagagtatgacttttcagaaccgagttatgaatttttttctgaaaattcgaatttttccagaaattctggaataactttttttcttttgaacattataaaaccaaataaatctcataaaattctcccgattttttgctatttttaaagctttaattcacttaaattgaccagtcctccattgagttatgaattttcaaattttaacccaaatttccaaggaccaaaaaaattaaaaatattttcgaatttttaaaaaattccaaaaattctgaaacgtaaaacaaacatcagattcgtgctcagcacctcaaaataccccagaaaaaaaattttcacccccattttggcccacaaaaaaatttccgaaaatttctagggggcctagctcgaaaaattttgaaattttccaaacatgtagtacatcattcgatagagcttaaaaagctctacaattttgctctaaggcaattttntggataagatcaactcctgacgagttatgggcccgggactcaaatgtcccgcttaggnccaaaattttttctatttccngaaaaaaatcgaaattttttcaaaatcccaccaatcg

SEQ ID NO: 29742 - DNA, 1075 bp, Heterodera glycines
gaaaattgtcctaaaaagagatagccatttttctgagaattaattcacaatttctgcagctcttagggtaatggaaaaaattttgaagaggctctccggaacggattagcatcggggttacgagatagaaaattgtcctaaaaagagatagccatttttctgagaattaattcacaatttccgcagctcttacggtaatggaaaaaattttgaagaggctctgcggaacggattagcatcggggttacgagatagaaaattgtcctaaaaagagatagccatttttctgagaattaattcacaatttccgcaactcttgcggtaatggaaaaaattttgaagaggctctgcggaacggattagcatcggggttacgagatagaaaattgtcctaaaaagagatagccatttttctgagaattaattcacaatttccgcagctcttagggtaatggaaaaaattttgaagaggctctgcggaacggattagcatcggggttacgagatagaaaattgtcctaaaaagagatagccatttttctgagaattaattcacaatttccgcagctcttgcggtaatggaaaaattttgaagagtctctgtggaacggattagcatcggggttacgagatagaaaattgtcctaaaaagagatagccatttttctgagaattaattcacaatttccgcaactcttgcggtaatggaaaaaattttgaagaggctctgcggaacggattagcatcggggttacgagatagaaaattgtcctaaaaagagatagccatttttctgagaattaattcacaatttccgcaactcttgcggtaatggaaaaaattttgaaggggctctccggaacggattagcatcggggttacgagatagaaaattgtcctaaaaagagatagccatttttctgagaattaattcacaatttccgcaactcttgcggtaatggaaaaaattttgaagaggctctgcggaacggattagcatcggggttacgagatagaaaattgtcctaaaagagatagccatttttctgagaattattcacaatttccgcagctc

SEQ ID NO: 29743 - DNA, 1337 bp, Heterodera glycines
  unsure (1)..(1337): unsure at all n locations
caaattttgtggtattcgaatgcgctagccgagctctacattttcaaatgtatcaacaaagggtctatctccactctctggcgagttatgtccagccaaagcagagtgggccataaacacgaattttttaatctntggtatttcctctattttgagcctgctctacatttatgtattgtgccaatatgcctattgcaactgaaatttatgcaactttcccgacaaattgttgagataattattctagacgatttttttatatctcaaagcttaactattgcctttttgtatgataactggtagatattgggagtaaaaaaaaagtttttttgtgactatttacaataaaaatttatgcagcatttctaaaaaggatctaaaaataatttcttgcgtaatattttttacattatgttgttgaagaatttgaggctgcttctgatgcgattgaaaatttttcagcttttcttgaaaagttttttcccagaatttatacagctttcccgacaaattgtttagataattattctagacgatttttttatatctcagtgcttaactattgcctttttgtatgataactggtagatattgggagtgaaaaaaagtttgtttgtgactatttacaataaaaatttatgcagcatttctaaaaaggatgtaaaaataatttcttgcgtaatattttttacattatgttgttgaagaatttgagtctgcttctgatgcaattggaaaatttttcagcttttctcgaaaagttttttcccagaaaacggatgggtcaaataaaaaactaaacatctcacatgaccaatttaaattcccttacattttgggtttactttattatgctggcccataaaaaaatggagtttttccggtgccaaatttttgtgaattttctttcggcccgtcataagcggattgtttgggggcaaatgaaaacaaattttgtgttattcgaatgcgctagccgagctctacattttcaaatgtatcaacaaagggtctatctccactctctggcgagttatgtccagccaaagcagagtgggccataaacacgaattttttaatctttggtatttcctctattttgagcctgctctacatttatgtattgtgccaatatgcctattgcaactgaaatttattcaactttcccgacaaattgttgagataattattctagacgatttttttatatctcaaagcttaactattgcctttttgtatgataactggtagatattgggagtaaaaaaaagtttttttgtgactatttacaataaaaattgaaggagcatttctaaaaaggatctaaaaataattct

SEQ ID NO: 29744 - DNA, 1467 bp, Heterodera glycines
caaataaaacaaatggctggagaatttgaacaagtgctttttccattgacagcatcagttgaataaataatcaaaaaatgaatgattgacaaaagtttattatgccaatcaaaaaatgggggcggggggaaattcggcgctattatttttcaaaaatatttgttgctgaagaggaattgaactttttttcgccaagaatgatcaataggctttttttgatcaattttggcaatgtcggggaatttttaaaattggaaatggcacaaaattttattacccaatttttaaaaattatttctttatttaaatggaaaattaatctaaaaaatctgacagatgttttttttcaatcaattttttttaaatgttaattttttttaaactttccagacttttttttaaccgctcttattattaatataataattattattttttcccattaaaaatgcttttcccattactattaattaatgtttcaccttttttcttctttcgcttcttccattgcttaagcatttttctcccatcgctaattgctttttttatgaatcataaaaaacaattacaaaaatgggtttagaatcgaaacgaaaaaagagttttcaattttcatccaaaaaatgtcattcagccgaaaaaatgccattgtcaccggtgccggcgttggctgcattctgacgctcacattcaccaccgtactgtttgccacgctctattacaatgcggcaaatttggtctatttttgccggcattgataatccccgtgttgtgccgccccacagattttgccattttcggggttttggtaacggaaaaaaaattggcaaatttaccgattttttagacaaaaaacatagaaaattgaaaatgtgaaataatgaattttattggcattcatcggccaattgaatttttgatttaataacaatgacataaaaacagtaataatgtgaaattaccgtatcaataccgaaaattgtatttgtccaaattaccatattatttatccaattatatttttcttccactcccaaaaaataaaaaatacaagaaacttttcttaaaaagtatgtacaaaaacaaaattttaattcttttttaaattttacgaacagtttacaattttgaatttattcgttaaaacattttaattttttaatttcaaagtttttttttttacaatttttggatactcagaattttaaatttctattttttttattttatgaaaaattcacaatttttgaattattttcttttaaaaatttctgttttttcatttttgggggaccttcgctcttttcgcgcacgaaaaattcccaaatttccttgcccaggtgtccacgaggttgccaaaatgggcgcccccctaccacagcttattgggcgagtactcagcagcggcggtggcggcggacaacgaattgtgctccgaaattggccgtgacattttgctccaggcaa

SEQ ID NO: 29745 - DNA, 1052 bp, Heterodera glycines
ctttgtcaccaatccaacattgttggtatcatgcgacatctcttaatatgctctattaacctgcaaaatcacaaaaaatttcgtcaattttgaacaagtttatgaccaaaaaggttggaaaatctggttttttgaattcttctggccatattttttttgaaccttaatgaaagttttaaaaattttgctactaatagaggaaacttagggtttttgaatgataccaacattgttgaatttggttaacaaagaaaaaagttatagctgaagagaggggaaaggaggtagagacaagagagagaaaggagagatacagaaagagatgagaggatgggaaagagagtgaaagaaaaggacagaagaaaagagataaagaggcaaacaaagagagagaaaggaggaaaggtgagagagtgtgaatgaaaaaaagagagaacagagggagatgagatggagagaacgagagcgagagcgaaaaggaacaaaagagagagagaactaaatcgagagatgagagagagagaagagagaagagagagataaaaagagagcagccttataagtgagagagacgagaatgtgaaaaagagggagagagaggagagggaggggagagaggagaaagggagagagacaaataaagagctaaaggaagaaaagagtgagaagagagagagagagagaagcaaagagagaggagagacaaactgagagagaggagagagaaagagagaaaaaacgaaagatacaaaaataagtagagcgcaggaaagggagaggagaaagagagaaggtactaaaattgttccctagcaagagtctttttcgtgcaattttgaattttagcgcgtaaaaaataatgtaaatacgctatttggcgaaatgaaaaataaagcgagaaagatagcgatagagcagagtgaaaagagagaataagataatttcaaaaaaaaattttagttaaaaaattccaaaaaaactagttgtgtacctaactaatttttgaaaaatagattttaggggctggcagcacatatgaaaagtgatcaggg

SEQ ID NO: 29746 - DNA, 1121 bp, Heterodera glycines
  unsure (1)..(1121): unsure at all n locations
atgcttattcatataattatttaactgtcccataatgtttctttaaaaattttagacattgcaattttgcgtacttttccaattttttgcaaaattaattcataattatttttttcagaaagtgctcttaaacgcacctaattttatttacaagctattttaggcactctgatgctttttctatcaaaaagggagatgaataaatttttaaaaatttttaattcctttttaaacaggccaaaaactttaggcttaactttttttttcagaaactgatcagaagcgcaccaaactttgcagggaaactccccggtaaaggactaacttacactgaaatgagcgccgagctagctgggtttaaaaattttttcaaaaatcaaagtctttcgtttttatttaattatttattattttttgcaaaattaattcataattattttttcagaaagtgctctgaaacgcaccaaattttatttacaagctattttaggcactctgatgctttttctatcaaaaagggagatgaataaattttaaaaaatttttaattcctctttaaacaggccaaaaagtttaggcttaactttttagtgaaaattaatttactcatttttcgagtagtgatcagaagtgcaccaggttttgcaggagcctaaaaaggtcaaggaaaggcgtctctgcgttgatttagcagtagtacctatgaatttaaatttcctatgaatttttaaaggttcacaatttatttattttttgcaaaattaattcataattattttttcagaaagtgctcttaaacgcaccaaattctatttacatgttaaataaggctctctgatgctttttctatcaaaaaggaagatgaataaaattttttaaaatttttaattcctctttaaacaggccaaaaagtttaggcttaactttttagtgaaaattaatttactcatttttcgagtagtgctcagaagcgcaccaggttttgcagggtaacagctgagaataatgcttattcatataattatttaactgtcccataatgtttctttaaaaattttagacattgcaattttgcgtacttttcccaattttttgcaaaanttaattcataattatttttt

SEQ ID NO: 29747 - DNA, 1209 bp, Heterodera glycines
  unsure (1)..(1209): unsure at all n locations
tggaaaaagagcaaagtttgctaattgcagcaaaaaatgaatcgacggtaagcaatcattaaaaaaatgtagcaaattttcatttcactattttttcatgtttcagttgggtgtgcaacgacgtgtggatggacattttcccatcgtttgaccacgctcaacttggcctcaaaatggcattgctttcgccacgttttgatgcgctggtggacaaacattttgacggcaaaacgcaatttacgatttggaaagcaattaaaattcgcaaggacaaagatgaaatgccaaaactttttgttgaaggaaaatcggagggatttccattgccggaccgtccgctgcccaacaaaatcatctttaagaagcttcggattgagtaaatccattaattctatacagagaccaatatattttttggttaatgcatctcgtacaataaaaatttacaaaaataatgcctaagccattgtacaagttgtcatgacacctatgttttaatacaactgattatatattcttcaaatttctccccttttcaggtacattgatcacttcgtcatcgaatttctccgttccaatcagcagttttgggacaaaggcaccacattgtatatcactgtttgggaaaaaaacgaagataacaaaccgatttgggatgtttttgtcgctgaaatatggccactttttgcgacaaacatttgccaattgtgctttgccggtgccgaatttttggactatttgcgtcgactcatttcgccaacaattctatccgatctcaatcgattggattcaatcatttcttgtcatctgttccccgatgtgcttgctgatgatgatgattttgatggaccaaatacgacttctgccggccaagcgttggccaaatggttgcacaatccgagaaaagatggccaaccaaagtcattgcattgctgggaattgaaggcatccacaaactttgaatggctcaccaatttcaaggaggtcggtttgtcgaaacatttacatatacaaattttgatttttgtttaggtttttgtccgtgcccgcacttccgtcagttacactgtctacttaaattttttcgtctctacgccaattgaaccatttgaattggtgaacgaacagactanagaanagctgacattgaaggaagaaatccgtgatggctcttctcgtntgtggctgntgaagcgatgtccaattact

SEQ ID NO: 29748 - DNA, 1028 bp, Heterodera glycines
ttgctttctcagaagaatagatattctcagaaaatggctatctcttttttctacaccgttgtacatgtgggttttccccaaaaaacgcattactatctgcggttgagccctacaaaaggtcggtttgaaaattgctgtctcagaagaatagatattctcagaaaaatggctatctctttttttctacaccgttgtacatgtggggtttccccaaaaacgcattactatctgcggttgagccctacaaaaggtcggtttgaaaattgctgtctcagaagaatagatattctcagaaaaatggctatctcttttttctacaccgttgtacatgtggggtttccccaaaaacgcattactatctgcggttgagccctacaaaaggtcggtttgaaaattgctgtctcagaagaatagatattctcagaaaaatggctatctctttttttctacaccgttgtacatgtgggttttccccaaaaacgcattactatctgcggttgagccctacaaaaggtcggtttgaaaattgctgtctcagaagaatagatattctcagaaaaatggctatctctttttttctacaccgttgtacatgtggggtttccccaaaaacgcattactatctgcggttgagccctacaaaaggtcggtttgaaaattgctgtctcagaagaatagatattctcagaaaatggctatctctttttttctacaccgttgtacatgtgggttttccccaaaaacgcattactatctgcggttgagccctacaaaaggtcggtttgaaaattgctgtctcagaagaatagatattctcagaaaaatggctatctctttttttctacaccgttgtacatgtgggttttccccaaaaacgcattactatctgcggttgagccctacaaaaggtcggtttgaaaattgctgtctcacagaccactttccctatccgggataggttctctccccaagtcccccccgggtccaaaaatttttaaggaaaaataatcttttgtatgaaaatttta

SEQ ID NO: 29749 - DNA, 1121 bp, Heterodera glycines
tttcgaaccccggaccagaattcgaacaaagtcgaaatttaagattttttgaattttacttctatatatgttcgaatctgcatagaatgactcatttttgctcttaaaattgcctgtgatttattttctgcttattttaatcaattttagattaaaaagtgtgaaatcaaaaatgtgaatttttgactttttgttcaattcgagtcctggttcgaaattggtcgaaatggatgtcatatttgtgcttagcgcatcaaataacccataaaactgtgtatttttggtttttattctttttttgagaccaataattttaacaattgcaaaacatggaacttgcccaagtgtaatggttgggatctgaaaaaactgctcattctttatcgaaaattgttagtttaccgtcgcacaccacatccgagctttccatgtcacggtcataggcgggagctccaggatcctcagggtcttaattaagtccacatagaattatttaaaattcatccatcctgtaataattgtaagtaaatccaagttgcacttattattcacatacatcgcattgtttgggaaacatttcggtacatccaaagttggcgacatccgtcagcaagaagatattgtgccaatcgcatcttaaaaagtgaattgttttgttatttatggattgcaatgcacatcgttgacgtcgcgatttgcatcaaatcgtgccctcattaagcacattcggaaccgacactcaagcctaaacgaaaaaactcggaagtattataaatttctaaaatctcacaatttcttcaaattcaaaacttacaagtcttgcgcatgccaggattgagtttcacgaatcgcgcgtttatacagacgcataaccttttgacgatgagacaaagccttggtaaaataaaaggccggtgcttccaatgaaggaattgtcattttttgctaaaaaaaattgataaaacctgaaaaaatccgagtcaaaataatcaaacacatcttcataagtcgaaaaactaaaaaaatgaaacctctgaattaaatttaagaaatttggcaaaatgtttgaatttaaagtttctgaagaaaaattgtctaaaccggaatggaatcgggatttt

SEQ ID NO: 29750 - DNA, 1103 bp, Heterodera glycines
ttaatttctctctctctctcgctctctccgtttctgtctctctatctccctctatcattcgctgctccgatcatttttgctgatccctcactcaccgagttctccacccgtttgcgctccgccgccgcctgtcgcttgcgccgctttgcgcccgccgcttccgagtcgacctcgtccgccccttccgcgtccgccgccgttcccttcgccgtccctccgccgccgcttttcatctttttggctgcttctttggctttcttctctttgatcagttcacttgcactgatatgtttcatttcgttgtgtcgcaatttgtccccaattatttcctccgtcacaaaatttgtcaatttgacgttccaatttgagtccaccaaacaattttggaggcacaaaaagccatggcagcgcaagtttgaggagtgaagaaagaaaaggcccttaaaagtggccaaaccgattaaaatggcatttaatgggataacatttgcccaatttaatgcgaattcaatcaatgcgtacactgtcattgtataaaatgctaaaattaattttgttagctgtccaatccctaatgtttggttgaggaattcaatctgatcagcagccaaatcgttctgatcacttgccttgacaacatctttggcgaatgacacttggaagttgcggctgatcttcagctcttcgttgaacagcatgtccttggtgattaacagataagcgatcgctgctcttttgactttgtctcacctcgagactcccgcgttggcagagaagccaaaggacgatgaattcgttttgctgattgaacgaaatgccgtaaaactgagagagagagagagaagggcaattataatggatgatgcttatcagttaattgaagcttttaaatgtttggaatattttgctttcatttgaaattctgccacttttgtctctcattttgtgccgctgttttccgatcagtttattgtcctcttccccaatttttgtctgatcacttttttccctttccgatcgttcgctgactttgttcagattttcgttctccatcagcttcatatcgttcagccgtgacaattcgtttttgtgaaggacaaact

SEQ ID NO: 29751 - DNA, 876 bp, Heterodera glycines
tcataaatgtttaacaattcagcataattaggtaaatcagcagcataattgttacgtctaaatattactctcaaaaaagttttttggacattctccaatttttctatatccttttttaaataaggattgaaaatgccaagaaacaaattcgaaaaataaaactcacgtctgataccaaaattggcacttttggacgccgttttctcctacagtgactaattttggcactgccaaaggaagcgaagtgccattggggggatcaaaactaaaacaggaatgattatgagacctttggaagtcttatttttatttttgcctcaataatctgcgattttttgctaaaattggcggatattcagctcgaattaacggcggttcgtctgtcagcgggtcacctccaaattcggcactcacattcacttcgcgaatttgccattctgggcattcaatgtctttgtcattagacgagtgtcccgcagctaaaatttataaaaatatttaaattaaaaaaataaatttaataataaatcacttactggcatcgtcagaagaggtaccaccttcgaagacaagctttgtcacacactgtttcaattcaccgtgaaaatcaacagctcgccaaacgatttccgtctcattgccttttggaaaaaaaaacaaattaaaagggaaataattttaaatttaaaaattattttttcaaaaaattattagaaaagcttaattcaaataagcagctaacaacacctctgaatttatatgcttttgccgaaatgttcatatttactgcactgatttgaatgtgcgggtcattgtcaactaccgtaggcctaaattcggtttttcgagtcaatttcaaaaaaaacaacttgacat

SEQ ID NO: 29752 - DNA, 1681 bp, Heterodera glycines
  unsure (1)..(1681): unsure at all n locations
caaaatagtgatttctagtgacgaaaagtgacgtccaaatgaaaaaattttaacgcagaaatgcgttttttgagctcctttcttcaaaacaattgagcaaaaaaaagttttttcaataaaagttgctgccctaataatgatgatacattgtacaacattttccccccaagttgtctttctcccccatcacccatccctaccccattatcatttttaatttcatcttctctctcttttcggttgttttgctctgccgggggtatgcacaacaactgacagctttgctggagtctgtttcaattaggatcatacgtggcccacgaaaaaaaagactatccatcaacaaaaaatttttattttattaaaattaaaaacggaaaaaatttagaattgggccctccaaaaacgagttccaatcaatctataatgacctataatcaacataagaaacactcccgaggtgtggaaaaaaacgggtttttgaatcggtttaaatcacgaaaaatggaccacaaatcagccaaagaaaagattatataaaaattttcgaacaaatttgctcattggaaaacccttgacgagctaatcattacgatttacatacataataattaataacaagaagctttgccgtccctcctcacatttaaaaaaaatttttgttttcaaattctttaaaataagttccctggcttttcggagtcgctaatcatgaatgcggcatccaagtttgttttcatgatgatttaacaccaacttatgtttgttggtcgaaatttttcttatttcgaaattttttcggccctttttgattggattttttttacacattttcttgctaatttgaagggttgttttaaattattttgtttttgataaatggcaacgacatcacaaatggcattggaaccacccattatggtcacccaagacacgggcatgaaaggtgcaggccatttcacatgatttccagtacatacaagtctttgaaagtcttataatttccagttactgttttcatctgtattccgggtatgcggtaaggacattttaattttgtcaaagtatgtctaaaagtgccgatggctgcccccccccttttcggcaaaaaaaaaaaaattaatccttaaaactacttttaggatatgatatttccgggcgtttttcgtgattcttattacgaatatgtatatacatgcgttaattgcgaaaattctgaatctagaatctctgggaatataaatgaaaaatttgaattttctgaattttcgacttttgttgagttcaggttcggaattgtcttaaatgaatgccatatttgtggttagagacctcgaaaacatccgaagacatgtcctaaactatttttggaatataattttgccgaaaaaagtcgagggacaccatcggtatgtactactaaaatcaacaaaaacaattgttgtttaattttaatcattttgtgtccaggaagaagggcggccttattgttcttctgaagcggatatttcgagtcaaatcccgggaccctttcacgctcgtttctaatgtacagtaactaatgctaatnntaccgggggtgatgatgtaacctaaaaaccgactttttgngccaaaaacaaaacccatggcttcaaaattgngcccaaccgaaaccgatacaatgaatccaatatttcag

SEQ ID NO: 29753 - DNA, 937 bp, Heterodera glycines
gaatgccagagatttgagttccagtgattggaaagcctgagaattgagtcccagagattgaaatgctggtgggttgagtcccagtgtctggaatgccggagatttgagtcaccgagattgaaatgctggtgggttgagtcccagagattgaaatgctggtgggttgagtcccagagattggaatgccaatgaaagttggtgggttgagtcccagtgtttggaatgccggagatttgagtcccagagattgaaatgttggtgggttgagtcccagcgattggaaagcctgagaattgagtctcagagcttgaaatgctggtgggttgagtcccagtgtctggaatgccagagatttgagttccagtgattggaaagcctgagaattgagtcccagagattgaaatgctggtgggttgagtcccagtgtctggaatgccggagatttgagtcaccgagattgaaatgctggtgggttgagtcccagagattgaaatgctggtgggttgagtcccagagattggaatgccaatgaaagttggtgggttgagtcccagtgtttggaatgccggagatttgagtcccagagattgaaatgttggtgggttgagtcccagcgattggaaagcctgagaattgagtctcagagcttgaaatgctggtgggttgagtcccagagattggaatgacattgaaatgctggtgggttgagtcccagtgtctggaatgccggagatttgagtcccagagattgaaatgctggtgtgttgagtcccagagattgaaatgctggtgggttgagtctcagagattgaaatgctgctggtgggttgagtcccagagattgtaatgccattgatagttggtgggttgagtcccagtgtctggaatgccggagatttgagtcccatacattgaaatgctggtgtgttgagtccca

SEQ ID NO: 29754 - DNA, 1714 bp, Heterodera glycines
  unsure (1)..(1714): unsure at all n locations
cccattcagtgaaaagaacaacccgatcggcatcccataaaagacgaacccaaacgaagnngaagaagaagaaaagacttaaaagacaccaccgaagaaaagggancaaagannncggancgnaccgaganccannnnnnagncanncgcactcatacgccnnaggagcaaaccgaagnccaannccnggggnccacccccaccncngaaaaanccgacccggncacccgcgcgccggagacccaaaaangacgggcaaaacngaaagcanccgaaancaaagnccaaaccaaacaaccgaaaaaagcaanggacggagnngaacaaaccgnaaaaaccaaccaaaacgcggaccnccnccaaacgacaaacgcgancaaaaagnncaacgcaanccgggagacaaccccggaccaaccgaannnccacagcaattttccccccgaaatttgacactgttttnntggagaaattgacaacgctcgaagacgagcgaacagaaatttgggcaaacgcagtcaaggagtgcaaaaagcaagaggaaagaaaaatccgatcggtcgaactccaaacaaataatatcttagaatcggtcgcgaaagcgattcgcgcggaagatttcaataggaaaatccttgacgaattgctcaaaacagtccaatcaacaacctacgcgactcgagccgcacgcgaaaagaccgtcatctgcgcacagaaactgcagaacaaccttctgcatcaaagacggttcctaactgcgcaagaacggacggccacattcatccgaaaaacatttggtttgccgacaggcacaaaagaagtggacaattcgggagcaaccacttccgcagacggacaacagtgataattttttgtgatctgtgatccattgttgacaaattgtgatttattttgtgataaatatttaaaacaaaccggtgattaaataataagtccaatcagaaaagggatacaaaattttaaaattgaatttttcgattgtcaaaaatttaaacatttaccaccaaactgtgtccgaaaaattgccaagaaaatcccgagcagattgaccattttcttgaaggtcaagttgaccaacccgaacttgaacaaaatttggaatttgccgaaccttggaaagtactcaggaagtatttcgatttttgtaaataaaccatcagctgatataaagaaaagcattgttgtctgtccttttccaattatattgccatttcggcatcggtctaacaaagctgcgcatggctttgggaaattcctcaagaattaattttcgttgtctaaagaaatgcactagtgtcgggcattttgacattaaaatgccattaaggcaccgttgtagcaatgatgcacgtggtccttggaaattcctctggaataaatccctgaatttcttctattttcttatcactcacaaatcactgggggaaaattaagatgatactgatgattagcgttcttgttcgattttggcgctagtgcgatatttattctcatggttcttggaaagtaatcaggaagtatttcgatttttgtaaataaaccatcagctgatataaagaaaagcattgttgtctgtccttttccaattatattgccatttcggcatcggtctaacaaagctgcgcatggctttgggaaatcctcaggaataattttcngtgtctaaagaatgcgctagtgtcgggcattttga

SEQ ID NO: 29755 - DNA, 1398 bp, Heterodera glycines
  unsure (1)..(1398): unsure at all n locations
gcatgcagccccctaaaataaaagatattaatttttttaattntaaaatntatttttcttcacttcatcctcacgatcttctaaaatcagcacttcaattcgagcgccgttgtaaagccaaaaagtaaatgtgagtttgccggttgtgttttggcacttaattggatgactggccaagctgaaaatagatttgtttactttttaaatttaaaattaatttatttaattttaaattttgattaatttgataaaagattaaaatgttaaaaaaaaacaaacaaacagtgcaacttgttcgtcacgctttctgtctcccgtaagcaagagctgatcgcctaaattatgatttcaattgaattaaataaaaatttctagattaatattaattaatcccctacctacggcaaccttggacggtccaggcctgacttggacaacctgaaaacatttttagaagcatcatttttgagaagtgctagcccatttccgaaaatccaccacgttaatcgtttcgtaaaatccgacattttcgcaattttttcgacaaaatatggtctaattttgcttaaaggtatcaaaatttggcatccttgatttcgatagcctagctttttctttatttgtctgcaaaattgcaaataaattaacaaattattataagttatggcataaatagtatttacttccatttttcgatagccaaaaatgaaaatttggattgttgctttaaagcaaagagttgtgccgtgttttttccaaaaatagctaaaatggtgggttttacgaaacgatgaccagcatgatatttatgtaagtaaaatattttttttacaaatatgaaccggaaattcaacgttgtcctccttgcggaacaaatgaaaattgagtgtggcatggccaccgcttcgaacatttcgccatttacctaattttcaaacatttgttttgttaaaaatggtttacaaaaattttatttacacaattcgggcttagaaaaatcacagttcaaatcgcttggatgccgaacattccgcggtggctgtactaaaattaagcaatacaaatctatgcataagagggtaaaacgacgaatcggaataaaaaagaattggccaaaaacgaatccgaataaaaaataattggccaaaaactaatcggaataaaaaaagaattggccaaaaacgaatcgtccttgatcagcataagacctaggcggttcagggggacataaagattttttccgggaactatcataccagtagtttattatgcataaatttacacaacaaaaaaggatccaaagcacacaatcagaaagaaaaattgaaattttcatatcgataactagcagatcatgtaagataagaaaatattagctcaagcgaatttaattaaaga

SEQ ID NO: 29756 - DNA, 1555 bp, Heterodera glycines
aaaaaaagtcgaatcgaagacagaattacacaataagaacaagaaaaacaacagaagaaaagatcactacccaaatgaacactacccaaatgatcactacccaaatgatcactacccaaatgatcactacccaaatgatcactacaccaaatgatcgctacccaaatgatcactacccaaatgatcactgcccaaatgatcagtcgatcatcatcatatgaagacgattacgatcttcagcagttccacaagcaatataaaattgcacacccctgctgctatacaccattagtgatgttcgagacagaatttccagagacttgagaccaagcacgacataactcggcatagggaccaatttggaaaaaattgaaaacgcttttgttaagaacaagtaagtgtcctcctattcacataacaaaatttcgtcgccgaaactccacttatagctggtcacccaccctcatttataaatattacaaaacatatgtctatacttaaaacaatttatctttaaaagcaaccgataggaacaaatggaatatatgtaagaaaaaaaaaagaccaaatttagataatgacagcaaaagttagaccaaacaaaaaaagagaaaggaattcgaataagaaaacacaacacgaacaagaaaaatcccagtccaaaagatcactactgcccaaatgatcaatcgagatattggcaagcagcggccaacaaggtacatataataattggtgataccatcaaaataccgtaaataattccaaagacgataataaaaaatgtgatcagtgttgttctcttttaattgcataacggacaaatagaataaaaagccacatatcattatgtagggaattaatgcaataacagcggcacacatgcgacacaatacatctttaacaccacgctttgctcttatgttcagctggcgattgtttttttggtgcgaaaattggtgattttttgctgaaaaaaatttattaaatttattcgttattaaaatttattcgataagtaagtaagcttttaaaagccttttccatacataaatccatcaagaaaaggtgatttgattaaaaaaaattcttcaaatggcttctgtttttaagataaaatcgccaaaataagtataaaaatgtaaattcaaattacctttaattatggcagcagttttttcaattccaatgattaatttatccaaaaaattcttaaaattttctttgttttctttgccgagaattgaatctttggccatttttccaataattgcctttttctcgtcaatttggacttttttgaccaaatcgcgtacattttcatcatcagttgttaatgttccatttagcaaactttcacggaaatatttgcgtaatttttccaaattttcatcattaatttcctctttaattttcccatcacaaaacacggcaaaagaatgtttgttaagccattcaattccggatgatgcgtcaaagtttcctgactttatttcattcattaaatttgttgcccattcaccaattcttttgccatttgaaatttatctaaaaa

SEQ ID NO: 29757 - DNA, 1534 bp, Heterodera glycines
ttttgctagaattcgggttggtggttcgacataggtgataattaatgtcagatttggattatccgacccttaaaaaactccctaatatagtcttttcatgaaaaaaattttcaaaaattttgttttccgaaaaagggggggggggtaccatccgtactattaccagcaattcgattggttcatttttgtgatttaacttcggcttttatcaactttaaccttggattcagagaaaaatttcggtgtaaattaattcgaacatgaggaaataaccgatcttttattagtcctgaattgggccatagagaaatggttaaaaatgttagtttttggaatttatgaactgattttgtcaaaaagggtcaatttttgtggatttaaggggttttgaaagtcctattaaatcagggctaggcgaaagttaaaaaaatcccatttctaataatttatagaataacattttgatcgtatttttaggcacttaattgtataaataggtacctaaaataggtataaaagagattcttccaacaattaagaaaaaattcctccagatttcattgcctttttatcgatcgaaaatttatttttcggattgtattttatgcattttcttcgctaaaattcaaatttttcttcaaaaagtcaaaaaaatcacgaaaaaagtcgcaaaaactcaaaaaagtcataaaaatcccaaaaagtataaaaaagtcaaaaaaaaatacatgttagaggcttcagacaaagtttagaacactttaagtcattttaaggccatttagagtcagcaaaaaaaagtcatttgacttaaattcacagccctagttctgatatttgagaaatttatctttaaattacgtaatattttcaacaaaaaaaacaattgtttccattgtataaattaacgaacggcgggcttttgaagaaatcttttgttggctcaaattatggcatttattcttccgaaataattttggcgtctattttttgcaatttgtacgccatttttttttagtttcaaatccgggcccaaaaacagaaaagccccaatttaggctcaattttaaaatttttatgaaatttgagtgccgaaatttggaccaatttgttaacagtttttgttgttatccaccgctatgagagggaattaagtaaactcatgagaataaccgctaagccactggaacaatactcaaagccatttaaaagaatatatttaattaatccgggtctgggcccggtcgggcatccgggcccgtgtaaccctattataaatttaaaaatactaaaatatttaaaaaggaacgaaaaattgtaaaatctttcacctttaccccaaaaaagtgaaaggttaaagggctaaaaagatgaaaacggaactcagccttggtgagaaatcacgtttattgccattgttatggctaagaatggacggcgttcatccattttttaagcgtcaaatggccgtccatcccaactaattgtaagttttgcgccttttcgcaccatcagtcccgcagcaatgactcaa

SEQ ID NO: 29758 - DNA, 1511 bp, Heterodera glycines
gtttaatcaaatcaattttcatgtatgatttataacatctttttatagccgctattttaaaataatgatttttttaaatttttataatgattttttaacatatgtaaatttaaaaattaaattattattaacaatttctaattatataaaaaacacatataaatttatttttctaaattccttttaaacaaatttatttattatttttaattaataaatattaatcaaattgttttaaagtaaaacttctcttatagttcatgaatttaattttcgggtttaaataaaatcaattttatttcttttgatatgaccagaacgctaatttttcggtaattactagagcacggacgggaccgggatcctgccgggactctcggtcccggtcccgttttcttaacaaaccaacgggaccgggagtaccgttaaaaacgtgagtcccggtctcgggatcccgtcccggtcaattttccaagccctggtcccggtaatttcaaaattccgtgctcttttatttttaaaatatttaatagttatatttatcattaatttccattattttcttgtttaaaatataacaataattgaattataatgatcgcgctcaacaaatttgcatatatacattctttaatttatagaaaaaattcaagcatattttatagaatctaatgtataaattaattacataataacaaataaaagtatttattaaattattacaaatttttgtgttatttaaacaaaagattcatatattactaataaagagaataattatgtctattcattaaacaataaatatcaattgaaaaataactttgttcataaagtaacgaaaatataataattaaaaacaataacggataacacatatttttaataatatacagataaaaaaagagcaaattttaaataaatattaatccataatgatataaagaattatacttaattattcagtcggcaattaacgacaatcttaaaaatcgctcctcattatctgacaagtgattcaaaagaacacgagttatgttataaagaattatgcataatttaaaataaaagtttaagcattcattatatgattattttattaattgaaacaattaaatattaataaatgaataattattgcataaatattgtaataatagtgaaaattaaacattttaaattaatatgcaagaggtttcttggactcaggaaaaaatttaagttataaaatctatttatattaaaaaatcaatgtatacctattatctatgaacaataaatatatctattaaatcattagctaaattctttgtatgaaataggaatataaaatgtaaagttttaatattttttattttatttattttcattttattttgattgttaattaattgtttttcttctgtttctacttctctgaattgactttatgcaataaaacaacacatttttaaaactaaatatttttcgctcaaaacatttgccagaatatttttatggagctttgaattcaa

SEQ ID NO: 29759 - DNA, 1115 bp, Heterodera glycines
ccggtaaaggactaacttacactgaaatgagcgccgagctatcttgctctaaaaaatttttcgaaaatctgagtctttcgtttttatttattttttgcaaaattaattcataaatattttttcagaaagggttctgaaacgcaccaaattttatttacaagttaataagattctctgatgcttttctatcaataagggaggtgaataaaattttaaaaattttttaattgctttttaactttgggaaaaagtttaggcttaactttttagtgaaagtttgatcactcatattttttgctaattgagcagaagcataccaaactttacagggatactccccggtaaaggactaacttacactgaaatgagcgccgagctagcttgctctaaaaaatttttcgaaaatctgagtctttcgtttttatttattttttgcaaaattaattcataaatattttttcagaaagggttctgaaacgcaccaaattttatttacaagttaataagattctctgatgcttttctatcaataagggaggtgaataaaattttaaaaattttttaattgctttttaactttgggaaaaagtttaggcttaactttttagtgaaagtttgatcactcatattttttgctaattgagcagaagcataccaaactttacagggatactccccggtaaaggactaacttacactgaaatgagcgccgagctagcttgctctaaaaaatttttcggaaatctgagtctttcgtttttatttattttttgcaaaattaattcataaatattttttcagaaagtggtctgaaacacaccaaattttatttacaagttaataagattctctgatgctttttctatcaaaaagtgaggtgaataaaattttaaaatttttttaattgctttttaaatatgccaaaaaattaagcttaacttttttagtgaaaattcgatcactctattttttgctaattgagaaaaagataacaaattttaagggataatccccggaaaggattaattaacaatgaaggaacgccgaactaacttgctctaaaaaattttggaaatctgaatttttcgttttttatttatttttggcaaaattaa

SEQ ID NO: 29760 - DNA, 939 bp, Heterodera glycines
agtgaatttaggtagccagacagtgtgattggcactttgtgcccttttgacatcaaagcatttgccatttctaaacagaaattcggccaccaaacaaccaacggggcacattctgcaaaaagaaaattgttttttttaatttattcataaactcgattgaacaggtacaggtgaaactaaattttgaaaatcaaaatttttaaataaattcatttcttaggcaattttattaaaaatctcaaattatgtacagaaaatgccgaatttttcaaagtcggaaactcggttttctaaaataaatgtgatccggaattggtttaaatatatatgccatacaatactcattatcagcaagtggtggtggatttaactgctggtcacccatatgcctcacctgtttatccaagcaaacagaaagcacattctcagcaattgattgaagtgattggtcatctcgctgatcaatcttttccttatcatttgaaatccgggcgcctcttctgtcccgatcacttttgcaaatgcttaactgatcagcccaaaaagcgcatgacaaatggtggtggtgttgcataattataaacctcttaaaatatgttggttttaaaagttcaaaatttatcgaacaaaaaaatgcaataattttatgattaacaaaaatttttttaaaacacggcccgctgatcgatcgtacctgtacatattatttatactttgctaattaaaaaattctttgcacatttatcactagacaaaataaattaaaaatcaattgttttccataaaaaatcatcactattatgtgtgtgcgacttcattcatgttatgttcgttcatgaatagcttgtgcactttattggcggtgcaccaatttgcaacaaaacgcctaaatttgtgtgttcttttatcatttaattaatatttttattttaagtgttg

SEQ ID NO: 29761 - DNA, 1370 bp, Heterodera glycines
gatgttggaccctgacaccggactgttctcgcacccggacgcacagaaacagatgacgctgaaggagctgatcgtcaaaggctacctcaacccgtacaacacgcgcattatggaccgcgcgagcggaacggacatgcacttgttggacgccatccgcgagcatattgtggacgacgtggcgggcactgtgcgcgacacgctgactggtcgcgtgcacgactttgcgaccgcaacacgacaaggttgtgggagcagttggcactaaatccttataattaatcgcttatttactgctgctcttccaggcttggtcaaggaagacagcggcgtgttcagcgtcgaccgtcgcaccagtcgcacgtcgttgggcgacgccggctcgcctcgcattgttgagcgcaagctgcagctgacgccctacgctcaggagccctttcaagcagcctcctctaccggcagcgtcggttcggtcggaggaggcaccacacatggacaacacgcatcgctattcgacgcagcagccgcaggtccggtggtgagcgcagcaaagtcacgcgacgtgtggagcagcagcaacgggcatggcaccgccattatccgtgagagagtgccaatgcctgaacacgcataaaattttagccccaattttagcggcgacggcaaccgcaatcaaacccaatgaacgaatggtggatattgggggcggcaaaacggtcaaagtgaacgtggtacgcgacgcggacgggctggagaagggcgagtacttcgacccggcgagcaacatgaaattcaccatccaactgcatggcgacccggtgaccacgcagacgagcacaaaggcaagcagaaagcaattaatttccaatttcacataattaatattttgaaggttaattaaattttaattattttgatttaattttttaatccatttaaaaaaatttaaaaaaaaattatataagtaaataacagcaattttatggtattactttttacctttaaatattttaatttttatgatcattaacattagcgaccgaaaagtttagtctgtttaaattttgaaaaaattcaaaatttcaacgttagttttttggtttaaaaactgaaaaccgaaatttttataaaactttgtacaataaatttttgataattatatgaaatgaattattttataaggaaaaattaatagaagaataatttctcattttttcaagaaaaaataattttgaaatttaattgcattaagtccattttttcgtgatattttattttattaataataaaatttttattatctttttacatttccaattctatgtataaaacattttattaatttaacaattttccctggttcaggtgcgttc

SEQ ID NO: 29762 - DNA, 1121 bp, Heterodera glycines
  unsure (1)..(1121): unsure at all n locations
ttttccgcattttttgatgcaatttgcgttcctgatggattttcaggtgcctatttaagtctaaaaggtgaacatcgtcgcaatgctttggccttttgccctaccgaatttgaaaatgaatgttttgtcgcacagttcgcattggtgcggtcggtcgccgctgtgaatcatcaaatgctgcgtcaaatggcccttctgaaaacaaattgaaaaactcattttaaacactaatcggcacgaaagcacctgaaaaaaggacttgccacaatggggacacgtgtgagagcgttttctgaaatttgtttaaattggcatttgatggcatgccaatttggccactcattcccctcctctctctcacccaatgtgccacatgctgtgcttcttcagcaattgacgagtgccgaattccttgccgcattgaactgaaaattaactctttcccatgtattttgcgtttgttttgtccaaattacggcatttgtgcggctgctcaccgctgtgaatgcggtggtgcgtggacagttcgcgtttgatgctaaacgattggccgcatttcacacaagcgtattggggactgaaaatgtggcaataaatggcggagaaaaaatatttgagaaaaaaggccaaaaactattcgcctcttaacggactgaccggtcgcggtgtgttttgatgtaatgaatgttcaacatttcttgcgaggcgaatgtgcgccccccggggcattttttgcacgtcagcgccgcgagagcaatgcccgagggactgacaatgagttggcccatcgaatcggaaacagagcaggaagaggaggaggaggaagcagtcggagaattcagcggaggaggacttgtcgattcggacttgatcaattgaactggctgaaaaacgaaaaaggcgtaagggactcaaatggaagagaggaaatgggggagggggagggactcaaatggtgggggctcaaatgggggaaatggtggagactcaaatggaagagaggaaatgggggggactcaaatggaaagcgaggaaatgggggaaagggggagggnactcaatggnggggggggctcaaatgggggaaatggtggagactcaaatggaaagagaggaatgga

SEQ ID NO: 29763 - DNA, 1013 bp, Heterodera glycines
aattcattcacatgggtatagttcagtgacatgagaccaaaaatttataaaaaacatcaacggtatcgccaaaatgcttgcgccacataaactcgggaaagtaactttcaaatgtgtttgcagtgtttccgctacgtggtcggaattgcttataatgatgccacattgcctcaacattttgggtataagaaccagtaatgggattaatgaaattctggctatggttaacagtgaaatgttggtacccctgaggaagattttgaatctgattgtatgccccccagagatcagaatggattatgctgcccgggaggatattctgttgaattagggggatgagatcatttgcacttcgtcgctgaaccggcacgagaaagcagcgtttcccctcagtgtttctttcaactccaccgaacagagccatatttgctgtttctcaggaaccctccctcgggcatattttatacgcacgcacattgtctcatcgatttcgacgtgcactccgacccctccgatcatgactcggtatctcactgcgcacacacatcgcgaaaaaagtttgtccaatcacaaattgtgtgattctccaatatcccggtctcatgcttgagttgttcatatgttccataatgttgggcccaaagataagagagatgaaagatttgctttgttgttaaatgtgtccccgcaaagaaggtcccttggagaaagccaatttccagtttgggtttggaatcagttcaaagcaaacaattcataatgttctataagctttctgtttatccagtgacaattacgaatgtataggaatttaattgtctggagttccgaaaaagtttaaacttgcacagagtacggctccatgtgatttttatttctagcatttgtacgtaataagtcgattgctttaaaattcccattcaatatggagagttcggtctccaaatcaaaaaagtgtatcgaatggctcaaaaaacgcttgcgcctgcttctatttacatttattattttta

SEQ ID NO: 29764 - DNA, 1534 bp, Heterodera glycines
  unsure (1)..(1534): unsure at all n locations
tgtttaatattattttacagaatattantttgcgaaaaaattgaatatattaatgtgaatcattcattcagctgattgaccaaaaagaaaaaattaaacaaaatagtcaataataaaatgggaacgacataattgatcaaatggcttattatccggtttaaaaataagaaaaatacagcagaaaatgatcagaaactgagaatttatcaaaaattgaaacaattaaaaaaattatttaagaaaaaccttatccattcaattagtggatgttaattgtttttcttcacctgttcctttcccttggggcccgaattcggatggattgatccttttgctcaaacaaatatcttccaccctaaaatttagatgaccatcttgatattgtgctggttttgctggtcatcggccccgtgttcttcccaacttttcaactttgttcagtaggaaagaagcagaaaattttttcagattttttttttataaaatcaatttaaatatcttattttaaaactgagttttatttcgccacactaaagtcagtgttaattagcgataaaaaaaacaaattctattttaattctgcgccgcaagtctcattttgaatgggcgccgcaaatctcgcatcactttccccatggaatcaagccgcttcaaacaatgagagtgcgaatggaagcggtttcttgaggaatcatcataaatggaccaaatggtcaccaattgttgtgagctttgtgcagcggcttatgaagtaaaatacacttcgttattacaaaatccctgaattttcgaaaaatatcacttcggcttcctcaaaacacataattatgccaaatgatagcgaacatttaaaatcgaaaaacaaagcaaaaaataaacaaaagtcttgtgaaatgttaacgatttctttctcgtccctctaaatcttcacaataacttcttgaatgatttgtgttgcgtcattttgttgaccatcttttgcacatcgtcactttcaaaattgtatctcatgtaattggagtcgttcgttgccgcaacaattttgaaaatggcattcattttggcaaaatgcgcatcaattctttgctgtgcagttttgctcgctgttatcatttgtttttccaacaaaaatttgtacagcatttgtataaatgcgatgattttaccgtataaacacagtaatttttcatgcaaaaatattaaaattaaataaaaaattattattttatttatgaatgaatttttgtaacatgtttttcatttactattttaggactaaagcacagtttggcgatgtgcccgataaaataggagtcgtaaagatcgccataatacgaatggtaggccggtttccgggatcgggttatggggatggtatgtttgaatttggggtccgactaaaaagtcgagggtttcggggtgccacacttatccaatggttataaaattgcctctgtttctatattttccaactaccaaataagttttttttgctttgatttattaaattcttaattttttgtttatatatttg

SEQ ID NO: 29765 - DNA, 1616 bp, Heterodera glycines
  unsure (1)..(1616): unsure at all n locations
cgacatcgattattcgagataagacccgttcaattacagtataaaagtgaaagctttggccaataattcaaaattaaaaagtttcgattagcacaaaaatatccaatttcttctcgactcggaattgcaaacaatttttcaaggaacaaatacaaaaaaaggaataaaattcaaaaatatttttaacagataattttccctgagataatcctttcttactctttaaaagcatttttatttttaattttgaaaattaaaaaatcattttgatcagtggcaacctacagagagccgccaaattttttaaaaattttctggtctttatttatttgatttcaaattcggacagcaattttttgtaattgtaatttagttcaggagagtgaatgatgatgaccaaataatgacattaataattctctccaaaaaatattaaatgactttaatttcaagaaatgccctcaggcagaattttgaagaatcaatccccttgcatttgcattgcttcacccaatgcttttgctcttttgatctcccccgcgggggagatgcgccgctcccggaggtaagtgcaataccgggccgacgcgcggtcgagagggggcaagccccctactgcgacctttttccaaaaattggttaatctctttgaccccggtaggggtcgttacggagattaagccgtaaagaacagatactacactttgatcttagccaaaaggccgagaagcgatgccggaacagcaaaatgggttccggaaacggaaccggcaccatcgaaaacatatgggtagcatttaaggcgaccaaaattgcacatttgggagcagagatattgaaaaaattggggaaatagcgtttaacgggagggacaaatgagggaaagaaacatgacggacgagagagagtgcttccgtaagaggaaaagcatagaagagagtgtgtacgacagacatgggaagggagaaagtggggggaggcagcagcaggtggtcgccatgtcgtcgcacgccgacgaccactttcgttctactctcattaactctcgctcgctcgctcgctctctctctcattctctatactctctcatctttctttttcgtccctgtcctctcattatcgcacactctttcccatttaaaataaataaattttttaaatttttgtataaattaatttgctttttattttctctctctctgactctctcacacacactctctcctctctctgctttgatcagttatgtaaataccccatccccccaagcacccacttgatctgccgtttgggctctgccgatcggcctccgctgttggcacgaccaccgccagcctcggccacccgatgtgtcgtgatcattgccgccgggcccattctgctgttgctgtttttggcattggcaccgcttccaccgccgccgccactcgtcagttggcacagcgtttggcccatccgttgggtgtccttcagtcgctgctgactgtgccgtttggtgatcatgtaaatgcgcatgtacaccacgacgagaatggccacccggatgtagaaagagcccagcgaggagtaccatacgtagtccaactctgangataccgtacactcgcccggacgct

SEQ ID NO: 29766 - DNA, 2265 bp, Heterodera glycines
  unsure (1)..(2265): unsure at all n locations
gattagcaagaattgatcatacatgcttgttcaatgatctaaagaaattcttgaaaaacgaaagatatatccgctgaaaatcacgaatttacaaaaatttttcggaatttttttattgaattttatgcattttccgtttctcctntaataaatttattggttttctataatttttaaacataatttggcaattttttaatataaaaaagaatctctgataattatattattataatacaaaattgtttcataattataataattttatgtgcaaatataatttttttaatggtgaatatgcattatttatattgattatccaaccacatcaacaacctaaaaacaaagaaaaatatgcatatatttttattcacatgaaaaaatacatatattataatatttatatataaaagattaataataatttatgcaaaatacggcggaagtttttgattaggtgccaattttatactggtatgtataggcggcactactgcttttatttaacccaatagttttttatgctaaatcgaaaatgaaaaagcaaatattatatattttttaattatgctttattttttttaaataaaaaaatgacaaaaattttgcaacacaaatttcgatctaagcaaaaattagcaaaattttgcatcctgtaattaaaaaaacgtagggaaattttggcccggcgttgcagagaagcgccgccaaagaaaaattaagaaattttggacaggtttcttcttaacattgttgcaccaaaaattatgctttgtggctttttggttttaaaaacataacggaaaggttatttttcggattgaaaaaaaaatttggacggcaaaatttttgaaaaaatatgccgcaaatggaaagcaaaaaaaaatctctccgtattcaatatgctcattttttttctccaagattgttaaaatatttataataggaagcttaaagaatatatatatttaatacatttttgattgaataattcgttttgtcaaacttttgtatcaaaattcgatttcacattttcaagttaatattgtgtaattggagcctttaaatatgaacttagcttctttttaaaccaaatatcttgaccatagggtaaaccgggcccggatattttggcaaaaactggacccgggtaatacttggtacagaaaagccatgcttgggcatgggtacaagttttctaaattaggcctgggtacctggtccaacagggtacgaaaaacccaacaattatttttaaaatcttaatttaaaaaaactaaacaacctaaaatcttttaaaaaataataactaaaggataaaacacgatttatcctacgactaaataaaatcgacataaaagaaattatattagcagaataaaacatttaactccttttaatataaaactgaaattgcgaatgcgttggtttttaaggattaataaaatgaacaaagtcaaataaaatttgtttgaaaaattgaaattttttttatttcttaaagaataaattttatccataaattaaatattgtctttttttggaaaaaaatggaaaaacaaaattaaaaatgaattggaaacatgaaatggtcagcagaagagcctgaatgatgtgtagggatgccaattttaggtaaatacatttttttctggattttccatagcctaattagttggaaaatttttttgtatttgcgaacaaaagttgggacttttatttacatattcttaattttctgggtttttatacatatcacatatgtacatattttggactttttcgcactttttcctacattttttgaagtttttttgaaaatgtacccctaaaaattctttttttttcttcaaaataagagatatcaaaaattaatttttaaatactaaaatgtgattctaagcctatctaggtcatttttatgacattttgcctgtttcacccattacgaagaatttttttctaaaatataacaatttaaaaaatttatttacatatttgatacaattttggggttttagtagatatttcgggatttttcttacatatttacgtacatatttaaatttgcatcatattcattaatcagttcttcaatttcatcatattcttccgtttttgattttgctttttccaattcttcctttgctgtcttggcatttcacttggcacgttcgcatttattttcccatggtgtcgatcaaattcttnnttcgaanngntttggcaatntttcgtttccgtgaccnntgcaggcnnatgcaa

SEQ ID NO: 29767 - DNA, 881 bp, Heterodera glycines
agtttatgtgtttttatttacccctatatatgtgctttttatgcaccagataattattttgatccactcattcattctgccctttttagtcgatgattagattttaaactttcggcctctccaatgtagtgaattaagacattattttccgtttttattgcttcctttggcactccgatcacttggttttttctgtcttggtctttacttatcggaaatgtgtactgcaattcgtggactactacggcctgtccgggccacgtctcagttgttactggtcccatagagaaatgcgtgtcacaatattctcccgagggaatgcgccacatcaaaagttcaactgctcctggcaggcggatccagtcatcctttccgattgtgaattgttcgatttttagggaatccccccatgatgtgacgagcatttctccgtctaaaattcctccagtcccctcttcgatgactgtttggacattgtcataacagttcactccgtaccagccgtactccttcctaattggtttagaactttcccagcgtttctcgcttattctgttcattggacgatgatttaaagaattttgacagtcgtccagtgatgtttccgattcgaatttcttcggcggatgatcaagagtaaccacgcgtaagaatgattcggtacatgccactgtcgtaacattccagcatttgaatactggaaatgaacgcggaattcgtatgggtatgtagagaattgatttgttcatgattggttgtgtctcagtcgggagagtacagttcttctctgctgggaaactcatagtcacggatgatccttccaatggactcgttggacaaatttggtattgtgctagcgccggtggaatcgatgtcataat

SEQ ID NO: 29768 - DNA, 922 bp, Heterodera glycines
gtctgatcgcgaagcacatatgttagaaaaagtttctaaacatattgagttttggaatgataccatcaatgttggattttgattacaatgaaaaaagttatataaagttatagtgggaaaacatgctggcgcccaaccgtgcgcgcccaactgtgcgcgcccaactgaggtagaccggatctcgacagtgttggtttcgacagtgattgatttcgacagtaaagcttatttaaaaaaaatttgttctatatggcataagtctcgttaaattgtgacaattaaaatgataagaacatggctcttatacttgcagaggggttcgagattttcgaattcttgcttaagagcctgcagatttgaattttggcacacaaacccggcattagttagcagattttcccacacgatttgagaatcttatctacgaaatttgttgtatttttgactacattacagcaggaaagatatttgtatagaaaaagtgaaagcgataaattttttgcaaaaaaatcatacaactcttattttttattacttacttcaattataaattttgtatatgcaaattgtatattcatataaattcatgtgtacaataaatcatgtagaaaattaattaaaaagtactttcgaaatcaactgctttcgaaaccaatcactgtcgaaaacacctgctggtacgcatactattaccggatttttaacgaaaaaattcaaaaaaaaatgggtacgaagtgccaatctgttccgcaaagatttttaaattttacgattttgttaagaatagacactcctaggctcacccatttctttttctcggtctcggctctcgttttttgctaaaaaataattaacaaaaaaattctttgtaaaattattcttgaatttgcagaaaacacccttcattcaacgaagccgtcac

SEQ ID NO: 29769 - DNA, 1224 bp, Heterodera glycines
ggttcgttcaggtaactcagtacgggttccaaacgcatcgcccacgccctccgctcaaccgcgccatcccgccaattcccgagtcgcgcagcaacgagtcgattcagtcgggactggtggcacgccaccaaagtgtcggaagcgttgtgggaattcagcaacagacggcacagatcattgacgagaacaacccaattgatgtagaaatggtaccgacagcggaggaggaggaggcaaagacaaagacggagacggaacatttggaaatgatcgaaagcgaaacggaggaaggaaaagcggggaaagggaaaatgagagtagcggaaaaaggaggaaaagcatcacgattgccgaagatgatgcaacgcaaaggcaaagcgaaggaaagagtggcggaggacggcgataaatggaggaaaatgccgaaaagtccgctgatgtcagtggcacactcagtgaaggtgagagagaaagagagagagagaggggagaaagacagtggagaatcagagagaagagatagaggaatattgagaaagagaaagggagagagagagagggacaaggagaatgagagaggaaagtgatcgaaaaacgaacggactgaccagcagttgcctggctaactaatactgaatgtccttggaattttcatttttcataatttgccataattttgtttagactcggttcactcgtctgaccacgctcagacagtccaaagatgcgttgccgatgagtcgcagtttggaaattggtcgtcagcagagtcggattccgacggtttgcggcggcggcgacccaatgacaaagtcgtggagtttggagacgacagccatgcaaaataacaacaataacaagaacaatagcggctcggaaatgccccgacggggaccaatcaccacattaatgccatccccgcggggaatgccgcggagaatgccgacggagggaggttaatgccgaacaaattaacaaaactcaaaaaaatgggaacagaaagcgaccattacgcgggcgcgaaaatggttcaatttgcgccacttcccaacgacaaattcgaaacgaaagaactaaggaaaatgccagaattggaatttgccgaattgaatttggagaagccgacggaggagggaaaagaagcaaaagacggaggaggtaaagcaaaataaaagaaaggaaagcgaattaagaggacaatttgaaggggaaaagagggaaaaa

SEQ ID NO: 29770 - DNA, 93 bp, Heterodera glycines
tctctttcgttattattgtggcctgaggctcaaacgccccatttcgggatcgggtggtcgcccatggaaatgcacacgttcttcatttcggcg

SEQ ID NO: 29771 - DNA, 1063 bp, Heterodera glycines
ttttctggtatggaaatgtcccatatatgttcgtgaggtagcggtggtaatgacacggttggtaaggcaacggttggtaaggaaacgtttggtaaggaaacggtggtaaggaaacggtggtaaggaaacggtggtaaggaaacaacaccaacccctttttgaaaaaaaacagaatgtcaaaaatagaattttttatttctctaagatgtaatgccaaatgcttttttcaaaattttcaaagaaagagaaagaaaaccggaaataagggactgtccccttgaaaaaatacactaccgaaatgacttttcaggtgcatttacatactctaatattattgcaagttttatggaaatgtcgtcacaagaggatgaatatgactatctttttaaaggtacttttttcagagatttaaccgttctcggacataaataattctgaaatttctgtaataaaattttggtttttcgattttgtcatttcccttatttttgccctggctattccccatcatttttcagtggttttgatcggcgacccgggcgttggcaagtccaatttattgtcccgtttcacgcgcaatgagttcaacttggagagcaaatccgccgctggtgtggatttgtttttcgaattctcaccttccattaaggtgtgttgtgttacttgtgaaataggtgttcaaaatgtgatggatttggaaaataaaattttagttttttgaggagaaaaatttgcattttagggataatttctgtttttaatgatactatactgacaaatccgcattaaaacttgttttttttcggtgttataattgcaaatattacaattgtttcattcaattccgaatctatggaccagcgatgtttctagaatttcgcggcttaatgccaggtagggcacctacagaaaaaaatgtctttcattcaatttttcgggttttttatagatattctaaatttgagttttggatcgttttttagttaaaaatcccgtacccaattgatggatcctgttctctctttgtcattggcgaaaatccggtccgatctcacattttttg

SEQ ID NO: 29772 - DNA, 1111 bp, Heterodera glycines
cctaatttttgttagcctcctttttactgttaggttatccccgtggaagagacgtgccatgctaatttggacgaaattaagacattgttgtcagaaatggtcgtcaaacatttgaagggagagaagaaggacactccgccaacttacgcagtcgaattcaaagcgagcaacaccaaactgttgagcagacagcaaatttacgatttggttgcgcaactgatgaacgaactgtcaccggaaagtgccgtcaacctcacccagcctgatctgctcgtcattgtgcatgtaaaaaacaaaagcattatttttaatgaatcagatctcattacccaaattcgatgaatattttatgacgtacctgcgttaactaatgaaacaaatattaaactggaaatttttgtggttttgcttttagactattcgcactgttacaatgctttcgattgtcgcaaattattaccaacgccgcaaattcgctttgaaattggcaacggagagcgaaccgaaagagaaaagcaacgaaaaacagaacacgacccatgaagagggagagacttgaaagaattagagatacggccacattccttattatttattttttgatttcattataccctctatcactttactctgtgagaaaaatttaattgtttgctaaatttttggcaagacttccttgaaaaaataaataaaacaaacgaattttataaccaaataatggaacaaacaatgaatcgaattcgaaacgatgagaaaggaccgaaaatagatgagatgagatttaacaagcaaccaattggtgcaacagaaaatgatcggacaaatgaagaattcgtcatcataaagcgaagcggggagaacggcagagccacttaagcatagttgtagaggaaattgaagctaaaggacggggaagaaactcaaaaatcagaaagggagtgaaataccggctcagaatttgaggaaggctggcgatcagcggcccatagcctgcggaattgtcgtatagctcaaaaagaggcgcagcgaccaatttaaaatttttagggacagcgaaaaaagctaaaacaataaatatttaaattatctacaatagcaataaatagacctt

SEQ ID NO: 29773 - DNA, 1250 bp, Heterodera glycines
gaggtgttttgagtcagaagtttcgctttcaaaaaagctcgtagggatcgtccgttttcggcaaaatagtgcaccatagcaaaaagggcggaggttgatcgacacttctctagggtttgaggtgttttgagtcagaagtttcgcttttcaaaaagctcgttgggatcgtcctttttcggcaaaatagtgcaccacagcaaaaagggcggaggttgaacgacacttctctagggtttgaggtgttttgagtcagaagtttcgcttttcaaaaagctcgttaggatcgtacgttttcggcaaaagagcgcaccatagcaaaaatggcggagtttgaacgacacttctctagggtttgaggtgttttgagtcagaagtttcgcttttcaaaaagctcgttgggatcgtcctttttcggcaaaagagcgcaccatagcaaaaatggcgtagtttgaacgacacttctctagggtttgaggtgttttgagtcagaagtttcgcttttcaaaaagctagttgggatcgtcctttttcggcaaaatagtgcaccacagcaaaaatggcggagtttgaacgacacttctctagggtttgaggtgttttgagtcagaagtttcgcttttcaaaaagctagttgggatcgtcctttttcggcaaaagagtgcaccatagcaaaaatggcggagtttgaacgacacttctctagggtttgaggtgttttaagtcagaagtttcgcttttcaaaaagctcgttaggatcgtacgttttcggcaaaagagcgcaccatagcaaaaatggcgtagtttgaacgacacttctctagggtttgaggtgttttgagtcagaagtttcgcttttcaaaaaaatcattgggatcgtacgttttcggcaaaagagtgcaccataggaaaaatggcggagtttgaacgacacttctctagggtttgaggtgttttgagtcagaagtttcgcttttcaaaaagctcgttgggatcgtcctttttcggcaaaagagtgcaccatagcaaaaatggcgtagtttgaacgacacttctctagggtttgaggtgttttgagtcagaagtttcgcttttcaaaaagctcgttgggatcgtactttttcggcaaagagcgcacatagcaaaaatggcgtagttgaacgacacttctctagggtttgaggtgttttgagtcagaagttttcgctttcaaaagctcagtgggatcgtactttttcggcaaaatagcgcac

SEQ ID NO: 29774 - DNA, 1356 bp, Heterodera glycines
  unsure (1)..(1356): unsure at all n locations
aagctcgtttttcacaacaaaaaaagggtaccaaaaattaatgtaaaaacatctaaatttgtgtggcatttngcgtcctattttatgcttttctacaaatntaatatctaaaaaatgcataacataaatttttatttgcatattttggtacatattttcatataaatttgccatttttattcggtttttttgttcataaaaattactaattgaccattttcatcaaattttgctcccttcagttacaacgttttccttatgttctctctgttggacatcaaacggcgaaaaattttgtcccaaattttgaaaaatttatgtgcatatttctcactttttatatgcatattttgcgattttatgtgcatatttctcactttttatatgcatattttgcgattttatgtgcatattttgggagccctaattatatgtattgatttgtcggaattttgctttttttggccaattaataatgtaaaaagcctgcagaataatatttgctcttttcttgcataatatttataaattcctgagatctttaatttgatacaacgtttatttattatttttagaattttaaattcactacgaaaaatcattttttttgaaaatttaaaccgcttttttcaaaaagataccaaaaatcaattttttctagtgataaaacattatcctaaatgtaattaggtcatttaatcttcattcagtgttttctatgaattttttgttttcgtgaattttttaaattttaaatattgtataggtacatatatttgcgatctttcttattacatacatataattcccaccataaattttattccaattttaacaagtcaataaaatgattttttgctgcgcgctttttccaaaaaagactgggaacagggggccgatggcgccagtatgcgccgccaggaaaatttcagaattttggtgaaattttaacagattttactgaaaattcgcaatttaatggtcgaattttgaaaattttgaggtttgttgggccgataagctaaaaatcgcaatttttgaataaaaatcagcataaatcggcaaattgtttagcatgtgtaaaatgggttgcgcgaacgaaggaaattttcggaaccatacgatcctgtgtcatccggaaattgcaaccactccgaggctcgtcgaggagggcgttagaattccatacatgcttggcgatttacatgggaatttcccacaagcttgtgaagaaagacacaaaggaaaaattggaaatttgtgaaattagaggtttacaaactgaaaattttttggcacttccttgttttgtcatccccctgaaatttttttccagtaattttttctaggctattt

SEQ ID NO: 29775 - DNA, 665 bp, Heterodera glycines
gagcactttgcctggctgaaaaaacaaaaaacatgaagatggttttgatggcctccgttgttccgacctgtgacccgtcgcaggaggcgccttggacgtggtgatgagacgaatggagggagcagccatgtggagaatggtggtttcagaaattaggacgttggtcgtttgttcgctgaaaattaaaagaaacgccaatgtaaaatacaggaaaaaggcaagcgaaatgtgcaaaagacgaaaaggcatttttagcacttttttttactatgacgaaccaaacgaaaaagcccctttcgattctttatgttttcctgatcactgaccaccagtgtgtcattttttgacccaaaattttgtacagaaatatcgaaaaattgcaaattatatttaaggaattcgcatgtggttttttattgggacgatcaaagtaaaaagtgcaggattttgttaaaaagagtggagaggaaaaagaatgaaaatagagaaaattgttttgaatagcgaggaatggtaatgcgatttgatttgactcgcctttatataaaaaaacaaaggcgcataaacaaattttttgttcggatgaaatttgaaaattcctccgattttgccattcacttattggactgatataaatatgcagccattttcacttaatgcttcat

SEQ ID NO: 29776 - DNA, 1055 bp, Heterodera glycines
acaaattagatggagatgtccaggtggtgggtcgaaaaacttttaggtcagttttactacgaccattatcagcatcatcatcattataattgttatgccgaaatgatgtgataactgtggaaataaaatttcggataattttcgttcaaaatatttatataatatttttctgataaaagttttaccattgaatcatcgagtgtccaatctctttttcagtgaatcatttttcccagctacatcaatttgctgattatgtgttcgccttcgaatggattgtcggtcggttgatctgtccaccccccccccttaattcacttttattcattttccatttttcctagtcttaaaatccatttaaaactatgaaaatccgaatggactttctatgtcgtcacccgatgcacttcccgccgattgttgcgttgttcgcccgctttcgcctttgtttcccttttacttccatgccatgataggccaaaaacaaataacataaatttgtaaaattcaccaatttaattttaacagcttgaggctttcctagagatgttactcggtaaaatagtttttgaaaaattacgttaattttatcgtaaaattctttaataagtccttttcaaattttattaattcccggcaaagacatcctctattaaaaatacgctcaattttttaaaaattcgaatgattttggttgttgatattttttagatttaggccttttacttgacattaatttagaagcaaagtttatctttttatgctgaccaaaaaagtctttccaacaacttgttctaatcacttaatggtgatatggaccctccaaaatgcagggcgacatttgcggaccgacttttgcggatcaaatttctgagttgaattgtctaaaaaaagaaagagagacgatgaattttcaataaattttaatacttctataattaaaattgatgaaggtatgctgatacaagtctgctttggcatatttcttgatcggagagattactagaacaagatatattaacctataattgagctgtgaaaatagtaataaaaat

SEQ ID NO: 29777 - DNA, 1556 bp, Heterodera glycines
cctttatgagagccaattaatgtttttccctccatccccaatgtggcataaggggtagtacgtcagtctggataccccctccatggttcggatccgctcgggtgcgggggatttttgataaattttaaatgcatttaaattcaacacgttaagatattttgacctttagatgtttaaattgaatttaaaattaattaaaataatttaaataaagtcgcgcagcaaaaaagtcgcgcagtaagaaaaaagccgcgcacccccttacaataggtttgggtttgcaagaaaagtcgcgcaaaaggttttgcttcagtactgaaaaattttggcgctcaaatggctggcgctcagttggccatgcacccctcccataagtgtggggggggctaccgtaatccggacaaatggtgtgctctaactactaaccattaattgcaaaaataattttaaaaacaaatttctaaatttaataaaatattcttaatgctttatgaaaaatctaaataaaaccaacgatgtaatacaaattttttaaaacaaaacctgggattaaagcttgaaaataaaccaatgcttattatctcgtcgaaatcattttccctcaattttagctaatgtcagttctcttatttataaatattgaattgagtttaaataaattcttcaataaaattatttagtataattataaatttaatgtaacttaattttgtcttaaaaaataattgaattatataaataatataaaatactattatttaagtgaaatttttacacctatgaagcgccaaatcttggaagctagaggaccatgccgcaataaaatggaaatatgtaaacaaattcaaccaacacttataataatatatataccataaaaagagaataaacataaaataatggaagttaagaattgtttaatatgaatttctaaatttttttttattaatacccaaataaaaaaataaaatttctttatataaaaaaataatatatgataaaaattttaaacaaataatataatttgaaacacatttttttaatataaatatgacatttttgaacagactccgttgagacatattatcaatatgaatcactttattttacctgttaatttttaatatttgaacgaataaattatctaaatcaaatacaataaaggcaaaatcttccgagaaaaaaaatgaatttattatagaaaagaatactaaataaataaataataagaacaaatttaaaataaatatctattttatacgtttacctgaaaatggtctcaacttgtgatgccacgatccgggacctactaaaacatcacaagacaaaacattatataaaaaataattatttaaaacaactatatttattaatctaaatttatttaaatatcatcttaataccgtgtaacaaattattttttaatattttgaaacaaacaaaaaaaaaacagaacattatgaaacaaataacaagatgaatgacaaaaacaaattcttattttatataaaataaaaaacccaaaacaaacaataaaaattcaacttatctgtaag

SEQ ID NO: 29778 - DNA, 1231 bp, Heterodera glycines
  unsure (1)..(1231): unsure at all n locations
ccagccacagtttgttgccaaccggctggccgagatacgcaaatccacggacgcaacattccactacgtgccaacgagcaacaacccagcggactcggcaactcggggctctcccccgcgcatctgcagcaattcgagttatggtggaaaggcccagtttggttggcgacttcctgcgcaacctggccacgtgagctcgagttcaaagtggacgacgacgaagaggaagcaaccccagcggaggaactcaccagcgccacgctcgtagcacaaagggagggcactccctgtcaaaaggaagaatggcccaattcggtgcttaaccgctgcagtaaatgggcaaaagttctccgcgtgactgcctgggtcaggcgattcaccacgaatgttcgaaaacgctgtcagaggaagcaaaatgggagaccggaaactcccagccttgacacgggggaagaaagccccctgcggagcaaaaccaaacttggcggacaatcgttgtccgtcccaagttgcgacgagctaacaagcgcccaatggacggtcattcgcgcagtccaactcacttgccaaattcaggacaaaattcgggcggaaaaggatgaaaatggcgtccagagactgctcagccggatcggatggtgcgaagaaacggaagtcagccagccagtgctactcccgagagggtcaagagcgggggcactcatcatcgatgacattcatgtgcgttttcatcatgcgggacccgacgggacactttccgagttcctgagaagatggtggtgctcaagcgcgcggcaacaagtgctgagagtactcgggcagtgccgacaatgccgacgcctcagggggatggcctacccccttcccacaatgcccccattaccgatggatcgagtgcggcgacgggtgccctttgaatcggtggggctcgattttctcggcccaacagctactctggacgacagcggacaacgacagaaagcatggggtcttctgatcacctgcttaacaactcgagcaatttacatcgacgcaacacgggacatgtcggcgaaaagcttcattgctttactggcgnaggtttattgctcgccgtggggcaccaagtcggatcctgagcgacatgcaccgacatttacgattgttggtaaactttgagcgaatttgggataacgggagacgatccgctggagttcgcggactcccgggcattcatggcgatcaccccgca

SEQ ID NO: 29779 - DNA, 1561 bp, Heterodera glycines
attgctgcgtgacgatgggatggcaattgtgaacgaagtgacacgggactacgaaattggtggggcaattcactagctgatccatcatcactgatcattagggaatcggatttttagtagcgaaaaattgtccaaaaataataatgctagaatatcgaaaagaaaaagttaaaaacatctataaaattcgtcctcatctgatcgtttgctcggttgatcatccttgtgatcattctctatgagcaatcgctgatttgcttctctccctccctttagcgcttctctgtgacggtttgcaaggcgccgactttggcaaagttgagggcaattcgcaccagcgcatttacggcgtctattttcaccgggacacgctggaaaaagtgttcaacgaagcaggctttcgcatctgcttcagacaagtcgcaaatacccgaatctctccccaatggcaccgttcgcttttcagtccgatccaaatgtgccgactacaacttatgtgatccgcaaaaagccgcagcaggcgcgggagcccgtttttgtgaacatcgacgacatcgaacagttctcttggatcgaaccattgcaaaaagtggtggaggagcgacttaatgagcccgactataagacaatttggtcggcacactttgttttggtcttttcattggacactcttaaggctgaccagcacgcgcgtgcgtaacaatggcactttgggaatgtctctgtgttttgtcgaggaaaatgccaaatacaaccgattccgcactttggcagacatctctctgaagcccgagaatcggacgggtcctgaaaaattggatttggagtcgaaggaaatccaggaaattttggagttggacttgcacgcaaacaattaccgggacggcgactggggctcaattcggcacattgtagtcaaagaaggtctgtcggttctgtcccttcggacattggccccctgccatttcagtctgattttgttttgattttcagaagatgcgcacagctacaaagaagtggaacatgcattcatcaacacattggtgcgtggcgacgtgtccagcctgacttgggtggagagtggcaaccaatactttgcccaaagccgcgaccaactcggcccgggcctcgagctgtgctcagtgtattacgcggcggtaaacttccgtgacgtaatgttggcatacggacgccttccgccggacgccattccgggccaattcgcggaccgcgagtgccttctcggcatggaatttgccggtcgacttcaaaacgggcgtcgcgtgatgggcattctaccagcacaggcactggccacttcggtggtgtgcaacagagactattgctgggaagtgccagacgggtggacactgaaagaggcggcaacggttccagtcatttacgcgaccgcatattacgcgctggtgatgcgcgggcgcattcggaaaggggacaaggcgagttgggcagtgccggtcaccaccactgacttttctactcgttcaggtgctgatccacggcggcacgggcggagtgggccaggcggccatcacaattgcgt

SEQ ID NO: 29780 - DNA, 1293 bp, Heterodera glycines
attgtttaaaatataaatttacttaaaaaatcagtaaattaaaatttgaaagaaaaatcaatattttttcgaaaaaaaatttttcccgttcccgcccgggattcccgttaaaattgacgggattttacgggaacgggaaaaaggcgggaatcccgccccgttcattttcgttttcccgttcccggaaaaaaatttttaccggactctagtttttaggtagaaaatcacgtaaaaacttaaatatttaaattaaatgaattattaaatagtttaaagtttttttccgaataggtttgtacaaatttttaaaccaaaaatttttattaagaaaaaatattaaatttttggaccaattttttgaaaattttttcaattcttaggtgtatatttattgtttttattgcatttttgttaagaattttttcaaaaatcctaaattaggcactttaggcacaaaaacctcgaaataggcaaaaataggcattataaaagtcatcgtagacatccaaaaccaagcggaaaacgcgtttttagcacttatctttgctatcaagtgtgcaaaattttaggcatttgcttaaaaaaggaagccctaattattaggggtaatactggagaattggcggtgggggtcggtttagtcgggccgttttagtccggccgttttagtccggccagtttggtcggagggtcggtttagtacggcaagctgtttttgcccataactagggctgcaaaaaatatgtacaaaaagtggtccaaatatgtacataaatacgtaagaaaaatcccaaaatatgtacaaaaaaccccaaatatgtaaataaaattttttttaatggtattttttgggaaagaaaatccccgtaaagtatgaaatagccacaaaatgacataaaattactttttttggtatttttaggcaacattttcaaacttattttttctttataaattttcaaaatatgtaaaaaaatgaaaatatgtacaaaaatatttgccgaaatcttgaatttttttttgaggatttccaaaaatttccgtaaaaaatcctcaaaatatgtaaaaaaaatgaaaatatgtacaaaaatatttgccgaaattttgaattttttttgaatatttccaaaaatttccgtaaaaaatcctcaaaatatgtaaaaaaaatgaaaatatgtaagaaaaagtcccgatttttgttcacaaacacaaaaaagaaagtgtttttcctgctatttagagcaaagagaagccaggaaaaaaatatgtatttacataaaattggcagcccta

SEQ ID NO: 29781 - DNA, 1019 bp, Heterodera glycines
  unsure (1)..(1019): unsure at all n locations
ataaatctggcgcatcggtcggggggaatgccccgaaaacaaaaatcgatttttcaagtgtcgttgggggtactcaacaanttatggggagcaaaaatccaaagcagaattaaagtacaggctatagggaagctattcccgaaggattcggtctccccataaatctgggcgcatcggttcggggggactgaccgaaaacaaaaaaatcgattttttcaagtgtccgtttggggtactcaaacaattatggggagcaaaaatccaaagcagaattaaagtacaggctatagggaagctattcccgaaggattcggcctccccataaatctgggcgcatcggttcggggggactgccccgaaaacaaaaaaatcgattttttcaagtgtccgtttggggtactcaaacaattatggggagcaaaaatccaacgcagaattaaagtacaggctatagggaagctattcccgaaggattcggtctccccataaatctgggcgcatcggttcggggggactgccccgaaaacaaaaaaatcgattttttcaagtgtccgtttggggtactcaaacaattattaaaaatttttagatttttattcatctccctttttgatagtgaaagcatctgagtgcctaaaataacttgtaaataaaatttggtgcgtttcagagcagtttgtgaaaaaatatttatgaattaattttgctaaaaaaataaaatagtgaagctttaaaaattaataaaaaattttaaattcagaattactggagttagcatcatagcagtgcttttccttgtctttttgatgccctcgcaaaatctggtccgcttctgatcagtttataaaaaaaaagttaagcctaaaatttttcgcaaatttaaaaagcaattaaaaatttttagattttttattcatctccctttttgatagtgaaagcatcagagagccttatttaacttttaattaacatttggtgcgaggcagagcacgttctaaaaaatatttatgaattaattt

SEQ ID NO: 29782 - DNA, 1591 bp, Heterodera glycines
  unsure (1)..(1591): unsure at all n locations
caaaatatgcgaaaatgcgaaaagcgaaatgcgaaaagcgaaattttttctacaactttntaatagttaaaatcataaatagggcccggatttttatgtgctaaaaatcctgaaatatgtaataaaatatgtgctaaaaaatgctgaaatatgtgctaaaaacccncaaaaatgccaaaatatgtgctaaaatatgtgttaaaaattgaaaaaataagtgtgtttttgcataaaaattcccaaaaatctcattctttatcatttttagcccatacaacgcaaatcaaatacatttcgaagtgtttggggtaaaattgtctttttttgataaatcatttctataaattgaaagttccagcagagaacttcgaaatccaatgacgaattaatgaattcgagatttcattagtttctacaatcgaagaaaaaattttttaatttgaaaattatgttaataattaggaaaaaagtcgatttttagggggtgtatttttcaattttcttgtatttttattgcaatttttctcaaaaatgccaaaatatgtgcaaaatatgtgccaaaccccaaaatatgtgctaacatattttatgtgacaaaacgccaaaatatgtgtttttatggggatcgacccaattccctaccgccaattccctaccgccaattccctaccgccaattccctaccagccaattccctaccggccgattccctaccggccgattccctaccgccaattccctaccaatgcatttgggccatttccataccaaaagtttaaaaagacagtgaaattaaaaatccaagaaaattttaaaaaatttatttgtttcaaatcacggtctcatttcataatttcgagaaattccgatcaaaaatgtaataataaaatgatgattgaaagggtgatgaattgggaaaatgttagtgtctacgttattaagtggtaaataattttgaaccatcgtgagaattcggcggtctgcttcgcgatatttctttgccttttgcggtggttcttgtccagttgaacacttcgcgaagtcatcatcggataaatttcgatcctttcgcagaaggtcaatgaaatgccaaatcgatggatgtgaacaggcaaatgcgcattgcaggcgtctgttcgcggcttctgaatggttattcgtccggtcatcgccttgcaatgttcgagtgtaaacactccaaatgtttgggtcaaatcgcgggcgtgttcggtttccatcatgcttaagacgacccgtgtagttttcattatgaaccttatatataattaaagaacaataaatagtaaacaatttgtgagattatcaatttaccagtcaaggacgggagtaagttcgtcgggaagagccatgtccagagcaatgattccaggggtcaaatctccaattgggagaaacgcgagcgacgtgacacatcgtgccatttctgcgaatgtcgggtcattttgatagcgctaaaattttcgaaaattcgattttttttgtcatgaattcaactgtttcagcccaaattcagaaatttttttgtgaaaaatgggacgaggtggaacagacatccgcgcacttcagtgaa

SEQ ID NO: 29783 - DNA, 1871 bp, Heterodera glycines
tgtaattgttcaatttatataattataaaaatatttttatttatgctaaatgttttttattttctaccgtattgaaattattttctatttttctgtatatgaatatgtataatgctttttttaaatcattgttatttttattttaaaatttagttgtcttaataattaatttttttcttttcatggcaaatcctgaggttttcgaacgaccacccattatcgaagtttagaattagaataaatgttttttattattttcgtttataaaactttatcttttaattatgtcttttcaagagtttaatttactgaaattatagtgatcatttgctaattgtttttaagacttatcttttacgatatttaattattttttataacaataaattcattgacaacttaaattaactatttgtttatattaattaactatttgtttatattattttttaaatgttaaattcgttttatatttcgaaaaaaattcacttcttatatttataatgaatcacaaaatatattaagatttttcgagcctttcggataacaattcattaaatggttatttgacttatgtaattaataattctgttactttttgtatacgacaaaatgtattacttttattcaagaaataaaacacgtttatccaactactcatctaatatatattcgtttcttttttgttataaattttttattcatgtctagcattttttaaatttatgacatgtttgcgccgtatttttttatttcatttgtgaataacttaattaaatttttttatttttcatgtaatcgtaatattttctgctttattactaatttaattattaattattaggtattaaatgatgaaattagtttgaaatctattgaataattgtgggaatccttttttaagtctgtctgagcactcaatatttgctaattattataaatattattttaatatataataaattttttaatttactgattaattaggttcatggtattaccgcctttcaatagaataataataaacaattaaatttaaatcaacaaataatgaaaataaaatgctctaaaaaagttaagaaagaaaataaagaattgaaattttgaataatataaaaacatattttcaatcatttcaaaagattgaaaatggtcacttttcccttgttttctggatactcaattttcaacatttctttctccatgtaaagaagtcgtagaaccatcattgccaaaggccattttgtagcacattttgtgctctttctgcccatcacattcgtcttccacgaaaaattttttacaacccctaagatttattttttttgacagtcatttttgccaaatagttgtctaactttggataaatttcagtaaatcttttataattttaaacacttatgcaaattcgtttcggagacggtatgccaaagattcaattgaatccgctcaatttggtttaaaaaatgcatttaatttccatgatttttattgtttatctcttcacgttaataaatattagacgatttataatatgtttaaattaaatattaaatttttgttatctaagttaaaaaaaatcattttatttttgatatttcttctgtgtgtgtgcatgttatttaattaagcataattacactgggcattatttggttattctcaattcgtggtacggtatagtattccgcaacatcatcagaaactgctttaattgtaaattatttatttaacattgacaaatataataatttagttttatactcgtttttatatattgatcttataaatatatatatatatatatatatatttggattatattacgttgtgattcattcttttcaaaagaaagttaagactcaaaatga

SEQ ID NO: 29784 - DNA, 1651 bp, Heterodera glycines
tatgcagttgtagcggagctaactcaggggctcgatgcggttgtagctgacatttagctgatcgtaatggcactgattgtgatggtatccgggctggttcagaaagagttgttgctaatggtatggacatgctggcatgatcagaaaatgccgatttcgaactcgaaggtatcaatctttgctgaaaaattgtttgcgttatgtttgacggtatccttgcctgatcaggagtttctgatgtcggaaaagaaggttgccaaacctgatcagaaacgttcggttgcgaactggaaggcagccaagcctgatcaagcggattagatggcatccaaccatggtgatgagtcgtctgtgttgagttcggttgtagccaagccttttcgggtgtcgttggtgctgaatttggtgccaacaaagtccgaactgtttttgttggttgcatcggagtatgttctgacgatgtcgaagtcagaggagaataagatgcccaagtctgctcagacatttttggtgtagatggcactggtgacgaaacaatttgctttgaaaatgcctcttggaaatgcaatttttgcttttccctttttccgctgcttttattgaccacatgcaacgcatttgacaactttgtcgacttgtcaattgtcggacccttcgactttttgttcacattcgcttcttcgcgcactccgtcacaaaatgacggcgaaagtaccaaaatggccaccagcagaagaaaagattttgcggtaacggcactcaatttcatggcattgtctaattggcttgtttttataatttctatgaaatattaatgcaaatataataaattatttgctattatatgtcattgttggaaacggcacattaaatcaattgattgattgatttcattattatgtaaatatgtataaatcacatttaatataaaaaacgcgaattctttttgttttagtaatatttaatttatgaaatctcaagaaagggactgccagagagtaaatgtggaattttaatgaaatttattgacagaaattcaaaaagtgaaattgggtcagaattctagacgcaaagacaggtgacacaggaagagtttggataatttaggaacatatccttaagaagatgtgagtaatggttcaattgaaatcctatcctgcatttttggaagagtaaaactatcgcactcttgagaaccttggaaatttaagtgaatggggcaatattcataactagattcaaagcagagtgatgtggagctattatatatgcataagaatgattattaggccagcaccttatagtgacgaaaaatcccaaaatagataattaaaatagtgagtaaaaatgccacaatagagaagagatagtgacataaaagtggcagatagtgaggaataatgccatcattttcatgcagaaaataaatcaaaataatatatattccctaaatgcagttgcaaatgagtaggactgggatttttaagcccaaaaagcccgagaatagctacctaaaaaatgaaaaaaattaaaaatttgtttcaagaaaggaaatttcggagaaaattttttctcatttaataggagtatatatcgaaaatgaatagcttgattattaggggtgtattaatttgtaaagtttggataggtg

SEQ ID NO: 29785 - DNA, 1416 bp, Heterodera glycines
acaacagcttaaacttaatcacgccgtacctgcagctgcaggcgatataggactttttaaatatacatatgcgcatacgtaataaatgtaccccctacatacctgggaccgtctgctgttgcgcaaccgccccctgcggcggcggcgtggcgcccggcttcttcctcttcttagcagccttcgcagccacgtcggtcgcttcgcctaggacgatcttcagcaactcctggtcctccaacaggaagttgaactcctcgctgtcttcaatctttgccatgatcgcagctttgccaaagagacgcaacagcccctgctgggtagcagacatttgaaggatctgtaaaaaagtatataaacgatacccgtattgactgctgcccataaagatatcaaaaatacccgttgcatgctctgaacatattcgttgcagcagtcctccaaatgctcgatttccttctgcttttccacctgctcctttcggagctctctcttcagcgccttgatttcacggtctcttctggcaaccgcccaacgctcgttgcgcagcgaatcagtagattcgtgccactaaaaaacatagttatattatcatttaacatgttaaaaaagctacatgtttctgcaactgcttcatctggcgcgccacgcgcatcgagcgctcaatcagtcggttgcagagctcctggcgctcggactcttttgctgcctttttgccggtaatggcattcaggtcctgcgccccagcgacgagaatgtccttaaaaaaatgtctatttacacccttgagggaaaacgtgaaatgatttaaatatacgtatacgacaattacctttattggcatattccgataaaggtatatattttagcctaatattccagaactcgattttggactatttttattcttgctcttatgtctttctcccattcccgcttcaatatctctattgcctcttatctctctatcacacgctattaaaccaaacctcctcggccgctgcctccctaacatccctctgctccggcaggaggtcacggagccggacgtagtccgagttctgcggagttcggatgaattcaccacgcgcagccgcctgagcaaccgcccgcgttgatgcgttcttagctttagattccaagaacgcgtcccgccagtgcgcggcatggactccggctcccttctggaagtgccagactaaagttaaaaattattcataatattaaagataactttatcagcagtagccaataaatgtatcattaatataatgtgcttaagcgagcttacttgttgagaacaatctgtgccgaaaagcttccacaggcggccaggggtttgccaccaaccattctgcagccgcccgggattctggcgtgtagtcgcgcactttcccttccttcaggtttcttccgatc

SEQ ID NO: 29786 - DNA, 932 bp, Heterodera glycines
  unsure (1)..(932): unsure at all n locations
ttgaaagagcctataaaatgggaagaaagtgnatttntaggggtgcatttttgaatttttgttttttttcttagatattttttcaaaaatgccaaaatatgtgcaaaatatgtgccaaaccccgaaatatgtgcgatatttatttatatgccaaaatgccaacatatgtgtttttatgtttttataagtcgctctaattcgaaaattgttcggagaaaatgttatttttgggcttctctcgccataactaagccgcagaaaaaatatgtaaaaacataaaaatcccagccctaatcataacccattttatttaatatgaacaaatttaattcataaaggaatataattaacggtttggatatgttcaatcagtgaactttgaaattcaatgatgaattcgatttggctgctttcggcattcgaaataaatttaaaagtaaaaaatgacaaaaaaagttgatttttagaggggtttattatgtttttatgtgccaaaatatgtgtttttatgtttatttatgacttctacaccactcatttgtcagaatacatatcacaaggatggcacggaattccgacattttttgggtctgaattccgatttccgactttcgaaaaatttttaaaatctgaggtgctcattgtcagataagtgatcaacgcatttttaaactagggttgcgaccccgatgtcggggttggaagcgtcggggttcaccaaatcgcttggggtcggggtttttcaatttttgccttatgccatatagtagtgatgctcgagactctcggtctcgactcgagaaaagtctcggtttttttttggtctcggtctcgagtctcgggttttcagtctagatttttttacaccctctaatgattggattttggtaaacttatatttttataaattttaggccattttttgttcattt

SEQ ID NO: 29787 - DNA, 1180 bp, Heterodera glycines
cttttttattcgatttatctttattttcaattaataattttttcacattttttgagctttttgtattattttaccgccacttaaacgaataatttcttcatttccattgaaatagggaagccaacttttttgtcgtatttccataattaattcgatggtcgttttgttgccaaattcttcccactttttgtgcacccatttgggctgaggcaaattgtgaattatcttaaataattaatcgttttaaaattttaattgaataaaatatttccattaaattagttttctattttattttttgtttttgttggtcaataatttgtccattaatttctcagccgacggaatggcatttgcattttggcattttgccaagagttcgcttttacttcgggctttatgtgacgaagtgccaccagttgaaccatttttattggcttttcctttgaaatgttcaggtggggacggacaaagtccaccaacgggcgatatttgtccaacaaatgggcactaatctcatcagcaacaatttggcgaagatgcttataacgcgcgcacggaaaaccggacggatttagcaactgaaaaatataaaataaaatcttttttaaaggataacccaattaatttccgtgcgtaggccgtgccatgtattaaaaatgctcccaatttccaaattaaacaaaaaaaacttaacatattaaatgaacaaagcaattttaatttattggtatgtccgtcccatttcttcaaactctgtctcaccggtgcagtgacaaaggacccacggacaaaggacccacaaagacaaaggacttacaaaaaaataataataataatgcaatttcttaatagatttacaccaaaaaggatctttttcggattttaagcatttttgagaaaaaaaaagttattgaggtccgacggtgccgatttctctcaatgcttatttttaaatctttttaaaaatgcaatattattttgtgggtcctttgagaggacaccatctcaacgagtcgtggttcgcttcccgagtggcgtgtatcgcaattggcacccagttcagtgccgggtcgaatcggtccccgtcggactgtggcgggaacattccgctcagcagcgattgcgcactttccagcgcccgatcgacgtcggtggaacgaattattatctttgaaac

SEQ ID NO: 29788 - DNA, 1280 bp, Heterodera glycines
  unsure (1)..(1280): unsure at all n locations
ccgatttgctccggaacaatttancaaatcggcagaatccattcctatttttcacaaaagggtctatctttgagtccgaacaattgagactcgagcaaagtttaaaagacatgtcaaatcggatgatgcgtcccgagttggattttactgatgtgagatttatggacttaaacctcacggaggcacacggagattcggtagccggacgccccctgaggaccgaatgcttgaacagaaagcatatgtattaaattacatgcccaaaatttaccaagtccatcagaacgagcggaagaaaaagagatgctatttgaacgtaacgattaatgggaaggatgtggaggctctgttcgatactggtgcggacgtaacatacgtcagaaattcaacggcgaaccaatgcatgctcaatgttagacgcggcgatttcccacaagcgcgagctgcaaacaaaacatcgattcgtttcttcggctcagctctggcagaaataaaattgggggaatttgaagggaaattcccgctgctcgttagcgaggatgactgctgcccatgcgcggcaataattggaaccgatctaatggattacataaccgaacaaggcgaggaggaaattggccttaacttcaaaaagggctcggtacgaattggacacatacacctgccaatggtcgcagcagttaccatcgagaagaaaccaattgagattcgtttgctaacaacacagactctgccaccattctccgacacattcgtgtggggacaattgaatcaaagttttgatgctgaaaaaattttcatcacgacggaaagagaacatcagtacttcccactccgggtgggaaagtgtttggccagcccaggctcaacacggaacgcaccattacgcttactaaatttcggaaactgtccgattaaagttcacgccggttcacgattagcgattctggaggcaatcagtgatacaactcaaattaattcattgaaggaggaagacaaaaatgaagacccaaatatcatgaatgaggctgaatggtcaaaatttaaagccgaaatcgatcatatttcaccggaggcagactggacagaccaacctttggaattcccgaaggaagtggagaaaatcaaatccattcttgagagaacatcgcactacatagggtgcccactttaaatatcgattgattttctccgcagagcgcagagagtatgagcgggcatgcccgtgcctattgagtgattgtgcctgcgtctctgacgggtggtgcgcggcgaggggg

SEQ ID NO: 29789 - DNA, 908 bp, Heterodera glycines
cgtattttattttataatatttaaacaaataataatcatttttaaatatataaatataatatacaaatgattaaaaattgatatttaatacgaatcatttaacttatataaaaccaaaaaacaacaaatttatgcaatgaaatttaaaaaaaaatcaatagaaataagttattgccattttaattttaaaatattttttttaaataatttaaaaccagaacaaacaaacttcttcaatatacctaaaagattttaataaagcttcagacaaaaaaataataataattaaaatacaatagaattgcaatagtttttaattctaaaaataataacaatttgtttttatcagttcttctctccaaattaaacgaacagcagcaaaagctttcacgcgacgaggacgagaaaaaaataaaatattttaagaaacattgcagttgaatatatttaaaaaaatataattttaaagcttaattaaatttaaatttatttaaatacaattgaaaacataactaattttcaaagtgacaatcgaaatttaataggccaaacgataattaattaaataaatatttaatataatacaagtttatcaaacaaacattattttaacgttatttcattttttaacacaaatcatccaaaagtatttagaaattattttaataaattaattaaaataataaaagtaaaataataaaatgatcatgagtcaatgtgtaagctaaaataaaattgtaattaaaatcaaaaatatatgaaaaagtttgcgacgattgaaagtaaaataaaagaattaaatattcaatattaagcaataaaaaaaaattatggaaaaatatcaccaaacataagtacattttattaataatataaattaaaaataatatatttctggctcctcgata

SEQ ID NO: 29790 - DNA, 1557 bp, Heterodera glycines
aaaacgattttttagaattttgaatgctcagaacatttgagctcttcgaatatacaaataaattgtactatttatttgttttgagcaaaactaaaaattttactatttataaaaaacactttcattgatgctgatttgtgatccgttataaaaaagccaaaattcatcaaaaagggcgttaaaaaaattgaatgaaagtttgctcaaaagcaatatcgaaatttttttttaatcttttgatagccctcaaaattctctattagcctgaaaaattttaaatattttattaagtgatcttgctaaatgttttcgaatcgcctgcaaatttcaaaaaatttggttaagtttaaaaaaatagagaactgttagggaccatcgaatgatataaaaaattaattgcagttgggtttgagcaaattttgtgagtaaaattttatgtttaaaattttcattttgatggtttttttatacaagataaatagcaccctttcatcaatgatctattttccattgtgttggcatggttttgccgctttctagttagcctattttattgggatttttgccactaaaatcctcaccctactaatgactcacttcattcattgtcagttgggtcgcatccatttaatagcatctttcagtgacctacctattcgtcattccttcatttttatctttgtttatccatgtacatattccaactctctctgaatcaataactccgcttttctcttcccaattttttttttattggtcgttttcgtttagtcgcaatattatggacattgtacccatttttattccaaaaattcattgttattttgctcaaaacaaataaatagtacaatttatttgtatattcgaagagctcaaatgttctgagcattcaaaattctaaaaaatcgttttgtttacaaaaaaaacacaaataaaaaatattttgaatcttttttttgttatagctttttaaaactattaatttttttgaattttaaattataaaaagttgaaattcccattatattaattgaatttaatatctcatgacccctaacactcttctgactctaaattttgaatttccttgcgcttacaaataatttaactaaatttaaatgttcagaaaagcgatggaaatttttgatgaatatattattgttgatgaaaaatcactttcaattaacattggctcaaagttcaatgaagtgactcaattcgctgcaatgtaatttattatatatttaagttttctcattatttttttgggaccaaccgagacgggtaattttggtggtgtcaaacgcataactttctaattaaccacttaaattaattaaataatgtgggattatatttcattaaaatttatgatttttttctcaggtgtttgcctatcgattcttaatatttttaaaattggagatttgatcttgattttgtgaaaaaagaacaagaatatattcatttgaaaataattatttaaagatttaaaaaacttttttttcatttaaaaattttcctgtttccgacggggttcccgtttaaattgacgcg

SEQ ID NO: 29791 - DNA, 1494 bp, Heterodera glycines
ccccccccccccaaaacaaatccgtaaacacatgggtaatggagagggattgggggggggtctattatgtagaagtgaacaaaataagtgagaacaaaagttgttgatcatgctgggaatgggaaggggggggggatcatcccacggtcctaggccattccacatttcttttttgcccatggattgggttaaatttgattgcacacagtgcgatgagggcctgaattgtttcaggccccatcgttactggaagcccattctatgtttacatcgcagcgtggacaatttgacatcatacctcagagaggggacttcgccaccattcccagcgacgacaacgacatcgacaaacgaaacaatttgccctcctccctcttccattcaatcatcacactccattttgctgttcatcctcacatttttcatcttcttggtgttcatcgcgcaggtagccccccccccccacccctcaatcaatttggacttgcccctctttaggctgttcaagttggagcgcttttgcgacgaatggtcaaaaatcgtatcatccaacggaaattgcaaaaacgtcagaagagtgagtgtttttttttttgaaccaaaccaataaaaatttcaaacaatttaaggaatgaaaactcttcgcagtcaagcgggccgccaatcgatgccaatggtggtgaattttggccgggtgggtaaaaactttttattttactattttaaattttcaaagtatttcagactggggacgcgcaaaggactggacaagtcgggggccgccgatcgatgccaccctctgttgtgccggcgaatttgggtggcgtgccgccataccaggtacaaacacaacaaatcccttcgcttccctttcttataccatttttttttaaaaaaggagccgcaaacgcagcgcgaggtgatttacgatgtgcctgcggatggtatgctggaagacgacgacgatgacagtttttgaacgatgagccgatacaacaatgagctttaattcctcataaatttttataaaatttgggaattttcatttcacatttaacaaattttggctaataaatgtaattcaaaatgattaattggcaatttataggagaccactaaataggagaaatttcaaatgttttactgttgggtattcagaacgttaggcgagattaatgctctttacgcaaaattttgaattttaagcatttgatataatctttttgaatgattaatgtgtgatatagtggagaaaatctgtcggtacatcaaatgagcaatttgtttaaaaatgggtcacatccattatcgggaattcgggatgctttggtgcataataaagctgccttgtcgatcgatgaccgatttgttgatggtgatgtggatgtatgatcattttttgggacatttaaaagttggtgctaaaatttgtccaaataaataagtggtgtggaaagtttgaaagggaaaatttaaaattgatttaaataatag

SEQ ID NO: 29792 - DNA, 793 bp, Heterodera glycines
ctcccattttattccttcgttcccctctctgctcgtaattgttcaatgatttattgctacaaaattcctccgaaatttaaatttggcgagaaaaaaggcataaaattaagcggattaaagatttatttgtcggtcagcaggtattaatgcaatcatgggcacaaatttgaaatttgccatttggcgccaatttgcccgtcacttaattagcaattcataaatcattttgttgcgtttgaatttaaactcctctctctctgccctgctgctgatgtccttttcgttcttattattcttctatccgtctttttgtctcaatttttgattcccctctcacctttttttgtcattgtgccattcttggcaaaatgttctgttgccggtttgtctgtcctccttttccgtaccaatttcgccttcctcaaatgcgcagcaacagctgagcaaacaaagaaagtaacaaaagtcagttaaagcaaaatgacttttgttatttcaatttggcacctttgcccaatgggaacagatgggcaaattcattaatttcaatggaaatattggtgagtcgggaggaaaatgatccactggcggacggggtggggagggtgacgacggcatatttggaaaatgatcttcctcccccctcccgcccacctgtcgcccgtcgtccataaattcaaattttggcatttcaaaacgatcacccgtgtctcatttcctcccctgtcggttgccccacccccacttttcattcttcatcatgcccacttcgctgtcccttcctcccccttcc

SEQ ID NO: 29793 - DNA, 1841 bp, Heterodera glycines
  unsure (1)..(1841): unsure at all n locations
ctgagctgctgttgacgtcgacggatcgcccgatgacactgggatcggcaggatgcaatatgatcatttgcaaatgcattgccttgccaccgtgcccatatactggcataatgccccatattgaaattgtctatacccccgatcacttgattttgttctgcccgcgtgtccataaactgacataatgccccatattggaattgactatatcccgatcttttgaattgcttccatatgtattattgctgaggagtgatcgtatataaactagtcaaaaagggagattttcactttgacacttgttggctgtttcgcaccttctgtgttatataaagggggaattatttacagagatcataataatgactattatggcatcctctacatcctctatatgcaatataaccgacttattctcccttagacgacaagtcggaatataccctgaaaccttgagatccgcgctccaaacactgatggttattactggtgaaaatatgctcgcccgcaaaaaccattcatggtcttcattgaactgtcgctttagaccctcgaacagttgcttgagctatgtgttcaaatttggacggcatgttaatacacttgaagatgtcattcaataaactgtccgggagctggtggcttaaacatttagaatagttaaaaaattaaaaatatatatttatttaccctgctggatttgccatgagagattaagcgaagacgaagacaaacaatagccaaatatgccggaaaaaaagaaacttttgtttagactaaaaacaatggcatacgtattaaaaaaaagagaatggaaaatgaatatntggcatntactgaaattgcattgctgctggaaacctaatgagtgtgttcaaaagtgggggcgtcggcctactcaaatcattaattttatgtttccccatcagttcctcagttgagattatcttttgagtactttgcgggtgcatttttgctaggaattgggctgtgccatgtttaacagaggcagagtatcaaagaacggacgggcggggttaatgaggcatcaattaaggcactaattggggcgggggacggaggggtcaaacgcacgtacagtaaatgaccacaataagtcacactaacacaaaacaaaataactgtgacctggcttgcgtttcaaatttgaaaatttaattgatgcaatttaggctattcattaattagattatacacatttgacgagtctattagagagagagagagagagagagagagagagaaaatgggaaatttaaacattcattgtcaggggattatatgaaaaatatatatttgtctattttttagtgtctgccgatttatcattaaaataggcaattttttatgaggcaaattatgcacataatgaaagaagaataaagtttttcttccgaaaaatataaattttatgttatgtatagacaatttgccaattttatattcaaataaatgcaaaaagatgagagaagccattggacaggaggttgagttgggggatcccttccgaccaaacaatttttgatattcggcatgtcaaagaattcgagtgccggaatttgttggtaatccgtggggggggggaagagaaaatgagggctaaaggtaattcaaacgggcgaaaaagctacaaaattaccaaagagctaatcaaagtgatcactttttctcatcaactcattcattttccgtttgtagaacattaccattcccctcccctctctttctctcactctctcactgattaatgtgatcaataatttccaagggcgtagccagacccttgactttgggggggggggggggctgaagtcaaaaat

SEQ ID NO: 29794 - DNA, 1393 bp, Heterodera glycines
  unsure (1)..(1393): unsure at all n locations
cctcagtgctctgtttgtcatcatctcacaatgctgtggttccaagaagaatagggtctttggcttttcgttttctgctaattttgctaatgccatccccccccccccaattaaggctatggaacagttcctcaagcaggagaatctcgactaccaagtacagtcgaccgacttcatgacccaggccaactcattggaggactttttcggcaaagtggtggtggacaacatcgtacaagagaagaaggtgcgtttggcatctgatcaccgatctgtcactgttgatctgactcattgggccttctgttcctgatcatttagggctttgaatttgcatgttttggtgtgatatttgtggtcattgatcacgattatggcatgcatttatgcgcatattccgaatgccggatccgaatcgaacaaaaagtcgagaattcatatttttactcaaaattaattcaagcaaaaattagttacaaaccattatagcatcaaaattagtcatcattctgtacatattttaacatacctacatatatattcaaaaattgggggtttcgactttttgttcgagttccggtccacgaattcggaatagccaaaaggcatgccatcttcatgatcaaaaatgaatgctcaattagctggatatggttaactgattggactcataggatgcattagagctgaattcgagccatgacagaccaatgatccctgaattctgcttgattcgttagtttagtgattctaactttcctctgttttcagaaggcttacgctaaacagccgaacgacatgaagggcatcgccgttaattgggacaaatggcccaacgtcgccagaaaggttgaggatgccaatgtagcgtccaaggtgggaaactgtgtccccatttaaacagtttaataacgcacaattcgattccacagattggcatcaaaccaatggtcgcaaaggcgggcggcgtcactttgttgggtcagtcgacgctggcggggtcggcccacggcaaaacgaaagtgcgttcattttgagggcattttattaaaaaaccaatataattgaatatgttttaagcgcgtttctcagaagaagcccggtaccatcagcaaacagttgggcagtggcacatcggtgacgcaaaaatcttcggcgacggaatcggcggccaaaagtacgacgcaaaaatcttcggctacgctgngccaaaagtcggaggcggaccgggagaagtcgaagaaggaggaggagacggaaaccgaaacggacgaggaggaggaaacgacggacaatgagggaagaggaggaagaaggcgaggaaagtgntgatgagaaacgagacgacgaangaggaggaggacgagggagaataagaagncatggacgagac

SEQ ID NO: 29795 - DNA, 1502 bp, Heterodera glycines
ttattatgtgctattacatatcacttagcttttttaaaattattctggtgtataccggtatactatttttcttgttcaccagttgaatcatcatctcctcttactcattgtaaagaatggaaaacactaaaatttttaattaatttaattaattttctataaaatgcttccaattctattttgtggtcttacaatgtagttacatacttttgttctaaactaggttttttgacaatttagaaaaaaaatgtaatttttaggtcagtcgacggatgatagacctacgtatttcaagtggattttttttatcaaattgatgaaaatagttcaaattgtcccaaaaattcaaccaagaaaattgaattattagaaaaatacatcataaatagtcagggatctgtccaaattgctcagatcaggcattttttttaaataaacccttaccacttgtcaatgtggcgatgaatttccgtgacaacaagtgccaaaacgaaacggaaccggcacaccattacaattgtcatcttcgcaacaccaattggtgttgcatgtcatgccctcagcaggcgaatgagtgccaaacgaacaattttgtgcacaaccataatagaaggctattaaaaaaatttagaaaaattttttgattaaaaatactgtataaaaaagggatgaccaattttaaatgaaaagcataatgcttatcagctgtggatgatctgatcaaaatgctcaagttcgttgttcaccttccaatttggtcggtgaagtaaaatggattgattactaattaatttgttaaaaaacttaaaaatttatggatttttaatatgtaggtcaatttttcaaaatattttaaactttctttttttttttgcccagtaatgtgttaatttgcaaaattttgatcccattttccttgccagcataatgctgatctctgatggatagataatctgatcaaaattctcagcagttcgttcaccttccaattccgtgccctccacttcgtaagtggcattttccggaaacagtttcttatcaatgcgttcgataatggcatcttttgaaatgatgcattgggatttgtagcatttgagcagatgatttgggcaattttttgtcgatttcgttacggaatatgttttcaagggcatatgaatgccactgttatgaaggcccaattcgggaaggtacactttaagttccgcttcggcagaaaagccgtgccaacattgcaactctggaaaaaatgccattattttcaaacgaatcagccataattacgggggtcttaataatatgatgaattatgtccagccctgttcagatgggatagaaatgttttttgtgaacccaaaattaagagttttaacttttttaaatcagctgactaatgtcgtaaatttaaataaaatttaaaaattttcaaggacttttttcaaattcttaagaacacccttagtaattttacatgcataacatatattagtaaatataataat

SEQ ID NO: 29796 - DNA, 1185 bp, Heterodera glycines
agtcaatctcgaaaaagaatagaaaaaaaacacaaaaaatgttatataaatgggaaaaaaatgccgccgtttgtaagattaaaaacaaaaaatacaaaaatcataaaagttaatattgaataaaaataatcgaatttacaagaatactcgaaatcgaaaaaagaaagctcgccgcccataagattaaaacaaacaacataaaatttaaaataaatttacatgaatattgtgtatattttaaaatattattatggaagaaaataagcatttggaggattcatagactgatagcgttaataccgtaatttgtttactgtaattataattaaatattttgtatttaccgtttgcttgcatcgatgccagtttgacccaatgatgtacctcagctttgctgcgcggcaattcctcatcaaacgcgacatggggcgtctgtgatttccacgcatccaaaaaatgttcgttgtgctcctaatgaggaggaagagacaaaatcagccggaacaaaacaaaatttcgccgaggaaattacgtcctggacaaaattttaccgccaaaatttaaaaaataaaataaataaaacttagatttttcaagaaaaaaaatcttagaatttttaataagaaaatttcaagaaaaaacgctagaattttctattttttcatgaaattttcttttaaaaaattatcttagatttttttcttgaaaaatttctgttttaattttttttttaaattcggcgacgaaattttggggcgcacccacatgaactggggttgttttttgcaaattttacattgaaaaagtagcaatttttagttgtttttttttttttgcgatattttgacacggcatgacgatggacgacctggaagtagaatttgatggcatgtagcgagaagtagcaactgctggatggcgactcgtccagctgtgcagcaaccgcggaggagggcggcgagtccgcgctgccaccaccgccgccggcaccgcccttgcgaccgctgcttggcggcttgttcaacgctcgtcgcttgtcatggtacatgaacaccatgtgccgatagttcaggttgatgccggcaagcgctggcccgtcatccgcgtcatgcattgccaaaaatgagtaagccgctgcggccatttgtgtgtaggagccgcgcaaccgcgtcacaaacgggtact

SEQ ID NO: 29797 - DNA, 256 bp, Heterodera glycines
cggtgtcctctgtgttgctggctcggggctcgctccccgggcggccgctcgtgcgggccctgcggtcgcttgcttggtgggggtcgcgcttgtcgtttcccgccttcagtttggcctctctcgtgggggtggtgggtggcggcggttgttccgggtggggggcgtctgtgtaagatggtccttctggggctgtgtccagcgtgattccctaaaatgagtcaattcaacaaatgtagatgtccacagcgttattata

SEQ ID NO: 29798 - DNA, 1013 bp, Heterodera glycines
  unsure (1)..(1013): unsure at all n locations
aaactctaaatcccccagaaacttggccgggactgaactgtccgtcttcatttccccccccccttttcccttccatgcctcttctccctgcatggtgacaattcggctgccaattgtgatcatcccacgtccgtggttctcttcgctgcgcaacatttgcatatcctgatcagtcggcaaagtgatcagagacagtcgtttcggcaccccgcggcgcaacatttggagaaatacgggcaccaaaacggaagacgacgaaacgatggaagagacggcggacgaagaagtggtggtaaaaccttctgaaaaacggaaagcaaatgaacgggaaacaaacttgcaatgccttttggcaaaccttccaaaatcagtggtggcaccaaagtgccattgcaatcgtcgcccgcggcattggcattcagccgaccagcaaaccaacggtccaatcgcttcagtgcttgccgatcacgaagcacaaaaaagggcggcgggctttcacaattggaatttctgtggttggagttgggggaagaaatgtcatttacaaattagtacaaaaaaggaataaatcttacaattagaaggtcaattaaattgcaaattataattctgaccctgtgagggtcctctaaatttaagaaaataacaagaaatgctgctaaaggaattgataaaatcgacaacccatggccccaataaatagcaatttcttggtggctccgcggcacttcaacataatagcccatataaagccccaaagaattgggccataaaaataaaatgaatttgcgtcacctcctcccctctgtcccatttgcggtgtcccattccgacagcagtgtttcccactcgaaagtgaagggatgcgccacgttcagtcccttctccccaaatggaacccttcgattgtgcggtctccgctcgtatttccncctgcacatttagaaaattgagttttatagaaatttcagcccaactttctctgaccatcaaatgtttagcctcggtttgag

SEQ ID NO: 29799 - DNA, 965 bp, Heterodera glycines
tcagaattatcttcctcttgtaacattaattattttttctttataataaaaacgatttcttcactttgggagtgttttttttttaaattttgtaaaaaacatatttatttatttattagtgagtgttttttataattgggacaattttgggtcggttttaattatatttttcggatatttaattgccttctcttcttcttatcgttatttaattcatttttggattttatttttcattaaaattgtccgacgatttccctttccttcggccgaccacaatttgttgcaatttctcaatttgaattcaattgaatgaatggaatggctcctcttctcttccttcgcttttccgtttttgcggtgttttttttgatcatttgtccgtcccatcgttcgctttttcttttctcccattcgttcgttcgtccgttcgtttccctttctttgtccatttctcccccttattttttccaatggaatttaaattcatcggacaaaaaatggcaatattttttctgccgtccgtccgccgattcattcattgaataatccaacatttgtccatcattccgtccgctgatgcccacaaaaagccattttgcagaacaaaaattttcatatttccgctcactcagtgccaagggacaaataaaaaacactccaaaaaatgaaaggccccaaaaagctgcagaattttgtttttgcaatttaaaaaaaataaataaattttctttgtaataattttctttctttttttgataggaaaatgattactgtgaaagtaaacattctgttcaccagctacaatggcttctgccagcccagcggagagcacaaaatgacagagcaaatgtgccgaatcagcgcagaacgaaccgttgggcaacaaattgaggcggtgatgacgtatttggccaatgtacggggcgaagtgtacgaaaatgcgatgtgttgggtgggtaaaa

SEQ ID NO: 29800 - DNA, 1153 bp, Heterodera glycines
  unsure (1)..(1153): unsure at all n locations
atgcgggcccgatgatcncaaatggctagatgcaccgtcacacgtacagtcacttcgaaccgtttaaaccatacaatttttccctttttaagttcttaacgtataaaatggtttcattgtcaacatgttcttccaaataccgttgttttatttagaaattcctaaaaacaattgttatttcagatccaattaatcagtgttgcaaggaccatgacaagtatgtttgaagaaattatgaaaaaaaacgaaaattttgttgaataagatgaaaaataatttattaatgcactccaaaaccgaagcgcctcgttgtttaagtttttttagtcccataaagtataaacatatgaaaatgaagaaaaaattaaacatttaaatgctttttttcctgaaatttcaaaatgcttcgattaaaaaaaaagtttcaatttttcgattagacaaaattgagggaaaaaaaatttttacatgagtgataaaacgcatgacaaaacaacaaaaaataaagaaagactttgccaatcgtatataaaatttataatagatttgactaatagaaataacatgatgaataatacataattgataaaatacaaaacaaagatttgatttagccaatgaagatagtgacactcacagacagaatgtgatctttttatgtttagagggataattaaaaaaagaaattttacattgaaatatttgatcagaaaccctcgataattgagtattttcttatgtgctttcatgatcatttaggtgttgtaatgagttggtagaaggttggacggagggtcagccgaaggaacgaaagaagccatgcgacccgatattttgtaaatgcttggaggttcattaaaatttcttgacagcaaattatttataaaattaaaattttgtataattaacagaacgcagctgacggggatctaatatgtctgggcgttctttcggttttttgcactacaatgatggctacctttgataaatcttatcaaagatggttggacgtgagtttaaaagcaaagccaaagagcgcaattttattttgtttttaatttagcgcgttgaccggtgccgaggtttaaagaaaaaaggggggtttttaaattttcgaccgaaaattctttaattcaagaagtgacaacaaaaa

SEQ ID NO: 29801 - DNA, 1692 bp, Heterodera glycines
gttgaattaattaattacgaattgcccattaaatagttggcattttccattaaatacataaatttcatttaaaattttttcattaaagtgtttgttatatgataataggggctaaaataaaaaaaaataataaataaaaataccaaatagttttttcatttctcggaaaaaaattatttagtgttttttttatttttaaatatttatttctatattaattttttgttcgtgtcaaattgttattaaaaaattcaaataccatcttattgaattagaaccctcggggctctattttcaaccactcctattttcgaatttttagccaatggaatgaatcgaacagccgttcccgaagagaatggcaaaatggagcacacttttgaacgcatgggcaacattcagtggggcgttggagaattggagtgggaggcatggatgcgccagttggacggaaccgtaattaattattatgtaataattaaatttaattttttaaattttttccaattctaagggctaccaaactggacacaagtacagattgccaattctgctcgaaccaatgacgaaaaagaaatgaatgaacaattaatacaatagagagatatttaacctaatgcaaggatattaattctataatttaatataataaagtttttttcgatttattttttataattaattaatcattatgttggggcattcaatttgttaatttgatgaatttttgccttttaaacaatttttctgcagctttgtctcgttgagaaatgaataagaagcactttttttgcctaacaaaatgttggctttcaaaaacggcacaatgcccaaaatccgtgacccttacatcttaaataagagattgttaaaaaataagaacaatttcattctttcgagaggatttttgcaaaataaataaaacctaaacgaatttttttgctacatttattgttttttgtttttgcctttttgagttgaattttataaaattttaaggaaatttgggaataggttggaaaattttggttttgtgttatgaaaaaaaaaatttcttttcctcaatacctatacaataaaaatgagcaaaaaaaaacaataatttggagggaaaccaaagtaaacaataatgaaacctaatgcacaaatcattaaggcccaaaaagtcgctgtcttagttcttgaaagttaacccgagtatcgaaccgatactcgagaacgagactctcggacagcgctagtgaatgtctcacccaaaaagtgcattgagacggagaaatttggattaattgcgggggctaattgtaagtgtcgaaataaattggcaattttgctaatgaaaaacaaaaaaaaaaggaagtagtgggaggattaactcaaatgcgtaggaggcccacttttgcataaacaaaattaaaaaattagagtaaatgaatgaatatgtcaacggaaaaagtaaacaattttttaatcatattttatttttaggcatttaatttgttgtatttccgaataatgcgcgattacgaatttttacgggaagtttacaaaggcataacccaacataaccaagtgttggcaaaagcttttgacataatggaccaaatccattctgaaggcattaaacatccaatcactttgctttttcaacgagcagtaaaatttaataaatataaaaataatttaaaataa

SEQ ID NO: 29802 - DNA, 1133 bp, Heterodera glycines
tcatattttttgctaattgagcagaagcgtaccaaacccccacagggatactccccggtaaaggactaacttacactgaacttagcgccgagctagctggctcaaaaaaattttcgaaaatctgagtctttcgtttttatttattttttgcaaaattaattcttaaatattttttcagaaagggttctgaaacgcaccaaattttatttacatgttagtttaggcactctgatgctttttctatcaaaaagggagatgaataaaatttttaaaaatttttaattcctttttaaacaggccaaaaagtttaggcttaacttttttttcagaaactgatcagaagcgcaccaaactttgcagggatactgaaaggaagagaaataacctattttaaatattatctagtcagttcatttaaataatttttatccaaaaaatttttttttgggttttcggggcagtccccctgaaccgatgcgcccagatttatggggagaccgaatccttcgggaatagcttccctatagcctgtactttaattctgcgttggatttttgctccccataattgtttgagtaccccaaacggacacttgaaaaaatcgatttttttgttttcggggcagtccccccgaaccgatgcgcccagatttatggggagaccgaatccttcgggaatagcttccctatagcctgtactttaattctgcgttggatttttgctccccataattgtttgagtaccccaaacggacacttgaaaaaatcgatttttttgttttcggggcagtccccccgaaccgatgcgcccagatttatggggagaccgaatccttcgggaatagcttccctatagcctgtactttaattctgcgttggatttttgctccccataattgtttgagtaccccaaacggacacttgaaaaaatcgatttttttgttttcggggcagtccccccgaaccgatgcgcccagatttatggggagaccgaatccttcgggaatagcttccctatagcctgtactttaattctgcgttggatttttgctccccataaatgtttgagtaccccaaacggacacttgaaaaaatcgatttttttgtttcataaatattttttcagaaagtgct

SEQ ID NO: 29803 - DNA, 743 bp, Heterodera glycines
  unsure (1)..(743): unsure at all n locations
aaaaattaagaacntcggttatgaaaaagtattttataacatttatatactcaaaaaatccgcaattttttgctctattttcttattttattttagctttttatcacttttttgaaaaaagttatagaaataaaagtgactttggaatttgggaccacaggggtgtgaccatgatttttgagtggaaaatttttttcaccaaaaatcttccaaaaatatgattttaggggttatttgggccgctgatcacgaatatgtaatcagattttactttagacatggttaagacctcagaatcccagtgttattggggattcttaggggtgggagcgcccgtcctgaggccgcgaagcggccgaatgtcccccaaaaaatttaaaaacgggcgcgaagcgcccgtcctgaggccgcgaagcggccgaatgtttcccacacaattaaaaaacgggcgcgaagcgcccgtcctgaggccgctaagcggccgaatgttccccaaaaaattaaaaacgggcgcgaagcgcccgtcctgaggccgcgaagcggccgacccacacaattaaaaaacgggcgcgaaccgcccgtcctgaggccgcgaagcggccgaatgttctcaacaaaattaaaaacgggcgcgaagcgtccgtcctgaggccgcgaagcggccgaatgtttcccacacaattaaaaaacgggcgcgaagcgcccgtcctgaggccgcgaaacggccgaatgttccccacgaa

SEQ ID NO: 29804 - DNA, 1092 bp, Heterodera glycines
  unsure (1)..(1092): unsure at all n locations
ttgagtcccagcgattggaaagcctgagaattgagtctcagagattgaaatgctggtgggttgagtcccagagattggaatgtcattgaaagttggtgggttgagtcccagtgtttggaatgccggagatttgagtctcagagattgaaatactgatgggttgagtcccacgattggaaagcctgagaattgagtcccagcgattggaaagcctgagaattgagtctcagagattgaaatgttggtggattgagtagagattggaatgtcattgaaagttggtgggttgagtcccagtgtttggaatgccggagatttgagtcccattgtttggaatgccggagatttgagtcccagagattgaaatgctggtgggttgagtcccagcgattggaaagcctgagaattgagtctcagagattgaaatgctggtgggttgagtcccagagattggaatgtcattgaatgctggtggattgagtcccacagattgaaatgctggtgggttgagtctcagagattggaatgctggtggcttgattttcagtgattggaatgtcattgaaagttggtgggttgagtcccagtgtttggaatgccggagatttgagtcccattgtttggaatgccggagatttgagtcccagagattgaaatgctggtgggttgagtcccagcgattggaaagcctgagaattgagtctcagagattgaaatgctggtgggttgagtcccagagattggaatgtcattgaaagttggtgggttgagtcccagtgtttggaatgccggagatttgagtctcagagattgaaatactgatgggttgagtcccccgattggaaagcctgagaattgagtctcagagattggaatgctggtggcttgattttcagtgattgaaatgttggtgggttgagtcccagagattggaatgtcattgaaagttggtgggttcagtcccagtgtttggaatgccggagatttgagtcccagagattgaaatgctggtgggttgagtccacagcgattggaaagnncctgagaattgnnagtctcgagagattgaagaccnntgcaggcnnatgcaag

SEQ ID NO: 29805 - DNA, 880 bp, Heterodera glycines
ttgatctaccctctgcattattttcattatttgtatcatcttctttaaataaaagaatttcagaattgataaacacaaaaattataattttattttagaacattgctatgaaatatttgttagtttttaggctaaaatctaaaacattttcgaaatgaaggggccaaggtgataataggcgctaccagaaaaaatttaaaggtgcaattaatataattcagactgcttattttgttttattttaaaaagaaaaatttcaaaaggtagttaaccctggcagggttttttgagaaatttttaatttattcaaactaagacttatcatcaaattggaaatttttgtctgtggatatccgtattttagcatgcctgaaataattctcaacgatacaaaaaaatagtaatttccagagtaaaataagttatatatatatatatgtctgtacaaaaaataatcattttttaaaaaatggccaagacaaaaaaattgccaccctactcttttaacaaaatctttatttatttttagactatttcatttaattaaattttaacgtaaaaaatttaattagtatcccaatttccccctcctttatttttcattgcccacctctttcatcaaagagaattctgcacaaaatttgtttgattttttcatcttggatcattcgcacaaagaatgggttcatcataaacgcttccaaatccaaagttgtggcgccgtctgtccgcttttttaagtgcatgtcattttgaacggcaaatgccaattgtgtatcgtccaatgggcgttcgatacgcgcccattcgatctcattgacaaccatttcgcccatgttgaacaccaacaatttgctgttgcttttaccgttccgtttgt

SEQ ID NO: 29806 - DNA, 945 bp, Heterodera glycines
cccgtttttggcatttcctgcattcatcatggcagctaattaagactgatcaaactgatcagcagcactgatcaacagaatatcatcttcgggataagcgctgttttttttgcggatcaacccctttccggaaggatcaatttaaaggaaggaacccataattatgaggaaattcaaaaaaagaaaaaaaaatgctgctactccatccaagcatgatgctgctgatccatggcgatgatgatgatgtacatagttgacgatgaatgaacgcacttttcaccccgctgctggtgtcttccgctgctgatcatcatcatcatcatcacctacggtcggtcggtgggtcggttgttttcatggagtgcggtgcggcgcccttccgccgctcgtcgtccgtcataattgctctccatcatcatcatcatcatcatcaacctcatcatcttccacttccatcctcatcatcttcttaaggacgtcgtcctggggctggtcgtggtgtcccgtcccattctgccagcaccccccccccccccgctctcccaattctttcttcttccatcctccgccgccgctacaccggcggaagggaatgaatgatgagtggggacgtgcaagccccaacaaaagcgcgccggaaaattcagtccctgcaaaattttgttcaaaaattttggcggattttaccatcggcgaacctttccttagaatttttgatggcgaagaagagaaaaatgctgcaatttgtctatccaatgtcgggttgtcccgagtattttttgggtatttgaatccctgtgacttggtgccaactggtcaggactcaaacggcctgttggccaatcacggaaagggaatcaatgtttgtttgtgcgtggatgggaggggggggggagagggcctcagttgtccgactcgccaaggacacaccctcatcatgaatat

SEQ ID NO: 29807 - DNA, 968 bp, Heterodera glycines
ccccataattgtttgagtaccccaaacggacactgaaaaaaatcgatttttttgtttccggggcagtccccccgaaccgatgcgcccagatttatggggagaccgaatccttccggaatagcttccctatagtatgtactttaattctgcgttggatttttgctccccataattgtttgagtaccccaaacggacacttgaaaaaatcgatttttttgttttcggggcagtccccccgaaccgatgcgcccagatttatggggagaccgaatccttcgggaatagcttccctatagcctgtactttaattctgcgttggatttttgctccccataattgtttgagtaccccaaacggacacttgaaaaaatcgatttttttgttttcggggcagtccccccgaaccgatgcgcccagatttatggggagaccgaatccttcgggaatagcttccctatagcctgtactttaattctgcgttggatttttgctccccataattgtttgagtaccccaaacggacacttgaaaaaatcgatttttttgttttcggggcagtccccccgaaccgatgcgcccagatttatggggagaccgaatccttcgggaatagcttccctatagcctgtactttaattctgcgttggatttttgctccccataattgtttgagtaccccaaacggacacttgaaaaaatcgatttttttgttttcggggcagtccccccgaaccgatgcgcccagatttatggggagaccgaatccttcgggaatagcttccctatagcctgtactttaattctgcgttggatttttgctccccataattgtttgagtaccccaaacggacacttgaaaaaatcgatttttttgttttcggggcagtccccccgaaccgatgcgcccagatttatggggagactaagtccttcgggaatagcttcctctatagctctgtactttaatt

SEQ ID NO: 29808 - DNA, 863 bp, Heterodera glycines
ccccgagggaatgttgacgatgaatagaggcggggatttgcctttggatgggcggcggaagcacagtttgttgctggaggggaaaagccgacgacgaattctgaggcggcaaactgcgcggcactgaaaaccaattttatatgatccgatcagtcgctgaacagtttgatcctccacctgacgccgccgtccttccccgcgattctacgcccatttcgagtgactgatggccatccgatggcattcttcattacaagaaaagtgattaggaccaaatgcttcttcttacgctgttccgtttatgctttgtcccatcattggcgttcgcgcggaaagtggtataagatattcaagtaaacgaataattgtaatgaaattatttatgcaagtcggtcgaggtttaccagttactttaggaaatggaacattttcttaaattgctttggcagaacgcatcaaatatactaatatttgaattgaagaatgaattattagtgaatgcatattatttttaaaaggtgtcggaggttcataaaagaatgctggcctcaaaatggcatgactcatggcaattaacccaaactaaggtaaagacaacgtgtcataattaacagagagctaaacacacaaatagttggtttatctttctttataattggccatttaatcttagtcaatatcgctccaaccgagagcaaagaagtgccgagttttcggtaaaatgtcttgcgcggaaagtggtataagatattcaagtaaacgaataattgtaatgaaattatttatgcaagtcggtcgaggtttaccagttactttaggaaatagagcattttcttaaattgctttggcagaacgcatcaaat

SEQ ID NO: 29809 - DNA, 1964 bp, Heterodera glycines
tattgggttgtaacataaattctgtcatagttgtgaatttatttatttgtatatttttaaaaaatgtcttcgtttttcatctcgttgcttttgcccaaagactggggagcgacgaattgttttttcttgttgtttgagcccaaagactgggaacaacactcgtcaattgcttttctcttcgctcaaagattgagataaagcgactacaactcctttggatacaattcaccgcaccagttttcgagaaccaagacggttgagaaaagtgtttgaattcggcagaaccaagacggttaaaccgaagattttgcgtgaaaaatttgagaaccaatacggttgaaaacaaatggttattacacgctcgccaaacttaactcgccagagaacccgacagcagggaataattttgaacaacgacgggaatcaaattcgggcaccggataacgagcaacaaatttagagatcatgattccggcttcagagcaaaatgaaatgagaaacctgaattagccgattaatcccgtaaatgatctttcaggagacggcagcattttgagtgaaacacagctgataaccgacttttggaagtggacccgcacgaattaaaccggcagcgaacgaagaaaggatggtcgaacacttagcgttggtggcgccaatagtcaatgcaggtttggggcgtctcgaaaattttggaagaaatatgggagaaataaatggcggcgaaataaggaatttgccaccaattggccacctttttgaaagaaatggagattttgaggatagttgggttcgggaaagacctccactgaactcaccgctattcgagtcaattcgccacgcgtatttgaatgtgggtagagccgaaaacaggggtcatcatttaccgccgagttttccaaatcgtgccgtcgaagcgtatgccaccggtggtcagccaactgcacactacacgcgagcccacgttatccaacaactgcacacgttctatacgcagccgattgcagtaaaaccgaccgtagtgcaataccaagcccatttacagcaacaatttgctcccgcggcaccaaatcgcatccatagtcctgtctcagcaaatttcaaccgtgatgcgaacattggtcgaaaccaacaaccgcagacttttcaacataaagaaaggggccaacaggtccacaaacaaattgcttatgcgagtcatgaccatttgccattccaaaaaggcacaaactcccgggatggaaattttgggcaaataaaccccgtgaatgaacaaaatcgttactatcagagtaaccaagtcgaccccaacatgataatggcgcagaccattaaaagtcttgacaatttctcgtactcaatgacgctccaccatttgccagagctgagaggaaatgccggagcggacgaagtgaatgtcttttttcgccagttggacgcagttagcgaagattggcccaacgataagcgcttaagcgccgcgttaaagtcaaattctcgggtaggtcagaacgcgcaaccaattccgccgttgccaacaatcccttccggtatgaaaatatccgaagagcgatgaaacaacaactcgattcaacggatgcgaagtcaacctgtgcttttgatgagttgatggcaggtgtccgcagaaggaacggagaaagcattgacgatttggcggaccgagtctcatcgttagtgcgaagggcataccccgggctcggcgaacattcatatgatgattattcgatccgacacctcatccgctcactcaaaaatccggatttggcactcactttggaactggcacgcaaacacgatatgatcttcgacgaattcgtggccatggcagctcgcgcggagatcacacaaaaattcgcaaaagcagccgagcaaaaagacacaaattttcgccaaaattttgatcagcgtcagcaaataaatttttgaccaccgaatcagcccga

SEQ ID NO: 29810 - DNA, 828 bp, Heterodera glycines
ctgttgcaaatggcaaatgtcgaccattgggccattctttgccggacactttttgttcagccaaaaagtcagaaacagagaaacggacgatacaaaaaaaacgaaaatattccttattacgagaagaaggttttttggacgaaaatttcctcaaaaagttgctattcttcagggattcttgaaaaaaggaatattagtcatttaaattttcgataaacacccgaaaatctccctaaaatttgctattttttgctaatcgttgttgtttcagttttctcggaattcatcagctgccagagaaaactgttgtctgatgttagccgacggtgtcgtcccccaaatgcgacgacggacagtggcgaaaagccaaaaacgattggccttttttgcagtcaaatgaatgcctacgcaaaatgctaccgacggactgcacaaaagtgcacaaaaaatgcgacaatagtaagagaattggggggggggggggtggagggtcatttgtttttgatggctccaggaaaattcgcacagtaatacagtattctagaataaatttctgtagcattaagcattgtattttgtataatgaggtcaaaaatataataaaaacctcacaaacaacgtgctaaaattaaataaaattttgaaaattgcccaaacccttaaaaacaaaatactgtaattggcttttgttaatttttttcccatatgattttgaccgattgaccaactgataatgaccgacgttttgattttttattaatcgatcgcatcaattagtcagtaattaatccgtgctttgtgaagatttcacgccgcctttccgatgca

SEQ ID NO: 29811 - DNA, 1256 bp, Heterodera glycines
  unsure (1)..(1256): unsure at all n locations
ggggacctctagagtcttaatcccgcgggagtcccgatcccgccggactcttccataaagagacncagngacnnggaganncacgggaagaacccctatacccatnnaaaaaacgatggagaggaaacgagnacgaanccaaaaaacccaaaaanaanaggggcaaaaagacaaaaagaaaggaaaacacccaacaccgccannncacnngaancaggcgggacgcaaccggannnncaacnagaacatgggggggggggggggacaaaacgccgnaaagggaaaaccanaaaccggaacgacggggggccaaaacacgccggaagacccanaacccacagcggcgcccaaaccggcnnaaanacncaanannnncacangggccnngaaaannaannacgagaaannnnnncnanncnananngggaaccccagnnnnaaannncaancacanaaaaannnnnnaaggacgggccnngccannngagagngaananngcngggnaanaaaaancaaaaaagggnaannngannnnnannnaaannnannnncncacnnnnncnncncccttttcctcatcgctcgtcactttttccttcattttggctcgaagaattgggctttcatagttcagtttcactaagttttgttccttcattgtttcaatgttcagtgttatggatttctaaaatttaataaaatttaaaaataatttaatttaaattgacaaactttggccatttttgctggtccgaattcaatgcgaatgttttgccaaccttttaaaatatttcggtcaattttaattacacttttttctccctcccaatttgtttttccgttttggatgacttcttcttttgagtcaatttctttcaaagctttgtcaacatctgtgagaacagtgaccaacacttcgtattcattggcaggtgcaaattgaaaggtcaaataatttccatcaccacaaaaaactttggcaaattgtaacacaataattaatgttgtaattagagttaatgagcagctcatttttgtcaaaatattttttaattttaataataatataataataatttcagttttgcgtaagtgaataatagcaaattttatgtggcttgaaaatcaatagtcaggcgctatttgaaaatggttttgaattttttaaaatatttatccattggtaagcattaaaatataataatgacgtactttagccctaacactcagtcgacaaataagttcactaatgtat

SEQ ID NO: 29812 - DNA, 1150 bp, Heterodera glycines
  unsure (1)..(1150): unsure at all n locations
aaaaaaagagatagccatttttttggacggtccataccctcacatatactcaacggnnccgaaaatcatttttagagcataacaactgatgacagccactgtcattgtttccaaagagatttctattaccagattgccaaaaaaagagatagccattttttaggaccgtccatacctcacatatactcaaacggcccgaaaatcatttttagagcataacaactgatgacagccactgtcattgtttccaaagagatttctattaccagattgccaaaaaaagagatagccatttttttggaccgtccatacctcacatatactcaaacggcccgaaaatcatttttagagcataacaactgatgacagccactgtcattgtttccaaagagatttctattaccagattgccaaaaaaagagatagccatttttttggaccgtccatacctcacatatactcaaacggcccgaaaatcatttttagagcataacaactgatgacagccactgtcattgtttccaaagagatttctattaccagattgccaaaaaaagagatagccatttttttggaccgtccatacctcacatatactcaaacggcccgaaaatcatttttagagcataacaactgatgacagccactgtcattgtttccaaagagatttctattaccagattgccaaaaaaagagatagccatttttttggaccgtccatacctcacatatactcaaacggcccgaaaatcatttttagagcataacaactgatgacagccactgtcattgtttccaaagagatttctattaccagattgccaaaaaaagagatagccatttttttggaccgtccatacctcacatatactcaaacggcccgaaaatcatttttagagcataacaactgatgacagccactgtcattgtttccaaagagatttctattaccagattgccaaaaaaagagatagccatttttttggaccgtccataccccacatatactcaaacggcccgaaaatcatttttagagcataacaactgatgacaagcactgtcattgtttccaagaaatttctataccagaatgccaaaaaaaaaaatagccatttttttggaaccttccatacctcacatataatcaaac

SEQ ID NO: 29813 - DNA, 1001 bp, Heterodera glycines
aataaataatttaaaattattttttagaaaaattacccttgtgttgtgttgggtactaaaatttgtattccgaaatagaggctttttaaataaatatatggaaaaaccaggggaacaattccataaattcatgaaccaaataaataatttaaaattattttttagaaaaattacccttgtgttggggtactaaaatttgtattccgaaatagaggctttttaaataaatatatggaaaacccagaggaacaattccataaattcatgaaccaaataaataatttaaaattattttttagaaaaattacccttgtgttgggtactaaaatttgtattccgaaatagaggctttttaaataaatatatggaaaaaccaggggaacaattccataaattcatgaaccaaataaataatttaaaattattttttagaaaaattacccttgtgttgggtactaaaatttgtattccgaaatagaggctttttaaataaatatatggaaaaaccaggggaacaattccataaattcatgaaccaaataaataatttaaaattattttttagaaaaattacccttgtgttgtgttgggtactaaaatttgtattccgaaatagaggctttttaaataaatatatggaaaaaccagaggaacaattccataaattcatgaaccaaataaataatttaaaattattttttagaaaaattacccttgtgttgggtactaaaatttgtattccgaaatagaggctttttaaataaatatatggaaaaaccaggggaacaattccataaattcatgaaccaaataaataatttaaaattattttttagaaaaattacccttgtgttgggtactaaaatttgtattccgaaatagaggctttttaaataaatatatggaaaaaccaggggaacaattcccataagtcatgaaccaaataaataatttaaaatttattttttagaaaaattacccttttgtgtgggtactaaaat

SEQ ID NO: 29814 - DNA, 1102 bp, Heterodera glycines
ccagcaatttctgataattttccgactgaaagcgagcaaaacgaagatgtgtttgttggcgaaaatgaaaacaacatttcaaagcttgacttaacagaacctgatgcatcatttttgcgttattaccaattcaataagggagacaaaaacgcaaaatgtcgaatttgtggagttaaaatctcacgcaaagggcgaaacactacaggaatggacaagcatctgacacaacacaaaaagtcttaaaattttctttcatttctaagttgtttttcaggtatcacaagatgtatgctgccgcaaaagaacaaaaagttagtcaaaaaagaagtgcttcagtatttaatgaggaatcatcttcccaacaaccattaaaacaatatctactagttctatagtcagcggtcgtcaataaaaaggaaaaatgatacagaacaaataaacaccccgataaataataaataacaaaaattgaagaaaaacttttggttaacaaattacacttatcggaaaaagattgcaaattaactgaacctaattgttaacaatgtttcggtgtgaagttagtatagaattaatgtcaagtatttttgcgtgtctctgctcaaacaaagaattgatccacatttgaatcggcgaatcaagtgtcaatttcaaatccgatccgattattataccggccaattcaccggcaaggttcagcactgctcctccggaacttccaacgttgcttcccggagttcctactaaacagcaaaatttaataaaaaatcaatgtacaattttttttacatattccatttccaacttctccgatgattcctttatcaaagcgagggccattattttcagttccatagggataactcttaaatatgagagttaaatggtttttgacagggttggaactcgaatttcagggaaaattctgagcaggatagaataaaacatgaaaaacccaagaccgggaccgacttctctttttggctggaaccgtgattagtacaaccacttttttagaaagtaagagtaacctactatttcaaaatcaataatttgatcataaacgattatttacatacgacgataaaaaaggttgctccct

SEQ ID NO: 29815 - DNA, 1368 bp, Heterodera glycines
taaacaaaaaacaaagagctgctgtctgtcctccggcgcgcctccgtttttgcgctttatcaacagacagacacaacaacggaatacggggtgagaaatagtgtgtgttctatagggagaggggaaagaagcagagggaggaaatattgcatgagacagagaaagaggcgaaaaattggacacgtatacataaagcatcacagcaatttaaacaaatgaatgaggcgcaggggcgggtcgccatttttaaaatgtgtgtcaacactcatcaatgaatggttagcagcaaaattaatgatgaggaagaagagagggagggagggagggggggatcaaacagacataatgagagagtacataaaaagtggagagaggggaaagcagacaaaaatttattgaggaaatagtataaaaaatacgttgaaaaagaaagagaaaatagagaggacatacttacataaacacaaaacaatgaagagaaaaagaaatttgttttttatgatggcgtcgtctctgtggtcattcctttttttcttaaccaatgcaacaattttcagcagtgtgtgttctctctccattttctatttctctgtctctctctatacacatattacaaaggggcagagaaatgaggagggaaaggaaaagggaagagcataatttgagaaaatagtacatggaaccagcaagcaaagcagagaaacagagaaattgaaggaaaaggaaaaaaagaagcatactttgagaaaatagcacacggaatcagcaaggaaagcaaagaaacacagaaattaatggctgacgcgactgcctgacgcagtttgagtgggtgtgtgtgtgtgtggtggtgcaacgcggcaccggttgacaccgctcgccaccccgtgtcggccgcgccgcgccccgccggggtctcccaccagggacggcgagcgggcgggcgcacatattcagcctcaaaatgtgtgcggcgccgcgccgaagcacagcggcagagacgcagacagacatgtagcatgcttctttttctcttcattttggctgctatttccgtcattttttacttccctgcactcaattttttttgttggttgcacagcaaatgcttgggaattcaaaattttcgctccgcaatcgccgcgcctattttctctcgtcagcgctctctctctctctctctctctcacttctccattcattcaatcattcacataggtatataagccagtgggtgtgatcactgatcagcggagagcacacagaaatggggggggggggggagatgggctctgtgaacgcgtaagggaagcgcaacgattgtgaaacaaatggaggaaatgaatcgactgctgtagagggggggggggg

SEQ ID NO: 29816 - DNA, 976 bp, Heterodera glycines
  unsure (1)..(976): unsure at all n locations
cgaaggattcggtctccccataaantctgggcgcatctcggtctccccataaatggggggatcggtgcccgaaaacaaaaaaaatcgattttttcaagtgtccgtttggggtactcaaacaattatggggagcaaaaatccaacgcagaattaaagtacaggctatagggaagctattcccgaaggattcggtctccccataaatctgggcgcatcggttcggggggactgccccgaaaacaaaaataaatcgattttttcaagtgtccgtttggggtactcaaacaattatggggagcaaaaatccaacgcagaattaaagtacaggctatagggaagctattcccgaaggattcggtctccccataaatctgggcgcatcggttcggggggactgccccgaaaacaaaaataaatcgattttttcaagtgtccgtttggggtactcaaacaattatggggagcaaaaatccaacgcagaattaaagtacaggctatagggaagctactccggaaggattcggtctccccataaatctgggcgcatcggttcggggggactgccccgaaaacaaaaaaatcgattttttcaagtgtccgtttggggtactcaaacaattatggggagcaaaaatccaacgcagaattaaagtacaggctatagggaagctattccggaaggattcggtctccccataaatctgggcgcatcggttcggggggactgccccgaaaacaaaaaaatcgattttttcaagtgtccgtttggggtactcaaacaattatggggagcaaaaatccaacgcagaattaaagtacaggctatagggaagctattcccgaaggattcggtctccccataaatctgggcgcatcggtttcgggggggactgccccgaaacacaaaaatcgatttttggataaaaatccgtttggggaactgaccaattatggggagcaaaaatcaacgcagaat

SEQ ID NO: 29817 - DNA, 1372 bp, Heterodera glycines
  unsure (1)..(1372): unsure at all n locations
cctacaaatttatgtttgtgattgatcgctgtttcgaaaacacaatcaattttctattatgcttattacatgcaaaagaagacaaaaaatgatntaaaacattcatttgtaataaaaaaattgcatgttttaaaaacagtccgaaaaaatttctgcaagaaattacataagaaattaaaaaattttttaatttctgagtcgggattgagaatcgaaaataatgatttatttattacaaaatataaaattatcaatttgatagtccacaaacaaaattttaaatctattggtataaaagttaaattcttgtcgcgtttttgtccagcctgtggtgtttggaaccaatcgataatggagtgtactttgttcactcatttccctttggcatatttcctccccacatataagcaagcgatggtttccctccctccctcgttcattctgttctttctcccatttatttccttcaattgcaattcccttcgcttgagcattttattattatatttgtgctccaaataaatattcgttttattcatatctgttgttctcggacacaacagattttgtcgcagtcagtggagcaaaagcgaactgaagctgagcggcgaaagggctgagaagcaagcaaatttggattgctaattccgggacggaatagcaattttccaaaaatcgtcaaaggagagaaagctaattcctagttggaatagctgttcacccaggtggtagcactctcaatttctggtgttaagccagggcggataactgccagcgacggatcaccgaatttggagtaattcgagttaaataacagttgaccagcaccaattttcattgttaatccggtacggataacaattgaaatcactgtaaatcaagacggattacagttgatcatcatcttaagtttgatccgaattggacaaattaagaaagacaaatatggcagcagtaacaaatgctggaaaaggcccaggaccatttttgccggagatgtgttgggcaacatggtggaacggttcgaattttcatccagctgaaaggcgtgaccgatgctgcaacaaagagccttctcctgttcaccgaaatgggtcaggtttatgaagaggtgcgaagaatggcatagcctgaggattccgaaccatggtcctcaccgaaattgaacaattgatggtggaacgatttggcgaagcaaaaacgattgccaattgtaggcattaattgttttagccaagcagcagacagggcaatcgataagggactattcggtgcagttgcgaagcttgatagcaaaagcagaatggagccgcgacagcattgacatgtgtctttgcgcattgtttatcatggcatctcaaatgatgcaatt

SEQ ID NO: 29818 - DNA, 1951 bp, Heterodera glycines
  unsure (1)..(1951): unsure at all n locations
aatttttgtacaattattccgtctaagcttttatttatttgccattcattcgcttttcaaatgnncaattgtaaaataattcattaatggcaaatttgtttcgtcataattcaatctgtgctcattcaacaacttggtttcaaaaatattgtcaagccatttgaacagagattntaatttatattcataatttttattccaagataatntaaaataaaattgcgaaattttcgccagacaattcaccacataaattattggcccattaatttcaatttggtctttaaatacaaactttggcttcactgtgtgaataccgttgtattctctgaacaaatattcgtacaaaatgtccaaaaatttgcgatatttttggcattcggtgcgttcatattcttcaaatttctctgctattttgtcacatttccaatgatggcctttcataaatgcaattagcatattgtcatcaaactaattaaaatagccccgtaaaattaattactcggattaattaactcaccgatggaattgcacatgaaatatgaattaaataaagatgtataatagcagtaataaaaaggagaatggttgaaacggaataaaacattataaatatatctttctttaataaaaaattaaatctaaatgagaaatatgacaaatcacacagccttacaaatgtatcaaaaattgggtatttaaataatgatcataagtaggattatccaaataaataatttacttaattgaatttgattattattattattattaaattatgatgcaattatttaaaatggtgattttatgagttttaaaatagtaaagaaaaactcaatcagatgatgatcaatcatttttttattaagaccgttcgtgcggcaaaaactacaggatcacggtgtgtctcttacagtagcaaaactgccttataaacggttccaaaattggatttgaaatagtgttcattagagttaggaatttcatgtacatacatattttacttaaaacattatttttaagtttaattaggtcatttcggagcgtttgtgcggtcaatattacaggaacacggtatcactattacagtaaccaaaaacttttttaaatgtgaaccgaaaaaactcatcgattttccgtggcaatcctttccttaaccaacctcgtcatggcacaagacacacatcagcttggccacaaaaatttattgttttactcgcttcgccctaacggctgaatctgccccaattcccatgggcattttccgtctccggcatttcttaaatatgagcaaaacaaaaaagcccccccccatatatccgcttcattttcacaatttctatagtttaaaatgccatttatcccagttttaatggcatttaaaataaatttttcgcaacattttcgataaataaatcaataaatattttttaagacggcaaaattatataatgttttagcaaaactgtatttattttttatttgataacttgacaattctcggtcatacatataaaatagaaattagtgcactttgcaaaaacatatttttcctggtattggaaagtttttagtattttcaaaaaccttagatcggctcccgtttaaaacggccttcctatatttttaaaactgaaaaattttccaacaaatcacttctatgaatttttttaagtaaattgccaataaaaaaaatgaaaaataaaataattaaaaataataatttgaataattgaaggaagatttcaatcttaattggtcaggaccagggaggggggataaaggctagaaaatctggggaccggtaaattggacaccagaaaattgtacaccaagcggaaaattggacaccgtcggaattttggacaccaaaggaaaattggacactgtaaaactgaacactaaattcctcttttaaaatataaatccagtaatttaaacattcaatatg

SEQ ID NO: 29819 - DNA, 1646 bp, Heterodera glycines
  unsure (1)..(1646): unsure at all n locations
ccaatgtgattaattccatttatagacacaataaaaacgtattattattttatcatttatttattttatttttgacaattttattgctgccttttcactcctcttttttgtgcttcatgtgatgatgatatttgtattagttaatgtgtttatttggcccaacaaaattaacattctcatctatttatttcaacgctcgcaaaatattatattcaataaaataaaaacaatttttgttatttttattttgtcctcaatttcccaaaaattttgatttaattatttattttgattaagttaaacggaaactttaaattatttatttttagatttaaaaatggaaagaatttcactttttgtcaatattgccggcattgtgttcatctttttctgtattggaaggtgatagccctataatttaatattaaaaaaaacagtaaaacttttttttaatagaattaaatatctaaaataattatttttatttgtttagtaattaatttttgttaattaataagttattttgattaaaaaatatctttaattaaaatattttttccattttagtgatgccgtttcaatttcggactgtgccgaacggcgctttcccggctccgaatcatttgtctgtgtgtgcaatcggacattctgcgacctgccaattgggccccatcggttgggcaaaaatgacaacaatgccattgtgtacatttcggacccggccaaattccgtctccatcaacagcaagtgccaattgaggtggaatacagtgaccaaaatcgtcggaaggataagccgcagcgcatttgctcatcggatgacgaaggtatggaaaaaccagcacattttggcagtaataattcagacctggcaaatgccatcaaaaaatgttaactttgccataaatcaattaatgattgagggcctttgaaatgctcagttgttccttttttgtttccttaatttgagtgcaaaatgatcaactttacgtagttttgtgacattttaccggtactggggagcaaacgtaaagaattattcaaattttctaaaaaaaaagaagaaattcgcattcgaaaattcataaaccctagcgacccatagaaaaccaaaataatgattatacttaatgcctttgaacaaattttaaagtgtgaatttttggacaattttttttattaggcttagcagtaaacatcctgtcagtgtttttaccatggagttgggttttttttttaattcggaaatattagtaagtcggaatttttatcccgttctaaccactattttattttctattttttttattatgtcttccataaaagcgtaaaaaatgtcgctgaaatattaattctcatatttttgagtgctgataagaataaccagaaaaatagtttaaatctaattacactaattttatgaaaaattccaatttaaatttaaggtttctattgtgccaaacccaccaatgtccttgtcaaaataggcacgcaacagtgttgcacgcgtggtgttgctcaacgcgttcaaattgacgccagccgcgtcagtgaacgcaccgccagagcccaganctgtttgatactcttttgaagaatcctttaacggtttcgatcccttcatctgaaaaataatgatggttttt

SEQ ID NO: 29820 - DNA, 934 bp, Heterodera glycines
aaatttttcacccccagaattattaaatttattaattagagcagaagtagtgcaagagttgtgcaggagttgttcatcagtggttcattagttgttcctgagttgttcaaaagttgactattttacataccaagatgcgcatgcagtatcttggtgagacttgaagttatatccaaaatttaaacgtcaaacatctttttacactgttttaagactttctgatgtattacttttgttctttctaaaaaaattttttttcggattctggacatgattccgcatcaagtatctttgtgtttatttgacatgtaatgcctaaatgcatgtagggcgtctttacgcattattttaagtatttccagtgtaaaaattttatcataattacccaacaacccctcagaatccctgcgtatcacccctaattctgcaggcaaaaatttttttgaaatttttatattcccgtggattgcataactcaatttaaattagtgctaaaagtatgcttaatagctcattagaaccgccaaaatgtgaaggtgtgccctttctccaagcccaagacgctatctttaacacccatcgcgctagaggccgacaactgcggcacgttcaaaaaatttccgaaaattttcaaaaattttctgaagaaacttttttttacgttaaaattttaaaaatcgctttacaccaatcgatgcaaaatccttaaaaaatagttgtactcttttgttcggagccgatccgagcattttgaagagagttattcagaaaattgccggaaaacctacattttcctcttatatagggaaccagggccccaaggggccctgtgaaagcgccggggccgctttcaacaccggggccagccggggccattgggttttccccgcgcttaagtaacttcgctcggccgcttcgcggcctcgttaggggc

SEQ ID NO: 29821 - DNA, 1475 bp, Heterodera glycines
aaaatttcgaaaattttcaaaatttttcgagctaggcttaaaaaacggttttcgggtttttgaattttaggattttttaacgaattttcccagaaaaacgaaggccacttccaaaacatagtttttcgagctctatcgactggtatttttttcggaaaattttcgattttttcccggaaatagaaaaaatttttggcctaagcgggacatttgagtcccgggcccataactcgtcaggagttggttttagccaaaaatggccttagagcaaaattgtagagctttttaagctctatcgaatggtgtacttcatgttcggaaatttttaaaaatttcggagctaggccccctagaaattttcgaaatttttttttgggttgaaaaagtgggtgaaaattccggtccggaggccaactgagcgccagcggcgctgaaacggccaactttgaaaaacgagctcggttttcgggctgtaactttttcttgggaaccgggagcggaaaaagtctgctgagagggcacaccccagacatgttggctacaactttgtcactgatcactttttgatcagatcaaatgccgagcctgtagaaattggcgactgaacggcgctcaaaatgccggttttacgtttttcgggaataactcgctgggggtttagcggagcgggttggcgccgcttgagcatttgtgtagtttttaaagctgcatccgatggcgttttcagattttgaaaattttcagaaattttcgagctaggccccctcgaaaatttttcgtttttgaattttattattttttgccgatttttcccaggaaaacggagaccactttcaagcaaccgtttttcgagctctatcgattggtggcatttttgaaaaaatttcaaaattttccggaaatagaaaaattttccggaattgagctccccatttccgttcaaggcttataactcgtcaggcgttgattttagcgaaaatttgtctaagagcatttttgtagagaattttaagctctatctaatgtgctttatctcatgtttttatcatgaatttaaaaaaagttataaaattaattgtgattttgaaactcaaaaccataggggggaccccatggttttgcatttcatgaaaaaattttttactcttaaattagccaaaatgcatttttatggcataatttgaggtgctgaatacgtatatacgctttattttgcgtttcagattttttggaaggtgtttaaaattttttgaaaaatcgtcaaaatttgagccccggaaatccagtgaaatttcgaaaatccataaatctccttcgtttttggtcaaattttattggaataaagctttaaaaatagaagaaaaatggggagaattttatgggatttattagaatttctatcttccaaaataaaaaaagtatcccaaaatttctgaaaaaaattccatttttccaaaaaaaaattcagaactccc

SEQ ID NO: 29822 - DNA, 1072 bp, Heterodera glycines
  unsure (1)..(1072): unsure at all n locations
gccacgcccaccacccccgccccagaagagccatggacatggcaatggcccgtattggtgctgttggtgacggtggtgatcgccgccgccgcacttggtggtaagaaaatttactattttggttaaatattttatggtaaaatttaacttttcagtgggtttgtggtgtcggtatcgccggtcgcggacggggcctgacgacgtggagtcgcaggcgcctgttgcggtaatcataatttttacaaaaattcttttagaaaaattcttttttgggtgggtaataaaaatgtggggttgaaaacaaaaaatgctaaaaaaagttgctttatatcccccgaaaaaaattttcagcgaccggaggaggaaaatggcaaggacaaaaagaagaatgaggaaaatggcaaggacaaaaaggaggaggaaaatggcaaggacaaaacaaaatgtcgtcatgcaaaaagcgacgaaaagttctggaaaatttactaatctaaaacttttttaagaaaaaatattatgaagtttttcttattagaaaattctaagaaaaaaacttagaaaattattatggtgaattactaagatttttcaaaaaatttcccaaattcgttgaaatttattgtgaattttttttgttagtaatttttttggaatttctggcgttttttggcacgatttacgacgttttgtcccgacgacgtttcggccgacgttttgtccggcgccggcgcacccttgcttgttcactttgctctgattgtgaattaatggtggtgacattggtgggtcaatgccagttcgtacagtaaaaaggtttacaaaattacacctaagactcagcttataggcctaagcctaaagttagggattattctagcaatacacctttctagaaacgtctattttacgaactgtcaattcaaaaaaaatttctgttttcggtggataatgagtagggctcggatttttatgtgctaaaaatcctgaaatatgtaataaaatatgtgctaaaaaatgctgaaatatgtgctaaaaaccccccaaaaatgccaaaatatgtgctnaaaatatg

SEQ ID NO: 29823 - DNA, 1045 bp, Heterodera glycines
aaatttgttcactttttttgcataattttttttatgcaaaatttgtttttttaacattggaacgtattgcatactatttaataaattgaaaaaaacattttaaaagataatttagcgctagttaaaaattttctgtataaaaatacaaaaaaaaaattttctaaaaaagtgaaaaaattttcaaaagagggcttctttaaactagcaccaacttttgtgtttattaaagcattttttatatttcttcagctacattgaccattccgtcattgaatttctccgttcaaacaagcacatttgggacagaagaggcaccaatttggaagtgtttgtggatgcaattgatatgggtgttcaaccgatttgggatgtttttatccgtcaaatttggcctatttttgcgacaaacattcaccatttgggctttcgcaatgccgatgctttgaacaacttgcgcagtcgcacttcgccaacatttctcactgatcttgatcaattgaattcaattgattccggttatctgtgccccgatggaattgctgatgatgggccaaatgcaactgctggccaagcgttgaccaaatggctgcacactccgacaaaaaatgggcaaccgaagcaattacgtttccgtgcttatgtggttccaccaaatctcgaatggctcaacagcttcaaagaggtcgtctcgccagaattttcgtcaatttgtttttgttttaccaatttttgtgtttaggcattccgtcgtgccaccacttctgtctgttacaatattcaactttattttcgtgtggacacaatgccaactgaacaatttgaattgatgaacgaacggacgaaagaaaagctgacactgaaacaggagatcgacgaattcgacgtaaatgtgtataattggctgttgcaacggtgcccaattggggagacggcgacggtgccagcaattaaatggaaagacagcttagatccgagtgccaatttgaacagtatcagatttgatctgtggaatttcgataaatccattgggtgagcagcaacagca

SEQ ID NO: 29824 - DNA, 660 bp, Heterodera glycines
ataaataagaaaaataaaacagatattttataataaattaaggcgataaaaatctaaaaatagaaattaattttaataaattttacaccgttctgagatgaagaaaaaaaatgaagcagaattacaagaagtgtgaataatttaagtatgatgagattgaaatagaacaataagataagaatataataattaaaattatttacaataaaattaagaaattctgtgtgtaaatgagcgattaatgaaaaagcaaaattaaatgcgtaattatattaaaaaaagaaatattttaaatttttaatagaatttcactactggtaaacaattgacacaagcattttttaagatttataataattatattaaacataacggataaaaatgaaattatagcaaataatcggcaaaatatggaaataattcacagtaataagaaggaattaatttgtagtaactagggctaatatttataggcactaaaaaccgccaaaataggcactaaaaaatggaaaataggcactaaaagggatgtaaaatgaaaaatgtattcaaaaaagtaaaaaaattagggccaaatcagtattgagataaatatttttaaaatcacaaattcttgtcaacaaacaaataaataaattttggagaaaaattttttgaaaa

SEQ ID NO: 29825 - DNA, 1248 bp, Heterodera glycines
gaaattcctttttccattggaaaattgaagcaccgggaaaccactcaattccttagcaattttaatttcccatttcaatgcatggcattttttgtccttttcttttcagttgtttttttctttcttcaaattggattcactatattaaacttatcttgttttgaatattgtttatgagctgaatatgtaaaatatattaataatttattaaattaatattttagattttttaaatgtttaaatttaaattcgtctaataaattcccttaaaagacaggtaaaaattttctaaattaatgcaaaaccttttcaattttaaaataaatttgaataagagaaccaagtcctatactttttctttcgtttaagtataaaaataggtagtctattatttcaaatttatataatttatttttgtacttgaaagtcccaattcttttttccatcgacttattgtatttcggccaacgcccaattctttggcgattttatttgttgttattggctcctccgcacattcctgctttcttttttgaaattgcttaataattcgaagtttttcatcgcgttcgtgacttattttttcaactaaatattgaaatattctattattatataaataaattttaatacaatatttaaaaataaaaatttagtttcattcgctagcttactaagtacgctctattaattactattaaaaaaggtataaaattttgcaatgtaatcgagaaaaaataatgcctatcgaattacactaaaaaaatattcgtttggtgcttccaaaaaaaaatgtgattttatttaaaatgaaatatttgaccaaatggatcgcgacgaaccagggttgcacgcattacggcgctacggaaataaaggcctttttggactctcgtaattacggattactacttccgtatgtcgtaattacgattcacggattaccataattgaaaatccagttacgggtagccttaatacgaactcaccatatccaaattgccttttccaactataaattgagcttgcgctggtttgtaattttttcgcaatttgttcgtccattttgctaattagaccagctccaaattcatttgccaattgctcttttattttaatgaattttttaataattagtaatttttcttcatcttaaaacagttaaatttttatttaattttataatgataaattaccttttcgataaaagaatttcttctttgacttatttttataaatttttatttt

SEQ ID NO: 29826 - DNA, 939 bp, Heterodera glycines
atgatcagcagtaatgaatggttaaagaatccacatgctcagcctccaaccattcaattgcaaactgtttcaattcatctgaaacaattccgtaaccaaaatggcaaaaccgatctgctggaagacaacaaaaaaggcgaacaattaatgggggaagtgatgaccatgagcagtttaatggggacaaataccacgggaaaaagggatgccatgggctgggcagtttaatgggacgagtgccacggaattccatgggcattcatttcggcatgttcagatgggatcacgggcctatccgcccatcagattcaaatcctacagaagatttgggaacgctctccggaagtggagatctccgactgtgcccgcaatattatggcccacctcctccgctcaaatgcccaaatgtaccaattcttcgatttggtgcttttcgcttttccgttcccttcgccctctgtcccaattttatttttacgtcagctcggcctcagtgatcgcgaaatttcgagcagtccaattttcgagcgtcaatccgctaatttcgttgtcgttctcgactttgttttgggtaatcttctcgaggaaatacaaaaggtttctctctctctatccttctctttttgtttgattttcatttcttttaggtttgcttggcacttcaggtaaaaaaagttattaacaataagacaaattccaaacaatttttagcatttgggcacacaacacgcggtaaaacagaattaaaagcattggaaaagcacaattcatttaaatattgcaacaaataaacaattaattcccctttcagcgacttccctttcccatcgaaacgtaatttgcccattgccattgccccccccccactgatttatgtatttccctttcccttgcattctctaatcagccaccattgggcattgttcagccgctgctttg

SEQ ID NO: 29827 - DNA, 1285 bp, Heterodera glycines
cgacttttggggatttgcaacttggggacccgacatttggggacccgacttttggggatcccgacatttggggacccgacttttggggatccgacacttagggatcccgacatttggggatcccgacatttggggacccgacttttggggatccgacatttggggatcccgacatttggggacccgacatttggggaccgaacgacatttgagcaaaagacacttaagaaaaccacggacatttggcaacccgacatttagggacccgacatttggggatttcaataaaacaaaaaaaaatttaattctaagccacaaaattagacaaaattacgtctgctttagccagagttaattccattgcagaaaaattaattaatattttaaaaattaactctgtttccggactcaccgcgaggaggcgcagaattttgagcccatactaaccacaacacaatagacaaaccacaatacattttttaactacagtagacctttttctaatttttatttaaagtgcctttcccaagggccaacgggaacagaaatccgtcaaggacattcaaaaagttccagccgactttgctgtctaattgcgtacagcaacaaaatgccgaggtcatcttttcggtttcttatctttcgggtgactttgttcggtgctttaaatgaattttttaacgaattaattttttgtggctgacctgcaaaacaaatctcttccactggtcgccctatttcggtatttatttttccaaaaatatatccagggtgtagtcatcaacattcacactgaattcataagaattcagagtgagcacaaacgggaaaaactcctttaagatctgtttctcttcgcaagctaaaataattatatcttttcaaaaaataaagatttttatccttttatttcttgtattagcaaataaatgttgagggaaactgagcccatttccatcaaaattgtggaggcggtaatgtacgggtgggctttaatgtaggtgcttataccgggggggggaaggcccaccacgaggccgcgaagcggccgagtgagtaccttcggtgcaggaaaatattaaggaagagagttcattatttatttgttttttgcaaaattaattcataaatattttttagaacgtgctctgaaacacacaaaactttatttacaggttagtttaggcactcagatgctttcactatcaaaaagggagatgaataaaaatctaaaaatttttaattgctttttaaacgagcgaaaaactttaggcttaactttttt

SEQ ID NO: 29828 - DNA, 1205 bp, Heterodera glycines
  unsure (1)..(1205): unsure at all n locations
aattttgaaaaaatcataaaataataggagacgcagaatttcgaaaatttattataaaagctgatgacaatctaacccgataaaacaggttaattcttttcctttcagtatccctggaaagtttggggcgcttctgatcagtttctgaaaaaaaagttaagcctaaactttttggcctgtttaaaaaggaattaaaaatttttaaaaattttattcatctcccttttcgatagaaaaagcaacagagtgcctaaactaacatgtaaataaaatttggtgcgtttggagcattttctgaaaaaatatttatgaaataaaaaaatcgattttttcaagtgtccgtttggggtactcaaacaattatggggagcaaaaatccaacgcagaattaaagtacagactatagggaagctattcccgaaggattcggtctccccataaatctgggcgcatcggttcggggggactgccccgaaaacaaaaaaatcgattttttcaagtgtccgtttggggtactcaaacaattatggggagcaaaaatccaacgcagaattaaagtacaggctatagggaagctattcccgaaggattcggtctccccataaatctgggcgcatcggttcggggggactgccccgaaaacaaaaataaatcgattttttcaagtgtccgtttggggtactcaaacaattatggggagcaaaaatccaacgcagaattaaagtacaggctatagggaagctattccggaaggattcggtctccccataaatctgggcgcatcggttcggggggactgccccgaaaacaaaaaaatcgattttttcaagtgtccgtttggggtactcaaacaattatggggagcaaaaatccaaggtaaaaataaagtagaggtatatcgaagctattcccgaaggattcggactccttataaatctgggcgcatcggttcggggggactgccccgaaaacaaaaaaatcgattttttcaagtgtccgtttggggtactcaaacatttatggggagcaaaactccaacgcagaattaaagtacagactatagggaagctattcccgaaggattcggtctccccataaatctgggcgcatcggttcggggggactgccccgaaaacaaaaaaatcgattnttttcagtgtccgtttgnggtactncaacatttatggggagcaaaactccaacgc

SEQ ID NO: 29829 - DNA, 1656 bp, Heterodera glycines
aaacaaagtccgctgctggttttgatggagttgggatgggacatacggggaattgatgagaaggggagcaattaaaaatattattgcactaattagtatgcaatattactttcaagaaaaaacactcatttaacatatttaaatatgaaacccaagttattttttgatttatttacatattctcctcgtcagagtgtgacaatgaaagatggcagatcgttgatgagcgcttctcatgaagatgacattcctccggatgttcccacgtgcggcttcgatggcaacggatgtaccgtatccgtgttcgagttgtacaaagtgggtacaggaacgaaaacaaacacatatgtgatttgctaatcatctggtaagtaatggacattaaaattcattttgacttttagggatactttttgggcggcatcgctttgtttgtgctgatcattggcgccagcattttctgcgtcgcttatttgatacagtatgcaaaataaaagaagcaaaaggccaaaataaaaatgggaaaaacaatttcaaatttagcgcaaaaattgttgacaagcgaaaaggcaatttgcagtggaaaatcccttttgcgttgttgcagcgacagaaccaaagagtgagtggacgaagaaagaaaattgtattattcgaccgaattccctttcgaatccctaaattcgaggctatgaccaattccttgggggatgaggtttaacatgaaagaaattcctttgcctgagaccgaagtcaaggagaagcgaacccattaaagccctaatactaattaaaggcccggattgattttactgggatccccgattatcgtttttagggtgaaatgccgaatgcgcgagtcacaagaaaacgaatttttaatctcggaatccctgtccattgcaaggctccgttcccagtttttttttcaaaatccgggatcaatcaataaatggggttgttgaaaaagccttatttgttttctttaattcagcgatctgaacggaccgccgaacggagtcaccactctctccgctccaaccaaacaaatatttccgcgttgacccatgcgaccaccagcagcagcttggcacagtcaaaaaacttcacactgtacgcttacaatggacaaatgtgcattgtacacgcgtacggcccaacaatgttggccatgccattgtctgccgaggggatggccgagtgccgaacggtagaagggaaattagcaataatcaataatatggtagactaaattgcaacaatacggtaagataattaacattaataaacaatttggtagaataatttgcaaccatacggtagggcaattaacaataattgtctttattgagtggtgtgcttgctctaaactgagatcacagtcttgaaaacaagaaaattcaaagcttcttggtctgttttacgccatatttcgaattagaacacatgcttccctcaatgaagtagccaaaattggccataactttcagttgcgactgtttgaccacgtgaatttaaatcgctttttgggactgagtttggacgggcccaatttgctggcggtgtggaatttctgtgcccgcgggtcgctcaaagatgtgataatgtccggtaatgcgatggtcagagacgtcgtgttcatccaatcatccatca

SEQ ID NO: 29830 - DNA, 975 bp, Heterodera glycines
gggggaactggacagagatatggaggggagtgagggggaggggaggaagggcgggggaaattaatataaagcaaaattttgagaaaaataaaataattgggggggttttttcaagtttcaaacacagggggaaaggaaaatggaggagttaaaatttaattggcacatatttccgacacaggcggcagaaatttaaatatttttaccaatagcattacttttctcatgcaaaattataaaatgaaatatttttccaataaattttttttaatccttctcacaagggtgaggatttttttagtttcatgtacttttttatggttttgtttcacttataaatgcacaaaaaaacattatttttatcgcggaaacattcattttatgtcactattcgtaaccattttgaattttagaaattagaaacaaaaaattcaataaatcgaaaaatacttaagacttgtatttctacaaaattaaaaaaatgattcctagagtcagaaatgttcaatttttaataaatttctattgcaaaattctataattgtcttttgaaaaactaatcctcaccctttgtcactaactaatcaaccactttcctttttctcttcctcttctccttcttcctttttctcttcctcttctccttcttcctttttctcttcctcttctccttcttcctttttctcttcctcttctccttcttcctttttctcttcatctgctccttcttcctttttctcttcctcttttccttcttcctttttctcttcatctgctccttcttcctttttctcttcctcttctccttcttcctttttctcttcctcttctccttcttcctttttctcttcctcttctccttcttcctttttctcttcctcttctccttcttcctttttctcttcctcttctccttcttcctttttctcttcatctgctccttcttcccttttctcttcctcttttccttcttcc

SEQ ID NO: 29831 - DNA, 966 bp, Heterodera glycines
aaatgaactcgcagacgtcgtgtggagtccgagccagagtctcttttctggtttagggtgtgcgtgcctggaagtggctcagcctgagatagggatgttgcgcccgtaaagcaccgcggttcctgtggtgtctcgtgcgctccacacggcccttgaaaatgcgagggaagctatttgaatctcctgcctgatcgtaccgatatccgcagcaggtctccaaggtgaacagcctctagtcgatagaataatgtaggtaagggaagtcggcaaattagattcgtaacttcgggaaaagaattggctctaaaggtcgggtcagccgggctgttgcgtgaaacaggcggcttttgcccgtggctgcgtgctgttctttcggggatggtgcgtggactagtggtgagagctgcttgtggagcgcttcagctgcgtgtatgctcgtcagggtatgcacttcggttggcgctgaacgaccagtttagaactggcacgaactcggggaatccgactgtctaattaaaacagaggagacggatggtccttgtggacgttgaccgtgtctgatttctgcccagtgctctgaatgttaagccaaggaaacttgattaagcgcgggtaaacggcgggagtaactatgactctcttaaggtagccaaatgcctcgtcggctaactaccgacgcgcacgaatggatcaacgagattcccactgtccctatctactatctagcgaaaccacagccaagggaacgggcttggcaaatttagcggggaaagaagaccctgttgagcttgactctagtctgactttgtgaagaatcatgagaggtgtagcataagtgggagccgcaaggcgccagtgaaataccactactttcatcgattccttacttaatcggtaaaacgggagtgcgcccgaaagggtgtccattttgtgttaagtcgggccacccggtggcccggcgacccg

SEQ ID NO: 29832 - DNA, 1222 bp, Heterodera glycines
tattttattataggcgttttttcaggggtatctttgcctcggtggtcccgtgccgccgcctgccggcgacccggccgcgccccgctttccctgtttccccgcaattcccgggtgtcccggaagtccttctgggccttgctctcctgaaaataaacaaagcattttaaactttacttacagatcagaccgtccgtcccgtccgttcccggcattcccggctctcctttgtccccctttggtccaggaaatccctgctgcaatttgaatgtttgtctccgcattcactttgttagcttttacctgtcctggtgctccgattggtccttcgggtccttggggaccttttaagactcaatatttcagctaaacaattccaactcacaaataatgcatttctgggcttcttccaacaaaagtgttatggcgtccagtccggggggtccgtcttcccccgtgtcccccgactcgccgtcacctccgacttcacccggtggcccaggagggcccactcgctgaggagggcactcatctaattggcgtttgacaagccgtccaaatgcattgtccgtcagactgccgccactgccaacggcgaattggctgacccgacggaattgttcatcgaagagacgagtgttgtgcttaaacagaagcactcactgaaccgaaattgcccaactgtcaaacgtgaaagcgacggaggcgactctcaaaatcgttcttcagctgttgggtgtgctgattgagccaagggagaaggacaagttgagtgagtacacaaagggaagagacggcgaaagtgcccatggcaatgatttggtagaacattcttgaatcagtcgcctttcaaatgaagcgataaaatggagaaattggggaggaacaatcagtgatcaaagtggtggcagagcgagtgacctcgacctattaaggaaagtgtcgaatcggaattggggcatcgacggagcgaacgcaatttacaaggggggggggcgacagagacgaatagtaatgacagcgggaagggtcggttctcgactcgagatttacgtggccgattcttcaattctcaccaataaaaaaactaagagattctcctctattctccagggtccctgtcaaaagtgcaattgaattctggacgccaaaaaacaattgacacgagccgggttcgaaccggcgacctcgattgtgtgagactcgcgtgataaccaactacacc

SEQ ID NO: 29833 - DNA, 1118 bp, Heterodera glycines
atgatgattaaataataaaagaaatcgaacggaaactgataatattagaaaaagcaatccaaataaccagaaattcagccacattattgtctttcttcgacgagttctgcaagccttcattgcatgtaaagttgttgctgaggacgttgtgcctgagcggcggcgtgggtttgcttcatctgagcttcgatgagtgcggcctgttcatgcattcccatggtgcggtagtattcggcccactgggcactgtagtccggttgtccagtttgcggattaatcgcaggtccgccagaagctgaacaaaggaaacggttttatgtgttgaaatcggttatatatagaaaactattcgatttatacaaataaaatatacaagaaactgcgcccattccggcggaaacagcttgctgaggctgagcaatggtcgcttgctgctgttgatggatttgttgctgctgcatttgggttgaatggagctgtgctgcttgtgaaacagcagtttgcatagtcccgggcactgtttggtaatgctgtgccggcgtggcaccaaaagaagcaggttgggaaggcggaccccccgcaattgccatcgcttgttgttggttgtaatactgagtccaagccgaagggtcttgctgagcaggcgcagcacctataacagggttgacagcgcctaaacaacatctttaataaaaataaaaaactaatttgcgtcaaaaatctgctaatatggttttccaggcggtatttgaattttgcaagactggaaaagatccttttgggctgaaaaattatactcgggatatggctttgtttaaaattaacagatgtttgtttaatttactaaaagcttgatgcggcgtgggtccgtagggatttccaacggccaaaggcgttgtggcattggtaatgccagcattgccgtgaaaagatggtagtggtgttcccggtgcaacatcgcccactttaatacggatgatgtgttggacatgatggatttggaatggagtgccttttatgacgaatattttctcagtcgaattgggtggcgagtctcgcgacagttcgacatgggcccccgtctccgcgctaatctataaagaaaaatattggtatac

SEQ ID NO: 29834 - DNA, 497 bp, Heterodera glycines
ttttattcttaaaatgtcccttttatttacccccccccctcccctctcattaccatttagactccatattgtctgccattttgatgaatggttgacggatcaattttcgatgcctaaccctcttcaactgcgaggtcttcaatagagaccttacctgcccctgcccgaatccgcctactgcctgccaccatattctgcaccagtgcttgttgatgcttcttgtcttcaccatgattacggctagaccggcctaatcgaaacccccacctttccgccgccgtaccccacgatagccacctgcccgtgaacggtgcatgtacctctcaattcaccgattctataatcgcacacaacatgactctatttgacactactccttctgcttagctttgactcattagagacgtaacattcatcatgacttggtccgcgtcgagtacgtaagtcctaacgattgtgtcattatatctatgaggtagtgtctatgtaatactaca

SEQ ID NO: 29835 - DNA, 786 bp, Heterodera glycines
aaaaaaaaatgggggggggggggggggggggaaaaaaaaaaaaaaaaaaaaaaaaaaaattttggggtgggggggggggggaaaaaaaataaattttttttttaaaaaaaaaaaaaaaaaacgcggccgcggcgggggctcaataaaaaaaaaaaataaaaaacccggcggggggggggggggggcccccaaaaaaaaaaaaaagaaaaaaaaaaaaaattcttttttttttttttttttttattaaaaaaaaaaaaaaagaaagaaagggagtttttttttttttttttttttgtgggggggggggggggggggggggggggggggggaagaaaaaaaaaaaaaaaaaaaaaaaaaccacgcccccccccccccccccccccctttttttttttttttttttgggtgggggggggggggaaaaaaaaaaaaaaaaaaaaaaaaaaaaaaatattttttttttttttttttttttttttttttttcctttctctagaaaaaaaaaaaaagaaagggggggggggggggggggggggggaggggggggggggagaagaagaaaaaaaaaaaaaaaaaagatagtttttttttttcccccctcccctcccccccccccccccccctcccccccccctcggccgccggagggggagggggggggggggttgggttgtcttgtttttcctccgttgagggaggcagtaaggggggggggggggggggggggggggggggggggggggggggggggggggggggggggagggggggggggggggggggggg

SEQ ID NO: 29836 - DNA, 940 bp, Heterodera glycines
tctcagaataattacgccgatactaattgttctggaatttgtttctcggcgcgtttgtttgggaaaaatttggaaaattggctatctctttttctgctcaacagtaataggaattccaaccgcattctcagaataattacgccgatactaattgttctggaatttgtttctctgcgcgtttgtttgggaaaaatttggaaaattggctatctctttttctgctcaacagtaataggaattccaaccgcattctcagaataattacgccgatactaattgttctggaatttgtttctcggcgcgtttgtttgggaaaaatttggaaaattggctatctctttttctgctcaacagtaataggaattccaaccgcattctcagaataattacgccgatactaattgttctggaatttgtttctcggcgcgtttgtttgggaaaaatttgaaaaattggctatctctttttctgctcaacagtaataggaattccaaccgcattctcagaataattacgccgatactaattgttctggaatttgtttctcggcgcgtttgtttgggaaaaatttggaaaattggctatctctttttctgctcaacagtaataggaattccaaccgcattctcagaataattacgccgatactaattgttctggaatttgtttctcggcgcgtttgtttgggaaaaatttggaaaattggctatctctttttctgctcaacagtaataggaattccaaccgcattctcagaataattacgccgatactaattgttctggaatttgcttctcggcgcgtttgtttgggaaaaatttggaaaattggctatctctttttctgctcaacagtaataggaattccaaccgcattctcagaataatacgccgatactaattgttctggaatttgtttctctgcgcgttggtttggaaaa

SEQ ID NO: 29837 - DNA, 941 bp, Heterodera glycines
  unsure (1)..(941): unsure at all n locations
atgccagaaaaatggttatctcttttttgtgagaaattttgtaccatacaaatgttcncagcatgggcagaggggcgcggagagcaatggccattctattctacagggaatttttaaatttattctctatgccagaaaaatggttatctcttttttgcgagaaattttgtaccatacaaatgttcccagcatgggcagaggggcgcggagagcaatggccattctattctacagggaatttttaaatttattctctatgccagaaaaatggttatctcttttttgtgagaaattttgtaccataaaaatgttcctagcatgggcagaggggcgcggagagcaatggccattctattctacagggaatttttaaatttattctctatgccagaaaaatggttatctcttttttgtgagaaattttgtaccatacaaatgttcccagcatgggcagaggggcgcggagagcaatggccattctattctacagggaatttttaaatttattctctatgggcgcggagagcaatggccatctctattctacagggaatttttaaatttattctctatgccagaaaaatggttatctcttttttgcgagaaattttgtaccatacaaatgttcccagcatgggcagcggggcgcggagagcaatggccattctattctacagggaatttttaaatttattctctatgccagaaaaatggttatctcttttttgtgagaaattttgtaccatacaaatgttcccagcatgggcagaggggcgcggagagcaatggccattctattctacagggaatttttaaatttattctctatgccagaaaaatggttatctcttttttgcgagaaattttgtaccatacaaatgttcccagcatgggcagcggggcagcggagagcaatggccattctattctacagggaattt

SEQ ID NO: 29838 - DNA, 901 bp, Heterodera glycines
ccccccccttttccccggggtatttttttgtaaaatttttttttccacaataaacttttccaaccccatttttcgccccggaaatgttatttttattgaattttgaaccggtttgagttgattagactagaaaaaattgaaaattttgaaatcatgtttccccctcccttttcccaggggtatttttttgtaaaatttttttttcccccaataatttttccaacccccttttttcccccgggaaattttttttttttgaattttgaacccgtttgagttggattgcttagaaaaaaatgaaaattttgaaatcatgtttcccccccccttttccccggggtttttttttgtaaaatttttttttccccaataaacttttcaaaccccatttttcgccccgtgaatgttatttttattgaattctgaaccgttttgagtagattagactagaaaaaattgaaaattttgaaatcatgtttcccactcccttctcccaggggtattattttgtaaagtctttttttccccaataaacttttcaaaccccatttttcgcaccgtgaatgttatttttattgaattctgaaccgttttgagtagattagactagaaaaaattgaaaattttgaaatcatgtttcccactcccttctcccaggggtattattttgtaaagtctttttttccccaataaacttttcaaaccccatttttcgcaccgtgaatgttatttttattgaattctgaaccgttttgagtagattagactagaaaaaattgaaaattttgaaatcatgtttcccactcccttctcccaggggtattattttgtaaagtctttttttccccaataaacttgtcaaaccccatttttcgcaccgtgaatgttatttttattgaat

SEQ ID NO: 29839 - DNA, 1134 bp, Heterodera glycines
aataatagaccaaataaaaccttttttgctcattttgaagggaaaattcttgagaatattctaagttttatttgattgggccttaatttgcgcacttggttaaaaaataattaaagtattgaaatgttcgtccccttcaaaaaatttttctagcttttaaaatttcttcaaattttgcataggccaatattttgacccccctaacgattccaagtttattttgtgaaacttaagtttttaactagagatcggctcttctatttctgcaagggaaaagcccaaaaaattttaagtttgcaaagttttggcgttctgattactaaataaataataaacctatttgcactgaaagccaaaaatcgggccgctgtgtgcactttgggtgcccaatcgacttttagacgcacaaataatgaccattttcatttcttttgggttatttcagctgtagtggggtgaatttccaaaatcaaaaaacggaatgggactttaatacgttgttttttgcattggaaaaagggacgcgattagtgagaagaatgcaattcacaatatatttaaaacgaaactacatttaacttttataagaaacagtaaattagaaatttatgctttttgtgcaggtcaattaaaacatgtgaatataaaattaattgtccatggaaatcttgttcttggtcaacagcttgttcaagccacgctcgatggatttgacatcggcccggacggacgcgagatcctctttgagatcggcccgcacggacgatgggcagcgcaaacggagcattttgatcacaaaaaaaagttgtaaacaaagaaaaaaaatgttaaaagcaaaattaaaaatgaaagaaatgtgactgatcgattgacgcgaacagggaaaattcgttcgaaaaacgaataatggaaacagaaacatacatttgtatacaaatatgtacgaagtggaaaaaaacgacaacaataacaacgaacaaaaactgggatgagaatcggtggagaatttgtttgtgttttgatcaatttcggggagtgtgaaaattcaatcaataatgcgacaccgtccgacacaattcgatgagatctgtaaaggagaaaactgaatttttccgcaaattcgcgaaaattaaa

SEQ ID NO: 29840 - DNA, 1344 bp, Heterodera glycines
  unsure (1)..(1344): unsure at all n locations
aagttggcncaaattgcgactcgaagagaggtgccaaattggcattggcaaaggaaacacttagcgaatgtttgtttattcctttcagtggcacttcgctttccgacctttgggcagcagcagaaaaaaacgcacaacttttggccattgttgtggacaaagagacgacaaccgacgcatattctgttggtcattcatccttttttaagtgtttcagtttctcagccctttcatttaaatttccattttcaaatgcctaatttttgctttcgttcgcctgtcactccctttgtccattctttccccccttcagctgatgctcaattacgccggcgattctcgacttaccgtttcgttttgttcgccttcccatccgataattaccggaaaattcgccgaaatgggactcaaaattccatcgcttttcgtattttctcgtcaacgtgcggaccatccaattttcatgtccaggtaataaacaatttcgacctttacctttcagatgttgcgttgtcttcggtctcttttagctcttcgattgattcgtgggtcgaaatgcaacacaaattggacgaacttttggcgcctttccctaaaaacgatgcgcctccgctcgacttgcttttggtaagttttcactttcctttccttttttaatcttgagaaatgaaaaggggacgaagtcggatgctcaacaacaaaatgagaatgggtctgcgatggcactcgaaaaagtgccaaaaatcgactggaaccaattcgaggtgggcacctcccccccccccttttgcccatttgttttgtttggctcaggtccaatatttggacttagtcagtgccctccattatttgctcaccgtggaagtgcctcgaaaccccgttcttggaaacaccgaattgaccgcgttgaaacgtttcgtaagtccattcgaaccaagcacttttttaatgatgctttatcatattttgtttaaaagtgtttgggttgaaacaatttattggccattttaattttcaactaatttttataataaattgcttcaattttttaaaaatgtcttttcccaccaattgttttccgttccgtcgtttgcccagtgtttgtccctttccccataaggtccatttgcttcgtcttcatggccccggttcgacatccgtccgacgccttttctatcgtctggacgaatggctgtcctcgcagcatcagccggtagtgatgaccgacaaatatctgtccactttggacgaaattcaggtggttctcttcgagggggggggggggggtaaaaaacaaaggcatttcttaggcactttcaaaatgcgttaaaaaaatgcttttcg

SEQ ID NO: 29841 - DNA, 1121 bp, Heterodera glycines
  unsure (1)..(1121): unsure at all n locations
ttctgctcacangtaataggaattccanccgcattctcagaatattacgccgatactacttgttctggaatttgtttctctgcgcgtttgtttgggaaaaatttggaaaattggctatctctttttctgctcaacagtaataggaattccaactgcattctcagaataattacgccgatactaattgttctggaatttgtttctcggcgcgtttgtttgggaaaaatttggaaaattggctatctctttttctgctcaacagtaataggaattccaaccgcattctcagaataattacgccgatactaattgttctggaatttgtttctcggcgcgtttgtttgggaaaaatttggaaaattggctatctctttttctgctcaacagtaataggaattccaaccgcattctcagaataattacgccgatactaattgttctggaatttgtttctcggcgcgtttgtttgggaaaaatttggaaaattggctatctctttttctgctcaacagtaataggaattccaaccgcattctcagaataattacgccgatactaattgttctggaatttgtttctcggcgcgtttgtttgggaaaaatttggaaaattggctatctctttttctgctcaacagtaataggaattccaaccgcattctcagaataattacgccgatactaattgttctggaatttgtttctcggcgcgtttgtttgggaaaaatttggaaaattggctatctctttttctgctcaacagtaataggaattccaaccgcattctcagaataattacgccgatactaattgttctggaatttgtttctctgcgcgtttgtttgggaaaaatttggaaaattggatatctctttttctgctcaacagtaataggaattccaaccgcattctcagaataattacgccgatactaattgttctggaatttgtttctctgcgcgtttgtttgggaaaatttggaaaattggatatctctttttctgctcaacagtaataggaattccaaccgcattctcagaataattacgccgatactaattgttctggaatttgtttctccggggcgtttgtttgggaaaaattttggaaaattggctatct

SEQ ID NO: 29842 - DNA, 1174 bp, Heterodera glycines
ttccttgttcatcattttcatttttaacaactatttcttcctttatcgcattaatttctccaaatatcggttttttgatgttttttgaggtcgatggcttaagatttttccacaaatcattaaacaaatcttcatcaattccgtcaattagtacgattagaaataagatgaaaataatcacaaaattaatttccatttttttgtcaaatgatttttgttttcagcttatatttattatagatagatatatatattatgtaatttataaaaaaaaattttcataaagtagaaattatcaaattaattgcaatttatcttgtttttaatcgtaaataattgattaaaaaataatttcatttacatgtaaatttccgtttccgtatagtaaacccttgaaaaacaattatggaattccaaaaaattttatatatggtaaatttaagaaatattactcggttgaggaaagagttttggcccacaaataaaattttacacaccgcaaaaaaaaattgcaaaaatttccatttttggcactgactcagagagaatttgtaacagttcgccatgtgccaaactttttttgaggttgaatagcggcggaattatgagcgttctggttgagaatgttaatgaatgatttatgcttttttgaatcgcctctttgtatttgactttggaaaattgtcatttagttcgtcatttccaatttggatcagaatctcaccaactttcgacgaaaaataagtattttaaaagtcgattgacaattcggctgcatttttggaagcgattaatgatgtgtttagttttttggccaactctcgagcctatgataggaaagacgaaatttggaatgggtttgaaaagagaacacgaattttggaaattccttttaccaaaataacgaatttgttcgttttggtataggatttggttcgcgtttggcaattggaatggattttgtgaatttctgatttgaaccgaacgtccctatgttttctcttccaccaaactaagacgattagcgaccattaaaagttcatcgtatgtttgggacggttttgattgacactccaaaaattttgccatgtttgtgtcattaatgttaagaacgaaaaaatttttggaaatttcgtctctttgtgccttacttaacccaacatgggcacaattt

SEQ ID NO: 29843 - DNA, 1368 bp, Heterodera glycines
tggatagagcaattgaggctatggaactatggcctaaaattaatgggttggaaatttcaactgaataatggtttcgttttatatttagggagaaataatatgaaaaaagaatattttattaactcacaaaggatttcagaatcggataatgttcgtgacttgggaattataattgactcgaaactgaatttttcagaacacataagcaaaattatacgaaacgcatatcttagaattttctagattttgagagtgttgaaaagcagggaaataaaaactctaacagcagcctataaaacttttgtacgacctcaattataatacgctaccgaagcttggaaccctaatttaaaaaaagatatagacaaaattgagcgggtacaaaaattttttacaagaaaagcacttagaaaatgtggttttgtgtacaaaaaatatggggaaagactaaaaatcacgggtttacacaaattggaagaaagaagaaaaatcaatgatttaacaacagctttttaaataatcaaagggttcaccagcctcgatgctgggaaaagtttctttttctcagaaaggctcaggaggcctttatttttgcgagtaaagcgccacacggccaaaacacaaaataatttttttcataggatagtaagaaactggaataaccttccagtggtagcggtgcaaattaataaggcaaaggaattcaggggtttactaaaagcaatgagttctgagtaggattttccatgttgccatatttacactatatttttatcacctgtgaatttttaacatttgatttatttttattcatttttattacggtattcattttgtattttttatttgatcatttttatttgtttgtttttggcaccatataagagcactaatgtgcctttggtttgctcgataaaattaaattaaattaaattaaattgtactgtttaaatttgcgcctgttgcaattttcccagtgaatggagagtggtgccctacttttgcctgttgtgaatttttttttgcaatcttttttgttctccctcctcctcagcatttaaccatttacattcgttgattagcccaaggcaattctgagattttttttgccaaaattgatttttatgtataaaatttaaaatatttgagtgtattagagaccggcacgatcatctttaacatctctaaatcggcctttttcggtcatttttcgaattatatcgaaaaaatgattaaaaaaatgtttttttttaaatttttatcacaattttttttaattcttgtatcgaaaaaaagatcgaaaaaatttaaaatgtttgatttaataatttttttaaatattagaatggatttgttgcatatcttaca

SEQ ID NO: 29844 - DNA, 926 bp, Heterodera glycines
atttggtcggtgtggcgccgtcaaagtgagccaaaaaaaagctgggttttttgagcaattttacatttattgcctcgcaaaagctgcatgtaaggaaaggaaacaattgatgatgctcactttctctgttcaatacattttgaccatgtttccaagggtgcaccccaaaattccgccgacaaatttttttaaaaagttttaaaataagaaatttccaaaaaagatttagaaaattttttaggaaattccaatgaaattttttgcgattttttgggaaaacattcgaaaaaacttactatatcatcacaaattacaaaaaaaaaaaaatttgttgactaattttgaaatttttttttgaaatcttataaaaaatgtccccctccagggctgtctattttggctgctactcgtgcatgaagcgtttcctgaacgaccaccccgaatggattcagtccaactcccacgccgtgcacatgttgtccgccggcagtgcaggtgtgctgttgttttgccaagctcctccctcatgtatttctcgtccaaaatttataaccaaactaaaaaaaacagaaatttagaccctcttccccccccccattgtggagtttccaaggcatgggatgcgagtactttttagacaactctccggaaaccactcttttaggacaaacatttgaaaatcggagcaggtcgtttcccccccgaaaaattaaaaaaaaaaatttttttttctgggggggggggtgggggaaaatgaagtgcaccctttgaaaatgacgtcttcaaatttgctaattaaaaaatcaatacaaatttcttcaaaaaactgtggtttaccaagaatacttcattttttaacaattaaaaaatatataggccccctttttggaagaaaattttttgtttaaaaaagtcgtgaaaagatg

SEQ ID NO: 29845 - DNA, 1589 bp, Heterodera glycines
gaagttccatatgccttgatccttatgaatatttttcacacttttttttgcatatttggcattttgtgctttttccgcgatttaggggtgtccactgcatttcggcgctggcgtttcggcgccagcatgtttttccactataacttttttctttagcatccaaatccaacatttttgatatcattgaaagcctaacattgtttagaagctttttctaagctattgcttcgcgattagacaattactaaaaaagttattatgaaaattgcgaagagacgaaatttttgaagttttttcttaataaaaatttttccatgcttgaaaatctttttgtttttttgtaaagctaatatagcatgttaagagctttcgaatgataccaagattgttggattttaatgccaacgaaaaaagctatagtggaaaaacgagctggcgccgaaactcccgcgcgaaacgcgtggggttctagatttaggtgtgcatattttatgttcttgttttggcacttttcaaaaaatccacattttttagctttgtttgatgcttctaggatggagttcaatatcctgtttttccaaagtatacttcgaaaattcatgcacccaaaatttttcattattattcaaatgttatatttcgggtgggccaagctttaaaaattaaaattaagcaattgatgaacccggccaatgggtggtacaacgaaaaggatgactcagtgattttggtggctgaagtgtcaacgtattcgcctgcatatccgcccagttggtctcagcagaaacggcgatggactgactgactgattgatccatttgagcaatcgctgccactgatctccttattcttatctccaaatttgacgatttttttaaatttccaatttgcattttttcatttgaaatatgggtgatcaaaaaattttacacttgttgagattggattgggcaaagagatgaggatgcatcgacagtagagaccgaaatttagtaaatggccgcgccttggaaaatcgactgggattggatcccgggtccgggactcccggtcctagtttttgggccggagccccgccgtgaccgggactttcaaacttcgtggaagattaattaacttctattttagcttggatgtcaatgtgtgctaatgttggttgattggtctggtctttttcaagtaaaacatcattgttgggatgttgtacatgattagccggtctacgtcagttgggcccctgcacgttttggcacctgcatgtttttggactataacttttttctttgtcatccaaagcaaggattattggtatcattcgaaagcccttcaaatgctctattagcctgcaaaaatccaaaaaatttcgtcaattttgaacaaatttatggccaaaaaggttggaaaatttggttttttgaatttttctggccataacttttctgaaccttaacgaaatttttcaaaatttttcaggctaataaaagacacttagggctttcgaatattaccaacaatgacggatttggttgacaaagaaaaaagttatagccaaaaaactgctggggcccaggcccaactgacgggttccg

SEQ ID NO: 29846 - DNA, 611 bp, Heterodera glycines
cccttcaaaattttgaaaaataaataaaataataggagactcagaattttgaaaattttttataaaaactgatgacaagctaatgtgataaaacaggttatttctcttcctttcagtatccctgcaaagtttggtgcgcttctgatcagtttctgaaaaaaaagttaagcctaaactttttggcctgtttaaaaaggaattaaaaatttttaaaaattttattcatctccctttttgatagaaaaagcatcagagtgcctaaactaacatgtaaataaaatttggtgcgtttcagaaccctttctgaaaaaatatttaagaattaattttgcaaaaaataaataaaaacgaaagactcagattttcgaaaatttttttgagccagctagctcggcgctcatttcagtgtaagttactcctttaccggggagtatccctgcaaagtttggtacgcttctgctcaattagcaaaaaatatgagtgatcgaattttcactaaaaaagttaagcctacattttttggcatatttaaaaagcaattaaaaaatttttaaaatttaataattttcctgcaccgaaggtactcactcggcctcttcgcggcctcgtgg

SEQ ID NO: 29847 - DNA, 1352 bp, Heterodera glycines
aatttggacactacggaaaaaataaatagaaattcttagtccaaaaattggccataacaagaatttttttattgtaaattttcataaattattcaaataatattttcgaaaattttttgtgtgcctattttttcaaaaattatttttgcgtcttgaatagaataaaaaaaaacaaaatctgctatatgaaattaaaattacgtaaaattaaaaaattgtaacaaaaaatgatttttaaaaagatggcgcaaaaaatttccaggacgaccgccaatgatctgtgaggagattgaaattccgccatgcaacccgtgcccgcctggcccacccggcaggcaaggcccaaccggacagcccggcacacctggcagatccggacctcctggccgacctggcaccaacggtgagtggagttaaaaaagtagtttttgttttttaattttacaattttaggcttgcccggacccccgggccctcctggaccgcccggcacgcctggacctactggacccgatggagaggtacagtctattatgtcatactgtattcttctagccaaaaatttcattccatgccaatgcacaaagccgaacaaaaatcgatattcgaaataataaaacccaaaattttcgaaataaaccggaattttcgcaggcttttctggatggcgcccggaaaatgcgtcagtggaaaatgcgtcagtggaaaatgcgttagtagaaaatgcgtcagtgaatgttttattgtcataaaacaagttccttgcgttttcgggggcacagaccatgaatccggtatccatttcggccaaatccgaaccccagacccgaattcgaacaaaaactcgaaagtccaaattttcgaatttagcatttttggttcaaaacggcatacatgatctattattgaaagactgatggcttttagtttgtttccgtgtatttaaatagatttttaagaaaaactctaatttcgaaattttgacttttcgattttttgttcgagttcgggtccggcgttcggaatgcagaacgatgttcttatagaagtttatttctatattacaatacaaatgccatacaactttattttaaagtatttttatcactgacgcattttctactgacgcattttccggtcacggcctacgcccttgatgccaacattgttggtaccattcgaaagctcttcacatgcactattattcttagaaaaagcgaaaagattttttggcttctgaaaaagttataaaggaaaaatttcgacttgtttataacttttttggtaattgtctaatcgcgaagcaaataacttgaaatagcttctaaacatgtttaattttcgaatgatac

SEQ ID NO: 29848 - DNA, 1124 bp, Heterodera glycines
ctctttgcccccctcgctccctctccttcgctccttctcatcactctctttctcgatatccccgtacatcctcacaaaatctcatatccgtttcccaatcttctcctgtcgccgatcccttccttctcgatcctccctcatccgtcctccccccccctccccgaattttcacgctttgtccatcgtccgcccttcttcccctcattgtcgatttttatctttctatccgttatttttcagtccatgaaccacgggttcaagctgttcgaccagcaccataaacaaaatgtagcacagattgccgccgaagcagtgatgcaacacaatttcggagcagagaatatggaagaggaagtgcagaaaatggaattggccagggttaatggaaacgatcagcagacgataatgacgacgatggcaaatggaaataacgtaagaaaaagggagaaagtgggaggagacgagagacagacgagggacatttaaaaagagagatacattgggggaagggggagggagggaaaggcgattgagtgggaaaagcaatcggaaaaatcgagaaaagatgggaaaggccttttgtttggggcattcgatcggtcagtgatcgctccttctgtttctctctgattttccttccttagcactgctcctcctcaactgctatcaattcctatggcattgtgccgtcggcggtggccggcgtgccgcaattgcaacacaacgcccacttttattaccccccgcctttgtccgccggtgccgcgcgttcgtccgtcgattgtgagcaaaagaaataacgaaccgattggtggacaaaacaacaaatgttaaagtgtattggtgcgctaactcagctagcacagcgaaccttttggacatcgttcaaacgccccaatcggtggaccaacagcaaacaccggccgaaggcatggggacgacaaatggcgggacgaacaacgcgatgtttggcacatgtaaggattagttagggattatggatcgaattactaattgctaattagtggattaattgtacatccggcggctttattagtcgtatcaaatgccctagtaaaaagggagcgaaatttagcaaatcagccgcttcccttctacaatta

SEQ ID NO: 29849 - DNA, 902 bp, Heterodera glycines
gtgttaaatctataaaaggggatgttaaagcgtgctgatggattaaaaatagaaaatagtttcagatctgttcggccataaacaattttacgtcattttggcgcggtacttttttgccaattttgtttttcaatcgtttttctcctaatttcagtcgtggaaaatgggtgtttccggttcttcattgtctgcttacgtgcaagtcgcagtccacgtacgaaaagatgtttgacatgatcagaaaccgctggccgacatttgcaccgaaaaacgcatccatggacttcgaacaggcgatggtcaacgccctccgcgcaaaacatccacagagctcaatcaacttttgtctcttccacttggtgcgcaacatgaaatctcgcctaacagacgaacaaactcgcgtaagaaaaataaaaatttattgattttgaaatctcaaatttagcgtttcacaaccgacgctgcctttgcacaagctgtcaaaatgatcacttcgctggcgtttgtgctgcttgaggacattacaccggcgctggcagcgctcgaagatcatcttccggatgagcttgagggcgttctcgattggttgtttgagtttaattttttttttcaatttcattagtcattttaaaggtttgtaatcaactatgttgggcgacttcgcaacaacggcacacgcactcgctccgccgcataaagcaaagcgttaccgtgaagcagacagacgaattttgaggatcctggagcgctacaatcaagaaaaagagcggccgcaaatcgaaaatgatcaccaatattgccaaaaccaaattaatccgagaaggattaatgaaatgcttaggggaattccagcaaacgtggtgggaatcaatgattttctttttaattgcattattatttat

SEQ ID NO: 29850 - DNA, 1241 bp, Heterodera glycines
aaatctttgaaatacaggatgaagcccaagtggcgacgaaggaattgcaaaaaatgttaagaaaaatggaaggaaaggaaaaaatcggaaatgaaatggaggatgaaattgggttgccgggaaatccgcgtgaagttcgatgttttaaatgtggacgttctggacattttgctcgtgaatgccgtgatgctggagaccgagaccgtggacgcagagtttggcgcaattggggcgacgctcgaggtcgaactggacgtggaacgtggcgaaacagcgaccagaacgaagtcggtgagggcccgtccacttcgacgtcatcagcgcacttgacggacttcggcacgttcttcaattacatcggaggaaaccaataaatgctaagcgatcggacattttcattattcattcaaattatcttactctttttaatctttaatttctctattttttaattgtattagtcaggaccggggacggtctattcggagggggccgatgatatacttaatttcttaattctctctttctctctcttatcctctgatcattgttcccccgtcaatgtcagcccggggggcggtccttcttttcactaatcgagactctttataagtgttcatccgcctcttctctctctcagtcttgcccggggctcccgcccatcagtctctgtccccgagaccgaatcgggttgggggttgcccattgtatcctgaacattggacaccagaataaagactgtgctgttggtcattggaagagtcagacattgacacttagaccttttgggcacccccttgtccccattgatattcatggaggtcccgccttaggggacgagacttggcgagactgattgtaaatagctgcacatatacggaaaaatttaataaaataaattaattaaataaagtttaaataatgttaaaaagcatttaaatgaaaattgtccgatcgattggagttgaagcaaaaaggaaaatggacagacaaaaattttaaagaaattaaagggcgtatggatcaatttaacaaaaagaaaaaagagaggcccgctgagaaattggccgaaaagtgattgttgaatgatcggcggcagctaaagaaacaatcaatgagaatgaaattgggcaaatttttaggaaaagggattttacattaaacagcagaagtgaatggcacaggaaacggatcgaacccacgagtgcaacgagtggaacgattaattggaccaaaaattt

SEQ ID NO: 29851 - DNA, 1299 bp, Heterodera glycines
  unsure (1)..(1299): unsure at all n locations
tttgattatggataaatttttgggaaaaaattatttttaaaaaatcggaatcgtaatcggaatcgcnaataatcggattntgggccataatcgtaatcggcgatntaatcggaatcggattttgtctggctcggcacatccctggtatgtatataattatttcaacattttaatagtcagaaaaaaatttcgggggggggggggaatccgaagaatttttttggtcaaaatttgtttagattatttaaaaaaattcagcaccggagagcaaaaacaggaattgtaactatttttagccaaaaaagactaatttttgccattttggagtcaaaatttaaaaattatggtccggcggtgccgataggtgccgccgggcaaattttttttgaaaattttaatgattttattaagaaaaatcgacaaaaaaatttaaaagtcccaatttttcctgtaaaaatttttaatttttcatttcgggcgggggaatggggggggggggggaatgcctcccctcacctggctaaggttttatgaattttcataaaatgcgtgaaaaataggtgtgacaaaatgtgatgcctctattttctaggcgaactacccaaataaccttaacaacaacaaataaaaaattataaatctattttaattcttaaataaatcgaaatacgggtagccctttaaataaaaaatagaaaaatttgttttttataaaaataatcttacaagaaatcgtctcgaaaaaaataatccaaaagtcaaattacggatcaaaattacggaaaaatcccaaaaatccgtaacccgtaatccgtaactcccaaaaccccgtaatttccgtaatccgcaatccgtaatccgtaattgcgtgcagccctgaaatagacgtcactgggaaattttatatgtttctaattggtgctgggcgttcgccaaactgccaattttacaatcttttcataaaaaactcttcctggactgttcagacaccgccgataggcgccgccggaaaaattctaaaattttgagtgtaatatattaacagaacttgtcaaaaaatgatcaaagttttggttaaatttgcagttttaggctgtttaaaaaaagaaaaaataataatttttaaattgaaatattttttattaattaaaatttcaattgaaaataatttaaagaaattattaaaaaaattctgtaccgttggggaattgaacccaagagaaaaataatgaaaggcagaaggtttagccagcagaccataaggaatggagctatccaaaaatagagaaaacattaagg

SEQ ID NO: 29852 - DNA, 1530 bp, Heterodera glycines
  unsure (1)..(1530): unsure at all n locations
ccccccttctcggaccccccccnnncctctctgacgacgctcccggctctctcacaggcacgggcttgtgcgcgaaaaacaggcggcgcgcgaaagcaggcggcacattcaaagacccgcaccgcccccacaggctcacgcctgacgacggtgcgggtggtaaaattacttattgggataaagaaattgataaaatatttagtaaaataagctnttaaacatattttaattcccccttatntaatatttgaatgctaaattatggtgaaaaatatcaaaaacaaccaaaaaaattgaattaaatgaaaaataacgagattcatatttaaatattccgggaaattaattttaatctttttcatttgaaatttagactcacaaactagaacatatacaaacaagaagaataaaaaatggcaaatctatatgttttccattatttgggaatttgtggaatttttaatataatatgttttaaaataagagctaagtaataaaaaccttttattaatttccaatatgacctggaaaatttaaatctaaaatgaaaaaaattgttcaaaaaatatttatcgaaaaaagttataatttggcaaaaaattaaagctgatagaattatgagccagaatgaaattggtcatttggtgtcatgtgaattaattattactttaatattaaaatctaaataatgggaaaatataaataaaatataaagtaaaagttgtcacttaattacattaaaacatttttcgtcgttcaataaataataaaaataaatcatgtagaaaacacgaagaaatattccataactttttaattcattcgtataatgactattttcatccgaagaaaatataccaagaaaaattcttaaaactttttaatttgtgtaatgactattttgaagaaaaacatgacaagaaatgccccaaaattttgaataaatttgttaaaagtaaaaataaggtaaagaattaattaataaattaatatcaattaaaataaacaagcatcgtcgttcaattcccttcgcaacgaagaggacgtggcgtcgctgatgcccgaaaaactaggttatttgatgagaaattatctaaactcttcgttctcaaagaaaacaataaataaaaaatattaaatttgaaaataaataatcactaaaataaaatgcaatgctaaaatttttagtaacattaatttctcttttacatttatttatcctgctagtaaaacttaagtaaataatcgttaataaaactcagattgagttgtttcatatttatcgatattttgataaaattaaggttttgactgattatctataaacaaatatgttaaatttgttatccaaagaaaaaaaattatttaaaagtcaaacaaaaaattgtattacatctatatcaaacagtcagtcaggatttgttttagagttttcacaacgtatttattctttatgattttaaaaacaatatttagatagttattaagaataaaaggagataaaatataaagagcgggttctttatgtga

SEQ ID NO: 29853 - DNA, 2229 bp, Heterodera glycines
  unsure (1)..(2229): unsure at all n locations
cggaagtaaaggcagaggcattatcggtgattagttcaacacaaccaccgtattttaagtagcaattggtaagaaaagcgtgggcaattgtttgtgcttttgtgtcggggaccgggacagaaattacgtatttggtgaaccaacaaacgatatttaaaatgtgtttattccctttttaagtgatcggaaaggggccggccaagtccagcccaactttggcaaaaagtgtgttggctggcaccatgagcatctcttcccggtacgcgggtgttggattgtgtctcaattggcaggtgacacacaatttgacccaagttaaaacgtcagagtacattttgggccaaaaatattttttgcatttggcaattgttttcctgtaattcaaatgaccaccacccaaaagagacgagtgaagtgattcaaaaatgagtccacgtaacgaaattgggacatagatcctcggagggagtcccttgtcctcaaaataaagaattcccgaaatcaatttgtaattggcagtgctacagcaaataactattttctttctcatccaaatcagctggaaattccccatctctgacaaacgcaatgtaggctgcggcttcaggatctcctgcctgctcttccaacaaactaactttgtaagtgtttccatcctcgtgtcggatggtcaaagtgtgcaaaaatgggtccgcgaccaccctggaatgtgccgccaaagcgagacagaccggaaattcgataatatcctcgagttcatccacattgtatatctccgacaagggcttgtcttcagcggcacgagaaagtgcatcagtcaaagtgttggcttttcccgccacgtggacaattttgacctgataattttgtagtcaatgagccatcgtgccaattgctgattggttcggattttttcagcaaaaacgcgaggggtttgtgatctgtgtgaagttcaatgtccgacatgaagatgaatggtctgaattcccttaaagcataaataatggcactcatttcaatttgaactgccggccatttcctttcagcagcagagagggttctgctgcaataggaaatggcagaaaatgtgcccgtcacgtcatccttttgcattaaaactcctccttgtccagtcgatgatgcatcagtgaaaatgtgaaatgctttgtcgtaatctggaaaaattaaactcggggcttgcgtaagtaattcttttatcttgtcgaaagcgttttgctgttccctgcccccattcgaatttattgccttgcctcgtaagcttcagcaatggctctacgaccattgcaaagttctcaatgtgccgtctgtaaaagcctgcctgtcctagcactctctttacttccttaacatttaaaggcacaggcatttctttgagaatttcgattcgacttaagcttggcttaaaaccttcagctgttaaaacaaatccaagaaaattcatctcattcgaggcaaaaatgcactttttcgggctaagcttcagattgtaaagccgaaaacgctccaaaaccttccttaccgccgttaggtgctctgaaaagttcggactttttgtgaaaatgagcacatcatcaacgtaggccaatgaagtatcctccaatccagacaaaacgatagccatggccctcgaaaatgctgcagttgcatttttcagcccaaatggcatcgtaatcatttggtacactttgtcttcagttataattccacattttcttgacgtttcttcactcaatttaatttgaaaatagccactggccaagtcaagagagctgtaaaattggcaatttccaaccctttccatgatgctatcaaggcgtgggagagggtacttgtcgggcaccgtaacttcgttgagtttgcgaaagtctaaacaaggacgaattccaccgtccttcttctgtacaatgacaattggagttacccatggggtatcggactcaaccatgactcctgcttctaaaagctgattaatgtgcttcttcaattcctctttgtatttgtacggcattcgtcttggcgcagatgcgattggttcctcagttgtggttgtaatgtgatgttcagcagctgtgaaaagcccagatcatacctaaacttactaaaaacgtctgnaaattcttcaattaatgccttcagctcttccaaatctttgccttcaaccattgccttagaaaagtcaactacaaatgttggggtcattttccattt

SEQ ID NO: 29854 - DNA, 1056 bp, Heterodera glycines
  unsure (1)..(1056): unsure at all n locations
tggccgttaagaaaaagaacggtaaaacacgtgtttgcattgatttttcaacgggattaaatgacgctctcgaactgcaccgtcacccgctgccacgtccggaggacatctttaacgcgatcgccggatcaaaattcttttcacggctcgatctacgtgatgcatacctccaactcgaattgtcggaagagtccaaaaatctctgtgtgatcaacacgcaccaaggccttttccaatgtcaacgattgccattcggtgtaaaatcagcaccttcaatttttcaaagtcttatggacaaaataattgcgccgattcctggtgcctttgtctacttggacgatgtaataattagaaatcaaacactggaagaacacatcaagactatttttcaagttttcaacaaaattcgagagtacggacttcgcattcaattggaaaagtgcacctttatggaaccccaaacgcttttcctcggccatataatttccgaaaagggaattcaaccagacccatcaaggtccgaggccatcaaacagatgccggcaccacacgacaagtcgacactccgatcatttcttggagcactgacatattacggcaaatttatcaaagaaatgcgtgagctacgaagcccgctggatgaactgctgaaaaaggacataaaatgggaatggagtcgacaacaacaggaggaatttgaaaaagcaaaggaattatgctttccgacctcctgttgacccattacaacccaaaattgccgataattgttgcagccgacgcatcaaaggacggaatcggcgcaacaataagccacattttggccgacaaatcagaacgtgtcgttgaacacgcgtcgtgcacattcacagcggcacaaaagaattatagccaaattgaaaaggaggctcttggtttggtgtttgcagttcagaaatttcaccgaatgctgtatggtcgaanattcacactgctcacattctggctatttttggatcaaagaaaggaattccatttactctgccagtcgccctgcaagatgngcactcatcctttcaa

SEQ ID NO: 29855 - DNA, 1322 bp, Heterodera glycines
aatcaccgctttgatggcgtcaatcatcgacaacaacatttcatcatccaagtacaacgagcattcgaacaccttcggcacattgtttgggcgcggagtgaacagccatttggccacgaattgtccatccgatgccgtggcactgtcatcggccgggaattcgatgaagaaattgtccaaggagacaacgcgaagcgatgcacaatcgtcgagaaatgacggctcgaatttgcgcaaacggtggaatgttccgacggacaatcccatgctatgaatgttgtttccgagcagtggccaaatgttgcgcaaaatcaacttccaaatgcgataattaccacaaaacgtttggatggacaaataaattggacaggcggcgaaaagtggacgaaaatggtggagaaaagcgatgacattttggtcgatgaaactgtgaaaatggatggggaaatgttagcctaaaatttttagcataatcgctcaattttacgaaatggtgatgcgtttgaatccgatgacgttgcgtggcaattggacttgcggaattggcaatgttttccaatagaaatcgacaatttccatttctttcgtgaaaaacttccaaaattggcgccaaatttccatggagttcagcacccaacgccgcgttttgaactgttcgtcgacgatggtgtcaaatcggtggctgaccagtgcaattccaagacccagttgagaaggcgcaagaaattggaacaccgacagcaaaacgtcgccggaaatgaaactgaaaaaaaaatttatataaatatttgttgtttgttttacattttctttttgtgatggcctcgtggttttttgaagcgattccaataaatccaaagaatggcacaacagccgacaaacattggcacgccgtacagactaaaaaatgagaaggaaaagggttaatcgagaaaacaatgcacaaaacgtacagaagcatttttgaaggtattgtcagggagcaattttgaagacgaaaattatgaatggagaaatgaaaaatggcgggatagcaacgacttttatacaaattttttgccaaattttatacgattttattaacggtcgcattcgctgacactttgctataaaagcactccttcctctcccatttcatttcattcgctcactttttccttcccttgtgcttcctcaatttctttccttgactttctcagttttcttcgtcacgtacatacattttttaatatttttttgtccgcagaaattggacaagagacgaaaaggaaataattttcctccatttgtgggaagataaaaaggagccccccttttggatg

SEQ ID NO: 29856 - DNA, 1607 bp, Heterodera glycines
agtttgtacccagacataatccgatttccaatttaaacctcctcaaaaattattatttttttagatttaagccaacgtgtagaaagtgtgcgggaggagagcacgcgattgagggcggagaatgtcgtgttgggaaagtacatcaaaaatttgatgcgttcgacttcgctcttccaaccgacgaattcgaaggaacaaccgccaaagtaataagagaacgctttacatttggagtgaaatgtttgattgtgttttgctttgcagttcgaaaccattttattctgggttagaattttttgctgtcaatatcgctgtttttccatgccatatttactgaattagagcccccccccccatgtggctctattttcaactcccctcggaaggggttttatttcaagggtgattctaattcagaggggtggttttaattcagtaaataaattaacaatgtattaacctagattttgatccaaatttactttgtctgatctcttttacatgtcctctcggtttaatggcaattactgttcgggtttatgcgcctatgcttgaaatcatggaaatgcgtgttaagtgtattctaaaataaacaagtaccaaattcattttcaagttaatttttttatcgagtttaaatactacctatcgattatttaattctgttatgctttgtaaaaataaaaaccttaaatttgaaccatattttgttataggcgcaaatgtctgcacaatgtcctttcacctcaaatgctgctgttattttaacccttttattattttttttttgtaattttttgcttgcagcaaaataaagcttttgttgttaataattagttttaggcgcgattcacaagaaaagatggtttacgatgaattttggtgaaataaatgaagctacacaacaattgccggctaaatgcaaatacaaatatctgcattcgtcttattttttgaaaatttttcgggcatcatacgttaaaatgttttacgatttttggaaaagggaccaatgatcatccaaccgattgattgtaataattatatgcaatggagatcagtccataaaaataaaaaatcggaactgaggaagaaaataaagcactcacaatcataaattaatgtttttgagtcatttccctgtgtattcgttcataaaaatatcaaaaagcgaagcatcgtgaaattggtcctaaaaacataaatcattaaaaatctaataattttatacacctctcctcccatttgcaacatctcaagcacttctgagcacaaattaacttaaaaagaaacggaatatttttaattaaattaaacttttaagaaaccaatttcggaattgctcgacatcattgagtttgagcttaggaattgcacattttcgaggttggaccattgcgactttagggcaggctgaaatatttacaaaatatttttaaaattttttaaaaaagatgcctctcgcttgcaaagctcttttatgattttgagcatggccaagtaaaggtcgctgtccaaattgctaccggtggtgaaagaatggagcaattcgaacggccgaaattcgctgccactgctaaaaataaataaataaaaagacaataaat

SEQ ID NO: 29857 - DNA, 1233 bp, Heterodera glycines
  unsure (1)..(1233): unsure at all n locations
aaatccaacgcagaattaaagtacaggctatagggaagctattcccgaaggattcggtctccccataaatctgggcgcatcggttcggggggactgccccgaaaacaaaaaaaatcgattttttcaagtgtccgtttggggtactcaaacaattatggggagcaaaaatccaacgcagaattaaagtacaggctatagggaagctactcccgaaggattcggtctccccataaatctgggcgcatcggttcggggggactgccccgaaaacaaaaaaatcgattttttcaagtgtccgtttggggtactcaaacaattatggggagcaaaaatccaacgcagaattaaagtacaggctatagggaagctattcccgaaggattcggtctccccataaatctgggcgcatcggttcggggggactgccccgaaaacaaaaaaaatcgattttttcaagtgtccgtttggggtactcaaacaattatggggagcaaaaatccaacgcagaattaaagtacaggctatagggaagctattccggaaggattcggtctccccataaatctgggcgcatcggttcggggggactgccccgaaaacaaaaaaatcgattttttcaagtgtccgtttggggtactcaaacaattatggggagcaaaaatccaacgcagaattaaagtacaggctatagggaagctattcccgaaggattcggtctccccataaatctgggcgcatcggttcggggggactgccccgaaaacaaaaataaatcgattttttcaagtgtccgtttggggtactcaaacaattatggggagcaaaaatccaacgcagaattaaagtacaggctatagtgaagctattccggaaggattcggtctccccataaatctgggcgcatcggttcagggggactgccccgaaaacccaaaaaaaaattttttggataaaaattatttaaatgaactgactagataatatttaaaataggttatttctcttcctttcagaatccctgcaaagtttggtgcgcttctgatcagtttctgaaaaaaaagttaagcctaaactttttggcctgtttaaaaaggaattaaaaatttttaaaaattttattcatctccctttttgatagaaaaagcatcagagtgcctaaactaacatgtagataaaatttgggtgcgtttcagaaccntttctgaaaaatatttaagaattattttgcaaaaa

SEQ ID NO: 29858 - DNA, 428 bp, Heterodera glycines
aaatggcacaaatttgtcatccatctgtacagacagtttcgtttctggtcctttgtccttgctaatttcgatcgttctccaaatagtcaattcgcttttgccatcaaaatgtttgtccaccaacgcattgaaacgtggcgaaagcaatgccaatttgaggccgagttgagcacggtcaaaagaggggaaaatgtccatccaaacgtcgttgcaaatccaactgaaataatgaaagtaaattagggcaaataagaatttgtgacttttcaaattgcttaccgtctgttcatttttgtggcaattagcacaatttggccgagttccgaatgatgtcacacaaatatataacagaataattaattgcgttgggtaaagcctggatttttagagttttcctatttttacggattgcacttgatgaaagaaac

SEQ ID NO: 29859 - DNA, 1024 bp, Heterodera glycines
aaatgcatttttatggcataatttgaggtgctgaacactaatatgcactttatattgtgtttcagactttttggaaagtggttaaaattttttgaaaaatcgtcaaaatttgagccccggaaaatccagtgaaatttcgaaaattcataaatctcttcgtttttggtcaaatttagtggaatagagctttaaaaatagagaaaaattgggagaattttatgagatttatttggaatttctatcttccaaaataaaaaagttattccagaatttctggaaaaattcgatttttcagaaaaaaattcagaactcccttctgaaaaagtattttataaaaataatatactcaaaaaatccgcaattttttgctctattttataaattttaatttagcttattagcacttttttgaaaaaagttatagaaataaaagtgattttggcattcgggaccaaaggggtgtgaccatgatttctgagtgaaaaaattttttggacaaaaatcttccaaaaacatgtctttaggggttatttgggccgctgattacgaatatgtaatcagattttactttagacatggttaagacctcagaatccctgtgtgattggggattctgaggagtgtgagcgcccgtcctgaggccgcgaagcggccgaatatcccccaaaaaattaaaaaacgggcgcgaagcgcctgtcctgaggccgcgaagcggccgaatgtcccccaaaaaaattacaaaacgggcgcgaagcgcccgtcctgaggccgcgaagcggccgaatgttccccacaaaattaaaaaacgggcgcgaagcgcccgtcctgaggccgcgaagcggccgaatatcccccaaacaaattaaaaaacgggcgcgaagcgcacgtcctgaggccacgaagcggccgaatgttcccacaaaattaaaaaacgtgcgcgaagcgcccgtcctgaggccgcgaagcggccgaatgttcttaacaaaattaaaaacggacgcgaagcgcccgttatgaggcctcg

SEQ ID NO: 29860 - DNA, 760 bp, Heterodera glycines
tgcaggtcgcccaatgcgacaactgaagcccaacaatcaattgccaaatccatgcggtgccatcccccttcgatgccaaccccgcggcgcttgcccccctctgccaaggctcgtccgaacactcagcgcgccgccgtccaactcggcaatgctcagttgcagctgaacaatgaattgcaacggtttgttcctctttgtctattcaatgcctgactcaccagtgttgtgttggccatgtccaaaatgctcagcaatggcacttcgttctcttgttgctgtttttgtccgtgtactgctccaactgttgttccttgctgctgctgatacattttcctttgtggtcgttgcaaaaggacgtgaaagtcgaaggcgaacggtaggaaggagtacggtatttggagggcggagcgaggaccaactgcgaccaattggggctgaggcatctatggagggggtagggaggggtataaaacaaaacgaaaaatggccaaattggaaaaaccatgccacccccattcatcatcacacctgacatgacggcaacaatttgggcgcagaggccaacaaattgagtccgttcagctccatccgggccaaacatccatagaaggaattctcgagagaaaactcaatgatctgaataatggagagtttgccatgtttttgccaaatgttttaacccctccccctctctttcacctgttcatctccgatctcttcaggtcggcccccaatttccacctgtgccaaaaaagagtga

SEQ ID NO: 29861 - DNA, 2555 bp, Heterodera glycines
  unsure (1)..(2555): unsure at all n locations
ttgaaattccaaaatcatttataatgatcaaanagccaagcaatattataccatatntaattaacatattcttaataaaagaaaataatttttatccgaatggcaaatggttttaaacatgtgcaccacactgtactagcataattaatcgagaaatttgaacttttataattttagaacattaaaaaattcttaataaaataaacagttattacaagaaattaaataattatccgtataaataatgaaatttatttaaaccgaatataaatatttttaattaaacacctatttagtccaaaaaattaaataatgctcatgaatataaaattgaataattttgaaagtttatttttccaaactcgtccaaaaaaatttacataaaaatgaaaatataaattcttcggaaacgagccatgatagcggcgcagtgcgaagatgcgtcaatttccacagtgtgagcaactcaaatgtcgcgtcattctcggcaaggcattttgagctcagagtatgaggcgtggcggaaacgcacggggcgatcagccgcaacgaattgggatcactttctttccccgccgatgaataacaaaagtcaatttttgttgatatatattttcgtaattaatataaattttaataagcaaaaaaagcaaaaaaaaaaataggaaaagcaacttttattattggaaaattagccagaattgcaacaaaaataaagtgaatattgattatgattattatttataaaagagattttcattttgtttttaattaaaaaaaaagatcatgcttgggaatcaatatttggacaactttattttctaaaaatgctttgtaatcaatgaaattttttggaaattttataaatcaaagtttggcccaatgaaaccgcgaccattgactagaaaatctgcagcacacaaaaataaccttaagaataccttttcggactttttaatttattttgaatttttgagaattttttaagggaatttttagaaatttttttgtccaaaaaaccattttaaaatttttattaaatatatgatacatattgtgagttttttttgtacctgttcttataaagcaaacagaaaaatatctttaatcagtgagcttgaatttttttttttggtcccaaatatttggagactttcaaaatcactttttagagaaattttctcgaaaatattaataaaatgacattccacttaatttttacttttgtcctaaatttaaaaagatttatatatatattttttttttgttgttgcaattttatgtccgtattttttgccatatttacgataatttccgtataattttgagccatattcattcatcagcaggaacaaaaacggaacaaacggatgttgaagcgggaaacaaaaatgaagaaggacaccgaaccaacaaccaacagaaaagcaccaaaagcgatcagaaaagcataaatcgacaaagggatcgcttttcgcccttctgcttcccattccgcgaccaacaaatcgccaatgccattgcacaaattgtcggcacatgtcaagcaaatgccgttgccgttgtattgcgcgcacagtttggcggcggcatcgcaatttgtgtcgttggcacagtcgcggaaagtgaggggcactgaaagcacaattcgtcaaaccggagataaaaagaaatctaatcaaaatgaaaaattgtatttttatggtaattaataattcgtgatttgagatgacgtcattagtgtgaattacttttatttaatgctttatatttaggtcaattaacgaagcacaaataaaagattcttacattttccaccatcacaagtgtaggtttgacaaacaaaagtgtcatcatctttaatattttcatttattcattttaataatttcaaaaaattaccaccaaaactttcgttgccgcattgcttcggttcgaatacgctgttttggcctgcataacaattttttgttgcatcttaatttaagcaaagtaatttttttattaattattaaatgttctttattgtttttttttgttaattaacaaggctaattaattataatacaatttttaccagatcgtgattgaacaagcagcagacacagaatgtaacagaacattttggtgtcaaataatcctggacacattttcaaatgcttaaaaaattttaagataaattagctaaagatgtatcataattctttatttcaaatattttcataaaaatgtttgtgtccattttcctatttttttgccgttttttcattcattgcataaaatttccattatatacatttcacattcaaaaatatgttttgccgaacatttcattaaagctgtgttctgttaactaagtatgtactgctccagctcgatgcattaagctaaagcattattggattaagcggttttgcaatttgttagggtttgcttgcaaaattggagaaaaataaatttcgtcaaataaaaaatattgagaagaaggcaaacatcgggggccttattcccgtcaaagggttaagttcttaaccgcggttaagataagtaaacca

SEQ ID NO: 29862 - DNA, 1596 bp, Heterodera glycines
aaatcccataaaattctcccgattttttgctattttttatgctttaaatgagctgaattggaccattttgaggcgagttatgaatttttaaaatttaggttgaattttcaagggccaaaaattattgatttttcaaattttttttaccaccttccaaaaaatccaaaacgcaatataaagtgcatatacgtattcagcacctcaaattatgccataaaaatgcattttggctaatttaggagtttaaaaatttttcatgaaatgcaaaaccatggggtcccccctatggttttgagtttcaaaatcacaattaattttataactttttttaaactcaaggtaaaaacatgagataaagcacattagatagagcttaaaattctctacaaaaatgctctaagacaaattttcgctaagatcaacgcctgacgagttataagccttgaacggaaatggggagctcaattccggaaaatttttctatttccggaaaattttgaaattttttcaaaaatgccaccaatcgatagagctcgaaaaacggttgcttgaaagtggtctccgttttcctgggaaaaatcggcaaaaaataataaaattcaaaaacgaaaaattttcgaaggggcctagctcgaaaaattttgaaaattttcaaaatctgaaaacgccatcggatgcagctttaaaaactacacaaatgctcaagcggcgccaacccgctccgcttaacctccagcgagttattcacgaaaagccaaaaccggcattttgagcgccgttcagtcgccaatttctacaggctcggcatttgatctgattaaaaagtgatcagtgacaaagttgtagccaacatgtctggggtgtgccctctcagcagactttttccgctcccggtttccaggaaaaagttacagcccgaaaaccgagctcgtttttcaaagtccgccgtttcagcgccgctggcgctcagttggcctccggaccggaatttccttatttttcccagatgcgccgtcaaaagttacccctgcctgcaaaatttcagccccctccgggcaaaccacggggacttataattttttctacgaactgcaacattattctatatatatataaactagcgtgtggcgcagtaattgctgggtgtagacagtatacttttggtatatatgggcgggcgctgacatgagcgcttcgcgcaaaggacttcgttgctagtgcatgcgcgattttgaaatgaaacgggcgctttgcgcttctaaatattgtggactcattcggccgcttcgcgacttgcacgacggttcctttgtcgattcgttcaccaattcaaatggcatcattggaattgaccgatgaacagaaaaatgaatttggtaactgacggaagaaatggcattggcacgaagaaaatgctaaaaacaatttgattgaaaacaaaaattaaggcaattaaaaatcagtgattgttgaaaatgttgggccacacctccttgaaattgttgacccaattggtgttcccttgttcgttgtaattataacaactcaatcgcttgggttggccatcttttctcggagagtgcaaccatctggaca

SEQ ID NO: 29863 - DNA, 1952 bp, Heterodera glycines
tttaattgttggacataaatgagaaatgaccaattttaagccaaattttgaaaatttaacagaatttagagctcagctgatatgcgccgatgaggaaaagttttgcaaatttaatgaaaattgggaaagaaaattaacccaaaattttctaaagaattaccccacgcttaacgggcatatgagaacccctattgaaaagtttggattggatttcaacaaattctgataaaatttagtacatgtccccccccctccctcccactactcctccattgcctgtttgtattccatagtccgttggctttgcccaaattccaacaccacgcctgtttctcgatcagaaactgttgctgaggacctttgatatgtgatttttaagtacggtatttcctaaaatactgtcccccccccattaaaaagggatcaggacattccgccagtgaaggacagacaatccgtcggtggacaattcgtcaaaaattttattttgaacaatgatcaaaaatcttgcgaaaatcattgttaaattcaacaaataaattatctaggtttttaaaacatttggtaattgtttaagacttcatttaattgatcatctatagaaattatcatttaattcgttaaaaaataattatttcatatttttttttttataaaataacacaaattattaattcatttttttagcgattgaaattcatttcacttggttttaaataaaatgtggtgtttttaaaaataaattttgctgacggattgtccattactgacagattgtccgggagcccaaaaaaaagacccctcccctgaaataaagaatccatttagagggggattgaaaatatccactgggagcttgagttttcggaaatacagtagtatgtcattttttctcaattttttcccgtcctaccgatcactgatccaggacgacacacgcgaagccaacccttgaaaaagttaaatgaaaattataggaaattgcaatttcaatcccagaaaaattttatattgtatgagaaatgccattgacccgaaaatccgccgtcggaaaacaacggaattatttaatttgttgacagaaaaaaagcaccaccatgcattgtggagcggtcagccgatagtgcttcatcatccaacatgcgatcatgcaccccgtacggccaagtccggcctttaaagaaaagttgcaaaatttttgtggctcgactaaaaaaacaaaaaaatttttgggccattttttgataaattttacccacctccataaattcttttaaaacagtaactattgtaaattttcagctttttttttttggttacggcgccgccaaaattgatcagagaaaaattgatttaatgaaaatgccagcaaaatatgtgttaattattctcttacattttaatgcccatttgtcatgggttcggatccgcacgacagcttggtgatttattttgaattttttttctaatcatttttttgatcacttttggcgccgagaaatttacaataaacaaatggaatatgctctatgacgaattatggatgggaggggggattaaattcttttggcccaaaaatggataaaaatgccataaaatttaccaaaaaccctcaaaatcaaagagatttcataaaaatccatgcctttttactagttttgacacaaaaaaaagaaactgactttacaatgcaccgcaattgcgcccggcgccgaatcgacgacatccaaaaatcggagcacaatttcctcggtgggcgtcgaaccgtcgatgaagtacaagtcatggtgtgcaaagccagcatcggtgaacctttaactcacacattggttagcttagccagagaaaattttagcaaaaaattgagcgaaaaactcaaaatttttaatttaatttgggcgcattttgatgagccaggtcacacatttaactgcaaatctgtctgataaaat

SEQ ID NO: 29864 - DNA, 1268 bp, Heterodera glycines
tgttcgggtggaacccgagagacatttatttaatttgattattgtcatttatgtttatttgttgtgtctgaccttttacagacagacacattccttattgatattgtgaccatttgccctcccctcttttcattcattcagtttatgatatttgtgttcacattttccaattgtctcctccgccgtcctccgacatatttatttgttattttaatttgtcttcaataaatatttatttgttcgtccattcgacatttcggggaccgaacactccatttgctttgttttttttcttcagcttattatacccattgctggcaacgttttacttgcttaaaaaatcctattaattcttagtggattagtcagtatatgtaaaatgttttcgttttattagattttttcatgtattctttagataaataaaataacatttttttaccgtgtcaatttattgtattatttttttaataattaaaattttcataaaatcaaattattgattatttttgttatatcatttaaatagttgcactgagagtgtaatttttattatcgtccagatcttaattaagtcattcaattaaagaattatataagaatatttgttttcaacttatcccattaacggtgtgaagaaaatttaggaagaagtaaaaaatgtttgacatgacaaaaactaaaattttaattaaaaaaaggatcaaagaaaccaatgtatttaaattttttacattttttatataaatgaatgcaaatgcaatgaactacttagaaacaatctgttgtgactgaggcatagacaatttggccaaatggtctacgcctcattcacaacaaaaagggaactccatgttcggtccctcctcgatagaaggggaccggtaaactggacaccagaaaattggacaccggaaaatgggggaccggtaaattggacaccaaacggaaaactggacaccgtcggaattttggacaccaaaggaaaattggacactggaaaactggacaccaaattcctcttttaaaaaataaacccaggaattaggttgaaaaataattgatgtggataaatggattaaggcatttagagtggatcaaacattaaataggaacgatgattgatcaaatgtggcaaaaagtgtacgaaattgggcgatgattggttcatgtgccaaaaaatgcgaaaaaatgggaaccctatcaaaataaagtttttttcgttatgaatgtatgaaggctttctgctgctgatgttacaaataata

SEQ ID NO: 29865 - DNA, 1117 bp, Heterodera glycines
tctgggaaaaaatcgaaaattttctaaaaacatcactaatcgatagagctcgaaaaacgatgttttggaagtggtctccgttttcccgggaaaaatcgttaaaaaatcttaaaattcaaaaaccaaaaaatcgttttttaggcctagctcgaaaatttttgaaaattttcgaaattttaaaatttgcaaaaatcgagctcattgagctctacaataagtctgctggcgccccctggcttagatcaaacccgggcgtgctattcgcttggtactgaagtgtccaaaaaaagtgattcttacgttgcctaacctacaggtcaggcctttgatctgatcgaaaaatttttgctggcaaagttgtaggccacagttggggcatttcgcttttgtggtcctctatgttctgaaagcaaaagcaaaaaatttcgtaacagtgaaactgtcagcaaagtcagttttcgcgccgctgggactcagttggcgaccggaccggaaaatccgtttcccgaaggattcggtctccccataaatctgggcgcatcggttcggggggactgccccgaaaacaaaaaaatcgattttttcaagtgtccgtttggggtactcaaacaattatggggagcaaaaatccaacgcagaattaaagtacaggctatagggaagctattccggaaggattcggtctccccataaatctgggcgcatcggttcggggggactgccccgaaaacaaaaaaatcgattttttcaagtgtccgtttggggtactcaaacaattatggggagcaaaaatccaacgcagaattaaagtacagactatagggaagctattcccgaagaattcggtctccccataaatctgggcgcatcggttcggggggactgccccgaaaacaaaaaaatcgattttttcaagtgtccgtttggggtactcaaacaattatggggagcaaaaatccaacgcagaattaagtacagactatagggaagctattccggaaggattcggtctccccataaatctgggcgcatcggttcggggggactgccccgaaacaaaaaaaatcgatttttttcaagtgtccgtttgggggtactcaacaattatggggagcaa

SEQ ID NO: 29866 - DNA, 1531 bp, Heterodera glycines
tatattgtgtgtgtttttgtttttttttcttaattgcattcgctttttttttgcttatttctctcttcctgttttgcttttaaaaatacgtgtccaaaacggtcccgtcaaattttatcgtttttttttgtatgtcctccaaaaattggagcgcgttttgcccgctttgttataccaatcattttttgttcgaatattacgctgttttttttttcattgtacaacaatttgtttgttgtttaaaatgcaaatttaagcgaaaacactcaaaaaaagcaaccaacaaaacaatttgcaattcgcgaaaaaaaatgtcgtcttcgtcaagtgctcgacgctcggacagcgagtcggaccgcaaccgacgtcatcggtcgtccaagggcgccccgccgcgtcgtgcaagtgatgagcaacggttggttgttgtgccacaattacaattttgcatttgttacttttcctggcacggcatttttatgccgtgccaccgctggtgttgccatatttgcttcaaatgaaggcatgatgggtgtgatttgaacaacatcccggcacaaaattgggtcatatgtcaaagagttacaataaaaatgtacaagacgggttcactacgaacaattacattgagacacgggacaaaatgggttcactacctcctccaccttaaggaaatttttttttaaaataaaaacgaaggttgaacccttaacttgttgcgttgcaactttttaccaaaaaaacaaacaaacacaacttataatccttgttttttgaccggattttttgatttatgcttcacctttgggaactgacaataagttgtgcatcgcctatccctggtgtaaaacgaaaaaaagcattccatttataaaagccatgactacaataccgcaaaaaatggacctttttggccgataccatttttgttccttattgcatttcttagaaaaaaaactcagggcaattcatggtaaacacatagaaccaaccatcaatgtttataattttgttaacgaaggaagatgatactttttttggtccaaaaattcgtcttacaacatttttgagtgcacagaaatgtgcaaaattattgtaatacctcactcatcgaagaattgaaaattcgaaaaaggtttacgatgtccaaacgatctgtgcccgtccggcgaaatccccctcctggtatatacgagtgcaacacaacttgctcgcttttcatcaactatctctaccttcctatttatttttgtctttccattatttcattttttaaaaaattttattccgccaatttttgcttattgagtaagtcgaatgaatcgctgacgatgcgtgaacacagggaaattgaaactggacaacacccgaattagctgtttgttgttcggtctgtataacgatgttcccgtttacacgataatgcgtgtgaaccgtgggctggctggaagaagttcctcttccaatccccccgacccgtttaaggtggccggatgtggatttttttaaatagccgaccacccgctccccc

SEQ ID NO: 29867 - DNA, 826 bp, Heterodera glycines
cgaaatgaacgtcatattcgtgattagcgaccccgaaaactccagaaaaaaaattaaattttttttttatgtggcgtaaagtgaaaaagtatcggaatttctttttttagttttatgagaggttgtgttaaccttgatgttgagcagtgaacccgaggagcgtgccctttgcaaaaaacgcgacatcgaaccggaggacatgtattcggtgatgaaaataatctgaaaaacggggatggacactgaatggtactttttcagagttatccccgaccctcaattctgtgtaggggtcgggattggcacacgcctaacaataaggatgatataccgatatggtactatgtagaggaaaaggaaaatcggttcctacaattttgataattcgtgaattttttttctcccaaaacctttttgatgaaataccatgtaaatgatactgatgagtaatatttttaatcattcaactgagaaacccattgcaccaaccctgggcttgtccgatttggtgtccatccaatatttatggaacttgacaagatttgggtgctccagacggactaagttgtcgaacacagcgcgaatcttctcctaaacgattcggataaatgttagattagtcaaaataggtgggaattaaccatttctaattgtaatttctggatttgtttggttttgcgggaatgaaaatcaaccaatcaattaattttaaggggtctgtgaaactgcattttctgtgaattttttttcggaattaatcggttccggaaaatacggttctgatatcgattacgaccaaattcgaaacctgaccctgtattcaaaa

SEQ ID NO: 29868 - DNA, 1398 bp, Heterodera glycines
  unsure (1)..(1398): unsure at all n locations
ttaccaaaaccaaataatggaaaacataaaatttttgtggccaaacgaaactcaattaaattttgcccagaaaatgcgacgtaaacgaacaaaaaatgaccagattgatgaagaatttcgaaaaaggagcacagtgccaaaagataattaacggtgccattgagtgacctaaacaataaatattaaattataaaatatatttaattactttgtcctaatggtgacataaatgactgaaaaattaagaacaattccaagagtggcgatgaaaccaaatatggtagcaaagctgatcagtttccagtttggagtttcatttgcgaattccaaaaagaacttaaattcattaaaaaataataatcacataaaaataatttgttaattaccgttaaattgttcagatcagccattattgcaacagtttattaatgaccagaataataagaaattgaaatattaattattatttggttgggtcattaattacccgttttaatttcaaaagtcttgggtggaggaatggcaccgcacttatgagtttgtttaaaatgagtccatgacaactatggcgtgataaaacctgactaattgttgcaattttccgcagcaaaatattactgtccatctattcgtagtttgcaattcatttgataaaaattggagaaaattaattgctattaaaaatagaataggttttaaaaaaattaattaattaattacataaatctgaagaattttctgaaaaatgtaaaattacttaccaaaattgcgaaaagaaagatcaaataggactaataaatataatgaaggatcaaaggaatgagacaaaagaagaaatagtagagcaaaattttattttcttgccctaatttgatcccaacataaggaaaagaaatagacgaacacttaaatttgggaaaatagccaatgggtgggtgattgattctattaaaattaacccgaggcgcatgacgaagaaagttataaaaacgggcaaatttttggaatggcatttccattttagcggtgatttaaatggcagtttcaatttcgaaatttagaccattaattaataagaaatcgaattataattaattaattaaaatgacttcattaaatgcctaattgctttgtttttaataatatttattttctcaactattattcctctttgatattcttcggcttttcatgattctccccctgttcaacattctgtagataataaaaacattcatttcaaccaaaatgaaatgatcaaacaaaatcagcttaaatttcatcattatttttttttanattttaaattgatgaacagaaatttgacaaagattgccaattaaaattggataaaagcattagaaaatgattaaatatggaatatataacattttctat

SEQ ID NO: 29869 - DNA, 1075 bp, Heterodera glycines
  unsure (1)..(1075): unsure at all n locations
aattaacattgaaattcagacagcatttggacgttacgtataatttggttggggaactaccgtaatcacattacattttagacaaaaactattttaggaaaaaaacaaaaactatagttatgacgcacgttgtttttaacccggacaacgtgaattggtccgcgttctttgcgttacagcagcagcaggagggaagcggtgagatgcagtattttgtaggcaataaatttcagcgtggtggcggtctgttacaaaatatttcgcggttcctgatgcctgtagccacaaacctgctaaagtctgcctcaaaagagggcatttccgcagggacacggatgcttgacgatctcgcgcagggaaaggcgtttaaagagtctctcaaaactcaggcaaagcaaggatttgagaatctggccgaaaagctcaaccagtgcggaaagggtgggcggcaacggcacaagacaatcactcatagaaaaaataaaaaaactggtacattgagagggaaacgacagatcatcgatcagctaacacttgcacattaacatttggcaccacacgaagcctataaataggtaggataattttattttttttcactatcgactacactctcagcaacatacattaaatattttgagagaaacatactaaccaaaaaaactcagtggaaaatgagcgtaattaaaaagattgacaaagacagtgttgagggtctggaaggaagtctgtcattattctctttgccgccaaccaatgtggccataaataagacaaacgtccgtgaattgttgcctctgtctgcacttaatcagacaggtccctatttgtttcgcctgttctcggacagccaattttgtgacttgagcaaaacctatatgtacctgctcagctcaattgaacggaagaatgacgcgggagaatgggtagcactcagtgacacggacccaaacgataaacatgttggcgtcattcaaaactttgctagcagctntgtccgctcgctgaaggtcaatatgtcaggcattgaggtgtttgacagttccatttattatcactaccgcgactacataat

SEQ ID NO: 29870 - DNA, 1495 bp, Heterodera glycines
ggtgtacggacatttcgcctactcgacatctcgcctactgacatttcgcctactaagccaaaaacattcattttgcctactaattagtaggcgaaatgaatgtttttggcttggtaggcgaaatgaaaagtaggcgaaatgacagtaggcgaatttgggttatgtagtaggcgaaatgaatgtttttggcttagtaggcgaaatgtcatgtagcctaaaaaattcattaaggaccattacaaattaaatgtaataaatcgctacttttgatacagccgatcaaatgaggaaaatttcgtttggattgtccttccatttttttgctaatctggatttgttctcaggcaacaaagcatttaaattgtttcgactgatagggaaaagactaaagttcaaatatagtaagtagtaccagtttagcaaggggtcgtggtcttcttttgtgcgagtgaacagagtcaaagtcacagctttcaatctcccccccccccccccctctttcgtaaaatacaccggcgcgaaaaatcgatcctttggccgcgcatcttttttcctctcatcaatgagcaagcttagacgtgcgtgtgagtggattcactccatccaatattttcgaaagtcatacaaaagaaatcactaatgaaaaaataaaaattgttgaggaagatgtaatatttattaaattaattaaaaagggtaaggaatttaaatcaaaagaagcgattaggtatttaagtaatgattcacaaccgaaaatgcccaaattttgacattttttgagagatatttcttggtttctctttcggtttatgtgttcttttctttaagccgctctttacgcttcctccgtccatctcgacccatccaagcgaatgttttccacccaatcgtcgcacatggtctttccttcctgaacatttcgcattgtacaacacatgaattcgtccttcgtttctcccactgtcacctcatccttcacaataccactgcacgcgatcacagcctcgtcctctcgaattgtgaatccgttcccaatataatcatcaattttggctgatatttctacgaaatgcccttcccgtgtaaatttttgtattcttccggttttgtccaaaatgagcaatgagtcaccatgcctataaaagaactttttgtcagattaaggttttcaggaaaaacttttgcaaacatcgcgggaaaaatatttgcccattgtctttgccggcagcggaaaatgacccaatgattcgacagtcttttgtagcaacccatttaatgcactgtctggaaaattaatataaaaaaggatgaagttattcgatgcactttgaatataaattaacaggcgatgaaacaacggcgactgcaagggtttcattatctaacaaaaagcaaatttaatatagtagaattttattcatttaattaaattttcttaattagtagcaaacaaaaggaatgttaaaaatgtgtgaattattatgagaagaataag

SEQ ID NO: 29871 - DNA, 956 bp, Heterodera glycines
gttgaggacattgggccgcttcacgcacgttttttaattttgtgggaacgttcggccgcttcgcggcctcaggacgggcgcttcgcgcacgtttttaattttgtgggaacattcggccgcttcgcggcctcaggacgggcgcttcgcgcccgttttttaattttgtggggaacattcggccgctaattttttgggggacattcggccgcttcgcggcctcaggacgggcgctcccacccctcagaatccccaataacacggggattctgaggtcttaaccatgtctaaagtaaaatctgattgcatattcgtgatcagcggcccaaataacccctaaatacatatttttggaagatttttgtgaaaaaaaattttccactcaaaaatcatggtcacacccattgatcccgaatccaaaaatcacttttatttctataacttttttcaaaaaagtgataaaaagctaaaataaaatttataaaatagagcaaaaaattgcggattttttgagtttattatttttataaaatactttttcagaaccgagttctgaattttattctgaaaaatcgaaaatttccagaatttctggaataacttttattgtttgcaagatagaaatcccaaataaatctcataaaattctcccgattttttgctatttttcaaactttattccactaaatttgatcaaaaacgaagagagttatgaattttcgaaatttcactggattttccagggctctaattttgacgatttttcaaaaatatgtaaacaccttccaaaaattctgaaacgcaaaataaaacatatattcatgttcagcacccttaattatgccataaaaatgaattttggcaaactatgagaaaaaatattttcatgaaatgcaaaacttggggtcccccctatggatttgattttaaaaaaaacaattaattttataatttttttt

SEQ ID NO: 29872 - DNA, 492 bp, Heterodera glycines
tcgtccgcagttgagttgattgtttggttgagccgcgacgtggacgcatctctcttttttgccgaatcagcaacaggacgtgaagagagattcgcattggcaaagagctcaacacgatcctaaaacgaatttgaaaaatggatacaaaattatttggtggaaataatacattcgctgtatttggagagtcagcgaaggccttgtcacggtattcagcaatctaaaaatacaaaaattattaaaaaacaaaaattatgaaacgaccttggccattttgttcgcacctttggccaattcgagcgagatgaaacagcccaaggccttttccccaatgcatttcataatggcacccaacgcagcaaaagaggaattcctcacttcggagtcggcatcaaaaccatgctaaaaagggcacaaaaataggggggaaatgcgaaaaaattgtgactttgctcagaatggccaccaaatccttcagcaaacccttgggaa

SEQ ID NO: 29873 - DNA, 1562 bp, Heterodera glycines
  unsure (1)..(1562): unsure at all n locations
atcagatttgaaattaaaacncaagattttaggctgtaattttttggtttttcaaggatccaaggcgggcacaatgcatgcccaatgtgtcgccagcaattattggcagagacagaggcacaaaatggtcaattcgaagaagcatttacgccattttaatccgtttttgttgagatttagagcatcaaatgcatggcattgcctcaggcgccgaaatgggaaattcttcaaatgatccgtcagtgattgtccaaatggaggatgagcaccaatcagaaacatcagacgaagaagaagaagctgatcaaaacgctgaaaacactcaaatggcaaatatggtctaaatttggagtcagccaaatttacaaaagaaatttttaaaagaattttattgaaatatttttttattattcgtcctgataaaaaacggaataaaaaatgttttttgaatgttggcgcttaaatttattaatcaaacaaaaataaattcacacaaataaaaaatgtaattcatgtttttttcatatgtttacatatgtaaatgtaattttataattatcggaaataaaaatcaatccatttaattcaaataaatgacttaaaaattgctgctttcttagaatataaatctgaattaaatcgtcaatttattatttattttgacaaaataattgtaattattaattatataaaaagtttaatgcatcgcaattttgtgtttcttttgctgtcattttgcgtaaaaacagccaaatttgactcaataaaaggcgcaaattgtgataaccaacaacaacagaatggcaacaattcaatttttgaaaagctttggcaaatgtacggcaaaggtgagttagggaatgccaacaaaatattatgatgataatgaaatatttacaatgtttatttcttaatatttttaattatttctacaatttgaatttttaaaatgtccaatatcaaaaggcaaaaatccaaaaaaaaaacatttaacattttaaaaagatcaacaaatgcaattgaccaacataatatgtgaagcggataaaatgtattgcattttggaggcaattaaaacggaagtaaaaattaatttattataattcatataaattttaatttctcaattaaagaaaccaatttgttgtaatttggtaaaaaatgatgaatacaattttatcaaaaagcgtatcacattaattaatcacagtgatccgccgttgagccaagtgatggacactttaattgttacactaatgagaattaaaaaggcaatggaatcgggtaaaaagcaaataatatttttattttaataaaaaaaactcctattattttgataatttttaatataactttaatttaaagttaaaataattttttattataaaaaaaacaaatttaaattaaaaattatttttttacataaatataattaatttcctcatataaaatttaggaaattttggcgattctctgattaaaatggtcaaactccgtttgaaanttgcactanaatttgctgcaaaacgtcatggaaataaatttgatgaacaaaataattt

SEQ ID NO: 29874 - DNA, 1178 bp, Heterodera glycines
  unsure (1)..(1178): unsure at all n locations
acaggcacggcagcgtacggagtgtgcacagcggtgacaacggcgggaattctgtcgctgctgatcgctgttgccggcagttccatttttggacncattcgaagcagaagtcgtaaaaatggagaaaaggacaaagttgaagagacagatgacgaagaaatgaaacacaggaagcaacattttactgcacgattttgtgaaattaataaattcgcaactctagccaaaacgataaaaaaaaaagaattgttgcttaaagttgcctcagacgccagggatgatcacagggtaagggacaaaaatcgaggttgaatcggcaaattttctaagatttttttggttttttaaacagaaaagggaatcgaggtattaaaaaccggaccaggaaaaaacgtcgccagccgaaacgtttcgccggacgaatttttgcaacacaaattttttctttctcaactaaattaaacattcttggtattgttcgaaagcatttgaaaaactctattaacctgcaaattttcaagaagttttattcatgtacaaaaaaaacaaggcaaaaaaagttcgaaagattagattttgagttcattctggccataacttttttaacttaacgaaaatttatgaaattttgcaaataaataataaacacatagagctatcgaacaacaccaaagaatgcttaatttgattgacaatgaacaaagttatggtgcaaaaagtcttccggcgacgcttcggccgacgacgttttaggatgcatccataaaaacgcattggttcaaaaaataagtcgattcaaagaatcctccccttatatacacaccatttcaattttacctttcagttccaataagatttgcatgtgtggctaagtggcttttgtaagatggtaaagagacaaagggttgaggttcgagtccgtgtgcaacatgagtatttttatttattttttgtccaaaaaaattaaaaaatgacgatttgtgaaattcatttttgaaggtatttccaatcaaattgggtaattttggtatcattcgaaagctcatggagagctgaaactttttctaagaaatgttaaacagttggacgtgttagaaaaaagataaaggcgttttaaaatttgtcttttgattaacttttgaatttgagcacagataacagataataactagagattg

SEQ ID NO: 29875 - DNA, 685 bp, Heterodera glycines
tcttttgccatatagtcaaaaacttaatatgtttgcttaaaaaatattgaaaaattggtaatttttataaggaaaaacggatattctgacaacaatgagcaaagtttaaaaaaatattcttttttgaaaaacatcgtgacaatctagcaaagtgccggggctctaattattacgaatggagtgttcaaagcgaatgaatggggccatactttggtgcaataaaataatggatgaatgggagttacaaactgttggcagacgctgattggctgaatttttgcagttcggagacacgtgcgccgtgcgagtagagaacggaccactatgggtcaactccactgtgcagagaaagtctagtactatctcgtttactctttttctttgtaatttctctcactttggcgtactattttatcagcagtttaggacttgagttataatgtaatgaaaatttgaaactcccactacttttttctgagatgtcaaattgcctagcatccgctttgaaaaatattctccttttcaaaatctttttttagatattaaatttgttcggtttgattgggaatgaagcgagttatggcagatcaaaaaaaaaatacaaaaaaggtgtttccagtgtatattttgaaatagcgcgcaaaaatttacgccaaatgcgctatttggcgattccagcaatttt

SEQ ID NO: 29876 - DNA, 874 bp, Heterodera glycines
aaaatttttaattcctttttaaacaggccaaaaagtttaggcttaacttttttttcagaaacttatcagaagcgcaccaaactttgcagggatactgaaaggaagagaaataacttttaaagttttttagaaattctgagtttttcactgtttattattttttgcaaaattaattcataaatattttttcagaaagtgctctgaaacgcatcaaatttatgtacaagttaaataaggctctctgatgcttttactatcaaaaagggagatgaataaaatttttaattgctttttaaacatgccaaaaagtttaggcttaaattaaaaagattttcttcggttctagctctttcaataatcaataaaatcgtaccaaattttataggcatactccccggtacaggactaacttaacctgaaaaaatgacaattgtaattggttttaaatttttttagaaattctgagtttttaactgtttatttattttttgaaaaattaattcataaatattttttcagaaaatgctctaaagcgcaccaaattttatttacaagtcaattttagcactctgatgctttagtatcaaaaaggaagatggagaaaaaaattttttaaaatttttccttatattttggttatatcgttttgcttttggtggggtgcttggaacagtggaatcatgcgcacccgtccgatctggcaagttaagcaacgattgctgactagccaaaaggttcggtgccgtgatgaaacgaaccagcactgcttaccccgcggcacccggcacggtcccccgaaggaatggatttaaaatttttcaaattttttgtgaaatatttgtcgtgctctgaagggcggggggggggggggcgt

SEQ ID NO: 29877 - DNA, 1534 bp, Heterodera glycines
  unsure (1)..(1534): unsure at all n locations
aacgaattttatgtggttgggagaagtgcaggacaatatcgaaccaaaattgaggggacatttggtcgaaatgttcgatgtgtgagtggaaaagagggaattggtaaagacagaagagggacggacatttggcaaaagagaggacatttggccaaagggacggacatttggcaaaagagaggacatttggccaaagggacgaacatttggaaaaagagaggacatttggccaaagggacggacatttggccaaatggcattttgaaagggattatttgaaaagataaagggcattttgccaaatagatatttaaaatggagggggatttaggaaatgggagggactcgaatagtccttaaaaatcaaaattaaggggagacctaaaaacagtgcaggacaacagtcggatgcgagtgctgaccagcgtaacggagctgagcaacgacggattccacgaatggatttacgggaagaacacttacttcgacgacgacgaagagtttggcgaacaaatcagcgaaattgtgtggcccatcagagaatttcaccaaagttttgaaagattttttttcgtttaaattttgacaattaaatttagtggcgatgcatttggacattaggccaaaaagttttgtttatgtgagggtaaaaaggggaaaagagctgctaaaactgacaaactttggcaattccgaaatgataccgaagggaacagcgaagaatggcacaaacggacggaaaagggccaatttggccaaggagccgaagggatttcacaaattcacggccgaatatgcgagtccggaattacacgtgatggacgaggagacgggggtaattaaagcgaaaatcaagtggcaaaaagcgaccgaatttcaggcgaaagtctcgccaaaatcggacatgtgggcattagggattatgctcattgaattgctaatcctgcaaaatccatcattttatcacctgagggaagaagaagagaaacgcgacaaattggaagtgagcggacaaaaggccaaaacggcacaaaagtcaactccattaaggcggatgttcggaaacggttgatggaaattggcgcactgtacaaagggtttactgtagacaatcgaagtgggcacattgtgccaattgaattcgaagaatatcaatggccatacgcattttgggatgcgctgtacgatattctgcgcatttggagacattttccgcgaacggcgcttctgattacggtaagtgggcgggaagggggaagggtacggtaaatggaaaggtgaattaagcattttgtaattagcattaataaaatacagaatttgttggagacaaatttgccgagacgaatgacggcgaagggagtgattgactttttggacgaaaaatgccatccgccggaagtggaggagcagctgaacagtggcgaaattcggctgttcaaccgagtcaatgcggacgaattcgtcgaaaaaatagaagagaaaatcaaggcaagcgcaaattagcaaaattgaaggaccanaatttatgctt

SEQ ID NO: 29878 - DNA, 1953 bp, Heterodera glycines
  unsure (1)..(1953): unsure at all n locations
tgtcgaatttggtgtcaattagggaattttgactgggatgttggggtgggagggaatgggaaggaatcgaatgggaagggaattaacgatttccaaagcaacggtgagacgaccaaatccgaatactgagttttatttgtaccagaaaagagagccgagccaaccaaagacacaactccaacaatccttcactttattttcttaatcaaaagcgggaaaaaggggaagcatcaacaaaaattcataagtgaagcaacaacgaagaagcgtaaaccggcgatcatcaaagggggcggggcagcaacgccaagcatcaacgaggggaaaagcatgagaaaaaaagaaacgggggggggagcgatcttatcaaagttcacataagggcaaatttgaacgttgtcactgggaggggggatcaaagggaaatggaacacgggaagaaccgacggggtaaaggacgggcgcaacaggcaatgagatggggctagggaaaaagaaaagttttggcgaaggggagggaataggtgcaacggtgggaataggggtctgacacgaaggagtaaacgccgggtggaatcgaaactaaattttagctcaacgcgacactccgcgcggcgcttcgacggggcggggaagtaaatcggatcgaatttaatgggatcggttttgctgacatcggcactgcgacggatttccatctaactcttcgacgtgggaccggaagatgttcgacacggccaacatcggtgatgcgcactcgtgaagaaagccgagcacaagccgatgaatttgggaatcgaatgggcattgagctaggaacacgacccgaaaaccccgataccaccttaatacgacgaggaggagacatgctggattgatttggtgacgggccgcgcacttttggatgatcaatttttgacggaaggacactttcgagctggccaattgtaacgacgaattcggtgtcggaaatttttaaaatgggggatggagaatttggacaagacgagtaatcagtgccattttctgattgattgttgtcgttgctattgtccgacgatttgggtggcagtgaagattccaatgtgggggatttagatactgggatagatgtaggagggacagggggctcaataaccgttggcattgagttaggcgacggatttggtccacaaattaatgcgaaatttaaatggttatgaatacggtttatagtagttatggacaatttcggggcaatggccttaggcatgggggagcagtaacaccttaattacgaaggggcggattagtgcggtggacgagttcctgcacagtgtttcggatttctcccaattcgatggtggatagaaggggctgggcgggacgaagaaattgaaaaatacggcgcccacgacacaatgcagtgattccgaaaagacacagaattgcaccaaaaatgcctacaatagtccaaatgacatggaaggaattttcttgaggttgtggatgataaagattgagagacaagtcgaggccaatgatgtttcccattgaagaatgatatggctggctatagtgaagggcttttataggcgaaatataatggtgtaagggcggcgaaaagcgatgtttggaaggttatcgcttaacaatcttgaggataagccgtgggaaacaagtaacggtcgcttcaccgctaacagtcgcttcagcgcccagttgcttcagcgccttcccgccggacgatgaatgtgataaccatgaaaagtttaatgtaaaattatggaggataatggaacgacgcgattggaaacaaacaatctttggtcacatttgtcggggtgtttaagtttatggtaattgacagtttttaatggcctttgctgttggtggttggttggcccaagtccattgtattttttgggtttaatgtataatgggcttggtgggtggaacttttgcccaanttaa

SEQ ID NO: 29879 - DNA, 1541 bp, Heterodera glycines
catttgttgatcccgggaaaaaggcatttttttttatttcctttaaaaagatcattattaaaaaaataaataaatttcctaaaaaaatttcttttcatgcaatatttacaaagaatttgtcgctatatggaaagtcaacacttttgaattttatcaaaaagtaaaggggaggggggggggggcctttttttttgcaaaattttttgtgataaaaaccatgaaaattatgttatccggggttttagaggttgctgatcacgaatctggcatctaatttgagatcatggggcccaaaaaaaaccccccccccccaaaaatggtgactttccatatagcgccaagaattttctaataaattgcataaggttgccaaaaattatagttcatatcggcacaatcgaaccaattgcgaatagaattttcaaaaaatttatatcaaaggttccaaatttaaccatttgtaatttgaaaaaagttgtcaaattattgtagaataaaaaaaggtatctcgactactcttttcgtaccgccgagaatagttaaatttttcaaccatttttggacaaaaactgttaaaaagttttgtttaaaattgtctcaaaaatatttatgtatttaaatcaaaaacaatttactaataaatgagcaaattttctttatgcaatttttttaaaaaatgggaaaaaaatggattggaataaatggagattaaatgaatatttctgctgctgttggtttacttatattcaatgggagagggcataatgaaaatttacggcaaaattttgacctaaaattggagggattataaattgaatgatttggtaagatgaaaaactttaatccgaattttgaatttagcaaaatgatgaccccaattaaatcgtaataaaaatattaatccataatttaagcaaacagaaaaattttgaaataatgcctgctaacgtaatttttgataatgaccgaaaagttcttttacaacgagagtctcgtctcggattcagacaaaaatttcttgggtttttgtttctcttcatttcaatttattattttatttgacccaaattttatttaaaataatatgtacctttttttaatttttatttaattttcaattttttttttttttttgcaatttaatccctatggcccaaaagttggctctcatttttctggtttttgttagactatgaggaattaaagtttgcaaaaaaatatctcaaaaaatggcagaaatttcctcaaaaacccttttaaaatgatctgaagcttttaccaaactctgaagggatactaaaactaaaataggtaattagtccttcagaattctcatctgagccccacaaaaacccaaaagtctctggactagaagatcggtagtctcaagcagcactaaaataggccaatagatacaatatttactaatttttatttattttttgataaattcataaaaaattcccatttttaaacattcataaaaatcgtttgttttattgtgaaccccaccaattttttgttcgttttttgaatattaa

SEQ ID NO: 29880 - DNA, 1011 bp, Heterodera glycines
cgtactccaaaagtcgttctgatcaccgacgcactgcctttgttgatcaacaaaattcgttggttgtgctgatcactgctgtgccgattgctgtcccgtcactgatcaccggcgtccaatgtctcacgcagtcgaacaccaaatccgcagaaatcgccgaagcgggagaggacaccgtcgatgtgcctaacaatttaaaatcatattaatgtgtctttcaattaaccaaatttgctgaaaatgtgatcaatttattttatcagattttagaatgcccacagcatactgtaagtgtctaacatgaacgactaagaaggaaattccaagactgtgcttaaattgccaagttaaacaaggaaaaactcaaaatttttgctcccctgagttcaaaaaagcaacttttttttttttttgcttttggaagggtttacccttcattttaagtgtccaattccccagcattaaattcaaaacccaccgaaatactgagtcaagtattccgcccttcggacttccttcagaattcgctttgaaaccgccgaagcacagagccgatgcctgttgccaaaatgccgaaggactgacgcctaaaaaaaaacaccctttgaaaattaatttgccatttgcttccccccaatttcatagtttcactaaaatgggccaagtcccaattaccgtcccaattagcggtcattcaccctttaaacatactgttgccgaagcacagagccgatgcctgttgccaaaatgccgaaggactgacgcctaaaaaaacaccctttgaaaattaatttgccatttgcttccccccaatttcatagtttcactaaaatgggccaagtcccaattaccgtcccaattagcggtcattcaccctttaaacatactgttgctggtgtgcccgtcgaatgtccaccagcaagtccgtccgattttgtctgttgctgctgatgccactttttcgtcggtggagagtgaagaaaattgctgaattaattgctttttgctaaa

SEQ ID NO: 29881 - DNA, 722 bp, Heterodera glycines
  unsure (1)..(722): unsure at all n locations
agagtagagcgggaccgggaattttgagcaaaaccgggacttgccggggcctgagaagccgggaacgggacctcgatttttgtccgggaccggaaccgggaccaaccgggaaattttaaaaattcaaaaaatttaaaaaaatttaaatttatttcaagtaaaaatgatacaaattaattttttattttgctatttatttaataaaatccaaaagttaaagctaagttaaattaattaaaattttcaaatcgaatttacttcaattaatcatttttggaccaaatgatcgaatattaatagaaattcagattgctttttacaacactttttcggcacattttttccaaaaaaacttttagagaggaaagaagggggtccggcggtgccgataggcgccgccgggggaaattttgaaaatttgagtgtaatttgttaacagattttaacaaaaaaggctggtttttgggattactaggctcaatttgtatggattttcatttaaaaaatgataaaatacaattaaaaaaaattaagaatcatattttgtcgataggaaagccatgagtatacaaaaaaaaattcaaaatattttaatttctgtggagggattgaaccaggggaaagaagaagggcaaagtcaaggagactagccactaagccatttgaacaattggcatcgtttcgttgaaagatatatttatgattatttcttaattntttcc

SEQ ID NO: 29882 - DNA, 1452 bp, Heterodera glycines
cctaaaaacggttttcgggttttttaattttatgattttttaacgaattttcccagaaaaacggagaccacttccaaaacatagtttttcgagctctatcgactggtatttttttcggaaaaatttcgattttttcccggaaatagaaaaaaattttggcctgagcgggacatttgagtcccgggcctataactcggcaggagttaagtttatcgaaaaattgtcttagaacatttttgtagagcttttgaagctctatcgaatggtgtaggataggtcgagaaaatttcaaaaattttcgagctaggccccctagaaattttcggaaattttttttcggacgaaaatggtggtgaaaaatatttttctggggtaaaataaggtgctgagtacgaatataatgtctattttaagtttcataatttttggaattttttaaaaattctttattttttggcaattttttggcccacgggattttggcctaatatttgaaaattcataacaaatcaaagggttgatcaattttacaggtataaagtcttaaaaatagagaaaaatcaggagaattttatggactttatttggaatttctatctaaaaaaggaaaaaagttattccagaatttctggaaaaattcgaattttcagaaaaaaattcataactcggttctgaaaagatattctggaaaaataaaatactacaaaaatccgcagttttttcctctattatataatttttatttggcatttttatcacttttttaaaaaaagatacaaaaataaaagtgattttgggattcgggaccaaaggggggtgaccaggatttttgagttgaaaaatttttttaccaaaaatcttccaaaaacatgtctttaggggttatttgggccgctgatcacgaatacgtgatcagattttacttttgacatcgttaagacctcagaatccctgtgtgattggggattctgagtcatcttctgggggggggggggcggcaggttcgagtccggacggtgtaacattatttttctgtgcatttttacgttattttcaatgattttaattaatttaaaatattttgttgagttaataaataaaaaattatatttaaattaattttttttttgatgaatacattttataagtttaaattaattatttttttaattgatggaatttcatgtattttttttaattaaatttgttaaaaaatattttcattttaatttaatgaatttactaatcactgttgtaccacttttaatcaaatttgtactacttctaatcactgttgtacctcttctatttactgttgtgcctctctaataactgctgtacctcttctaatcactgttgtacctcttctaatcactgttgtaccttttctaatcgcttttgtacctcttctaatcactgttgtaccccttctaatcacaattgaacctcttc

SEQ ID NO: 29883 - DNA, 1528 bp, Heterodera glycines
  unsure (1)..(1528): unsure at all n locations
ggggggggtaaaatgccaactcagcngatgggagaatggaaagtgacttatggagagagaaagccaacgaganaggcacttcacaacaaatcattgccattcgatacggcgcacgcaacgacacatcacaatgaattcacatgattaaggccaagaggaatcagtggcagaaggaactccatccaatcactaattcgaatgaattgacagctcatttttgtccaacaaaaacagagaccatgcgggggggggggcttttggcttttactttctctcgctaatggttgaaaaaagaccttggcgcagcggacgactgaattcaaaaagtcggcaggagtaaagagaaacaaaaatagggaaaaatggcaaagactcgaaaaaaggaaaatgccatataatcatgggactttgcccattgtgattcggaatgattaaacacatcaaaaattaattgattcttaaaaatgagtcgaatgataaaagccttttgaaacaaattaaattttgaaaaaatacttgttttgtcataatgtctggaatgaatgtaattaacagggttgccagatgaaaattttcaaaagcctcatttggcaggcaaaaaagcctcattttgggtcaaaaagcctcatttttataaaatttattcaaaacacgtataaaatgttcaaatgttatatttttgattgtccatgatcgatttgagtaattttttgttttaagtagagtgcgccgggatcgggccgggaattcccggtcctcagaggtcccggattttgaaaagctcaggtcccggtcccggtagggcaaccgggaaccgggaaaaattaaataaaaacaaaataataaaataattttatattattttcactttaaaaaaaaattaaaatttgaattttttaaaatttttttgaatttttgaaatttcccggttggtcccgcggttcccgggctcaaaatcgcaaaattcgtcacttttttggacaaaattttcccagcggcgcctatcggcacctccggaccccctccgttccccaaaagttttatggaaaaaccgtcacaaaaaaagtggagtgaaaatcaaaaaaaaaaaaaaggtcgtcctccggagggggggggggggggactacacctcccccaaagccgaaatcctgggaccgtccctgtttgaggccccatctttttttgtttctcctatgggggcgtactattaaaaagccacaatagaagtcgacctgctctatccaatgataccaaattatgtatgttttccgagttacagttcgggtggttcctttgtgagactattttcggttcgtctcagcatgtcatttggcatgtttgcctcaattttaatttattttcaaagaaaaagagtaccaatataagaaaattaagccatttttttaattttcgcccttatttcgcgatttctcgtccctaaaaatccgcccttttgtgattaacgacccgccagaaaaagttctcggggggaaaatgttgcaaaaaaagagcggggtaaaaatcggga

SEQ ID NO: 29884 - DNA, 1022 bp, Heterodera glycines
ttaggcataccgaaattatttatgaaacagaatttgcaattattaaattatttattgattttaatttttgaatatttgtaagagcttgaaaaaaatgataattttgttggttcgtggtaatcggcgatgtttgctctttttatttaatttacataaatgctgcataattttataattttattattaatttaataaacttatttcttctttttgcaatttaatttcatttgattcttatcatttatatttttgaataagatttatttatttttattttttcttgatagtttacttcattctgtttaatgctttgtttgcgggaaaatatgttatatttaaatggttttaaatataaaaaatttgtattataaatttattcgtagagtagtccggtttcatttcgaacctccttgccctttttgtgtcaaatcttcaaaaattgttgatgattgtttttgtctttataattaaaaataatatctatttatttatttaaagcgatatctatattattattttattttttatttctttcatgtgtaaaacaagtcattcatacttcaagcaggttttttccagaaatattcttttatgactattaaatactcaattttttttaactttgaaaacggtcgaagttttacaatttttaaattcctctttatgtatattctttcatttagaatttttaagattcataactctaaattttttataagaacaatgatcatgaatattttcaagggaatttccggtgtcaattattacgaatatgacattaatttctgccaaccctcggaattcattaaccaaatccataaaagtttccagtccttggcttgaattgagttagtgaccgggaatggtcaaattccttatttgttcatatttgcgttgacccaccactgtttcgactttaattaaaatttttaatttttcccattaaaagtaagaatttaaataatcatttttggcaattttaagaacatttatatttttgagtaaatttttcttttaatttt

SEQ ID NO: 29885 - DNA, 1373 bp, Heterodera glycines
ccccccccccccctcccccctcctcgcccatcgttgtcccatttttcctacacaaaacccaccgatgccttcttgttctttgttgtcggcccatccccccccccctgcccccggcgttcggttcggcacccaaagtggtgacctgcccgagcgccggcggggggtgagtggtgggtggtggcgtcttttctccgtgccctcctcccccgccggtccgttgcctattcgttgccgacgccacggggggggggggggggaaggacggcggtgcccccattatctgctcgttgaatagttgtgcttggcttggctttgggccgaaggtcacaccccattcacattcattgaccattcgccgaattttttcttccccgtcgtgtcccctagggggaaaacgacgggggcggcggcggccgggggtggcatttgagggccctatcgccgcccgccgtccaacgaaaatgtgaacgacccccgaggcgacggcgtcggcgaatttacgagtgctggtgggtgaccaataccgagaattttttttttgaatgtttgttcgttctttggttgttccatgtttggtcaataaaacaaagaatagagagattttttgagagggatttgggtgggaaatttgaatttggtggattcgggattataaaagaggattaaagcaataataataatttttactttttggtattaaattaagcattataatttgaatagtgtaaaatttttgggctatttgactattttgaaagtaaaaaaaaagagaaatgaaaaaaatgaaaattgtaattattagggcttccttttttaggcacaaaaaatcgcgaaataggcacctaaaaaggcataaaaaaatcgcaaaataggcacaaaaatcctcaaataggcactaaaataggcaaataaaattttttattaacgctttttaggtaacaaaacacgttaaaacttaaatatttcaattgtaaatgaaattataaaatattttaaagtttttttcaaatatgaacaattttttaaaccaaaaaatttttattaagaaaaaatatttaattttgggaacaaatttttgaaaaattttttcaattcttaatggtgtatttcctgaaattttttttgggtcatttcttaggggtgtgtttttcgtttttattgcatttttgttaaggattttttcgaaaatccttaaataggcactttaggcacaaaaaccccgaaataggcaaaaataggcattataaaagtcatcgtagaacacctcaaaccaagcggaaaacgcgtttttcgtgcttatctatgcgtatcaagtgcgcaaaaattttaggcatttgcctaaaaaaggaagccctagtaattatcacataaat

SEQ ID NO: 29886 - DNA, 1563 bp, Heterodera glycines
aatatagatataatgcttcagtaacccataaaaatctataaatatacgggacaagcaatacagaaaattaaaaaattgtaatataaactaaaaatggaaactaatcaagcaaataaaaattaatacttgttggtgcgtaagttcatacgttttacagcaaatatgattaagggagacaaaccaaaaaaagaatgaatttttttaaaaacagacgagaaatttttgagttttcggttatttttcgttttcggtttttaaccgaaaccgaccgaccgaaataatcaaaaaccaaacaaccgatcgactttttttattgtgatttgttaacagattttgtccaaaaatgagcaattttttgccagtagccaagatctcgaagtgggatccgggattttgcgtgattttatttatttttttttaaattttatggacataatgccaaatattttggataaattattaataaatttacttaaaattaacttattttcaatcggaaatttcattcaaaatttgtaaaattttcccggcggcgcctattagcacggccgaatggcctccacattattatctcttttaagaatttgacccaaaatagcaaaattgtcaattttcgcaaactctgttaacaaatcgtattaattttcaaagaattttaacggcgggaaccccctccctctatttctagttttttaaaaaaatttcgcctcaaaaaagcgggtttgaaaagcaaaaatagtaaatttatggtgctatgaagttagtcaaaaaccatcataatgggcgttagtcaaaaaaccataaaatgaaaatatttttttatataactttgctcaaaagcaactaaatttttaatttttaaatcattagataggcctaacaagggaaccacccgaactgtaagtcggaaaatgcatatgtgttatataccattcgatagagcagggtcgacttctagtgtggatttttaatcttacggatgcatatgacgaagcaaaaagttacgggccctcaaaaatcggaatttttccctttaggcggggatggcgccatgcaatgatcagtgtgcacaggagcgtgggttcgagtccgcggcacgtaaactatttttttattattgtaaattaaatcaattctttaagttttaataaagttatgcctaaaaatgttaaaaaactttgtttttttagcttctcagtgcgcactgctcaagctcaactacgacaagaagacaccgaaaaaaatagaagaggtgagaatcgaaagggaaaatggcgagacagcacgacactcactcaaccagcagcaacccctagggcggaaaagaaaaaaatagcaacaactaacagaaaaccaaagagagagagagtgcgcgagagagagaaaggagagaggcagaaaagtgagaggaaagattagagagagatagagaaagaaacaaaagagaggtgttgaaaggaaaggagtgggagggagagatagtgcatacacagacgttaaatgtgggcactatgggtacgcgccagtgtcagacaaaattgctcataacgccaaatagcgcat

SEQ ID NO: 29887 - DNA, 985 bp, Heterodera glycines
ttttcgaagtttgaaaatttatttagtgaactgacacattatttgcggactcacgaaaaattaaataaaaataaaaatggaggaaaattgaaaattaaaaaataaataaatgccgcagtgaatttttagtcataaagccattgggaaaacaatggtcccaaaatggcagcggaggcttaaaaatgaactactcacccacggtttgggcgggcacattttttttatgccatcaaaattgggggccgaggagaagcaattcagcaaattgagaaggctcataaaattgtacgaaaaatggaatacaataataaagcaaaggaataaaaattttgcaattacaaaatacaaaaaaaataaattatatttaaacgaatttttttttttttgaatttcttcataatttttttttaaacgttaaaatttattttcataagaaattaatactgctaaaattatatttctatcgaaaaaattaataaatagagataataatttaaatttaatttattcgaaattttatgaatatattatttaacttaattttaattaatcattaattaagttgcattttacaaaaaaaaaatctcaaattacgtaatgttacaattttgggaaaaaagaatgacgcgcttggagatgaagagataaattggataatcggataaaaaagactcggaagaacgaactcccactaattacttaatccattccgttgcactaatatggtaaaagaattgcacagaaaaatataataaaagatgaaaaaaacttgaaaaaatagaatatataatttaataagctaaaaagtgattttttattgaagtatttaagtaaaaattgaaaaaataaaaataatttagtttaaaattaaaaaatgcaatgattcttaatttgagaaattgtaaaacagagttttgccccggctgttttgacgggaaagaaaaatttacagcaaattctgggaaatttttcaaaaaaaaaaaaa

SEQ ID NO: 29888 - DNA, 807 bp, Heterodera glycines
tatccagagggagaggagggatatcaggagaagggggggggatacccaaccccattcattcactcaaaatgtcgaaaaaagagcgttcaaatattttaaaaaaacatatcactgatcaatgccgacacataaattgacatggagtgaattgaacacggaaaaaccaaagtgaagtgaatgggttgaaaagtggagatgagagataacgaaggaagaggagagcagcagacagaaggagggacaaaaatatagttaaatgaaatgggagagacggcgaggggaagaaagaggaaaagatggaaaagggaaaggggaaaagggagggagggaaatgatgcgcaagacaaaagtcagagggcacgatttggggggagaagaggtgggcaaataaaagcggagtggcggtgtgttggggaatgggcaggggtaggaaaagccacaacggcggtgcggcttttcggtaaataaggagcagcaaagtggcgagcgaatgagtggacataaagaaagttttgtggccaaagaaagggtctctctctctctctttccgccggtggccaaccgatcgatcgctttgcttttcctttgcccaaaacactcatcggctgaccaccaattgcataattacattttcttttggtaattagataattattattttattagagggggcatttgtttcgacttgcaattcggcgctcatcgcttcgcgctgtccgtccgtccaattcgattccaaaagttccctcattcattcgcccgtcactcagtggcggcagagttcggcgggtccatcccatcccatca

SEQ ID NO: 29889 - DNA, 895 bp, Heterodera glycines
ttttgagaatgatgaaattacaacgacgccggggggaagggtaaagaaaaaagaaggaatttagcaattttaaagggcccgggggacgacggggaaacgggggggggcgggggaagggcttttccccctccaccctctcccgggggcaatgaaaagacgacgacgaaatattcatgaaaaagcttttggggatggataaggggggaaatgcaaaagtcaggtgggcacccgaaaaggtgcaaagtgagtgccaaaaatgggatgttgctcttgtgaatagcaagaagcaatgaatgaatttggaaaatgatttaaaatggatttataaacggaaaatggcaaaaaagcgggcaattaattgggagaaatgacatttaaattttaaaacaaaaatttaaatataggggattttgaaaatcaatttcaacttggaaccaaactgtaaaaccaacggcaataaatggaaaaattcgaaaaaagcatcatttttttatactcactgagccaagcggaattcttagataggtttaaatgatgcaaaataaattcaaaaaattttttggattcatggaactattgaaatttgagttcgcgtttgaaaatcctctcagaaaaaaatcccctcgaggcttttggtttcgtggtggaagcaacttacagaatgaatgttttaagccacgccattggccacgggaacgttccttcactcaactttacgcattcattcattcattcattcatttggtgataatctttcatttgcttttgggggaccgttttcccatcattggccccggggcaatgaatgtgagcggtgaggtgggcaaaacgaatgagaattttgttgcggtgggggagcgcaaacaatgggacgggggcgggggggggggggagg

SEQ ID NO: 29890 - DNA, 866 bp, Heterodera glycines
attctggccgcaattctatcgactgatataataacgatgcagtcgcggcgttggtgaagattaagggacgcaaaagagacgatttaaaagcgattcgaaaattctatcgactgatataataacgatgcagtcgcggcgttgacaactgagatggaaccaaaagttccataatatctttccataaggctggaaaggcagaatttgaatggccagtcgatatttacactgagcacccgttgaagcgggtgatgcgaagccatagcaaactgtatttttaaattctggccgcaactctaccaaaaacgtgtttagaccgcagtaactcggctcagagtgaagattaagggacgcaaaagagacgatttaaaagcgattcgaaaattctatcgactgatataataacgatgcagtcgcggcgttgacaactgagatggaaccaaaagttccataatatctttcgataaggctggaaaggcagaatttgaatggccagtcgatatttacactgagcacccgttgaagcgggtgatgcgaagccatagcaaactgtatttttaaattctggccgcaattctaccaaaaacgtgtttagaccgcagtaactcggctcagagtgaagattaagggacgcaaaagagacgatttaaaagcgattcgaaaattctatcgactgatataataacgatgcagtcgcggcgttgacaactgagatggaaccaaaagttccataatatctttccataaggctggaaaggcagaatttgaatggccagtcgatatttacactgagcacccgttgaagcgggtgatgcgaagccatagcaaactgtatttttaaattctggccgcaattctaccaaaaacgt

SEQ ID NO: 29891 - DNA, 1383 bp, Heterodera glycines
  unsure (1)..(1383): unsure at all n locations
tttttcaacaatttgtattcacttaaaaaattaaaaacaaaaaattactattcattttcaattatanaatataattaccatgctgatgganacagtggtcattagtacacagaagccaaatggttttaccaatgagaaaatattaaataaaattaaattttttttgtcctttttaggtccaaccactgcaaaatccaccatcattcatagtaatgaataaaatcatttttataaatttcctttgtatgcagaatttttaatttgttatgtattttttagtttcattcaatacaaccaccaccgaaagagttgggacaaaatcaagtaaagaattttcttaattttattttatgaaaattttcatttacttttaaatctgaaaatgggacttcaaaatcaggtaactgtacgtacataaagcagacccgtgcatcagcaggccttacaacgcgttcatagttttggcccgagccaaatgagttcgggccggtcagggctctttagaagcgggcttttgcctaaaatctcgaggctaaaatttcaaaaataaatcaaatcaatcagagccaactattactgtgacccttttctgtacacccattaccgtatagaaaccacgcgaatacgaatcaatcagcaaaaataaacgtggaccattctttttagacagtccaattgtccccactttcttttcgccgatgactctttttgtttggtcgtttgtttttggtaaattggttttaccttcttttaattctttattttgaattttcagctcattttattgtggtgccgcttttctaggccactcttacggcacagtttggacgaatttgccaaattgacgaacatttttgtgtgtaaagaagaaatataagacagaaaaatgatgaattatttattcctaattaaaattttaattattgtaatttcaaattgcatttttaatgttcatattttcgaattttgaataaagctcggcaaaaccaataaaatagtttatgaaaaaagccatttgtggttttaggtttggctaatcttgaaggaaagaagttgcaacattcgctagtctttgagagttttatgtaacaatttaataactgtcaaattaacatgaaaattcactatttaaactcggaaaattgcgttcttcgcccattccttcgacattcattcctttcgtttttctctttttcccttcaattcttcttaaatcgccttcctttgtcgcttttccaatattttttttaactaataaattttattacatataaatttttgtgaaaaatttttgaaaatttattgggattgttaactgatgttgccaaaaataaatttatttggagcgaatttttaaagaaaattaatgattttaattaaatg

SEQ ID NO: 29892 - DNA, 1374 bp, Heterodera glycines
  unsure (1)..(1374): unsure at all n locations
ggtagatattatttnaaatttgaaaaatgacaaatgccaaaaataantgcaggtgagaaagaaggtggtgcgcaaggtggtgcgcaaaagcagcaacaaatcggacagtccggaaaagaacggaagtccggcaccggaagagccgccccaatcgccgacagtgaaggcgacgacgacgacaaatggcacagtgccaacggctggtgccaaaacaacggttggcaacaacactcagtctggcactggcgctaaaagtgtgtcggcaattattgccggaaggatggcgtcattgtttaataattgtgccgggaatggagtagaaggagcagctaatggcgagaacggcactggcacgaacagaaacgatgccgcgccggcaacgacgggggatgggggtggagcagcaatacatgagatcagtgtggcacggtttggcggcgacgaaccgacggcacaatccgatgaagaagcggctggcaataattccacgagaaaagaagcggctagcgatgccaaaaagggggaatcaactggcataaatgccaagagagaagaagcggctggcaataatgccaagagagaagaagcggctggcaataatgccaagagggaagaagcggcaaagaataatgccaagagggaagaagcggctggcaataatgccaagaaggaagaagcggctaagaataatgccaagagggaagaagcggctaagaataatgccatgagggaagaatcgtttgacactgcttgcaaacaaagcaatggtcctgacgtgacagagtccggaactaatcgctcggcttctgaaacggtgccgaaatccggcacggctgttgagataaagccggcaaaagccggtcagttggagtcggaaccaaaaactgatcacactgttgatgattcgccgccaattgttggcagccggcgagttggagcagtgtccaaaacatctaccgaagcacccaatgaatcagcagtgcctgaacattcgtcggcgatcaaagaacggcgcagccaatcactggacgggcatgaattggcgaatggcacgaccaacggagtcggcactttgcgcatgacggagtcgtcgtcagaagacaatggacgggtaagaaaatgaaatttttagaaaattaagttttaaactaaggcttgaccaactgtctaaatttaattgggtttgaccaagacccaagggcgtagccagacccttggctttgggggggctgaagtcaaaaattcgattttaggggtgtatttttttttttttcagtagatttttaggggtgtatttttgtttttttgaaatcccgaattagggggcgtatttaacaaaatttttcgccgttttcgccaaaatttactattttt

SEQ ID NO: 29893 - DNA, 906 bp, Heterodera glycines
gaagtgtcccccggacgccggacgattgagtacgaaaagcgtccgttagtgaaaggcaaaaagcgaaggaaataaaggcgagagaatgcattgccgaggttaattcagagatatgaaattctcttaattaaggacaattaaagggatggctaatttaattgggccgagtgattggacttctcttgaacagaaaaaatgggaaaaataatggtgggtggcgcattctcgcgacaattcatacgcattcctcgcaccgaatggggcggggtgattaatcaccccccccccccccctcttcaacagtccctccctcccttcccaccgatcaatttgcgcccatttgaagatgatcgattaaaaggaaaaagcgaattttaatttgtttattaattaacaagaaaaaagcagtgaatgggaggaaagacaaaagtggaggagaaaacattcagcttttttggaaaattgcgctttggagacgaaaggaacccgtttatagagaagggacagaataaaaagtattgaaattctgtacaatttatggtaaattgttcaggggaaaggcaagggacagataagaccaaaaagagaagaaagaataaagtgaaatcgaacgcaaaaatggaagggtggcacaaatggagggcatcgacgaaatgacgaaattccgttagtttttccaattgtcagggggttgaccaacatcaaccagcaaatggaagtacaaaggtcgaactgtgacctaaaaaagacagaaaaaatattccctcacaaatcattggacaaatgaaacatcccccccccgccaatgtccacagaaagtgccgtctcacattgagaattttccatcggttctcttcgtttacgccgtctctgtccatgcgattgtccgcttttgcaagcaatttg

SEQ ID NO: 29894 - DNA, 1482 bp, Heterodera glycines
gtgtgcgctttgcgagccgaaattggccaactgaagcagcggaatgccaagcagtgcccgcagttggagaggcaaattgacgacttgaaaaaggtggggcaaaaaacaaataatcgttctcatgcattcttgttcaattaaagggcctcaacttttttatggttttttatgctttactcttggcgataaactaatatttgacaatattaatgttttcaaaaaggtattttgaatttgaccgctgtttactgaataaatttttttattcaccccacccctaaaattaagcaaaaagttttttctcgaaataatcgccctccggcgtcattactttatgatgctattgtatgtgtattcccatctaataaggaaaaattgtttgttctcggggcactgccctttcattctcccctccctctgcttggtggtgacgactctgctttttccagtcgcccattagcgtttttcggtccgtttgttcgctcccccccccccccccctttgctcctcatttacacataaacgcaaaaggaaaaaagcatggaatgaaacgacaaatgtttgtgggaatgcaaaaacacctcttttttttctcccatttattatcaataatttctttggtatattaatttttttgtttcaagaacgatcaaaataaagaaattttgcttggttcttaaaaaatgtcccttcaccttccacagaaatgtgaacagttggcgcagtgcacgcagtgtgaacagtacaagaaggagcgggacaagaagacagaagcactcctcgacaaaatcaaggagtccttcgacacgaagaagcagaagaaacaaatggagaacgaactgaacgaacagcgccaaaagtgtgcggacctcggcaaacagaaggacctgctgacatgcgaagtgtgttcactgcgcgaagagttggagcgggagaagaaggccaacgcacacttcgacgacgacctcaaagagttcaaacggcgtcgcttggccatggacgacgagctgaagcagttcaaacgtcgagagaaggacattggagccgagttggagcagtgcaaggaacagaaccagcaacttgtcgcggcagcagaggaacgcgaaagccgaattatggagctggaaagggtaaaaaattgtttttttaaattggatcataacacattatttttttttaaatccctaggattttacttttgttctaaattgcagaatatatgctcaaaggatgtggggggggggcagtttcacatgtggaacggaggtaaatcgctaattttgcgaaaaaagcacggataaagatgaggaattttgcgatttttttttttgcaaaattatttgcgacattgtaaagcaattcttaaggttttccaattgcaaagaagtacacaaaaatgctagtttttaatctagaactaaagcaaaatcctagggattgttagaaaactagctgtacttctttgcaatgggaaaaccttaa

SEQ ID NO: 29895 - DNA, 1858 bp, Heterodera glycines
ttgtattttcaaaagaatcaagtccattttgaatttgtattttagggatgtgccagctggaaatggtactacccttaccactacgcgccgtttgcctccgattttgaactgatcgccgatttccaacccgacttcaacatgcccacgaaaccgttcaagccattggagcagttaatgggtgtgtttcctgctgctagcaggtgtgttgatatgttttgttttgttccccgactggcacttttataattattcatttgcagagctcatattcctgacgggtggcgttggctgatgaccgactcaagttcgccgataattgatttttacccggaaacttttgaaattgatctgaacgggaagaaatatgcttggcaaggcgtcgctctgcttccatttgtcgaggaaaaacgtcttttggatgcacttgactcggttttacaattttttttcaaaaaacaaaaaatattttaggtgtacgccactctcacaaccgatgaaattgcgcggaatgccaccggaccagaccgtctttttgtcggcaataaacacaacttgttttcgctcgtttatgaggtgcactcccaaaagacgacaattccgataaaagatgaactaacaaatgatgacacaaaagaaacaagcgaagggacgcgagaaactgaaggagaagccgaggaaactcaacaggcggaaaatggtaaattaaattttgactaccaatcatttgccatataaaattgttttttaattaaaaataggtgaaagcgaacaaatagcgaaagccgaagaaacgacggcacaagaggaacaagcgaacgaagaagctatctcaaaacctgaacaggcaccgaaacagggtaagccatttaaggcatttcctctttaaatatcgagatttagaattcgagactgaaattgaatttgtcgatgacgaagaaaagaaatgggtgcacatcgacgcagtcaaagcgtatgggatgtctggcgaagtgtcttatgacgtcgaagcactcgcttttggtgaggcgcatcggtcgctgttcagaaattcgttggagtttggcgacatcaaagtgagttgtttttacaaatagcctatgtttcaataaattgcatctcttcaggagaatacctgcattatggttcggtttttatcatttacaatgttcgatttatattttttgtgcacaggttgagttccgagatccccaattcccaatgcacttcatcttcaaagccaacaggctggacggcatcaaggaattgcctcgtgtgctcaaaccgaacgattgggaccaacgacggcacggctccttccaaccccaaatcggattcaggttcatcgtcaaattgttgtctcgtgagacaatgagcacttgacatttacagtcgtgacatcccacgtgcaaatctctccatggcgggccatcgtacgctcaaccaccacataaacgacaaccgtcgcagttgtccggcctctcttttctcagtgcaaacatcgccaccagcgcacacacttccatggcacatgagcacaaactcaccacaacaacaacatcaaatgcagtaccaacatcagcaacaatggcagcagggtcaattttacaacgggcaacagcagcagcagcccgtgccgttgttcagttttgggcagatggcaatgcccccgcctccgccgctcccaccgcaaaattggattactagtcacccgccaccacaaatccagtctcacgtgccgtacgggcagcccccacctctaatatcacagccacggaatactcagcatcaccatcgcagaaacgacaacaacagaacttacaataggaaataattttcatcaaccgctgaatagcggtca

SEQ ID NO: 29896 - DNA, 1110 bp, Heterodera glycines
  unsure (1)..(1110): unsure at all n locations
gagaatctgattctgacgttcgtttcgtcccatntagaatcccgaattcgaacaaaaattcctaaattcaatgttcaacaaaattcacatntacacaataaaatttcaagccaatgatcgaatcccattgttgtttaatgccaaaaaaatcgaacaaggaggctattatcgacagtatttaacttaattgcccgttctttttttacttttttaaaatttcagtcccgaaattattagtcaaaggcctgagggaatcactaccaaaagtgacgtgtggtccttcgccgtcgttctatgggaaattttctcgcgtgaaataccttacaacggtagagaacgaatatccatcccttctgttgttaatgggtttccgtgttttaggccttacggaatttaaaatttattcgataatttcccaacacggagttcgtctggttattcccgagacatgtccttctcaactcaataatattatccaaaactgttggcgcacggaacctgccgatagaccggacatgcgatacggttcgccacggtcttaggctatgtaaaagcgcatttttcagtgcttgccgttctgcaacagataggcaatgatgccgaattgcaacgcgaagttgcgcagtttttggtctttcgcaaggacgaatggcgggaaatgattcgcgagcagaccttcgcattggaagtaggcatctgagattgcttcgacatgaaatagggcataatttatccaggaactgaagttggatttggcccgacagatggaggatttacgaaggcgggaggccattgtccgaaagcgggagaacagccatcgtaattttctccatttggtaaacatcgctcttctaattaggtttattgcattcgtgagacttttaggtggacgtcatgaacgtggaggacgtttgcgaatggaacgaggattgtgtttgcgaatgggtgagcaaatgatcagcaaatttcagcccattttgagcttttgttttaaggtgcaaaacattgcggcaagtgccatggaagacttcagcgaggcgattgtcgatcagctcatttcgtgtattcttcagtatgaaatccatgggtgtcgtctgtttaaaaatcacc

SEQ ID NO: 29897 - DNA, 981 bp, Heterodera glycines
tttttgttttcggggcagtccccccgaacccgatgcgcccagatttatggggagaccgaatccttccggaatagcttccctatagcctgtactttaattctgcgttggatttttgctccccataattgtttgagtaccccaaacggacacttgaaaaaatcgatttttttgttttcggggcagtccccccgaaccgatgcgcccagatttatggggagaccgaatccttccggaatagcttccctatagcctgtactttaattctgcgttggatttttgctccccataattgtttgagtaccccaaacggacacttgaaaaaatcgatttttttgttttcggggcagtccccccgaaccgatgcgcccagatttatggggagaccgaatccttccggaatagcttccctatagcctgtactttaattctgcgttggatttttgctccccataattgtttgagtaccccaaacggacacttgaaaaaatcgatttatttttgttttcggggcagtccccccgaaccgatgcgcccagatttatggggagaccgaatccttcgggaatagcttccctatagcctgtactttaattctgcgttggatttttgctccccataattgtttgagtaccccaaacggacacttgaaaaaatcgatttttttgttttcggggcagtccccccgaaccgatgcgcccagatttatggggagaccgaatccttcgggaatagcttccctatagcctgtactttaattctgcgttggatttttgctccccataaatgtttgagtaccccaaacggacacttgaaaaaatcgatttttttgtttcataaatatttttttcagaaagtgctctaaagcgcaccaaattttatttacaacttaattttagcactctgatgctttagtatcaaaaaggaagatggagaaaaaattttttaaaaaatttttccttatattttggttatatcgttttg

SEQ ID NO: 29898 - DNA, 1627 bp, Heterodera glycines
  unsure (1)..(1627): unsure at all n locations
ctctataagtctacaaaatttaaaaaaatttcgttaagtttcaaaaaaattatggctagaggaactcaaaaaaccttggttttcgagcattttttgagcatctttggccctaactcttttgaaacttaatgaaattttttgaaattttgtagactaatagagaacacttaggactatcgaataatatcaagaattaaaaattttgttacttttcagctaagttataaataatttttcatcaaatcataatgatggttttttaaataaaacatagcaccttctaatataatttctctaatttagattgcgaaatgttatttattttttcaatttttctcatttatatacatttaaacgcttcgaacggatgtggcactgaactcggaatatgggaaaatgttagtaaaagtggtgccgaatttttaaaaaacattaacattgaagcaaaagtattggcacgccaattgtgccaacttgacgaagtcatcttgaaaattgcagaaaccccagcggaaaaggcatttttaattcgtttaaaaaattttaattaaaatttcaatttcagaaaatggtacaaaatcagttgcaaaatgatccggcacttttatacagtttggaaaaattatttttcatttatcaaatgctgaagagcttaaaaattggtacgtttcgggcttaatggaatttaatcgaaaaccgcacctaatattatgttcattataattaattacttgctgattctttctaagattggcaacaaattattgcaatatttttgaataatttaattcaacttttttttcaaaattttcgggactaatttttttttttgactttttgttgccaattaatttttttcaattttcgatggaaaggtggaggtaaaagagttttggggtcaaaatcttaggatcaagcatatattattaataaaatctacttaaaaaactatttttagatgccaatcgtcataaaaactatttgaccgcctcattagaacattctatgaccttaatggccaaccgttttggcattccgttcaacgaaatttcgaatgttgttgagccaagaaaaagtgcatttatgcttaaagaaatcacaaatttgttaaatgatcaatttgaaaatgagaggactggaaatgagcatgaaaaagaagaaaatgggcaggacggatatcggaaaaaccaaaaatggacatttcgccaactcagcaacaattcgaacaatttgtttgggaaatggtttaattcatttcataaaggtaaaggggtaattaagaaaaaaatttgttagatggcttaacaatgtaaacatatacaaaattgcatttttatgggtttaaaaaagaaaatggttatttttcgctaaatccaaaaatcattaccccttcggagaatggcaaatttggcttttgcgcgccaatatatttttgaagcatacccaaatgttttttttaaaattaaatatacattttctacctagaaatgcagcgnccgtcgtcgtcgaaaaaagcgcagagattntttcngcattaatgggtattttaaatttatgttgngatttagtatgcttttgtcatggattgtcagaaatcgttactttttgttgctcttggcattctgac

SEQ ID NO: 29899 - DNA, 1726 bp, Heterodera glycines
  unsure (1)..(1726): unsure at all n locations
aaaaaaaattaacaaaacaaaagggtcccccctatggtttttgataaaattcaaaatctatcactttatacctagcgccaaatttgcttaataggcccaaataattgtcatattcgtgatcagcgacctttaaaacacccgggtacttggtttcaggactttttaaacaaaaaaaaatttgaccaaaaaaaagttgaaaaaattttcaaaatagtgctccttttaaatagcgccgatttgtgtctttttcagtttagccaccctttctttgatctatttattgtccctaatttgtgcagcacatttttattcaaattcgctatgatcaaacccacttttaatcttttgtaggcaatttggatattttcatgcaaatttctcgactcgtggacctaaatttttgaaagtaaaataataaataataattttgtttaataattagttaaaaattgtatgcatttaaaatgacaaaatatgtgcataaaatatgcactaatatatttgaaaattaccaaaagtcgaccttaagggtgcatttttcggttttttgcctttttcctttcaaatttaccaaaaaataccaaaataagctctaaaattcaacttaatttaaatgcataaaaaattaaataaaaaaattaattattaattcttataaaattaaaatgccattaaatgagtgcccactttgactacgcaattcgtccgcttgtgcttcaaaatcactgcgttccccgccgaatttacgtttgaccctccggggccccaccccctcacatgtttttcttcgcattcttccggaattatctcgggcaatttgtaccctttgagacgtttttttgcgacagaagtgctggagaatctcacaaaaatgcgaattgaaaacatttaaaacaaaaaaaggaaataaattaaaattgaaaaaggaaaataaataaaaataaaaagacggataattaacaattttaattttgattcaataaaatatcattggcattgcgttgattaattaattcaaaagttaaacaaaccccaaataaattgggagtagtggtgacttggcgattattctttgatacattttgtacaataatttttccgttggcatttgcccatttcgctttcatttctcatttattttgccattctttctccatttctttttccgattcgcttagtctcttttttcttcttcttctggcgttttgtccgttgtgccataaatttgaaatcgccgtcctttccgacctcctttcaatggctctcttttcccttctgtttcttccaatttcgttatcatttcgctgtccgtcgttgtgtaattgttgtactcgtagtaaaatatggccaaaagtgccaaaatggcactgaccaccaccattacgacggcatagaaaaggaattcgaccgcggcgtttgggaaagcgatcaaagtgatcagcaaaatgatagtgtcgccaattgcggtggtcatcagcctaaaaggtaacaaagaattgaattgcaaaatgaaattaaaccgaccaaagcgcttggaccaaagatttcatcgacggaggggcctaaagaaaaagagaacggaaattcaaaaagggacaaatgnngagaagtgcctgggaataggcgaactcgtagcccgtgatggagaagagcacttccgcagcagtgagcaccataatctgagggatttgccacagaatggacagcgaattgtcgggcaccgcgt

SEQ ID NO: 29900 - DNA, 1176 bp, Heterodera glycines
  unsure (1)..(1176): unsure at all n locations
aatagatntagtccaaaaaagaccnaaatttttgatgtaaatgttagaattatgattgaattcccatagatnaaaggaataattttgaaaaattataaaataaaatattgcttggaggggaactgatccaancgataanatgaagaaataacacacagattcacaccacacctttgaccacgcatatgagtaaataaattaagcaaaattaagactttggatataattcgcttcaaaaattatcatttaaaatctaaatttctctctgaatccaaaaaataagactaaaataaggacaaagagcttaaataaggacaaatcttacaaataaggacaaatggtaaccctgatttagactatggagaatctaggaaaaataaataaatttacttatttttgccattcctaataattacaaataataacgaggcaaggcaatcttccactttttttattaactgcttcacaatgtttttacattttaacaatcaccgctaactttatgaaagtttgtctcaatgacaaaaaaaactgattgttaaaaaatcaaatcaataaaagaaaataataattaaaaaattagaatacaaataacaacagagaggaattacacagtaattgttggaagtaatacatacagagaaaattgaaaatggaaagggcaggggatgggaagaccgaacgtgaaaatagagacaattaagcagagagagagagaacgcgagaggaaaaactgaaaacggattaaaaactgaccaaaaccaaaaaacaacaacacgtaaaaacaatatttacttttgtaaggatgggtaaataaatgtgtggacgcgctacacgattttgcaagacattcaccagcagaatgacggggggggggattgagttgggctttgaacagtaattaaaccgaaatttaaatgtcgattttttattttcgatttttaattttttgaagttatgaaagaaagattcaattgattgtaaattagcataaaaattacaaatatcagaaaaaataaaatgccataagagtaataaaatgaaaaattgtttaaatttcactggaaaaattagtggtttttgctgagaaaaaaagataaaataatgataaaataatgataaaataaatgaaaaatacaatgaagtgtgtgaatttaggaaatgaattgaagaaca

SEQ ID NO: 29901 - DNA, 1480 bp, Heterodera glycines
agtaagaatggaaggttattatcggattccgctccttaaaatcattaaaaccttactcgaaaataaataaatttttaaaaacatagggatcgacacacttttgtctcgcacacatttgttattgtttcacagaaaatgaagcagtaacaatccaatataataatggatcattaaataaaagggaatttcgcatatatcgcaattttaaattattctttatcacacagcagagcgcagagacatcatcaatcattcataatacttagaaaagaatttatggaaggcgccaaaacgattgagcatgtcatcgaaaaaaattaaaagtttttggcaaattaatacaaaaaaattttgaaatttataaaacgaaaaaaaaattcttaaaagtctatcgatctttccgttttttaagcactggtaagaatggggtctgagtgaaaaattagtgaagaaaattggagtcaaagggaaaaataaaaaataataattaatatattctttaaaagtaacattgcccaagtgtgcaaatggcctagtggctagtcttcttgactttcccttcttctttcccctggttcaatccctctacagaaattagattaggtattttcaatttttttttttttttgtatactcgtgggtttcctataaagaaaatatgattcctcatagttttttttaaattgatacatattttatcattttttaaatgaaaatcctaccaattgagcttaataatcgcaaaaaccaacctttttttgttgaagatttctcatttattagaatttttaaattgcacccaaatttttaaaatttccccggcggcgcctatcggcaccgccggaccccttctttcccaaaagttttttgaaaaagcgctccgaaaaaaagtgatgtgaaaatcaaatctgaatttctattaatattcgatgatttagacagcatgtgcgcacggacgtgttggtgttggtggtgaaagtggagctggtgttactgagaccaaattataccaataaaagtcgaaaacatttttgatttctttctttgttatttttaatttatgcgaaaatgttttttatatttttcatatattattgtacaattcaatttttcttgctctttttttctaaggagttggtgtcctgccacaaaaaaagaagattttctagagtcaaaatgcgcttatctcgaatcaaagctcggtttttgcaaaaagttttaggtcgcacgaatactaatgagtttcatgcttttttctgtttattcatgatgtcagagcaattccaaaacaaacgattagcaaaattcaaacgcaattcactttttttattgaaagaaaaattaatttaaaatgaacaaaaatttattttggtatgtataataaatattaaacaaattatatataactaattaaacaagcaaacaaccatacggatccccataatggtgcggagccattctttaaaaatcaagacctgca

SEQ ID NO: 29902 - DNA, 1186 bp, Heterodera glycines
  unsure (1)..(1186): unsure at all n locations
atgttaaagcaattttcgattcaattggccaaagtggcgatttggagtgccaaacaatcgacaatttgtttgnatgaataattcatggagggggagcttcgacagtgtttctctcctcgcaacccccgcatttttccaattccgtaaattttcagtggcaaaaagtggacaaaaaaaaaaaccaaagaatattttccttagataatttaattttatttaatattcgaatttctcttctcaattggtgcaccgatggaatttattgaaaaggacgacgaacagagccttcttcggtcagttcagaaaaagaatatcccctcaataaataattggcgaaagccccccaaggatttcatttgctttttaatggcaattaatggtaaaaaaggaaaaggctctttccgtactcttctaatgaccccacggggactctttaattggaggatttttgaactgctgaaagttcgtttgacaatttacaatgaaacaaaaaacaaagagagaattgagtctaaagattgtctctaaaccaaaacgctattggacatgccaattctgttcagaactcgcttttggcttgtggtcgttgccggcggtgccgcctccgcctttggcattgttgccaatgcgatgctcacgcgtctgttcctcactcggcctgcgttccgccactcgcccttctttttcctcggcttcgtcgctttgtttgacactcttttggattccgtttacattttccttttggtcagttagcaaatgccatttttaatatttgaaaattaatttaaatatggaaaaagaaattattatcacgtttttatggcacaaagaattaaagctaatgctaatgaatgcttaaaattattaaagttttgttttcgttgttttaaataatatttgtgagaataaagtaagcattttttaaataccgtattgataaagaagaaattttgatttttgtatattaatttaacgctattttgtcatctcataaatagcgcttttttcgaattaaatttgaaaaaaagaaagtttttttgcggtgacacacacacttcggtttataaattacgcactcacttatcgtttttacattcatttttttatcctttttttgatcttttttttctctcccgtttaagctgatattgttnngtnataaacattgaatttctctacatcgatt

SEQ ID NO: 29903 - DNA, 948 bp, Heterodera glycines
tcgattagaatacctgcactgccaacacttgagaaacggtgaaagctgtttgatctgttcatggcgcataaaattgtttatcggccgaacagatctgaaactattttctatttttaatccatcaacacgctttaacatccccttttatagatttaacacaaaatacaaactgggcaaaaaattcattccctttgctgggagggtaacaaaattgtggaatcaactagataaagaactaataaaaacaaattctttaaatcaatttaaaataaaacttaaagttcactagggtaatatgtaagaccgggaaagctagaatgtaacaaatttctaagtgatttggtatttcgacctcatttgactttgacctcaatttatttattatttattttcacatatttttgtctttttttaattcctgtgattatccatatattttgtcacttactctacgacacatttactggaatagtcgtcagagtaagtggttttcgcccttctgatgacttttttattttttatgaataaacaattaagatttatgactattgaaaagcagaaattcaaaaatttcaactcaaaagcaccgcttacgttcgtttttctcattttgctggttttcctgattgtagtaacgagccatttgattcagcaaattgtcagaaaaaatcactgtaaaaattcacatttgtaaatattaaaatgggttgtctaattttgtgtatgaatggatggattaaaaacaaattaaaagatcgatttccgacaggaatataggccaaatactgtacaaagttcataaatatactgtggaaaaaaggaaccggaaaagaaattacaaaattttcccctgaggcgctattaccatttatattataaaatttgttaagaaataaggcagaaaatttccaaaattttcgcacggtagcgcctgtcggcacacttgac

SEQ ID NO: 29904 - DNA, 1299 bp, Heterodera glycines
actttgttatttgaaatgggaatttattacttgacaattttaaatattttattaattaaaaatttttccggtgtttttaaatttaatgcaattaattcaaatatttcactccgatatttaattttgaaaatctaattttttcaattttttaggttgttgaggaccgaattcgcattaatgaggcgaatggtggcatccgaaaggacggactaatgcacagcgaaggatcactgtacaaaggcaaaattatggcatttttggactttttgctgacactgcgcgaggagcaaaagttgagcacggagcaagtgagggagcaggtggacgcgttcatgttcggaggtgagaagaattagcagcaaaaatgccgtaaaagattgggtcggaaatgccaaaacttaataatgcatcatagtgaggacttggaaatttcccgaaaaagaatattgggcaaatcgccaaaaaatgtgatcatgtcaacaaaaaatcttttttattgaatttttttgttgttaaagaatttattttacatgaaaattcaaaaaatgccaaaataaatataattcagatcacaaattatattaaatgcaaggtcattaaaaaattcaaattccgaatttgggcttcaattttaagaagaaaaacttatgaaattgccgttctcaaattcgatactttggacaatttcagggcacgacacaatcgctcatggcatgatgtggtcaatttatacatagcaattaatctaaaatatataacaatttttaatgaattaaaaaaaaagaaatttcttcgattaaaatttaaaattcgaattcatttaaaaaaaaatatttatttgcgtcatttacatgcctgcccacaaaatatttccatctataatgccaggtttctgtggtcaatggcatgccatcccgatttccaagacaaattgcgtgccgaaattgctgaccattttggagtagcaactcagggggaaactgagctggaattgaccgcctctgatgtgaacaaattgccatacttggaccggtgccttcgcgagactatgcgcatgtttccggtgattaatttttatgccaataattagtgccatggttttctgtaaaattttgtttccaatttctctcccgaatggcacataaatttataatgaatctgatcttgctgatgactttttaaggtgttccccgtgttggagcgtgagcttcaggccgacttgcgcatcggtgacaaaactttgccccgcggggcgaccgtcgccattccgccactgatcattcaccacaacgaaaaagt

SEQ ID NO: 29905 - DNA, 1197 bp, Heterodera glycines
ttgatactgaatcataaaaataaaatatcattagcagaggtataatggctttcattacaaatgggcatacaattaatatctatggaaaagaatttctgaaaattcgagtttaatatattcgattcatccattaatttagcagttattttaaaagtcgaccaataaaaaaaacgtacgtttgttgttgtacatacttaaagaaaagggataagttcataaaaaaaaattagatgtgtcataattaaagtcaaaaaactcagaggagctgatagattgatgatagtaaattagggaaggatggggacaaattggacaatcaccattatcattagcaattagcattcgttgtgctttctctctctctctcccttgctccctccctcgctctatactcttctagtagtgtgtctctatctctgatgtgtatatcgatctgagtcgctgaatctttgacatttggggtgggttgatcgaatcgtcgagttgacgaatcgaggggaggcggttgaagctttcttatttgtaaatttccgaattatgatcgcttggcgaaatgaatgaatttgggttagtttgcgaattttaattggcaaagtgaatacttagcgaaataaaattgctttacattcaaattaaatgattagacccgcccctctcctccagcagattcttcagactcgagtttttcttggttaaatttttacttcagcagtataaaagaaaattgccgaaaaaatcattttaaatacaaaaaataaatatcagttttcaatcttcaaaaatgtttaaaagagctaaccatgagaaagaattgaaactgagaaagaaggaacagaagcaaagagattaaccactaagccaacaattaacttttcaataatttttcattcctccaactttgctcaaaaatttgatccagaaccccatgcttaccagtgtacttttggacccggacctaccgggtcgggtaccgggtttgcaacagggttgcgcaaatcacccgaaaccctacattttctcgacccgaaacgcgacccgatatttttctcgacccgcggcaaccctggtatgcaatagagagactctaaaatttatattgtctatgagtgaaattattgggccaaataaaaacagacccgagtttatcttgttcttttagtgttttaaaaaagcacatttttgctgtcggttgtagaa

SEQ ID NO: 29906 - DNA, 945 bp, Heterodera glycines
acattaccaaaatcatacaaaacagcattatttatttttttattttttaatatcaactaacaaattaaatatttttatacaatttaaaactaattgtacagagaaaaaacaaaaataagaaggacgtttgaattgaatttgaaaccttttgtgacgatagatacgtaaatatttattgaacacaataaaatatttaataggataattttcaatgaaaatataatttatgcgaaatgctacaagaaaaaatcacgatttacaaaaaacaatatttattccacattatattttataattgtcaagaattttcaaaaaataatatttattgtaaagaataaatctaaaataaaaggtttatgatatcgaagtgtaactacaatgtatagatacttcaattatcgattgatttccaccccaaacctattggcttcttttggggcgagagagtgcaccgtctaacctctccagcgacgagagagtgcaccgtctaacttctctcgcctgcagagcccgtgcctatgggctgctcggtcccggagatggacgagatcgcgacatctctgaatgaacagctgacaccatatcgctgcccattggcactgatggccaagacaacaaagcattaataatggctctgatggctacaccgacacgcattatgccaactcatgacgcgctaactgttaacataactacaatttgacgaaattatagtatgtgtggctgaccgtgacgttatgtcggcaattgtgccacactttccagtctacagaaattttggcttcaatttctctcttcttaaaaaattccaccagttttttgcatgtttttgcagtgccttttcactttcttcgcaaatgttctgaatgccattgtccaaaagttggccctttttcaatgctcacaatgtttatcaactcccaaatatattttcacccgaatcat

SEQ ID NO: 29907 - DNA, 861 bp, Heterodera glycines
  unsure (1)..(861): unsure at all n locations
ctttgcttttataatctgttttaatggaaataaatttcatttaattataatgtgatctaataaattaactttacattttnaattagatgcattatacgcattttaaacttcatgatttttaggtacctaaaaatggaagccctaataatcgaagtctgtgcgagtaaatttataaaaattcaaatttgcgaccaccaaaaaagaaaaattaattgcaaaaagaattataaaataaatgagttttattattttgtgaatttgaaattagaagatgagagccaaccgaatattataacatcaatttggaggcatcagagacaggcatttaaactcagttaaactcagacaaaaataattaaagtaactaaaaatcaaagagtaattattaaaataaaataaaaacaattcatgagaaaattatttatattaaaaaattatactgaaagagaattatttgtcatttttagcaaattttttaactaaaaaatgacaattttgatctttgtggtcaaagtataaaactaaaaataattgattaatgttgactataatattggacacttaaaataaaagattgataaatgtttaaaaataattaggaaaatatatatatacttttttgaaaagaggaactgaaagacgaacagaaagagtaataaatagataatttggtttaaaattttttaaagaattgttaagttccagaattttttttgttggtgattgattccaagatcttgatagttttatgtttatttacacatttttttaaattattaacttttcttataacaacatttgctttattcgatttgatggaattttatttatttaacaanttattattggaaattaattgaa

SEQ ID NO: 29908 - DNA, 1439 bp, Heterodera glycines
tataattttgacactttaaccccttaattgattacatttttgtgcttcatatactgcgccttttttctaatgccaatcaaaacttcccttttccttatgcttttgcttaggcttcaatgaccgaatccaccggttctttgtgctcctccaatttcgcctcggctgcccaacaaaatgttgtcccaccagcaacagcagcatcagcagtcgatgttcatcaacaacaacaacaacaacaacagccgatgctgcagaccaattctttccacgaccggcgccgtctgaacactttggccgagaaacggtcctttctcgtccgaatggtaagtgccgccgggatggcacggaattccgatttccgaaaattttttgcttctcggaatgccatcccttgtaagtgcgccgggagcggccctttgatgtttgcccgagttatcacagctaattagcattcatttgctaatcactcctttctctttcattaatcactaattatttttattttctcttttttcttttcattcctccgctattttcttatcattaattgacttttcccatgatgtttctcatctgttcacaggtcagtgacccgaagtgttacaatccgaaaattgtgcaccatttgaacatgcgcacgcacaaccaaacatcacaagacttattcagggacagaacattgaggtgtgcagcaggggaggaggacaaagtgacaaatgacaaatgggacaaatgacaaatgggaccaaaatgacaaattggaacaaatgaataagaaaactcaaaaatgggcatcggttgtgatttcgttagatttttggcaattttgtcttgctcctttcccccccccccccccccaaataggcatgcaattgaacaaagcagccgtgccatcggtggactgtgtgtcgcaactgctgccgcccaatcggcgccgtcgtcgtcctctaccgccccgctcaacagtgccaaccatcacttccatttgccaagtgccagggcggcacagtttcgaagcggaaaatgtttgtgcccattcaaaaggaatgccaatgatgtttcctcagatttgtacatgagcatcgatcagcaggggtcggacgacgattaaacggcgaacaaacaattaacggatgaattttggttttcgtctcggcgtattcaaaggaaaaaggtccgcaaaaactattacaaccgtattagaccaggaattgtgtttctggataattaccgttaattacccaccgcaagtatcattttattagccatgtatccattcatcattattatcattttgttccatcggtgcgtcgttcgttttgtttgttttttgaataatttctcccttttttggcatagtgtaacaaataaaaatgatgctgatgatgttaatagataaagatattgtacatatgtaaatgtgcatgtgtgtgctgtgt

SEQ ID NO: 29909 - DNA, 1021 bp, Heterodera glycines
ggcaaataggacagtcgtttaaaatgccaatgccaaacattaattcccgagtcgcgtcaaatcccatgccaaattgtttcccgtgccattgtcaccccccccccccctcccgcaggtgtccagctgtgtactgcgtggccatcagctgagcggcttcgactgctgtcgcatggttcagccatggctggcaacgcccagggccggcatttgttggcccttcgtcgtcaattcgtccgcctctttacaaagtccgttggacaacgcgcggggcatccaaatcacttttcaggtggtgacaatatcggccaagtgatcggagtttcagacaataaactgatcaaaatgattggaacccaatcagagaataaattaaagtgatcattttccaatttgaaataagcgtaatctgatcatggactgatcgaaatttgggcaataaaacgatcatttagccgaatgtgattagggattgaaataaaatgcatttaattcattgaaaataatcgccgaataactccgatcggactttaactacaacagattagaacaaatattaaagttaagccaaaaactgatcagatgaaccaatgcgttaaaaagtatcggaccataactacccaaaaatataatttattagcaattatttttctctaaattacccccccccccccccgccccgcagatttcgcgcaattcgttccgctcgggtgccctctccgtacatcccggcctctccgtccatttggtttccccgcatttgcccatcggtccccgtctccgcgttgccacaagtctcgactcggcggccaacgcccatgcgctggccgacaaacgctcgctccgcttggacattcgcaaggaaattgtcgcggacgccgccgcctcgccctttttcccgagcagcgggtgaatttgcaatttcaaagcggattaactttatttcttgatttgaaaatttaaaaaaagaaaatttaaaaacgggagcgaattattgaggagggaatctgttaaaaagcaagca

SEQ ID NO: 29910 - DNA, 1475 bp, Heterodera glycines
cagaagagaaggctaaaaaggatgccgaggataaagctaagaaagacgcagaagagaaggctaaaaaggatgccgaggctaaagccaagaaagaagcagaagagaaggctaaaaaggatgccgaagctaaagccaagaaagacgcagaagagaaggctaaaaaggatgccgaggataaaaaagccaagaaagacgcagaagagaaggctaaaaaggatgccgaggctaaagccaagaaagacgcagaagagaaggctaaaaaggatgccgaggctaaagccaataaagacgcagaagagaaggctaaaaaggatgccgaggataaagctaagaaagacgcagaagagaaggctaaaaaggatgccgaggctaaagccaagaaagacacagaagagaaggctcagaaggatgccgaggctaaagccaagaaagacgcagaagagaaggctaatgccgaggctaaagccaagaaagacgcagaagagaaggctaaaaaggatgccgaggctaaagccaagaaagacgcagaagagaaggctaaaaaggatgccgaggctaaagccaagaaagacgcagaagcaaagaaaaaggaggaagaaatgaagaagcaaaaggctaagcccgaagaaaagcctgaggcacctgccgaaggcgtggccgtagtgccggaagcgaagaaggcggaagagacaaaggaaaagctgaagcaggaagagaaaccagtggaagtgccaccatctccagcagaaaagaagagaaaagaggctgaggagaagaaggctcagaaggatgccgaggctaaagccaagaaagacgcagaagagaaggctaaaaaggatgccgaggctaaagccaagaaagacgcagaagagaaggctaaaaaggatgccgaggctaaagccaataaagacgcagaagcaaagaaaaaggaggaagaaatgaagcaaaaggctaagcccgaagaaaagcctgaggcacctgccgaaggcgtggccgtagtgccggaagcgaagaaggcggaagagacaaaggaaaagctgaaacaggaagagaaaccaatggaagtgccacaatctccagcagaaaagaagagaaaagaggctgaggagaagaaggatcagaaggatgccgaggctaaagccaagaaagacgcagaagagaaggctcagaaggatgccgaggctaaagccaagaaagacgcagaagagaaggctaaaaaggatgccgaggctaaagccaagaaagacgcagaagagaaggctaaaaaggatgccgagactaaagcgaagaaagacgcagaagagaaggctaaaaaggatgccgaggctgaagccaagcaagacgcagaagcaaagaaaaatgagcaagaaatgaagaagcaaaaggctaagcccgaagaaaagcctgaggcacctgccgagggcgtagccgtagtgccggaagcgaagaagcggaagagacaaaggaaaagctga

SEQ ID NO: 29911 - DNA, 1007 bp, Heterodera glycines
agatagccatttttgggcaagatttttttcgttagcatttcaaatatcgtgtgagtgttggtagagccagactagagaaggcaaatgttggtaccaagtttgcggtcaaatccccaagagaaaaaagagatagccattttttcggcaagaatttttttcgttagcatttcaaatatcgtgtgagtgtttggtagagccagactagagaaggcaaatgttggtaccaagtttgcggtcaaatccccaggagaaaaaagagatagccattttttcggcaagaatttttttcgttagcatttcaaatatcgtgtgagtgtttggtagagccagactagagaaggcaaatgttggtaccaagtttgcggtcaaatccccaggagaaaaaagagatagccattttttgggcaagaatttttttcgttagcatttcaaatatcgtgtgagtgtttggtagagccagactagagaaggaaaatgttggtaccaagtttgcggtcaaatccccaagagaaaaaagagatagccattttttcggcaagaatttttttcgttagcatttcaaatatcgtgtgagtgtttggtagagccagactagagaaggaaaatgttggtaccaagtttgcggtcaaatccccaagagaaaaaagagacagccattttttcggcaagaatttttttcgttagcatttcaaatatcgtgtgagtgtttggtagagccagactagagaaggcaaatgttggtaccaagtttgcggtcaaatccccaagagaaaaaagagatagccattttttcggcaagaatttttttcgttagcatttcaaatatcgtgtgagtgtttggtagagccagactagagaaggcaaatgttggtaccaagtttgcggtcaaatccccaggagaaaaaagagatagccattttttgggcaagaatttttttcgttagcatttcaaatatcgtgtgagtgtttggtagagcccagactagagaaggcaaatgttggtacca

SEQ ID NO: 29912 - DNA, 1095 bp, Heterodera glycines
  unsure (1)..(1095): unsure at all n locations
aacacctgcgacccgttccttctgtcntcnttcgtgcgcggccctctcttcttcgtcttcgtcctcctccgacttctgcccattctctgttttctcttttnggtcgctgctccccaaaatgctttgagcatttcgctggccaaatgcattcttcgcgttaagcccaccatcagatacaaaaagaagtgattagaaaagataatgaaggccaaaagcaaaataattaaaaatgaaaagcccaaaaattatttagcgccaaaagcactccttcaaagagtttgccatcgtattactcgcacaattcgccgacaaagacaacctttggcgtcaaagagaatgtgccaatctcttccccgttgccttgcggcacacaaattccaccaaagactccgccgttgggttacatggatcacagaataaagtgggcacaaaatgatcgaaatttgtttggctaattaacttggtgccatttccctccagctataacaatgccgcctttttcgccgtctccggcgccaacgcaaattatgtgcagggcccaattgccagcgcgaccaatttgggcggcggaaggagttcacgcagctcagagatttccattaacaaattcggcggggaaaatttggcgacggtcgaccaaattaagcggcaaatgtcattttcccatctgtaggagaattaattgaccagatggacagcaaattattcactaattcaggggcagtacgcacacaacgaacagtttggtatccgaagtttaagccaatgacacaccaaaggaacgccaattgctttttgtccgttccctcaacatttttgaagcctttcttctcttaaatccttaccattctgccaaaaccaattcattaattaattacccctcttttacattccaagtcttttatttgttctttaatggtaattttcatctctgctgatcattggtcaatttaaattcaattagccattttaaaagtgcgtttttcctccccctcccccttcccattattttttgcccattttttcatttttgtttgttttgtcattttatttatgagattaaatatttgtacaaaatggcaaaagtgcacaaaa

SEQ ID NO: 29913 - DNA, 1398 bp, Heterodera glycines
tgctgtccctccgcttctcttaccgcctccactcgcctttctctccaatgagtcattgcgcgacaaaattcccgaggtgctcggatgtgccaatgctttgtgggtgtgccgttgcggctgatgcgtcgtttggcgtcgttgtccgtcaatggaagggtttgtgctgtgtccgtaacgtgaaaatgaatgacaccgggcgatgggcaacgctttgccgtggtttccggaggagaagggcgagtggggctgggaggagagggggtgctgatgttggagcagatggcgcgagaatgaacctggcaattttctctgttgaggttcaatttgccaatttatttctcttttctctttctctattttccattgtctctcatttgtctgtttctattttcgcatttataacaaatgacaaagaatggagaaaagtgagtgataacaacacacaaatattaagctgagatcacacacatagacagaagatgtaattgaggggatggaaatttgtaattattaattataaccaaattgtaaaatgatagaaaggataggaaggatgaaagaaataaaatacgtaatttgaaaaaggatgagaaagatggagaaagagtgggaggggggaggactggtgaattgttgaataagcaccaaaggtgtccggaaacagttaaattttgagatcagttaacggcagatcagactcagagaccggacggaccaatgaattcgcattttgcaaatgccccaaatttggcgaattatggcaccgatgaaaaaagagaaagaatgggggaaagaaaaacatctgctaatcggaaatacaaattgatctaatcgaaaggaatgataaaatgatatccccataatttatttgtcattcgttgagtagcgaccgattatcagctgatcattcgcttgtataaatgaatcacaaatatgtattagccttaaatataataattaacttttgagacgaattcccgtggagaacaaataaaaggaaaaggaaaaagaaagaatgtttattttggagaaaatggcacggggaaatgcaatgcagcgaattgagaagccacaattaaaatgagacgtgagatgaagcaaaagggcaaaacaaaatgagagggacgaagaaggaattgaaattggattttgatgagtctaacgacccctcgggcaaaatgaaaaaagcgataattaattggaaaatgaggaggtttaaacaaaacaaatgaaattttttctaaaagacgcggacggatgggcgggcggatgaggccgagtgaatggatttgacatgggattggaaattgggcagaaaggaaggggcgggggggggggagaaaccatctcttacattattgtgttgaggcggacgaggggggaggggcggaaggggag

SEQ ID NO: 29914 - DNA, 1271 bp, Heterodera glycines
ttcgggggaccgtgccgggtgccgcggggtaagcacctgttggttcgtttcatcacggcaccgaaccttttggctagtcagcaatcgttgcttaacttgccagatcggacgggtgcgcatgattccactgttccaagcaccccaccaaaagcaaaacgatataaccaaaatataaggaaaaattttttaaaaatttttttctccatcttcctttttgatactaaagcatcagagtgctaaaattaagttgtaaataaaatttggtgcgctttagagcactttctgaaaaaaatatttatgaaacaaaaaaatcgattttttcaagtgtccgtttggggtactcaaacatttatggggagcaaaaatccaacgcagaattaaagtacaggctatagggaagctattcccgaaggattcggtctccccataaatctgggcgcatcggttcggggggactgccccgaaaacaaaaaaatcgattttttcaagtgtccgtttggggtactcaaacaattatggggagcaaaaatccaacgcagaattaaagtacaggctatagggaagctattcccgaaggattcggtctccccataaatctgggcgcatcggttcggggggactgccccgaaaacaaaaaaatcgattttttcaagtgtccgtttggggtactcaaacatttatggggagcaaaaatccaacgcagaattaaagtacagactatagggaagctattcccgaaggattcggtctccccataaatctgggcgcatcggttcggggggactgccccgaaaacaaaaaaatcgattttttcaagtgtccgtttggggtactcaaacatttatggggagcaaaaatccaacgcagaattaaagtacagactatagggaagctattcccgaaggattcggtctccccataaatctgggcgcatcggttcagggggactgccccgaaaacccaaaaaaaattttttggataaaaattatttaaatgaactgactagataatatttaaaataggctatttctcttcccttcagtatccctgcaaagtttggtgcgcttctgatcaggttctgaaaaaaaagtaaagctaaactttttggcctgtttaaaaggaataaaaatttttaaaaatttattcatctcccttttttgtagaaagagcatcagagtggctaaactaccatgttaataaaatttgggtgcgtttcagaacccctttctgaaaaaaaatttaaaaattaattttgcaaaaaataaataaaa

SEQ ID NO: 29915 - DNA, 1104 bp, Heterodera glycines
gggcgaatattgaaaaattcatatctagcctaagggttgaccaattttgagcaaataaagctttaaaaatagagaaaaatcaggagaattttatgggatttatttaggttttctaacattaatatgaaaaaagttattccagaaattctggaaattttagatttttcagaaaaaaattcgtaactgccttctgaaaagctatttgagaaaagtaaaatactacaaaaatccgcaatttttttctctataatataaattttattttacatttttatcacatttttaaaaaaagatataaaaataaaagtgattttgagattcgggaccaaaggggggagcacatgatttttgagtggaaaattttttctcacaaaaatcttccaaaaatatgtctttaggggttatttgggccgctgatcacgaatacgtgatcagattttacttttgacatcgtcaagacctcagaatccctgtgtgattggggattctgagggggggggagggggcaggttcgaatccggacggtgtacattatttttctgtgcatttttacgttatttacagtgattttaattaatttaaaatattttgttgagttaataaataaaaaattatatttaaattaattttttttgatgaataaattttataagtttaaattaattatttttttaattgatagaatttcattatttttttaattaaatttgttaaaaaatattttcattttaatttaatgaatttactaatcactgttgtatcaatttatatttaaagatttgttgtaaattaataataaaagaatttatgtaaataataataattatcttttaataaagaatttcatattttttttaattgaatttataaaaattaatttcatattaatttaaatattcaattattgtacatttcaaaattctctttttaattaataaaaggaataattaatttattttttaaaatttataataaattgcattcaatttttgtacctcttctaatcaatcacagttgtacctcttctaatcacttttgtacctcttctaacaattttgtacctcttctgatcacagttgtacctcttttaatcaccagttgtac

SEQ ID NO: 29916 - DNA, 987 bp, Heterodera glycines
  unsure (1)..(987): unsure at all n locations
tttccgacaaaagaacaattttcgttaaaaattttgaattctttctcaaaaaattatttaaattatttattttcattctaattgcatttttatttaaatcatattacaaaaatctcattaatctctctcttgccgctttttaaataatttttttttgactattttttgattgattaattttatatttttttattttacaattgctgtcgacaattcaactattttccgcgtgtgcatttccttttcatttgcttgatagccaagtgcggaaagccctgaatacacaacgccaacgattttgccatttagcaaaagcgaattatcatcggccaatgaaaagctaaaaaaattattgttaaacaaaaaatttgtttataaaaaatcaatagcgctagaatttgtttttctctaatttagcatttaaattgaataaatatatttaattaatgttgatttttatattttttgcagattttaaaacctcaaaaatattcgtttattttttaaatttattttacttctcatatccttccaacagcggaacatattcaacgcgcaatttccccccagacaatcgctccaattcgtcctcaatgttgcgcaattcgtatttgtatttgttccattttgccgacaaaattacgaacaaagcgtcggaattgccaaaagattcccttaaattctcaaaatggaactgcgaaatttggaaatcacttaaaatattcaaagagcaataataatttttttagaaaaatgaaaataaactatcatttggctttggtttttcccaattattcaattaaaaaacccaaaaatgtgccctcaaaaatgatttttacatcgtttttatccatcctttcttcatttttaccatgccatgaacagtgagttgatcagattcgtatcgccctcatttntgtggtgcgtttgtcgggtccctgccaatgcgttttaaaagtcgctgaatgcaattcggtggtccgtcga

SEQ ID NO: 29917 - DNA, 1370 bp, Heterodera glycines
tttcgtttcgcactttcgatgattgactgatcacaaaatgcgctgccatttttctcttccaaaaatttcagaatttcgttcattttttccaacgatttattcgtctcattttcattggcacccttttcattttcaattcttgtcaacataatttcgatgacaaaagtgttgaactcttcacaaagtcccaaaattattcctcgaattttgggcatttcgtccagctgtttttcgctgttgcctttaagtccaaactgatcggtgcccttactcagctgtttacagaagccaatggcacggtgtgccgggagtgcaattcgccggttgaataccatttcaattgtatgtatcggctttccccaggcatggatgtgcgggtacggtactaaatttgcagccattaccgtgcctggggattttggcataaaattccattattctttcggccatttatttatttttcgaaggatttttttagacaaactgttattcaaatatttaatttgctcgcattaaattgttccccagattaaggctaattttttttggcataattatggaaaaatccttctcaaaattgggataaatggtcaatttatgtaattacccaatttataaaattggagaatattttgctcaaaatttgccaattctttttccaaattaattagttcgccgacgtcaactgttgatgagttttctgagaattaataaatagagaaagaataaaatagtttatatgcgttttgtttttcaagaaaaacacctcatttccaagaataaatgtcaaatttcttggtgtttaaggggcaacagaaatttggacagtaaagcgagggaaaggtgggaaaatagtgctcaggtgctcaggccggccgttgagaaaagcggtccgtccgtaccagggctgcggtgccgataagcgccgcctaggaaaaattttcagaaattttaacgaattttgttaaaaatagccaaattttttaggcatttcatcttttccccttcgctagcctcccgcccccttttatgtatgttaataatactacaaatttccaagaataagtcagatgaaatcgaaatatgggtagcagccttttaataaaaaagaaaaaaaaattcattttataaaaaataatcttacaagaaatcgtctcgaaaaataatccaatagtcaaattacggatcaaaattgcggataagtcccaaaaatccgcaacccgcaatccgcaattacgggggtccaaaaaccccgcaatttccgtaatccgcaattgcgtccagccctgtttccaacccaaaccaattgcccatccctctgaagggtaaaagacgtatgaatttagataatggaaaaaggcggacagatt

SEQ ID NO: 29918 - DNA, 979 bp, Heterodera glycines
tatggggtctaatgagcgggcactttggcaccttaactccacgtttggttcatcccacatcgccagttctgcttaccaaaaaatggcccacttggagctcaaacattcaacgcctgggttcagagtcaagcaaccctggcttcatacccatttagagtttgagaataggttaaggacatttcgtccccaagtcctctaatcattcgctttaccgagtataactgcttaacgagctccagctatcctgggggaaacttcggagggaaccagctactagatggttcgattagtctttcgcccctatacccaagtcagacgatcgatttgcacgtcagaatcgcttcggacttccaccagagtttcctctggcttcatcctgctcaggaatagttcaccatctttcgggtctcagcgcatacgctctgtctccgccccatcgcatgcgatcgagacgggactatgttgcgccccaacaccgcagtgccagggatcacacatcagctccgtaagaagccttcactttcattgcgcctttgggttttgaacacccaatgacttgcgcatacgctaaactccttggtccgtgtttcaagacgggtcgaacagatgaccggcttttacaccgagaacgcacaactgagagcccgagctggaccgaactggttgctggtacgtgtcgcacgcgaccgccaccgacccccagctcgagtcaacacggacccgaaaccattgcacaattcacccagagtaaacagcactcccccgatccgggtaccagaccccgaaaggctggcctcaagaccgagctcacgcagctactccgagcatctcagcgcactccgcctgcaaatgccccattcgccactgaacagaaggacagcaaaccccagtctggaggctagcagcccaacgtacagcaacaaacgggtgaatgcagacaagagacgccagctctgtccgtttccacctcatcggttca

SEQ ID NO: 29919 - DNA, 1958 bp, Heterodera glycines
ttaccgtatttgctctttttatatgccagtctccattaatctgccggtctccaattatataccccctttgaactaggttgaaaaataatctcccagtctccatttatgtgccgggggggataaatagaattttttaataatttatttggccggcttcttcgtgatcgtttcgtccatctttaaccgtttcagttgccctaaactcgcgcaaaaaagcccagaaggctgtttctatgcctcaaaacataaaaaattacaaaaaaaaacttcattttgatcacgttaaaaatttcgacattttgaccgacttgtcgacattttgtcccactactcccaaacattgttagacctgtcaaaacattgtttaacccatttaaaaacaaatatcaagctctacgcactcaattacccccaaaatcccccacttactgcgaaaagccgacttttttgaccaaatttttagacaaatgaccaactcaactttgggctagggactcaaattttttaaaagaatcgcctcaaaatgctctaaccaaaaaccacctcgcccattacccacggcaacttaaaagccgctacgggcgcaaaaaaaagatgcaactctaaaaaaattcggaaaaattccctttttgaccagtttttcggacaaatgacctacttaactttgagctaggggtccaaaatttttttttaaatgtgactaggtgagctctacaataatatacaatagcgcctgagctaacatttcgctaaagcacacccgcccgagtctaactttttgagaccccttcctggccaggggctaaaggggggtccaccccttcaacttagtgctggcgcacaatttttttttttaaagaccaaaacgattccatattttcttaacttttcattaaaaattccaattttttatgcataccggaagcaagaaaattacatatttttgccattttggggtcattttcagaagttctttaacaaaaaattcaatagaaaaaattttttttttgacgagatgacattttttggcgacatgttcaacatattcaaaaaattttccactaaataaatcaaccgaaaaataatctcccagtctccattagtctgccagtctccaattatatacccccttctgagaaggtgaaaaataatataccatggtatataaaaagagcaaatacggtatttcatgaaaaagtgttgggtggagaactaggtaagttggaaagtgaaaatcgaaaattttagttttcgaatttgttcgaattcggacccaaggttctgaattggtcgaaatggatgcccgattcctgatcaacgaccccgaattgctgcctgctgtaaatcggacatttgcgttccgaactttagcatagagcccggaaatttcaaatttacggatcctgttgcaggattggaattcaaaaatttttgcaggaccggatccggccggattaatcctgcaaatcctgcaatcaggattgcgtactgggatcctgcaaaatcctgcgcaggatccggtcctgctccgggctctactttagcagcccaagcaaaatcggaatagcagccagcggaacgccaaattatcattctttttcaaatcaaatcctgtaaattttaataaccaataaattctgtaataaaaaaggagtgattgggcgccgcttatacaaagtttgataaagaatttgttccactttcgtaattaaatgagaatgcgtggcttatgggttaaatttcaaaagccgcttttcgcaaagaaatcgatgaaacggtcatcgatttggacatttttgaatggccattagcgcagccgagctgaggatcgatctgttgaagtgtatgcagcagctcttctgtttcattaccaaccacattgcgatactctgatcattcccgattttaaagccaccaattttttttgtctaatttttagaatttataaaaattattta

SEQ ID NO: 29920 - DNA, 1370 bp, Heterodera glycines
gaagaggtacaaatttgataaaagaggtacaaaagtgattagaagaggtgcaacagtgattagaagaggtgcaacagagattgaagaggtgcaacagtgattagaataggtgcaacagagattgaagaggtacaaatttgatgaagaggtacaaaagtgataaagaggtacaaaagtgattagaagaggtgcaacagtgattagaagaggtgcaacagagattgaagaggtgcaacagtgattaaagaggtacaatcatggtttaaaatgaaataaataagaaaaatgtattattggatgtattataaatttatcaaattaaaaaaatccttttacttattaaaaataaagttagaaatttataataaagaatatttattgaaattgaaaggaattaatttctcgaaaattcaaattaaataaaacatttattcatcagaaataatttaaaataattaataaaacaaaattaaattaaataaaaaattaaataatttaaattaaaacatttgttcaccaaaataatttaatttaaattaaaatttaaattaaaaatttttatttattattaataatacaaaacaaattaattaaaaaatgtaaaagtaatcaaaaaatgcacagaaaaataatgtacaccgcccggatccgaacctgcccccccccctcagaacatgtcccagaatccccaatcacacagggattctgaggtcttaacgatgtcaaaagtaaaatctgatcacgtattcgtgatcagcggcccaaataacccctaaagacatatttttggaagatttttgtgagaaaaatttttccactcaaaaatcctggtcacccccctttggtcccgaaccccaaaatcacttttatttttgtatctttttttaaaaatatgataaaaatgtgaaacaaaatttatttggtagagcaaaaaattgcgcatttttgtattattttactcttccctaatgacttttcagaaccgaggtataaatttttttctgaaaaatcgaaaatttccagaaattctggaataactttttttcttttgaagctagaaatcccaaataaatcccataaaattctcctcatttttctccatttttaatgctttattcattcaaaattggtcaaaccttaggccagatatgaattttcaaattttagcccaaattcccgatggccaaaaaattggaaaatattttcgaaattttaaaaaattccaaaaattttgaaacgaaaaataaacatcatattcgtgctcagcacctcaaaataccccagaaaaatatttttgacctcctttttcaacccaaaaaaaattttttgaaaaattttctaggggggcctagctcaaaaaattttgaaaa

SEQ ID NO: 29921 - DNA, 1087 bp, Heterodera glycines
ttaatagatattcagaaaaatggctatctcttttttgagaattttctatgcaacaaacgctctcgaacatgaaacgaagtgcggtgcgccatggccattttatttttcaaataatttttatatttaatagatattccagaaaaatggctatctctttttttgagaattttctatgcaacaaacgctctcgaacatgaaacgaagtgcggtgcgccatggccattttatttttcaaataatttttatatttaatagatattccagaaaaatggctatctctttttttgagaaattttctatgcaacaaacgctctcgaacatgaaacgaagtgcggtgcgccatggccattttatttttcaaataatttttatatttaatagatattccagaaaaatggctatctctttttttgagaaattttctatgcaacaaacgctctcgaacatgaaacgaagtgcggtgcgccatggccattttatttttcaaataatttttatatttaatagatattccagaaaaatggctatctctttttttgagaaattttctatgcaacaaagctctcgaacatgaaacgaagtgcggtgcgccatggccattttatttttcaaataatttttatatttaatagatattccagaaaaatggctatctctttttttgagaaattttctatgcaacaaacgctctcgaacatgaaacgaagtgcggtgcgccatggccattttatttttcaaataatttttatatttaatagatattccagaaaaatggctatctctttttttgagaaattttctatgcaacaaagctctcgaacatgaaacgaagtgcggtgcgccatggccattttatttttcaaataatttttatatttaatagatattccagaaaaatggctatctctttttttgagaaattttctatgcaacaaacgctctcgaacatgaaacgaagtgcggtgcgccatggccattttatttttcaaataatttttatatttaatagatattccagaaaaatggctatctctttttttgagaaatatctatgcaacaaacgctctcgaacatgaaacgaagtgcg

SEQ ID NO: 29922 - DNA, 1125 bp, Heterodera glycines
  unsure (1)..(1125): unsure at all n locations
aaatggcgattgtgcacagccctccgtctctacgcaagcgcttttgtgaggtataaaatttctcaaaaaaagagatagacatttttctgggatagagtataaatttaaaaattccctcaaaaataaaaggtctattgcgcaccgccctccctatcatgctcgagagcatttgtatgtgtataaaatttatcaaaaaaagagatagccatttttctgggataacctctaaatataaaaatcctctgtgaaataaaatggcgattgtgcacagccctccgtctcatacgcaagcgcttttgtgaggtataaaatttctcaaaaaaagagatagccatttttctgggatagagtataaatttaaaaattccctcaaaaataaaaggtctattgcgcaccgccctccctatcatgctcgagagcatttgtatgtgtataaaatttatcaaaaaaagagatagccatttttctgggataacctctaaatataaaaatcctctgtgaaataaaatggcgattgtgcacagccctccgtctcatacgcaagcgcttttgtgaggtataaaatttctcaaaaaaagagatagccatttttctgggatagagtataaatttaaaaattccctcaaaaataaaaggtctattgcgcaccgccctccctatcatgctcgagagcatttgtatgtgtataaaatttatcaaaaaaagagatagccatttttctgggatagagtataaatttaaaaattccctcaaaaataaaaggtaaattgcgcaccgccctccctatcatgctcgagagcatttgtatgtgtataaaatttatcaaaaaaagagatagccatttttctgggataacctctaaatataaaaatcctctgtgaaataaaatggcgattgtgcacagccctccgtctcatacgcaagcgcttttgtgaggtataaaatttctcaaaaaaaagagatagacatttttctgggatagagtataaatttaaaaattccctcaaaaataaaaggtctattgcgcaccgccctccctatcatgctcgagagcatttgtatgtgtataanatttatcaaaaaaagagatagccatttttctgggatacctctaatataaaaatc

SEQ ID NO: 29923 - DNA, 1248 bp, Heterodera glycines
tttattatttatttaggaatcagaatgccaaaacttccccccacttaaaatttattggggattttcccttgataaaatcgaaaagccgatctcgagttaaaaactagacagctaaaaaataaactgtgattcgatagagggggtcaaactatgggcctatgcaaaatttgaacatagggaaaaatttttcaactgggcaaagttttttctttttcactcattttgacgcactatttccatgtctctaacatataagataacacatggttcatttttttgccaataaacaatttttttaatttttatttaactttgaaatattcttcagaattttcccttcaaaatgagcacaaaatggttttatttggtctattattgacaaagttataagctaaaaaaaattcataaaatcaagggtaaaataaaatgtttaccttttattgtttgtatttgttcttttggcgttctgtttttattatttttttatttatttgctttaaaaaaatgaaatttatacacaaacacaaagaggatttgaacctgagacccactttttggtgactaactcacagaccactaagacgaaaaaaccaacttaattgtacttggagcccaaaattgactcgccgtgagtattaatgagttcctgtttgattccgcgtatttagccagttttaaactaaaaatgcaaagttcaaaataattcaggtccggggttcgaaattggtcgaaatagatgccggattcgtgatcagcgatcccgaaaaccctaggaaacttgcgcttgcatgtgttttgaaaaaaaaaaatttcaaaaaaggtgggtaccatcgacagtattaccaaaacgaaaaattcacccctaagaatcgaatcgaaatgtatataattttgttgttcccctttcattcttttatgtgaggttttcggttgttcttcgatgcctcttcacattccgttttaaaataacatccagcggatggttgtgctgttgactcccgttgcaactcgcgctgtttggcactgtcggtgttctgtcggcatttttatgatctttggaatatgtctgctgttgccgggcacactccgccgtgtcttggcgaaaaactcgatattttacccttaagttcccctccatgggttggtcattgttctgccatttcatttgtgtttggttcctttcttcattaattgcttggtcaatgagttggactttctcttttctctcggcgcccaatggcgccccat

SEQ ID NO: 29924 - DNA, 514 bp, Heterodera glycines
ctggcagttttaacaaacgcgctggcagttttaacaacgcgctggcagttttaacaaacgcgctggcagttttaacaaacgcgcatgggtggcagttttaacaaacgcgcatgggtggcagttttaacaaacgcgctggcagttttaacaaacgcgctggcagttttgacaaacgcgcatgggtggcagttttaacaaacgcgctggcagttttaacaaacgcgctggcagttttaacaaacgcgctggcagttttaacaaacgcgctggcagttttaacaaacgcgctggcagttttaacaaacgcgtatgggtggcagttttaacaaacgcgcatgggtggcagttttaacaaacgcgctggcagttttaacaaacgcgctaacagttttaacaaacgcgcattggtggcagttttaacagacgcgcattggtggcagttttaacaaacgcgcattggtggcagttttaacaaacgcgctggcagttttaacaaacgcgtatgggtggcagt

SEQ ID NO: 29925 - DNA, 1353 bp, Heterodera glycines
aatccggaattccggaatttagaaaaaaaaagttttcccgaaattaaatttttaaaatatataactatttttgagggactttgtggtatttaaataattaaatggaatttttaaatagattttttgtacgaaagattagttttttaaatcaaaacataaaatcctgtttttttttttgagttttcatattttttctaattttagaaagggtgaaaaatacagtttggaaaaagggcatgccgaacttttgttccaattcaaatggtccaataatgatgatggttcagcagaggagaaattcgtgttggacttgaccccaacacagttaaaagatggcaaattggagttcacaattgacagcaaaggcattgagctgaagaggacttggtaaatgatgaaaaaaataataaaagaataattaataatttgaaaataaattaataaaattatatacattaataatgataggattttttttatttaaatatttatttttttgatttaatttctgacatttattcgtaaattatttaattaaatattcggctttttcataaatatcatttaccataccgattaattaatattattatgaataaatcattgtccaattgaatagagacggacgataaattaaattatattttttataacaaatttttatttcgtataatatttattagattcaattaagattaatgaattaatatagatagattaaaaaattttcccaccaattataacattaaaatggcgcaatttaagaaagtgacatattttaaattttatcaaaaaataaaaacaaaaggggcccttttggtttacaaaatttctttaatgtatagtatattcatgaaaatttatgcaccgagcgtttttggggtccattccgatttcctaacttaaatttgaacaaaaaactataaatcataaatcgaaaaattcaaattttcggtttttgttcaaattcggcttagggattaggaattggtcaaaatagaagtctgattcgggatcagagcaacccctaaaaccgcggagagcaaatttttattactaaaattttttgaaaaacaaaaagccacccactttactttttgacaaaattcaaaatctatcattttttaaatagcgccaaaattttaaccaatttgaaaaattcatttttaatataatattttccataacaaattattatttcgtattattatcgatttaatatagagaacaaatttttccaccatttatttaaaaatctgtcactttttaaatagcacccaaagttgtatcaattttaaaatttgaaaaattccattttttatttgtttttagggtaaaaccaacaaacgtctg

SEQ ID NO: 29926 - DNA, 1396 bp, Heterodera glycines
ccctttcctaatttttgccgttcaaaaatttcacaccctttttatggacgacgcttcacactgttgaccgatcatacgccgctcatcgccatttttggttcgaagaatgggatcccaatctacgcggcgtctcgacttcaaagatgggctctcattttggctaattatgattttgaaataaaatatatctcaacgaattgttttgggcaggtagacgttctctcgcggcttgcggcaaaacaacgcgagacagtagaggcggaagaacgagttattgtcagcctcgacaaaatttcacttccaatttcggataactcagcgctcgatgaatccgaaatggccgctgtcgactacatcttcatggccaacatcgaccagctgccagtcaccgcgaatgaagtcgccgaacacactcaattggacacaacgcttaggaaagttttgacttttgccgtaatggatggcccaagaaatcgcctagtgatttgtctgcctttttcactcataggcacaaactttccgaagtgaatggttgcctccttttcggggaacgcgtcgtcattccgggagctttgcgtcagcgaattttgtccgctcttcatttcacacaccctggaatcgtgcgcatgagggcattggcacaacaacatgtctactggccccgcatggaccttgacattgaacgttgggttcgccactgcgttgattgcgcgatggcagcaaaagcaccaccaaaaacaacactctctccatggcctcgaacaaacaaagtctataagcgcattcacatggactttgcaggcccatgttctgatggcaatctctatctcatcatcgtggacgcattcagtaaatggcccgagacttttcaagtgaaaagcacttctgcggacaatgtcatcgttcaactcgagtggctcttttcgcgatacggttttccacgtgaaatcgttaccgacaatgggtcaccctttcattcaaaagatttttctcatttttgcaggattaaagggatcaagcaaagatttagtccgccgaatcacccacagagcaatgggcaagccgagcgttttgttgacatttttaaaaggcaaatgaaaaagtgttcacacggagacaaaaagtggatcaccaattccccgttcgcctaccgcaacacaccaaatgccgcactgaaaggtcaaacaccagctgaactttttcttggccgctctcctcgaacacaactgtcactgctcaagcctgacatttcttgctcaaatcgcaatcaaaatgactacacaaacaacatgtcgaagcaattcgatcgcaaacatggtgctcgccaccgaacatttgcaattggtgacgatgtgctcatcatcaactaccgtaacaacaaaaagtcttggataca

SEQ ID NO: 29927 - DNA, 1163 bp, Heterodera glycines
  unsure (1)..(1163): unsure at all n locations
cgctgacgccacacaaactcntggaaagtaagtagtcctttttccaatccctgtttcctgctccacatcatcaagagtcccatatttacggccccacagataagacagttcaaaaatacgtttaggagacagtttgaaacctaagtcaataatgcccaatgcctttaagcctaataaaccttcaaaatatgtgccgacaagaaaaccggttgacttgcgacaattctttgtcgtacagcgccatacaccgtaacggcgatcgccaattgccctaatcgatgtgtttccgccgcatcgtggacacgttcgacgtgcgtggagaagacccatattttcgagccactgatcaaactcattgtcctccattgctaatttttcgtgcagttttttcaacgaaaatccacggagttcttctagcgcagccatttaatgtgacaaaggaaattgggcgaaaaagtcaaaaaaaaatttttattgaaaattagaaatttaaaaaatgttcgaattcgggttcggggttcgaaattgggcggaatggatgtcagaatcgtgatcagcgacctcgaaaacacctagaaacttgttttgaacgaattttaaattttgaaaatttccgccaaaaaatggggggctaccatcttaactattacccggcatatntcagtaaaggtctatcaaaaattaaaaagaaaaaataacaaaaaaaagaaaaaaaatatttgcaagaaccttcattttgtcgatgatttttcatcaaggtccataaaaaatcatttcagccgcgggtttgaaccccagcccccgtctcatacataggacccctagggattaataattaaatttcaaaaaatcataaaaaactaagtattgacttctcaatagatcaatagctcattcaaagctctttttaagctctacaacatctgtgtatgacagggctcccatccgtccttgaatggcaaggacgtccttgaaattgggccctctttcttgaaaataaaaaatgtccttgtatgcaaggacgtccttgaaaatgagcatttggaaaagttttaaaaaaatcaaagaaatttgagaaatctttgtaattttcaacaatattttgattaaatcgcaaattttggacatttttggacaaaaatctgtaaacaactcgcattaaa

SEQ ID NO: 29928 - DNA, 726 bp, Heterodera glycines
cagcatttttagggcaaggtggggggtggtttctctgtctttctagccggagtaaaatagaaaaatgaatggaattttttcttagcttttgcccttaaattactagattttaaaaaccgaaaagaaatttgtaggaattctattttacgaaatgcccattgcaggaactgcctgccacgagacgcatctccctcatcccattttcattcactctttcccccccccccaaccaatttgcataattctctcctcccctcttctccctctcatcccatctcccaaaaatccaaccacttcgtggtgcgcccacaccgccagcttcacataatccttagcattccgaaatcgatcattcagatcattaataaaagccattagttgaccgcgaaccaatgggcccggcaccatctcaaaaccgccgattattgttcccggcgtcacttcaaagccgccgacgaacatctgaccctcctcgcggatcttgcccgcctctgcttggttttgaccccacagaaatttatggttgaacatcctgagcaccttcaaaaaatccgacagcgtaaaaagacaccgataaatcctttccctcacatttgccatcattttattcccctcttttcactgggtcaacggcagtgaatagcaattcgtataaatttcttttatatttttcaattaagatagacttttttaattgaaatcaatgaatttgtttttcactaaaaa

SEQ ID NO: 29929 - DNA, 1409 bp, Heterodera glycines
acgaattaaatcggaagaaaacactgtcaactaattaatttaattcaataccctaaatttttttggtgtctttattttcattccgtaattaatgtccataagtccctcgaataattaactaattgtccgttgtttttcagtccttttcttcgtggaatttttgcgcgcaattggctcgcatttgtctatttgttcaccaaatttctgtatttaatcgccaacattgttcaggtgagaacactcattttggcattttcacactgaaaatgccatcaattaattgcttgttaatataaaattcgtttagttcaaattcatcagcatgtttttgggtgtcgacaaattgcccaattggggatggacggtgagtgttcgcaattgatggcatttgaaactaattaatgggaacgcatttttggatttattctgtttcccattaactttgaattactctctaaataacctaaatgttgttttgagttattttcgaattttagatcctaaaaatcccgtccctaatcatcataagtcctttgaatctttgttccgtgtggggcataatttaaaaaatattttttaaatttaatttttaatatttattttttgttttgattttagtcccgtgaaatttttgttttttatgggaaatatttgtcaaaatgcttttcttaaagatgctgaacagcttcctaactcatggctcttcttgggagcacagtgggcactttcctcgcgtcactctttgcgacctgaaggtaaaatttcctaatttgagcaccattactaataaatttccgaattattctgagtgccaattaacttcatttttccgaatatttaataaatgggaattaatttaccaaaagttatcaactaataagattttttcgaaccgttcagatccgtcaaccaaacgaacgctttcacgagttcactgtccaatgtgtgctggtggcgaattttgtcagttaaatgcacttgaaatatgggtcaatttagtctggtagttttaagtctgctggaatgcctcaaaacgatcttttttttaattttaaggccgtaactgtttgtaaatttacaaattataaattaatgggcatgtttcgaggtagaaacattaataaaaaaaattgatgccctcgaatcggactaaaattgccatactgaactggcatgaatataaatgtgagggacccacgcgtttcggcgctcccgtttcggcgctcccgtttcggcgccagctcgtttttccacttaagcttttttctttggcatctaaatctaacaatctttgtatcattcgaaagctcttaacatgctctattagccttataaaaaacgaaaagtttttcaagcctgtaaaaattttaaagagaaaaaacttcaaaaatttcgacttttcgcaattt

SEQ ID NO: 29930 - DNA, 925 bp, Heterodera glycines
gggcattttggatgggatatggccggattggacacccaaagcaaaaaaaaaaagagcattttggatgggatatggcacggattggacacccaaagcaaaaaaaaagggcatttcggatgggatatggcacggattggacacccaaagcaaaaaaaaaggcattttgagaaggggggactgaaattggatgataatagtcaatctacattctcatccaaacttagcagaccggtcaacttctggcctcgtttggcataccgttgtacgagccgtatgagctgtaccagcgccttcaaagcgcacttcagcagcactctttgcccacagcaatgccccaaaagtatggcaatttaattatttgtcaaatcatcatttatccgtggcattaaattatggccatagtcagagacagacattcctctccctccccttcttcccccattcttcctcaattcatccctcctcccctccctactcccgtattcttcttcaattcactccccctccctccccatttcctccccccggggttttttctctggcagccgatgtctccgtctgcagacaaacggactctttggtcacaaatcccttcccccattaatgatgagatgattacgctgctgctgatgatgatggataagatgtctcctgagatttgtttcgatggtcctttgggggagtgattaatttgtatttgtggaggaatttgccttttttttgttgaccaactgacagccgaacagcccaaaacattcagtcgctgttttattgccagtcgccccacacaaattttcggatggattcgccgttttagtggggcaccattcaaaaaaactaatgggacataaagcgaaggaaagggaaatgaatgtcgagagtcgagacttttggtcgaaggagacgaaggaccaaacaaccaaag

SEQ ID NO: 29931 - DNA, 660 bp, Heterodera glycines
  unsure (1)..(660): unsure at all n locations
tcgacgaaaagcaatgtgtcagggaattatttaaatgatctaaaaatggtaaaagcggacaatgaaaggcattcgcgacaattacaaatggcaaaaaatgtgcaaaagttagactcactaaatggaagaaaatcaaagggaattgaaataaaagagccgacacaaaaagtgccaaaagtggagaaaaatgacgagggaattgaggcgaagggcaaggaaattgtggaagaaaaaacgaagaaaacgaagccgaaaaagaaaaaaggggatggaaaaagtcgaaagtcgaaggacacttctgttgataaacataaagcagaaggggaaggaatggacgaaatttgggctaagataaaatcagatcaaaaacaggaggaggaggaggaggaggggaaaggaacggacaaaaaggacggaaaggaagaagtattggaagaggaggaggaggggagtggatcggcaatgttgcgcgaactcagacaaaaaaggggaaaactgaagaaggtatcgccgaaaaagccaaacaaaaatgagcaaacgatcaccgaaccgatcattttggaagagaaaaaggagcaaaaaacggagaataaaattggcaaaacggaaagccaaacattgaanagcgacgagaaagcaaccgacggancaaaaactgct

SEQ ID NO: 29932 - DNA, 1478 bp, Heterodera glycines
gacagtccctctcataattgaattcagactcgaggcgcctccctcacaattcatttgacgacccattgtcatccgaacgcaaagcggaaacactgagagcaatttgtcttggagaagggcgagagtcttctgctcgttctgttcgctggcggggagagcattcattacgaaaacgccttaagggattagcaaatttgaaggcaccaacacaaatatcgtggattgattggcaaaccctgtggtcgaagtgcgcttttggcatttccgagcattttcaaagcgatgaatggcgaggctgggcacggaatgtgaggggacgagtcgcacgcgtccaaaatgatcgcgtcgaagcgattgcctcaatttccagcgaattttttcaaaatttaatagtgaattatcggcggagttttggggtgcaccgacgtggctacaaaaaggtcataggactgacttttaacgccagaaaaatcaaagatatgacgtcaatgttaggcttatatcggatttaatacacggcttgggatggtggcgaattctccgcttttctgtgggtcacttttctgcagttcttctaccactcaccccttttgacgtgatcggaaattgcggccgctccgtctccgaccaccgttctccgcgtctgatcgtccgaaacttcgaaccattgtttggccaattcgaccacaactgagtcactctcgtagacagtgatgttgagctgaacaaagcaagttccccaaaattcctcccaattccgtcgttggcaccgatggaattttgaggtgaaggaatgcgtccaacgacccaccgccgagtccgacgatcgcaacgtcccccaatctctggccatcggtgggcgaaaggccaagcgaagccaccgaaaaaggcagcactgccattgccgccacatattcgttgagcaaagtgccgtggtcaacgtgccataaacgcgtgtccgagtcatcgaccgttgcgtctaaaaatgcaaaaagcagcggggaaacgcttctcctttctgggttaaaatggcactttgcggacgaatgagcggaacctctgattcgaaactgtcggagagtccgtcgaaaaacatcgcacgacgggcggaattgctaaattcatcaaatgttcagccgatggcggctgctaaccttctcctggaaattatgtccaccaccgtgcggcaattgcctccgttgccgcacattcgcgcgacttcgacgaagcgaaaattggactcgttggaagggacatcagcgaaagaacggtcgaccattggccatgggatgagcagaaggacagcctaaagagcagaaggaggagagagtgggcacaacgaaagcgaaggaataaagagaattattagagctatcgaatgatactaagattttcggtaatagtaaagtttaccccccccctttttcgaaaacctttttttgttttcaaaagtcatgaaaacatgtttccatgggttt

SEQ ID NO: 29933 - DNA, 998 bp, Heterodera glycines
ctcattagcccgcctcattactagaggttaagctttacggtgtatgatcggactcatgttagccatcccccgccttaattcaagaaaaagtttaaagtattgaaaaatatttagtgaaattaacgcctgcttcatcaatgttcagaacattttttcgagactttatttgaaaaactcattgcaaaagcaacttgggactcatttattcgacaaaatttcccagagacattacgccagtgagactcaaattaccaaactcattgcaaaagcaaacgggactcatttttatgttcccaaatatcccgcactgttttttgctgctgctgctgttgctcatttggcgccgttgccgccggctgaacagctggtggttgcgcgactgcaactgagtctcgtctgtctccgcccgtgtccagcacagtgccggtgccaatgtcaatggacaccggcgttcgcttcggcacttcctgctggtgctgaaccggaccggtatgcgtgagggctggcggcggtgggagcagcgtttggcgttgtgcaaccgggactttttgaaaatttttcaaaaatacttagtacaaatttttttttgtaccctggatgggctggtggtgacgtgtcagtatgggcgcctgttggacctcggcgctcagctggggttcgtcctcaacagccggaatgtcacgcggacaataatccacctacgatgatgtatgtgtgcccgtaattgtgcaaaaatgttatacggtagtgtgagacaaaaatgggggaggaacaccgaatggatttgggataaattagcacgaaaagtggtggacaattcaacgcaaggataattgggtactgaaaaatttttttgtcccaagttggaatttttaattttcatgaaattttccagcgctcattcggatttcggacctttataattatgtataaaattttgaatggctaagcattttttttatttagccaccaggctttgctgctgttatgtctcggca

SEQ ID NO: 29934 - DNA, 1016 bp, Heterodera glycines
  unsure (1)..(1016): unsure at all n locations
aaaggaatcgggagcacataaattgtctaagtaacttcttattctggtggtctcgaaaaattaaattctttgaattttcggaataatttccgatttggggcactactccaatttttgtgctcataattgcaaaggtaaaatgaagagtaaggagtataaatgagattacaaaaggaatcgggagcacataaattgtctaagtaactttttattctggtgtctcgaaaaattaaattctttgaattttcggaataatttccgatttggggcacttctccaatttttgtgctcataattgcaaagggaaaatgaagaatacggagtataaatgagattacaaaaggaatcgggagcacataaattgtctaagtaactttttattctggtgtctcgaaaaattaaattctttgaattttgggaataatttccgatttggggcacttctccaatttttgtgctcataattgcaaagggaaaatgaagaatacggagtataaatgagattacaaaaggaatcgggagcacataaattgtctaagtaactttttattctggtggtcccgaaaaattaaattctttgaattttgggaataatttccgatttggggcacttctccaatttatgtgctcataattgcaaagggacaatgaagaataaggagtataaatgagattacaaaaggaatcgggagcacataaattgtctaagtaactttttattctggtgtctcgaaaaattaaattctttgaattttcggaataatttccgatttggggcacttctccaatttttgtgctcataattgcaaagggaaaatgaagaatacggagtataaatgagattacaaaaggaatcgggagcacataaattgtctaagtaactttttattctggtgtctcgaaaaattaaattctttngattttgggaataatttttcgattggggcacttctccaatttttgtgctcataattgcaaagggaaaatgaagaatacggagtataaatgagattaca

SEQ ID NO: 29935 - DNA, 958 bp, Heterodera glycines
taagcttttttcttcttttttatttttattttctaagaaaaagaatttatttttgttaaaatttatctgctaacattcattacatacaggaccagaaactcaaaatttctgggctcaaaaaagaaacacatattgataaacagtaaaaaatttttttctaaattttagacatgggtaattccggtttcaatgcctcaggcgtttactgtgtacttccaaactcagattttcggggccggagaatccgattcctataccttcaaaatgatgaaatcatttcttaacaaaaatttagggcgtttcggaaaattaagaatttccatgtgtttccggggttactgaatattcatttgtcgaaacgtcaaacgaatccaaacgaacccgtgaagccaaaaatttgtgcattgccaaaatttaaaaatgcaaaaagcaaaaagaagcacacgagcacaagcagcagcacatgatgaaacggcattttgtacgagtcgaggatttgaagaaagtattaattttaatacttaaaacaatgaattaatattgaaaataaataattatttggctttctttgcttggctttaattcgggtttgtgtatttgaattttgcttcttgctttcctcctttttgagggttctgctgtgctgaaaactgccggtaaaatttatttattttttcaaatacacaaatcgtagaaatagcgcaaatgggagccctcaatagaatgtgttttcactcaaattgggccatgattgctcttgagagacgcaaaattttcctaatttgtttgttattcagcaacctttttgaggtggttattttctccaatatatttactgttttaggatggtccttaccaaaacaaagacctaattaatgtgtcaaagtgtccgttggtgatgaaagtgctaccgacttttactaattagtattttcccaataggaaaagtgattgattt

SEQ ID NO: 29936 - DNA, 930 bp, Heterodera glycines
ctttaattctgcgttggatttttgctccccataattgctttagtaccccaaacggacacttgaaaaaatcgatttttttgttttcggggcagtccccccgaaccgatgcgcccagatttatggggagaccgaatccttcgggaatagcttccctatagcctgtactttaattctgcgttggatttttgctccccataattgtttgagtaccccaaacagacacttgaaaaaatcgatttttttgttttcggggcagtccccccgaaccgatgcgcccagatttatggggagaccgaatccttccggaatagcttccctatagcctgtactttaattctgcgttggatttttgctccccataattgtttgagtaccccaaacggacacttgaaaaaatcgatttttttgttttcggggcagtccccccgaaccgatgcgcccagatttatggggagaccgaatccttcgggaatagcttccctatagcctgtactttaattctgcgttggatttttgctccccataattgtttgagtaccccaaacggacacttgaaaaaatcgatttttttgttttcggggcagtccccccgaaccgatgcgcccagatttatggggagaccgaatccttccggaatagcttccctatagcctgtactttaattctgcgttggatttttgctccccataattgtttgagtaccccaaacggacacttgaaaaaatcgatttttttgttttcggggcagtccccccgaaccgatgcgcccagatttatggggagaccgaatccttcgggaatagcttccctatagtctgtactttaattctgcgttggatttttgctccccataattgtttgagtaccccaaacggacacttgaaaaaatcgatttttttgttttcggggaagtccccccgaaccgatgcg

SEQ ID NO: 29937 - DNA, 977 bp, Heterodera glycines
  unsure (1)..(977): unsure at all n locations
gcagtgggcaagcgcagagagtcgcttatatacacaccctttgagacgtaaaatatatcataaaaaaagagatagtgattttttttggattagaccggacaaataaaaattaccagctattttaaatgcagtgggcaagcacagcgagtcgcttaaatgcacaccctttgacacgtaaaatattccaaaaaaaagagatagtgattttttctggattaggccggagaaataaaaattaccagctatttgaaatgcagtgggcaagcacagcgagtcgcttaaatgccccccctttgacacgtaaaatattccaaaaaaaaaagagatagtgattttttttggattaggccggagaaataaaaattaccagctatttgaaatgcagtgggcaagcacagcgagtcgcttaaatgcacaccctttgacacgtaaaatattccaaaaaaagagatagtgattttttctggattaggccggagaaataaaaattaccacctatttgaaatgcagtgggcaagcacagcgagtcgcttaaatgcacaccctttgacacgtaaaatattccaaaaaaagagatagtgattttttctggattaggccggagaaataaaaattaccagctatttgaaatgcagtgggcaagcacagcgagtcgcttaaatgcacaccctttgacacgtaaaatattccaaaaaaagagatagtgattttttctggattaggccggagaaataaaaattaccagctatttgaaatgcagtgggcaagcacagcgagtcgcttaaatgcacaccctttgacacgtaaaatattccaaaaaaagagatagtgattttttctggattaggccggagaaataaatattaccagctatttgaaatgcagtgggcaacttcatgggagacnncttaaatncacaccataaaaaacataccacgtgggggaaaagagatagtgatttttctaattagaccgga

SEQ ID NO: 29938 - DNA, 891 bp, Heterodera glycines
aaattttttccattacggcaagagttgcgggaatgtgaattaattctcagaaaaatggatatttctttttaggacattttctatctcgtaaccccgatgttaatccgttccacagagactcttcaaaatttttcattaccgcaagagctgcggaaattgtgaattaattctcagaaaaatggctatctctttttaggacaattttctatctcgtcacctcgatgctaatccgtaccgcagagcctcttcaatattctttccattaccctaagagctgcggaaattgcgaattaattatcagaaaaatcgctatctctttttaggacaattgtctatctcctaaccctgatgctaatccgttccgcagaccctctccaaaactttttccattaccgcaagagttccggtaatcgtgaacttattctcagaaacacgactatctcttctagcgacaatcttctatcttgtaccgctgatgctcatccttaccgccgagcatatacagaatccatccatccctaaacggctatagggatggtacccatccctataccaacggctatagggatggtaccatccctataccaacggctatagggatggtacccatccctatatcaacggctatagggatggtacccatccccttctcgggccaaggacctgccccagcgggggattgtggttaacctgccaagaacctgccccagcgggggattgtgttcaccggccaaggacctgccccagcgggggatcatgtgtccattcaacaaaagtgttatgcacaatatgatgttaatgcttaacagtataattttttgatgatgtgcatattagggcacttccggtttccattgcagcataatgcaatgtgtcagcttctggaaagaa

SEQ ID NO: 29939 - DNA, 1145 bp, Heterodera glycines
ccattaaattgacaaaacacaattaagctatagattaaatcaggttttgatcaaaagtctggaaaagcataaacccttggctctaaaatataacattccgtaataacgtgcacatattcgattattgcttaaagaattgaattgtgatcatggttcagaaatattttttaaattttttttttactctgtccatctttgtttgcgattttgatcgaaaccggttgatcatcatcttgataaaacacgattaaattgtgtcggtatcatttttaatctacggtttctttcgattttcacggtatattaaaaagttacagctaattactgggttcgatttttctaggcaattgttttttttcaattttatttattattttttaatttaatttcagcagcaaagcaacttcaattctcgccaaaactccatccacagcactcaaagagcgcgtgtttgcattgaacgaggtgctaaatcattcaactttttgaattttttttgtttgtgtattaaaaattctgtagcttgcgaatcaattcctgtatactagtgactggtgtactgtatccacttttttaatttgtcaccttcattttggttatttgtatatattcaattagcatttttatttaccatagttatttttaaaaaaatactatatcttgttaattaattatttttttcctaaaatttcgcattttgaattttttttttcttgtcgggtttggtccaaattaacacaatgttattcaatttaccatctttgtgctagcttattgtttcggtttttgcaaaatgttatgccattcatctttttttgctattaagccgtaatttcaaagcaatttatccactgattagctttctgtattcacttttctatgccataaattttgcacaatttcttaggtttggccatcgcttcattcagcagccaaaaagcggcaagaaaaattggaccgggtgaagcgagcggcggacgaacttgtggaagcggaacaaagcgtcaaaagcgaactgaacaaattgcgcgaagaaacaaaattggtgaggaaaagcggcggggaggggggggggggggggcggagaagaagcaaggcttaaagcacacgttgggataaacaacaaaaagcaaacacaaaggggt

SEQ ID NO: 29940 - DNA, 1119 bp, Heterodera glycines
cagtcccccttgaaccgattcgcccagatttatggggagaccgaatccttcgggaatagctccgctatagtctgtactttaattctgcgttggatttttgctccccataaatgtttgagtaccccaaacggacacttgaaaaaatcgatttttttgttttcggggcagtccccctgaaccgatgcgcccagatttatggggagaccgaatccttccggaatagcttccctatagtctgtactttaattctgcgttggatttttgctccccataattgtttgagtaccccaaacggacacttgaaaaaatcgatttttttgttttcggggcagtccccccgaaccgatgcgcccagatttatggggagaccgaatccttcgggaatagcttccctatagcctgtactttaattctgcgttggatttttgctccccataattgtttgagtaccccaaacggacacttgaaaaaatcgatttttttgttttcggggcagtccccccgaaccgatgcgcccagatttatggggagaccgaatccttccggaatagcttccctatagcctgtactttaattctgcgttggatttttgctccccataattgtttgagtaccccaaacggacacttgaaaaaatcgatttttttgttttcggggcagtccccccgaaccgatgcgcccagatttatggggagaccgaatccttccggaatagcttccctatagcctgtactttaattctgcgttggatttttgctccccataattgtttgagtaccccaaacggacacttgaaaaaatcgatttttttgttttcggggcagtccccccgaaccgatgcgcccagatttatggggagaccgaatccttcgggaatagcttccctatagcctgtactttaattctgcgttggatatttgctccccataattgtttgagtaccccaaacggacacttgaaaaaatcgatctttttgtcttgggagtagtccccccggagccgatgcgcccagatttatggggagaccgaatacttccggaatagcttccctatagcctgtactttaatcgtgcgtgggatatttgctccccataaattgtttgagtaaccccaaaagga

SEQ ID NO: 29941 - DNA, 1136 bp, Heterodera glycines
cgctttctctttctgttcctcttccgctttatgttcctcttgcactttccctttcactttctcttccactttctgttcctcttccactgtccctttcactttctcttccactttctgttccgctttctctttctgttcctcttccactttgtgttcctcttccagtttctctttcactttctgtttctcttccactttctgatcctcttccactttctcttccactttctgttcctcttccactttctcttccactttctgttcctcttccactttctcttccactttctgttccattttctattcctcttccactttctgttcctcttccactttctcttccactttctgttcctcttccactttctcttccactttctgttcctcttccactttctcttccactttctgttccattttctattcctcttccactttctgttcctcttccactttctcttccactttctgttcctcttccactttctcttccactttctgttcctcttccactttctcttccactttctcttccactttcactttctcttccactttctgttcctcttccactttctcttccactttctgttcctcttccactttctcttccactttcactttctcttccactttctgttcctcttccactttctgttcctcttccactttctcttccactttctgttcctcttccactttctcttccattttctgttccactttctatttctcttccactttctgttcctcttccactttccctttcactttcttttcctcttccactttctgatcctcttccactttctcttccactttctgttcctcttccactttctcttccactttctcttccactttcactttctcttccactttctgttcctcttccactttctctttcactttctcttccactttctgttcctcttccactttctcttccactttctcttccactttctgttcctcttccactttctcttccattttctgttccactttctatttctcttccactttctgttcctcttccactttccctttcactttcttttcctcttccactttctgatcctcttccactttcacagccactttctgttcctcttccacttttcttcccaatttct

SEQ ID NO: 29942 - DNA, 1639 bp, Heterodera glycines
aaagttgacggcatcaagccaagtgtcccatctccactagatgggtttgggaaccagaggaactgtaggtaacttctttctgtagaaagcaacacgtgacggtgctttgcgaaacaccattttggtagaagaaattaattcgtcgacgtctttaaactgattgcggatctcttcagcgattcgatgcagtccatgagcgaggcaagtaaaatgcaccatgttgggatagaaaacacgcagattccgagccgccttcttcatgtattcagcgctgtccgtcaccataaaaagaagccgatttttctttgctcctgtagatagcaaatccgctaaaataaataaaatcaaaacattaatatgtctaacacacccaaaccctcatccacaaaacgagcaaccgtttgatgatcaacttttgggtcaccattttcgtccaacagtggcttcaccgaaatcagatgcggcgcgttccaacgttcattcagaagtccaataagcaaattagccatacagcgtccatttctgtctgtcctttcatcaaccgaacaccaaacgaatccattttcgccaatgtcgtccttgctttttgacaaaacctaaaggaaaaaaattggtcaatcaaaaaatttcaaattttaccccttcaaaacaatttttcacataattgcttctgagggtttcatggtgtaggatggatcttccacaatatttctccaaaaaagccttgaatgaaggattattgaccttaaataaagttaaattgttaaaaaatgaatatatgtattcactttaaaaagaggaatattcgctgaaagcagcattgaacacaattcagcagcaaatttatcaacaacaaacggttgactgatcaatggttgcttttgttttgacgacaaaaaacgatcacaatttttgatatgttttgctgtttgattgtgttgctccaaatggcccatttttttgcattttaccttcaaatataaatttaaagtattaatttccaaatgcatattccttaaaacctctatttgacatgcttgacaataaattatctttgaatcagttgtgtaaacatcgttcatgtaattggaaacccattttttgaaaagaaatgcgcgggacgaaggttcttttggcatgtttaacactaaaattgaatattaatcactaaagaattctaaacaaatttttaaaattaattaaacaattccggattttattttccgagatttctttattctatgcaaagattttcgtttttattgcatttttgttaacaaattttgggcaaaacgccaaaataggcaaaaataggctctttcaaaattttttaggctttttaggcgctaaaaataaaagcctagaaaataggcactaataacttgaaaagtagcttaacaaccgccgaaaaaaacatgtttttcgtgcatttcagaccatagggagctcaggaaaaaaataggcttttgcctaaaaatatcatccctagtgctaacatattttatgtgacaaaacgccaaaatatgtgtttttatgtttttataagtcgctctaaatcaaaaattgttcggagataatgctatttttgggcttctctcgccataactaagccgcaaaaaaaatatgtaaaaacataaaa

SEQ ID NO: 29943 - DNA, 1050 bp, Heterodera glycines
taattggacaactacgtgtcaatgagcacagtcgccgttgcccagttgtgaaacagaaaaatgggaatatcagatggggtgcgtcccatcctaaaaattcctcttttcgtctaaccatccctccctttttgtgcactatttcgtttcaacattttatcaattttttgttgtcttttgaaataaattgtgaaaaaatatacgaaaattattttcgcttttaattatgatgtacaatgcttttaagccccgccgtgaggcggcttctttttgtgcactattttcgtttttaaaattggatccggattttttggcttttttaaataaattgtgaaaaattcaaaacaataaacttttttattgcgctacaaatgcttttaagccccgccgtgaggcgggacagttccaaaatttgcaccacattttactgtggaaagtccaagtaccttaattggacaactacgtgtcaatgagcacagtcgccgttggccagttgtgaaacagaaaaatgggaatatcagatggggtgcgtcccatcctaaaaattcctcttttcgtctaaccatccctccctttttgtgcactatttcgtttcaacattttatcaattttttgttgtcttttgaaataaattgtgaaaaaatatacgaaaattattttcgcttttaattatgatgtacaatgcttttaagccccgccgtgaggcggctcctttttgtgcactattttcgtttttaaaattggatccggattttttggcttttttaaataaattgtgaaaaattcaaaacaaaaaacttttttattgcgctacaaatgcttttaagccccgccgtgaggcgggacagttccaaaatttgcaccacattttactgtggaaagtccaagtaccttaattggacaactacgcgtcaatgaacacagtcgcctctgacctcttatggagcagaaaagggtgaatatcagatggggtgcgtcccatcctaaaaattcctcttttcgtctaaccatccctccctttttgtgcactatttcgtttcaacattttatcaa

SEQ ID NO: 29944 - DNA, 1096 bp, Heterodera glycines
tcatttggggtaaaaaaaaaatcaaattgccaatgggccataagtttggcattttttgccaaacgaatcagcaattcccctcaaggcatagaaaggaaatgtctaatttgaaagtatcgtttcttcttaaaaaggagaagtacccaaatggtgttggacgataggacgggtttcaggatgaattctggtttttccagattaaaataaacataattttctggaaattaaaaaaaattcatagacatatgataaaaatcatagataaaagcctagattttggtttttccgattcttgaacagagcataaaactatcatagaattttcctttgtcggtatcatcaaacttttttgggaggggaaggggtggcataatcgaaaagtgccgtttcttatttgtgcatacatataaaagaagtgacaaatcggcaccagcaaggccagtgcagtgagttcagtcgcctgttgttggacatggacccgcaggacacgcaccaatttttgctagccgtacgtacatcaattaaattttggaaaattaaaatttttggcacctcacccctccccatttactttaggcactcaaagtgggcctggtggagttgaagcattggttcttgaccacctcgttggacatgcggcacatggacatggagctgttccggcacaaccatgcgcattttgtgggcttggacccggtggtgcgtaaaaccatctacccgaattatttcgagagttccggttcttgagtcgatgattctcgagagcaggcccgccaggaaaattttttttttgctcttttggcccaaaattgtccatagtaaattgtctaaatttttgttttagccttttaaaattttgccattttgagaccaaattttggcgaaaaaaaatcaaagaaaaattgtgaactgttaggcaccaccggtgaaaatttctgtggcaggaggcgtggggcgattgcccccctggttacgggtttgctcgagagtcttgaattttcagtccaaaaattgcaaatttatttcttctgaattagtacataaaatcaccgccaattatttaaggacacacacttgctgtcttcatcattttctg

SEQ ID NO: 29945 - DNA, 1133 bp, Heterodera glycines
tcggcactattaccgagatgcaaatcaagacgctattcaaatgtcagatgcggattctccgacccttacaacccctaatacgagatgctttccagaaaaaaagatttcaaaaattttatttttcgagagggggggggggactaccatcggtactattaccaagctttcctttttcaattttaatcagtttcatccatttctctgcatgtcaaaaagtaaagttgaactcatacaatttggtgaattaattaatatatgtattaagaaaaaaaattaaaaaacttttcccatcatttaaaaagtaacaaatttttagagtgaaatctcggctttttttttattaaatttaattttaaccagctaattaggcaaagaaataattaattaattaattgcttcccccgttatttttgtattttaattggtgcccacagatgaagccccttggtaccccaaccaaggcgggggttctgaagcgccgccacagggagtccgtgcggggccacccgaactttttttaaaatttgttttaaaacaatttaaatttttataattacttatattaattaattttttggtactcattgcgtgatatcgcagcgcgattcggatgctaagctaataattggaactacgcacgaatgcagggcatttgacgacaaattaacacatatattttgtgtctgcatattatgctgtttgtctgcccgtcttttccgggatcaggtggtaacggttggcattatgaatccttcgcgaaggccttgataacgataactgcatgttttcatgagctaggcaatgacaataatttcataacatagcatgaagcttcggataacatttttttctgtgattgaattatctgataaattatgtaattaaggtctgactgatttttaatgatatttattttcaatgaatttcccttacggtaccagaaatatgtgcttggcgaaaatagacagtagagaaagagaagaattgtgtgacaatcatgagcaattaataatttgcgaaattcatataccatagaagtgcctagtgtgttacttaaaaacagccacccccccccacccgtcttataagaaaactacttgataaatttttgaacacattaaaaattttttttt

SEQ ID NO: 29946 - DNA, 1565 bp, Heterodera glycines
aatttaatttttaattaattaattatttttaaataatcattttatttatacatttttattaatagtcatcgcgtattgggcatcagtgaaggcattgaacatgtgggttttaaaaaattcaatgtttattctaaaaaaagaatttgtatttttttgccaaaaaatttttttttaaaaaaaatccaaaagaaattttttttacaaaattttcattttgaaaaatccaatttccgaaaatttttactaaaaattttcatttgaatttaatgggtctgtctttttttgaaaaatattttctttaaaaattctcgtaaatttttttttgttttttcaaaatctttttgaaaatttattccgaaaggaatttttatgaaaattttatttttattttttttgaaaaatcatcgtttctctcttcaaaaatttaaaaaatttctgcaaaggtcggttctcttcgacaagacatggcgctgtacttgctgatctgctggatcatctgctacttttgcatttttaaaggcgtcaaatggacgggaaaagtaaaaaaaaaaaaaaaatttcaaagaaaatttcttgaaatttttaggcccctaaattttgttcctccctcggccaaccttttaaaaaaaattttgatcgatttcccatttccacctctttttcttgtccaaaatccgggaatttttcttaaattttcggcccctaaattttctaagtcctccggaattttcaaaaaaataattaggccccttaatttagtcccccctcgccccttctctacacttctcatattatcctaatgcaacttgttcatttattaggcttaaagaattttgtaaaaaaatttcgcaaattttgtaaggcatcctaaaaattttcaaaaaattgtttaggcccccctaatttcctttcctctcaggttgtctatctgaccgcatcatttctctatttgatgctgttctttttgcttttgcgcggcctttcgttgcctggcgccagcctcggcctcgagtaaggcccaaattttcaaaaaaaaaatttctataaaatctatcctctaagattttatttgaaacccaacttttccaaactgctggagagcaaagtttggattgacggggtcacacaggtcgaaaatttaaaatttgattgattatctatttaaatatgtttttttaaatatgtaataaaatatttaaatacattttttaattatgaattaattatatttaaattttattttttaattggtagtaaattatatattaaataaatatatttttaatttgataatattttcgatggtaccaaaatttttaaaaattttttttttggatttcttcgaattaaaaaacgggaatttacaagttcactgtgcttaatattcattaagttcaattccgaactccgtacccgaaatttaaagccaaaattgtcgaaattctcaatttttttccaaaattcacattttgataaaaatttggattttttgcccctgaaacatacaaaacgatctgaaaagcaattaaattttatgtgatgccatcaacagtatttatgtttat

SEQ ID NO: 29947 - DNA, 1291 bp, Heterodera glycines
aagattattggatttggttggcaaagaaaaaagttatagccaaaaacttgagcctcgtacgaaaacgaccccgacccataaatatattctttgaaaaattattttgtttaaaaaaattttggttattatttttttcaaatatttacttccgttcaaattaggcctatttttttaaaattttgccactttaacaaaagtcgaaatccaaaattttcgatttgttttttattttctcttcaaaaatttatgttaggatgttgaatttgttataataatggttcactgttttgcacttattccagcagagaattaggagtaatggcctcattattttgaagaaaatttgaaaatgtaaattttacaattgccaaaataggattttaaaatgcgcaaagatgagaaaaaggccgtaaaaagtttacctattgaattttcaaaataatttcggcaaattttttggacaaactttgttttgtaaattattgactcatttcaaaaagaacacaaaaattaccagtgatgcccaagactgaaaatttttcagcactccaaatagagaaccaaaaaaagccgtgatttttcttgagatcgagatcagcagcagcacagaaggttgaattggaatgggcaaaagaatttatttattattttttttgtattcttacgaaggtgaagatttcgaaagatgcaaattattttaggggaaaatggaaatttaaaattcaaagtaaatttaattttaaatggacatatttaattatgcaaaaaagcacttttggaggaatgcatttttgcgtttccggctgagaaattaagaagtaattgtctcattattattaagaaattgtttatgtaaaatttgcatctgccaaaataggatctaaaaatgccaaaacatgataaaaaggctttgaaaagttttacctctgaattttttcaaataatttcgtcaaattttttgagcaaattcatcttgaaacgtttgactcatttcaaaaagtaataccagtgatgctcaagacaggaaatttttaaattttttcggcactcgtaacacaaaaaaaagccgagacttttccttggctgagactttttttttcaaaaaattttttaattacttaaaaatccgacaaaaaaactaactttcacaacaatgtcttttgcagttaagtgagaagctctaattttttgtaggtgagaagaagttggcggaagataaattgagaggaccaaaactcaaaaaaggcacaaattttcttttatttttcaaaactaaatcaatttaaaatat

SEQ ID NO: 29948 - DNA, 948 bp, Heterodera glycines
  unsure (1)..(948): unsure at all n locations
tttatatatatgttatattgacaaggcaactcatccttaaaaccaatttctcgggaacggctgggcacaccgggctgaaattttgcaccaaggggtagctcgagacggcgcatctgggaaaactatagaaaaaaattctcgacgcccaactgagtaccaggggcgcaaaaactgactttgctgacagtctcactgttacgaaattttttgcatttgcctttaaggcttagtgaaccccaaaagatcaatgcccaaactatgggctacaactttgccagcaaactttttttgatcagatcaaacccctgacctgtaggttaggcaacgtaagaactactttttttggacacttcagtaccagctgaatgccgcgccagggtttgctcggagcggggggtcgccagcggactttttgtagagcttttaaagctctatctatccatgtttaaaaatttcgaaaattttcaaaaattttcgagctaggcctaaaaaacgattttttggtttttgaattttatgattttttaacgaattttcccagaaaaacggagaccactttcaagcaaccgtttttcgagctctatcgattggtgacatttttagaaaattttcgatttttttccggaaatagaaaaaatttttggcctgagcgggacatttgagtcccgggcccataactcgtcgggggttggttttagcgaaaaattgccttagagcaaaattgtagagctttttaagctctatcgaacggtgtactatatgtcgaaaaattttcacaaattttcgagctaggccccctagaaatttttgaaaattttttttgggttgaagaatggagtgaaaatatttttttcgngtattttgaggtgctgagcacgatatgaccttnttgtnnttgttncnngatttttggaattttttanaaattttgaaaatttttcatttttt

SEQ ID NO: 29949 - DNA, 881 bp, Heterodera glycines
gacatttacgctcccctgacatttacgcgtcccatgacgttttacgcgtcccgtgacattttacgcgtcccgtggcattttacgcgtcccgtgacattttacgcgtcccgtgacattttacgcgtcccatgacgttttacgcgtcccgtgacattttacgcgtcccatgacattttacgcgtcccgtgacattttacgcgtcccgtgacattttacgcgtcccgtgacattttacgcgtcccgtgacattttacgcgtcccgtgacattttacgcgtcccatgacgttttacgcgtcccgtgacattttacgcgtcccgtgacattttacgcgtcccgtgacattttacgcgtcccatgacgttttacgcgtcccgtgacattttacgcgtcccatgacattttacgcgtcccatgacattttacgcgtcccgtgacattttacgcgtcccgtgacattttacgcgtcccgtgacattttacgcgtcccatgacattttacgcgtcccgtgacattttacgcgtcccgtgacattttacgcgtcccgtgacattttacgcgtcccgtgacattttacgcgtcccatgacgttttacgcgtcccgtgacattttacgcgtcccatgacgttttacgcgtcccgtgacattttacgcgtcccatgacattttacgcgtcccatgacgttttacgcgtcccgtgacattttacgcgtcccgtgacattttacgcgtcccgtgacattttacgcgtcccgtgacattttacgcgtcccatgacgttttacgcgtcccgtgacattttacgcgtcccatgacattttacgcgtcccatgacattttacgcgtcccgtgacattttacgcgtcccgtgacattttta

SEQ ID NO: 29950 - DNA, 880 bp, Heterodera glycines
ctatttgaaatgcagtggggcaagcacagcgagtcgcctcttgacaccctttgacacgtaaaatattccaaaaaaagagatagtgattttttctggattaggccggagaaataaaaattaccagctatttgaaatgcagtgggcaagcacagcgagtcgcttaaatgcacaccctttgacacgtaaaatattccaaaaaaagagatagtgattttttctggattaggccggagaaataaaaattaccagctatttgaaatgcagtgggcaagcacagcgagtcgcttaaatgcacaccctttgacacgtaaaatattccaaaaaaaaagagatagtgattttttctggattaggccggagaaataaaaattaccagctatttgaaatgcagtgggcaagcacagcgagtcgcttaaatgcacaccctttgacacgtaaaatattccaaaaaaagagatagtgattttttctggattaggccggagaaataaaaattaccagctatttgaaatgcagtgggcaagcacagcgagtcgcttaaatgcacaccctttgacacgtaaaatattccaaaaaaagagatagtgattttttctggattaggccggagaaataaaaattaccagctatttgaaatgcagtgggcaagcacagcgagtcgcttaaatgcacaccctttgacacgtaaaatattccaaaaaaagagatagtgattttttctggattaggccggagaaataaaaattaccagctatttgaaatgcagtgggcaagcacagcgagtcgcttatatgcacaccctttgacacgtaaaatattccaaaaaaagagatagtgattttttctggattaggccggagaaataaatattaccagctat

SEQ ID NO: 29951 - DNA, 903 bp, Heterodera glycines
atgtcttcgtgggcgaagaaataggaatacgaagaaaatcttttattccgaaaacatagtccgtcttcagactcggtttttttaagaggacaagagcaaggacaacataattgagtattggacacatttaaaaatgacgagggcctttttatttacaattggcaataaatcgctaaagtgtaatatcaggggttggctaatttctaattagaactcgaaagaagcgaaatttaaacaccatttttttttaaattttcgacggttcgattttggatttaagctcattatagcaaaatcgatgttactattcatgatcatagactcgaaatgctcacgacctgacatcattttgaaaggatttttacaaaccaaaacttgtaactgtcaatttaacatacgtgcataaaacttcgcaaaaaagcagtgaacttaatgtaaacacaaaccttccttagccggcagtgtgcgacggattacgtactttcgcacgtcgtcttccttgttcaggttgaacagacggcgaatctttgtggcacgctttggaccaagacgacggggcacaactctgtcggtcagtccttcgatttcctgttcacctaaagcgttaattggtttaagaccgaaaaaacaattggccgagtacaaaaaaccaaatcataaacctttcttcacaacgaccaatgccagcacggacatattcgagtcgacaatgcatccgcgaaccgactttcgcttgcgctctcccttcttgcgttggcgatagcaggaatggcctttggagaggagaaggcgcacacgcgagttggtgatcactccctgcttcataggaaagccttgcttgtcgttaccacccgaaattcggagcacatagccctaaacattgaaggatgctcatatatcaat

SEQ ID NO: 29952 - DNA, 1342 bp, Heterodera glycines
ttggctgggaaaacctggaaaaaaccgggattagtccctgtcaaaactggtacttaggtactcagttgtacgttttttcagtaccagtaccggtcccgctcagggctgggcgaagctcggcttagcactcgaagccgaaggcgaagcccaatttttattcgaagccgaagtccgaagctcgaagcccaaaaaacccgaagttttcgaagccgaagccgaagttttttcaattttttttttaattccaaaatttttttcatcacataatttcggttaaatatcaaatttaatcaattgacgcagtttctagtagagaccggaaatttcaaatttgcggatcccgctgcgggactggaactcaaaattttttgcgggacgggatcccgcggaattaatcccgcaaatcccgcatttaaaatttgcgggatcccgtgcgggattgcgggattttggaaaattcgaaaaaatttcaattaaattcaaaaaatttccaaaaatcaaaaaatgctgaaaataaatttataggggctgatgggtcgactaagatttttcgattggatccgacggtaaaaagttgatcggaaatcaaattattaacggttcataaatttgactattttttttcttttcaaaaccacttttttgcggtgcaagaaatcggaaatttttcaaaaaatgcaggattgcggactgggatcccgcaaaatcccgcgcgggatcccgtcccgcgccggtctctagtttctagagaccaaccaacccttttcgataaataaatataattaactttttgagcaatatattttgtaaatttttatacttcttagaatattcacggtttttgagtcgatttaaaaaataaaggaaattttggagctccggcggtgccgataggcgccgccggtgaaattttttaaatttttagtgcattgttaacagatttagtccaaaaatgaaaaaattttacgattttaattgtttaattttattaaatttctgtcgaaaaaaagaataattttgaaaaattagaagaaaagcaagtacttggatgggaactgatccaaaggaaacataatgaaaagagccgagagaactaccactcgaccaagcatgcgaaaaaacaaaaataagcaaacagtttaaatatatattaattttaagtttaccaaaagtcaatcactagtggtgcattttcacattgaaaactcaatctttagcggtatatttttcccgaaacttaaaatagccgaagccgaagcacgaagttcgaaactcaaaaaacccgaagttttcgaagttttcgaagccgaagccgaagtttcgcccacccctgatccgaaac

SEQ ID NO: 29953 - DNA, 1203 bp, Heterodera glycines
  unsure (1)..(1203): unsure at all n locations
ttttctgctcacagtaaataggaattccanctgcattctcagaatattacgccgatactaattgttctgaaatttgtttctcggcgcgttggttgggaaaaatttggaaaattggctatctcttttctgctcaacagtaataggaattccaaccgcattctcagaataattacgccgatactaattgttctggaatttgtttctctgcgcgtttgtttgggaaaaatttggaaaattggctatctctttttctgctcaacagtaataggaattccaactgcattctcagaataattacgccgatactaattgttctggaatttgtttctctgcgcgtttgtttgggaaaaatttggaaaattggctatctctttttctgctcaacagtaataggaattccaaccgcattctcagaataattacgccgatactaattgttctggaatttgtttctcggcgcgtttgtttgggaaaaatttggaaaattggctatctctttttctgctcaacagtaataggaattccaaccgcattctcagaataattacgccgatactaattgttctggaatttgtttctctgcgcgtttgtttgggaaaaatttggaaaattggctatctctttttctgctcaacagtaataggaattccaaccgcattctcagaataattacgccgatactaattgttctggaatttgtttctctgcgcgtttgtttgggaaaaatttggaaaattggctatctctttttctgctcaacagtaataggaattccaactgcattctcagaataattacgccgatactaattgttctggaatttgtttctctgcgcgtttgtttgggaaaaatttggaaaattggatatctcattttctgctcaacagtaataggaattccaaccgcattctcagaataattacgccgatactaattgttctggaatttgtttctctgcgcgtttgtttgggaaaaatttggaaaattggctatctctttttctgctcaacagtaataggaattccaaccgcattctcagaataattacgccgatactaattgttctcgaatttgtttctctgcgcgtttgtttgggaaaaatttggaaaattggctatctctttttctgctncacagtaataggaattccaactgcattctcagaatattacgccgatactaattgntctggaatttgtttct

SEQ ID NO: 29954 - DNA, 1761 bp, Heterodera glycines
  unsure (1)..(1761): unsure at all n locations
tattcgtcttccaataccatattttttcaacctcctaggattttttttcgacacctacccctgcacttacggtatttgatctctaaaaaggtcactataatggaatgttgttagatttatcgggtctttttcaaatcaaaaatagagttaggatgcctgtgcatgatgttcatgttaatttggtgcagttttactacactagaattttgaagctataattttggaacagactgtagagacagacatacagccaggtgcaaaagtctttgaacaaaatttttgataaacagtaactcagtttcaaattggcagaaaaatctgaaaaaattcctgcaaagctaacttcttatgctgatcaaaaaagtctttagagaacaaaattctctgccgaatttccttttgaatattgggtctacgatttatatacgcagagcaacagttcgtgaaaaataagtaccataaaaacgatcattttcgatcattttcccttgaaatacggtattaatcagtcatttttgaattgttcaactttatctctctctaactcagtgggtatatatcgtagacccaacattcaaaaggaaattcggtagagaattttgttctcattctgataggcttattaaaattttccaaaaaaatttcccagccctctaggagttttttttcgaaaatttgcccgatttcaagccattttttaatttttatatcaccatgaaggagcgtctgatcaagttggtggaaatgattattaggcgaaatgtcagtaggcgagatgtccagaagcgcattgtcatacaaccttctgagacagtaatgctgaaaaccatgcgccatgtgttcccggcattttaacaatcgggtatagcttccagaaatcatggtcatttttatttgttagacaaagaaatgccgaagtatcggctccctgaaaatgcgacaccgtcggaaaatccgacagcgataaaaagtttttcatttcaagaaaatgcgacactgagaaaatgcgacaccaaacatagatttttaaaaccgtaatgggtttggttcgagtccgctccacaacaaaatgtttttatttatttattttcttcctgaaaattcaaattggctattctgaaaattgttgatggttttgccaatgacaactcttcatctcctatgtcaattttcaccgaaaaaactcttagctgttccttatctgaagtttagtattttgactttttatttttaatttattatcgattttttgtttatacattatcaatttaattttatcattaatttaatatttatatattttcgtacctatagaaaaagccacaattcaccctctgatgaacttatgttcataaattcccaatataattaaatttgaatttaatttttatttacatatttaggtttttctatcttttttaaacttaataagcaaaaatttgatgcaaaaatttttgcaaattcctttactatttttttaaaatttattcatatttgagtttttaaaggaatcttttcttcatcattctcgtgtaactccgattatttcagccgctgtttataaaaaaatatctataaaaacaatatatttttgaaaatttataggttattttagtaattagattttcaatggaatcaagaatttaaaattaaaaaaatcaaataattcatatattanattatttttanattatcttatttttctcactatttttataatatttanatgtcgaatttgtttacatacttgtatccatactc

SEQ ID NO: 29955 - DNA, 970 bp, Heterodera glycines
caccaaattttatttacatgttagtttaggcactctgatgctttttctatcaaaaagggagatgaataaaatttttaaaaatttttaattcctttttaaacaggccaaaaagtttaggcttaactttttttttcagaaactgatcagaagcgcaccaaactttgcaggaatactgaaaggaagagaaataacctattttaaatattatctagtcagttcatttaaataatttttatccaaaaaatttttttttgggttttcggggcagtccccctgaaccgatgcgcccagatttatggggagaccgaatccttccggaatagcttccctatagcctgtactttaattctgcgttggatttttgctccccataattgtttgagtaccccaaacggacacttgaaaaaatcgatttttttgttttcggggcagtccccccgaaccgatgcgcccagatttatggggagaccgaatccttccggaatagcttccctatagcctgtactttaattctgcgttggatttttgctccccataattgtttgagtaccccaaacggacacttgaaaaaatcgattttttttgttttcggggcagtccccccgaaccgatgcgcccagatttatggggagaccgaatccttcgggaatagcttccctatagcctgtactttaattctgcgttggatttttgctccccataaatgtttgagtaccccaaacggacactgaataaatttttaaaaatttttaattcctttttaaacaggccaaaaagtttaggcttaacttttttttcagaaacttatcagaagcgccccaaactttgcagggatactgaaaggaaaagaattaacctgttttatcacattagcttgtcatcagtttttataaaaattttcaaaattctgagtctcctattattttatttttttttcaaattttgaagggcggggggggggggggggggg

SEQ ID NO: 29956 - DNA, 1204 bp, Heterodera glycines
ctaaatcaacgcagagacgcctttccttgacctttttaggcccctgcaaaatctggtgcgcttctgatcactactcgaaaaatgagtgattgaattttcactaaaaagttaagcctaaactttttggcctgtttaaaaaggaattaaaaatttttaaaaattttattcatctcccaatttgatagaaaaagcatcagagtgcctaaactaacatgtaaataaaatttggtgcgtttcagaaccctttctgaaaaaaatatttataaattaattatgcaaaaaacaaataaataatgaactctcttccttaataattttcctgcaccgaaggtactcactcggccgcttcgcggcctcgtggtgtgccttccccccccatttttgactccctccctctccttttttgccattaacttactgttgctccactgaatgcgatggcaccgctcattgccgcgtgtgccgacatttcttcgttctttcggcactctttcggtgactgtccgttgcctttgtcgcttaaatactttcgctccgccgctgtgtacgattccgcctcagtgcaacacaacaaaagcacatcgttcttcgctaaaatcgtcaatccaattaaacacactttcgcggctaaggacggaaattcctgaaaaactcgaaagaatggcgtgaaaaaattaacgaaaatgcgcagtgcaattggcgaaaaaagtgacgaaggaattttacgacggcgcggcacttttgggaaataaacggggagaataatcgaattataggaggggcaaaaagagaagcgaaaacgggatgaatgagaagggtggggtgggggggggggagggcatggaatgtaagccccgaggggaggcacagggaaatggaggaaaagcattggataaagcataggaaaaaagccatatggacaagggaagggaagcgaagcaggcaaaggagtggcattggaggatttatcaaaatacaatttcacgcaaaacaatcgccaacaaaaaatcaaaggaatttttgctcgcttcatcgctcaattggccaaataagccatagaattaattagcacattctgcacaatgcgcagcagcagcatcaaaagttggagtgcgcccaactgagttagaccgtcattcaatgtattaatttttaatccaaacagacacaaaataggaatttgaaaaaggccaaaatttccaat

SEQ ID NO: 29957 - DNA, 1489 bp, Heterodera glycines
cagagcactgggcagaaatcagacacggtcacggtccacaaggaccatccgtctcctctgtttaattagacagtcggattccccgagttcgtgccagttctaaactggtcgttcagcgccaaccgaagtgcataccctggcgagcatacacgcagctgaagcgctccacaagcagctctcaccactagtccacgcaccatccccgaaagaacagcacgcagccacgggcaaaagccgcctgtttcacgcaacagcccggctgacccgacctttagagccaattcttttcccgaagttacaaatctaatttgccgacttcccttacctacattattctatcgactagaggctgttcaccttggagacctgctgcggatatcggtacgatcaggcaggagattcaaatagcttccctcgcattttcaagggccgtgtggagcgcacgagacaccacaggaaccgcggtgctttacgggcgcaacatccctatctcaggctgagccacttccaggcacgcacaccctaaaccagaaaagagaactctggctcggactccacacgacgtctgcgagttcatttgcgttaccgcgcaaaacagctcttgcgaaccgtcatttccctagcctggcgtgggaatacacaggctttaacatgtgcagcactgagcggtataccacagctccaacgtatggagcaccccaaaagcatggctcgtgaggcagctgccccgtaatgttgggcagcgtccacaagtcagctcgaacgacctgtgcccgtcagcggacgggggcatttggtggtgccaacgctagcccaacaggacagcaggtaggtggtgaataggaatcacttgggtaatgatccagcagcaggttcacctacagctaccttgttacgacttttgcccggttcaagccactgcgattaaatcggttccagtctgcataccgaccgaagccggaacactaaccgtccccgaatttctcgaaatggctcagtcccgggcagcgacgggcggtgtgtacaaagggcagggacgtattcagagcgagttgatgactcgcccctacaaggaattcctcgttcacggacaataattgcaatgtccgatcccaatcacggcaaattttcaccggtttaccaacccctttcggggaaggacaagcacgctgattttgccagtgtagcgcgcgtgcagccccggacatctaagggcatcacagacctgttattgctcaatttcgtgcggctgaacaccgaaaatccctctaagaagttgtgcccacagaagcaatgagccaactatttagtaggctagagtctcgctcgttatcggaataaaccagacaaatcgctccacgaactaagaacggccatgcaccaccatccaccgaatcatgaaaaagctatcaatctgtcaatccttacggtgtccgggccgggtgagtttccccgtgttgagtcaaattaagccgcaggctccactcct

SEQ ID NO: 29958 - DNA, 1120 bp, Heterodera glycines
ttctgtccaccaaaagtgaaaacatttcacgcagaacgtttcgcatgtccatggcttgcagcacaatggacaacgccgagtccgtcgcggtccgttgcaaatcgattggcacccgcctggattaaagtgcaaaaagccgacaaattgcctaaagggtttcgagtgtcaaaacacggctttgatcttcgaatggctaaagacactgccgtcgctcgctgcccacagcagcggcgtccgtccgtcgacgtcggcacattccaaagggactccttttcggagcagtgtgtgcagaatggcctcggcccggcccaacggcacttcctcctccactgccgtcgatgaactgaccgtggcgtaatgcagcggatatgccccgtggacatccgccaaatcaatgggcgcgccatagcgatggagagcggtcagaatgtccaactaaagtgaagttgcacgtgccgacaagacgaccatgcccaaagaaagaccaacggacttggccacaaacgacggcccaatgcgccgcggagtgtccgtcacagtccaaatggccaaggtgggcaccctgcagcagcaaaagcattctcagcccatcccccgaccaaaacctgttccatcagatattccatcacttcaaaattgcctgccattacagagacaagcaaaggagtgaagccaaattcgtcttgtgcgtccatcagtaagcgattcaaacctatttaaatggtttttgcttttttctgaaaccaactcaaaatttgttgaaaggtttccaaatcagcgcaatcagccgcataatgaagaggcacctaaagaaagagtgaaatcacaggcactattggaccaatcccaaaattcgtttattcttcgccaatcgatgatcatttgtcagtccttcccttttcattgataattttcagggttttggtcattgtccgctttttaccaattcgtccatcttttttggtctttttcatgttcaatcctaatttgtctgttttcattgatcattatttgtccatgtttttgattgtcccttctttaatgatcatttatcccttttctgatcattcgaccatgttcaatgatcatttgtcccatttgctctttttaatgagcattg

SEQ ID NO: 29959 - DNA, 1141 bp, Heterodera glycines
  unsure (1)..(1141): unsure at all n locations
cgacgncatttgcgcaacnncgaacaggaaaagctntttacgtgaaaaaacaagaagcattagggctaagccatcgtcacctttaccattgccatttttcggaccaaaagtgagtcccaaccgaagaagcatcgctttctctttctcttccggcccgcgccaaaatggcgcttctccagcagtttcttccctatcgtattccattgtcgtcatcgtcttctgcgttgtctttgttatcgatggcgtcatttttacgtttccgtgttgtgtcactattttcgctgaaagcttctcgtgctgaatttgctcatcttccgtcgatgcctttgtccttcttgtactgctcgctgtcgtccgcttttcctccatttcgtcattttcttccgtaacaattggacaccgtacaaaataagcgttgtcttccgccgtcaccactcccgtgttcatctccaagtcgacaattgccacatattccttgtccctctgcacaaaatggcattcaaatgccctcccttccttccgtttttctttttaccctcacaatggcacacttttgccggtggtcgtcgtcaagtggaaggcgtagtccgactctgtttcggcctcgtccggtcacaaaacaaaggccattcgggcgcgtttttagcattccgtgaaagggctcgcgaaattggacgaacatttccatggaattggcggaacaacggacagacacttttgagggggggggggaattggcgaaagagcaaaatgccaattttggaaatcagtgccaaaatttaacgccaaattttgcatggcaaaaaacgaaacaaatttagtggcattaaaagggggcaacaaaaagacaccagaaaaggggctgctggaggaagaagacgaaagcggaggaagaagagccgtgaggtgaagcaggccaaagaagacggaagaaaaagtggaagcggaagagaacatcggccggaggagcgtggaaatgttctcttccgttagtctgatcttaggttgttcgttgcctttttgcttatttgcgttgggttttttttggcatttagtgccatcgatcagtgattgcttaaccaattccatgcgtaagttggcgtttttggactgagaaagagaagcattttccgatcgtata

SEQ ID NO: 29960 - DNA, 991 bp, Heterodera glycines
ttcttggatataagataaatttaaaaattctctgaccattaaatggcgattgcgcaccgccctccctctcacgctcgagagcttttgtaacgtataaaatttctcaaaataagagatagtcatttttcttggatataagataaatttaaaaattctctgagaaattaaatggcgattgcgcaccgccctccctctcacgctcgagcgcttttgtaacgtataaaatttctcaaaagaagagatagtcatttttcttggatataagataaatttaaaaattctctgtgaaattaaatggcgattgcgcaccgcacttcctatcatgctcgagagcatttgtaacgtataaaatttctcaaaataagagatagtcatttttcttggatataagataaatttaaaaattctctgtgaaattaaatggcgattgcgcaccgcacttcctatcatgctcgagagcatttgtaacgtataaaatttctcaaaataagagatagtcatttttcttggatataagataaatttaaaaattctctgagaaattaaatggcgattgcgcaccgccctccctctcacgctcgagcgcttttgtaacgtataaaatttctcaaaataagagatagtcatttttcttggatataagataaatttaaaaattctctgtgaaattaaatggcgattgcgcaccgcacttcctatcatgctcgagagcatttgtaacgtataaaatttctcaaaataagagatagtcatttttcttggatataagataaatttaaaaattctctgagaaattaaatggcgattgcgcaccgccctccctctcacgctcgagcgcttttgtaacgtataaaatttctcaaaataagagatagtcatttttcttggatataaagataaatttaaaattctctgtgaaattaaatggcgattgcgcaccgcacttcctatcatgctcgagagcatttgtaacgtataaaatttctcaaaa

SEQ ID NO: 29961 - DNA, 1222 bp, Heterodera glycines
aaaaaaaaaaaaaccgcccaccccggggggtgtgttgttttttttttttttttaaaaaaaaaaaacagggcgcccccccggggggtgggattttttttttgtttttaaaaaaaaaataggccccagccgggggttggggggttttttttttatttttcaaataaaaaccaggtccacccggggggttggggttttttttggattttaaaaaaaaaacaatccaaccaggggtttggagttttttttgtgtttttcaaaaaaaacagacaagccaggggtgggagttttattggttttcagaaaaaaaaaataggtgcagccagggctaggagttttcttggatattcagaaaaaacaggtccagccagggctaggagttttcttcgattttcagaaaaaaacagcccagccagggctaggagttttcttggattttcagaaaaaacaggtccagccagggcgaggagtttgcttggattttcagaaaaaacagtccagccagggctaggagttttcttgggttttcagaaaaaacagtcaagccagggctaggagttttattggattttcagaaaaaaaaataggtccagccagggctaggagttttcttggatattcagaaaaaacagtcaagccagggctaggagttttcttggattttcagaaaaaaataggtccagccagggctaggagttttcttggattttcagaaaaaacaggtccagccagggctaggagttttattggattttcagaaaaaataggcccagccagggctaggagttttcttggattttcagaaaaaacaggtccagccagggctaggagttttcttggattttcagaaaaaacagtccagccagggctaggagttttcttgggttttcagaaaaaacagtcaagccagggctaggagttttcttggatttcagaaaaaaggcccagccagggctaggagttttcttggatattcagaaaaaacaggtccagccatgggtaggagttttcttggattttcagaaaaaacagtccagccagggctaggagttttcttgggttttcagaaaaaacagtcaagccatgggtaggagttttattggattttaggaaaaaaataggtccagccagggctagggagttttcttggatattcagaaaaaacagtccagccaagggttaagagttttattggattttcagaaaaaaccagtccagccagggc

SEQ ID NO: 29962 - DNA, 1504 bp, Heterodera glycines
ttggaaaaccaatcgtctcacggcaatacaatttctttggcgtgccatcttttgtcggcgtgtgcaaccatttgtacagcacttggcgagcaccagatgcatttgagccatcagcagcacacacatccgggaacagacgtcccgaataaatccaattcaatttgtcaagatcagtgagcagcgttggcgaaatgcgacggcacaattggtccaagtggtgtgcattgtttaacatcaaattacacatatttgccgaaaagatgggccaaatttcgcgggccaacacatcccaattctgctgatgctgcagctgatgtgcgtcactttcggtgccatccgagtccacacaaaaatacacggtggtgcctttggtgtcccaaagttgcttgttggcatggagaaatgcaatgacggaatggtcaatgtacctgtgtgaacaaacacacaataccgtataatatctctaattatccctccgtctccatttatccccccgggcgataattagagacaatacggtacatacaagtttttatttaaaaaatggtaatactgtcgatggtacccccctcccctttaaaaaaaaaatttttttttcttgaactaaggttgtcttagggggtgcacttcattttcccccgtcgtttcccctccgaaaaatttttttttttaaattttcaaacctagaaatttttcctaaaaaaattcttaggaattaatccgattttgacattaatttcgatcaaattcgccccgaactcggagattcgtgaccagtgatcccgaaaacgctcggaaatatgatttcatgtcttttgaaaaaaaacataacttactcaatcatgaaacgaattcggagtttgtttggcagcgggaaggtccggcaacggaaaatccacaaaattggcatccatcggctcccgcggagattgctgcacaaaattggcaccgagcggcacagacactttcgcttttggtggttgggcttcatccttgcaaattctgatccatttccaagtcgtccactcgcttttaccatcaaaatgcgtgtccaccagcgcatcaaaacggggcgaaagcaatgcgattttgagtccgagttgagcatggtcaaaggatggcagaatgcgcgtccgcgcgttcgttacagttgcaatggataccataggagagatcggcgatcatgaaaaccattggaaccatacattcatgcctttagaaaacaaaaacattttttcagggaaggggggcttccatcggcagtattaccgaaaatgaagcgggtaatagtgaagctggtgcttcttttttttgatttttttttatattctctaaaacatgcttcttagggttttcggggtagctcatcagtagggtgcgacttttagtgacgaaaaatctcgaaatagttaactaaaatagtgagtaaaaatgccaaaatagtgagtgacaaaatagtgacaaaaagtccgaaatagtgacgaatagtgattaattttcagcc

SEQ ID NO: 29963 - DNA, 1032 bp, Heterodera glycines
  unsure (1)..(1032): unsure at all n locations
aaatagatttttttaaatataataatttctcttttttaggaatttataatttgataagaattttattttttccaacctgtttgcctccttttaaccaattttatttattaatacaattttatttttaaaaaaaaagtgtgatttatttagaaaaaataatatgagtaaacagagatgtgtgtgaacagatgttgggaaaagctgcttttgcttgtgtgggaaagcttaatgttcagggaggggaggctgtgaaatttaagttgtgatacgaacaccgcttaaagcaaagctgtgaattctgaggatattttatccgcattttgtggctttttgaagggattggagacgaaaatttttaaatgaggataaatattttttatgaacccatttaagcactaaatttgaaattatgtctccggcggcgcctgtcgtcggcactgcttccgaagattatcaattctgttaattgatgcaaaaatttgggcacaaagatgtccaaaaatggcatttttaggcaaaatctgttacaaatgcataaaaatgccaaaaaaattcacggcacaccttccgggcgcaaatttttaaaattttacctaataatattcatagtctctagcatttttggctaaaaattattaatatatcatataaattccaaactttctcataaaatatattgaaaatgaagattttgaaattttaagtttgcatttcacactctgctgcttttaaaaatgatgaagccccaaccaacttcggcttggaaaaagaggaacaaagcggcgggcgggacaggggttaacggctgttttaaaaatagcacatttggcgatgtgctggacttatccgtgatcaaacaaaaagaagcgggctgatcagacagaggtgataaaaaaaatgatgtaaaaatttgatcagaagcagcaaaagaagaagagaaaaatgatgggagacgaaaagccatcgcaaaaaaaaatgtgcagaaaaaatgtttggcgaangaatttgtccgttaaaaaaagaatgaatgcc

SEQ ID NO: 29964 - DNA, 1250 bp, Heterodera glycines
  unsure (1)..(1250): unsure at all n locations
ctcacanttttctactacatatgccataattgttttgattttttctattgaataaaaactgataatggaaatcatcaaaaacccttaaaaaaaactccgagaaacaagaccgatacagagaacctcggtttccgagactaaaaacccgagactcgagtcgagactctcgcacagccctaggatttatattccaatacaatacaatatttgtttgctagctttacattttaataaggattctcacccattgttacataataatccatttatcgcgtcatatttttatagatttacaatttatgtaaaaaataaataaaaattattaatgcttattcaacaaaatatattattgcaaataattttagcatttatttaatttttattattttgaaatttaggttagcataattaataaaatattttgtataattattatgtatttgctgtttctttttccatttcttattatgtttattatgggaagggaatgcaacgaaataaaaaatgaaaatggcaaataatatttaatttaaattattattaaattcatttttaagacacaaaaattgaaagcggaaaatatttggttaagacagctccaagagcattttttactgctgataatcatttgattgataagtggttgcaaaaatatgttaatgaatttttgtgcaacgaaaaaaatgaaattgaaaaaaatcattcaaaaattggaaattttatttttttacgaaaaagcagaaaaaatgcgaaaaactttttgtgggcaaataattgaaggaaaaggtattgaaaatgcgacagaaaaagtaggaaaaatgtcaatagaattggccaaagaattggagaatgataaaactcttaaagaaaatatacaaaatgctttgaaaaataaaaaagataaatttatttttaaattttcaaatgcaattgaattgaccgatcaattaacaaataattatactcaagaatatttggaaaaactcaaaacaactttttatttagagcttgccggctttttaaagtcatccaaaggtaattatttttaaataataatttaatttataacagaattaaatacttcaatcagcgctctcaattgtcataattaaaaaattgtatgatttaaatttcagcttcaatagaaaatttgtgccaaaagcaacaaattgcgtttgctccacgacggcatcgacgtgcagatttcgccgacaaataatacaatatttgatcaaattcgacatccaaat

SEQ ID NO: 29965 - DNA, 1678 bp, Heterodera glycines
  unsure (1)..(1678): unsure at all n locations
ctcgtctctctctctttttatgctttcctctttctcacctctctatcctgtcctctcttctctcctcctctctctttctcccttctctctctctctatctctctatctccttncctctctcttatctcctcncctctctctctctttcttttcctctcttctcttctctctctctctctcttgtcctttaaattctatagttccttctttctctgtattcgtaagtatctatttatcttttttttattatttctctctctctctctctcacacacacacaccctctctctctctcccactctctttctctctctcacacactctctctctctcctctctcaatctctctctctctcacacaactctctctctctcaatctctctctttctcactttctttctctttttctttttactttcattctttcatacataatattttgattcattatttgtttaaaaaaattaagcttttctctcaaaaattttaataaaaaaaacaaaacaatataataattaaaaaatgtacaatttgaattaaagtttgtggattagaattttaatgttaaatagtagtatttaattaatttaatttgaaaaagataaaagtaaataaataaaaagaaaaaagtgatgaaaaatctcaaattttattattgcataattttcttaaatttatttacaaaaagtttttattggcattatgtttattttcgcgttaatttgaatcgatattttttgtgacggaatgacacgacccaaatagtatatttagatttgaagaaatttagagacattacacccttaatttggaaaatttatatgcatatttttcactttttatgtgcatattttgccatttttggtgcatattttatgcgcatatttttggatgccctagttatgattagaaaagtcaaactctctttttgtaaggcaatttcatcatagtgatactaaaagaaacgggtaacgggtagccaaacccgcagctgcgggtgagcccagcgagaacccggtaacattcatttagtacgggctgagggtgagttaaccgggttaagttataacattacctcgttcttttggtacgggccccgccggacgctgtgtataagattaaaaaggaacacaaaaacccacgaagacttttgtttttgttgcattctttttgcaaaaactattcatttattttacctatttatttttcagtttattttgaaatggaacaagaacaacaacaaaatgttcatcacagtgggcgcgaagtgcgtcagatgttcatcgactttttcgtcaaggaaaaggcccacaaatattaccattcctcttccgtggtatgcaacggtcgtttccgctctccttttgaccattttcagattccccacgaggatccgactctgttgttcaccaatgccgggatgaatcaatttaagcccattttccaagagactgtcgacccgaacagtgacatggccaagctgaagcgtgcggtcaacacacagaaatgcataagggcgggtgggaagcacaacgacttggacgacgtggggaaggacgtgtaccaccacacctttttcgaaatgctcggcaattggtccttcggcgataatttcaaggtcagtcgtctcctttttttgctattctgtttttaatgttttagagggaatttgtacat

SEQ ID NO: 29966 - DNA, 1377 bp, Heterodera glycines
  unsure (1)..(1377): unsure at all n locations
ttttaaaagccatgcccggaaccgatttgataaaaatttaaattctttctcacaagtatttcaagttgagttgcacgggaccgagaccgggtcgggaattcccgggtttttcaggtcccggtcccggcgggactaaataagcactggtaagaattgaggtcctggtgagaaagagaagaaaattggcggagaaggagaaatttttaagaaaaaatttatttatttcatagcacagtcttatcttatgtgggtgtaattaaatcttctgaccttcattgtttgtctcttgggttcaattccctttttgacaaattctgttagcaaaatcactcaaaatttcgaatttttccggcggcacctatcggcaccgccggaccccccccccccaaagttcccaaattttttttgaaacagcgccacaaaaagaccgatttaaaaaatttaagagattgttaatttgtaacaaagtgcacttaaattttcaaattaaatggcctcttttcgctgaacaaaaatataattaaaaggtggataaattttaaaaactccagaatttattccagaaaatgttcagccaaccacgagaaaagtgaattaacagacaaaatttggttttaaacctaaacaagtttttgaatcagaagagtaaggacgagcgtgacattatgcctttgcatattccgttgtgtttgaattcgtttccaaattgttccattccgccaatgatagcattttgccgcaactcaccaaataaatcattgccttcattctgtctaacttcgtaaattccatttgaacaaataatacttaaaagcattactattgcaagcaaaaacatctgaatttgaaaagatttgaatgattggctaattttcaaattgctaaaaaattaccatttaatttccaaattaatttattaaacatattgcaaagacttatgaacaaaaaataataatacaaattgttcttactgatgcttttcatcaatttgttgcatttcccctcctccacccaaaaaaagaagtaaaaaacgtggcttcttgtctttcaagtaaaattccaaatttcttaaagttttcatcgaatttctgatttcgatccaaaaatccgagctgtaaagaaaatatggtgtattatttattattagggcgagcatttatattttcaaaaaatctcgaaatatttaaataatatttgagaaaaaatgtcaaaatatgtaacaaatattgatcaaaaatacctaagcaacttagagcaacaaaaattgaaaaattttcttttaaattaataaaaaacgaaaaatgtatttgtaagcgaggacaattgggtgctatttgaaaccatttttttcaaaacaannatatttaattcttaggg

SEQ ID NO: 29967 - DNA, 925 bp, Heterodera glycines
tgaaaaaacaacaaattcctgatgacaattcacaaaccatgcactcatcacatctccgcgacggactgaaattgaattttcactttaaatttggcttttttggcactgccaacccgaaatatctttgttcaaatagccacggatttcgcccagaatgaactcaatgtcactgttgcgcggcttcggagaaaacgaaacgtcgcacggcgagtccgtcgtgccggccaccgtcattctctgccatggactaaaaatgtacgacagtttatgaggacattccaacacaaaaacgcacagaaagaaaatcactcgtccgtcggtggtggacgggtccaaaaggcccgtgttggcgggactgtaatagccgggcaacacaatgtgcacgccggcggacggacgacagattggctccgtgtccggatcggccatcatacggatggagtcggtgaatggaccggtggcattcacaatgcatttggcacggatgggaaacaattcgccagtcaactgaccgttggaggggggggggggagatttgaaaaagtggctaattgaaagaaccatgtttttgacttgagcaccgcacaatttgccgttctcgtccttcagcaaatgttccaccgccacgtgattgcagcatttggcaccgtttcgtattgcggacaacactatggccaagttcatgcgcgcgtcattgtgttggcctaaaatggggtgaaattggaggggattaattggtaccaatgaaacaaaaaactcgagaaatgaatgttctactgaaagcgaaccgtcgtaataaataagcgctccctttaacgattcctttttgagcatcggaaatcgctccaacgccttttccttgtcgatgtaataagagttcttcagaatgcgctttccggacacccaatcgtacattttgatgccg

SEQ ID NO: 29968 - DNA, 1661 bp, Heterodera glycines
  unsure (1)..(1661): unsure at all n locations
ttgttttgatttgtttaggtggcacttttttatttccttctgtcatcaaaatgcaacaaattgtcaacataaactccctcaatttcccccccccccaacttttttggcattttgtcataaaatgtttcgttgtccctttattccctcccctcgtcgttttgctgtttcgtgtgctccgtcgcgcttttccggaagaattgcatcggccgcgggttccgcacagaatggagatgattatccgtccataaaatgttttgtcctcctcgttttgattgcttccaaacattttatagtctctccacgttgaattggggtgaaaatgcgcgacaataaatccttcgctgctgggctttttttccccaaaattttgtaaaagtcgggtaaaattcgcggaagagtgcctaattagagggttctttgcgctggacagtcgagagtgacgagttaatgggtcggaaggcagtcgagattggcactttgtcgtcttctgcgggagaaggccaaatggctttcttttctggggaagggggaagccgtgggaaaatgaggctgactttggacgcaaacattgtcaactccatccatctgtccctacgtgcctcggggaaatcggcatcgaaattcgggttccctgagggctttttaccgtattcctccggttttccggcaaaacaaacattcgtttcgtttcatttttccctcgtctttttaaaacgaattccttttttcccataaactaaatttcgttcacagttaatttgttccttttttaccgtttttcttcacatttttcccatttttcggtcatttgtccataaaacaaagcgaaaaatgcgataaatcatcgcctcacaacagacaaatgcagcacaacagttgggcaaactctgttcacaatttgtggatgataagcaaacggagggggggggggggggcaccgccgccttatcattaaaataacacgccatggcaagcggacggagaaggcttagagttatcagtgcggcgggagaagcgccgactcagccatagccccgggggcattttctcacccgccggaggggccaaagtttgtttaggctttggaatttcttttgggcggagaggaaatggacgattgttgagaaaagtgttgttgatgagcgaaactgatcaggctaattaatcattggtattagctctgtacgacttttattgcttataatgttcgagagtatcaatcatttgatttgatatcgaataaaaggaaaaaagcgaaactcagaagaaataatcaggaaattaaaatgtacaattgttaaagctaaaaacttgtgaacaaatttaattaatgccaaaagaagtgatcggtggagaagggccgacgccttttttaacgcaaatgatttattttcaaaaaagttttaatttgttaaaaaatattttgatatttttgaaaatgttttcgatgggtccgtccgttcgtgcttcgtcgtcatcatcatcaaccagttcgttcatccattgcccatctctccccaattcttcatttgttggttggtcgccgccgtcgtcgtcgcatttccccccgcccattctctccgactgtcccccccgtcgccccccgggaaatgcattggcatacggtaccccaatggagtcggngggaggggggggggggg

SEQ ID NO: 29969 - DNA, 1164 bp, Heterodera glycines
aaaaaatagagaaaaatagggagaattttatgagatttatttgggatttctatcttgcaaacaataaaagttattcctgaaaaacttgaagatttcaatttttcacataaaaattaataactcactccaaacaaagtgctaaggtataaaaaaatattgataaaatccgcaatttttttctctacaagtaggaatttatttcatatttttatcgcttttttaaaaaaagttataaaaataaaactgattttggagccaaaattcaaagggatacccctttggaaatttcatggacacatttttttgctctaaaatttaaaaaaaacatattttcttacgtaatttgggtcgctgatcatgaatatgaactttattttgagttatagacattttggaattttttaaaattttttgaaattttagaattttttggcccttgaaaatttaagctacattttgaaaattcataactcccatcaaaaaggtccaattcagtccatttaaagtttaaaaaatagagaaaaatagggagaattttatgagatttatttgggatttctatcttgcaaacaataaaagttattcctgaaaaacttgaagatttcaatttttcacataaaaattaataactcactccaaacaaagtgctaaggtataaaaaaatattgataaaatccgcaattttttgctctattatataaattttatttggcatttttatcacttttttgaaaaaagttataaaaataaaagtgattttggaattcgggaccaaagggggtggacaggatttttgagtgtaaaaattttttcacccaaaatcttcaaaaaatatgtctttaaggccatttaatgacgctgatcacggatacgtgatcagttttcacttttgacatcgttaaggcctcagaatccctgcgtaaattgggattctgaggcattcaggttcgaatccggacggtgtaaatcatttttaaatttattttctgctattttttaatgctaattattaagtcaaaattatttttgttattttttaaattcaattttagaaaaattaaaataatttttctataaaataaaaatgaaaatgggtaattattaatttatttaaatttaaattaaatgaattcttcttgaattcaataaaaaataaatggattt

SEQ ID NO: 29970 - DNA, 808 bp, Heterodera glycines
  unsure (1)..(808): unsure at all n locations
aatttttataacaaatttntttgtaaaattttatttactttaatatgttgtcggcatcgtccaagcgaaaagcacaaatatttttttgtcatggcactggtgctgctgctgctgttggcactttgtttgaaagaaaaaaataaatttattaaaaccccgtgaaacaatttttgaagatttaatttgaaaattccaaattttcccggcaacgtctagatggatggcattttcgaacctccatttttgttcatttatctcttgaaattggatatttttaaccaatccatgataatcatcaaatagaaaataataatatattttttcgagataatttcattcccaccaacacttcaaatatttttatagtacttacaattagtactaaacatttttttgttaaacggaatacagtaacagcacttgtcactaccgtatttgctgcacccacagtctcttctcctcctcagtcatttgttgccgttgcagtcgtccggtcttcactacgttcactcatccgagtaggatcgggcacaaattgctcggaaattgtctacaacaacattataaatgatttaaaacaaaaaaaaacaacaaaaataataataaattgcttaataaatgtttttttggcaggggattagtcagttttgccaataggccaaatttttctgatgtcgcacatgttgctgttgaccagcagaacagttgctgctgttgttgaactgcttgaacttgatggcggaaacacagcaggggcaaccgtagagaaagtgacaccgcgttgttgttccgaatgatgacgatgttg

SEQ ID NO: 29971 - DNA, 991 bp, Heterodera glycines
  unsure (1)..(991): unsure at all n locations
agtgcatttaaattgttaaattaaagaataatttcattgttttcagtacttatttcatataatatttaataatttttgaaacatttcgtatacaaaacaatttaaagtaaatcttttttggtgattggtatttcgttttagtgaaagatgaattctatgtatttctgtctgtatttaactaaataattatttgctctattatcattagtttaagaaatccttttaaatttaattttatttttcaataaagaaataaataatcacttattattgaattacgaaatatatattttcgcaatgaatatattttttataactttgaaacactaatttttaatgttcaaaatgagaaaagctcagatttttttcagtgtgaggagtctttttattttttacaattcaaatattataaatattactaatatgaatattcaaatacttcgacatcggctttaaatttattttgttcctcctatcttttaatattattttttgttatttttgatttaaatttagatttcttatgcaataaactctgataattgtttctttctttctaatctatgacatcggtaattggttgctcaaatgttgtgttttttattatttttaataaataatttatttttgttatgttgttcatttatgtatatgaaaaaaaaaatttaatgtttattactaaaatttaattttttagtgattaataaataaatgacataaattttccattgaagaaataaggtttattaattgttataagcattgttaatattatttttcatttatcttctttgataatttttatttaaatcttatttctttttgatcttttattagaatttctaattttagtggtttttaaattttgatttgataatctgaaacgaatgttattattttccaaagtgttttttatgtgaagtgatcagtatatgctttattaagaaatagtataatgagaattntttgatttaanactcttttttttaat

SEQ ID NO: 29972 - DNA, 1003 bp, Heterodera glycines
  unsure (1)..(1003): unsure at all n locations
gttgtggttagctacggtgcagcgggtgtgactttcggcactgtgactgccggtgtcggcacgccagcgataatcctcgcttgcaactcagcgttcggcacatgccaggcggcttgttgggccgcgctttttgcgccgacgccatgagcggatttgaaagaaaaccccagatgggaattatttttttggattttaatttatcaattcaccatcaattgggatgccaatttatgtaaatacaattttttttaatttgatttttaattttttgctatgctaatttatttatttgttttatgaatttgtaaagaaaaaattgaaataaaatgtaaatttaaaattaaaatggtaaagttttttgtggcattttgtgcctatatgttcttcaaatttgtatacattgaaaattcaaattttaaattgaatattttaatacgttttgatattttttatacaaaattggcatcctttctattgtactcactttatttttatattcaacacggtacactgagtacggtaattttttgccctttcattttggcaatttttaaattttcgaaaaattcaaaatttgttttccgactacattgaaatagaatatttgcttacctaattttaaatttttcgaaaaaaaattcctctgaaacttgatcaataaaaattattgaaaatttaaaaaaaaaatgttttttaaattatcatttaattaagcattaaaaatctcttccatttggtacatatttttagtagcatttgttttgatttgttttagcgccttatttgaatggatgaatgaaatgtccaacgaaaagctgacaatacagccaacgatgggtcggtttgccaatggctaatgaagcgatgccaaattgaggggacggagtcgattcagtgggaagacgaaaatttgggcgatttgaacactgtcatcttttccatttccgatctccaaagctgcattgtgtgagcaatttacatantaagcatttgattttattca

SEQ ID NO: 29973 - DNA, 1782 bp, Heterodera glycines
  unsure (1)..(1782): unsure at all n locations
atcattgataaccatagtttttctctattagcctgcaaaatttcaaaaaatctggtcaacttcgaacaaagttgtatacgaatgagtactattattgctgccaaaacttatatgaaaattgatacttttattttaaattttgcaggcttatagtgaaaaacctgggctatcgaataaatgccatttttttaggaaaaatgcaaaaaatgccggattttacgaaacgaacaggcacagttttttgtgttaaatttgtttaatgattttaaatgggtttaattaaatttattggaagaaatatttatttattttatttatttatataaatatttccaaatttagtctcagaattgaacaactgagaacagagaaatcagtcccagaagaatggaatttgttgcggtgtcccatcaaactcaggacgtttttttaattagatgcccttaacaattattttgcaaattaatcccaaccattttcatccaatgttctcgagaatctttgtactcgagactgagtttttttcagctaaattttcgggatttattggctcgggtctcgagttctaaccctgatgtatatactgtcaactgaattgatcattaacttttcattaacattgtatgttttttaatatatttgcattttacatatatttgtttttttaatttgtatattttttaaaataaaaaatattttttaatcagaaatttgtttttaatttgtatatttaaaagattgaaaattttataatgtctatgaattgtaaaattaattgataggcaaattacaaaaatcacaagacatccattcgtcttataaatttttcaagaaaaaatcagaggtaggcaggttggtctggacggagtgcacgaagcctaattttaaaataaattgggcaaaattaatttaaatattaatttattttaaaatgaattattttacctgcgcaagtattcggcatcacgcaaaaaatcagattggaaactgttgtggcgcatggtggacagtgcagaactcagtgtgttctcgtcaataaatcgtaactttaacaaaaaaaaacttattaaaaatttttattattaggtaaataaatatattttttaattattaggtaaaaaatataaataaataaaatttaagtaaaaattaaataaataattaaatataaaatttttgtaagtttttttaatattgtttttacacattaattgatctaatgaataaaatattttttaatcagctatcataaaattaaaattattttcatttaataaattttaaaatattatctttaatttataaattttaaaatattatttctaacttaaaataaatttataaaaatttgcgttactgtagacaaaaaatttttaattaacgataataaattaaaataatttttattcaattaaattaaatttaaaattgtattgcaccagaaaaaaaattccatttttaatattttttctctgccttaccttcatcagtaattcatgtggttcaaatggacgattgtagagctcattttccagaaaattgcacacatcatcccaggtgatctgagtgaaaattttaggggttaaaaatttttgaaattttcaaaaaattgccctaacttttccatgcttttttctcctcaaaactcctaacagtgtgacaatttcgcgcaattcttcgctcatgcccaagaagcgtttggcacggccaaagtaatggagtgaagtgaaataggccttncaatgagttgatgcccaaatcacacacattgtcacaacggcg

SEQ ID NO: 29974 - DNA, 988 bp, Heterodera glycines
ttaaaatttaaaaattatttatttatttatttgccaacccaaacgaattccatttttggtgaaaaagatctgccgagtggcagaattgacgccaattccaacagtatcgccaacaccgtaggaatgtttggcattttttttaatttctccgttattccgagccaagccatcactatcatacgcagaaatgctttcatacatcagccgtttgacggtgaatccgaagaaaatgtaactgaaaaacgaaaaattaattaaaaaaagaatgacaattaataataattaacaataattttttaatatttctgatcattgaacattcaaaaaagcatttactttttcatatttttgaccgaaatttcgtaataaaaaatgttggacgagttattgtttaataaaatcgaatattcaccaaagacaaaacaccaaccttttgatgaggaaaaaaagattaggtcgtatacacaccatcccagaaatgagctcctgtaccagaaaagatttgcatgtgtggctcagtggtttttgtaagatagtaaagggacaaagggtggaggttcgagtccgttgtgcaacatgaatattttcatttatttttgtccaaaatattaaaaaatgaccatttttgggaattatttttggaggtttttaccaaccaaattgtacaatcttgacatcattcgaaagcccttgatggggagaagctttttctaagcaaatgctaagcaattggattgattaggaaaaagatatgagggttcgaaattttgtttctcgaataactttttagttaaccctttttttgcttttaaaaacccttacattttgttcgtaatttttttctctatcgacatgcaaaatttggtgtaaattgtatgagtagaaaaaaagttatatgtggcgaagtaaattcagtttttctctattaacagagataaagaaatagtacgccaaaaagagagatgtttttctctgcactctctattta

SEQ ID NO: 29975 - DNA, 1116 bp, Heterodera glycines
catcacttcggcatcgcatcagtctgagcccaagcacagtccgcctcgactgactccgagtctgcactctgtcgacgacgacgacgacaccatcgacggcacgccacccaaaagcggaaacaacggcacagggcactgatgaagccaccagtgatggcaacaacccggccattttcaaggacaaatttagcaaggagtggcgcctgctcgtcccaaccgatgtcgcacagttggaccaaatcgccgaccaacactttttgcgtcgcaaagggacgccgaaatatgacgggcgcatttacttaaggtgctgacaatgagtggtcaaccaagtacacagaatcggtttttcggaccttgcaaaattggtagtgattgaagaagttctgttttccaaaaaattctttttaatcaaagaaaattaattttttgagttttataaataaaatctaaaaatttattaatacaattgtttgtgatgttaattctttacaattttctcaaaattctatcttcctttcttttcaaagtttgtcaaaacggcggcacgacaatcgcttagaaaatggtagcatcacaccacaacaaactaaagaataaaatgaaaacaattataattggtaacaaaaaaaattattaccaaaaatcaacggccaataaaattgccattggcaccaaaaaactgaagccgatttcattgcctacaaaataataatgttgggtttgagaagattttataataagatagggcatgatattttgtacaggattttcccaatgttttgcataaagcaagggatattttctgttcgatatatactgactggtcctgtttttgtagcaaattcgagctctaataataataattacctgaactgggagtcgattcggcaatctctgaattcggcaaagaattcattaattgtttcaatagaaagatttttgtttaattgacaaaaaaaaatccccaaatttgttattattgtgtttgattctgtagaacaaagttggaatgatcattatctgttctcaatcacgggtcaatggcaactcgtacaaaaaaattttttctaagaattttcaactaaaacttataatttttagataaaaaatctaaat

SEQ ID NO: 29976 - DNA, 1304 bp, Heterodera glycines
ggggtaaaagtgcaatttcacatgtgcagtgggtgtcttttgcttaatatgaggttgagcgacttgaattgtgcaaataataacaacgattacaacaacaacaacaatcgctttagaagcagcttcactaataatagctcaacttttggcaatttcggaaacaatcgcacgaactttgacgctgggaataaccaaagcaacgcatacaacaacaacaacagcaatgaaagtggacaaatggtacataacaacaacaatgccggatggatgaattgattacctattttataacagactaataattttgctaaatagttcattgcatttaatcaccatttcatattgttctaataaatttaaatattaatccgtgtgtcttaattttttgcatcccctttggtgtttgaatatacccgtaaatgtgacaagcgcatcgccggttagcggcatgatgcattagtttctcttttgtgccgatgcagaaatgccgcacatccctttgttatttgaatttgaccccgttcgcatcggtcaccgcagcgtcggaccttggctacacagatggccacgatcccgcctcatacaaaagggcccatgggaaagtcgccctctttttttcaccattcatttaccctgcaaaccaaaaatgaattcccagcagcgccaggcagaacgtgcccaacttcgcgcaagattgaacttgcttgtcgatgaggtagatattgtggtgcaagggctcatcaacaattatcaggccgatgggttgatcaatggggtaagttttctttattttttatgctgtttttgcttttttttgaattttaatcttgattgaacaggccccgcatgagggacagctgatgggcatggaccatggacaaggtctacagcatgagcagcagcagcagcagcagccatgggaactggatccaccaatgcctgcacagcaattggaaattgggccacagctcccggatgcgtgggaactggttccctaccagccgacaccacaatgggaccaagttgcacatgtggaacaacaaccgcagcagcagcaacactaccaccaccagcaacaacaacaacaacagcagcaaggcgcgtgggatgaggaatgggaggggccgctttcgccaaatgcgcttgctcaaatccaggacgaagcggacgggctgcgtcaggatttgagtaaggattttgggtcggggtccctccataaaacaaaaattaagtgattgggagattttctcgtgtggggcagcctcagcctacgtggcccggttaccaaagatgtttgaaaaatt

SEQ ID NO: 29977 - DNA, 1410 bp, Heterodera glycines
agaaaactcctagccctggcttgactgttttttctgaaaacccaagaaaactcctagccctggctggactgttttttctgaaaatccaagaaaactcctagccctggcttgactgttttttctgaaaacccaagaaaactcctagccctggctggacttattttttttctgaaaatccaataaaactcctagccctggcttgactgttttttctgaaaacccaagaaaactcctagccctggctgggcttattttttctgaaaatccaataaaactcctagccctggctggactgttttttctgaaaacccaagaaaactcctggccctggctggactgttttttctgaaatccaagaaaactcctagccctggcttgactgttttttctgaaaacccaagaaaactcctagccctggctggactgttttttctgaaaatccaagaaaactcctagccctggcttgactgttttttctgaaaacccaagaaaactcctagccctggctggacctattttttttctgaaaatccaataaaactcctagccctggcttgactgttttttctgaaaacccaagaaaactcctagccctggctgggcctattttttctgaaaatccaataaaactcctagccctggctggacctgttttttctgaaaatcgaagaaaactcctagccctggctgggcctattttttctgaaaatccaataaaactcctagccctggctggacctgttttttctgaatatccaagaaaactcctagccctggctggacctatttttttttctgaaaatccaagaaaactcctagccctggctggacctgttttttctgaaaacccaagaaaactcctagccctggctgggcctattttttttctgaaaatccaataaaactcctagccctggcttgactgttttttctgaaaacccaagaaaactcctagccctggctgggcctattttttctgaaaatcaaaaaaaaatcctagccctggctggacctgtttttttctgaaaaacaaaaaaaactcctaaccctggctgggcctatttttttttaaaatccaaaaaaaatccaacccctggctggacctgttttttctgaataaacaaaaaaacacccagcccggcctggactttttttttttataaaaaacaaaaaaacacccacccctggctggccttttttttttcaaaaaaaaaaaaaaaaacacccacccccggggtggggtttttttttttaaaaaaaaaaaaaaccccacaccccgggggggtttttttttttttaaaaaaaaaaaaaaaaacccaacccccgggggggtttgtttttttttttataaaaaaaaaaaaaaaaaacccacaccctggtggttgttttttttttttaaaaaaaaacaaa

SEQ ID NO: 29978 - DNA, 955 bp, Heterodera glycines
actgaaatttattcaactttcccgacaaattgttgagttactattctagacgatttttttatatctcaaagcttaactattgcctttttgtatgataactggtagatattgggagtaaaaaaaagtttttttgtgactatttacaataaaaatttatgcagcatttctaaaaaggatctaaaaataatttcttgcgtaatattttttacattatgttgttgaagaatttgaggctgcttctgatgcgattgaaaatttttcagcttttcttgaaaagttttttcccagaatttatacagctttcccgacaaattgtttagataattattctagacgatttttttatatctcagtgcttaactattgcctttttgtatgataactggtagatattgggagtgaaaaaaagtttgtttgtgactatttacaataaaaatttatgcagcatttctaaaaaggatgtaaaaataatttcttgcgtaatattttttacattatgttgttgaagaatttgagtctgcttctgatgcaattggaaaatttttcagcttttctcgaaaagttttttcccagaaaacggatgggtcaaataaaaaactaaacatctcacatgaccaatttaaattcccttacattttgggtttactttattatgctggcccataaaaaaatggagtttttccggtgccaaatttttgtgaattttctttcggcccgtcataagcggattgtttgggggcaaatgaaaacaaattttgtgttattcgaatgcgctagccgagctctacattttcaaatgtatcaacaaagggtctatctccactctctggcgagttatgtccagccaaagcagagtgggccataaacacgaattttttaatctttggtatttcctctattttgagcctgctctacatttatgtattgtgcccatatgcctattgcaactgaaatt

SEQ ID NO: 29979 - DNA, 1101 bp, Heterodera glycines
tccaaatatcattatcaccctctctcatagccaccgcggcacatcgttaagctttagcgtgtttcttaaattctctggagctgcgatcagcccacaaaagaggtcactaaatttgtattccaaatatcattatcaccctctctcatagccaccgcggcacatcgttaagctttagtgtgcttcttaaattctctggagctgcgatcagcccacaaaagaggtcactaatattccaaatatcattatcaccctctctcatagccaccgcggcacatcgttaagctttagcgtgcttcttaaattctctggagctgcgatcagcccacaaaagaggtcactaaatttgtattccaaatatcattatcaccctctctcatagccaccgcggcacatcgttaagctttagtgtgcttcttaaattctctggagctgcgatcagcccacaaaagaggtcactaaatttgtcttccaaatatcattatcaccctctctcatagccaccgcggcacatcgttaagctttagcgtgcttcttaaaatctctggagctgcgatcagcccacaaaagaggtcactaaatttgtattccaaatatcattatcaccctctctcatagccaccacggcacatcgttaagctttagcgtgcttcttatattctctggagctgcgatcagcccacaaaagaggtcactaaatttgtcttccaaatataattatcaccctctctcatagccaccgcggctcatcgttaaactttagcgtgcttcttaaattctctggagctgcgatcagcccacaaaagaggtcactaaatttgtattccaaatataattatcaccctctctcatagccaccgcggcacatcgttaagctttagcgtgcttcttaaaatctctggagctgcgatcagcccacaaaagaggtcactaaatttgtcttccaatatcattatcaccctctctcatagccaccgcggcacatcgttaagctttagcgtgcttcttaaattctctggagctgcgatcagcccacaaaagaggtcactaaatttgtattcaaatataattatcaccctctctcatagccaccgcggcacatcg

SEQ ID NO: 29980 - DNA, 1683 bp, Heterodera glycines
  unsure (1)..(1683): unsure at all n locations
acccgccggcttttccatctgctttctaatcgaatttccncaagtntaatattgaggtaaaattttaaataattgaaaattaaaataaacaatgtaaaattaatggctattttattttcctttattacataatataattttttcatcgccacctgttgcggttgctgttgcggttgaccaactgcgacggcatttgtgccattcggcggctgcgcggaccgaaccttttgcgcagtttcgttcaatttccaacggccaactttgagcaccacgcgaccagtgcaagtctaacagaaaaacaaacaaacttttcaatttgaatgggatgtttgacaccttcaaaagggtggccacgtcctcctgcaaacagttggccacgttttggccattcacttccaaaatctgaaaaactccatttaaacaaatcccaaaattattttcctaatgatcctaatttagcaattatatttggaattttccgtagatttccctcctcccgccctgcgaatttttcataatttcctgcccctccgccctccgaatttttcataatcctcccgccttcttccgctgccagttcgtcttttgcgatcagtcttgatcttccaaatatatatttcttttcctccctcctgatcagttctaacctctcccgctgtgcctgatcagcttcgtccctgtgacccaatcaccctactcccgttccacagttctcctctctgattagcgtccccttgatcagtcgcttttttcttctctccctccccaactccgatcagcttcttctccccttcatcctttctgatcatttcctccctctctgatcaacgatcagcctcccttttttcacctgatcgccctgcatcagtcgtccgtcgttgtccgccacgccgcccttcacaatttcggaaatgtaaacgcccggctcatttttgcgcccgacgatggaaacgccgaggcctttgccactttttttggtcaattcgatggccaaaatgttgtaaatttgggccgggtccaacatgctcatctgcagattgacgtctgaaaagctgtattatctcacaaaaaggaattctttattttaaaaaatgtttgctttatttaaattaaagtttcaaaaaaaaattaaaagaaaaataaatcgaaataattaattatttaaatggaaattaatttttcaatttgccttgcctctgtaaatgagcagtcgcactttggcgggcgttcggcgcagcagtgaaatggcctgttcgtgggccgtgccgcgaagtgaagtgccattgacctgtacaaaaaattcacaacttttttcaatttttaaaatacttaaacttacaaaatatttttagcttaaatttcaaaatttaaacacttttggcgcccacctccaacacttggtcgccgggcttcagacgcgcgtcgattgcggccgccccgtccgggtacacctcgtggatcacaaccgtgccaagcacctgaaacaaagtgccatcagtgtcatcatcattcttggcacaatttttaaatagataaaagtaataaataatttttattcttttttcacctaaaaattttattctttttcatcatacattaaaaaaggggggggggggggtcggtaaaaatttctgcgaagggggataggccgccgatgaccctttttttttttgcttttcaaaa

SEQ ID NO: 29981 - DNA, 1087 bp, Heterodera glycines
aaaaaaaatcgtttttttcaagtgtccgtttggggttctcaaacaattaaggggagcaaaaatccaacgcagaattaaagtacaggctatagggaagctattcccgaaggattcggtctccccataaatctgggcgcatcggttcggggggactgccccgaaaacaaaaaaatcgattttttcaagtgtccgtttggggtactcaaacaattatggggagcaaaaatccaacgcagaattaaagtacaggctatagggaagctattcccgaaggattcggtctccccataaatctgggcgcatcggttcggggggactgccccgaaaacaaaaataaatcgattttttcaagtgtccgtttggggtactcaaacaattatggggagcaaaaatccaacgcagaattaaagtacaggctatagtgaagctattccggaaggattcggtctccccataaatctgggcgcatcggttcagggggactgccccgaaaacccaaaaaaaaattttttggataaaaattatttaaatgaactgactagataatatttaaaataggttatttctcttcctttcagtatccctgcaaagtttggtgcgcttctgatcagtttctgaaaaaaaagttaagcctaaactttttggcctgtttaaaaaggaattaaaaatttttaaaaattttattcatctccctttttgatagaaaaagcatcagagtgcctaaactaacatgtaaataaaatttggtgcgtttcagaaccctttctgaaaaaatatttaagaattaattttgcaaaaaataaataaaaacgaaagactcagattttcgaaaatttttttgagccagctagctcggcgctcatttcagtgtaagttagtcctttaacccgggagtatccctgcaaagtttggtacgcttctgctcaatttagcaaaaaaatatggagtgatcgaaattttcactaaaaaaagttaaagcctacatttttttggcatatttaaaaagcaattaaaaaatttttaaaatttaataattttcctgcaccgaaggtactcactcggcctcttcgcggcctcgtgggggcct

SEQ ID NO: 29982 - DNA, 932 bp, Heterodera glycines
ctagccaattccgtctcagcaaagttcaaaaatctatctcccaccttacgcaaattttctaaaaaattttgctaaacttttcaaaaaatccactattacttgaagaaaatctgctaaaaatggctcaaaatcgcaaaattggtaattttttggacagaattcgttaacaaatcgcattaaaaaaagcaaattttttgaaattttatgcaattttcgtaacaaatggcattaaaattttcaaaaattttccctggggctcctaacggcaccatcggacccccattttatcatatttttgaaaaatggagaccaaaatggcaaaaaatagtaattttttggtgaaaaacggctaaaaaattttagatttctcggttctcgattcccgagtcgagaaatttctcgggttttttggggtctcggttctcgtatcgtttcccggggtcatttctcggttctcgtatcgtttctcggggtcatttcccggtctcggttctcggtaaaaatcatttctcgcacatccctacccaccccctccctctcatttcttaaaaaggcaaggagagtcactaaaatcataaatacaatttaaattatcttgtaaaaggcaaaacagaatttagaaaacaaagatttcttctctttcttcgccatctctttttccttcttccatttcttctcttatttctttttcttttctttcttcctccgtttctctttttccttcttccatttccatttctcttccttttccttttccttctcctccctctctttttccttcttccatttccttttctcttttttctttttccatttcatctttttcattttctttttctccgttttctcctctgggttttcctctctgtccctccactttttcccgcctctcttctgccatttttcgtgcgctttcgctacaaaaattctca

SEQ ID NO: 29983 - DNA, 879 bp, Heterodera glycines
tattagtgttttattctcgctccaacagaagccaaaagttggtgtccaattcccggtagggatttaatcgtgactttcagagataccctttttttgtcaataactatttttcgtgcgttttcaaacacactattagtgctttattcagcgctacaacagaagacaaaagttggtgtccaattcccggtagggatttaatcgtgactttcagagatagccattttttgtcaataactatttttcgtgcgttttcaaacacactattagtgctttattcagcgctacaacaaaagacaaaagttgatgtccaattcccggtagggatttaatagtgactttcagagatagccattttttgtcaagaactatttttcgtgcgttttcaaacacactattagtgctttattcacgctacaacagaagacaaaagttggtgaccaattcacggtagggatttaatcgtgactttcagagatagcaattttttgtcaataactatttttgtgcgttttcaaacacactattagtgctttattcagcgctacaacagaagacaaaagttggtgtccaattcccggtagggatttaatcgtgactttcagagatagccattttttgtcaataactatttttcgtgcgttttcaaacacactattagtgctttattcagcgctacaacagaagacaaaagttggtgtccaattcccggtagggatttaatcgtgactttcagagatagccattttttgtcaataactatttttcgtgcgttttcaaacacactattagtgctttattcagcgctacaacaaaagacaaaagttgatgtccaattcccggtagggatttaatagtgactttcagagatagccatttttt

SEQ ID NO: 29984 - DNA, 1010 bp, Heterodera glycines
tagtgcttagtgatggactagcgagtgatgtccgtaggaataaaagccaaggcgtggctgcgtcctgtccactatttccctagtgcttagtgatggactagcgagtgatgtccgtaggaataaaagccaaggcgtggctgcgtcatgtccaactattccctagtgcttagtgatggactagcgagtgatgtccgtaggaataaaagccaaggcgtggctgcgtcatgtccaactattccctagtgcttagtgatggactagcgagtggtgtccgtaggaataaaagccaaggcgtagctgcgtcccgtccaactattccctagtgcttagtgatggactagcgagtgatgtccgtaggaataaaagccaaggcgtggctgcgtcatgtccaactattccctagtgcttagtgatggactagcgagtgatgtccgtaggaataaaagccaaggcgtggctgcgtcctgtccaactattccctagtgcttagtgatggactagcgagtgatgtccgtaggaataaaagccaaggcgtggctgcgtcatgtccaactattccctagtgcttagtgatggactagcgagtgatgtccgtaggaataaaagccaaggcgtggctgcgtcatgtccaactattccctagtgcttagtgatggactagcgagtggtgtccgtaggaataaaagccaaggcgtggctgcgtcatgtccaactattccctagtgcttagtgatggactagcgagtggtgtccgtaggaataaaagccaaggcgtggctgcgtcatgtccaactattccctagtgcttagtgatggactagcgagtgatgtccgtaggaataaaagccaaggcgtggctgcgtcatgtccaactattccctagtgcttagtgatggactagcgagtgatgtccgtaggaataaaagccaaggcgtggctgcgtcatgtccaactattccctagtgcttagtgatggactagcgagtgatgtccgtaggaataaagccaag

SEQ ID NO: 29985 - DNA, 1496 bp, Heterodera glycines
tatttttttaatttcaacaaaacacaaacatgattcaaaataattccattattatcgataatatgttgccatttttcaggcaaaagatcaattccaatggaaaagtatttaaggaattagagttgataaagtaaaaatggtcattttcgcgataggtatttttgatgactgaatccaccaaaatgaaaatagatacagagtcagagaaaatgtcagtatagagcaaagttaggaccataaaatatatcagggaaaaaattttaatacctaataaatgaattattggagagccgagtctgaaagtggtctccaaaaacgacattatccgagaccatcaaataaaattgttttaaaagtgaaattctgaatttaattaagctgagaaaaagatcgaaggccgacaaaacttttgttacaccctaagtaattcatttttattttaaaaaatttgcaaatggtaatattttgttcggatgttaagccatcaattggtgggcgaagttgagacgaatgtgaaggcattgaccgaagagaagcaatggcgcatcgaattggtggacgaaaagaagcgactgaggacgaacgacgtgtacaagacggaggggcacctgcacttcatccacgttcagatcaaagggaatgaatgaatgactcaagcaattaacacgctaattagcgaatgctcatttatttggtgggaatacggctgccgaatgattttcgatgattactttacatttgcttataaagtgatttgtatcatccgacgatcattaagcccctaatcactacgaacaaaatcttcactcattttctcatttcattcttccttttgagttgaccgtccgtccgcctctccgttcacttcttttgttgcacgtccataatcacgtcgtaattttcgttgtcgtacaattccaacgcaatggtcatcgcatccttgctttggcagttctaaattgccgaatttccactaatgacccaattagctaattgttcggtgagctcaccatttgtcaataattacctgccaatacccccatttgtcactaattgcctatcttatcctatacccccatttgtcaccttatccaatgtcccgatccgtcactaattgcccaccttgtccaagtcccatttgtgcgccgtctttggcgacatgcacagccacatgtccttgtccgtcttgtagaccagcacgttcatgttgaactttttcgccgccgctatcagctcgaccgtgcccccggctttgcccgcctttattttctccgcctgtctgcgcacacttcgcacttcgtattcgtccatccacggctgcgcctgctttttgtcccattgtccgaagaaactctcaaagtattcgagcacaaccatccgagtcgccttgtgaagcatttcggtgcccgtcagtgcataagccaacgctctttaaattgaaataattagcacttttggcatcaaatggttgggccgccgacctgtacaattgtcgc

SEQ ID NO: 29986 - DNA, 1745 bp, Heterodera glycines
  unsure (1)..(1745): unsure at all n locations
tctaattggaggaatatcttttctattctttaagttctcacgagggaagngtannggtgtnnggnggggggtgggggccctaaaattggagaaaaatgaaaaaaaaaagatttgaaaattagagaggaattatttgatttttttgttgatgttttaaatttgaaaaaaaagtgtgtaggaataaaagatgaattaataattttttatgtgtattaaatgttgaaggtttttgagtgtatgtaataattaaataaatatttntgtgatttatttatgtatatgtttagattgaggatgttatagagtaggtgattaatggtggtggaagtgggaaggtgggtgaaggtggtggatattgtgatggtacgaaatgggtgattgagaggtgtgtagttgaagagggtgttaaagatgaatttgtgtggtgagtggtggatgtggtaagacgagagttggtaatgtatgatacgagtcacgagcactacgggaacagacacgccagcgcacattttcgaaccgcgatttggcaacggttgtgcaaagagttggactacccaaggtgaaaagagtgttttatggaagcggggaaatggataaaaatgaaaggaatttaaacggagggactgaaatggtcgaaaaaagtggtccaaagcgacggaaggggtcaaatgcgtcccaaggaatttttaaagggcattcttttttctcatatggccaaattttacaattttggcagcatttgaaagagcctacacatttaaaagctgttgaaaagttatttttctaagcgaaaagctactacatgaatgctgcaaaagtcaggattattgcatatttttatttatacttttttacatatcggcgagtttttctgattttttgaaatcaaatagagattgctaaaggcttttgaatgatgctaaatatgtaaaatttggtattctgtggagcaagttgcgacctattaaacttgtctgggatgttgttggcaggttccgaaaaacgattggaagggaatttgggtgcaaaaatgtgacggaattgggggactaaaaacagtgccattttcagatgatccgcaggcactgcaaaagcaatggaaaagcattagggacaaatacatcaaagagaagaagcggagaaaagggggcacaacaacaatgatggtaagcatttgagaggtttttaaattttgtagaaattttactgacattttcaggaccattccgaatcgacgacaaatggcacacgaaatttcaacggtaaaatggacaaaaaatattcttaattgccgcaattggttgattttcctgccatttttcaagagaccaaaacactgacaactttcaaaaattggccaatcccctccaattacattgtttttcaatttattattttttttagtgctgggttggctggacgattacatcggcgacagcgcaaacggttggccaaaatgttcactttttgttaaaattttcaaaaaaatacattcggcagaaacaatgccaaaaaatcatttaaaaatttgcccgattccacaccctacatttaattaattgaccaattaattaactattgattaattgattttccagcggtgtcctcgcgtctgtttcactctgtgccgagcaccagcggagagtcgtcgtcggcatttttgctgacgaaatcagaactcaacaacagcacactgctcaacggcggcggtgggtcgctggtgctcaaagagatggcggcggccg

SEQ ID NO: 29987 - DNA, 875 bp, Heterodera glycines
ccgggtaaatttagtccggccggtttagtcgggcctttttagtccggccggtttagttcggcccgttttagtacgaggggtcgggttaagtacgagggtcagtttaattccggcaagctgtttttttcaaaaatagatttaatgatttttccgaaaaaaattttaaaattaataacataacatatttatcaatgtgtaacaacaacaaaaaaaatagcaagcatgaaaaattacgggcgcatttcataattgcgagaaacaccaacgagcaaatgattgatgttatcgggattaacattgacattggcatggtaattgtggtcattttggcaacattgtacggacagcagcaaccatggcctgctcgaagtccaacgatatggtttcaggtgcaaaattcggccatttttggacaattagctgaagcatccgtgtgtaaatcatttcacattttgaagtgagaaggcagtacgcaattggaaaaacctatttatcacgtctaaaaagacaccaacaaaaaacgtgaaaacataggcttttactttgcgagaatagatattataagtttttccttctttataattgacaaaaaaaacatttgtaacagttatggacaaaaacagcttgccgtactaaaccgaccctcgtactaaaccggccgtactaaaccgaccctcgtactaaaacggccgtactaaaccggccgtactaaaccggccgtactaaaccgaccccgaccgaataataaagcatttttttaaatttgcgagaatagatattataagtttttccttctttataattgacaaaaaaaacatttgtaacagttatggacaaaaacagcttgccgtactaaaccgaccctcgtactaaac

SEQ ID NO: 29988 - DNA, 735 bp, Heterodera glycines
aaaacaaaaaaatagattttttcaagtgccccgtttggggtactcaaacaatatggggagcaaaaatccaacgcagaattaaagtacagcatatagggaagctattccggaaggactcggtctccccatcaatctgggcggcatcggctcggggggactgccccgaaaacaaaaaaatcgattttttcaagtgtccgtttggggtactcaaacaattatggggagcaaaaatccaacgcagaattaaagtacaggctatagggaagctattccggaaggattcggtctccccataaatctgggcgcatcggttcggggggactgccccgaaaacaaaaaaatcgattttttcaagtgtccgtttggggtactcaaacatttatggggagcaaaaatccaacgcagaattaaagtacaggctatagggaagctattcccgaaggattcggtctccccataaatctgggcgcatcggttcggggggactgccccgaaaacaaaaaaatcgattttttcaagtgtccgtttggggtactcaaacaattatggggagcaaaaatccaacgcagaattaaagtacaggctatagggaagctattcccgaaggattcggtctccccataaatctgggcgcatcggttcggggggactgccccgaaaacaaaaaaatcgattttttcaagtgtccgtttggggtactcaaacatttatggggagcaaaaatccaacgcagaa

SEQ ID NO: 29989 - DNA, 760 bp, Heterodera glycines
acatttgggaaggcacgtccgggaaaagggacagtgggaagcaaacagctgattttgcctttggcaaagtcggctctcgcctccctcgctcctcacaaaagttttgtcgcctccttggccgcgacaaaattggagccccgtaggggtcagttgttccttgccgaaaggacctgacctccatcaatcggccgtagccgccgatcaaaaagtcttcgcccgccaaggggtgaagaacatcggctacagtcgccgatttactttctccctaccgaaagggaggaaggctcattcggccatcagcagccgactcttcgtcctgcccaaccagtggcaagacactcggccatcagcagccgattcatttagcctaacccaacaaagggaaggctcactcggccatcgtcgccgacttatttagccgaacccatcaaagggtaggcacattcggccaccagtcgccgacttcttcgtcttgcccaaccagtggcaagactcattcgactatcatataaattatagaaacaaaaataatatttagaaaattttatttaaaacgcattttaaaagatcgaaaaaatcaataattaactcaatatgaataaaaatacatactttcactttaattcatgaaaaatagtgtcaaaaagtgcgaacatgcctgcagtttatgataaattttcgcctaaaaataaataaatgaacttatctaaatttaagtaattaaaaaaagcaaataaaagttaacactgaaacggataca

SEQ ID NO: 29990 - DNA, 1369 bp, Heterodera glycines
cccaaattttaattcataaatgagttaaaaggagacgtgtttccattgccacagttctcgcttcttccgttcgatccacaacctgcttgaagcaaggttgacacacttctggtttgtgaaggcaaaattttaaaaatttgcataaagaatacgttaatcttctttattaattgctttcggacaaaccaaaaccacaattcttccatccattttcgcgcctttgtggtggtggctacgactcatatcagttggcaaaatgctcagaatgctaagtctccgaattgaactgtcgctcattgggcataataatggctttcggcctaaacaaaaagcagcttcaattaaaagaaggcaaaacctcgtctaagaataattggtaacgtccccctacttatccactgtttttttaaatataattaaactaattttaaattattttaaacacaaattatcgtgtttagtttaaacttttccagcttcaaacccggtcccgttttcaaaaaactcaaatcctgataacgatttttcaaccccggcgtcgtgtcccaatccctttttctggtcccgtttttcctcgagagtttgatcccatgtaactctctaaaaatcgtcaacggatggggcgccgttcgctcttaatttttttgctgaacaaataaacgaatgaatgctttaatattcccaaatgataatccgctggaattgaaattcttcctcaaaatttactgcatttttaattcggaaaatatttgttttgtatttgcataaattttcaatttttcagcgattgtccttttaaattgaatatttataaggacaaatgagaaccaaaatgttcaaagaaaaaaaattattaatttgataacgttcagaaaaataaattgctttttttgcaagaattttccttttttcatttattttgtttcacattataattaatgactttttgcaatgatagaagtaaactaatttctctctccaccgatatttcaaacaataaaaataaatttttattcctcctcattaaaacacttcaaaattatataaatattagcgacatgaccattaagcacaattgtactaattaactttaaatgtttgcccatttgccacttttattggccttttggtcaatttttgcctctgcccaattgcctgtgttgcccattgtcactgatttgttgcccgttgaactgttgacaaatttaactaataatggcgaatgtgcactctcgaatgagtgcaccgggggctgtgccaatgcgtcgacaattcgtccgccattaattctcggtgaatttaaaagtttggcaatggcataccaatacttttattagacattaatttttggcaaatgtttgactctaga

SEQ ID NO: 29991 - DNA, 1413 bp, Heterodera glycines
acccaattcgtactaggcaaactcgtactgccccaacttgtactgtttttcgacaaaaaaaatcgtcataactttgttaaggtcaaccaaattaaacattttctttgtatcattcaatagcccttaaaattctctctctatccacaaagttgcaaaaaatttgatcaattttgaaaaaagttatggacgaaacaaaatttaattttttttacgatttttggtcataacttttttgaaaagcaataaagtttttttttttttgcaagtaaatgcaaaactttaagggctatcgaatgatagatatcaagaatgtttaatttggttgactttgtcaagagttatgacgattttttgtcgaaaaacagtacgagttgggtgtccgtccatccgtccgtccgtcccccccccccgggggccgtagtaaaagaagatggttatttgaccaggtcattattatttaaccatggtatttaacccggtcaaataaccaccaaccatgagaaaaacggtagcaaaagaagatggtaaattttcagctggagcaaccaaccagcaaccacctttttttaaccgccaaccatcttcttttactttatcaccaactacgctaccatgaacttagtaaaatttgcactgatttttttaataaatgggcaaaataatgtttaaagtacctagaaaattggtagaataaataaaaataataattattattatttacggattaattttttgtaaatttttttattattatttaagatatttcggcatttaattcgattaaaactttacattggttttttttggcagatttttaaaggttggtggttacgactgctaccatgggtagggagggaggggcaggacaggcgctttaccatggttacatggggttaggtaaccagtaaccaccttcttttgctgtgcgttcacgaaccacccaccaaccaagggcgtagccatttttaggggtgtatttttggttttttgaaatccctatttatggggtgtattttacaaaatttttcgccgtttttcgccaaaaattaatatttttttgccattttgtcctccatttttctatggtaaaatagggaggggtccggcagtgccgacaggcgccgccgggaaaatttttgagtattttaatgcaattttgttaagaaaattgcttaaaatttcaaaaaaatttctgagaattttttactttttgggtttcgggggggctttagccccctcatcagaggttatttaaccataaccaccttcttttacaacggctcccggacgggatcggaaaattgaggtcgttatttaaaaaatcatcattatgtgcgcggccgttaaaatacaaagccctcaaaaatcaaacaaattttgcttgataactttattagaaaagctaccaaactt

SEQ ID NO: 29992 - DNA, 1134 bp, Heterodera glycines
aacccttaattttgaaacatttatttccgattggctcaccccctgtctctcacctttcgtggtgcaattgctccgtccccctgaccaaaaccgcggtgtttttgtccgttttgtgctgacgattcacctaaacttacaattaacatgcttctcgcgttattcctttttttctgacccctgcgaaatatttcttcgtcgtttccacgtcgtcgccgcgcttttttgccgcattaacctattttttaaaaaatcgaattgtaatgcgtgtgaaataggtcggttttcctcatttttcattcattccaaacacctttatcgagagcatttttcttaatcctaaaacaaaattactcacagccgcgtccgacttaagtacacgctggggcgcttggtgcttcctcagaattgtcaccgtatttgggtccgtgtccgattccattcggcccatcttcgacattttgggcgagtcacacaatataactgtcgcttgttagctaattgaaagacaataaactttgatttaaaaaattgcaaagaaaaattattgttcgaaaacaaatattgtaacttgtcaggaagaaatagcttcagaaatatttatttgataattggaaaatgaatcaatgtgctgagattgaacggccccgctcttccctccaatttcttccgacttcgttagagactgtcgacccgcgacgccaacggaccgcagatttgcggagaattaattttggcggatggaaaagatgcaattgttttatctgggagacgaccttttgacttatgcgcacgacgtggtcacctgacaacggaaaaggaaaacgcatgttttttatattcattcgtcggcatttctcacctcgccaatatttaatcagttgcaacgatttgaatgtctcaatgatgtcatccgtgtgaatgccggagaggcgcgagagttcggctaccgaaatgttggactccacctgctctcggtcgagcaccccgatgagcacccaccaccagtaggaacggtagctgactttgcccaagtcggacaacggcttctcaggagtgccgaccacaccttcgcgttccgacagacaataacctggcgaaaattttaaaactaaaggttagtttttacattaaacg

SEQ ID NO: 29993 - DNA, 1168 bp, Heterodera glycines
cgttgaagcgggaggtgcgaagccatagcaaactgtatttttaaattctggccgcaattctaccaaaaacgtgtttagaccgcagtaactcggctcagagtgaagattaagggacgcaaaagagacgatttaaaagcgattcgaaaattctatcgactgatataataacgatgcagtcgcggcgttgacaactgagatggaaccaaaagttccataatatctttccataaggctggaaaggcagaatttgaatggccagtcgatatttacactgagcacccgttgaagcgggtgatgcgaagccatagcaaactgtatttttaaattctggccgcaattctaccaaaaacgtgtttagaccgcagtaactcggctcagagtgaagattaagggacgcaaaagagacgatttaaaagcgattcgaaaattctatcgactgatataataacgatgcagtcgcggcgttgacaactgagatggaaccaaaagttccataatatctttccataaggctggaaaggcagaatttgaatggccagtcgatatttacactgagcacccgttgaagcgggtgatgcgaagccatagcaaactgtatttttaaattctggccgcaattctaccaaaaacgtgtttagaccgcagtaactcggctcagagtgaagattaagggacgcaaaagagacgatttaaaagcgattcgaaaattctatcgactgatataataacgatgcagtcgcggcgttgacaactgagatggaaccaaaagttccataatatctttccataaggctggaaaggcagaatttgaatggccagtctatatttacactgagcacccgttgaagcgggtgatgcgaagccatagcaaactgtatttttaaattctggccgcaattctaccaaaaacgtgtttagaccgcagtaactcggctcagagtgaagattaagggacgcaaaagagacgatttaaaagcgattcgaaaattctatcgactgatataataacgatgcagtcgcggcgttgacaactgagatggaaccaaaagttccataatatctttccataaggctggaaaggcagaatttgaatggccagtcgatatttacactgagcacccgtttgaagcggggtgatgcgaagccatagcaaaactgtattttttaa

SEQ ID NO: 29994 - DNA, 748 bp, Heterodera glycines
cctccctctctttcacctccaataacaaattccaacggcgaatgatttgtgtgcgctgtttgtcctcgaaaagctaaagcgattaaatgagcttaaatcgcccgcttcttttacactcatcctcccaatttcctcttccattcttccttcctttctcttcctttctcttctttccctttcttctcttcccctccctccctcccccccctctctctctctttctctctctctctctctcttttctctctctcctggtcctctttatctcaactattctttcttcatcggcctcccacttccatcctatattttccacttccttcctctcttactattttttcatcttcaacaagctgatgtttctcccctacttttcttccacttccctctctcctcttccctcctctctctctcttttatcatatctctcttccactacttctttcttctctatgtgccttcttcctctcccttttcattctttccttagtctgctctccttttcctttctttgcttccccttttctcttcatttttgtaacttcctcttttttttcttccattttccgtttcctattcccttcctccccctcctcttcaattcctttcttccgcattttcctttttcttccaatttcttcccttcctttgttcgtccattccgcttccctacgcccattaacaccttttcctcccgctcctcttccattttcttctccttcaaaaactgttgtggtcacaaaccgct

SEQ ID NO: 29995 - DNA, 1477 bp, Heterodera glycines
cgctaattgacaattatcctccaggcacaggcttttttattctgttttttcgtttttttcttttgcatattttttctgtatcctcttcttccaacaaattttcctttttttcaacaaaatttattttaattcctccatttttttcgtcatctcttcaaaatttttatttgaatcattaaaatgactcatcaaatattgtcttccattctttgtacatatatgtttttaatttattcccataatacttccaaattatcagttgagaattatttggctaactctcgtccaaaagtggtcaatgcggcgcagtccgtttgtcttggcattttgtcattttttgaaccccgaatttttaatgtaaaagaaaaagaagatcttccgtcaattggaccaaaatatcaaattccttaaatttcaatttgcaaaaaatgaatttttcgtaaataaatcacactgctttttcattcacacaaatttcacagtttggcgcaaatgctcggtaagaaaaatttatttaattggccgtttaaatgctttaatgggatgtataaacaaaaaatatactgtaacatacagccagtatactgttgatgataattatgaagatgaagatgaaaacgattgagttaagttgaatcaaatttctcttttataaattttaaattggtgacgaattctttttctcattgcttttgcccataattattttaagcatttgagcacttgataaataaatgtcttcaaatgtcaatctgaaagtgaagggttcgataatgaattttaaattttctgaatttactaaaagataaataataattaattttaggagttaaataataaataatctaaatgaatttgaaatttctgaattgattgaaaaattaaattaaaagataaaaataaagaaattaattaataaagaacttaaattttataaatacactactaactaatatattgtgttgtttaggattgtacttcacccggaatttgttgttaacataaaataagccaaaaaatgattgcaagttgcgtcactttgaataaattgatatggaaaaattttaaaatttcaaataaaatttatttacacatttacttcaactttttttttgtcggtattctgtgctaacaaaatttgtaggcagacagaagagtgttcgttcagctgtaatcccatgatgccaagaaaattttgaaattttttaatatttccattgtaaccgaagaatatctttgtcatatacgctctttctgtcttgacttttttggttccatccggattgtctgattttccagctttttctgatttatcttctttttaattcctaataaattcttctaaatctctattcaaaaaattcattttattgaaaatgttaaataaatttgtttcaatgaaataataaaaaggattcggcatttaaaaataaacattgaattctcattgaattctaaaaggattactcagataata

SEQ ID NO: 29996 - DNA, 554 bp, Heterodera glycines
attttcatataaaattcattaaaaattacgaaaaactttccgacggcgcaaaccggcaccgccggcccccctaaaccatggtgccgatcggtaatttttcaaaatatgaacaccaaggccgaaaaataagattttagggtcaaaataataacatttagcaacattttttcaaatcagtaaatttttacaatttatttcatcaaaatgctatcaaattttatatttttagtctcccattatcaaataaggacaaacgaggttaaaactaagattttggtcccaaaaataagactaaaaaaacggctttttacattgtaaaaacataaatgaaaattttcaaaaccagcatttagccaacaagaatcatcatttggggtcaaaatcagcactttggaaattttagtcaaaatgaaaaaaacatgcttttttgtgatgcgctttttccaaaaaaacaggggccggcggtgccgataggcgccgccgggagaattttttgaaaatttggagtttttggtagcattttttacataaaaatggccattttaaagtttttt

SEQ ID NO: 29997 - DNA, 1082 bp, Heterodera glycines
acattctcgtcccggacatttgcggccccagccaaatctgacatttgcggcgcgacttttgcgtcccggacatttgcggcccaattttttgttgaattttgcggcccaagccaaaatcggacatttgcggcttcccccaaattcatcagcatcatttttcactatttataataacaattaacaaaaattttttattttccaatgttttctcaatgcttaacgagcttacagtttaattttccgccaattttttctaatttaatgacaaattctaagaattaaaaaaaaatcgctgaaaattttttgaaaatttttttctcagaattttcaatgaaaatttttctaggattttttcttgaaaaatttctaaatttgaaaaaaaaaattttttttatttattcccggctgtgttttggggtgcaccgtcagcgatcataaaaaccggctatataataatgaagagctgtttctattctgaatatatacccctattttcattgcacagattaccatcgaaggtgacccagttccgggccatgttggtgtgccggttccatgctgtgccgtcaagttgattgatgtgcccgaactcaactattttgccaaggatggtgcgggcgaagtgtgcatcaaggggcccaacgtatttcgtggctactacaaaatggctgaacaaacggcggaaacgctggacatcgacgggtggctgcacacgggtgacattggacgatggacagaacagggaacgctcaaaattgtggaccgcaagaagcacatcttcaagttagcccaggtgagatctaacacagggaggaaaatagggggacggccttcgaagaatccctccctccctcccgaggccccccgcacccgaaattttttaaggaaaaaagtttttccttgctggtaccaccccaccccccagacagtctcacccaaattttccaaaaaaatcgctaaatttttcaaaaagcccatcattttttgatgaaaatctgctaaaaatggctcaaaatcgcaaaatgtggtcatttttttgacgaaatctgttaaaacccgcattaaaaaatgcaaaaaatttc

SEQ ID NO: 29998 - DNA, 1441 bp, Heterodera glycines
gcagcatcgcctccccctccgccaacttccgccgttcttccgccccgttcatcttccgtgccgtcccttccgtttgtcctcctcgctcttcctcctgctcgctccacattgtttgagtcgtgttcaattccaaaaatggcgtctcctcctcaaaagtaccgccattgtctaccatcctttgctgtacatgtacagctccaactcgtccttctcctctcccattttccacttgtttcaatccaatcattggctctgtccgttcctccaccaccgaccgttgccaaaccgttgtctccaccgttgaagtcgatgcctgcacttcgttgacgatgctcaccgttttggacgcattttcctccggcaaaggcatcgccactggctgctttggcatttggttgtccggcacaatcaacacaattcgttgctgctgcttttgtgctgttccttcagtaacatccagcagaacttcggcgctttcttccttctccttcaccaattcaatgccaactccgatttctctttcttcctcttcctcctcccctctctctctctccgtttctcgtccatccctctgctcctcctccatccccagtctcttccatctctcttccaccttttcgtccgttatctctctattccatctccgtttctcttccttcccctctccgtcctccaccctctctgtttctcgtccatccctctgctcttcctccattcccactctcttccaccgctcttccttctccctttctctcccactctcttcctcatccatgggctcttcctcctcctcaatcgtctcaatttcggcattcggtgcccctttgtacagcttcgtcagcatcacttcctcctccacttccacatcgatgtccggtatttcctcctcctcctcctcttcctccgcatcttccaggatgaatgtgctttccaccatctgcagggattcgtcgattgacagttggtgttcctcctctccttcatcctcttgtcggcgttgtataatgccatttatcttcggaattccgtccaatgaaacggtggtaatgatcggaatattgcgcagcacagtgccatcattagcataattaatgccaaattggccaatatcaccaaaggattgagccatttttaaagcgtgggacggctgaatcgaagagacaaaaagtcatttaagagctttggatggattttatcaaatcaattagatgacggggtcgacgaaactcggaaaagtgatcagccaacagggccaattgagcgaatttaggggaggaaccgaaaaaggaagaaggatcgttcgaatttgtataagcacaatggcttttcaaatggaattagagaccaccaccacctgcgaaatggccaagtggtggtctatggttctcagagatcggctggtcgaatgtcgccgaagggaatgggcagaaaataaaacgga

SEQ ID NO: 29999 - DNA, 1170 bp, Heterodera glycines
  unsure (1)..(1170): unsure at all n locations
tcaaaagaaaagtgcaacaaaaatggaacaaagatcatttcnaggattacatgttgaatgtggttgagggtcagactgaagaagagccaacctatgaaattaaacaggtaaaatcccatatattttattatttaaaacatttttaaattcagttggaagtgaattgtggctcagttgccggcacaagtttggaccgacgcgcggcacagctgaaccatgtgatgctgaagaaggtcggatttcatgcggcaccagaagatttgccagagaattggcccgacagagcgcaaattgagtcaataaaaatggcatggtgagaggaagcatgaagaatagttaattatataaaataattagctaatttgacataaagagcgaatttttgggattatgacagtatctctcattcagggaagcatacgataaccctgacgcgattgtgctgcttacgatgtcgccgggttcgcagaccgcgttcgatgcgcgcttttttgagactgagttggaccgactctctgatgggcgcatcaaaatggtgcgcagttccatgggcgattgtgcgaggaggtggggaatgcaattaaaatatattgctaattaattaaaatggctaattgccaaagactatggatcccgcaatgggtcagcaaatttggtttttgtgcggcacccggccagagacccgcaatatgttttttttaaattgcagaaaagagatacctaatgccaaattttcaattacaataaattttccccggcgagcgagctgttggaagtgcctgactttttgaatttccaaatccacgcgggattccgaaaatttaaatgcaaaatttgcggaattttatttaaatttgctggattttgcagaattattcccgcaaaaccggtatgaaaaccaaattgagttccaatcccgtatccggatctgcaaatctaaagttcccgtctctacaaaagatgtaagctggatgagaatttcgtactgagtttggacgggcgtgaggtggcggtggtttactcgcgctattcggtgctcggcaaagtcaacgaccgggagataatgtcgataatattgaacgcccgctttacgatcgaacgctcacgcgccatcgtaaaataattaaaaatatattgtttatttaaagttaattaaaacagattccagct

SEQ ID NO: 30000 - DNA, 908 bp, Heterodera glycines
tggccgcctttcgctcaacggcactttcagactgtctcacctggatctcacgtcgttgtacaaaaagccgcttgcggcggaataaccaagcagctgaacaagcgaggaatgagtaataggccaaattaattactcgcctcgggccaaatgtccacgccgtctttaattgtctgatgttcggcatgctgttcagcggaagacgccgactgatcagtgttctgaatcggaccaaagggcttttaattaaataaataattaattgcaacgattgactctttttcctccgatcgccccgccaataattaattaattaattaaaaggcatagaacatttaatcgaccggtgcttctgatctgttaattacctcctgctcctcttgttgctgttctcgctttgcaattgcttcgaaggtgggaaacaaatcgagcgaggaaatcacttcgttggacaccacgccttggcgcactgtgccgggcatccaagtggcgaatggaatgcgaaaaccgccctcgtaggagttggacttgccacctgaatttgatcggaactcattagcaaaagcaaaatgccaatggaacctttaagtccggcggtggaaccgccgttgttgcacaattcctggtgagggccgtggtcggacatgaacatgaccaacgtgttccggtccaacccgtacttgcgcaggtcggcgatgatctgaccgactgaccacgccatttcgttgagattgtcgccgaaaaggcctgaaaatggcacaaaataatataatttaggccaatttcgcttcgaaatgcccacccctttcggattttcctttgaaattttcgttggcgaattgcgtggaatggacgtgggggtaggaaaagtaaaagaagaaaggctttgagggacgacgcaaagcgacgcc

SEQ ID NO: 30001 - DNA, 793 bp, Heterodera glycines
  unsure (1)..(793): unsure at all n locations
ttccacgtgcatcgtaaaataatttcgcccccatttttgtatttcaatgcgacttttttgtcccggcattcgtcttcaccgactgccccccggcattctttgtccacaaagtccaatttgctgcttttgtcttctcccccactcccatcggcgctgccatcggacgattggccttcaatttaaaatttaaaaaattaaattgcattataatcaatttgatatggatggacagaagtcgaaattaaagtgactttttaatggggcataaatctttcggcacttaaacaacgacgaacaataaagtcaaaggttgctctcggacctttcgggggtgaaaatcttaggagatttcaatgtatcagtgctcatggatttgggtcgggaaagacgccatcggggagatgaggtcagggaaaaccctgaaaaaatccaaaaaataatctaataaatttttgagcgattgtttttctataataataaatcattacgtattgcgttagcactaattaccttccatcctttggtattttaatgcttttgctccacaaatcattccccgcacttttggagggaattgtgcggtgaaaagcagcagaaaaaccgcaaaaacggagcaaagcgaaaggaaattgggcaacatttaatattttattaaaaaaataattaataaaaaaataaagaaatgtttaaatatttacgtatattaaataacaaatgaattcatttttctcgacaaatttatgaacggaaataataagtaataattttgtttggatatganagaacattcata

SEQ ID NO: 30002 - DNA, 2130 bp, Heterodera glycines
tatatgagtgcatctgcaattgtatcgacagcgacctgttttgaagtcaacaatgggatagcgtcatcaccagcgctaattttgctccttttcggcctagctctatcaagatcacttttcatgttcaaatactctctctgtgcatgttttcgcgccgcgttcattgctcttttgtagctttgctgagcatcgtgaacctggttagacaaatgctcactactaatatccaaaaggctgtacaaacttttgctcaactcataggggcgtataatgtttgatgatgggactgggatggtcaccacatttccggttttccattcaagctctataaactggtcttcagtggtgcccaatgatggccatgagtgagggtatattatggtagctaggcccacatcccattccgaattaaattgtatttttcgtggtagtcgcacacggaaagagttcgtccggttcccttcaacgttcgtgttcgagggaacaacaacataaaaagaatttgacgaaatggtggacatttttttgttttatcatttttccctatatatttatatatttttatgggtgattgaactgattggaatccagctgttatgctgtttgttataacctttccacttcacatatgcatactctacaccatcctttttctttttcctcaacactttctcaatgtcatataatttttcaccatcctggtgggtgtttttgcggacgcgacatagatccgaagcataaaaacgacctttgatcagttcattatccgcatctctgattcggtatgtgacaggtgaacggccttcatccgcactgtcaaccttgaatatttcgctcgtaaaacggccaacataacccttctggaacacatgtttatgtttttcaatgcgaaccagatcccctacatggaaacgaggcagacgttttggtctactcatagctgcctcattggctaatttctctcttagcgtgtccgcattccgaaatgtaacgtcaactgggcgcatttgaattgatgaattgtatgaatggttaattccattcacaatatcctggatgacatccaaccatcgttgggtttgacgcgccgtaaaataacgaaataatcgttccttaattgttcgatttgctctttctgctataccagcatgaaattgtggggacgtgtacatgcaaaaatgcttgacattctttgaatcgaaatatgtttgcatgcgtttggcggtgaactcgaggccttggtccgttaccaacttccatggaatatatttggaatgggcaaacagcctatcaaatgcatgaaccatgtcctcactttttttactttttactggctcaacaaacaactgtctactcagagtatcaacacaaaccaacaaataacggaaccccttattttgcggggctaaacggtcaaaaactgcaagatcggcttgccaatcggtatgtagacccgaagcaagcgtaggcaaacgtttgaaccgtctaatagcttgacgatgcatagtgtagctgggctgttcagccaaatattcttccacatccctgcgcttgatcgaactgtttgttttccgcgcctcattcaacaatggaaccatgcttgtatagctgaccggcgaatttatatctttgtaaaggtggtccaaaatggttcgcttctttttttctaataccataatgatggcttaaaattgacaaaactctttatccccttttcacactttttattctctttgaaaccaattaaactcccaactccactcccaaactgataaggtctgtcggaaaccaaatttgttttaagataatcatcctggtatgccctatccaaaaaatcttttaatccaactggaaaatttttaaagcgagcgatacccgtgctgatgttctggttcaatagataggacacaatttgttcaatattacttgttttgtatgttgacggtgtttgtgaccctacctcactggttgaaacccttctcaaaatcttcccatccgcagtaacacctagggcttccgcattctttttaatatgctctaatattgcgacgagtttttggttcggtgcgtttttgctttttttagtgcttttttgagggtcttcaccctcagcggcggaacccgacctta

SEQ ID NO: 30003 - DNA, 622 bp, Heterodera glycines
ggtacgaaaacggccgcgaacgaaaacgcccccgtacgaaaccggcggtacgaaaacggccccgtacgaaaacggcggtacgaaaacggcggtacgaaaatggcggtacgaaaacggcggttcgaaaatggcggtacgaaaacgtccccggtacgaaaatggcggtacgaaaacggcggtacgaaaacggcggtacgaaaacggccccggtacgaaaacggcggtacgaaaacggcggtacgaaaatggcggtacgaaaacggcggtacgaaaatggcggtacgaaaacgtccacggtacgaaaacggcggtacgaaaacggcggtacgaaaacggcggtacgaaaacgtccccgtacgaaaacgtcccccgtacgaaaacggcggtacgaaaacggcggtacgaaaacggcggtacgaaaatggcggtacgaaaacggcggtacgaaaacggcggtacgaaaatggcggtacgaaaacgaccctgaccgcatttttgattaaataaattgtaaaaagaactgatttgaagcaattttacaaaatgttctgatttttgaccccaaaatctgattttttgagcccgatgttctaattttgaaaaatttgcgatcgcatccctg

SEQ ID NO: 30004 - DNA, 1323 bp, Heterodera glycines
  unsure (1)..(1323): unsure at all n locations
ctatttttcgactcaagactctcgaatgtcacgctaattacgatgagttatcaaaggacccaacgaccttttttccatgtcgctgcaattagcggttgccgagtagtcacgtgtcagcaaattaaagaattgaattttgtttcttctanaatgacccaaacccaatttaaactttggattggtttaaggttttatgttgcaaatttgactctattacagttcgtacgatttatgccgcaaattttaggtgttcactatagacatcatacaactattcagcctcaggcctagattttcctgaacctggacccacccttgttaaactcccgatcccgctcccggaatttttttttaccggtctctaaatttttgttatgtatgtacataattcacgaaggaagaaaaacaatgtccgacgagtggggtggaaatgaaagtggatttcgaaagactgaacatgttgcgaactgatttgtgagaaaacaaaggaaagaaaatttgcttaatcgtattgtgtgaacgatgaaacgaaagggaaaaaatagcacaagggaatgagaaagaaaggaatttgtatgaccattccgccattccctgctcattcggctatttcaaatgcatagaaagaaagcattattcactaacaaagttggtgggcagacggtgagacagatatcgattgattgagcaaaagagcaattgggcacagaagaagcagtagcaagtacatacgcatatgtctgtatgtattttgaacattgttttggtgtttttagaaataaagggctaaaaattcccaggcatatgtaatcgatgcgattaaaatttttacgataaatttcatatttttaaagaacaaatacatatataaatattataacgcagcatactgcaacatcatttgctgtacaataagaaaaaacaatttcaaaaaaatgaaattgataatttatctagtcaaaaagcatcatcagcagaaaacaaaaaacaaactcattgattgatcaatgatcaattaaggtggatgcaattaattaattgtttaattaatgatctctgattacggtaatcactcgttttttcttttgcctttctctggaacaattaaatttgttagagggcaaagagtagaaaattaaacagtaaaaaaagaaagaaacaaatttaattaggtaattattagggagtccaattatatgcacatgcatatttttttcctggactgtgggaggcctgaaacgcacgaaaaacatgtttttagcgtgttttgaagcttctaggatgactttccataatgcatgttttgcatatttgtgcatattt

SEQ ID NO: 30005 - DNA, 1767 bp, Heterodera glycines
  unsure (1)..(1767): unsure at all n locations
gcatgcctgnnncaggtcaattgaactgggagcaaaaagcaccgttgccaactccatcctcccatgttttggtcgaccaaaaaagggaaggcgacgactctgtcgaggcaaacgacgaattgcaaattgggcaaccgatggtggtcgaatttgcacttcaaccgaaaacgggtggcaaaaagcaacaaataatgaaataataatttaattttccaaaattaaattttaacttatcatttattattttaagaggcattcggatttctggtcaaaaattgcgtcgtgaaagatgcgttgcgcggaattgagcacgaagtgattgacagttttgggcgagtgtaaaatcccaaaaattaaattaaaatgaataattcgcaattcaaaatttccatttgcactttttgtttaagttgttccaccgatttgaacatctttggtcatttccgttatgacacttatgtaaacaattgcattcattggcatttccttcgatttccccttaatcccccccttccccccttttcagaatgacattgcccgtgcccattggcatgccttcaaactgccggatcagtccgaattggcactaaaatgcagtgtcctcatctgcaccgatttggccgatccttcggaagtgcccttcgtcgttggctgtgccgcccttccgtcggtcggtgccattctctccaacaaatgatttgtccccgtgccctttctctttctcagcctccgttctgtcccgatttggccacttcgccctccgattcggtgctcgccgacctttcccccgcttcttttgcccgtcggctgaggcgaacgaatttcgtcgtcggcggcatttttaatacgacggtggccaattggtcgtcgccggcacagcgccgagtgcgcacttccctttgtgtcggcaatgaaagtgactcaaatgatggtacacagttttgcctccgttttttggcggaagccgctgaaaatttgagcaaagggcgcggcggaggtggcaaaagcggggaaatacaatattaattttgtttcggtgtttttattcctatattagtgctattcgagacggaaacttgtgaccccgagattattttattttttaaattttaccaaaaagcaacctttaggaatttaaaaagtctcggtttcaagtcgggactcgaaaacaacactaggctttatcctttgaaaaaaactaattttttggggtaatttatccattcaatattttctatgcaaacattcatagagagtccttccttaattaagtttagttgctcaaaaatcactcattgattaaagctttttgaaaaacccccataaatcaaattgaatttattccaaaaagttaaaaaatcgaaataaataatgaaaatacttcaaattaaatttaaaataatttgcttttcagtcccttctgctgctaatcatcgctttttggctccgtcagcttttctctgctcattctctgtctttgctttgttctgttctttcgctgttaaaaattgcgcgaaatttattttctcagaaaaatcggaaaagaaacggaggacaaaaataattaaatctcattaaattatttgtttaaatattattgtgtttataatcaatcccaaattaaaacttcaaaattcgaatttcgaaaaagtgccaaaatatttattcttatttagcggtaattatgacaatgcctttgtcgtcccattaatgtgccaaatggtccctcaaagatgcaatcatttggcccatcattcactcatttat

SEQ ID NO: 30006 - DNA, 1433 bp, Heterodera glycines
gtttccctgtaccaggtctgctgatctgtgccgtgttgcactcgggggatcctttatatcccccctccccctcttctccctcccctttttctctttcatttccttttcatttattttgccttcgtccctttcaaaggtccgtcaccgttttgccactctatcaaatgtctccgctttttcttcctcctctcccttcgacggtcacttctcttctccaacaatggccaactctctgtcgccccattggtccccgcagcaaattcgacgaaatactgccgttcatcgacttaatcgaatgggatattcgcaggaagtgcctgacagggttaacggaatggcacagcgaaggtcaacgcttttgaggatgcgggagagatcgttggggtgggacggcgaaagggcgggcacggcattatgagagacaaaagggggagcagaattgctttttcattttcttaaaatatgtcgggaaatgctttctcggcactttccaaataattcccccttttttcctttttgctccgattgttcttctctttcttcttcgttcctttcttttgttggtgacccttttgcctttttctttttcctcgacaattaatttccctttcccttctcttttattacgcaattgtcctcctttttcctttttgtcctaaatttccttttttcattcattgactgacatagtttaaataaagaaaaaacgaagggaggccaagaaaagacaatggaaggaaaagaaattaaatgggagggagggaactaaaaaaggagcagcagaaagaggggggaggagaaagtgaaatgatttggaggagaggggggagagattgggaagagagtgaaacgattgggaggagaggcaggagagtgattgggcggggggggggcagcgactgctgggccattacgcttaccactcggtccgttcgttgtcctccccttgcaagttgcaacttgccagtcgatctttgggcaggttcttctcccttttgggcgtcccttcccttttgtgtcccctccctttcccttgggcattcacttcgccccctccttccgtccccccctttctgtcccccatttcgctcttccgccgtccttttcaaatgtcccctcttctgtcccttcttgccctcttcgccgtttccttagacttttgtttcgcttggcctgatggtgctccatgtctgcgcactgtttaggactctatgaaccctctggaggctgtcgaacaccaaggcggactccaactttcggtaccaatgccaaaccctccccccacctcctcctcctccctccgtccgtccttttccccctccctctcgacttgcaggagccacccttctccatcgaagtggactcacagtgttacacagcgggacggcctctctctcgtgggttcatcgcgaaatgcggaccatcgtactcat

SEQ ID NO: 30007 - DNA, 1590 bp, Heterodera glycines
  unsure (1)..(1590): unsure at all n locations
cttatttccagaaaatctcgcatgaattctcattttcatattttttatagatttttaaatgtttggattttttttggcttaccaaaacttcatcgaacctggttctttctattctctttcaaatcgccccaaattttttttacagcttaactaggcgatattaagcttatttccagaaaatctcgcatgaattctcatttttatttttttaatagatttttaaatgtttggatttttttttttggcttaccaaaacttcatcgaacctggttctttctattctctttcaaatcgccccaaattttttttacagcttaactaggccctattaagcttatttccagaaaatctcgcatgaattctcatttttaaattttttatagatttttaaatgtttggattttttttggcttaccaaaacttcatcgaacctggttctttctattctctttcaaatcgccccaaattttttttacagcttaactaggccctattaagcttatttccagaaaatctcgcatgaattctcatttttaaatttttaatagatttttaaatgtttggatttttttttggcttaccaaaacttcatcgaacctggttctttctattctctttcaaatcgccccaaattttttttacagcttaacaaggccctattaagcttatttccagaaaatctcgcatgaattctcatttttaaattttttatagatttttaaatgtttggattttttttggcttaccaaaacttcatcgaacctggttctttctattctctttcaaatcgccccaaatttttttttacagcttaactaggccctattaagcttatttccagaaaatctcgcatgaattctcatttaaaaaattttttaattgctttttaaatatgccaaaaaatgtaggcttaacttttttagtgaaaattcgatcactcatattttttgctaattgagcagaagcgtaccaaactttgcagggatactccccggtaaaggactaacttacactgaaatgagcgccgagctagctggctcaaaaaaattttcgaaaatctgagtctttcgtttttatttattttttgcaaaattaattcttaaatattttttcagaaagggttctgaaacgcaccaaattttatttacatgttagtttaggcactctgatgctttttctatcaaaaagggagatgaataaaatttttaaaaatttttaattcctttttaaacaggccaaaaagtttaggcttaactttttagtgaaaattcaatcactcatttttcgagtagtgatcagaagcgcaccagattttgcaggggcctaaaaaggtcaaggaaaggcgtctctgcgttgatttagcagtagtacctatgaaatttaattttctatgaatttttaaagttttttgaaatttttttaagtgcaaaaagtggtggtgtctgcaaaaaattttcaccgggtttaaaaaatctangaaaattagtaagcatttgtagtggtccgatacgtatccctgcaaaaatgggtgagcccctgatcaatacaaattatttatggacgatcaattttttagaaatttttatttat

SEQ ID NO: 30008 - DNA, 1330 bp, Heterodera glycines
tctagagtccgacttcctgaaactgctccaagcccaagggttcgacgtgtacgagaaatgcgtggagaatccgtccacaatgcggctgatgtccatccgagaggctgtcgagtctggcttgttcgacgtgaccagcggcgagctgatcaacccaatttccggtcggcattatcccgtgcagcgtgctgtgcaaatgcgactagtacaaacaacgccggaacgtgcacaacagttggaggacgcgttggcccaagcgcaacaacaacatgcgcacattgtgcagccgctgcagaaacggccaagcggtcaattctcgccgagcagcattagcttgggtagcggtggcggcggcggtgtgatcgccggtccagcaggcggtgccgagcacggctacagtagttactcccagcggcgctcgtcctacggtgttggcgacgggtatccatcataagcatttcatttagtttacttttctcgctggcactcaaattttagcgattggggagccgaatctcgaagccttttatacagtagccatggtgttagactaaggtagtggcaattaccgtcctttccagtatgattactgtagcggtcttgacttccatttcgaattgagtggcagcgagtaggaacaaaaaatcaaccaatccaaggataatcaatttgactcataacttaacaaagcagcgaattgatgtgtttttttacagtaattaccgtaaaaaatcatacaccgtaatcaaaaataaataaataatgattcaaattttaaattgccgagtttgatcaaaagatttcaaatttagtgcacatatattgagagtaaaattcataccgtacccattatcttaaataaatagattggtacgtgtaaaattttattgccgtacacactcattctcctattcaatcgaacccttttttgcgctacagtcaaccgatgtcgccgctgaacggtcgacactcgtggtcgtcgcgcaacatctcctggcgcggcccggataccaccgaacttcgcgcgcaccccgaaattgtcgacgtacgtcacgcatcggttgagcgaggtgccaatggcgtgccgcccggcatggacaaggatgacttccaccgcgagtttgacgagttccgccgcgacgcgtcgcctacgggcggccggccgccgatgaacacgcaacgcacgcgcacctttgtgtcgccagacggacgaacgcgcaccaccacgcactacagtcaccagcgaagcgagtactgagccgagccgagagagtgacgaaagtcatacacatcaccattatcatcaaaacatcgcctgaggccatcatcatta

SEQ ID NO: 30009 - DNA, 2232 bp, Heterodera glycines
  unsure (1)..(2232): unsure at all n locations
ccctgaagacaaaaaaaagcgattttttcaagtgtccggtttggggtactcaaacaattacggggagcaaaaatccaacgcagaattaaagtacaggctatagggaagctattccggaaggattcggtctccccataaatctgggcgcatcggttcggggggactgccccgaaaacaaaaaaatcgattttttcaagtgtccgtttggggtactcaaacaattatggggagcaaaaatccaacgcagaattaaagtacaggctatagggaagctattccggaaggattcggtctccccataaatctgggcgcatcggttcagggggactgccccgaaaacccaaaaaaaaattttttggataaaaattatttaaatgaactgactagataatatttaaaatagggtatttctcttcctttcagtattccctgcaaagttggntgcgctcctgatcagttttctgaaaaaaaagtaaagcctaaaactttttggcctgtttaaaaaaggaattanaaattttaaaaaatttattcatctccctttttgatagaaaagcatcaaaggggctaaactaacctggaaataaaatttgggggggtttcaaaaccctttctgaaaaaaaattttaaaaataatttttgaaaaaaaaaaaaaaaaaaaaaaaaaatccaatttttcaaaaattttttttgggccagtaaccccggggcccttttcggggaaaaaaaacccttttccgggggaaatcccccccaaaattttgggccccttttctcttttttttaaaaaaatttaggggggtgtgaatttttttccaaaaaaaaaaaaaccccttttttttttttttttttttaaaaaaaaaaaaaaaaaattttttaattttaaattttttttttccccaagaaactcccccctcccttttccccccgggggggggggcccccccccccccccccccaaaaaaaaaaaaaaaaaaaaaaaaaaaaaaaaaaaaaaaaaaaaaataattaaaaaaaaaaaaaaaaaaaaaaaaaaaattttgtttttttaatcccggggggggggggggggggtggggggggggggaaaaaaaaaaagggttttttgcccgggaaaaaaaaaaaattttccaaaaaaaattaaacaaatccaaaaaaaacccctttaaagccaaaaaaaaaataccccataaagccaaaaggggtaaaatcccggggaaaaaaaaaaggaacccccgaaaaaaaggtggcaattatgaaaacacagaaaaatccggcggaggacttttaatgatttgacccccatgaagggcttttttgggaaacaaatgggctccattcaaatcccatttattttcacatttaccctcaattttgtgaacattttttaaaaaatttattcgtacaatgaggcaaataaaatttgtccttcaatttcggactcattttaagttttaggcttatatttttagtgatatcatttacctattttccctaccaccagggtttcattaaaaaattttttgttggattttcaacaattttttatattattttcccatttttgaaaaaatttcgtcccacataattttttgctaataggcattaactacgcggtacaggactaacttaacctgcaaatatttcaacccttattagttttaaaaaatttttcaaaattctgagttttttttatttatgccaaaaaaattatcaaaaaaatgttttccatttttgactttgacagtgtaattaaaacaattatccgcaatgtaaccctcatttatttgagcatattagcgttagttaattgataagttccggctcattaaactttctcattaaattttaaaatattttaaattgtaactttctcaaacaaccaaacaaaaaaacttgctgccactcattagtatgtaattaccagcgccaaaaagtgcaatggcaatggcaatttccgtttgccaatgtttcgcccttagcctttttaattaatgggaaatgctttttctcccatcccactttttggtgggcttctcgatccccccccccgctttttggtccaattttctctctctctctctctctcccctcacctctctcttccgtctctctctcttccctctgtctctttccccctctctttctcgtctccctgtctcactccctctctcttctctctctctctctctctctctctctctctctcccctcatctctctctctcctctc

SEQ ID NO: 30010 - DNA, 1437 bp, Heterodera glycines
aaacagaatcgcaatgtaggccagatggaaccaacaggtaaaggacaaatacgaaaataattaaaatttaatttatttatttaaatttaggcaaaaaatagcatttctttattgtccgaattcgctgagaggcaaattcgtccgaccgctgaaagtcgaaaataaaagaaggaattaagaaataaaatttaaatatttaatttaaaaaagaatggttaaatataataaacattttaaacaattttaaaaatttatgaaagaattttatttagaaacaaatccgagtggtggtccatcctaggttttctgtttattaggaagattaattcttttgtttgaataattcaaattttatggacccaatcatttttatcacttttttaaaattctatcatgacttctacgagtgaaaaaactcatattaaaagcgattttggacatatgtttggaaaaataatttttgttttctaaattgtttctaatgacaacagaatgtgaaggcgttactcatcattaagaggagttgctcaaaatttgctaatttttttttagaatttttctaaagaaaacaaacttgaaaatataaccttcattaatttgtaagagcaattgctgaaatttttgctacgtctcacattgtttaatttttaagatcatttattctgctcaaaattgaaagttgacttttattttgcttctcataacaattaagtcaattaattgccataatacattggcatttcgggttcaaatcgggttcaaaattggaccaaactcgaaaaatgcctctcctttcactgtttcgctgcttgcgttttgcgtcgcgcttccttttgtgccgttggaagcattgcgcagctgccggccgggcccgagcagtaccaccggcggccgaatgagtgcacttccatggcacattcgcccggcttcaacgggttgccacagtagccacaattgaagcatttgttgtgcactgaaatgattttgtaaaaaagcagaattatttacagtatttcaatgtagggcattttggagataaaaaaagtgaaatgaaataaatgtttttgaaattaagcggtcgcttcaaagagaaatatttaatttttcacaagaaactttaatttcatccaaatttctcttttaaccattttcaataacattggacaagtttttaaattttgaccaaataagtaataattacatgtgaccctgtcgatcatcattttgtcggccaattgtaccaaattgccacaaattacgcactttttcaattccgggtcacctccactcccaaaatacattgtgaatgaacaaacaatgcaattttatttaaatactgaattttgcttaataatttaatcagatttgtcatattattaatttagctgtatttagcttacgcataaattgttaaaaagaaaaatttatgaaaaagaa

SEQ ID NO: 30011 - DNA, 1541 bp, Heterodera glycines
  unsure (1)..(1541): unsure at all n locations
aaaatgccaataattaaaatgggatccatgtacaaaaatccccattactatcttggcaaaaaatcttagattaaagttaataaaaacaaaaacgccatacaaatgacataattagtagggctgagaattttatataagataataattgcaaaatatgtaaaataaaattttaaaatggttattttttggaaaaataacttcataaagggtgaaatatgcacaaaatgtcataaaaatgaacaaaatagacttgaaacatattttatttagcaaaataaaaacccaaataataaaaaaaataaagaaaatcatcaaaacgtttctagggaagccagatgtgaaatgatctgcttcgttgacacaaatcacaaattttgatttttgtttttccaatttctgagagtgcgttcagagatttccaataattcagcaatttctttatcaagcaaagaaggattcgcttttttcatttgataataaattgtcattttactcattttttcttcattcgaaaagcgatttccacctaaatattaaaaattaaaacaaataaacaataatttatttatttattcaaatttactttttctcatttcaatgccaaattcccttttcaattttctaaacatttctttaccaatgcccaactctttcacaaattgtttctgttttccaatttcgaacattcttttaagctcatcacttcgctgaataaattccttccttttcatttcataataatttttatctttttttatattgaatccaaattcttttttccatttgaaaattttctttcgactaattcccaattttttacaaattttttgttcaattttattcttaatttttgccgaatatttcccgcttttcttaattccttcttttactgcgtggtatttgttaacatttcgcgtttttgttgatcatcacattgattggcattcagataattgacaatggaagctaaatcattttgctcattttgaatttccatgttttcccatttttggccaaatatttcatcaaaaattggccgtatttttgaattaattttattcaattgaacagacgaagcgttgattattaaattgtttatgaataataaaataaaacttaaaatataaaaattcatgtttacaaagattatgtttttgatttctaaacagttaaaaatatgatcaaaattaaaaataagaataataatgatataatggtagtttttaatttgaatgattattttaaaattttttttcaaaaaatctaacattaatataaagatacccccattttcgtaaatttttacacttcctgtgaactgttcgagctgaaattttaactatagctgcaactttgaaatttcaactaggtaagtgaaaacaattcctattttattcctcagtaaatggagtcaaagagaccaatcttcaatttccaattttatcaatttctgtttcaaatttttgcgaaaaatatttaagtttttttaaatggtaaaatgcngtgcattatccctcaaaatttgtgttaagtcatttttc

SEQ ID NO: 30012 - DNA, 1019 bp, Heterodera glycines
atttttacatatttcggtacatattttggactttttcggactttttcttatatttttttttacatattttgaggattttttacaaaatttttggaaatccccccaaaaaatccaaaatttcggcacatttttagtacatattttcatatattttttttcatattttgagaatttttgaaagtttataaaatttcttgtgaaaaaataaaaattaaccaaaaattaatttttaaaatactaaagatgattttatgcctatttaggtcatttttatggcattttatgcgtatttcaccctttccaacgaattttttccaaaaaatatccatttaaaaattttatttacatatttggtacatattttaagttttttttttgtagatattttgggaatttttttttttacatatttatgtacatattttgatcattgtacaaatttttgacatccctattaattacattaaataccatttgtatttaaaccgtggccaaacaatatacgaaattgtttcttgaacatgttgcgatattcagtgctgaatttaaaaaaagtatttaaaaataatttagatcaaaaataatactgtattaattaaattaatggatgacggacgacctattaaagtaaagaacaacagcgtttgatcctgccgctgcattcaacagaatgccagcaataaaaccgaattgccacgctcggattggtgagcttaaaattttaagcaaaaaatttcaaattatttaaaattttatatttcatcgttaccctaacattgggccgattgcttgaagaatttgaaacattgccagagtaaagaaataccctccaatgtttattgctaaaatgatgactaatgaccgtaacaggcgggtgctcgtctgttgtgatactgtaagagcatttttgaatttggtaaatgccaataaatttagcgccatttaggcaatttgcaaaaaataccctccgtttttgcatcggatgatcaaaaaaatggctacgtaacagcagacactgc

SEQ ID NO: 30013 - DNA, 1502 bp, Heterodera glycines
agatcaattcataaattataatgtgttttttatataattaatatacaaaatattttacaaaaaaattaacgtgaaattgaagcaaattccgcacaaaactagacatttacatttaaatatgtaaacaatttattattcaattaaccaaaattactaataaaatggctctattccattaataaaaattccgttttctattaaaccaaagcaataataaaaatgaaaaataaaatttaaaaattaaaatttgttaaaagggaaagaaaaatttgaattaaaatttaaataataattatcattttacttttttaacgaaatttattaataaatttattaatttcatttaaaaaacttacataaaaaagactgggtggtgctggatgttggtcaaaaaccataaaaacaacattaaaaaagattgtgattcttatgaaattatataataaatgtaattttaaatcattaattaataattttattattataataaaactgccaataatttaaaaaatatataataatagtttgtgttaattcaggtaaaattataatgtcaaaatacatttacaattaattctctttaaaataaaacttttattcttttatagtcatattttaaacaagaaatattcataaaccttaataaaattattttataaataataaaagaaaaggaatgaaataaatgttaaaaaagttgattaacaataataatatgtataatataataaaaaaatttatcaaatttttaacaaattcttatgcactgcaaatgcaggtaattttctgagtcataaaatttttgtaatttaattcgttaaaattatttatgtttaaattaccaaaatttgattttaaaaaaatattttattaaaaattggatttgaaatttttttgaaaaagttttttaagaacaaaaagctaaaatctcttataaattcaaaaaaatatattaaaataaaaggtacaatattaaaatatttatttaagctcttgaatgaataatttaacaatttttaattgttggcaacaaaatgaatgaagcaaaacaattttttttaatttcttgacaaaaatctcattgcagcataaaaactaattaatagagcaaaatccaatggaaataaaaaatggcatattctcaggaatctaaaagaatacatattttaaattgaaattaccaacataaaagtttgtaaggcgtaaaagggattagccaatcacgggaagggaccgccccgtagggatctcgccagagggcccctttataagctcgggattcccttcccacaacacacaacatctcagtcgcgaccatcagctacatatcgatgaattcttttgatattttgtatataaattaaaactattaattactaaagaagaattaaaataattgctaaaagtaaaaataaatgatttaataaaataaaatagagacacttgagcagaatatactttgcagaaaaatttttaacttttgtaaattatttttataaaaa

SEQ ID NO: 30014 - DNA, 1155 bp, Heterodera glycines
  unsure (1)..(1155): unsure at all n locations
tttatgaganataatgttgggctgtgaaaaatttaattaaaaaatataaatttccgagaaattaatcttttttttttaaaaaattcatccttttctgttaagcttactaatatgatcagctaaatgggaaaacaatcttttaaacattaattttcagtatgaaatcaggcgccgcattggcgcctctacttgcccggcatccgttgggtataaaaatttttttaataagaaatgtttcttcgtaaattaatttgttcaatacagtatgccataggttattttcaaaccaagttcggttcgcttacaagtaaatgttttttgccagtaaatatttttggctcttttttttgttttggtatattaatgaaagcgattatagttatttttgaaaaaaatctcatcaaaatcccacttatattaagttgttttttttttgaaattattgcttgttttaatctctttttctccatttgaaattttacaaataaaatcaagaatttctcttcaaataattcaaaattaccttttttgatggaaaatataaaaaaaattcgcttcaatttctttttttttgaaaatataattaaagaatttttcaaattttttatttcatgaataaatcagttgaaatgaacaatttataatttcaaaagaattttctcatcttataattattaaatttattaccagaaaatttgagaaatttgaataaaataatcgctcaattaacattgtgtgagctaaaataatttttaatttaataaataaatttaaattagggcattaaattatgctattcttgaacacaaaagcgggcggctcaactgtagccaatctgttgttcaacaaaacgcttcgcatactgtactgcctcagttacggtatgtccacgggccaaatacactgccattgcagatgataagcgacaaccggtgccgtgggcaattttggcattgacattaagccgttttccgcgaaaaaactcttcggcaccgtccgatttgaacaaaatgtccgtgctttgatcactgttagtcaaatgtcctcctgaaaagataactcaattaaaatgaaataaaaataataatatgcctttcaacaaaactgctttagcgacaaatttgccctaattcatggcattgttgaagcatttcg

SEQ ID NO: 30015 - DNA, 1687 bp, Heterodera glycines
  unsure (1)..(1687): unsure at all n locations
ccccccccccccctcagcagggttttgttctggatgattcgttttgcattaattcaattcgcttcttctcattaatttcattttgtttcttccggtcatcgcttccattcttttntaaggaaggaattcgctcttttgccgctctctcttctctttgctagataataataatttcttaaataacggaattcagcccaaaaggcacttacttcaatgagtgaagggagccgtaaaagggagcaaaattctacagaaaatttccgaaataatcaaaaggaagaaagggccttctcatatcttaaccaaaatattttaataataattctttcccgtctttttatgcttttcatccttgatagagatcgaaattttgaacttaacaaaacttgaagataacacgcaatgtgttcgcttcatctgttaggtattcttgtaattcttggccatttgtttttaactaatcgatgatgtgaattaagaatattgatgcattaaaatatggcttcctgagttgtagcccattttctcaaatggtctctgtgttttagaaggtctaaacatcggtgggcttttcgagaaactacagtatatgtctgctttgacgaattacacgttactataaataataacaaaatgccaatattttaaattaaatttcttaaattctaatttaaaatttaaaatacatacacaaatcgtttatttcttttgtattcaaatcgtttaaaatcaaaacaaatggtaatttacatataatttgttgctttaaaaacttaaatattttagcctcaaaacgagcatattgaactacacagaaaacgccatgggcgaaaattggatcacgaagagcgcacgtgagtaaattatgcaaataacttaatttgattattcatttttatactattccttttgatttaatcaggcgaaagaaactggccagagctgttcatgaccgttcaaaagtggccaagaaattgcggaaagggaaggcgaagttgtaccacaagaagagatatgcggagaaggttgcttcttgtcttactttaaaactaaagaaaaagttaaggtccaaatgcgaaaattgatcaaacaacacgaggagaagaagcaaaaggggacgacggacactcaaacggagggagcagtccccgcctatttgttggaccggcaaaaggaaacggcggggaaggcactttcgactgccatcaaacagaaacggaaggaaaaagcggtaaggaaataggcaaatgctcattggcatttctatcatttacacatttaaggcaaagtaccaagtgcctttgccaaaagtgagggcggtcagcgacgcggaggccttcaaagttgtcaatacgggaaaaactagacgaaaagggtggaaaaggatggtcaccaaagtcactttcgtcggcgaaacattcacacggaaaccggcaaaattcgaacgattcattcgtccgatgggtctccgttttaaaaaggtgtgatttttgtaatctttgctttcatttgttttaaactattttgtaagttaatttaggcttaagatggttcaatgttttggtttttgtcctttcctttccatcaaatgactttttaaaatatacaaaatgttcaggcacatgtcacccatcctgaactgaagacaactttttgccttccgttggttggcgtcaaaaagaaccct

SEQ ID NO: 30016 - DNA, 1296 bp, Heterodera glycines
aaaaaagcgtaacgtttcgcgatgactcataatgtcacaaccgcaatctttaacgaaaattcaaaaaatgtttgaccgtcgatcccccccccccaaccaagggcatttttggctttgttgtggtgggtccggcaactttacaatttgttacggttgggcacccgccgagtcgaaaaccgactcaatttggctcgagtatccaggttgaactcttgttagtgtgccacccaaacattgcaataaaaaaaacgtacttgtgaccggcgacgtgaccaccagaatcagacagtagaacaaatagtgagccgagtcctcacggacgagcagtgccaaaaagtgttggctgaacattggcacctccacgccgcgcatgcgatggtgcaaacggaaggcattggtcgcggcagctgaacgcgacaaaaaacatgcatatgtttattacattttcacttaaaaagaaattaggctgatgattttttgttgttgctttaaatagatgccatattcgtggtcatcgacctcgaaaacccatggatattcatcattatgggtataaaaacaaattattgctgaaaatgggatgaaaactgtgtgtgttgtgccgaacctgcagcgattgcctttgtgaacgccattttctgagcggacggagacgcaacggacagcgcataatttagggcaaagtaaagggtggccaaacgaagggcgaaacaaagtgtgtcaatttgattccgttttagaaagtcctagaaggaaaagatttaaatcaaatgacaaatttatgacagcgtttgcttggctctattgtaacttaggcgtcgaaatagtgaccgtcctcagtttcttaggtcataatcttgaatatacgaaaatgaagaatttcagttttatccattgcgcaatttctattttatttttttcttgtttttataaattccataaattttaagggtattaccactttaagctttctcaagaattttgggttttgtagcatatgaaactgaggatacctagttaccgattggaagcgtaaattggtaatagagtcttttgctttaccaaggctgtggtccggggaccgttagcgttttgctgagatgggtttcctccttctgaatttgttggctgctgctgcccttgcggttgttcgttgttttcttctcgaatttcaaccattgctttttgtatcaaaatgttttcaaaaaatttggaaatccttacggcgagtcaattttgggcccccagtgaaaataaatttattatttatttagtaatcagaacgccaaaactttg

SEQ ID NO: 30017 - DNA, 981 bp, Heterodera glycines
tccgtctgctgatgatcatcagcaaagagaagaggaccctttaattaacagcagcagcagctgaacaatacgcaatacgatgctgcattgtgagattatgctaatttatgggcagataaagcggaggaaaaaggagaagcaaaaggatgccctgaggggaggaaaaggggggggggggaagaggaattaggaggaaagagcacaacgagacaatatgaatgatcagcagcaacaacaacaggaaaacgtactactaactgcttattctgaaaattttaggcattttttcctaaatattccttttatgaaagtgccaaaactgcttattctgaaaattttaggcattttttcctaaatattccttttatgaaagtgccaacctttgaaaagccgaatcatttgaaatgtaaaggaaattaagaataatgttgattgcttttagtatttaaaaaaacaactgctgatgaatgtaaaaatgtaagaaatgtaccagccgacaccgttgggggggggggggacgaacgcagcacaaaccatcatttcatctgtcgtcggatggaacagaggatgaacatgaccaagaagatgatgatgatgaggaggaggagggacagaacaacaaaagggagggacggattattacgaaaagggacggaagagtcaatggaagggggggggtgacagacagacagagggagggacggacgtcgtccccccgggcgagtggcggtgagtgactcttccaatttcgcgaccgcatttccccgcgggtgcttctgttggtgctcctctttgtgggcggtgcttttgtccgtccgtgttttccgccctttccgcgccgccaccgacgggtgacttttgctgctttgacctctccgccgatcactttcttcactttttgcttgatcaaaaatcggagcggatttttaattgaaatttaatcccgtccgtttcggataaaatttttttgggctcaaattt

SEQ ID NO: 30018 - DNA, 933 bp, Heterodera glycines
tgtttttctggtcatgtttctggttttgctcatttcttttgtctaatcataacaacggtggaaaaccagaaattaaactgaacatggtttctggttcggctcattttgtattggtaactttatggttgtttttctgaaattaaacagtttctggttttggctcatttcttttgtctaatcagaacaactgtggaaaaccagaaattaaactgaacatggtttcgtctcatttgttttgtattggtaactttatggttgtttttctggtcatgtttctggttttggctcatttcttttgtctaatcagaacaactgtggaaaaccagaaattaaactgaacatggtttcgtctcatttgttttgtattagtaactttatggttgtttttctggtcatgtttctggttttgctcatttcttttgtctaatcataacaacggtggaaaaccagaaattaaactgaacagtttctggttcggctcatttctttgttaaccagaacaacggtggaaaaccagaaattaaattgaacagtttctggtttggctcatttcttctgtctaatcagaacaactgtggaaaaccagaaattaaactgaacatcgtttcgtctcatttgttttgtattggtaactttatggttgtttttctggtcatgtttctggttttggctcatttcttttgtctaatcagaacaactgtggaaaaccagaaattaaactgaacatggtttcgtctcatttgttttgtattggtaactttatggttgtttttctggtcatgtttctggttttgtcttttcttttgtctaatcataacaacggtggaaaaccagaaattaaactgaacagtttctggttaggctcattctttgttaaccagaacaacggtggaaaaccagaaattaaactgaacagtttctggttcggctcat

SEQ ID NO: 30019 - DNA, 677 bp, Heterodera glycines
taaaattaatttgctggttggttttggtatcacaacacttcatatgaattcgaaattcattcgccactcttttgccttacctttgcgcatcccacggcccttctcccctcccccccccccccacctgtgaccacaaatcaatcatttgcaataatctcctcaaatttgcccattcgactatttcatttctctccttttcgctttctctctcccttctctcgttcttcccttctctctctcactctctctcatccctcctccctttgtctttctccctcctcccctcttttttctccttcacttcttttctctttccttctctctctctctctcccttttctctctctttcccactttctcctttctctcgctctcactctctctcccccctcctccctctgtctctctttctccctcatcccctctttttcttcttctttctcctttctttcctacctctctcttctcgactgactcttttcgctttcgctttggtcacttccttctctgctttgaccatgctccctcccccccccttctcctcctacctctcttttcttttcttccttccccctccttatccctcctcccaccttttccccctgtttactcgacgcatttacccgtgccttttccgccctgttttaagagatcgaattaaagctccacaaaatgcc

SEQ ID NO: 30020 - DNA, 1070 bp, Heterodera glycines
tatttaaggcatttatcgcagcagttgtggcgcccccccctatcagtatcggaatcagaaagcagagtcggatggacgtcatttgattttcacggcatgtccccccattttcagtccaatttctcgtacattttgcacagctcatctttgaaatgggccatcaattgtggtcgcttgcttttcatggtcggagtcaacaggtcgttctccaccgtgaaaagctcggcgtacaaatgaatgtctttcgccttaaaatgaaaaaataaataaataaacacaccatccgaaaaaacgagatgtgtaccagggatgtgccgagccagacaaaatccgattccgattatggcccaaaatccgattaattgcgattccgattcggcacatccctgatgtgtaccaataaatagagagtgcagagaaaaaaacatctctcattttagcgtactatttctttgcctctgttagttgaaaaaacctgaatttacttcgctagtttaacttttttcaatacgttaaatcttcctcaaattttgcatatcgatagagaaaaaaattacgaacaaaatttgaggtttttgagagcaaaaagtgtattagctaaaaagttatttaaaaaagaaaattttgaaagcctgtatccttttttaaaacatcaaataccttagctttggtttagaagctttcgaatgataccaaaattgtccaatttggttggcaaaaccctccaaaaataattcccaaaaatgggcatttttttaattttttggacaaaaataaaaaaatattcatgttgcagaacggtctcgaacatccttcctgtgtccctttactatcttacaaaaaccactgagccacccatttttttggtacagtagctaaaactgtctcatattatttttaaagaataaaacaaaaactaaattaagaaaatagctgttctacgctcacttgtattttttcattcaaattcaaaccgaattgaccgacctgttcaaaggtgaagagcccagccttctttccaacttcatgaatgtcctccatgaccatcactttcacttgctcatttcggc

SEQ ID NO: 30021 - DNA, 1182 bp, Heterodera glycines
agcctggactttattttgtttgtgtgaaccttttttatttgaaaacattgccagacggaattattattttttttcgcggccgagtgacaagctgtgggccggattgcccgccaacgcaaattaaaaaataatcaaaatacctttattttggttaccccacatttgcgccccaggcatttgcgcctttgtccaaaatcttcacgctattgttttgctatcttattaaaatgtttacgaattctatttcattttattaatttcgttcatttttcttgcgagtttaatttgtttttcattttaattcctaacaaaataaaataaaacattgagccaggctcaaaacaaaaagttccaatcattaattagtacgccccgcccaaaaaataacctctaccacattaactggccattgtacttcttacaagtcattaaaatagtcatttcatctggtgctcatgaacaattatctcccgttccatgaagattgtctataaagcaatgcccttccggttccctatcccatttacaaggccttaccatatcatggcgtgtcccgacatttgtggccaaactgccaaaaacgacatttgctgtccgtcatttttgagcccaatcaaatgggacatttctcttcaaatttacgccgaaaactttattttaccaagtaatcgttttcaaaaattatacttattcaagacccccaggtgatactgtagagttcatagatttcctaataatgttcataccttttcttcaccatttcataacgcaaaaaaaaaaaataattttaatcgaaatcggcttttcaaaagtgacataaaattcgcttaaattggataattaattttatgaagtttctatttggccagtggccgcaaaatgtcggaccgaaaatgtccgaggcgcaaatgtcgggcggggtatacctacctatttcgcgatttttcttacctaaatttcccagccctactgatcaccttaaaaaataccaggccctgtggtatttggtcaaaaaaccgggcccgggcattgtcgggtaaagaaaaaaattgaaatttttttcatttcaataaaacaaaagtatttttattcaaaaaccctctgagtgcaaaaccatgtaatagtcctaaagcaaacgttgaaataagaattttgttttttttaataatttttttattccct

SEQ ID NO: 30022 - DNA, 1196 bp, Heterodera glycines
  unsure (1)..(1196): unsure at all n locations
cctcaaatagccctaatgacatggtttttggaagatttccccccggaaaaatttttccactcaaaaatcctggtcacccccctttggtcccgaatcccaaaatcacttttatttttataacttttttttaaaaagggataaaaatgtaaaataaaatttatataatagagcaaaaaattgcggattttttcagtatttaaaatttcaaaaacacctttacagaaccgagttctgaatttttttctgaaaaatcgaaaatttccagaatttctggaataactttttttgtttttgtggtataaatttcaaataaaactcataaaattctcccgattttttgctatttataaagctttaattcaccaaaatagacctgatctgaactgagttatgaattttcaaatattcacccaaaatcccatgggccaaaaatttcccaaaaaataaagaatttttaaaaaattccaaaaattatgaaacgaaaaatgaacttcatattcgtgctcagcacatcaaaataccccagaaaaatatttttcacccccattttcaacccaaaaaaaaattctgaaaatttctagggggcctagctcgaaaatttttgaaattttccgggcatatagcacaccgttcgatagagcttaaaattctttacaaaaatgttctaagacgatttttggctaaacccaacccctgacgagttatgggcccgggactcaaatgtcccgctgaggccaaaaattttttctatttccgggaaaaaatcgaaatttttccgaaaaaaataccagtcgatagagctcgaaaaactatgttttggaagtggtcttcgttttcccgggaaaattcgttaaaaaatcctaaaattcaaaaacccgaaaaccgttttttaggcctaactcgaaaaattttgaaaattttcgaaatttttaaatttcagaaaatcgagcttcccaaactctacaataagtctgctgggcacctttccctcagatcaaaccccgactcggtattcgcctggtactgaagtgtactttttgagcacgcttcagttgccattttctgcaggccagggggtggctctattaaaaaaataaaaaataccagcatgtagaggacactttggcggggtgccctcgcagcgggcattttttgattcgagttttagaaaanaaagttacgggccttcaaacgca

SEQ ID NO: 30023 - DNA, 1316 bp, Heterodera glycines
  unsure (1)..(1316): unsure at all n locations
gctttcgagacagcccttccggatggcacagatgtgncgggaatgaatgacaatccgggccagtaaaacaaatcaggaaatgggccncactttctttccaccacacgaaaatatcagtctcaatagtggttcttccaagtgccttgtaagaagctaactgaagttgaatttgtgattgatatgacgaatgtgaagtgccagaaacaattgagggcaccgaaacactccctggagacttgggcctccaaatatcgacttaaagtattataaaataaaaaaaagaattattcaaatacatttaatgctgtcgtcgcttgctgatcccgtgtcttcgaccaaagaatcgaggtcttccaaaggtgcagccattgcttcttccacatttgtgccacattctctgttgactgtaaaatagttagcaaatatttttaaaaaaccatgttttacttttttgatgcgcaaatttaattaagtcctcctcgataagactccaatttgcttttgaaaaaattgattcatcgtaggcaaaacgcgggtccaacagtgaacaaattcggattaacaaattttggaccattttttgaaccctttcattcaatgagtcgaccaaaccgtcgattaatggctgaatgattgggggaaatttttcttccagtaaaaaatcgtgaaggcgcttgatggtcggcaatatcacagaagccgttgatttttcgtgggataacttaaaactaataagtttattgagcaaaaagaaaaatttttactttttgggtttccacgtcaaaaattttaagaattgggcaaatttggcgcaaaagttcgaagtctttaaatgaaatggacggcaatgatgaagaaattatttccatctcggccatccgaggtttttttggtgcagacaaaattccggcatttctttggtctctttcaaattgcattgccagcaaaacttttttctgctctttgaaagatgccaacattcggtaggtcgaattccatctcgtcggaactgacttaaaattggccgaatttgaataagaatggaaagaattaccaaaacaagttgctttttcggcatattcaattgctcttggtgtcgctccatacatttcttaattttgggttttcgacattctttagtccattcttttgccttccagataatttcagaaaggcattgatttttgatcgcatcttgaataaccaaatttaaaaaatggcaacaacactggaaacttaaaagggaacacggaaccattcaaaaataaatgataaaaatggcctgtccttatccaattggcgtgtggccgactgca

SEQ ID NO: 30024 - DNA, 1118 bp, Heterodera glycines
  unsure (1)..(1118): unsure at all n locations
aaaaaatatgtaaatgcattttttttcctggattctacgtagtctaattagtaggaaaaacatctttttcgtatttgcgtctaaaagtcggtttgggttttttaccgattttgcctagcctagtaagaggagttttttgccatttttaactcatttactaatgatatgtagggatgccaaaaatatgcacatgcatatttttttcctggactgcgggaagcctgaaacgcacgaaaaacatgtttttagcttgatttgaagcttctaggatgactttccatgtgcatattttggcatttcgtgcatattttatgtgcatattttggcgtttttccaaaaaacctctaatagatcggaccccaacagacaaattggcctttttgagctcaaaaaccggaaaattttccaaaaaataattttttagcaaaattttcacgaaaaatattgaataaataaatttctcaaaaaatggttaatttatgtcaaaaataagcaaaattttgcttttcaggttgatttttcgctaaaatgagtaaattttaagctgtatcgtgtttttttctcctaaaatgatttttaataccacatttagccatttttgaagattttactttatgtttaacaaatttgaagaaattttgagaaattacaccctcaattggaaaatttatgtgcatatttcacgatttttggtgcatattttacgattttatgtgcatatttttggcatccctaatgatatgtataccatttttcattaatattttatattatcagccggctttatattttacaaaaaatctatcaaaatgttcatccgtctccaatcctccatattgcctgttcggttttttttcacctcaaatcatccacctctattgcttaatataactaccaaaaatccaaaaacatcccggtcattatgtgtgataaagtctgagtcagttttcgtcaacaaaattcccttcaatgagttggtcgtttctgcactgagagagtcgcatcctggtattaatatgatggaattatctttttttttgtttcgttttcattgcagaagagcacagagtttctctgacgccatccgctgctgcaanttnggtcaaaaagggcatgaa

SEQ ID NO: 30025 - DNA, 1304 bp, Heterodera glycines
caagtctcgggaaattttcggtctcgactgattggatacaggttcctttaggtaaatcccgtcacctatgggcgttcgtaaatccgccattttaacgactttccaacaaaaatcttcataactttactcaaacgcaatcaaattaaacaacaatttcggtattttgttgtccgacacttttcattcaatctaagggcaaggcaaattgtgaaaattttaaaattaatattttgtaatttatcgtcacatttactaaaatttaatgaaagtttatgaaatttggcaagctaagggagacaagaagagctattggatttattttgtggacgtttgagaaaagatattgtgagtttgtcaaagtaaagtcgttaaaaatggcggaatttacgaaacgacctagcaccttctgattgatctgatcacaaaggatgaaactctcggtttaatgaagcatatgtgggcactttttctaaatttatactggtgagataaaaatcctgaagggtaaaaattttttaatatttgaaaatcagagaattgttttggtttcaaaataatatcaaaaatatgagcagcgaaaaactctctatattttaaatctgatcaaaaatgacctgcttatgtttttgtattgaaatttaataataatttagtcaaaatgaatttttggagtccatatctcccagagaggtacattcgaactatatgatatagtagttgataacaatcccacatggaaatttttcgcaaattttcacctgaaattcattagaaaatttttctgctaattttccaccaccaatcagcatttttttgatgctgttaagcccgtaacgtgttcgttttttggtgcgttccgctagcttgtgtcttagaacaaattctaaaaaataatttcaaattagtggtcagtttaataaaaaaaaaaattatattttaaatggaatatatttagatatttttatttctaaaatttttacatttgaacattctcaactacctcgttgttgttttcgattttcatttttttggtccgtcattgtcagcaatgcaggcacttggtcgggcagaacaggcagtagcccaaggatcggcgaatcacaccattttatggtcgggggacatttttccgtcacttattaacaatggaaaaaaagttaaatgctataattagagaccggattttgaatcatttgcttaattttctttgggcgtgaagaagcatgaaaaacacatttttaattcctttgaagcttctatgctcaatttttcagttaattttactgcatggacggtaaaaaaga

SEQ ID NO: 30026 - DNA, 942 bp, Heterodera glycines
  unsure (1)..(942): unsure at all n locations
gggcagtcccccgaccgatgcgcncagattatgggagacgaatccttcggaatagcttcctatagccttactttattctgcgtggattttgctccccataattgttgagtaccccaaacggacacttgaaaaaatcgatttttttgttttcggggcagtccccccgacccgatgcgcccagatttatggggagaccgaatccttccggaatagcttccctatagcctgtactttaattctgcgttggatttttgctccccataattgtttgagtaccccaaacggacacttgaaaaaatcgatttttttgttttcggggcagtccccccgaaccgatgcgcccagattaatggggagaccgaatccttccggaatagcttccctatagcctgtactttaattctgcgttggatttttgctccccataattgtttgagtaccccaaacggacacttgaaaaaatcgatttatttttgttttcggggcagtccccccgaaccgatgcgcccagatttatggggagaccgaatccttcgggaatagcttccctatagcctgtactttaattctgcgttggatttttgctccccataattgtttgagtaccccaaacggacacttgaaaaaatcgatttatttttgttttcggggcagtccccccgaaccgatgcgcccagatttatggggagaccgaatccttcgggaatagcttccctatagtctgtactttaattctgcgttggatttttgctccccataaatgtttgagtaccccaaacggacacttgaaaaaatagatttttttgttttcggggcagtccccccgaaccgatgcgcccatatttatggggagaccgaatccttcgggagtagcttccctatagcctgtactttaattctgcgttggatttttgctcccccataattgtttgagaaccccaa

SEQ ID NO: 30027 - DNA, 1101 bp, Heterodera glycines
acggttagacttccacacaccttagagcttgattccatctgtaagcgtcgcattatcagcaataatctatccatattcattcctctcgatcagtgtggacgaggatgactctatctctgtcaaactggttaatcctaactacagagaagatgccggaaattctgacatggaatcgcaaaagtttatcaatttgtcagtgaaaattccaaatgtacaattccaaagtgtacaaagtttacaaaaaacactgaatcagataatccagaatacttacgataaaaagtttggcggctcatccttaaatgatggtacgcccactaaaagagccaaacgacaaaccgaattgtcagaatcaggcgttggagttatcgaagtagagaatttcttcactcgaaatccctttgactattggcaacagattggagaactgagaaaaaagcactatcagctcagagaaagggttgaaaaaatgacaaaggagtacaattcaacagcggatggcgaacgaaaaacatttctctcaacggaacttggggtttttcaagggcgagaaacttttctgaaagaacatttgcatttgattgaagaagaggcgaagagaagggatggtgagcagcaagaagccaatgaacaaagactcattgaccgtttctttgcccgataccccgacaattatagagagcagctggacgagtggaggtcaagttacctccgagatgtgctagatctacaaacaaagatgggagagtatgaaggagttaaagatttgaaaaggcttgaagagctcaattcacaaactgaacgaatgagaaattccatacacgtttttggaagaaagatggaaatattaaacaacgcagcattgcaacgtgatcagaaaaaatctcaagaggattttgaacggttaagccatgaacaaaacctaaccttcgtccaagaattcttccaagccaatcccgtgaattactggcaagcaatccagaaaaattatgaagcgcttcaacttgagtacactaagaagagggaattgagggaaaagcttgaatttgaaactgacgcaaaagaaagggagtcgctgcagcgacaaatagagagcattca

SEQ ID NO: 30028 - DNA, 1727 bp, Heterodera glycines
tttttaaattattttattttttcattggtatactttcattcttattaaaaatttaaaaattattgtataaatttttttattttctagttattttatgctactaatatcataaatcaaatcaaaataaacatatcatatctttttttgatttccaaatgatgcttaaatttattacctttttaattgtatttttattgttgtgttgtttatgtctgaattctcgaaaataaatttaaaattattttataaaaataacttaatatttaatatttaggtttttaggaacaatttattttggataagaaatttttatcctatttttgtggctgaccattcgggtttataaattataattatattttttcgaattttttactctttttataaaacatttattttcgatttgttttattttttcattgaaccacttttttattttttttaaatttgtgttgttaatttatgtttattataaacttgatttccttaattacgaagattgtttgattcagattaagagtaaaatttaaattgatttaggtttttaatatctataatgttatattggctagagctaataaacaaaagaagaaaaattctcagcgtttggaaaggcattttaattttatgatttaattgcttctttcttttcgagcttcaattaatatttaataaagattctccaggcatggtaaaccgtttgtttttaacgggcatgcctaaatgcattgcttgcctaagcatcaaaacaacgcatatttaaaatttatatattaaattaaaatattcttagaattctgttagaatttttatacaaattttattgctggtttttgatttatttatttttgtaactgaatttcgccaggttttgaaaaactttaaaaagaaaatttatgatggattgtccaatgatggattgaataattaggcggattatctcattgaccacctgtgatatttgacctcgtatttaatttaaataattaatttgtggcattttgtctatttaattttgttcctcttctaaatttgttttgttttctcagtgctttctcatattatattttggcttcgaaatgatggtaatttattctcatcgctctccgactttcgaatttttattgaattaaatttgttctgttttgtgctgtggactttaatttgtgttggagatacacttttggttttaattgtttgagtgcaattcttttttgttaattttggttgacgacgaacggggacgagaagtgaattcggaggagaagagaagagcccgcaaaagccctgcatttgtgttctccctcattttcttcgaatattttcgacgtggcgctcctgcttttctgggtaagctcagcgacgggatttgattcgattttcggttttcaacaaaaaaacgaagcaaaagtgggaagtaaattggagattgagcgcattttgaggaaaattagtgattcacagggtgaacactaaacaatttgattgctgacatttgaaagatagatccacaggttgggctatcagattttgaatttgttatcggatcaccaactcgctgtttttcttcacactcgccatttttgttttgttccgcagcacggacaaagcacaactcaacaattttgtttcaacagcgacactctcaggaaggggttgcaacaaaacagcatcaaaagcgacactctcagaaaggggttgcgccacaggaggttgtggttatttga

SEQ ID NO: 30029 - DNA, 967 bp, Heterodera glycines
  unsure (1)..(967): unsure at all n locations
gggggcaatgttcgtttttcggatgatgctcggaatttaatcgaactaaaatagaaaccgaaaattgggctttttgtgccaaaacccgaaaccgaaactgaaattgaacccgtgggaaaatacaatacaccgtgatgaaatcaactactgtacatacatttatcttaccaaatttttgtaacagttattctgtcagccaacagtgcaaatttgtgtttggtgctgctgccgaaattggtccttacatgccaacttgtcgccgtttgtggtgctccgtgtccttcggataccaaatgggatgccgaacacaagtaaattatataaataattgattcattttaattggcatatatttggtaaaccaaaattttttcgtgtccttttaagcatatgccatgggccgacggcacgccctgcggcgataacatgtggtgccatcggggacaatgtgttggcatgtcgccaatgcagcggcaacccgttgatggcggatggggcgaatggaagccgtggcgtgagtgttcgcgcacatgcggcggaggtgcttaattagggcatagagtcaatcaataaatgatcagcgattcttatcaggagtccaaaaatcgtttcgagaatgcgactcgcctccgcccgagaatagcggcaaatactgtattgggcagagggaacggtatcgaccatgcaacatccaggtcagtattaatgagtaggtttttgatcatacatcaattgattgattagattcacatatgcacagttagtgatccattatttgaattttaaaaaatgcagtgatcaattgcttaattgcaaaatttttaattataatggccaccttttcattctgatcagtgattactcgcatttgcgtgatcataatttcagtgatcatcatattttgatccttatcactttgttttaagaacggtccctgggaaacgcccgngttttcgtgagcttcaat

SEQ ID NO: 30030 - DNA, 1041 bp, Heterodera glycines
ttttgaggtctcactgatcacgaattatccattcggccaattccggacccgaactcgaacaaaaaatcgaagttcctaatttccgaatttagcactgttataagtaatattgagctataaaaattttataaataaatttgcaggaatattctgacttgtgttttcatattgaaacaattataagtgtttaatcgattagacttgcttattctcaaaataagttgatcacttgagaaaaaaagttatggcttcttaagtttacctggaaaagaactggcagaaagggactgctgatggtgcctttcagaattacgaacgacaattttttcggttgtctcttacctaatttgttgtcacgacaaaaaaataaatcgtttgtcgttcaagttcgtcgaattgtcgtccaattagaattaacaaatttgcagaggcttgtcgcttgttctgaatttttatggaaataaataataaacacatgtttgtcaaaaattggcaaattttgggataacttagaaaaatgtgcggctaaagagtgataaatgatttcgtaaagagttgtttaaaatgagatgtgtttgttgtctaagccgtttaagttaaggctgtcgagaaaagacacgaaatcttttttcacactgtaatggggtccgattttctcaatgttgagtattgttgacgcgaagttgccgaagagtgcgcggaattgggacatccccgattcaatgacaaaaccgtcaaacaactgaggggcgatacttggcaaaaaaaaggaggctgtcatgaaaaaatatgacacctctcaaaaagcagaactatcggaggaagcgtcgaagtttgcaaattcgtattccattttagaaaaataaacaaaaaataaaattcggagaaataaatttattttcagagaataattttggagaattatgaataatgggattcagtttgggcttatggatcaaaataatttggtggatttttgggacacttatcagacgacaaatttgaggggcggtgttgagcgcccccaaaatatttggcgtt

SEQ ID NO: 30031 - DNA, 859 bp, Heterodera glycines
ggggacctctagagtctttaaatctttttttgcttcatattttaatatagattctcttaaattaatttaagttgtagtttttttaatatttgagaataatgtttttgaagaatggaatttaaaattttttatattttaaaatttaatttatttgagatatttaattcctactgaattaaatatttaatacttgataagataagcgagcttttacatcaaagattcttgcttggattaataaagccttttttaaatttaaataattgtattgtaattttgttattttttgaattatttattaattatgtagaaattttatttataggatttattttaataacagagtaaaagcattaaaaataatcacaaatcgaattaaaaataatacctcataaataagaaagatgaatctattaaatcaaattcaaaaagtgatacatgaaatcttgattttaaaaatataattttgttcgggattaccgaaaaccattcatatttgaaaaataaaattttttattaaaattcattaaaaatttttgtaagttaattggtgaaaatcattaataaatatttttttacgttcttcctcgacaattattcttgctaaataccatattaaccttttataacgcaaaacaaaatacttaaaagattataaaaaatttaaaattattattgaaaaaaacgatcataaattttgctttttttttgtatacaaatttttctaaattttatttgatattcatggtgaatttttttatatgcgcataaaattacttacttcagctttgaaaaagatatatcagataaacgacaaggcttatggaatgataattttatgggatattaatcaataata

SEQ ID NO: 30032 - DNA, 1416 bp, Heterodera glycines
aaaaatttgccattttttctcggaattttttaaaataaacgtcagcgtgctttttcccagccccgaaaattagtgaggaaaaaaaaattacgtagagttaagaataatttttttcaagattaaaaaaatgtattgtaaaattttgttggttctagtaattggagatttactcattttgtttaccaatttttaaaacacaaattctagtcccaaaaagcaaatttaattaaaaaagcgtaataaaattttcggtttgatttggtccattggtggaaaaccaaccgtgatcagcttcaagttctcctcactgaccgcatcaccgaccagaaaagtttcattcaaatcgccatggaagccgcgatggaacacagtcacatcaacttgaattagaatgccaggaattttttgaaatttcaaatttagcaaaattgaggcttaaaaaatgcaataaaaacataacaaaccatcgcaaatgtctccattgatcagtgcccgtttatccgggatgccatggcaaatgacctaagacaattagcgtacaaaaaccaaaatcttccaaaaaaaagcaacgaaattagcattttgctctattaaactttaaaaaaatgtgcttggaggcaaggtgcaagttacaacaaaaaaaaattggataaaattttttttttttgtgaaatttttgatttattaccgaaaagtctcaaaaagcaaccgtttttaggggcaaaatctgctagcaaaatgtatatgtccaactttcaaatatttcttcctgtgcttctctaggggcatcaaccatttttctggcaattggcccaataaaaataaccattgccagtgtacacattttttatggaaaaatttttcagataaattttattttttttgaaaatttgaaacacctcgttgaccgacgtacaacaactcttcgggaatttgtagtagcccagtgggctcggatagcactcccgctcaatgcacgcctcgtgcacaacacggtcaatctcatcggtggtcacctgatgtttaatacaaataatggcacttatttaaatcgaatcatacgaaaaattggcgtttttatttgattcgaattttttgaaaaatgaaaaaatgataaaaaattgaacaactttctttaaaaccaaatgtttaacaacaacaaaagaccataaccaatttgaaaaaaatcagcttggaaacatgaaatggataggatttagggaaaaaaaactattttccggaatcccctgatccggtttgtatttttatgggattttaataaaaaaaaaaaaaaaaaattcattacgccaggctcaatggcacgtgccgcctcgtcgagcacctcgcggcccaatttggcggccaaacgcattcccaactgttcctcctcgttcaacaccttaaaaattcagatga

SEQ ID NO: 30033 - DNA, 1359 bp, Heterodera glycines
gggtggggggggggggagagggggtaccaactaaacctagcaattaagaaatctcttattttggtgatagatttctagacaaataaaaatcaaatgaacaaatgttgttgttgttaacaaaagcatctgcggtacagtacgatcctaacaaattgtcgtgtcctcgtgtcggaaaagcctatttttaaaaaaacaaaacgccaaaaaatttattttaattctttcgtcatcttcccatcaattttaattaagaaaatgaaaacaaaagtacaatgaaaagctgaatttatcctttttcattaaagaatagcaaattttatgaattccttttaaagatctgttgatactatttcaatttttatgtccaatttgcccgtttcttctctgattcgtcaacagcacggcggtggtttaggagaggaagatggtatagaaagtgggaaaagaaagtccaaggatgagtacagacgacaaaaggacttggaggagcagcgaaaagccggcacggcgccggcgatggtcgacgtggagacggggagagacataaatccgcacattcccgagttcatcgagaaaacgccctggtatgtgccatcttcaggacccacgctcaaggtaagtggacgaataacaaacaatgcgacaacgaatccattttagcaccagcggccacatcctgaacgccaaaaacagatgtcatcggttgctgaatggtaccctaaggttcattttggttacaaaacaaagggacattgtgactcattggcttattgtcagggcactaccgaacgcgtggcattcaaataccgtgacggggcttgtcaaaattgcggtgctttgggacataacagaaaaaattgctttgagaagcctcgattagtcggtgctaaatttacgaactcaaacattgctccggatgaccatgttctggtgggtgaccactttgttaaaatgttagcaaaatgaccccaattcagccatccctcgaaatgggatacgacgcgaaaagggaccgatggaacgggtacaacgcggaggattattcattggtggcagctgagtttgaaaaaatggaggaaacgcggaaattgatcagagcggaacaggtaaagccaggaggcgtaatgcaatggcaatattcaaaactcagctcaaagaggccggtgaggaggacaaaaaggcggaggaggacgaggacatttacgcggaagacgcgtcggcccccggacagtccgtggacatggactcgcggacgcgaataacagtgcgaaacctgcgcattcgggaggacaccgccaaatatttgtacagtttggacccgaatggagcatattacgaccctaagagcagatcaatgcg

SEQ ID NO: 30034 - DNA, 1828 bp, Heterodera glycines
tgcaaagcactttgaagagagagtaaaagaggacgtgaaacgatgaggtgaacgggacagagctggcgtatctggtctgcattcacccgtttgttgctgtacgttggcctgctagcctccagactggggtttgctgtccttctgttcagtggcgaatggggcatttgcaggcggagtgcgctgagatgctcggagtagctgcgtgagctcggtcttgaggccagcctttcggggtctggtacccggatcgggggagtgctgtttactctgggtgaattgtgcaatggtttcgggtccgtgttgactcgagctgggggtcggtggcggtcgcgtgcgacacgtaccagcaaccagttcggtccagctcgggctctcagttgtgcgttctcggtgtaaaagccggtcatctgttcgacccgtcttgaaacacggaccaaggagtttagcgtatgcgcaagtcattgggtgttcaaaacccaaaggcgcaatgaaagtgaaggcttcttacggagctgatgtgtgatccctggcactgcggtgttggggcgcaacatagtcccgtctcgatcgcatgcgatggggcggagacagagcgtatgcgctgagacccgaaagatggtgaactattcctgagcaggatgaagccagaggaaactctggtggaagtccgaagcgattctgacgagcaaatcgatcgtctgacttgggtataggggcgaaaggataatcgagacatctagtagctggttccctccgaagtttcccccaggatagctggagctcgttaagcagttatcctcggtaaagcgaatgattagaggacttggggacgaaatgtccttaacctattctcaaactctaaatgggtatgaagccagggttgcttgactctgaacccaggcgttgaatgtttgagctccaagtggccccatttttggtaagcagaactggcgatgtgggatgaaccaaacgtggagttaaggtgccaaagtgcccgctcattagacctcataaaaggtgttggttgatatagacagcaggacggtggccatggaagtcggaatccgctaaggagtgtgtaacaactcacctgccgaatcaactagccctgaaaatggatggcgctggagcgggccacctatactccaccgtcattggcttgtacacgtgcttgtcgcgtagtctggccatgacgtgtaggagggtcgtagtggttgcgttgaaggctttgggcgtgggcccggccggagcttccaccagtgcagatcttggtggtagtagcaaatattcaagtgagatccttgaagactgaagtggagaagggttccacgtgaacagcagttgaatgtgggtcagccgatcctaaggcaccggctaacgccgtaacacactacggatgacgacttttctgtgcttgcgcagttggtccatccggttgccgaaagggaagtgggttaacattcccacgccaggctagggaaatgacggttcgcaagagctgttttgcgcggtaacgcaaatgaactcgcagacgtcgtgtggagtccgagccagagttctcttttctggtttagggtgtgcgtgcctggaagtggctcagcctgagatagggatgttgcgcccgtaaagcaccgcggttcctgtggtgtctcgtgcgctccacacggcccttgaaaatgcgagggaagctatttgaatctcctgcctgatcgtaccgatatccgcggcaggtctccaaggtgaacgagcctctagtcgatagaataatgtaggtaagggaagtcggcggggttagattcgtaacttcgggaaaagaatggcttctaaa

SEQ ID NO: 30035 - DNA, 1514 bp, Heterodera glycines
  unsure (1)..(1514): unsure at all n locations
tctagagtcatgggacacaacaaattaatgccatcggatgatggcattaattgtcctgaggaattgaattattgtcctacattacacttgcaaatatactaatttttgttgactttcaatgtttagccatctcccatccgaaatggagaactttttttgctcttcgacaataaaaatatttcataactattttttaaaaaacggaatcgtacatcttttcttggacaaaaaataaccaattttgacttttttaggtaaaaattataaaaattccatgaaattcaactgaatgtttctgcattcggagcaaaggaaagtttttaaattgttaattaaaaagtggtaaaatttaaaaatcctatttattttcataattttatttttccacgcagaatgggggggggggttggggctcagctgggaacgcatttgaattttgcaattcgtcgggtgttatttgcgtctgattgtgagaaagaagggcattcatcctccggctgaattatgctaaaagcacttgccagaattttttttttttgaaaaatggaggaaattttttcaccgcgagaaaagaaattggggcgccgacgaatggcttaagccccgaaaatgggtggagggtgggcgaggtggggcgggtcgagagcaaaggccaattaaatggtgccagaccgacgaaggcaatcggccgggggcggcacggctcaacgcccttgtcactcgggtggggttttttttgccacagcttaattaaaaccaggcaaaaaatgtgtttaattattcataaattggggccctgctgaacatttgcatagccgaaaaatgcttggcttggttatgcatattattagtaaagtacgaccatttaccataaaaaaatttttctaattattttaattttttttaacagttgaaacataatgtaaatgctgcaatattatttaaccatttaaattttgcgattataatattttttataatgccttatttaatatttgtatttaattttcattttctgtttaattgttattacagtatgactattatatttaccgtaaaaaatggttttcttgaattggaaaatattatgatgattaactattattttattcaatcccaatatgcggtaaaattcacacccaacaaaaaaaactatattttttaaataacatatgaaaatgcagatttcaaaaaataaataaaataaaaactaattgccaacccttggcatgtttcggaagcgtgccattgccgtgacaacccgaagtgccgatgtccaacgcttttttggtgaaaccatattttgacttattggattagtagaatcctgctgctgtgcaatattgtcatcatcacgatcgcgagaaacactctggaaaacattttaatttttattttaaataatattttgaaaaaatgagagcaataaaatacctgcttatcagtgcccaactcatcgccactctnctccatttntggtccatatttttaacagaaataattaaatcaattaa

SEQ ID NO: 30036 - DNA, 1238 bp, Heterodera glycines
  unsure (1)..(1238): unsure at all n locations
atcactttgtgctccgtttctctgatcactccccatcctttgatcactttgtgctccgtttctctgatcactccccatcctttgatcactttgtgctccgtttctctgatcacttcccatcctttgatcacttcccatcctttgatcacgttgtgctccgtttctctgatcactccccatcctttgatcactttgtgctccgtttctctgatcactccccatcctttgatcactttgtgctccgtttctctgatcactccccatcctttgatcactttgtgctccgtttctctgatcactccccatcctttgatcactttgtgctccgtttctctgatcactccccatcctttgatcactttgtgctccgtttctctgatcactccccatcctttgatcactttgtgctccgtttctctgatcacttcccatcctttgatcacgttgtctcccattctctgatcacttcccattctctgatcacttcccatcctttgatcactgcgctctccgtttttctgatcacttttcgattgtttttgtcgttcttctatcccattttgtccttctgtccctttttgattattgttgtcgttctgtccatttctctgttggtggtccttttctgtgaatgcgtttttcaatgaactcccaactctcgaagcagcttctttcgcgctgtgcccagcggaacgggcgacttctttggcttcattgcccaactttttcactttttcatatttgtcttcgtatttttttggcatttcgtcctctaaatttttaatttttttaaatttcattcgctttaattgcaccttttttctgttccttttgttgtcggacagccggtgcagcttcagcagcagaaacagcttctccttgctcactttttccaagggatttcttcgatggcgccaatgtttcggcgatcttcgataaaatcatttcctataatgggactcagctgacgagccaaaactatcaacaatttttcttgcgttttaactttggtatttaagttaaaaatttattcccattttcgaatatattgggaactgtagaaattggtaattcgcattttttgcttttagtatttcctcgattataagattataagtccctgggcttttattgttcaacccccctcaagaggaggcttatattcgaggggtcttctaattgagaaggngcttataatcgaggaaatacggtaagtacggccacattttaaggacttt

SEQ ID NO: 30037 - DNA, 1266 bp, Heterodera glycines
agattagattaagatacaaaaaaaaaacgcaaatttttcaaaaaaaaaaaaaaattcagctttcgtaaccatccctgggcctaatttaacttgactaaattcttttttcaacacttgctttttactctattcccagtgattaaaattgcttaaaaacaacctgtgcactttttccgggaaaataaaaatgcgcaaaaaaattaaaaatcacaaattttttacgatttgcgagagatcatcaacttgaaaaggtacaaaattgttgggatgatcatttcacgaaaacaaaaccaccaccaacacaactgaggagggcgctaggggagaggcgcattttttttttttttgtgtggcgttgtgcactaaacgccaatcacaaacacaacacccacacaactcctgggctattacatttttgtgatcggcgcggatgtgcgtttgggctgagttgggctgagcgacacccaaacacacagacacacacaaagacaaaactccccaaaaattcggttgaattggatttaatttggggcccgccgccggcgggggcatagccaattgagggggagggggccaaacggtctaaaactgcctcctgcgcgatttcgatggaggacgactcttgacgtggcggcgacggtcggtcccgagaccgccatctcggccggggccggctggctgctgtcatcaaccaccaaaactagatttgtctcctttctccttcaatttgctgccagccgaccccggtctccccccgggggcgtcttctgctcctcctcccagccaaataaacccggtcgccgaagggccaaaacgcgggggacggaggagagtgcctaaatcgttaagtgctgccacaccattctcatcatccgccgatgagtccacaattctacgcgccatttctgcattaaatttacggtagtgcgatggggaaatgaattaggaaaaaacacattttttggaaaaaaccattttagcgtaggataagcaaaagttggaattttttttttttttgtgaaaaacacaacgaggaaaagtttttatttttgaaaaaaatttggtacttttcgtttgttcctacatctcaaataaaaaaaaatcaagtacgcataaaaatcggttttatatcataattattattttggaactgaaaatgacattcaattttatatcctaattccaaaaaaccaaattaaattgatggcagcatatcattatttctacatgaaaaatggcataatatttcgcggaaaattttttttt

SEQ ID NO: 30038 - DNA, 997 bp, Heterodera glycines
ctatgagtgtttggtttggaaactgtctaaaatgttccgggtcgcccacattgcacaattttcttgaaaataccatgaaaaatgctctaactccaagagacttagttgagcgcactgcaaggagaaccctaacacagttcagcacaaaaaaattaactattcacgcttgagaacgcgaagtttgctgcggagaatggcaattatatgcagaaagtcaagtgcatatatctcagcgcctagtgcatgaataggagcgtttttactgttttctgagagcgcctgaaagcagctttcgaatggtatagctgatttttttggatctggaattttcgcagagatatatgcaaattagtaaccagtgtttcgtttcaaattatttctcgtattctaacgaaataattttttactatgagtgtttggtttggaaactgtctaaaatgttccgggtcgcccacattgcacaattttcttgaaaataccatgaaaaatgctctaactccaagagacttagttgagcgcactgcaaggagaaccctaacacagttcagcactaaaaaattaactattcacgcttgagaacgcgaagtttgctgcggagaatggcaattatatgcagaaagtcaagtgcatatatctcagcgcctagtgcatgaataggagcgtttttactgttttctgagagcgcctgaaagcagctttcgaatggtatagctgatttttttggatctggaattttcgcagagatatatgcaaattagtaaccagtgtttcgtttcaaattatttctcgtattctaacgaaataattttttactatgagtgtttggtttggaaactgtctaaaatgttccgggtcgcccacattgcacaattttcttgaaaataccatgaaaaatgctctaactccaagagacttagttgagcgcactgcaaggagaaccctaacacaggtcagcacaaaaaattaactattcacgcttgagaacgcgaagtttgct

SEQ ID NO: 30039 - DNA, 1253 bp, Heterodera glycines
tttcctggatttttgtccaggaaatccaggtccaggtccaggcaaaacacgaaaaacctggattttcctggacaaaattttagaatttattatttcaagtgaccaatgtttttttaaattttcaaaaaaagattaaattaatttaaaaatacattattattattattaattagatatttttaggtgtttctaagcaattaattaattttttcaaacctttttttgatttttaagatgagtttcaaaaaatccaggtccaggcctggatccaggtctcgaagagcctggatttttcctggacctggattttcctggatttttgtctaggaaatccaggtccaggtccaacatggaatccaggtccaggtccaggtccaggcttttttcaaaataccgatctctagaaaaaattaatgttttatttattagggctgaaatggttttaccgagtaccgagaccgaagaatgacaatgagtaaaaaaccgagaccaagaaacgtgaaatcataaaatccgagattaactttttagtttttagcaatttcaattttagtacatatgtagaatttctcctctcggtgatttcaaaaacccgagacagagaagtgaaaaattgagaaatttaattcgagaaccaaaacatcccgaacagccctaaaatgtatgaaatttcagctgacccaactgacaaaggagtgaaaaaacgtgtcatttctacggacaacggtcaatttaagtggaatatttggaatgctgtgcgagatcttgacactaatgccaagattacggtactcttgtgtttggacgatgagtaccgtgtgtatggccaatttgcggattatgatgcgatggaagatgagatgggtgaacggttccacgaagtgtttcaagtggtgtacaataattaccccatttatgagattgacgaaacggtgccaattgaacacgacgtgccgattgagtacgaagacgaaggccattcgacatgcacaattcaaaagtcagtttaatcaaattcaaaaattgttaagcttattttttaggtgatcgaatttttggcaaatattaggaaaagaatttagaatctttaattgaaaaccaaagaaaatgatgtacaacgaacggattattcatttgaaatatttaccccaaaatgagcatggatttaatttatttcatgtcattttgtaaaaattgtttttttttgactctatgataataaatagggaacggatttatatgtgctaaaaacg

SEQ ID NO: 30040 - DNA, 1170 bp, Heterodera glycines
aaaatttacaaaaaaagggataacccttttttggggaaaccctttaaatataaaatctttgtggaataaaatggcgattgtccactgcctccggtttcatacgcaaaccgcatttgtatgtgtataaaatttatcaaaaaaagagatagccatttttctgggataacctctaaatataaaaatcctctgtgaaataaaatggcgattgtgcacagccctccgtctcatacgcaagcgcttttgtgaggtataaaatttctcaaaaaaagagatagccatttttctgggatagagtataaatttaaaaattccctcaaaaataaaaggtctattgcgcaccgccctccctatcatgctcgagagcatttgtatgtgtataaaatttatcaaaaaaagagatagccatttttctgggatagagtataaatttaaaaattccctcaaaaataaaaggtctattgcgcaccgccctccctatcatgctcgagagcatttgtatgtgtataaaatttatcaaaaaaagagatagccatttttctgggataacctctaaatataaaaatcctctgtgaaataaaatggcgattgtgcacagccctccgtctcatacgcaagcgcttttgtgaggtataaaatttctcaaaaaaagagatagccatttttctgggatagagtataaatttaaaaattccctcaaaaataaaaggtctattgcgcaccgccctccctatcatgctcgagagcatttgtatgtgtataaaatttatcaaaaaaagagatagccatttttctgggataacctctaaatataaaaatcctctgtgaaataaaatggcgattgtgcacagccctccgtctcatacgcaagcgcttttgtgaggtataaaatttctcaaaaaaaagagatagacatttttctgggataaagtctaaatttaaaaattccctcaaaaataaaaggtctattgcacacagccctccctatcatgctcgagagcatttgtgtggtataaaaattctcaaaaaaagagatagccatttttctgggatagagtataaatttaaaattcccctcaaaaataaaaagtctattgcgcaccgcccctcctatcatgctcgagagcatttgtatgtgtataaaatttatcaaaaaaaggagatagccatttt

SEQ ID NO: 30041 - DNA, 1319 bp, Heterodera glycines
aaaaaattttattaaatttttgaatattcaaaaaagacatcgcttcaaaaaattttctttattaaaattttaccaccaaaaaatgcgcggcggaccgcgcattcaaattgccgtggccgcggaccgcgcattcaaattgccgcggccgcgaccgcggatcgcgcaaaaaaaaacgccgcgaatcgcggatcgcggtcgcgctccagccctgttgcaaatgtgcgggcgaaaaattaaaaaataaaatttttctgcgatttttctgcataaaacacttgatttttccaatttgagaacatgcatattcgcacttattttggctttttttttttggtttttagcatattcaacctttttagcacatattttattaccaaattaaactatgactccacccaaaaagaaatagttttttgaaaaaatttgatagaaacttgaattattgaaacgtgggacagaggtaaaatccctcgaatccccagtctccgtttgacctgctgaagatatttcatccaaatcatccgtatcgtaattctgagcatcattttccatccaagcagctctcacagaatcactaagcagtgcaacacacaaaaatattttccacatagcaagaaaattaaaattgaattttttgcatcaaatatgatttttgagatcattttttaactcatcatgcattttatttgatatctaacaaaacctaattgaaaattcatttatttaaatgctatttttctagttttttttcttgtttttttctttgctgaggttccacctctcaaggtatcatttaatgacactaaggtaaaacatggcaaaaatttataattaaatagcaagaataaggagaatggatactcagccatcgcctctcatcagctgacaccaaaaaataactgctttcttccacttggcctgctgggtgatcaaagaatactttaattgtgatgggttccatcccattctcgattttatttatttatttatcgccatgtcaatctttttgaagcaaagtttttgggaaaattacaacttaaagaaggcttattttgaggactaatgttgtcatagaaacccagcattttagctttagtttagcttaagccagggctgccatcgtccatcctccgtttccaaggacgggtatgccgattttcaggacatagtggggaaattcatgaaaccaaggacatttaaaatttttattatatgcaatgaaaaatgggtaaaatttattcaaatggtttgtatttttcaccggaatggattttttccaatatttttttggttcccgctgatcatttttcctcatttcc

SEQ ID NO: 30042 - DNA, 1400 bp, Heterodera glycines
aaaaaatggatccaaatcaatacaaagaaacattgtagaaaatggtgtgtacataggttgaataaattatattaatattaatgaaacagataatttataattttggattagaataaagcgtaaaattaatttaattttatgggtcagccttttattcgtaaagtttttgtttataaataaaaactgaaaaggaaataagaggatcatgttagccaatggaaaaaatcataaatgtatatttaattatgtaaattaattaggaaaaaattgcagagaacaaaatgaaaatatgcctaatgaaaaacaaaagttgtgagaaaaagcaagggttattctgttccaatttatccattgatctggtcaaattttttacaaaatcagaacatcaaattcaaaaaatcgcattttgaggtcaaaaaatatgcaaaattgcttcaaatgattaacttacaattttttcgttcaaaaataataaattatttttatctttcgtctctcatctctagggttataaattaatatgatttttaatatatttttctttgcgcatatgctattaaaaagcggctcagaaatagcatttctacgttaaaattttttggttgttttggtgtttattctcctgatgagataacacaaaaaattattaaaaaaacaaagattcatttttagagaaagggaaaacattaaaatagtgtatgccagagatattttctgcttttccaaaaaatccaaccaaaaagggggaccaaaactaatttgtaagacaacattagtaccaaaaatatacatattctaaatttagtgtaaataaaggcacaactttttttctagttattttgttcaaattataattttaaattaaaaaaataggaatgaaataaaagacaaaattgaacttttttatagagggaagagagcgcaaacaaattaacttctcgcaattacactgatgcccctgttttttttctaaaccatagcctcaaatttaggagtgtaaaatgacaaaatttattcaaaaattataaaaattaggcaaagtcaatattaagataaataattttaaaatccaaattcttgtcaagaaaataaataaataaattttggagatggatttttgagaaatttttcatttcttagggatgtatttttgaaaactttcgggtcgattcttatggggtgtattttttttttaattttcaggtcgattcataggggtgtatttttcgttgttgcatttttgggcaatggccaaaatagatcgaaataggttttttcaaaatttttaaaatctctttaagctctaaaaaataaaaacctaaaatagcctctagaactcgaaaagtaccttcacaccctaaagcaaaaaaaacatatttttcgtgtttcaggccacggag

SEQ ID NO: 30043 - DNA, 1773 bp, Heterodera glycines
  unsure (1)..(1773): unsure at all n locations
tttttaaatttgttgagatcggacgggcgcctcgcgcccgttacancgtgttagaagaggttcaatagtgatcagaagaggtacaacagtgataaaaagggtacaacagtgattaaaataggtataacagtgatcagaagaggtacaacggtgattagaagaggtacatcagattagaagaggtaaactgttattagaagaggtgcaacagtgattaaaagaggtacaacaatgaagagaagagatacaacagcgattataagaggtacaacagagattaaaagaggtacaacagagattagaagagttacaaaaatgattagaagaggtgcaaaagtgactaaaagaggtgcaacagtgatcagaagaggtacaacggtgattaaaaggggtacaacaatgattagaagaggtacaacagtgattagaaaaggtacagcagttattagaagaggttcaacagtgattagaagaggtggaacaatgattagaagaggttgaacagtgaatagaagtagtacaaatttgattagaagtagtacaacaatgattagaagaggtacaactgtgattagaagaggtataactgtgattgattagaagaggcacaacagtgatgagaagaggtacaaaagtgattaaaagaggtacaacaatgattagaagaggtacaacagtgattagaaaaggtacagcagttattagaagaggttcaacagtgattagaagaggtggaacaatgattagaagaggttgaacagtgaatagaagtagtacaaatttgattagaagaggtacaacagtgattagtaaattcattaaattaaaatgaaaatattttttaacaaatttaatttaaaaaaatacatgaaattctatcaattaaaaaaataattaatttaaacttataaaatgtattcatcaaaaaaaaaattaatttaaatataattttttatttattaactcaacaaaatattttaaattaattaaaatcattgaaaataacgtaaaaatgcacagaaaaataatgttacaccgtccggattcgaactttgacccccccccccaaaaatgatgcctcagaatccccaatcacacagggattctgaggacttgacgatgtcaaaagtaaaatctgatcacgtattcgtgatcagcaccctcaaatagccctaatgacatgtttttggaagatttttgttaaaaaaaattttccactcaaaaatcctggtcacccccctttggtcccgaatctcaaaatcacttttatttttataacaattcgcaaaaaagtgataaaaatgccaaataaaatttatttaatagagcaaaaaattgcggatttttgtagtattttacttttcccgaatagcttttcagaaggcagctacgaatttttttctgaaaaatcgaaaatttccagaatttctggaataactttttttgtttttgtgctataaatttcaaataaatctcataaaattttcccgattttttgctatttttaaagctttaattcgccaaaatagacctgatctgaactgagttatgaattttcaaatattagcccaaaatcccgagggccaaaaaattgccaaaaaataaagaatttttaaaaaattccaaaaattatganaattaaaatagacatcatattcgtactcagcaccttattttacccagnaaaatatttttcacccccatttttcgtcgaaaaaaatttcccgaaattnctagggggcctagctcgaaaattttgaaaatttacatcat

SEQ ID NO: 30044 - DNA, 1217 bp, Heterodera glycines
tatttaaaagaggctattttttttcccttttcacaaaagaattattaaaaaaagccaaaattcgccttaaaattataagaggaaagtttgaaaatgtttcttaaaaaatttaaggatgaaatataattagaataaatcaaaaagaaaaaaaaatttatttttctaaataaataaaaaacattgtcagaggcagtgcctgccgaaaaaaagacaaaaaatttttcgaaaaaagctaaaaaaattgaaaatttaaataaatttaaaagtgaaaaaaggaaaaaagcttacaacaccttcgattcccaggacgtctccgttccaagtactaagaaggcccaacgttgcttaacttgccagacggacgggatggcgtgctttcaacgtggtatggtcgtaagcaaaggaaagcaatgaaagtaatttaaataggcatatttaaaagagcctatttttttgccttttcacaagagaatttattaaaaaaggcaaaattcgccttaaattaataaggtgaaagtttgaaaatgtttattaaaaaatttaagaatgaaatataattaaaataaatcaaaaagaaaaaaaaatttatttttctaaataaataaaaaatattgtcagaggcagtgcctgccgaaaaaaaagacaaaaaatatttcgaaaaaagctaaaaaaattgaaaatttaaataaatttaaaagtgaaaaaggaaaaaagcttacaacaccttcgattcccaggacgtctccgttccaagtactaagaaggcccaacgttgcttaacttgccagatcggacgggatggcgtgctttcaacgtggtatggtcgtaagcgaaaggacagcaattaaagtaatttaaataggcatatttaaaagagcctatttttttgccttttcacaagagaatttattaaaaaaggcaaaattcgccttaaattaataaggtgaaagtttgaaaatgtttattaaaaaatttaagaatgaaatataattaaaataaatcaaaaagaaaaaaaaatttatttttctaaataaataaaaaatattgtcacaggcagcggctgccgaaaaaaaaaacaaaaaatatttccaaaaaaggtaaaaaaatagaaaatttaaataaatttacaagcgaaaaaggaaaaaagcttactacaacttcgattcccaggacgtctccgttcccagtactaaaaaaggccaacgttgcttatcttg

SEQ ID NO: 30045 - DNA, 1817 bp, Heterodera glycines
cgtccggtgcacactttgtgtgttactggtttggttggcttttctgccggtctttccccggcgttggcctttaccggtcggcgtcggtgggctggcgagtttactttgaacaaatcagagtgcttcaaacaggcgtttcgcttgaatgttcgtgcatggaataatagaagaggatttcggtccgattttattggttttgctgaccgagataatggttaacagagacaaacggggccattcgtattgctacgtgagaggtgaaattcttggaccgtagcaagacggactacagcgaaagcatttggcaagaatgtcttcattaatcaagaacgaaagtcagaggttcgaaggcgatcagataccgccctagttctgaccgtaaacgatgccaactagcgatccgccggcggatttattcgccctggtggggagcttcccggaaacgaaagtcttccggttccgggggaagtatggttgcaaagctgaaacttaaaggaattgacggaagggcaccaccaggagtggagcctgcggcttaatttgactcaacacggggaaactcacccggcccggacaccgtaaggattgacagattgatagctttttcatgattcggtggatggtggtgcatggccgttcttagttcgtggagcgatttgtctggtttattccgataacgagcgagactctagcctactaaatagttggctcattgcttctgtgggcacaacttcttagagggattttcggtgttcagccgcacgaaattgagcaataacaggtctgtgatgcccttagatgtccggggctgcacgcgcgctacactggcaaaaatcagcgtgcttgtccttccccgaaaagggggttggtaaacccggtgaaaatttgccgtgattgggatcggacattgcaattattgtccgtgaacgaggaattccttgtaggggcgagtcatcaactcgctctgaatacgtccctgccctttgtacacaccgcccgtcgctgcccgggactgagccatttcgagaaattcggggacggttagtgttccggcttcggtcggtatgcagactggaaccgatttaatcgcagtggcttgaaccgggcaaaagtcgtaacaaggtagctgtaggtgaacctgctgctggatcattacccaagtgattcctattcaccacctacctgctgtcctgttgggctagcgttggcaccaccaaatgcccccgtccgctgatgggcacaggtcgttcgagatgacttgtggacgctgcccaacattacggggcagctgcctcacgagccatgcttttggggtgcttccatacgttggagctgtggtataccgctcagtgctgcacatgtgaaagcctgtgtatggctgctgcgtggcaatgtgtcggtggcgggccgcctcgcttggttggttcgctgcgccaatgtgggatgcacgctcgtggggcgacctaacggctgtgctggcatctgtgcgtcgttgagcggttgttgtggcaggcacataacacatgactggggatggtggtttcgttcccggtcttacgtgccgtaactagcggtgtgtttgtgcttgctgctacgtccgtggccgtgatgagacgacgcggtagggcccgtgcttggcctagcacgtggcttaagactcaatgagtgtcagctcgggcaccgccagctttttctttttttcattatttttttacacttctgttgaagaatgaattctagtcttatcggtggatcactcggctcgtggatcgatgaagaacgcagccaactgcgataattagtgcgaactgcagaaa

SEQ ID NO: 30046 - DNA, 1178 bp, Heterodera glycines
aggtaagaaaaaaaacttttaaattttcccgggggaacgtagtgcacctctccccacccctttctccaaccaaagcaaagaaagttagaggcttgtaatacgtcaccctattgcgtgcgtgtgtgtgtcaaggcgccataattgtttgaattaaaatgtcaattttcaaatttcagatcattgaacgagccgattggacagcgagcgatttttgtggccaattgtttacggactgtccaccaaactcagatgaaatgcaacaaattttgtcttcctttgagttagccaacaaattgaatggaagcgcggcgaatagagacgaagaaaatggcggaggaaatgatggcggaggaggaggagggaccggcaatttattggaatgaccaattaattagaaaaaaaaacaaaaaaaagcatcaaaacgccaatgtgtattttgttttctttattttaaatggagacttttaaatgcacttttcctctgtgtcacaattgtcattatttctgtaaccaactccatttggaaatttatatgttcatgagtaatgacggttccgagctgctttgtgggtagggccaagggttttgaaaaagtcgggaccgggattcgggagtggaaccaggctgggataggattgattatctgaagtttaggtttgccggtgtttgaagaccctggcggaatttaaatccaaatttgtcggaatcgaattccggctccttttcaaaaaaacaaagccaggattgtggtcctggactggaccccgtcctggctctatgtaataaacggactctttccctgataaggcccaaattattataaaaatttttgtataaaaaattgtgccttttattacacaattacttaggtaaatcaagcgccttttaaaaggtttgattgcaacgtcaaagagtgtgcagtttcctttcccctcccctcctctcttttctgttgtgttgcggacgaaaagcacaaccaaatccaatcgatggtttgcgcggcttacgctcaaaccaaaaaatgctttatttcccgcattatgccctcgggggggggggggggatgcgttgcgcagcgatttatacggcgcgagcaccgcacacacgcgaacacttattaagcaatatgccgctgggcataaaaccgcgtgggcgtagggataatgtgaaaatatacg

SEQ ID NO: 30047 - DNA, 1254 bp, Heterodera glycines
  unsure (1)..(1254): unsure at all n locations
ggggacctctagagtcttatctcccaattttagccgtgccttatggtgaacatatatgtgtacatttgtttgcgagttgctttcagcctcagacagcagtgaaagaggcaaagaaagaacgaaaaacattggggaggaagtgatcggcagagcaaatgatatgaaaaatggaaatgattgtgattttgtgaattgaattgatcaaaaatgaaaagccaagacttttgtgagtagtcccaacttgaaaatacacgtaaataattaattgaattttaaaatgcggaaacgaggtttgattgtcggagatggggccagacaaagaacatttcaagcgcttccggttaaagttttcacaatttaaagatatgctctggtataattgtcagattttaaattctttaattttttattgaaattatttcaatattatttatcaaattcttcggaaaagaaagaatattactttttttataaattttttgacatatttcctgcttattgattttacaaaaagatttttttcaatatttttgtcggatgtatttaattagggtcggggtcacttcggcgcggaccatttcggcgccgcaaattttgaaatgctataacttttttatttgtcagttagctttagccaatctggcatcatttgaaagctctatgtgtgctctatatttacatgtaaaaatagaaacgaatgattcaaaaataaaaaagttatgccacgcggcgccgaaaaagccaagaaaaagttaatttttgaggttttttggccataacttttttgtaaactgacgacattttttgaaattttacaggctaatagagaatctgaagagctatcgaatgataacaaaaatttttaatttggttgatcaggaaaaaagttgttagcaacggcgccgaaaaggccggcgccgaagtgggcggttcccatttaattatgctttacgttgttgtcggaatattaaaaaattgccaagccaaatgttatgacgttgtaagtgttggcataaatataagggagtcaaagtcatcataaatttaacatttacctatatgcaaagtatggcgaattttaattttaatttttttagaaaaatgaatttatttcttattttattattgctcctaataattattttaaataatgttttattctttgctaaagacacgaaagagcagcaacctgtgcccgatggtttgtcttatcttggaattgaattttctcanattggttggcctttctctgcg

SEQ ID NO: 30048 - DNA, 1029 bp, Heterodera glycines
agagagagaggaatagcacatcatacatacacttcgtttctgatcatttttctcttatctgttccatccatgcattattttttgttggtaattgtttagtaaatggtacgtacccctcgcccctttttttggggaaaaaaataccctaaatttataatttatttctttgaacttttgtgattgctgatcacaaatccggcattcatttcaacaaattacaaagctcggacgcgaatttcgaacaaaaaccaaattttcgagtttcgcattttttgcctaaaaatggttcattttttttgtaaaatgtaaattttctaattttactttaataatttggatcggggtttgaaattaggtagtcgaaatgggtgttagattcgtgatccatgatcttgaaaacgccatgtttgtattgcaagggggggggggcggggcgtatcacctaaactattacaccttttttgattcaatttaatataaaattaaataaaaattgttttatttaattcgtttcaattttaatgtttggtacaaaattttgccaataatttctttctttctttttttttgttgccaaaatgtgtgacaatttgttgtccaaaaagggccaaccatttgctgttgttgaggaccggaattacgacagcttttcgtcatccatcggaagaagaagccatttgacaacaccaaaaacgacgacgacgcaaagcaacgacaccgcggagggacgacggattcgaaagcggaggaacaccggcgaaagtacgaaaaattggggaatttttttttgaaatttaggacttgctgccatattaaatttgtccttttttagtaaaaattgaaaaaattagaatttatttctaggatataatttttgaaataaaacccatttttaatgaatatgaccattcaaaaaaaccgtttttcaaaattttaacaaaattttcctttaaattgtgtagtaatgcgccgcaatgccaaaatttgaaaatatttaaaaaaaatttcgacccttccaaaaatggggga

SEQ ID NO: 30049 - DNA, 1344 bp, Heterodera glycines
tttctacactatggaggacaaatacaaaattttcactgactttgttttggaaaatttgagtattaatatacctgaaacaaaatttttgaataagtctaaaccttcatatccagcgcacttattagcatctattaaagagaaggccagactattcagattagggttgcaaccccgacgtcggggttggaaaattcggggttcggggttgtcggggttggaagtgtcggggttcggggtcggggttgccaaatcgttcggggttcggggtcggggtcggggttttttaattttttattttcgctatttaaggttcattttttaaattttattcaggtaaatgactcaatatttttaatcatcattaatcatttcattttcataatcaatgagatcgataggatcaggttcaattggaggtgccagctttacatcatccatatttgccttaaccactaacatttgtcgtaccgtttttccggaaagtctaaaatatacttatttttaatttatttgagaataatgcaattcacttgtttctcaaactatttgcataaattagtccagccttgctaaaaagtctctcactgctcacagaggttgctggaattgaatgcacaatttgagcaatttttgccaactcaggaaagcgaagtccgttttccttccaccacaaaaatatgtcagcatcaattccaactcgttcaacatctttgtaaagcgctaattgagcttcaattttggtgccaacggcgggggcaggttctccagaaagtgtcgatggtgtaatcgatgaactgcaaaaagattttgggttaccgttccaaatgtccactaaattttattgcaaattagtttgtactcaattaattgtttacattttagttcactctcgtcactttcactaaaatccgtaaattgagcagattctgactgatccaaatattgtgtttcggaaaaattttgctcattggcaaaacaaaataaaattgagattaaaattgtttaacttactttcctttgcaaactcaattaaatcgtcggcaattgctttccagaataaataaattcagatcatatgcaaaacgggggtccaacaacattgaaattcgcaataattcattctctttgtaattgtgcattcgagagccaatagattcagcaagaactttgagcaatgatcataatttgttgtgggtgttcttctttggttaaaaagtcataaagcctttttagagttggcaaaatgcaagacaagttgacttttcgcgtgaaaacttaaaattagaaaatagaaaagtttatagattaaattgttgttactctttccgtttctctgttaaacag

SEQ ID NO: 30050 - DNA, 732 bp, Heterodera glycines
acattaagtttcgaatgataccaacaatgttggatttggatgacaaagaaaaaagttgtagaaagttatagtggaaaaacatgctggcgcccaaccgtgagcgcccaactgacgcaaaccgaattttttgtattaatcgacaatttacttactcaccgtatttgctctaattatcccccatggggattatttttcaacctcctcgtagactgggggataattggagactgggggattaagatagagggattattttcaaacccctcctagactgggggataattggagattgggggataattagagcaaatacggtatctattaatttttatgtatttaattgtttgattatttatgtttgtgcgattgttcaataatcatctcattggctaatatgtaaatagtcggtcagggtcgttttcgtaccgccgttttcgtacgggggacattttcgtacgagttcttgtacaagcgtcagattcaaatagaaaaacttaagaactaataaaaccaaaatttatcattttttgtttcccattcataaaattttgtagaaaattcataacattatacaaaaataacaaaatccgggacaaactaggtcgcatctcataattttggaaaataccagcgagaaaattgttaaggttttcgggattgacattggcattggcataattatgatcattttgggggacaatattgttattgatatcgttatagcgttggacg

SEQ ID NO: 30051 - DNA, 1239 bp, Heterodera glycines
acaacaacaacaacaacaacaacaacaacaacaacaacaacaacaacaacaacaacaacaacaacaacaataattggccacaaagttgtgacccaccgatgcaaccatcgccacctgggattgcgctgatcagtaatcagcgaacacaggcaaaaaaattaagctttttctgagaaaattaatggagggagaacaagttttacatagtgaatttattggaaattaaaaaaaccctttttaagaatcaaaattttaaataatagccgcaaaactttttgttaattcgatgcttattaatagattaaaattcggctgaagatcttcaaattttttacgagcgtttattcatcaaaattggttctggtagcattgaaataattacaaaaacttgtgaaaagatttcaaatatccggttacaatcgcattaattgcttctaattgcccatctaattgaccactcagttttatagaatagccaagtgtaacaacttccatttaaaagattatggccaatcaaataatttagttgataaagtgcattggtatgaaaagaaatttatgacaaatcaaaaaatttaatgaaggttcttccgccgtcgcttagtccgccaccgtatcgtcaattcgacttgcaacaaccgtatcggtggccggcagctgccgaacttcaacaacaaccagaacaaacgcaattttccagcaattttggaccattgcgtcaacaacagcaacaacaacaacaacaacaacaacaactgaatcaaaggcagcaaatgaaaagtggaattggtaattaataaatgaacaaaattaaaagcgtattattttattttttaagggttttataaaaatattttattttcatcaaaatttatcaattaatttgcttgaaatccgtgaaattatcgcttgaaggttcgcctccttattattttgacatataaaaaagaaagacactaagagacagacctaaatgcatggaaactttaaaacttttcaactttagaatagagcaaaaaagtcaatttttgataaaaaaaacacagcaacaaattttacaaaaaattgataccccaaataccaaaaactttgcatatatcgaagttattaaattaatatataatttttataataaaattgtttagcatcctgcaccaaatagccgcttcacaacaactttagcccctaattgcacatcccacactgtttcaccacgaaatccatcaaatcgtgctggca

SEQ ID NO: 30052 - DNA, 1264 bp, Heterodera glycines
  unsure (1)..(1264): unsure at all n locations
gaaaaaagcttacacacccttcgattcccagacgtctccgttccaagtactagaaggcncacttngcttacttgccagacggacgggatggcgtgctttcaacgtgctatggtcgtaagcgaaaggacagcaattaaagtaatntaaataggcatatttaaaagagcctatttttttgccttttcacaagagaatttattaaaaaaggcaaaattcgccttaaattaataaggtgaaagtttgaaaatgtttattaaaaaatttaaggataaaatataattaaaataaatcaaaaagaaaaaaaatcaatttatttttctaaataaataaaaaacattgtcagaggcagtgcctgccgaaaaaaagacaaaaaaattttcgaaaaaaagctaaaaaaattgaaaatttaaataaatttacaagtgaaaaaaggaaaaaaagcttacaacaccttcgattcccaggacgtctccgttccaagtactaagaaggcccaacgttgcttaacttgccagacggacgggatggcgtgctttcaacgtggtatggtcgtaagcaaaggaaagcaatgaaagtaatttaaataggcataattaaaagagcctatttttttgccttttcacaagagaatttattaaaaaaggcaaaattcgccttaaattaataaggtgaaagtttgaaaatgtttattaaaaaatttaaggatgaaatataattaaaataaatcaacaagaaaaaaaaatttatttttctaaataaataaaaaacattgtcagaggcagtgcctgccgaaaaaaagacaaaaaaattttcgaaaaaaagctaaaaaaattgaaaatttaaataaatttacaagtgaaaaaggaaaaaagcttacaacaccttcgattcccaggacgtctccgttccaagtactaagaaggcccaacgttgcttaacttgccagacggacgggatggcgtgctttcaacgtggtatggtcgtaagcaaaggaaagcaatgaaagtaatttaaataggcatatttaaaagagcctatttttttgccttttcacaagagaatttattaaaaaaggcaaaattcgccttaaattaataaggtgaaagtttgaaaatgtttattaaaaaatttaagaatgaaatataattaaaataaatcaaaaagaaaaaaaatcaatttatttttctanataaataaaaaacatttgtcagaggcagtgcctgccgaaaaaaagacaaaaaatttttcgaaaaaaagctaaaaa

SEQ ID NO: 30053 - DNA, 1530 bp, Heterodera glycines
ctgtggccatccaacaaattgtatttgactcaacatgagagggttttgggattaaaaaaatgaagtaaaaaacgttttaatcccaccgaactcatcgccaatttggcgaccaaatttccaaagttcgcaaactctgctcattgtgggacggcgcttctcttcggcaaccccaaaaaactctttgaaatttttgcgttttttctctaaaattttattttgctcttcggttaagcttttgatgctagcattttttaatatttcctcaatttcgtttgcaaataccgacgcttcgatttcaaatattaaattttggtccaattctttgggaacattcgcttcagtcaattcatcaactgtctgctgctccttttttatcggcaagccgaacaattttgaatacatttcatcaatttgggcccaagaaggcactgaaaaaagaatttatttaacaaaaaatttatttaaaatacaaaaaatgtaattaaaaattaaaacaacaattctttgcagtgaaaagaaaataggggatcatcagaattgaatcaaccccattagtgatgctcgggagcgaaactttcccgagacttgtgaccgaaacagctgaaagccgagacttttcccgaggattttcttattgtattacgaacaaaaaaacaaatataaaacaaaatatgtaaaataatttttattattattagttttggacaaaaaacttcgaaaaaaataaaataggcaaaaaatgcataaaaagacctaaataagcttataatcaagttcagctattttcgaaatttcatttttataaatctcaaaaattctcaaatatgtaaaaatgaaactattcgtaaataaattagttgtaaatagtagacacttttcaaaattatggtaatcaaattatagaattcgcagttttttcaaacgaaagcccaaaattaattctcggtatttatgctaaattttttattttcttttttttatgtataatttttacattttggttgagtttcagacaaagtcgaaatgacaagaagaaattgaaataaaagaaaaaataatcttgtcggtagaatcatttttggcactgaaaaagtaattcgcaaaaacaaaaataaataaaattaatgttaaaaatttacatgaattttcaacaaaaagttgggatgaggtatagccaatccccacaaaaaatggcacaaattatatatcccaatcaattgtctcgagtgccaaaatgtgtttaaggcgttttctgaccagtttaaaagccgaaaagtcaagaaaattggacatcactagccttttaaaacaattaactaattggtatcattagtgataactccgccctccgtctcgtctcaccacttttactccaatccccttagcggcctcgagacgattcaattgggtatataatttatttgtgtcattttttgtggggaagggaggattggctatactaactaaatatctaaatgttgcttctccatataaaatgaaaacaaattattaattaatgaataatttttt

SEQ ID NO: 30054 - DNA, 1109 bp, Heterodera glycines
atttcaatttgggaagcagtaaattaacaaattcactttttatttcaataacattttatttgttttttcggcactccgttgggccgacgcaaaatgccgtaaaaatggcattgaatgttcagcagagaatcgccgtcaaatgcttggcccggcacttttcaatattcgttttccgctcgtccaaaaaatggaattttcggagaaaattggtaaaaaaaatataaattaattttatttattttttctaaatctttcagttcctttcggcgtgttaacaatggaagaagtgatcggcattgaaaagtaccacagtcctccaaattttcgtgggatgtccaacggcatattgtacccattgcaatttccatgtcatggacgcatttcacctcgtggcacaattctggtgcacattgacaaattgtccgaatttgcgggagaatctgtggggagtcgccgatacagcataattgagccaataatgggatttggatggagaattgtggcgcaaataagaataaatataaaaaccaaagaaaaatttttgggcttttgtcttttctctctggtgccaaaaggaggttaaaaaaaagcattattaaaattgcctaatgattgttttatttgttttaagattcgtgcctttgctcggcaacctttcgaattgtcacacaaaatgccgaagctgagaattgcattgggaaatttaatgacatcatttttaacaataaatcgaacgatcggggattcgttaatttcattaaattgacagttaagatgcactcacttaattgttctaattactactaattaaggaattgatggatcagggaaatggtttttacaacaaaggcgaggacaaagtgacattggccattgatttaatagtgaaaaatacaaaagtggccaaattcactcatgatccaagcaaatccgacgcaacaatttcgatggaaattgaaaaactgtcggaatttgcgcgagaagtcattaagagtgaacgtaaaagcgaaactgtgcgcatcaaaggattttcatggcaaattttggcagaaataaaaacgaaaaatggaacgctgacaataatgagaaatgtttgggcattttccttt

SEQ ID NO: 30055 - DNA, 918 bp, Heterodera glycines
aaagccaattcgaatgtgactcttttggacattttgataatgatttttttttcatttcatatactggaaaatatattttaagcaaagggcgggcggagagactcaaacaaattgacatcataggttttttggggtgagacaccccccgcccccctccttcgtcgtaaatggctccggatgatggggtcttcgtaatgagggggggggggggggggagggggattcgttgcgaatgggaaaaagaggaaaacttgaaaaaattggctaattttcttgcaaattcattaaaaattctttaaaaatttccacatgccgcctatcggcattaccggccccctttttcccaaaggttttttggataaagcggtccgaaagctcgtcgatttacatggcagggaacccttcgtaaaatttggttgacctttccccatttttaacgtctgattgacatggacaaaaattaatgaccccaaaaatagttaattaggcggagaaagacaattttacgactcatgaccataagctgaccaatttgagcacgggataacaaatttatggtaatttgcacatttttatgaattaatttgtatttgaacgatgtagtttaatgacttcgcccggacatttatgtatatatttttgttaaatagtcgaccttgaccaatgagagaagttccacactgtagatgaacatttgagcctatggataaagacatagacctatccgtcacagcgagtgctaacggatcagcactgtacgcgacaacaagaccaacatccagagacaaaatcggagggcagccgtgacggtttggctttcgcagcatcaatcgggaaccgctgccccgtgacgaagatcaatagacacaaatggtcccaaattgctgtctaaaggaaggaaggcaccgtcactggatg

SEQ ID NO: 30056 - DNA, 1110 bp, Heterodera glycines
cagcctttaatctcccagggagagaaaagtttttgatggtctgcgaaaattagaaaccaacacgagatttctaattttccacttcgagcaatatcaccacgagataaagctcggaatattgtttgccggtgatgtgcaatggatagctgactgcgccaaaaattgttatgtccgaagataacaaattataaaagtttatttgccggagaaataaataataaataaatgcagagaataaattggaaaggtcaaattggtgggcacaataacaactgaataagaggggaaaggagagggaggagaatggggaagtgaccaaagatatgagagggtgctgggtggggtcatacacataatcaatattacttccttctctaacaatgagctttaagtatttttggttttatttaatatatgtttcaaaatagggttgctccccgactccgtgccccccgactcaccgacactaattcgggggattggggactccgagcgttgtaaaaatttaaaagttaattaaacaacgaaggaggaaaaggttgaaaatttttgaaatcttgaacaattttgttaataaaattaactaaaaattccgaaaaacctttcggcggcgccaatcgacaccgcctgccccccaaactccaaattttttcttaaaaattgattcgaaaataacaaaatttggacaatttttggacaaaattctcttaacaaattatactcattttcaaaaaattttccgccggaccacttccccccaccccaagtttccaaaagttttttgaaaatcgcaccgctaaaattgttcaaatttatgagattaaaatttttgagcctcgaaattcgattttcggtttctgaaattttttggagcctgggatgccttgttataaaatgccaaattggacgcaggctccaacgaatgaattttaatcagatgattaaagtgaaaaaaggaagatttacgagcatttaaaaaagaaaaattggttttttcgttaaaaaattttgttgatcactacccgatcggggtccccgacctccgacatgacgccccccccccccccgaggtccccggccccccgacattttgcccccgaggggtcgggg

SEQ ID NO: 30057 - DNA, 1080 bp, Heterodera glycines
  unsure (1)..(1080): unsure at all n locations
tcaacctgttgacgctctttgcgcccattgtctgtccgcgtgccaacttggacaaatatttggcactcagtcgcgcttcaaaccaaaacagtcggaatccgtgccaggtgtgaacgagggcatgccatgccaaccgtgccagtcctcttgggtcccgcaatttgttccacactcggataagcaatggctgcttgtgttgctggtcaccactgctgctgccgctgtcccccgtcgtcggcggcgccgtgccaccgctgccagatgcagcctcctgatgatggcataatgcaattttgccaaaaaattattttattgagtggggaatgacatcgaggggagggcatcccaagatggattctcgttgaatttttaatatcttgggatttttgtgttggtttagtgcccccggcaagaccactcgcccctcttttggtcgcaattttttgaaacttacaattaaccaaaattttcgaaaatttgtaggaaaaaaattacgcaccaaaatttggcgaaggtcgccagagaaaatcatttttttagaatgaaatgctgaattgaggtgggaaaaaataaattagcggaataaatgaaatgagaaaaaataaaattaaatgaggaaaaataatacatggatgttgaaatgtaatttttatgaaaaagggtagcaaaagaaaatgtggccgcaatttttatttaaaaaaatcaagatcaaaaattcatagttatttaacgatgtcaaaagaaaattctagcctaattctttttttttgaaaaatttactgggtttgcattgggcttaagctggacccccccccccaaaaaaaaagctaatttaatcttggtctgatttttggaaagtgaataaagacaccaaacggattgggagaggtttggaagggctcaattatcgaaaaataccgaaaatatgtacaaacaaagaagagaaaaaccatggtaatttagcagacatttttttatttgttagaaggcaccataaatggacaaggggtgcgccagggcgatgcccatacgccgaaaaaattggcacgggggggggggggtgcgccanaagcccaattt

SEQ ID NO: 30058 - DNA, 1628 bp, Heterodera glycines
  unsure (1)..(1628): unsure at all n locations
atatataaagttagctattgcaacaattagctcaaattactcattannctgcttaaagaaagcagtgcccttnccgctggggtttcccgcatttcactttctccgccccttcgtcccccgcagcgatttccaacgacgacgacacgtgcattgaccggttggaattctggaagtgcgatgagttcctttatgtgtgccgttattaccgcgagacgtacgccttcgaaatgtgccgcaaaacatgcaatctgtgcgacttcaatcggaaggcgaaagtgaagctgatgatggcacaaccgtactattattaccacccttattgaagtggaaagaatatttggacaagaaagaattgcaaattatcaggacaaggacacgaaaaatgctaaacgagtcaccaaattagagatcggcacaatcgatcttttttcgcttttgtaccgaaaaaattatttaaaaaaaccatttgaaaaagaaccaaaaatatccaaactctaaaatgccaaaaaaaaaaaaaaattaattttgcgttttctgtgtctttaatgtacagttaacatgattttgcaatgatcttatctagtttcgcctttaaacatccatttcgtggatttagccctagaaatcccatcccgactaatcataagataaatttcgatgcaaattaacattttaacattcaattccatcgtattggcaaagaatagatgggtgattgtggggcgctgtcactcggcccattttgtagcgggtgccgtcggcatcaatttgccaggcacaatgaaaattttcgaaatagttcagtgtcgaaaatttatctgtgccgaaaatactcagtgtcgaaattaccagccgcgcattttcatttgaaaaaatattattaatcatttttttattaaaaattctcagtcattgttgagaattgctgtgctcccggtcctttcttaacttaataatacaatacataaataaaatcctgaaaaattattggtctttttcaattccgacttttctgttcttttatcgaaaaaacgaccgaaaaaatgattcccttcnnttctnttcnnttttttcgctngngcgtgtccccgtcgtttttccgttntnnnttntntnntnttggtccctgnntgngntggggcggtttctnnngtgnnncntcnntntcntnggtgtccngtngtttngcnntctcngtngtttnnngtnncctcgcctctttnggcntnctcctctngtggcgggtggttcgtttnnnncncgtntgnnnccgntccttggttgnnccttggncggtttttntnntntnntcgtttttcngtcctgnntntntttttgnnnnngnntccttntgctgnntntggttctttcccnccnttntctcctggccncgttttcnttcgttttttgttctgcgttttccccgggtttcttgtttntngngttgnngncgttcgttgtncccgggtatgtcctccttgtttttcttccgtcttggtgctttgcgtgntngtgttttttggcccttttcnngtgcgtcgataaaggtttcctctttggnttnnnnnccggngcnccaaatttaaagatggaccgacaataaatattaaatatatttataagaatga

SEQ ID NO: 30059 - DNA, 1796 bp, Heterodera glycines
cctcccttttgtcctcctcgtccccccattggtcctcgttctcccattttggcatttcctctgctcaggctacgcttctctcgctccgcgggtggactccccgtgggtggcactccgttcggcttttccccttttggccgtcctcctcgtcctccctttttgaagcccccgaaaaagttgaagaaagggcttcgcttgcggcgatcgtttgattcttccgacatttcattgcttggcggtggtccgggaggggattgctcatcattttcatcattttgcattgactcatcggccgaacatttgacgacgaaaagtgccacgaaagcgaggaacagaagggagcgcatttaagagagaaaaaagccaattaaattaattaattaattatgcctttgtacggttttctcttttccctcgccttttatactccgttttctaaatgatcggacactttttgcttcatttttgcccctgtcttctgttcaaacatcaaactctccaatttgacgtttttcataatttaaaaatcgtgctgtttttttgaattttcattttgataatggatttccgtcctaaataatcgtaggtgaacaaataaatggcgaaatgtttacgtggcacttcaaattgaggtacagactgatctctttctcaattcaacaattaaagtcggatccacagaaagtgggcatttgtttattaaattttaaaatagtgacaaaaataatgttgtcaaatgccaaaattcaataagagaatgagaggctacgcagaacttctgggaattggctaaatatgtattcagtttaagcatttgttaaatgcgccaaaacggcgttttttcatagctaaaattttattttatttatttgacttttttattataaagcttatttctctgattttttcaaatcaaaacgattgtagaatgtctgtgcatgatgttctattaattgggtgcagttttactatgttggagaattgaggacccaattccccttggggtgcagaaattcggatcactcccgatcacatgaaggagtgatatgatcaaggtgattcagtgagttcaaaaggtgttatgagtgaaatttgaaggatgaaaattagaaataatttatttataatctttatttttgttttgaagttgacaaattattattttatttctttgttttttatattccgataaacacataaattgacaattttcaacatttctttaaaaatcatcaaaattgcaaacgaaattattgacataaatcatccaacaaaaataataatctctttgacctaaataatttgtctgattcatacttatatgtctgtaattaaatgacaatgtgtataacatgatccgttagctgttcaagattgcttgcttctccattcaatttgtgtgaatggcatatttttattggcatgacggatttaaatgtctaaaaagccgaatattaaaaataaataaataattttaccaaaattaccatttcatccttcagaagaaaatccgtaataaaagtcattttagcattaagtccaccttctatttcacatgtgtaagcctttatcacaaattccaaattgataattttgccaatttttgtcattttttctggcaaagtttgcacaaaaattctcttttttaaatcgtaccaccattcgacattattctttgagaaatgaccagtgacgtgttgcaaaataaacgatgaacaattttcgacatcattttttatgctcatttttattctatgatatttcaattcacacttttggttttgatcagttttgac

SEQ ID NO: 30060 - DNA, 1612 bp, Heterodera glycines
  unsure (1)..(1612): unsure at all n locations
aggagtgccgttccaagtctctggtccgagattgacaccaacgaacctgtcgaggagtaagcttcttttcttcttttttttttgcttgcccccattcatccgtttcttcccgttaggttggtctctctcgaaagaaaagcaatgcgcaggcgcagcattcgttccggcatcgcgtctggggaaataagtcgggtgtcgccctttctgaacgacattgttcacgtgaacaagttgggccatgaggagatgatgaacagcagcaaattctcgtccgctgcctccgtccgttctgccaatgtgccgcgtcaacgaatgcgttctcgttccgctggtcgccaatcgatcgctcgactcatcccagcttcaaaaccgaatgttcatatccataaacccgccattccggcttcaagaccgaatgttcagatccataaacccgctccgaaagaacacatttaaattgttgtgttttaatgaagtttatttgtatcaaatgggtcttgtttaagtatgtaattggttattaaaggttaaatttatgtgaatttttcatattatttgtgtcacttttttgtaatgtccgtataatttccttgagagcgaaatgccgcttaaaaagtcgtgaacatgtttatgggggttttctgggtcggggaacccgaatccaatattcattttgaccaattcctaatacctgcccgaactcattttggtgaaaaaacaaaacgtagccctagtggggataagttcagcatcctatacttcgaattttaagactagattcgaaatttatgaatacctatttaacatttaataattaaacgaatttttaatatcgaagaaatgatgtattctgagatacaattgcattttttgttcttcccaacaatcgatcacttccaaatcaattgtcgtccatctgttcctgatcattccgcgacttcggccgatcatcagaaacattttcatctgaacagagttaataatttaaattcgaatttatatgcatttgttttttgcccggagcgtcattcaaggagccaacaattctttcctggaaaagaaattaaaatgtataaacaaataatttcatattgttaccaaatttgctcgcccttctgcgctaagccgtaccctaaaataaaaatgaaataactacaaaataattgtagtcccgctgccgngttctaatattaattaacaaaatgaaaaatgaattgaattttcgtggaaattataaattttacacattcaaaattgtttcttccatctctctttttcttttataataattttcaattatttctccttttttcccccattttatatttaaaaagaataatatgaataaatttatttagttttttcaaatattttctgttaaaaaattttcctttaataatatataaatggtggaaatgaaattgaaatgatttattattattattattgttgtaacaaattataaaaatgtatcttaaattgtttttttagttaaaaaataaactaataatattttttttcactatatttttcaaacactacgaaatgaccattttgctatgtcatatttctaatgcttataaaaagaaattttttgtatataaatttagga

SEQ ID NO: 30061 - DNA, 622 bp, Heterodera glycines
tttgcaggggcctaaaaaggtcaaggaaaggcgtctctttgttgatttagcagtagtacctatgaatttaaattttctatgaatttttaaagttttttgaaatttttttaagtgcaaaatggtggtgtctgcaaaaaattttcaccgggtttaaaaaatctaggaaaattagtaagcatttgtagtgttccgatacgtatccctgcaaaatttggtgagcccctgatcaattacaaattatttatggacgatcaaatttttagaaatttttatttatttttgcataattaattcataaatatttttttcagaaaatgctctgaaacgcaccaaattttatttacatgctagtttaggcactctgatgctttttctatcaaaaagggagatgaataaatttttaaaaatttttaattcctttttaaacaggccaaaaagtttaggcttaacttttttttcagaaacttatcagaagcgccccaaactttgcagggatactgaaaggaaaagaattaacctgttttatcacattagcttgtcatcagtttttataaaaaattttcaaaattctgagtctcctattattttatttttttttcaaaattctgaagggcgggggggg

SEQ ID NO: 30062 - DNA, 1284 bp, Heterodera glycines
aaacatataaggtatttggctttcctttaataaacataaagttaacaatggttagaaaatatatacaaattagaattggtttcaattttgattgtatttcagatgggggaggtataagaagtgcattgacattctgcgaaggtcgtcaaacaacattttaatggatgcacaattttacatcccatcgccaatgttgagtgaaatttttggagaaatgcactggagcggctattctgtgagcaccaaaaactgtcaacattgggctctcgagttttttgaaaaaggttttcagtttaaaaaatgataaaaaatatgtgtatcattaattttatttaatcgaaaacatgcatctggaaaaaactggttggtgtgagtgcgaccctgaacgtgtcagtcaaaatgtcatcaagatggagcggcgcaaaaggtggacaaaacatttgcagtgtcggtcttcatccattgtccatgtcgtcaaaagtcgcctctgcacaagtcgttccgcttcagcaatgctgtacaatgtcaaagtacttgagcattttctccttttcccccattttcacattttttagcaaggggattttcgcaaattctgagagtggtcgacggacataatatcaccagcaaattgcaattcaaaaaccttatggctgtttacaattcgatgcctgacaaaaaattccaccgcactgagtggaactcatcaaaggggagcgaaattttgtatgacgagggtatgtaaaaaatttaaatggctaggcaaaaaaactaataatttagtgcttaaaccctaaactgacatttgaaatttgagttcggcaccaaacgaagaatgaatgtgttaaccttttattatgttactatttgatacaattttatatattttattccgttgctattgtaatttttacattttttgttttgtttctcattttttataccattgatgttgagttgtaaagcaatttttaacatttttgggtatttatcgttgtttgaatgcattttaacagtcttgtaaataatgggcaaaagtgctgcctatgggctcttattggaggtgagctggtcaaatttttttaatcgaagaataaatttccgctgagaacaactgttggtaaaaagaaagtttgcattcatttcaccattttgcaaaaaaaaatttttgataaaactacctatgtaaatttcaacaagtttaattgcctaaaataaatagaattcgtatttttcggttttttcctgagctctttttggtctaaatatatatggaaaaaaaat

SEQ ID NO: 30063 - DNA, 852 bp, Heterodera glycines
accgggaccgggccgggaattcccagtcatccgaggtcccggtcccgagttttgaaaagctcaagtcccggtaccggtcccgaaaaaaaatcgaggtcccggtcccgtggcactctaaaaaatatttataaattgttaattgaaaaatgcaatgaattcctaatgtaacctttaaatttattcaaaatgatcgatatcatttctcaattcattctttcacttttccttccgctgaccgttgggcccgggattcattggcagacaatcttttgcgttgatttgatcctctgctagtggacacaaaggcctcaattaaaatttagtattaaagcaaacgctttgctattattaaccccatgcaattgttgtcaccataaagcaaaatctggatgttgttcaaattgttcgaatttgggctctcccatcggaccgtcgccgtccccccgaaaattgggcatcgcttcagcagcaattcaacaaaaatttcatcaagaatttttttctccagagtcaacttttccttggtccgttcgttcaccaattcaaatggttcaattggcattaatgcggaaacataaaatcaggggtcggatctgtccttatttataagaaatgttctgatataagggtcaaaatctgataaaacaaaatctaagtatttaaaaattgtcttttattcttggtagttactagagctcgacctgacctggatccaggcctggatttatcctggatccaggtccaggccatttttcggcaacctggatttttcatgggtttttgtcaaggaaatccaggtccaggtccaacatggaatccagttccaggcttttttcaaaatgtcgagctcta

SEQ ID NO: 30064 - DNA, 1020 bp, Heterodera glycines
ccacttctttggagcaggttttcaactgtcccaagatgcgtttcatggaggtgccgcagcggttgcagacactgctccaacagcccgacccattgatcattcaccatgtcatccgctgggacggaagcggctcatcagtgggggccgcagcggcagcggacggttcgccgactgagaacaaaaacacggcatgttacgatgtgaggaggacggggctttagggttggtggtatgtcaaaatttggcacttttgtgcctttgcaggtcgatgttgagttggacgacccaatcaaacagcagcagtcggcctttttgcagtccaatgccaatgtgcaagaattgatggcactcgaccataaggttggattgagagacattaccaaaatgggggacaacgaccccaaaaaatttaaatgggaaatggcacggtttatttttgtttcccgacagtcgaaatcggcattgatgcatattcaaaataaccaaaaagtcccccaaaattgaaattttgttttcaattaagatttacaacactgttgaagagattaacgaactgaaagtgcgacgcgacttttttgccagttttgtggagaatccgcaagcatttgtggagaaatggctcatttcgcagagcagagaccttaaggtgagaatttcatggatttggatttaattattccccgcacccaaaactgaaaaattggatttcattaaaaatcgcctctgatttcccccctcccggccaatcttaaaaaatataaacacacaaaaaagtcctttttgcaatttattcctaaatttcccattttgcattgttaacaaattgcgccattttacagaatttgtccgaaatttccgccgattatgagatggagcgtcgtgccgacaattattatcagcccgttgttcaggagggcgtcttccgttacatgtaaaaattgaatgaaaaaacgaaggttattttgttcacatttcagttatgcaaaggtccaacaacgccgttttgagttggaagcgacg

SEQ ID NO: 30065 - DNA, 1948 bp, Heterodera glycines
  unsure (1)..(1948): unsure at all n locations
cggggaccgatttacaatttgtgctgttaaaactcccaaattaatggacgaaggtacaagggaaagatttagaaattgtgcctcgttcaggtctatatatgtatgtgtgctagcatcgtcgaggagacctattcccttaacaaaattggaagggatttccgggttaaaaattgtaacttcgacacattttaaaaggatgggtatttgatggcattcttgcaaatttgaaaatgtagtatttgtttgtgatgtcaaaaaggagttttttgtgaggtcagactcagaagtgttaattggaactgagcttgtcaactgaatagaagggttaggagttaaattttgattttggttattttggtgcggaaatggttgtaagttagcttgggattgtgaataaaaggtatcattaggagaatatgttatgtctgaattaccagaaaatgtattggggtttggggaaaaagtatgagtacaataagtagaagattgcttaggtttggatttgttggacaaagcactcgtggatgttggcccttgcatgcggagcagtcggttggtgtagtgcattgatttacaaaatggccggatttgagacatttgaaacaacgctttagagtttttaagcactaattcgagctgtaacttccaaaaagataggacagtaagttgaaaaatgggatggatcatcacaaaataagcagggtaattttggtattattttgtgagtggattgagaatagggttttccctttttagaatgaaatgttagggttgaaggggggggggacgaaatctcatggttaaagggtttattagtcccgtggttaaatgtgaagtttggctttgatggagtttgttttagcagtggcaattttggttgtactgaatcgatttgctctcttctccgtaagatgttgcggagacggtccttcagttgatcagtggaccagttggcttcttcgtctttggccttgaaaatttcttccagaacgaagcgagggagacgttgctcgatttccatttgaaaagaagtagtatcataggattggtttagttaattcatttggacacaaatgcattcaatttgatcaaggagggagcgcaaatcggaacaaaacaaatcacctccacgaatacggggcaaattcttaagggaattatgcaatgagcgagctacatcttcgggattatcgtagctttttgtaagtaaagcaagcgcatcattgtatgagttatccgaaattggaagagggctaatgagggtaaggggagtcccggttaaacactgtttcaagtacgtgaatttgatggaatcggagagtggtaaatcatggacacaatatttaaaggaattccaaaaggactgatattcgacacaatttccgctaaatttgggaagttcggtttttggcagatggataacagaggaattgggagaattagtatttgttgggttagtattttgggaaatagaagtctccaatttgcggcgctgatttcggagggtacgttcgtattttttgagggtatttaaaacccggggaaatggtgttgtagcaacgaattcgtcgtaggcggtgttgtctgatagccgttcgtttccggtcatgcttgttcgcagagccatccatttgtcactcgcatcagacaattgagtaatgtaatcgtttacctcatttgtctcctcatccaggtcttggatgatggattggacttgtcggtaatgattggaatcggattgaccctgggggcgggcggggatcggaaaatctttctggttatcggcaatttcagaagcgtcaggaaacaccaggccaattgttgttcgataatgggtactcataaangatttaagttccccggccgttgtgtctcgtaattgggaaatatgcccccaaatttgactcaaactttggacggcaaatcacgagaatttattgtcactgag

SEQ ID NO: 30066 - DNA, 1465 bp, Heterodera glycines
  unsure (1)..(1465): unsure at all n locations
atcgaatgtaaaacaaacaaaaaaccaaccccccgatgttcgccaattcgctttataagcgtggcctgggcccggaaaaggcaccgcttgagtgcaaaacggcgactttgcataacggaaaccaagcattcaactctttgacccattggtggagaagtgtagcgggacaaacgatcagagaaggaccaaggcctttatacctacaggaaaaacagggattgaaaacgcatgcaaaaagcacacctgaaaatgttggaaattgtttgactctccgagagagagcgaaggaagacgcaaagttggatggtctttccgagtcccatttcatcggccaaaatgctgaaaagtgccaatgggaaaggcaaacgcaattgctcatccattaccctccgacatattgaaaatgcaattcgtagagccatcggacgccccttttttggtatcttaaaaatatttatcatcgcttttaagcaaaaaagagacaattattgacgactttcattccttttatgacctgtaaagtctgttccaaacggaatttgaaatgcggcagtcattggacagtgtttggaagtcattggggtcgtcaaaagggtcgcccttaaatttggccaattcttggagtgaccgatgctctctgaaattggggttggccaagtacttctctgatatttattcattacttaatccgttccatataattggcctcttccccgtcgtccttaacgcctttgaccgttttttcccttcttttggcttttcctttattttgttttcttgacgaagtgtgcgcttcgttaaattcgaaaaaggtgtcacaacaagtttcatcactttcgtcggtcgaattggggacaacaaattcatcatcattggcatcagttgtgtccgatgacgctgatccgtcatcaaactcaaatgaggctcctcctttatcagagccatttaataacactgcttcattttgcatattgcataatctgaaatgggcggattacctcggtcncagcggcatcagaagagttcaaaaaaccaaattttgtttattgtttgtttattcgtaaaaataaaaaagtcatcagaagggcgaaaacctcttactctgacgactgttcagataatgtgtcgtagagtaagtgataaaataaagtgatgatcacaagaattaaaagacaaatatgtgaaaataaataaataaattgaggtcaaagtcaaatgaggtcgaaaaataaaaataaaaccaaatcacttaggaatttgttataattctatttctggtttcattaccctagtgaacttttaagtttggttttaaattgatttaaagagtttgttttgattagttctttatcgagttgattccacaattttgttaccctcccagcaaagggaatgaattttttgctcagtttatattttgagttaaatctggctaatagagcatgttaaaagctttcgaatgata

SEQ ID NO: 30067 - DNA, 1218 bp, Heterodera glycines
tttctgtgtatttaagccatttttattaggtttttgttcgaattcgggtcggggttaattgtggtcgaaatgattacaccctattttaaaatatgtttacttttaactttattcgaagcattcaagtatcaaaaagacaaaatatgagttaaaggcatcaacttattgtataaaatcaacaaattcttcaaaattcaaacaggggcttctgctggatggcctggttttgtggctgaacatcgcccttcatttccaagccctcgttttcatcctccgagaagaattcttcgattatcttgaacacattcgaatatatttgctaaaaattggaaaaaaaaatatatacaatatgacagacaaaacactggcctcagactcatgttgttgcaatgtctccaaatggtccaccccatcgcattcctcgacacggtcgcgaattcggtccaaattttcaggatcactaaaaagcggggaatgagaacaaacagtcaaattgatgcaagtttaggccctacgtttgtgcaacagtgcgcagcaccgaacggagagattcgagcatattcaaagtctaaaaaatggaaaatattgaaattgataatgaaaaacagcaaccaattcgttgttctttgtgatcagacagtcgcaaattgcctccactccgttcttgacacgacaaatttcgatgatttgattcgctgttccaccacagcacagattcgaaattgcccaacccaaagggggaaattcgaattaaaactcgaaagcgaacttagacaaattcactcaccagcctcattctgcaaacgatgttcacccttttgcaaaacactgagcaaaattggcaacaattgcgcatcaatgacatcctaagaaaacagaaatgtttgaattaaaaaggggaaccaaaaattgagagatcacttggatttgcgaggtgttaccagccaacacattggagatcaaccaacagcaatccttgacaaacgtggtactgttggaaagcatcagttgagcgatggcaccactgagaatgccggtgtcaatgacagcctaagggaaattgaaggaaagatgagatgactaataaacaaatagcggaaaaatccattttctgagtccacctgagtttgttcgtcacttccggtcacaaaattgccgagaacgcgcagtgcgggcgcaatcagcgagtcgtggccggacgagatgaaagtgaccatg

SEQ ID NO: 30068 - DNA, 2440 bp, Heterodera glycines
tcctggtttggaagcattacataataatatcaaaaaaaattccattggctttaattttgttttgtcttagtgccaaagtcagccaaggtctttatttatgtaaagaattttcaaaaaaacgaatactttttgtcacgattctcgaaaataaagtcccaaatctcgagaccgaattagtttagttacatgataattaatattttaaataatttattaatttagaaagaaaaaagttatcatctataaaactgataatggtactaattattattctcatatttttcgccacttttaatgggatttttggggttggagaaggtggtgaagaaaacgatttgttcagtgatttgtggaagaattatttcaacgcaaaaaacgttcagaaggcaaatgttggccgaaacggaggacaaaaagtgaccaatcgcgtaaagatggaagaaagggacggtggtgtagaaatgggtgcggtcggcattcgcatgccacccaaattggcacaaatgttgatcaaaactgaaccaaccgcagcagcagcagtttttgatcagctattgaaaaatgtaaagcatgagccaaaagaggaggagtttgagcaattggacattggaaaaatgggtgtggttggcattcgcatgccacctaaattggcacactctgtgatcaaagatgaaccgccatttgatcagcagagagagcatcaacaaaagcatgcaaatgaagagccaaatcatttggactatatgctagaaagaacggaaacagcagataattcattggaatcgaatgggaaaattagccaaaaaagtgccaaaaagttggcaaaaaagaaagacaatggcaaaaggaagtggacagaacgccacaacaatttaaaaaggaggaagattccaaaagcgaaataaaagcattgatcgaaacatttgatcaaatgaagaagaaatttagaaaaaaatatcattttgttgacagaaaaataatgtgaattttggaaataaaattgcaaaaagattgggcacttgcagaaccaaattatacaaaatgaaaagagaaaatggtaaataaacaaaaaaaaatttttttaattttaaatatttttaaatgaaaaattcatattattgtttttttaataaaaaattattttttttaatattttcacataactatttacttgaaaaaattcacccgttttaaaaacttaaaatttaataataaaaaataaaaaaaatttttggtatttaaaaaagtttaaatttttcaaagagaaaatatataaaattttaagtcattagaaggattttatacttttaaaataattaagcaaaaataaataaacattttcaaaataaaatttactaaacttttttaattttaggattattgaccagaaatttttcaaatgaacaaaagaaggaaataatccatcgatttgaaataataaaagaagaatttatgcgcaaattcaaaataaaaaccaatgccaaaattagcgataaaattgcgcgaaaagttggcgtcaatttggagacaattaatcgttggaagaggtcatttggctcaactggtaaaaaataataatcaaaataaaactaaatcttttgtttttaaaagatttttgcatagctttttggggataaatgtttaatttttacagcaaagccaatctatacgagcgcagaacaattggaatttatccgaaaatatgatgcactgaaaattcaaaacccactgatcagcgatcagaacaccgcccaaatgatcggaacaaacgcaataagcataaaaagatggaagaagaagtttggtatcgcatatccttgcaaaagagacggatcacgtgaattgattgggcagtgatcagcaatggcagttgcttgaacatcacagaagcggaagagtgatcggtggcttctgatcagaattggtctgctgacctggtctgagtgatctgcttaatttaatatgttcgtaaataaactgatctgcctagtttggtttgattgggctatgtttcggtaatttctgatcagttttgggcttaacgcaaacgatcagtaaagtaattggctttggttattttttcccttgttcatccgagaattgtctgtgtcttgccatgagcgacctaaaggtttaataatcatatcatttgaagctttctcactattcgcttgatttgatttttttggattttttggggcatttaataaaaatttccttaaaaaatcctcaaaaattgcaaaatatgtaggaaaaaatggcgaaaagtccaaaatatgtataaaaatatgtactgtaatatgtagaaaaatcccaaaatatgtaaataaaagtcccgatttttgttcgcaaacacaaaaaagaaagtgtttttcctactaattaggctatggagaatccaggaaaaaatatgtatttacataaaaaaagaatccctggt

SEQ ID NO: 30069 - DNA, 1588 bp, Heterodera glycines
tgtaaacgaagacgaacatcactccactgatcagagtgatcagaacgcccaaataattgatcagcggacttttgatttgctgcggtttggtgccgaacagaccgaatttggccacggaccatccgacgattatctgcatgaaatgaatgaagtgccatttgataatttgaacccaatctatgaacctgaaaagagccccaaatgaacatgccaaggccaatgcccatttcggcgataatcggcacagaggcaacatttccttaagggacaattaaaacgaaatttaaattgttaattatatttccttaaaggattaatgtcagtgatataacggggggcccttttcccagttgaaattcccaatacaaatggtgtaccttcaaacaatagtcctttatatgggtaaaataaagaggtacaactgagggctcaacacaaaacgtcctctggaacagaggagcgcctgaggggggtccctctcaagcaaaattggattggccaaatcccaagactgatcagaggagaacgacggggaaaaggatggcaatcgaagggaccgctctttttcgccccaggaacatttgttaatgacagattaaggtgaacaattaatgtgttaaatgagtggcatcttcaggataattaaaacaaattcaaatattaatgagacaattaaaacccaatcaattttaaatgctttaattcaccggtggcataaagaaaaccgccaatggcagcgatcagattgaacgggggaaggcctcgggcgatgtttatgatcagtccggccataaaaacgacggcgcattggacccattggacgaaaagcccttggggggaaaagcccaatttgaaattattgtttcagtttgagaccatctttggtgtcgcaacgtttcaatggcacaaagagaaagccgaaggaaagacacgagacgaaaagggacaaatagccaattagcaaatcggtgcccgaggcattgtccattttattataattttcttatataaattttaaatacctaattataatttaaaataaaagaaaaggttaaggttaaggtgaacaaacaaaaaataaatcaatttactttctgacaaagcgcacatcaaaaagaatttatatttcacaaagcaatgagaaaacggaaaatggcttatgttttgttatttatgaaacaatttaaataaatttttaaaatcttataatatttaaagaaagtaaaaagtgtctcttttttgcctaaatattgacacatttattatcattaattatttattcatttattcaacacatccatttataatcaatattcttacgaacaaaatgagaatcaatttgtgcattttatacaaaaaaaattttaatttattttaatttaatttcattttgtcggtaatcaaacaattaataatttttaattggttaatcgatgattcaataaatgcagtcgatcaatcaaagcttcatttctctgtcagactgtgcccgtcgtccgattggcaatttgttattaagatttgaactaataatgcctaattttagaagtgattttggaaacatttagcgaattttttttggaaattt

SEQ ID NO: 30070 - DNA, 1270 bp, Heterodera glycines
cgacatagagaaatttcgacactgaactatttcaaaaactgtcactgtttttccagcattttcgacacaggaccatttcgacagtgagtaaattcgacagtattgagaagtctttaaaatttccggacttattctggtttggacgactaatttttcaaaaactttacaattcataattaccgaaattaacaattttacagaatgggtattggattaaatgggctttaaagatttttttattgtgttaatttagttctgagcacgaataagatgtttgtttttcgttcttataatttttagttttttttttaaaaaatctttaatatttttcaattttttggcctcaggatttgggactaatatttgaaaagtcacaactcacttcagtgtagaacaatttttacgcaataaagctttaaaaaaagagaaaaataaggagaattttatgaaatttattttaaatttttatcttgaaattggaaaacgttattccagaaattctggaaaaagtctaattttcagaaattaatatagaactcggttctgaaaagttattttggtaaagtaaaatacaacaaaaatccgcaattttaaagccgtttgtgttcggtttaaccggtaacacaaacggttgaaaccttccgtcgttctgaaactacggcgaaaacacatgcgtttatgttttcggtttagccggcgacggctgaaaccggaatttcacacgtgaattgtgctgccggaagcaaaaccggagctaaattcaagggtttttgcgaaaaccggattttccgtgcgcaaaaattgccaaaatttttaaagttttaaaaactttaagggattcggaagggggtttaaaatagttaaaattttacgattttttttacagctctttttaacacaatgtataataaataggtaaattttaaaactttgttttcatggctgatcagtaaggggtcgtaaaaaaacatagatattaatccagaaaaattctatgaaatacaattgtttttctggtttgcgctaaataaaaggcaaatgtttccggttttgttacagaaaatacagttgttttccggttttcgccaaataaaagaaatgtttccggttttgttacagaaaatacagttgttttccggtttatgctacatagtttatgaaaagtcggtctaaaaaaaacaccaactgctgaattttaaattaaaatcgcataaaatcaatttaaattaaaaaacaaaataaaaaagaaaaattgtggattggtccatcc

SEQ ID NO: 30071 - DNA, 233 bp, Heterodera glycines
cccggcccagtcccggtcccggtcccgctgcactctactaaaaccttaattaattacgaattactttttgtttttctgcctcctcttctttttccaattgtttgtggagttcaaccagcaaaattcggtttttgttgctattttgtataaaattgtcattgatctgatcaatttctgcccatatttggttagccataaaattgttgttcaaatttgctgttgcaggttgtcct

SEQ ID NO: 30072 - DNA, 1266 bp, Heterodera glycines
gttctttgcgactctttaaaaatagtaatatttttaaaaaaatcagaaatgtcctgatttggcgggccaggccgttttcgtacgaacacatgtttttggggcacccccacaaagtgtccaagccacgaaatgtccaaaagagtaaaaacccacgaaatgtccaaaatttttcaaaatttataaaaacaaaatgagtctaatttaggatttttagggttttcggggtcgctgaatacgaatataccctttatattaccccttgcctaaccttaggcccatctgaataataaaaaactcaaattcgagacttggacatttcgtgggctggacattttgtgggtcagcgacagaaattgtacaaaaatctaatttttttttgaaaaaaaacaaaaatttgaaaaattccgactttttatgaaaaatttcggaagtcggaattccgaggcccccaaaaattttagaattccgaccccaaaaatgtcggaagtcggaattccgtgccatccctgcttcacacttttgtagtttggtttttctttttcattttggttaatgactgatattttacattcataacatttggagaaatgtaacaataagagttgaaagcaacattcatattgaaacaacattcgaagttaaattttgaaaaataaataaattagacaaaaatcttgaagaataacaatgtaaagagaattgacaaaaacacgtatatcagattggtagtgcttcctaatttaaacaatcgaagccgtggcgggtgtttcggcacataacgggagaacaccggcacaaagcgaggcggagacggaccacttagaagtgctttaatgacgaaaaaaaagataaattatgggatttgcacaaacccaccagccgaggcgaaacgactgatgaccgagtcacggccatgctgacgcaagtaatggaccagccaggcatcggtccatctgatgctcagttggtgaaggaaattggcgaccggacgaatgtcccaatagccaatcgacggaaacgcatcggaaatttgccgtgaatacttcgtatagtcaaactttgcttgtcgatttacgacctgaaaagcacaatttttgttcgttcttccaccttcgtgatgacctcgagccgaccatggggtgtcaaaaatagcattttggtccatcggtctgtctaaatgtttcgaatttgaatccaagtgaaaattatggcattcatacattatggtccggaattttcgggttcaacacggaaaagtttgacgat

SEQ ID NO: 30073 - DNA, 855 bp, Heterodera glycines
gatcgacttcatcctctgatttttagacttagctcatcaagagctttcgaatggtactaaatttgtcaagttttgatcgttttaaaaatcccccggataagtcaggagtgccaagggatggaaaaagataataaaatgaacaacagaaaaatgttgaaaaaattgcacacaaaaaagtggactttgatgctttaatcttcgcaaattgcgcttcgttgtttcaactcttccaataagccggcaatacttttcaaagcattggccaaatgttccttgatattcttttttttcatcaaagccttctctttcaaattttcaatggcttcttcctttttcttttccattttctttttctccttttccgttttctttttttccttttcctttaatgctttctgttgttccattttctttatttgttcctcgtgttttttctcgttggcttcctttttctccatttcgtttttccattctttttccggacctttaagaaatgcgttaaatccttccgtaaatccttctgtttccgttaatttccgcaattcttctaccgacacattaccaaacattgcgactttctcagctgttttctcgtaatattttggcttacatttcccgtccaaatagtcaaccacccctttggcagtcattcgttctttcgggtccaaatttaacatattctaaatgattattaatgtaagaatgaagctggctgggtggttaaaatacggaaagtggggggtttataagaagacatataaaaagaaagggtggggtgcctcggtagctaaatggtagagctgcccgattggccgtgcggcgccgacatttgcggcgttacatttgcggcgcgca

SEQ ID NO: 30074 - DNA, 926 bp, Heterodera glycines
ttccttcccttcccattcgtttgtcagtcagttcccattctttcgcaatttgctgctgttttcgaagcgcgtgaacactttccgcgcctcctccaaatcgttgcgcactttttcgcgcatgtaaaaaatgggacagtcgcggctaaacaaaacgtcccattttaacattcaaacaaatgaaaaaatgtggagactgacgcggaacagaatatttcgctttgcaatgttcccgcgcaattttggcattccgtccacaggcgtgaaaaacgatgctcaatttgccgcattgtcagcatctaaaaatgataatttatgaattaagtgcaaatggaataacaaatacaaaactaattggtcttctcgcctgttccaaatagattttgtcgatccgcggcctgcactgctcgcatgtggcgggtgccgcctcctcctcgaagtccatgcgcgttttgcaccccaaacagacggactttttggagaaatagcccgccatcatcccactcttcagttttgtccgcgcctttttctttgtgtgttcgccgcctgtaaaaagagtcagttgccgaaggaataaatggaaaacgcactgatcaacagcttttccgcctggtcgcccatcaccgggtccaaaatacgtgccaacggtttgaccagttggtgctccaaatagtagtcaaagtcgatggggatgttgttttggagcacaaaaatcgggtcttccgccttctcataggcgggcgtattggcgccgccgccgcggttgacaatgacgtagggcacgcggtcgccgagacgcggggcggagccggggtcacgcttgcgcattcgctccgctaactccacgtgggcttgtttggcggcatatttctgtaaacaaaatgaaatactctcgtgaaaatggcactaaaagtgaaattccgtgtaca

SEQ ID NO: 30075 - DNA, 1547 bp, Heterodera glycines
ttgattggcttaagctttaacatacatttttacgagtcgaaaaattttttaaacttattaaatattttttattatctaaattggctcaataaaaaggtttaataaaaattatttttagattaaaataaagaattcgaatatgcaaaatttaatttaaaaagagatcccaaaattttacacttgaaaatttattaaagaattaatcaaaatgtattttattttttctgtttttgtttaagatatagaatttttgctcaaatagaaaaaaaatttgtattattttataactttttttttcaaaaatattctatgaaaccttttgagttttattaaatttgttttttttgtggagttaaaaaacataattaattttcattttgaattaattttttaccatcatgtcccatatttgagcttcgtcacttaatggtttaccgaagttttttaaatttttttttactgttacttttactgtttttcattgattattaatcaaaattcttctagccacatatttatattttttaaaataattcattggtataaccaaattatatttaaatacattttgggtttggattttatatatttttcaaaatattaattttcattttataattatcttaatcggaataaataatttttgttttctgtcaattgaaacataatatttttattaattctatctttcatcaatataattttaaaaattactcttttgtcgcgattaattacttccgggttaaaaatataaattttattctcatggttcgtagaaaaattgtgaaaggaaataaaagtgaaatattttaattttaaatatttttaatttcccttctttttttttgctctcaaaagcttagtaagtttctagttttttgtcttcataaatatttttaagaaatttattttgttgaaaattaaataaattaatatttaatttaattaaataaacaaattaattattttaaaataaatttgactaaatataatttagttttaatgctttgaataatcatttttctgatttagagcatattatcatggcgatctgtcctgtatacccttgaacgaatatttctcattaattgaatttttttatttaaattatattcttttgtgcattaaataatttaatagtaattttattaattgcatatatcgatttttaatatttatttatatatatttttaatcattttttatcattttatttattagaaaatattgttagtaattaatgttttttttaattatttttttatttctttacgaaattttaatcttcgttactttatgtattcttttgggccgttgacgtaattaaatcttttagagtcattttatatatttttttcttttaatttgcttttattgtgtaataatttgatgtgtaataagtttattttttcactttttaattctaattataattcgttttcgatatcaaattaaaacatttattttataactctttataattataaaaactaattctttcattttaaatgctttttacattgcctcattaaatttattctttcatt

SEQ ID NO: 30076 - DNA, 1215 bp, Heterodera glycines
  unsure (1)..(1215): unsure at all n locations
taattggttttcgcccttctgaagactttttatttatgaataaataaataaataaaagaacgagcatngggctcgaagtttttgaaataattaaacaatgaatatttgagtatgataaaaatttatttaaatgccattttgttaattttcattttagaaatatttgttctattgaaattgttattatatttattaatcaaggatcattaatattaaatgacagcgcaaaataaaaactatttaaatgccatattggttaattagcgtgaaatttatttagacaaaagagtaacaaatagaaccgtagttaaatcgaacaaaagaaatttttaaaaaacaaagaacaaaacgaattacctaattagttaattggatgaaattatcgcttcttccgttgtttcttgctttcttcaaagagttgccaaattgaatttgaaattgggcccaaagttcgcctcggtttcgtcatcagagacgtcagcaaatgaaccgaatgggaacaattcatcatcatgaacagaatttggtgaattgtcgaccaaatagaatggacctatgaccatataaaagaggaatcatttgtgctttttttgaaacgcttaaatggatttttgtttcaaaatcacaaattaaaaagaatatttgacattatgtgttttgattatgctgaaaaagagtaggagtcgttttcggcgccagcccaagtttttgacaataacttttttcatagtcaaccaaatcaaacaatcctggtaacattcgaaaacccatcacattctctatgtcttacaaacaaagtaggctccctggtgttccgtcactgaaataaaattttatgccaactatttgtattttttgaaacaaaaagcattaaatttgtgcaaaatattatatttcgaaaaaacctatttgaccaatttaggcgtttttcccagaatttattaatagggctgggatttttatgttttaacatattttttttgtggcttagttatggcgagagaagcccaaaaatagcattttctccgaacaatttttgatttagagcgacttataaaaacataaaaacacatattttggcgttttggcacataaaaacatatcgcacatatttgggctattttggattttttagcacatattttggcatttttgagaaaaatcgtaagaaaaatacaagaaaatctgaaaatgcaccctaaaaattgactcctt

SEQ ID NO: 30077 - DNA, 1437 bp, Heterodera glycines
  unsure (1)..(1437): unsure at all n locations
caaatcacagttaaacattttctgttctccgcgtcttaaattttatttcttctgttcattaataaattacgaaataaaataatagctacataattagcaaatattaccttaaaaggctttttaaattagcgggaatttaggcgttttgcgtaatgtatgagacaatgatttctttacaattgaaaacaaatacacctctttttgataataatcattttattgtcaaatttcagaagcgaacaaaatgtttaaaaatttccagaaagtttatcctttaggttgtattttttgcatttttcttgtgaaaatttcaaaaaatggctgaaatatggactaaaaaaataaaatggtgaaacatggatttgcgcactttttgccgttcgctctgatgggtctgatgctgctgaccgatccgatcagcgccaaagggggacgagaatgtgaggggtgacaaagttggactggtgcttgatggaattgtgcagcggtttgctgcttgctttacggcaccaccgacaaggttttggggaagggcttgtcggacccctttgaactgaagcttcgttctcgactcgacgaccacgggtttcgattcccgtttactgtggcggatactccagctggcgggagtccgctttgatcgatgcgcgcttctccggctggagggattagcccgacgagcggccctgtcccgctttggacgattttggcaccgctcggctcttccttccttctgacgacgacgggaggtcacacccgtctcttcggttgctccggctggcgggagaccgaactgctcgaatttgttgctgcttcggccccctcccaaatgttccctaattgccgacaggaaggaaattgggatcgggatggttaggggagacgacggaggctgccgggaaaggaaggggtcaagaccggagtgggtgtcgttctgacgacggcaaaaaagtttgaatgggctgggcggacgtattcagagcgagttgacgaaaattaaagaccaaagacgccgaaaatcactttattttgtaccctcaaacttgggtaattaaaccgtcccaatcgggacggtgagggaaatacaaaatattgggaacacacaaaaatcggaacgacaaaagggcaaaatatggtgaaatcaaattaacaaacaaatgggaaatgcggccaaatcaaagaggcaaaagcaacgcaacaaggagggcaactcgggcagcggcaaatccaatggggcccaaacaatggcacggggaggggagggcactcgggcaatggcatggcatgaaaaaggagcagtgcgggccgggtgcgctgaatggcagcaggcgggtgctgtggaaacttcggagggaatcgttcgtgttgaatctgaaatttccggaaaagcccaccccttaaatacggcttttttgcaccnaaagtacgctataattt

SEQ ID NO: 30078 - DNA, 1083 bp, Heterodera glycines
acacacctcccaagtccctggtgcgcactttcccgtctctgatcactttctcgacggattctcgcagtgccgagccgtactgatccaagtggagatggttgagcatgttggcacagcacaaaatcattgcggttgggttggcaatttgcctaaaaataaaattaaattacgaatctgaatcaaaggatgggtcaacaatttcacacaccttccaaacgcctctttgtatgtgtgtcgtgatccgggctcaaaaatgacgtagtcagagcccactgattccccattgaccacgccggcaccgccgaccaaaccggcggccaagttgtcgacaatgttgccatacaaattgggcattaccatcacgtcgaactgttcaggatgggcgaccaactgcatgcaacagttgtcaatgatcatttgttcaaattgaaaaaggaatttgatagtcttcaaaatcagaatttcaataaatggacaattaacccccttttcccattattaacttatctcaatttttgggtacagtttcgacgtctccgtgcacacattcaaaaagagtccgtcgcccaatttcattatgttcgctttgctatgagtgaaatgaatatgaaaaatgagtgagaaaagcgggtaaaccccaaaacgtcgccgcaaaaaaaaattaaaaattttaataaaatttaaagttattttagcttttttgaaaatctaagtgttaataaaaactaaattgttgatttctaagaaaaaaaaaatcaaaaaaaaacttaaaaaaataaaattttttccttgaatttcttaataaaaaagtttttcgaatttttctagaattttttccgaaccaggctaggtaactaaaaattttttgataattttgtttataaaattttaaaaaattttgcggcgacgtttcggctggcgacgttttgtcctgctcccgagaaaagcattcattgaaaaacactcactgaacggcggtgacctttttgcggccatgtttagtcgcataatcaaacgcaaatttggccaccctttcgcacttctctcgcgtcatgattttcaggcactcaattacaccttaaa

SEQ ID NO: 30079 - DNA, 1398 bp, Heterodera glycines
tcactgagaaatcgattataaatatcttctaaacatctatggctttcgaatgataccatgattgtgaagtttggccaacaaagataaaagttatagctttttgaacgatgttgagacggagttggccagacggagttgacccctaccgcatccccgcgactctgacccccgcaatcccccgcccccgcgaaaagccacccccgcccacggggtccgaaccctacttttgatggtgacagtataaaacggcgcgcaaaaaaaaagtcggctccaataaatctcacgctaaaaaacccgcgtcaagtagcaacgcaaactgggcggatcccttaacaacagggctgccaagtgtcctttttttaaagatttgtccttttttggaggggccggatctttaaaatttaaaatgtcctttttttaaagattgtcctttattttaggcttccccaaactttttaaattttttgtgcttaatgatttatttcgctgatattttatttatttattttcgttttaatactattttctcttcctctctttccctctcaacttaacttttgttttttgagcattctcatccataacctgttgtcagacgcataactatttcccatttttagcttttttttacattttccaaataccccaccaaaaacgcaaaaatatttattgtgaaaattatgcaaaagaattccggcacataaagaaattcgtgttgatcggttccctgagaaattgcgttgggtctcactgatgtcggacaaaatcccgcacaatgacgcgttggacttggccagacagattgccccggacctgacaaataatctctttgacgatgttagcgaagccaatcaaattctcaattcaatcccaaaggacgaattgcagaagctcaacccagaacaaaagtggatgaagctatttgaagccgatttaccgcacttgtacaagttggtcagcattgtactttccgtgccggtctcaaatgcatctgtcgagagagtgttttcgctttgcggctcacaatggactgatgttcgaaattcgttgaaagtcgaaaccgtgaaggctctgctccagacgaaaataaattttgatctcacttgcccagaaatgtatcagatgctcatttccaatcacaaactgttggatcagatcggtggatgggacaaatactttgaatgactcttttttgaaaaaaacaatattattttcaataataaaaccgtcgtaattgtgcaaatttgttgtattttgcttttataaaagccaataatgttttttaactgtttttacaaggtaacaatccattttttcaaaaaatcttttttttggggtccaaatctttgttttagcctcgtttgtactttttttgaaaaaaaaacttggcagccctga

SEQ ID NO: 30080 - DNA, 1775 bp, Heterodera glycines
tactctcacttactcactcttccccctccccctcccctacactcaattttccaattttcagaaatttcctaggcctcaaatttctccgccccctcccccacactcaattttcaggaaacatttcctaggcgccttcacaaaatttcttccacaaccaattgtcactctgagcactggggcaactgagtcccacgcggtgatcatctccctcttgggccgggtgtcaggggagcaacagtaatcccatgtgtcccatgttttgggtctgatacagtacatataccgtatcccggacatgggaaatggggtggtaacattcctgtattgtattttccatgtttttaattccacgttgggacttaggctacttttctttccaaaattttttgtttaaaaatagtccaagccgaaaccttggaaccgacactcgtacacagggtttgctgtttttacgaatttcccaccgaagacaataccgtagctatatgtagggagtgatgctacagtcctccgtccgaaaaataatttttttttaattttttgccttttttgctgccgtaagaaaaaccaattatatttgtgtgccatactgtattttcgtctccctttttcacggtcctctcacagggcagaaaatctcgacttttttttggtccaaacttggcaaaagtgtcgagagttgtgtgcccgctcacacgcacgcaattgagctgctctttcatctttgctctgttttcttggttcaccggcagttgtaattttcttgattcactattccctctttttctctcccctctctctctctctctcctttctctctcttacctcccctctcattctctcctctttctctctctgttttcccatgtggcgctcacttggccacaaggccagctgataataataatgagggagggagtacatgcactagagagagagaaagagaaagacagagagagagaagagagagagaggcagggagtaaattggagaaaagcggaacagactggagaacaaagaaaaaagagccgacacatagggagaaaaagaaaaaaatcaaaagagaacgatacggaaaatagagaaagaggtcatgcgaactggtttagagagagacagagaaatgggcaagagagagggaggagagagagagataatgatgtcctgaagaaaaatagggaaagatacagagaaagcgagagagtatgtaaaaaaagataagagagtgagaaaaagaaagagaatgaagaggaagacagggagagaacgagacggtggttgaaagaattaataaagaaaagatagaggaaagagagagagtgggcattgaggagtgcgagagagaaataggaagaatgtggtaaaatggcttttcttgcccattcatcccctgcggggacaaaagttggtcgtcgctgggctgctggagctgctgtggcgatgctgctgctgcagatggcgtacataccgccggcggcggggcaccgcaacgacggacggacggacgaccgccccgccggcgatggcgcgggcgggggcaggcagtacgacgacggtggtggtgttggttggcggcggcacatatataataaagaaggacgagctcacacagcccttccccccaaccattctccatccccccccccaattttcccgtccagcgaagacgacgccgactgaggttgaggtggaggtggaggtggaggaccacccctgctggcgggggacacgtgacaggagcagggcggagacggaagactaggtaaacggaggag

SEQ ID NO: 30081 - DNA, 1134 bp, Heterodera glycines
  unsure (1)..(1134): unsure at all n locations
aatgtaagggatgaaaaattatccaatattaaaaatgtgtgcatttaagacaattaattatcaaaaagggcacganaatgggaaagcaaattttacaccaaaatcttatggaaaaatcctgnaacaaaaaatgttatttaaatttattttaaaaaattttggtcactattttatcacttttttgccattttttgtcactatttagttaacaggggatttttcgtacttaaaatccacgccttactcatatgaatgttaattattgcagctcgatctgttgaaggcaaaaattttgtctgattttaacaaattggacaatgggaagaggaaatttacgagcggtgctacgctgggatatgtgacaccggtgagtgtattgaaaagaatttactaagcgattaaaacttataaaaagatgtaacacgaaaaccgcaaaaaatcagaatttttgcatatttttatttatgataatatctttatgatttttgaaaagccaataaagcttgttgcgagctttcgaatgataccaagtttgttggtcaacaaagaaaaaagttatggtgctttaaacttagctcaaaatccgattgtgtccggcctccgaaccttggataatttcgaacaaaaaatcaaacttaattttcctcttttcgcgtttttggtctaaaatcggtttaaaagatatttattgaagctcctcaatttttcgagttttaaaccggtttaaatgcttttccgcgcccaattttgagctgttctatcgttctcagcgcctaagaaaacctataaaagtgtttatgcgacttttcgttggtaccgtattcgtcaatttttccttttttagtttatttccttacatttaaaccggttttgaaccaaaaatgcgaaactagaaaaattttaaatttcgtatttttgttcggattcggaattcgaattgtgtcgaaatggctatcagaataaaattctccgtcctgaaatctcataaaatgacttttttgagaagaggggggggggggggggggttaccatcggcactattaccgattttcctgataatttttgacgcgtgagtcaaaaaagccaaaaatttacaaaaaaaaatcgacaattctctacacaataaaattggaa

SEQ ID NO: 30082 - DNA, 573 bp, Heterodera glycines
tgaggaataaaagtatttttatctggtgatatttcgagaccgcgcacttttttagggggggggggggctacaccaacaatcacggactaagaagatggacgacctccttgaacttgttgaccaattcttgtccccttgatgcataattgcctgtgaagcggcaaagcaaatgctttggttggccatcggttgtcggcgtgtgcaaccatttggacaacacttcgccagcagttgcattttttccgtcataagcaattggagcggggaacagacgataggaattgatcgatttcagttgcgtcagatcagtgagaattgtcggggaaacgaaactgcgcaaattgttcaaatttgcaggcgaatagaaggccaaatgacgaatggttggcgcaaaaatgggccaaatctccctgaccaacacatcccaaatcgctgttccagtggacgcgtgcaatttcaatttggtgccccttcggtcaaagatttgctggtttaaacggaaaaattcgatgacagtttggtcgatgtatctgcgcaaaagtggggcaacaacataaaacgcgttaatacacg

SEQ ID NO: 30083 - DNA, 1110 bp, Heterodera glycines
  unsure (1)..(1110): unsure at all n locations
ccaaactttatttacaggttaattaaggcactctgatgcttttaataccaaaaagggatgaataaaattcttaaaaattttttaattgctttttaaatatgcgaaaagtttaggcttaactttttactgaaatttcactcactcatagttttacgagtagtgatcagaaaaatcccagattttgcagggtaacagctgagaaccatacctaatttatacttttttcccgcttactaggccttgttaaaaattttttagattttctgattttctgtactttttcaattttttgcaaaattaattcataaatattttttcagaaagtgctctgaaacacaccaataattaggcgcacttttcgccgttttatcccgctttttcttctactacttgcgacggagacaatgaccttaattaagcgaaatttgaataatttttaaacaaaaggaaatgcattttgttgtttacccaagccaatttttggcattgtaaagccaaaagttgacaatgttcaaattgttcgtcttttcgtcctcccactgaaccgacgccgtctccccaatttggcatcgcttcatcacccaattgtaaacttcgcgcggcacattctccagtgttagcttttctttggtcctttcgtttaccaattcaaatggctcaggcattaattgttgcagttcaagttgaattttgtagctggcagaagtggtggcactaagaaatgcctaaacaattgagaaacaaaatcaaatggcaattaatccaaatagttttgtgccaatgtggggactggcctccttgaaagtgttgacccattcactggattttgacggataatcatagcaagtcaatcgcttcggctttccatcttttgtcggggtgtgcaaccatttggacaacgattggccagcagttgcatttggcccatcatcagcaattccatcggggaacagatcaccagaacacattgaagggttcagatcggtgagaattgtcggcgaaataagacgacgaaaattgtccaaatgataagcattggaaaagaacaaatggcgaatgtttggcgcaaaaatgggccanatttcacggacaaaaacatcccanattggc

SEQ ID NO: 30084 - DNA, 2072 bp, Heterodera glycines
ctttactaaataagcagaacgcatccccatacgtgatgaggagccctaatgagaaacccaaattctcgttcagcttgttctgcggttgatgctaatgagactgattagtggcaccgcgtgactaatttgttccgtgccggccccgcggaaatcgcctttatttaagcctcaactttttgtgcgtttcctccccccctcaactcgtcttcgcccccccgtcgtccatcatcggagcaatgctcgtaatcgccagcatcagcctcctggcttcttatggatttgtatataatggaacaaatgaagcgaaaagaagaaaatgggagaagcagagaaattggaaatatggcgtttcggagagtgaaatggacgaacgacggatgaccaaagaaacggcgaaaggcgaaattggggggggggggggaatggaatagaaagaggcaaacgacaaaattgaattggaaatcacccaaatgccaacgaattcagttttgaaattaattgcgcataatcaaaaaaaaatttgttgcctcaaaaaactttctttaatactaaaaatataaataaaaatgcaaagaataagaaaaagtcggcgagatgggcttatgttgtaatgttggacaggttgtttttgtgggaaagaagaagcgacgattattcatttatttgttgaaatgattaaacgcattatgcaacaaaaagataaaaccaaaaaagcaaacgagattaatttggacgaggtggaggcaagggaaatggcattaattagtgggatgggaagaggtaattagcataacattaagggcaaacaaggatatagagctggacgagaccaggattacaatggaattttaccggactcccggtcccctttttttgtggggatgagggaaagaccgtgaccgggaatctcggaaagcaattgaaaaaatgaataaatgacctttattcaaagttaacttagctaatggtgaataagagtaatgtttggcttctgctgtgtttggcagttcaatgagagaatggatttgtgaattaatggggggggggtgtcgcaacgcaacgacaacaaaccgatggacagacgaccaaatgaccgccgtcgacacaacgccaaacatttcctttttcaacggatctttcgaatttctctccttttctccgcattctctgtcttcgcttcttcttcttctcctccatttgctgctgatctcctgaaactgcaaatggatgtgcgaatgtaaaaaatgggtcaatcgtcggtcgcatcgccaaaagtgcgggcgaaggggcggcaaacacttaacgatggacgcttaaaacagagcattttcaatttcacattgaaagcatgaaaagggaaaaaagggaaatgaattgaaaaagtgtcagctaatagggagaaattggcaaccaaaaatgttgatgatcgcttggcacttccgacttccgttcttactgtttaaatggcatttccaatattttcggagggaccaatcttaaatattatgcaaatcataaaaattatggcgctttaaagtggttctttttgaactttttgaaaaaattttcaaatatttatttacaattacgagagtgccacttaaaaatatattaataaaaaataattaatttctcacattttgcttgaaacgcatcttttttcgaaaattcacctcatatttacttcatctacagttggaagccgaatcggagattagtgaaatcaatgaaagaatatctaaaacattttaaccatcttttaaaaaaaaataaaaaaaacataaaacactaaaattgatggaaaagtatttgaaaaaattttttcaaaaagaatcactttttgtagcgccaaattttcttacatatttaggcttctgattgaaattctcttttaccaatcaaccgattcctcagatttgctcaaaatgttgaaaatataaaatggagctggtttttcaatatattattggatgagtgtgctgatttgtgagtgttgaccatccctcccacccgcttctcattcccaattttcccctcttccgttgctcaagttactttatttttttcatttc

SEQ ID NO: 30085 - DNA, 1624 bp, Heterodera glycines
  unsure (1)..(1624): unsure at all n locations
aactttttttttagtcaataatccaaattcntgaaacactggggaacatttgaaagcatttgtttttttgggttagtggcaaaattagcaaaaattttcatataaaatcagtctgcttttttaatttttcaaaaagtcatgacataagcgggaaagaaaggggggggggagacaaactagagaatttcttctatgagccaccgattgtaacttttcacgaacatttctgtatttttattcttcgaataaatagttaatttgtagagttttcgcagctaatatccaggccctagctattaatatgggaaagtcatttgaaattacttaaaaagtgtaaaaataattaatttaaaatatattttattttacaaaaataaataaaaacaataatctttgaacaactaattttcgatgaatggcggaggaccttccaattaaccaatgtttattacctacaaaattgtcaatgaaatgggaaattgacgacatgaaaaataaggggatatttggatgggtaatatacttaaaagataaaacccaaaattgataaggtgataaggaaacacaggagaaatcagctaaataatagtaacaaatcataaataattttgtctctaatttgaatcattaattaatgaatgtatcaaaatcgtataatttgtgcaatccccgtgagacgattaattttttatacattttgattggaattttataactaaaccgttttgtcaaaggtaaaacataatgcttacaattaaattttattattttttttattattattatcgtccaattttgacattttcatttctttggcaattaaatttaatgcattttaaaattaaaccaaaaagcaatgaatggaaaataaataaataaataataaaatcaatgatttattatattgaaaaaaaacaactaattttattatgcttttcattcaaacaaattcgcaaaattaaaatttttctttgcaattatttcagaatcgtagaaatgatttgtgccaattaataattttattttttaaattcattttatttaaaatagaaaaaatgtacttgattgctagaaaacatgaaattttgtttgctaatatttgtacaaaattttctgaaaaatgagctaaatttttttcgacagcgaattttcagcatctccaggatattttatgaaaaaactagccgagaattcgcgactataatgaaattttttcgaaattttgcagagaaatagaggacactagggctatcgaaatgaccaaaattttgcatttttatctaaaaaaaattggtggttttaggcgttgccgggtgaaaagtgaaaattttggccctattttgaaataaaaatatttttcataatatgggtttttgttcttgtttaaaatttaaaaagttttaacagaatattaaatttatttttaaatcccatattaaattattccatcagaaatatttttaaaggccaaaaatgcttttatggcatttgatatttccttttattttattaatctatacaatcgaatccggcaaaattcgaacaaattttgatgaaatattcggcaacaagtgggatccggggggggagtgaagaaaaagtgataaaaatagagcaaaatgaa

SEQ ID NO: 30086 - DNA, 1536 bp, Heterodera glycines
  unsure (1)..(1536): unsure at all n locations
ttttattatttttagaattaataatattatatttttccaggattatatttntagtgcaaggaaaanccaaaaaaattaaaaataataaattaggttggataagtaataaatcggtttggtcagggttcacaattttattttaaaaaatgtttattctaaaaatacgcaaaatctcctttaaaaattttcactagaacaattttttttcaacggatttttgagtaggtagggttagaaaaaaaaatttctaaacatattgaaagaaggcttttttcactttaaaatatgaaccccacagacgaatgctggctccgagattcaagatcgagacccaaatagcaagaaaattctcgagcacgggatcagctcgtttccccgccgcacgaaattttttttttaaattttcaagcagaatttttcagcaagattagaaatttttttcctaaaaatttttaaaattttccagtgattttttagtaaaatttttgaaaaaattagtaattcacagaaaactttgaaacttataaaaatctttttgaatattcccataagatttacctgaaatggaacgcaaaaaaatatgtttatctaagctatttttaaatttggcatccttattaattacccttcaatgttttgttggcgttctgccgctgctgctgttgataattagtcacgccaatttgctgcagcaaattggcatttgaattcttcggaatgtttgccggcggattttgaacatttgagaggaagacacttcttccactagtcgaatttacgccacctaatttggaattaatcgatgattaatcacaatttttgtgtttgttaattcacaaagctggcaaaatttgaatcaaaaattccaattttaatttataggcaaaaattttcatttctacaaaaaaaaaaaagaaataagttttgcacgaaagcaaaaattgttttttttaaaagcttaaatttccctttttactttttagaattttgaaagcttagttttttattgaaatctccccaatttcatgtccccttttacaatgagttttaaaatgacaaatttgaaatgtattttttggaaatttaaccaaaaaatatctttttataaaatttcgcatccctaattaatattatttaaattattttttaataccattaaaaaatgcactcaaaaacgacaccacaaacaccgcaaagatttgatttaacaccaccattttttctgcaacgaaaattaacatttttgttttagaattttttattaatgcataaaatatgccaaattattattatacaaatgtacaatttttatattgctaaaaatggccattattatatgctgcaatcgatgttcaacgtttgtaaatatttgctgctgtttgttgcgtgggatggcattggcattttaaaaggcgccacgtgccctcctccaactccgcccctcccacccccgaaggctaattaggaanatttggatgagtgccacggaattcaacttccgtcatttttttggntgagtggaagcatgatttccga

SEQ ID NO: 30087 - DNA, 975 bp, Heterodera glycines
ggttacgagatagaaaattgtcctaaaaagagatacccattttttgtgagaattaattcacaatttccgcagctcttgcggtaatggaaaaaattttgaagaggctctccggaacggattagcatcggggttacgagatagaaaattgtcctaaaaagagatagccatttttctgagaattaattcacaatttccgcagctcttacggtaatggaaaaaattttgaagaggctctccggaacggattagcatcggggttacgagatagaaaattgtcctaaaaagagatagccatttttctgagaattaattcacaatttccgcagctcttagggtaatggaaaaaattttgaagaggctctccggaacggattagcatcggggttacgagatagaaaattgtcctaaaaagagatagccatttttctgagaattaattcacaatttccgcagctcttacggtaatggaaaaaattttgaagaggctctccggaacggattagcatcggggttacgagatagaaaattgtcctaaaaagagatagccatttttctgagaattaattcacaatttccgcagctcttacggtaaggaaaaaattttgaagaggctctccggaacggattagcatcggggttacgagatagaaaattgtcctaaaaagagatagccatttttctgagaattaattcacaatttccgcagctcttagggtaatggaaaaaattttgaagaggctctccggaacagattagcatcggggttacgagatagaaaattgtcctaaagagagagccatttttctgagaattaattcacaatttccgcagctcttacggtaatggaaaaaattttgaagaggctctgcggaacggattagcatcggggttacgagataaaatattgtccctaaaagagatagccatttttcctgagaattatttcacaaatttccgcagctcttacgggaatgg

SEQ ID NO: 30088 - DNA, 1078 bp, Heterodera glycines
ttttcaattaccgcaagagtggcggaaattgtgaataattctcagaaaaatggctatctctttttaggacaattttctatctcgtaaccccgatgctaatccgttccacagagactcttcaaaatttttccattaccgcaagagctgcggaaattgtgaattaattctcagaaaaatggctatctctttttaggacaattttctatctcgtaaccccgatgctaatccgttccgcagagcctcttcaaaattttttccattaccgcaagagctgcggaaattgtgaattaattctcagaaaaatggctatctctttttaggacaattttctatctcgtaaccccgatgctaatccgttccgcagagcctcttcaaaattttttccattaccgcaagagttgcggaaattgtgaattaattctcagaaaaatggctatctctttttaggacaattttctatctcgtaaccccgatgctaatccgttccgcagagcctcttcaaaattttttccattaccgcaagagttgcggaaattgtgaattaattctcagaaaaatggctatctctttttaggacaattttctatctcgtaaccccgatgctaatccgttccgcagagcctcttcaaaattttttccattaccgcaagagctgcggaaattgtgaattaattctcagaaaaatggctatctctttttaggacaattttctatctcgtaaccccgatgctaatccgttccgcagagcctcttcaaaattttttccattaccgcaagagctgcggaaattgtgaattaattctcagaaaaatggctatctctttttaggacaattttctatctcgtaaccccgatgctaatccgttccgcagagcctcttcaaaattttttccattaccgcaagagctgcggaaattgtgaattaattctcagaaaatggctatctctttttaggacaattttctatctcgtaaccccgatgctaatccgttccgcagagcctcttcaaaatttttttcattaccgcaagagttgcggaaattgtgaataattctcagaaaatggctatctcttttta

SEQ ID NO: 30089 - DNA, 1678 bp, Heterodera glycines
  unsure (1)..(1678): unsure at all n locations
ttagcaatgcaaatgtccaaaattgggtccgacatttggcttagccgttgggcttccgccgtttcaccgctgcccaatgggtccgagttcactttccctgcggctgattggaggtgcatctccgatcgctttttccttcgcttgataatctgaatcatttccgtcccttttagttttcctcttttctcgcgtcccattcaaaaaatggtcccatcaacgaatgctcagcaggaggaaaccaatttttatcttttcgtatacattggaatcgctgctctgaacaccatttgcactctgatcagggcctttttgtatgccttcggttgcattttggcagctaagcaaatgcacgaacgaattctccaccgaatacttaatgtatttaattgactaattagttgtccctatcaaaacatccccacaggccacgctgacttggtgggaccggacgccctgtggccgtgtgaccaatcggtgcgttttcggcatttcgcttcccaatcagtcagtcatttttgtccttttttcgactgtccaccgacgtgaaccgtgttgacgatgcgttacccttccaactgaacattctactcgcctccctcttccccctcgtctcctcccttttggtcacggtcgttgctcttccgctgctcagtccctttgtgctgcttctgaccgtcgcttatttcttcctccaggcacattcccttccatccaatcattcccatttgtgctgtttagcgatactatcgaaggactacggtcgaattggtacgtacagtactccatttgtgtgcaaagggagtcaaaacgggggataggaggggggggggggggggtggaaaggtcgagatggtagcacattctcctttgatttacttagcgtcgtatcgcagcccttagcctgtcgcccctgtacagtcatttggccgagactgtgtccggcctcgtgtccatccgcgccttccgaatcactcaccggcatgatcaattcaatccttgccgtccattgtcattaattaattggtttgtccattcggcagattctcctcgctgatgtgccaccgtttggagggcaatgtccgtgctctcttctctcaattagcttgttaccaatggttggctgttcgcacccaaatgctcggtgttgccattgtctctgtggtcgctttcgccagtgttttcgatgttcatttcttccatttggctgaccccggtgggtccaattggtctctcttttccagctccaaactcattaaggcttaattggcctttccattacttacgctctttcatttaccgcccttttcaacggcgctttaaacacttttgttgaaacggaaaaaggtgggaattgtaattacaactgttgaagcgcattaattgccatttcctgggcttttaattcagaattggtttctgtggaacgaatttgcgattatttggccaatgttccggaagaaattgacgagaaaaaggccgaaggacagccaatcggacacattttggtaaagcatcactttggatttggatagagcatcctcttcaatatccctttttatcttcaaaccattaatcccacacaatgtttccttcttcacgtagaatcgacaaatcaccgnccaaattcgcttcctcgggaagatctcttcgctatgcttccgatttgacctctggcaat

SEQ ID NO: 30090 - DNA, 1368 bp, Heterodera glycines
cccgtgcccccgcgggggcgaaggtcgcgggggcgggggatgcgggggtcagagtcacgggggcggggacgggggtgagccccaaaaacctgtcccgcccccggggacgggtgcggggtccgaaccctaaattaaattaaatgcgaaatgtgcacaaaatatttaaaaagccctgtccatgaaaatgttaaaaagtaaaatttggagaaaaatggaaagtgaggacaaaccaaccaattacgaattggaaaaaaacgaatgatcgctttgtctgttggtcgtttgtcttcaagagaataatctcattgtcaaataaacattattacatatgtgtctcatttattaatgcttctttccgcttccatttgctgtccctaccgtatatctcatccgcccgctaccgtatcgtaactcgcgcgaaacaattttttgtggagttgcaacttccacacggcgccactcaacaaaatgaggaggatgagaagaagaaagacaaagataagcctgtgtgatagaaaaagctttttgcggaaaaggaaaaagccttaggaaaattaaaattttagtaaaaaaaaacccacgcggtgttattactctcagtgaccgccggtgccaatgtcggccgttcgaagatgacgtgttgctgttgctgcttcgtctcgctgtccccgcgtccgttctccatctcttcctgcgcctcctcctcctgctccgtctcctccttttccgctgtctcttcctctccctcctcgtcttcctgtaactctctcctcctgctccctccgtcttccccctgctctctcacgcccttgtgtcccttgtctttcgcttcttccccttccgtctcatcttcttcctttgtcttttcccgttcctccttttctctcgtccctttgccctttaccctttccctcccattttttggcctcattttccctgcttttctttccccattttgccgactttctttggcacgttcaatggcttcggtgtcgtttgtctaaattatcaattgcataaacacaattagttaattggttgccatatgatttgatagattaccgtgaagcaaacttccacttgcaagtcttccgaattgaactttgcgcaccccgtcggctccaattcctccgccaatttcgaatcgcgcgaaaaagaggcgcagccaatctccaagggaaggaagcacatgaaaaagaaggtgggggggggggggcaattggtgttgctgctgcgctctctctcaccgtccgataagcattcaaatggccaagtttcgatttgatgaacgctcggaagcagaattcgccggtgcaagatgtttttttagagggcattttctggcctagcaactgaaagaatgagaag

SEQ ID NO: 30091 - DNA, 1114 bp, Heterodera glycines
  unsure (1)..(1114): unsure at all n locations
cgggttggaggggcacgaaaaatgaagtgaaatgtgtggcgttctccgccagcggcgaacacttggccacctgctcccgggacaagtccgtctgggtgtggcaagtcagtttttcgttcaataagggaaaatcagatggggaaattaaacattgttgcttttttggatatagagaccggacgagtcggaatccattcgggcttttttcaaaatcctgatcccatattctctgaaaattttctggtttgttggttttgaaaccgtccaaaaatttttgatttgctaaatgcatgtcccatttttggttatttccgaaattcgcacagatggacgacgctggcgacttccaagtgatctccatcctgcaacatcacactgccgatgtgaaattcgtgctttggcatccccgcgaggaactgcttgtctcgggcggctacgacggctccgtccgcttttacgcttccgacggcgaagattggtgcactggccattcggtgaatggtggtggtgggcgggaagggcaatgtagacatataagtaacacatttatgaaaatatctgtaaaatttaatgtaaaaatgttttagggagttttggggtcactgaccaccacgaatttgcatcggtttcttccaattcgggactccgcacccaaaatttgaacttcgcatttttcttttttatttaaaaaccggtttaacttcacgaaacaaatgatgaataaacaatcatttaaatcgttttagaacaaaaataacgaaatttaaaaattgaattttcgactttctgttccatttgtgttcgaaagtgggcaaaatgggtgccggattcatggtcagtggcctcaaaattaattaaaacatgtttaaatgacattaaattttagaatttttattaggggaggcttaattacagtattaccgaaaaattttatcaaagacaagcacgaataaaattattttacagatatgaccggncgacatataggttgacaatcgtgcaaataattntatttttgaatttacatatatatntatttaataatatnntcacgaattatgaattattttaagatttcataaaaaaattcttatcactgacgaaatcacttctg

SEQ ID NO: 30092 - DNA, 1598 bp, Heterodera glycines
  unsure (1)..(1598): unsure at all n locations
tggcaacggttgtgcaaagcgttggactacccaggtgaaaagcggattttatgggagtgggaaaatggctaaaaatgaaaggaattaaacggagagactgaaatgatgaaaaacgggggccaaagcgaacggaaggggtcaaatgcgtcccagggaactttaaaaggcttaacttttttctcatttggccaaattttccaattttggcagcatttgaaagctctatatgtttagaagctgctttgaaaatgaataatgaatgcataaaagtcagaatttttgcatatttttatttataactagagaccggatttttatgtttttacatattttttttgcggcttagttatggcgagagaagcccaaaaatagcattatctccgaacaatttttgatttagagcgacttataaaaacataaaaacacatattttggcgttttgtcacataaaatatgttagcacatattttggagtttggcacatattttgcacatattttggcatttttgagaaaaattgcaataaaaatacaagaaaattgaaaaatacacccctaaaaatcgacttttttcctaattattaacataattttcaaattaaaaaatgttttcttcgattgtagaaactaatgaaatctcgaattcattaattcgtcattggatttcgaagttctctgctggaactttcaatttatagaaatgatttatcaaaaaaagacaattttaccccaaacacttcgaaatgtatttgatttgcgttgtatgggctaaaaatgataaagaatgagatttttgggaatttttatgcaaaaacacacttattttttcaatttttaacacatattttagcacatattttggcatttttgggggtttttagcacatatttcagcattttttagcacatattttattacatatttcaggatttttagcacataaaaatccgggccctactaatcaattacagaacgccaaaataaaataaaaatacaaaaataaaagatagcactatgttttaccaatgattttataaatttttttagtttatatcttggtaaatactagaccaaataaaaccattttatgctcattttgaagggaaaattctgaagaatattataaaagggcttttagttttttaactatttttctgcggctttatttcgacgagaaatgcacgaaaaacacatttttagctcggaaattcttcgttttaacgccactattcatcactaggaatcactattttggagctttgccactaaaaaaaattattttggaagttggccactaaaataattttttgccactattttgacattttttggaaaatttcccaaaaatgcaataaaaatgaaaaatataccccaagaatcgacctaaaaaattcaaaaaatacaccccaaagaatcgaactaaaaattttcaaaattacacccctaaaaattggaaattttctcaaaaattcgtcccccttttttttcttgctcatatttgctaagaaaatgttttgtaactgtaatcagtgaataaatttgtttgcctaattntatatnattttcaaattaaaaatagcaaatttaaaaattacaccc

SEQ ID NO: 30093 - DNA, 1079 bp, Heterodera glycines
  unsure (1)..(1079): unsure at all n locations
ttgttgattgctgctcgatttgtcataatttttgaaaatgttaaattctcaatcgttcagtaataaagatatttgcttcaaattgccttgcggtataattgtttccgggccctcctcgtcgggcaaaacggaattcctactaaaatttattgctgagtgcaatgaactgatcgcacccagtcccatctcaattctgtactgttttggtgagatgaattcggcggtgccgctactacaaaaggcgggagttgaggtgtattcgggcgtaccttcggaggagctgattaggcgccttcccaaaccgatgctgctcattctcgacgatctgatgctgtcaatagaggagcgctatctgtccgatttgttcaccaaaaaatcccatcaccatcagtttacggtagtgttcatcactcagaatctgtttgagcggaagatcaaggtggctcgcctttcggcgcagtatttggtgctaatgcgcgcgcccaactcgctgctgtccatttgaaatattggagttcagctttttccgcgtcaactcgattttttccttgacgcctaccgcaaggcaaccgcccgcccctatggctatttgctaatcgatatgcacgcatcatctgatccggcgcttcgcctccgcaccaacatatttaaagaggagcaggaggaggacgagggaacagttgtgttcatccccaaaaatggagcggtataaacggcaacaacaacgacaacaacaacaacaacaagctaaagttagtcaagtgcttgaacattgttgcttcccgattccgactgacaacttggcagaagaaacgactaatgccctacgtggacacggtgcgccgcgtgagcagagcgaggagcgagaggggcgctaagcgagcgcttgtcgtccagaaagggagagggggtttggcggactatttgcagcccttttacccccgtcttaattgaattgccaaatncgntgtgacccgaaacacataaatacccnntcgtaaatgtctcacacacgcattcattcattaaataaaatgggcaaacaaattcattctcgtaccacaaaaaaattatcgggg

SEQ ID NO: 30094 - DNA, 920 bp, Heterodera glycines
aatagcagaacacataaatttgcaataaaaattttaattctaaaatttttgtacaaaattaaacattttcataaataagtaataacatggaataaaattattcatctaagaaatttaaattaaaaattaaccaatttttggtgctattgaatataaaaatagggctttcaattcaagaaattaaataaatattgtaacatattcaggataaaaaaaccattttaatacataaaataataaaaaataatttcaaataaaaaattaaagtgcccataatataaagttaatttttaaagttacaacctatttacttaaattctaataaatgaaagacggctgaagtgaataagaatatgcttgatcacttttttgaacgcctaggggacagctcctgcaaaataaaaagaaattaatattcttttgatttatattaatattaattttaagagttaaaaaaaataaaactataaaaactaaaaagttgtaaattaaattcatcatcaaatataataaaatttttgtgcaaaaataccaaataaaaattttgccttcaaaaataaagtgattcaacataccattaatttcgacgatataaaaagaaaattacagttgtatataaatataaactaattcattttttcggtagaaagaacattaaataattattacttaataaatttaaattgtatgagtttccttgtattattactttttttaattagttaagaatagtacttgaaattttaaaatattttgataaaagtttttaaaatattcattaaagaatagtagttaaaagtatgctaattattattttgtcaaatttttttgcttcaatagcatcccagacttcgatcactattgttacaacaatggaatttattttcatttacattaccaattgataagcaactcgattc

SEQ ID NO: 30095 - DNA, 1815 bp, Heterodera glycines
atgaagcagggaatgaaaattctagaaattcctttcctctttatatacacattagtttttgctggcgacaatgagacaaaaatcgctgcccgtcaaaatgtcgctgcgtcgaaatgtcgccgcgtcataatgtcgctgtgtcgaaatatcgctgcgtcataagtcgctgcgtcgaaatgtcgtccaagctaaaaagagtcaaaatgtcaccaagccaaaaattagtgaaaaagtcgaaaactacattttaaaaaattataaaaaactaagttcattatcaatttatcagaatcgcataaacaaataacaaaaaaataaaatttgcatgaaaaaggaatatttcaaaaagcgaatgaataaaaaaagggtgaaaattgggattcaacaattttaagcaacagccatgcttgaatcttccatgttttcgtagtccttcaatttttctgcgtatccttcgacctgcagaccaagatccgtaataacatcgtgaatctcggcatcattgtcccgtccaaatgccatcttgcactgtttttgctcaaatgtccaaactctaaaaaattaaatataaattctgtctttggcccctaatgagacaacccgttcgcacccaaaaacgagcacaacgttctttgttccaattctgacagtgcgactgtcgtatagcacgatgtcctcgccatccagccgcaatttgtcctgattcggggttcggctttcacgcgctcgagttttttgccgtcgaatttccgcctaaattcttctttgtctaatgaattaaatgcctcccaaacattttgtttcgggggcttaggcaaatgattgttctttttgtccgagaaaaccggacatgctgctgtcacttttgtccgcaattgtcacgcgggcatggcagcacacacagtgcacctccatcggacgtttttttcgtgcgtgtaccgaaaacctttgacaacttttcataattctctatcaaatttcccaccttcagaccaaagacaaatgcctcccttttgtttttccgagttcgaagttgatgatggcgcattcttcttcaaaattatcgtcgcatccatcattttggcgttttattcgtggtgctcagaattcccttcgttttcgctgtcattgtatccaaaaatttgtgttcacgacatttttgaagaatttaaatcttttttcgatccattgtaagacaaataaaattcatttttcaaggtcaaactagagtgccacgggaccgggaccgggccgggaattcccggtcatccgaggtcccggtcccggggttttgaaaagctcaggtcccggtcccggtagggcaaccgggaaccgggaaaaacaagcattggtaagaatggggggtctgagtgaaaaattagtgaagaaaataggagtcaaagggaaaaataaaaaataataattaatatattctttaaaaataacactgcccaagtgtgcaaatggcctaatggctagtctccttgactttcccttcttctttcccctggttcaatccctctacagaaagtaaattattttgaattttgtttttgtatactcgtgggtttcctatagagaaaatatgattcctcatagttttttttaaattgatacatattttatcattttttaaatgaaaatcctaccaattgagcttaataatcgcaaaaaccaacctttttttgttgaaaatctgttaacaaattgcacccaaatttttaaaatttccccaggcggcgcctatcagcaccgccggaccccttctttcccaaaaagttttttgaaaaagcgctccgaaaaaaagtgatgtga

SEQ ID NO: 30096 - DNA, 645 bp, Heterodera glycines
ctccatttatcccagtctataattatcccccagtctttgagggggttgaaaaataatcccccatgggggataaaaagagcaaatacggtattgaaataaaaaatttttttaagtggtgctttagtggaagaggatcagaaagtggaagaggaacagaaagtggaagtgaaacgaaagtggaagaggaacagaaagtggaagagaaacagaaagtggaagaggaacagaaagtggaagaggaacagaaagtgaaagagaaagtggaagaggaacagaaagtggaagaggaacagaaagtggaagaggaacagaaagtggaagagaaacagaaagtggaagagaaagtggaagaggaacagaaagtggaagaggaccagaaagtggaagagaaacagaaagtggaagaggaacagaaagtggaagagtaagaggaagaggaacagacgtggaagagaaagtggacgaggaagtggaagaggaccagaaagtggaagagaaagtagaagaggaacagaaaacggaagagaaacagaaagtggaagagaaagtggaagaggagcagaaagtggaagaggaacagaaagtgaaagagaaagtggaagaggaacagaaagtggaagaggaacagaaagtgaagaggaacag

SEQ ID NO: 30097 - DNA, 1005 bp, Heterodera glycines
gggagtgagagtgtggagaagggaagggggaaagatgggggagaggggaagggtcaatggtcaccctttggtcactcttttggtcatcattttgtgttcgtctccgatggttatgcatcacaattgggggggaggagaggtgagaagggcacttgggctaacaaaagagcaacaaaacactcaaatctcgacaggggcgagaacaacgcacgtttggacaagaaatttgggggatgaaagtgcaaattgtgaggaatgaggagggaggagagcaaacggacggagaaagggcgtgcaatgggaaatgcaaagattggtactgaacaggcggggcggagagggaggcggagctgaaataaatttaccaaatttctggggttttttggagtgtttttgggtacataaattcgtcgttccctcagcagaattgttaaattatttcttcactcactttattttttatggatatttcattggataattgaaattgttttttttttgacacgaatcctttcaatttgttaaacgatgcaagtgatgagaaagaagatgatggctgagtttgcccattatgcaaatgaaagaattatttgtcgttacaaatgactgagtttgtgaggttaaacttgggaatgttttggggaagggaaagggacggaaaatgcgcaaaaaaaaatcgaaacaaaaaaatacgaaaatgaaaatgaatggaatgaattaattaattttttgccattttcttatatttttaaaatttaacgtaaattgaaacataaaagagcagcaaattgaatttgcgcctttaatttcgaggactttggcgggaaattgtcctaatttgttgacatttgaagagagtgagtgagtgccattttacaggaagggcaaattgccaaagtgcgctcaatcttaagggaggcgccaatcttcgctaaaatgaaaaataaaatttaaaataactttgtaacttatctttgtattttttataattaaaataaatgaatg

SEQ ID NO: 30098 - DNA, 1235 bp, Heterodera glycines
  unsure (1)..(1235): unsure at all n locations
caagtgacgaaaagtcgcgcagcatggccaaagtgccattgatgcgcaagtcgatgtaacgcaaacgatggagcaaaatgggctcaaaagagagggccgcctaaggggggggggggggttcagaaagatggacttttggtcgctaaacaaacctccggatccgagcgcaacaaatgtctgtaccggttgagcatgtgttgccggtccttctcctccgcccgtatgtaatttttcagcgtccgtaacacgttctgtcgattcgtttgacccacttggacagccaacgcggcacggtactcgtgggttgccttggtaattgttgcaattagtcaacaattttggtaataaataatgcattaaaagtcacagcccgtccccttcccccacccatttggaagatacggctctgatgattccccgacaacattacagcaaaactatatatatatttttgtcttcaaagaccatggacagtccagtccgtacatggttttttgaaagaaaaggttttttgttgagaattcttgattttcgtgtttataccctgccaaccaaatgcccgtttttcgtggttttccttgccattttccattccgttctcttcccatcgtttcgctttctctttctgctcacctgtcgcttcttctcgttcagcgccgtctgcactctttcgtcgtgcaattcctcaatttgcttgcgctgctctttgttctccgcttcgagtgccgccacagtctttcggaattttgcggtccttcgatgggaatgcgtcactccaaaaagtgccgtcccttccctcccattttccctctcacatattccgtttgtactgctccgcccccttggggtccttctccttcattgtgctgtaccgttcaaacagttcactccattccgtgatcactttggtcactttcttccgatggcgtttctctagacgttcctccgcatcacggaaacgttcgtgctcattgccttgcgggtcgtccttaaagtacgggtcctgctcggcctttgcgtccgccgtcgtctccttctttgcggttttgtcatctaaaaagagtagatgatcaatttttgttttttccaattctattttcccattgtcatttctcgttcccttttttanattcctctaaaatccctgattccgcccagataatttgctaacccggttcttcctcttcgtcgtcatcgccgtactcctcgtcgtcctcgtcctcctcctcttcctg

SEQ ID NO: 30099 - DNA, 1670 bp, Heterodera glycines
aacgaagctcttcaagttcggaccattcaaaccacccaaaattatcatcgtgaacttatttaggcgcctccaattgtcaatccattggggcaaaatccgcagcaaatgatccgttggccaagacaaccgtggattgggagacctgttgaccctcgctcacccccgcattgacgaaaaatatgcatttgttaataaattttttgttgattgagcattttatgtaaagggttgaacattccctgattcctaaagttttaagggacagaaacaaattttaggaaaatgttaaacgacacagaaattaatcagaaagaaaataacgaaaaagtaattggattggctttaattttagttatttattcgttttcttttttgtgtttctgttccgctatcgtaagagaatgacaccgtgtcttttttagctaacaatgcccctgccccccgagttattgtttgaaatagttgaagcccttccctcctcaaaattgtctacagtcttcttgagcaatcatctcttgtcgtcgtgggctcaaaaacgtctcagagggactttcaattcgctgatgtcacagaaacaagaatggagaaatctgttaaaaatatctcgtttggtttttgaaagtcacagtggattaaatatgcaataattggtttttagtttttcgtggttttatatccattttattgttaattcttaatgcgtttttaattagtttttcagcaaaaatgtcagaatttctcattttccttttgggtttctcctttgcaatgcttctcatgttgtgtttgctggtttcgctggtgctctttgttctttatacaacatggtattattggacaaaagaagaacaacaagaagaatgtgatgattttccagaatacccaccgccttattaatgaaataaattttttgttgaaatgtgtcatgaaaaaacttgggtttaatccataatatctttttaactttttctgttttaacattaccatttcaaatatctaagatttgaaaaatgttcaattcatccttttttgttgatgtgaaagaactagggcgtattccaacaccaaaggggaaatttagtgagaagaaaaatgaaacacaatttatgaaaatatttaggtatattttatgcacttgagttcgctaagctttatcaaacggttggacgtgaaatttctcgtgataaattccgacatatcatgaaaacagggaaaaaacaacacgaattagcattggttttgatggaaaaggctgggataaatacacagcagaaaacttttgggcttaaacacctccaatttgtgcaaaactgggacaaggaattcccagatatatttcgtatcgttgcgtttgatatggtaaacgaacatttccaaaactgtttgtgattgctttccggacttagaccgattttcaaagggaagggagtaagaaaaaacgaagtttatgtgataagagtgggcgaacattgggatggtttaaaatctgttactcaatttttcgccgtcaaaaatctttgtgtaagctgtgaggtgacatacgatcgacacgaccgtcaccgaatggaatgtagggagcgctgcaaaaagtgttgccggatggggtttgggtttccttgtttggatgtttgtgaggcgatacattgcggataatgtaatcggaatttcta

SEQ ID NO: 30100 - DNA, 212 bp, Heterodera glycines
ctcctttccccctgcctctccccttccctccctacttcctccccatcttccttactttcctactcgtccccttcctctcccctcccctccctacttcctccccctcttcctcctttccccctgcctctccccttccctccctacttcctccccatcttccttactttcctactcgtccccttcctctcccctcccctccctacttcctcccc

SEQ ID NO: 30101 - DNA, 1309 bp, Heterodera glycines
aaaatgagggggagagatagttgatgtggccgcccgggaccgtacggctgctgcccccgggagaaaaagagagaaaaaaagaaagtgaggagcagagaggaagagggggcgggaatgtcccacactattgggttcagtccagttgaggaaagttcgaagaatgggtacgggccaaatgacaaaaatgcctggcaatggcgcatcccacaacagggcaggtgtttgcattcggtcggagtctcggtgagcggtgtgcgagcgcgcaatttttttttagatttaaaaatataattgggtaataattatgtatttggatgaccggataaaaaaatcacttacgctataatatatgtacatgaaatgcatttacctgagtaaattatggaattattcgttccggttctgtatcggagagttattccgaaaccgaccgaccgaaataatcaaaaaaccgaaacaaccgaccgacttttatgaaaaaccgaaaaaaaaccgaatcaatggagaacctgttaataataataaatttattgcttttttgtgctctttttcattttgaagaattttttgtaaaatattttctgctattttgaaaaaaattattaacaaaaatgcaataaaaacgaaaaatacacccctgagaaatggaaaattttatcaaaaattcatattcaaaatttatttatttatttacttgactacatttttgatttttaaaatatttatctcatttccattttatatagcgagtaactagctatcataagtatgcattcacagattattacccaaaagttggcgacttaggcgctcggctaagatgagaaataagaggcaaaataaaaaatgattgatttagtctgcgaaagtgacgaaatacggacgaattgttaactcttttcactttaaaatttttattgttttagccaattaaaaaaaaacactgaataatgccgaatagtttaaggacacaaatttgggaaatttaaaacttgaatttttctgttttttcgaatttatttttttgacggaactttctttttttaatacgaactgaaaatcttttcacctgtttttcagggtccttgattacgaacatattagatccgttcttcggataacaaaagaaaaaaaaattaccgtaaatgctctaattatcgcccagtctctattaatcccgcccaattatcccccagtctaggaggtgtttgaaaaataatccctctatcttaatcccccagtctccaattatcccccctcccctttctgaggtgtttgaaaaataatcccccatgagcgataattagag

SEQ ID NO: 30102 - DNA, 1524 bp, Heterodera glycines
attttcaggaagccaaagggcacgacagtgacgcggcagtttcagcggtgcaaaatgagtacggaaacaatcggtaaaagtttctgctataactccaaattacaacaaattgggtcacatttgcttcactccctcactttcagtgtcgaaatggaagtgccaaagttcgtggagctgttcattgaacgtgccactgctcccttcttcgtcttccaagttttctgcgtcggtctttggtgtttgggtgagtgagtcaccgccgaccattgcccattaataaacaaattatgcatttatttccttttattagccctaaaattacacttcaaccttttggtgacttaattttttgaaattcagaggacatgtggtacttttcactgctcactctgttcatgttggtcactttcgaggtgcaaaatatgcaattttttaaaattttaattttatttttcaggcgaccattgtaaagcaacagctcaaaaatatgtccgaaattcggttggacttatttgccatttttctttgagttggccatgaaatttgcacacaggaacatgggctccaagtcgttttttgtcaatgtttaccgcgccaaacgatggaacaaaattccttcaggcaaacgaagcgataaaaaaagacattcgattttaaatttttttagaccaattggtctgcggtgacattgtgtccatttgttcggtgaaaggaagtgacgacgaacgggcgattccatgcgatcttttgcgtataaaaacgagtttattttttacaattttttttttcaattttaaagtcctccgtggcaatgccatttgtgacgaggcgatgttgaccggcgagtccattccgcaaatgaaggaacctcttgaggaggtgacggaacgccaacgcgtttttgagccgaacaccgacagccgactgcacgtgcttttcgggggcaccaaaatgttgcagcacacgccacccggtgagcagaagcaacagcgtacaactaatatttaggagtaatttccattgttttttattttggtaaattttatttcgaaaaactttttgaaaaatttcactgccataccttttgaaagcctttaaagggcattttaagtatctttttttcattttcagctaaaaatgagcccggaataaaggggcccgacaacggcgtggtctgttacgtgctcagaacggggttcaacacgcagcagggaagtctgctgaggacaatcatggtaagaacaaacaaagagctatcttattactggtagctattaataattgatgctacattgtcatagtaattggatcacagcaaattcatccacagaaacccatgttatggcatttttttatatatggatgagttgggtggtatatggcaggtggtgttgcttgtctcgtttcctgtattctcttattttagggcatctcatagttactttaatttttttgtccctcattatgggtattgtgtttaaccatcgactaattggattgattgtgagattaaaaagtctcatt

SEQ ID NO: 30103 - DNA, 1752 bp, Heterodera glycines
  unsure (1)..(1752): unsure at all n locations
agcagaaggggcgactcgcgactccaattgaacaggtggacaatgtcctgtgaattgggggggggggggggtcattttgagagtaattaatgataagttttgatttgtctcgagttaatttgccaaatgccgccgctctcttttccggcatttttcagtgttaagcatccatcattaactaattagtcaatgccacacaatgctttccttccttaaattgcctttgcccacctccaaagtgtagtcgtcctccagcacattttgcagtgttccgtccacaaaatacactccgaaatggtcggtcatcgccaatttcatctccaaaagttgcttcagctgttccaccctcactcgggcagaacaacggaagaagcggcggaagaacaacggttgctgctgttttttgactttggcgggcgaagggacagcgcccccaggcgatgccgaaacggaagcggaggggacagtgccggaaggggtggcggtgccggcatttgccgtcgtttggtggtgggaacgatttgcggccaaaatgtgggccaatgggacgtagtcaatttggacggaaatcttttcgtcgggtgaacaaagcgaagcggacaattggagcagccgttgccttttgaggaggcgccgttcggtggaaagtgccgacgcattggcagaggacggcggaggacggcgacgggaacgcgcaattcgggagagacggcgccagaaaaggtcgggcaccaatttgtagaccttaaaaattgaaaatgccttcagtgcgaaataatgcggaaatccaccgggctaaaattctttaaccattttcccagggactaattggggtcaatgagcgtaattttgttcgaatttgggtaaagagtccggaattggtaaatggatgtcataatgaatctaaaagaccacgaaaatgcccctagaaaggtattttcatcttattttcacacgaaaaaactgcacataatcgccagcagatgatggattggatgagtcaagcggacaatccgtcagaaaattaatttttaggcatttgatcgaaagtttattcaaatgatagaaaatttcctatagaaaaatgttaaaatcgcaaaattcgaattattaaaatatattaattttagatttatcaattttaaaagatttattattatggaaaataggtatcttttcatcattttacacaaaaataaaagcaataaattattgttttcattcactttttttttaaatttggtggaccgtgaaaaccaaaactggaaaatcaccgaggcataaacaatttggacattcatttcataccaatcataaatttatttgtaagcaaacggcaataaatcagaagcagaagattaaaagtttttcattattttcgctttcaatacatttctgagaaatggctaatgagcccattaattaattaataattcattaatagtgactcacgagttcctgaagggcggaatcagggcgaaagaacggcttttcggggcccaattggacgtaacatttgggacaacnaatttggggagttttgtgatgaaaggtggcgaagcaaacacggacgacaaactgaccaatgggagaacgaataaataaccattttggatttacaaattcgaacaaatttgatcaattgtncaggaaaagcattttcccaaatatgataaatatttttattgtgnccacaaattaaattattttttgccggatttttcgcttnttatcaaaaaaaaaattctgttt

SEQ ID NO: 30104 - DNA, 1061 bp, Heterodera glycines
ggtgggtggtgttcaataaaaataaaagggcggcgaatgggggcatacccgagggaatttgggcacaatggcaatgtaagccagaacggcacacgaaatccggaaaaaatgggattggtggatttttaaaaagcatcccaaaagttcgtggattggaagaccaaatttgccactcaattttgagcccagatataaaagccagaataatgataagacttctcggctcaatttttcaccaatcccgcagcaacttccacacatttaaaatttaaagttctaaaaattagactttgaatatcactgtatcccttttttcgtttggttggcattttcacattcggttaatgccggtctttggttttttatcaaaatgccatccatcactgttgccgcttcttaccgtttatcatttgtcatcactaattattttttaaaatcgtctctgtcaattcaacatttttaaattcgtgattttcccaaccctcaattggcaactttccttttttgaaaaaatattttacattttttatgaatgccctcagctcctcctaatcattcaacattttatgatggcctaaaatagcaaaatcccctcagggcatggccctaaaataaaatttcctccctccccgccgcactgctggggagagagagagagagagcagcgcgaaaacagagggcaaattgtccactttatctgattacgacggcatttgtgtggatgatgatgggcacggcaaacaatgcaattttaaaaaatggtgataatgatggtgaaaaattgccaacaaaaaatgaacgtcatcatcattaggagaagcgcaagcctcaaaaaaaaatagagaattttctctaatctcgaggttctcgggagcaccaccaattattttattgaaattaaaatgcttcggcggcattgatttcttaccggagctcgttttcggagcgggcgttccgatcccattccacaatcccaattttcggtttttttttgcgctggcattaagcctcgaatatgccgtcaaaaaaattttctatcaaaattacaggctccaaatcac

SEQ ID NO: 30105 - DNA, 1948 bp, Heterodera glycines
  unsure (1)..(1948): unsure at all n locations
aaaaaaaaaatttttttttttttataagggattgggttaatgggatctttttgactttgacctcatttatttttttcttggggattttatttatttgtgcttgtataatccgattcttttggacgattaatgtatgtatatgtcacaaagtaagtggattatccccttttgtggacttttcttttctttataaataaataaataaataaagtacagaaaaatgaaaaatcacagtaaaaacaactttttaaatttcagcataaaaatgtaaaataaacatnntaaaaataaattcaacaataattttaacaataaaaaatgtaaaaattaacagaaattcgcgggttcataaggtaatttggacaataaaacaaaaaatcacgggttcattcgatagttgcgagaaattccccggagaaactccaaaataaatgtgaaattgattttttgaactcgcatctccaaaattttgtcatcccatcagaactcattttagcgaaggtgtaaaggtggccttcgtaagacaattttactttttgttttttggttgcaattgggtaagccatttctgaaaaatatccaaatcagaatgtacatcaaattggttaactattaaaaaataataggatttggaataagtaaaattgtaaaaaatgagcgagtgttaattaaacctaacttatgccaagtggcgagggatccctcaggcttagtttttagattcttaatttttaaaaaagcacattttccgatttttgggttggggcccaaacgaccccggggcccaaaaacgggggcccaaacgaccccggggcccaaaaacgggggcccaaacgcgggggcccaaaaacggaggcccaaacgctctggtcccctaccctgtacgtttcattcggaagtcacaccgtcacttgggtacctctcctttgttagtaattttttccccaattttttcgtttttcgtgactataaaaatgtttgctttttccatttctctctcattatgaaaaaatatttctaacgcaattatttccctctttgtgacatccttcgaaatactgcgcattgtgctaattgacacaaaatgaaccgacggtaaggaatttaaaaaacaaattcatttaactaaactgttttccccgcattctatgttgggtttgtaacgatgtttggatggacattctaccagtttttaaccgtcttcaactcggcctcaaattggcacttctttcgccacgtttcgatgttttagtggacaaacattttgatggcaaaagcgaactgacaatttggagacatatcaatattctaaaaggcgctggaccagaaccagaattatctgtacggattgatcgcaaaaccatggtttccattgcccgaccgtccgctgcccaccaaaatccgcattaaggacattcatatcgggtaatttaaaattcaaataattattaaattacaaagcattcctttccaggtacactgaccattccgtcatcacagcaagctacataattcgacttctatcaacagaaattgacccagttgaattgatgaaccgaatggaccaacgaaatgctgacatttgagaaagatacgatcatgaaaatatggaggacgatgaaaatatgggacgaagatgcaagtgacgattggctgttgaagcgatgccaaattggagaaacggcgacgattcattgggtgtgggacccgaacgatggcaaaatgtcagccttacgctcaatagtgtcaggaagaattgcattgggtgaatggcatcagcttttgttttaacaacaaatttaaattgacctccattcaggccattgtctccacccaaggcggaccaaatgaatgcaaaaatcgtctgaaaatgagcgccgggcccagcggaagaaaaagtgaaagaattattgagaaatgacaaatgagtgatcattatgaatggaaa

SEQ ID NO: 30106 - DNA, 1263 bp, Heterodera glycines
  unsure (1)..(1263): unsure at all n locations
caaaaaatccccccagcgggcaaaagccaatgacaaaaaagagccccaagtaataaattnaattatatntaatattgtgccaaatttgccaatttgaagccaaaccaatgngcagcagtgaaagccgtgccaaaggcggcggagaatgctcagaagggaccgtcgagtgcggaagtggtggcggaggaaaacaacttggancactgaggcggtcgacgacttgggggcggaagagtcggactttgaccaattggcagaggacgaactgctcgaggaggacgccatgggcggcgaggcgaacgaattggagggcatgggggaagagacggagatggacagccaaatggctctttgatggacaattgaggcaaattggacaaatggcaaacggaaaaaacgggacaaatgacacaaaaatataatttttatcatagaaattaaagaataataaatatttatttcatggaattttaatatttttggaataagatgattaaatagaatttattttgtattcagtgagcatagctttgatacctggaattttcttctacttacaaaaacataaatctcttcagttcagtagccctaaaacattttgttataaaaaatgattggataatttaaaatattattttgaatttgaatttcttcttgaattaattttgagtttaatctttttttattttaattttgataataagcaaattgcaaaacacctaaaaataaaatatatttcaaaaattgcaatttttattcaaacaaaaaatttaaaaattggaacgattaaaatgacataaatgaaaaaagaaatgttgccatggaaatgaaaattaatataaattataaattgtgtgaacccaaataattgtcaacttctgatttggccaagcagcgactttgcggttcacattttatcaccggctttccaattttggcattttcgttatgttcaacctatgaatttaataatatcattgataatgataaaaacaacaaattagtgagaagataaaaataaatatgaaaaaatatcgcctaaaagtaaaatatactttcaaataataaattaaaattttaaaactttttcacattatgtaacatttttctcatgaaatggcaaaatatttgataacatttgggcgtcaccttggcatttttaatatgaattcgttttttctatatacggtattgtttgagtttcttactgtaatatattgaactgcccaaacgggaatgttggagtgaagttgcacggcattt

SEQ ID NO: 30107 - DNA, 1031 bp, Heterodera glycines
ataaaggtataattcttgttgttttaggacaccatcgtcgctggggcggatgacctgaacgccatcaccggcagtaaaggccaaatctgaggcggagcggaacgtgctctgcaaccggctggcggagcgctcgctccgcgtcgccgctcatatgagacagttgcaggtctacgtatgtatttttttccaacaatacttccaacattataacattttaaagtatgctgagagttccaaagcaaagcatcgattgagctgggcggttgcccacaaggaaaagcagatcaatcaactgaagaaagacaacaaacaactgcgaaaggacgtcgagcacctggaggactgcggcaataaaattaattattttaattacttttatttttcatttcagttcctcttattgtaaaagaagagcccattgatgaacagttcagattggcagatttggagaaggaaatccaggcattggcgaaacgtctttcattgcttttccgtattgaaaagtcagttaaaaatggcatttgaattataattaacaaatttattaaataacttattttactttataattgacttaattaatcaaataaatttactttggattaacatcgataatttaatctaatcatttaattttgttccgtttaagcgatgtcttcgttttgatgcttcccactgaagaaggtgaccattggttgtctcgtcttttgatgcttcgcgatgacaacagctccattagacttgccgaattcaccggctcttccgaagcattcgcagaaaaagccgaacattggctgaaaagtgattttgaagggccgcaacaactgatggaagcggtacagttaaatcaattttgaaattgatcagttgatcgattatatcagtttttaaactgatcagctgatctgatcacttttataattaatttccttcagttgaatgcgaaatgtgtagaatactttcaacagcagaaaatggcacaggacgaggacaatctttgacagattaaaagggaaggaaaactctgatta

SEQ ID NO: 30108 - DNA, 1789 bp, Heterodera glycines
ttaataaaaactcattgatttttaagttcaaattatttagataaagctgacaatgaaatatattgtgaggaccagaaaactgcataaagaaatttaattgtaaaaaattaaaagcaaaaattctgactttattttctctttttccatgctataacttatttataaatttagtcaaaatttatttttgaacttctacattcattatttttacggagtatttttttaaactttcatttataagttttactaaaatgccgagaggaatgcatttattgatttagaatttttgtgaatgctttatctctctctgataaagttgagtttttgcttcataataaaagtttcgaaattgaagcaattccaacaaaaatacctataaccggggctcccaactgaaattaatcacacacacataaatgaaccaattactttgcttaatgaatttaaaagcaatcaattgaataaatagaaaatgtatatcaaacaagtgaaaattaaatggattccatttaattagaatcggaattgattgttaaattttcctccgatcgaaaactgagtgatcactgatcagtcgagtagcattgggcatggtgcattttgcttgtcttgtcaatgccgaccaaaactccatatgcttcagcacaaagtcaaaaacatttttccttaacaaatgttaaattaaaaaaagtcgttaaaaaaataaaataaatgaaagtgaattaatttgtgaggccgtacaacagggattaagccaacagcaaaaaatcgtaattcagcggcttaacgaatttttataaatacttaaatcagaataacccagatttaattttttttaatgtaaaatttaaatttgcaatatttcaagttggtcacaaacgattaaaaaagttattttccaaagtggagggttcctttaaataaagaaaaaacatacatttaaaattataaaattataaaaatattaaatatttattttcacgaattaaaaatggtgttggccatttaaatatttcctcaaattatttgaccggcgatttaatttattcctctgctcaccgccgctattgtgttgcccattgtttgcgcaagtgttgcatgtaaatgcgctgttgttcctccaccgacagtgtgcagatggcacggcatgccctccgggcgctgctttgccggcaaatgaagcgtaaatagacaagcaccgtgacgagaatgtgcagcgggagaaactgtttaaatttgggggaacaattttcaaaatagatcagaatgaaaatttcatatttaaaatgatgatcattgattgatgacggcatggcagcctgggtttttttggtcccgaacagttggctcattatgggattatggcagaaaagccgagaaaaatcttgggttggctttaaccgccaagtcatgtttctggttgaaaaatttttacaaaatcgaaaattcctaggccttaaatggcaggaatcgggcatgccaatttccaagcaaaacaaaagtggaattgatcttcgggattgtaaatgttttgaaattgacaacggaactttcaattagagtagagcgggaccgggaattttgggcaaaaccgggactgggacttgccgggatctgagaagccgggaccgggacctcgatttttcttcgggaccgggaatttttaaaaattcaaaaaaaatttttctttcattatttcaaagcattaatcatttgggctaaatggtcgaatattatttgaaaatttagatttatttatcaccccattttttttcggcgcgctttttcc

SEQ ID NO: 30109 - DNA, 1808 bp, Heterodera glycines
  unsure (1)..(1808): unsure at all n locations
atggcctaattagcaccataaagatatttttgtataaaatattgaaaaattgactcattntggttcaaaatacgaaaattttcaaaaattcgaaaaatcaaatctcaaaattttgggcaacaatgaaatattattggcaattaagctagcaattcaaatttgtcactgtgaaaaactggttatcctaaaaattagtgatgagttctgccgattttaatgatccaattacgtataatctgctgccaataaaagaatgcattaaaatatattagtgaacaatgggaaaataaatgttaaagattttaaaaagacaaacatttaaagaaaaatgttattcactaattgaaaagataaatataataacttataatataattttttatggtttaataatggctaattctaacgattaattattgctgaataaaattttaaaaattagaagaataatttatttcaattcatttattttatccgaaataaaactcaaaaaattaagtgtatttttgaatttgtaaaaaatcttcttcatggttatctcaactttgatgaacaattattgtttcgtgcctttacaaatttccattcatttgcaagaaacttcgcctctcgtcgctcgatttatccattcacaaaatacggagactttgttgaaaaaatcttaataagaggaagttaatgagtttattaagtataattaatcgcgtaattaaaaattttttacaaaatgtgatcagaaacgtactcttgtttgatcgttctgattcatgtcccaatataacaccgatttgggtccacctaccattcagggttctgagcaatggacctccgctgtcgcccttttcagttaaagaacaaagtttaatttgattcattttaatataaaattacattttgaataaagatatttttgactaaattaattttacaatcactaaggattcgttttttaggcaaaaaatcgggaaataggcacctaaaaaggcagaaaaaaatcataaaataggcattaataggcataaaaatccccaaataggcattaaaatagaaaaacaaaaaaaaattaataacgctttttaggtagcaaactcgttaaatttaatcaaaaaattaatgtttttcaattataatgatatattaaatattttaagtttttttcgaataaggacaaatttttaaaccacaaaattttaccaagaaaaaatatattttatggaatcaatttttgtaaagataaaatttaagggggattgaagttttattcattttctctatacaatgaaaatttgtagaaaggcaaaaacctcatttttttgactaaattcattataatcatcataggaacatatacttagagtaataaaggaggcaaattgagtttgtttttaatttatcttgaataaataaaatcttagagacgattttcgtatatgcaaaataaagaattttgttagtgtttttaaaacgaacgtgcgtagtcttgtggattcggctgaattggctgcaaccgtttgaggctatctaattaattgaaattaattgactaattaagcctcattttgttactacatattgtaccttattccttttttcaacaaaaaattggcgcagccggggaaaaactttggatttttaaaaaatctttataagaaaattcaccaaattttcaaaatgttcttcttttcctcatagtgaaccccttacccttccctcttttaaagcccctttcctctctgcgaaacctaatccctcgtttttacatgagataattcaaatttatagaaatgcacctcctttcgtaagtcccc

SEQ ID NO: 30110 - DNA, 1694 bp, Heterodera glycines
  unsure (1)..(1694): unsure at all n locations
agtaaaaacaataattttgattaaaataaaccttaatacacattttaaattaaaaagtatattaaattagatttaaattaaatttttttggacgataattttttttgaataatttaaataaaaaatatatttaaattcattagtatattttaatccttaaaaaataaattccatcatctttatgcgattctcaagtttaaaaagcattttattcattcattttagtacaaaacaaaattaaaaaaatgactttttttttggttgattttatgaatagattaatttttatatcataattttaaaaagacatttttgaattttttttaatattttgaattatatgtgcgttaattttgggtgttcttcacttcatttatttattcatactattaatttatgactaatttatatatatatatatatatatatatttcatgccttttaatttgatttcttttaaatttgatgtattagagtcttcaattatttatcaactttaatttggatccaaatgtttaaaataccggtttgacacgtgaataatgactgtaaatttaacgtacatgaccgtgaattaacacgtgaataatgaccgtgtattaacacgtaaatcatgatcgtgaatttacaagtaaatcatgaccgtgaattgacacgtgatttaacccgtgtattaacacgtaaatcatgaccgtgaattgacacgtgctttaagccgtaaattgacacgtgaataatgactgtaaattaaacgtacatgcccgggaattaacatgtgaatcattaccgtaaattaacacataaatcatgattttgaattaacacgtaaatcatgactgtgaattgtcacgtgaattaacccctaaattgacactgaataatgactgtaagttaaacgcacatgaccgtgaattaacacgtgaatcatgaccgtgtattaacacgtaaatcatgcccgggaattaacatgtgaatcattaccgtaaattaacacataaatcatgattttgaattaacacgtaaatcatgactgtgaattgtcacgtgaattaacccctaaattgacacgtgaataatgactgtgtattaacacgtaaatcatgcccgtgaagtaaaacgtaaatcatgaccgtgtattaacatgtaaatcatgcccgtgaatttacaagtaaatcatgaccctgaattgacacttgaattatgagcgtgaattgatacgtgatttaacccgtaaattgacactgaataatgactgtaaattaaacgcacatgaccgtgaattaacacgtaaatcatgcccgggaattaacatgtaaatcatgaccgtgaattgacacgtgctttaagccgtaaattgacacgtgaataatgactgtaaattaaacgtacatgcccgggaattaacatgtgaatcattaccgtaaattaacacataaatcatgattttgaattaacacgtaaatcatgactgtgaattgtcacgtgaattaacccctanattgacactgaataatgactgtaagttnaacgcacatgaccgtgaattaacacgtgaatcatgaccgtgtattaacacgtaaatcatgccccgggaattaacatgtgaatcattaccgtaaattaacacgtaaatcatngatttgattaacacgtaaatcatgcccgtgaattaacacgtgaatcatgatcgtgaa

SEQ ID NO: 30111 - DNA, 1877 bp, Heterodera glycines
  unsure (1)..(1877): unsure at all n locations
cgtgaatgttatttttattgaattctgaaccggtttgagtagattagactagaaaaaattgaaaattttgaaatcatgtttcccactcccttctcccaggggtattattttgtaaagtctttttttccccaataaacttgtcaaaccccatttttcgcaccgtgaatgttatttttattgaattctgaaccgttttgagtagattagactagaaaaaattgaaaattttgaaatcatgtttcccactcccttctcccaggggtattattttgtaaagtctttttttccccaataaacttttcaaaccccatttttcgcaccgtgaatgttatttttattgaattctgaaccgttttgagtagattagactagaaaaaattgaaaattttgaaatcatgtttcccactcccttctcccaggggtattattttgtaaagtcttttttccccaataaacttgtcaaaccccatttttcgcaccgtgaatgttatttttattgaattctgaaccggtttgagtagattagactaaaaaaatatgagtgatcaaactttcactaaaaagttaagcctaaactttttcccaaagttaaaaagcaattaaaattttattcacctccattattgaaagaaaaagcatcagagtgcctaaactaacatgtaaataaaatttggtgcgtttcagaaccctttctgaaaaaatatttatgaattaattttgcaaataaataaaaacgaaagactcagattttcgaaaaatttttttgagccagctagctcggcgctcatttcagtgtaagttagtcctttaccggggagtatccctgcaaagtttggtacgcttctgctcaattagcaaaaaatatgagtgatcgaattttcactaaaaaaagtaaagcctacatttttttggcatattttaaaaagccaattaaaaaaattttaaaaatttaataaattttcctgccaccggaagttactcactcggccttctttccggccctgggggggggcctttcccccccccccccccctccccgccttcagagcacgacaaatatttcaacaaaaattttgaaaaattgactagagcaatcgaacgctaacggacgacctaatggaaaaaaatccccgaaggagagaatntaattaaatccattccttcgggggaccgtgccgggtgccgcggggtaagcagtgctggttcgtttcatcacggcaccgaaccttttggctagtcagcaatcgttgcttaacttgccagatcggacgggtgcgcatgactttctgaaaaaaatatttatgaaacaaaaaaatcgattttttcaagtgtccgtttggggtactcaaacatttatggggagcaaaaatccaacgcagaattaaagtacaggctatagggaagctattcccgaaggattcggtctccccataaatctgggcgcatcggttcggggggactgccccgaaaacaaaaaaatcgattttttcaagtgtccgtttggggtactcaaacaattatggggagcaaaaatccaacgcagaattaaagtacaggctatagggaagctattccggaaggattcggtctccccataaatctgggcgcatcggttcggggggactgccccgaaaacaaaaaaatcgattttttcaagtgtccgtttggggtactcaaacaattatggggagcaaaaatccaacgcagaattaaagtacaggctatagggaagctattcccgaaggattcggtctccccataaatctgggcgcatcggttcggggggactgccccgaaaacaaaaaaatcgattttttcaagtgtccgtttggggtactgaaacaattatggggagcaaaaatccaacgcagaattaa

SEQ ID NO: 30112 - DNA, 1187 bp, Heterodera glycines
  unsure (1)..(1187): unsure at all n locations
ttttgtcatattatatcatcgaatgatatttttntggtatagaaaaactaaaatttttatatgatattttttaatattttctctttttatgnaaaaagtgggaccagtttttttcataatttgtattatntaataaaatttgtatgttttgtgttagttttaattaatttaatttttcatcggagattattctttattataaaatttttattcttttttttcattctgtttcagcaaggatttacggcttctcggcgacagttaaattaaagttttttaagtaaaactagatttatcaccttttaattttattcacgtgcggtcgatgctattatcacaagcttcgaattgaatttaaattccttattacaaattttttatttcgttcgggtgtctttaaatctctttttgattttttcttcgaattaaaatttataaaaaatagaaaaagccctagaaatttcaatttaattattatttattagtatactaatccaataaattgattggttttataaattactagtttattcgttttaataaaaaattggtggttgttaagctactttttgagttagcaactatttctagttaattatttttagcacctaaaaactaaaaaattttgcctattttaacctatttttgttttgccaaaatatttatttattttcttaacatgaatttttgatttttaaattattaccttaatactgatttagccagattttagtttttttttaaatttttgtcattttacaccccctaatttaatgctttttagttcctattttccatattttagaacctaaaaactaattattttggcagtttttagcaactataaattggagtcctagttttaatctaaatcttgtatacacaggttgacgttattatcttttttttcaatcattaattttttttttttggtttaaaagaaaaaaataaattattatttttttctataaaagttaatttttctttcaattttcccatttctcttaaccccccccccccaatcttaacaaaatttcgtatctcgttacaaaatacgagatacgaaatgagcaaaatccctgattcttaccgttgtttttagtgcatatctaaacgaatttatttttttaattaaaatatatgggaacactatttccagcttgtttgaattaatttaaatgtcaatt

SEQ ID NO: 30113 - DNA, 1712 bp, Heterodera glycines
  unsure (1)..(1712): unsure at all n locations
ctttcagtttcaccactgattgttgaggcaatttttttcgccaatttcttttgtctacaaacattatttattggcgtttcatcctgtagtgtgtaaaaaattttcagtaaaaaaaacttgttatctgaatatttacaagcaaaatttaagaccatttccaaagaggaaggaacaaaaatttttgcctaaattttatattatattgttgaattgtttgaaatgcatctgttgtctgccgttttgaaatttttcaacttttcgcgaaaagatttcccagaaaatgcatgggacaaataaaaattaaacttctattatgatcaatttaaatttcctatcagtttcgggtttgctttaaacacgctggccgatgaaaaaatggagttttatggatgtcaaattttgggacttttcttcgacgtggcccatcagcgggttgtttcgtgacaaaaacaaaccagtttgatgttattcgaatgagctagacgcgctctacattttcaaatgtatcaacaaagggtctaccgccactccctggcgagatatggcctgtcaaagcagaacggggccaataaatttgaatttttgttaatcttcggcagttgcctttatttcgagcctactctacttgtgcatcttttcccaatatggcactgcttccgaattattgaactgtttcacgactgattgttgagataatttttttttccgattcctttatctccaagcatgagccttataagtgattgttcatatccttctcttgaaaaaaattgtcactaaaaaaaacacgttttctgaatattaacaacaaaaatttttagacactttctaaagaggaaggaaaaaaatttttcatttgcctaatatttatttatactgttgaactgttggaaatgcagctgatgccgtcggaaaagctccgattttttggggaagtttttttctttcagtttcaccactgattgttgaggcaattttttcgccaatttcttttgtctacaaacattatttattgcgtttcatcctgtagtgtgtaaaaaattttcagtaaaaaaacttgttatctgaatatttacaagcaaaatttaagaccatttccaaagaggaaggaacaaaaatttttgcctaaattttatattatattgttgaattgtttgaaatgcatctgttgtctgccgttttgaaatttttcaacttttcgcgaaaagatttcccagaaaatgcatgggacaaataaaaattaaacttaagaccatttccaaagaggaaggaacaaaaatttttgcctaaattttatattatattgttgaattgtttgaaatgcatctgttgtctgccgttttgaaatttttcaacttttcgcgaaaagatttcccagaaaatgcatgggacaaataaaaattaaacttaagaccatttccaaagaggaaggaacaaaaatttttgcctaaattttatattatattgttgaattgtttgaaatgcatctgttgtctgccgttttgaaatttttcaacttttcgcgaaaagatttcccagaaaatgcatgngacaaataaaaattaaacttctattatgatcaaatttaatttcctatcagtttcgggtttgcttaaacacgctggcctatgaaaaatggagttttatggatgtcaaattttgggacttttcttcgacgtggccatcaagcgggtgtttcgtgacaaaaacaa

SEQ ID NO: 30114 - DNA, 2267 bp, Heterodera glycines
attcattgttaaaaaatttatttgtaaataactttttattaaaagttgggtataaataaaatatgagtttttattttaaaattattttgtttttagttccggtcgagtcaaattaaaagtctggtgttcattatacaatatttaataattcaaaaaatgattaaaactgcaccaacctggagcggaatcgtccctcgttcggggtacggggtaggcgggagtcggttaaattttgcatattagcatttttaacaaattacaactgttgttatagtcatatttaaaataaattcttagaaaatttttgaattttttggcctcttgggataatcaaaaaggaggacctcccagttcggcgccaacactttcggcaccgttgctaataatttttatcattattaagaaaattaaatattttttgtatcattcgatagcccttaatgttttctataagcctgcaaaatttaaatttttttatcagttttcaaaaaaaagttattgccaaaaagctcaaaaaatgacattatcatggctttttcggttccgtttgccatagctttggggccggcggtgccgataggcgccgccgggaaaattttttttgtaattttaatgctatttgttaggagattttgtctaaaaataccaaattttgagattttggataattttttaagaaaacataggcttttgactggccggcggtgccgctaggcgtcgcctggggaaatttttaaaaatttttaatgaattttgttaaaaaaatggccaactgatttgtcaaaaaagtcggtcgattgtttcggttaaaaaaaccgaccggtccggtctctactttaaatatgctttgtttcaatgttaaattattcttttcctaattttctacaaaatatttatattttttaaattgatttatttgcataattaaaagaatagaactaattaatttaaagaaaagtaaaattttaattgatacatcatcatctgaaaatcaaattaacatcagttaactgtttattgtatactgtatatcccaaagtttatttttgtattttcttttcacatcaaatgtattcttaaatttaattaaatttttaatttggttatttcatttgttttttttttaaatcttctatggcggttaccgcaaaatgtgcgtatagtacctttaattgattaaaatattaatataattatttttataaatgctcaaatgtcataattttttaaagcttttttcatagaaattttgttgtttttgatgaatgataattaaggctgggaattcttttagttttggctaacttttttaatgacttctttccattttaaatgatttttatgatttttttagttaattttttggcggatattatttgtttataatgaatccgagttcatgagaaataaattaaatgatgataaataataatttttgcaattggaaaattattttgacaaattttgggaggaaatttttaaatgaaaatgaataaattggcggggcgacggagcaatgggagaggggcaattaatggacagcacaaaagtcaattaaattgaacttttttttgcagatgtcgtaaaatttgctatctaataaaactattcaaataaatccccagggttccatttcaaatttaattaatgggaaaattggtgagctttttttaatcaaggatttaacggacaatagcaaaagcaaaaattcgattaaaattaaaataaatgtaaataaatagagtttactttttcaaatttaataaatatatatacagacaaataaatttttatttttttatattttgataattttcttttaataattgcactcaaatttcgtttttctttatgaaaattattcaaaatttgtttattttttaaatgcattcatatcaaaatattaatttgtagtgaaaaataattgcattatttattcgaaatttacatttaaaaataaattttctttctgctaaaatcattctttaaaattgtattttacctaaaacataaaatttattactgatctcgtttaaaacttaacaactgaaagtgttcttttaccaaaagattatacattttctttgacaaattatcaattcctttgttttttcgaaattgaattttatttttattttttttgtttttttctataaatcatatattaatttttttaaagagctattagatttattattcacagttcgactaaattatctttataaaggtttaacagttgaggcacttatctttcagcttgagttaat

SEQ ID NO: 30115 - DNA, 1507 bp, Heterodera glycines
tgtttcttctccttattaattgcctcttcgcgatcggctctcttctgacaatttgtcttaatgttatcaattgcgacatgctttttttctttgttttgcttaattatctctaaaatacgcttcatgaacaacaccgacttcatcacttcctgcaaatgaacaaacaatgaaaattgcatttgcatttaagcgtcactttaaactttaattatattaatcaattatacatttaataaaataaaatgaaaaatcaaataaatcaaaatcttcaaaacgttcattatttattctaaaagcctaaaatgatcagaaaatgagcttggggcgtgcttgccaattttctgaagaaaaaacccggtactgaagtgtccattttcaacgggattcgacgttttttcgtaatcaaatctctcgaatttctttttctcgggttactaatttattgaaaaatgaagcaaatccctaatttgatttgcctttaagtgctcaagttcggtcgcgcttgagaacatcatttgtccgacaatttcgccaatctttttctctaacccttctattgcacttttgtgactggtgaatttcatacaaagtttgccgaacaaacaatcgaaaatgccatggagaatccttttttgttccgccttataaatgggcgaggagggcgatggcattggctcatcaattggcggaatttgctgttgctccattggcattggcactacttaaaaatgggaaaggttttttgaaaatttctcatggatttttttacatatttggttaaatattttggacttttttcttatatatttcattttttacagattttgaggattttttacggaaatttttggaaatcatcaaaaaaaatccaaaatttcggcaaattttttgtatattttttcattttttatatattttgagaatttttgaaaatttgtagtgaaaaaataattttgaaaatgtacccctgaaaaataccaaaaaataatttttaaatactaaaaggttattctaagcctatttaggacgtttttatggcattttgtgcctatttaatccattaggaagaatttttttccaaaaaaaaagtttagaaattttatttaaatattcagtacatatttatggttttgtgtacatatttcgggatttttgttacatatttatgtacatattacatattttgaccaatttttgtacttatttttggcagccctatttattagcattttaaaaataaaaaaacattaataatcagtgttaaattagggacaaccattttttagagcacattctggcctttttttaacatttccagcaaataaagaaaatatttttcataaattcaaaattttcagaaatttttcctcgaaaatacaccaaaaacggatttcccaacaattagttattttggataaaatgtaaaacaattttgaatttttcaactgactattgtcatcatcatcatcatcagatattccgacggcgatgctaaaattctgcaaaa

SEQ ID NO: 30116 - DNA, 761 bp, Heterodera glycines
cctaaaaataattttcacttatttttaaaaaattttagggtgtgtgaagactccctttcagaacggagttctgaatttttttaatggaaaatcgaaatatttttgtatttttcatgaaaattcagaggttttctttaacaaaaatgcaataaaaaaattttgaggcgatgactttttttggcgacatgtataataaattacaaaaactttcctaaataaatctgtcgaaaactaatccccccctctccatttatccccccccgtatctattaatcccccgcccctttctaaggaggttgaaaaataatcccgccggggtgataattagagaaaaaacgggttcttatcccttttgtcaccccccccctgaaaattttttcaaaaaaaaattttctaggctaattttatgcgctgaacatgaatctaacattagttttggccgattccgaaccctggacccgaattcgaacaaaaagtcgaaattcaaatttttaaaaatttacttttatgttagatctgtacagaataaccggttttgatgtttcaatgatttgtgactaatttatatttagttttaatcaattttaaagcaatgctgaaaaattttcgaaaaatttgaattttcaactttttcttcgaattcgggttcagaattaatataaatggatgtcgggttcgtgatcggcgacctctaaaaccccggagaaggtgttttcacgacttttttaaattttattatttttttcgaaaagatggagggg

SEQ ID NO: 30117 - DNA, 1005 bp, Heterodera glycines
ttagttgagcgcactggcaaggagaaccctaacacagttcagcacaaaaaaattaactattcacgcttgagaacgcgaagtttgctgcggagaatggcaattatatgcagaaagtcaagtgcatatatctcagcgcctagtgcatgaataggagcgtttttactgttttctgagagcgcctgaaagcagctttcgaatggtatagctgatttttttggatctggaattttcgcagagatatatgcaaattagtaaccagtgtttcgtttcaaattatttctcgtattctaacgaaataattttttactatgagtgtttggtttggaaactgtctaaaatgttccgggtcgcccacattgcacaattttcttgaaaataccatgaaaaatgctctaactccaagagacttagttgagcgcactgcaaggagaaccctaacacagttcagcacaaaaaaattaactattcacgcttgagaacgcgaagtttgctgcggagaatggcaattatatgcagaaagtcaagtgcatatatctcagcgcctagtgcatgaataggagcgtttttactgttttctgagagcgcctgaaagcagctttcgaatggtatagctgatttttttggatctggaattttcgcagagatatatgcaaattagtaaccagtgtttcgtttcaaattatttctcgtattctaacgaaataattttttactatgagtgtttggtttggaaactgtctaaaatgttccgggtcgcccacattgcacaattttcttgaaaataccatgaaaaatgctctaactccaagagacttagttgagcgcactgcaaggagaaccctaacacagttcagcacaaaaaaattaactattcacgcttgagaacgcgaagtttgctgcggagaatggcattatatgcagaaaagtcaagtgcatatatctcagcgcctagtgcatgaataggagcgtttttactgttttctgagagcgccctgaagcagcttt

SEQ ID NO: 30118 - DNA, 1120 bp, Heterodera glycines
ttttcagcttttttttcccagaaaaaaggatggggcaaataaaaaactaaacatctctcattcaccaattttaaattcccttacattttggggtttactttagctatgctggcccataaaaaaaatgggagtttttccggtgccaaaatttttgtgaattttcttcgggcgcgtcataagcggattgtttgggggcaaatgaaaacaaattttgtgttattcgaatgcgctagccgagctctacattttcaaatgtatcaacaaagggtctatctccactctctggcgagttatggccagccaaagcagagtgggggataaacacgaattttttaatcttggtatttcctctattttgagcctgctctacatttatgtattgagccaatatgcctattgcaactgaaatttattcatctttcccgacaaaattgttgagataattattctagacaatttttttatatctcagtgcttaaccattgccttttgtaatgataaatggtagatattgggagtgaaaaaaagtttgtttgtgactatttacaataaaaatttatgcagcatttctaaaaaggatgtaaaaataatttcttgcgtaatattttttacattatgttgttgaagaatttgagtctgcatctgatgcaattggaaaatttttcagcttttttttcccagaaaaaggatggggcaaataaaaaactaaacatctctcatcaccaatttaaattcccttacattttgggtttactttactatgctggcccataaaaaaatggagtttttccggtgccaaatttttgtgaattttctttcggcgcgtcataagcggattgtttgggggcaaatgaaaacaaattttgtgttattcgaatgcgctagccgagctctacattttcaaatgtatcaacaaagggtctatctccactctctggcgagttatggccagccaaagcagagtgggggataaacacgaattttttaatcttggtatttcctctattttgagcctgctctacatttatgtattgagccaatatgcctattgcaactgaaatttattcatctttcccgacaaattgttgagataattattctagacaatttttttatatct

SEQ ID NO: 30119 - DNA, 701 bp, Heterodera glycines
tttgctcaaaaaaaagcgaaaagagtcttaaaaagcagcaactttttctctagcgccaacatatgtatattatttaagccagagttcggatcgtaccaagtcactttccaggtacataacggtgggaaatttgttaagatgagttttttggggagaatgggtgttgttgtcattgacgccaccgggagaaaaattggaaattttgggccatttttttaaaacaaatttttataaaaattatttttaggtcaattctaacaaaaatcaatgtttacttttgacagaatgccaaaaatttgaaaatttttcataaaatggacatttcatacattcaaatgaaaaaataccgatttccaagtacaatcttggaaaaagtacagttaaaattttccaagcatgaagccgaaacccaagtacgtacttggtatccaagtacgaatccgaaccctgatttaaatcattttttattttaaaaatcacctagtaaaatataaaatgggtccattcgatgcagcgccaatgttcaaaagaattaaagtgattacttggccaaaccaagcagtgatcggagataaaattaagtgcttgatcagatcaacaaaaatcatgcagattaaatagccgcccacattcactgtgattattgaacaaagtgctcgaaaaacgcgctgattgatcgaatcggctgagggtaaacctaa

SEQ ID NO: 30120 - DNA, 1272 bp, Heterodera glycines
ttaaatttttatttatttatatttttttcccttaaattggtattcattttttctcttttttctttctaattaaattcatttccgccgataattttttttagccaaaataaattgtccgaacactttgccaaaaatacaagactaataattaaatttaatttttataagtattctgtgcgtgctgttattaataaagaccttatttgcatgtggtttttataattttttatttttcttgaaaaaaaaaatttttaatcggaaaaagaaagttccggcgattcattaatccagcagccaaataaaaagcaataaatgcccataactaaaatcaaccgtacccaattgggactcacttttcaatttaatattaaaaattaattatttttaactgaatgctaaactgatttacgagcatatataaatgtatgcggactctcaaatgacattgttttatattggtaaattttacaaatttagtcggattaatagtaaattgcttgccactttgttggtaaaaataataaattatatttaattcactcagattctctcgcttataattaaacaatgaaaaaaagtttttgaaataaatccgatttccacaaccgatggattgcactgatccatcttcttcgatcggtatcaaagggtatcaatgccttgatcgtaattatgggctgttttggcattgaaccggtctagtctaaaaaaaaaattagtttttgatacccaaattggagtgggggaggggggacgataattgtccgttgaaattcacaaaaaaagagactttaagaaaacccaaaatacaaaagttaattaaatctggttgaaaatggcttaagtgatgaaaatagttaccaaatttaaaaaaaaacgtttaaaatataaaaccttttctttgaggaaaaattaacaaaaaaaaattcactatttcagatgattttattccttttaatgaaatatgaaaagaattatttttcaaacagaaaatttaaatgaacttttcttttttttgtcctttttcaaaagaaaattataaaccgtgaaaaatagtttaaaaaaagctaaaaaggtcgggccttcgttataaagccaaaataatcaaatcttttcctcccctttcagcttccccctgcttttttcgtcttatccttaaattttttggtttctgactttgtaattcttctacaaaagctgaacatattcgctttgatcagcatccgtttgcacattgtcgcgttggctgtgaacagagcacatgccaatgtt

SEQ ID NO: 30121 - DNA, 1375 bp, Heterodera glycines
  unsure (1)..(1375): unsure at all n locations
gaagcgccaagacaaccgagctgatgaggagatcctccaggtagacagtgctgatcgggagaagcgccaagacaaccgagctgatcgggagaagcgccaagacaaccgagctgatcgggagaagcgccaagacaaccgggctgatcgggagaagcgccaagacaaccgagctgatcgcgagaagcgccaagacaaccgggctgatcgcgagaagcgccaagacaaccgagcaataatgtattaagccattacggatgacattagattttccgacaagaaacgtctcgtatgaaaatgtttcaataatacaccgaaccttattatgtaaaataatcaaataaaattttaaaaaacataggcaaattcttcatcaaatgaattaaacggatgtctgtatcttagattcaattaaatttttgaaattggtccaccacatttatcggcaccgctggtccaagttcaactggtgaacaatatggtgccaaattattttctttaagaaagataataaatttaatgaactaaaattgcgtattttattatttttgtggataaatgcaatttgtcaaaagtaatgaatagggctcggatttttaagcgcgaaaaagataaggccttaaataagggcgaaaaagctctaaatttaggggtataatttttttgaatttgctgttttttatatgaaaataatttcaaattaaggcaaacaattttattcattgattacagttgaaaataattaccgtattttctctaattatcccccaatctacattaatcccccaatctccaattatccccctttacttcaccctgattccgacccatttttgtaaaaaaaaattatccactttaaaactatgtacaccagggctggccatgattgaatttccaatcacggatatccgtgatccgtgatcacggcacggcaccccaaaaactccgtgattcccgtgatccgtgatcacggccagccctgatgtacacccacccccgtttggtccgaattccaaaatgagttttattttaaaaacttactttaaaactatgataaaatataaaataaaataccccttgtaatgcaaaaaattgcagctttttcttgtgttttaatttgtgaaaactccctttcagaacggagttctgattttttttgaaaatcgaaagttcccagaatatggaaaanttttcatctttatttataaaaacccaataaatacaaaacttctcatggtttttattatttcttnnagcgtattccagcctgaagtgtattatgaatttccaaaaattagtttaaaattcccgtgctcaaaaaaatgaaaatttaaaaaaattcagatttaggcaaaaaatagttttttcaaaaattttt

SEQ ID NO: 30122 - DNA, 1159 bp, Heterodera glycines
gatggtgcgccgcaagaacttgccgatcgagtacaacgtctgatggaaggatgcttcgtcacctcaacatggacatgataggatcccacccacccaccgtcccaaaattgtcattttgtcccccatcatgtaaattgttgtatctgtatgtaaatttctgtgatcatcacttcaaatgaatgtatatttaattgttgcctatgtaattgtattgttgttgtgcttaataaatgttcatatgtgcttcaattcaaatgcttttgtaggaaggggggcggggtggtaaaatttggcgtctgtttggtcggagggttagctcgcgtagaactcggtctgctcactccttgtaaattcaggtcaaaatgagttttagacaaaagtggtccttcctataagtctaccagtcacacatttcgtttggaattcgaatgttagccgcccaaatttggagataaactgaaattcagagtgtgcccttccttctgtttcaattcctgagataggtaacactggtacaaaaatgacgaaattcacaaataaggacagaactcgttcaaaaaatcacaaataacaagccggacaatcaaatctttcctttgaaaaagtcattgcttgccttttattggaaaaattggccttttttggtctgttaacaaatcagttttccgccggaccccctcccctcgcccgttcaccagaagttttatggaaaaactgcacccgcaaaaaattgttaaaaatcttattgtttgatcccgatgcactgaaatttacgatttgcttatttcctccccaaaaatcgttaaattcgacaatcggaggcgaaaaaaataatacattattgatcgaataattttaaaaataactaatttggaggcagtttcgcaaaacaaaatctgttctgattttgaaaaattgtcgatccgagccctgggtttaacgactttttaaaattttcatttttttcgaaaatggggggaacaaggtaaaacaattcagggggatgacaaaaaggataagtaccgtatgtccaacggtttctgtgatgacccgctaataggggacgaatgtttaaacgccaaaaaactttatgccatccaaatgtctacgtcaaacagagagagggagggagggagaggaccaaatttcagttaataaa

SEQ ID NO: 30123 - DNA, 947 bp, Heterodera glycines
atggaaaataatttcagaattataagagaacaattctgtttaattccgttattggggcaagtgggttgaggaaaaaattaaaatgagtcgaattgatgggtgcataatcttcacttgaatgtcttaaagataattttattatcagccaaggcttttttgtcgtcgtggaaatattgattttaattcaattagagggctcttccgaaaatgagtatttcttcatcgcgatcgaaggcaatcagttgcgaatgggaaataatttcagaatttgaagagaacaattctgtttaattccgttattggggcaagtgggatcgaaggcaatcagttgcgaatggaaaataatttcagaatttgaagagaacaattctgtttaattccgttattggggcaagtgggttgaggaaaaaattaaaatgagtcgaattgatgggtgcataatcttcacttgaatgtcttaaagataattttattatcagccaaggcttttttgtcgtcgtggaaatattgattttaattcaattagagggctcttccgaaaatgagtatttcttcatcgcgatcgaaggcaatcagttgcgaatggaaaataatttcagaatttgaagagaacaattctgtttaattccgttattggggcaagtgggttgaggaaaaaattaaaatgagtcgaattgatgggtgcataatcttcacttgaatgtcttaaagataattttattatcagccaaggcttttttgtcgtcgtggaaatattgattttaattcaattagagggctcttccgaaaatgagtatttcttcatcgcgatcgaaggcaatcagttgcgaatgggaaataatttcagaatttgaagagaacaattctgtttaattccgttattggggcaagtgggatcgaaggcaatcagttgcgaatggaaaataatttcagaaattgaagagaac

SEQ ID NO: 30124 - DNA, 1081 bp, Heterodera glycines
caagagttgcggaaatgtgaaattaattctcagaaaaatggctatctcttttaggacaattttctatctcgtaaccccgatgctaatccgttccacagagactcttcaaaatttttccattaccgcaagagctgcggaaattgtgaattaattctcagaaaaatggctatctctttttaggacaattttctatctcgtaaccccgatgctaatccgttccggagagcctcttcaaaattttttccattaccgtaagagctgcggaaattgtgaattaattctcagaaaaatggctatctctttttaggacaattttctatctcgtaaccccgatgctaatccgttccggagagcctcttcaaaattttttccattaccctaagagctgcggaaattgtgaattaattctcagaaaaatggctatctctttttaggacaattttctatctcgtaaccccgatgctaatccgttccgcagagcctcttcaaaattttttccattaccgcaagagctgcggaaattgtgaattaattctcagaaaaatggctatctctttttaggacaatttctatctcgtaaccccgatgctaatccgttccggagagcctcttcaaaattttttccattaccgcaagagctgcggaaattgtgaattaattctcagaaaaatggctatctctttttaggacaattttctatctcgtaaccccgatgctaatccgttccgcagagcctcttcaaaattttttccattaccctaagagctgcggaaattgtgaattaattctcagaaaaatggctatctctttttaggacaattttctatctcgtaaccccgatgctaatccgttccgcagagcctcttcaaaattttttccattaccgtaagagctgcggaaattgtgaattaattctcagaaaaatggctatctctttttaggacaattttctatctcgtaaccccgatgctaatccgttccggagagcctcttcaaaattttttccttaccctaagagctgcggaaattttgaattaattctcagaaaaatgggctatctctttttaggacaattttctat

SEQ ID NO: 30125 - DNA, 1338 bp, Heterodera glycines
ggaggagtctaataacaataagcgccttttcggagacgtgcaagtgtcgaggccagcgtgtagggtcttttgaagtccccaaattcaaaatggttgataaatgccaccctctctgacgctttaaggaggccgtcaatggcgaagaatgcacacaatcgacacccatcggcggaagattgacaaaacagcggcgtcgagacgagctcgcaatcgtttatctccgactcggaccggtgcaattatcagcctgaacaaaaacgacgagtcgctgtcctggtcgaacaccaacagcgaagtggggcagggcccaaatggggagaggtcaacgacaaggaggcgccagagtttggcattatagtggaccagcaacaagataaggtaatacgggtggtgggatagagttgtgactttttgcgattgttgttaattaatttcatgtcgcaggatgacatcagcacatgtgactccaatcgaaaatccctccccaccgttcaacatcccaaggcacacaaaaagtaaaaattgctgaggtttagtcccagttattcgaatgccgcagaattgagtcccagtgattggggtgcagaagaatcggtaagattgagttccgatgattgtaatgctaatgaattaagtcccagtgatttgaatgctggtgggttgagtcccagtaattggaatgccgagggttgtttgagaaattacgagcaacaaaaagatcagtagaatgttaaaaatgctgtgccataagaaggtgccaagagaagggtgcgaggccgcaaagcggccgagtcgagccataatagttggttttggggacaggtaaattggacaccaagcggaaaactggacaccgtcggaattttggacaccaaaggaaaattggacactggaaaactggacaccaaattcctcttttaaaaaataaacacaggaattagcttgaaaaataattggtgtggataaatggattaaggcatttagagtcgatcaaacattaaataggcacgattattgatcaaatgtggcaaaaagtgtacgaaattaggcgatgattggttaagatgtcaaaaaatgtagaaaattggcgatggttgttcaatgtgccaaaaatacgcaaaaaatgggaacccgatcaaaatgaaaacttttttcgttatgaatgtataatggcgttctgctgctgatgctaaaaataataataacattatatatttcaattaaaatttttgtttatttatttttaacttatttattttatgtacaattgtgtccaattttccggtgtccggtgtctaattttccattggtgtccagtattctagtgtccaattttcc

SEQ ID NO: 30126 - DNA, 949 bp, Heterodera glycines
gacagagtagcgaaaaaatgggcagaagaaagcagagcaacagcagcatgagaagccaaacgatcagacaaaacgccgaacaatttgggtgcaactgaacagtcggagggacgacgaagtgatcggacgcaaaggaatgatcggaacaggccgatcaacgccagaagtccctcccccccccccccacttttcttacgtttgtaaaagcaccgtcccttcgcatcgatggccttgcccctccggtgaagtgtcttttgtgcccggaagacattggcaccgaaagcgcagtccttccggcaaacattgtgcctttttgtcgcaattgttcaaatcgctctgttggcatgctccgtcggtcagttctgtgaatcgactcaaaattgccaaatgaaataaaatgccaccgaccggacactttcactttcatttctggcaaattgccgtgcgttttcgtcgcctcttccaatttgtccgtcgcgcattcgtccgcacaaacggaattcaccacaatttgtccatcgttcaaaaagttacgcacgcaaaaggactgatcagggagtgaatcgatcagctaaacaaaatgaaatgatcagaaagtggaggaaggcacctttagaatgatcaattgttcttgaagggacggctgagaagagagggaaaagtcggcaaaactatggccacaaagggaaccgattttggcactgaaagaaaacattggcaaaaagaaaaaatggagaaaaaacctaaaggtggacacagtcgagaagacgcaggaacctgacaaggaataaagaataaaccaaatcgaaagtgaaaagcaatgaattggctaaaagaatggcaaaccgtcggatgttcggaattggccgggaggacacgcgcaacggacagagacattcttctgaatggattgatggagttcaaaaaccacgcgcccttcataaaaatg

SEQ ID NO: 30127 - DNA, 1431 bp, Heterodera glycines
ccacacaaccacattgcaccactcacacaggcgccgctcctcacacattgaaaggtggggccgcccgcgacggcggtccgcaaacgctggcgcgacagcggcgccaacagcagcagctaaagaaacagcgtcgtcaccgtctccacccgttgctttctcaccacagtgaggcacagcagcaacggcggcgacgcccggaggcggtgccggcgcaacatccacgcgccggcggtgcgcctcaaagcagtccgcgttcgggaacacgaagcggcactgttggcagaacgtgccactgctgccgtcgccgccctggcgccggcatgggaagcgcagctcatcgtagcgcatgcacaggccacacacagcgcggcagcccagcggatgcgtgcgccggtcaaccggatgctcgcactcaacacagaactgcttggcctgcgcaaaaaaagcacgattaaatgatcaaaaagaaaaaaatgcatacgccatacagacttttttttgcttgttgtttttaattttccttaattttcaaatcgggatgattttgttcatttgattttccatttctctctttctttcattcatatataatcaatttttgcttttttcatggatttttaaatcagtttgcccttattttgattttaatttattttttttacttttttgtctttatttccttttgatgaaatgaattttgggtaaactatttgtattcttaacggttgcttgatttttctttattatttgtattttttcttagatttgtttgacttttcttaattacttttatttcacttttgcacatttttcttttcattttttcattttgtgtttttcttttctttgctttaaagaaatttgcgtagactttcctgtatttttagtgtgtgtgtgtgtgtgtgtgtgtgtttttttccttgacatttgcttggcttttctttattaattgcattttttttttcttgaggtttgtttgacttttctttattattcttttctttcactttggcacatttttccttttcttaagttttcaacgtggtgttttttctttctttgctttgctttgctttaaatgaataaaaattttaactacaaatgaataaaacattatcggtgaggtgagtatcattctcgagtgtatcttatctggcgcaagctctatccacttaaacgatttataagtttttggggtcgctgatcatgaatccagcatccatttcgaacttgtaatttgttgcaaattcctcgtagtaagttttggagctcatccattgattttgcaattctttagataccagcaattttggtgaaaaatgaattccgactttttggttcggggtttagaatggggcgaaatggatgtcaactttagtcaacgaccccgaaaaacatgtaaatttatttagaaataaaaaaaatttgggg

SEQ ID NO: 30128 - DNA, 1017 bp, Heterodera glycines
  unsure (1)..(1017): unsure at all n locations
tcaatccttaagaaatttatgtaaatgaaaaataaacaaaattcaggagaaaagtcgaaaaaataataaacaaaatatcattagtcataaaataatttttaattgtttgaaaagggaaaaagaaaaaaataacaaaaattttggaacgcacggttctcacgaagttattgccggtgccagaaacatttagttcttttgttaaaaacataaaatgtacaagtatgtgattttatgttaacataattgtgcatataattaaatatgtttaaaaataatagaaaataaatttcattatttatattaaggtgactatgacgataaaaaacaataaaaatgataaaagagaataataagagaaaaataataatagcgaaaaaaatatttagaaaatttaaaagacttgattccagaaaatttcgtcaagttttaacaaagttatggacaaaagtactcaaggaagcattttttcaaacatttatggtcataaattttttgatacttagccaaattttggaattttacaggctattagataatacttaggactatcaaatgataacgagatttcttttttgagcatcaaaattctgatcaaaactttttgaaccaaaaaaaatcttgatatcaacttagcactgatagatggcataaattaatgaattaagtgcattttcatttttgcaaaactaggattccctgtcggatacaataaagtggaataagaataatatgtatactggctggtcttttaaatatatcagttacaaaaatttgcgaaataatatagtgtataaaaacaaagctaaatttaaagcataatttgaaaattaaaaaaatccataattatttataaatatatcaggcaaatatgaaaataacaaaataaaatagatagtaaacttaaagcgaagaagtaaaactttttatgaagaattgaaatattataaaagtaaaaattaattacgagnatataatgtaaacatcccatgaattacaaaaaaaacagctaaataaatg

SEQ ID NO: 30129 - DNA, 969 bp, Heterodera glycines
aaaaagttcttacaaaaaattcaaatttttttgattttcaagggtatatattttttaattctcaaaaaggtcaatccttggggggtttattttttatttttgttgcatttttcttatgaaaatttgccaaaaatgaccgaaatatgctctaaaaacgcaaaaatggcaaaatatgcatttattctcgaaaacccccaaaatatgcgtttatatgcactaaaaagcttccgtagaaatgctattttgagcttctttttttcatagcatatgcgtagaaagaatatgcaaaattgtacaatttaaccctagttattatgtattaaaaaagcatgggcactactgtatttgccatctgtacagctaacaaggaaccggtattctattgtacatatcagaattattatgttttattatggtcagctacagtatccgtcaatatgagtacagtttttgtttccaaataaactcactctttccattctcttccaacgattcgtgcatgaaaatgaacataaaattgttgttgctttgatttcgggcgccatgttcaggctgcacggacagtcggacagaatcgccatagttgaacagtgtcgacaattttattgtgaaatcatccggtattgttttattgtctaccgtggttttggctttgaccagaaaaatctgtaaacaaaaaaaaaagagaaaaaatagctaaacataaaaatgaaaagtttttacaaattttctcatttaatagacaattaattattaggggctgccaaaaatatgtacaaaaagtggtccaaatatgtaaataaatatgtaagaaaaatccaaaaatatgtacaaaaaaccccaaatatgtaaataaaatttttttaatggtattttttgggaaagaaattccccctaaaatatgaaaaaaaaaaaaaaaaaggaaaatatgtacaaaaaaattttgcccaaaatttttaattttttttt

SEQ ID NO: 30130 - DNA, 951 bp, Heterodera glycines
tttgacgatatcgggcagcggctgcattgttctgatcaatgatcataaaattgcatgaaccatttaaatctctgtcacatggttttctttatgccatttcgaatttagcgaaacattcaaaacgctttagcccggtaatttcaattcccaaggattaaaaaaaaccgcaaatctcgcgaagaatcccgtcccgggcccgactccatccaaaaataaaagaattttatgcttgttcagaattattttcaatttttaattaaattgaacaaaaactatgtaatatctggcattcaactttcgtttcgaacacaattcaaaatattctctgatcattccccttatcactcactcactgatcatttctccgactatcattttgatctgatcactatggtttttacctgttcccgcttccgctcaagtatctgttccgcattttccccatggctcatcacactatcgcattccgtcagcttcaaactcttcgatcgatgcttttgtttcgtggaaatcatcgcctccgccaggctaatttgactattgttcttcatcttaaaaatatgtccaaaatttgtaataaattgtttaaatctttaatcgctcgtttggcaattcacctctttaagaacatgcgcaacaacaactttgatcagtctttccaaatctaaagaaaaactggtgcctttgccggcgatcagctgctgctgatcattgcatgaaaatgtttttgtgcccagctccgatttctcagttcgcattaactgaaggattttaagtgtgatattcaaatagtttttaaagcatatcgtccaaaaatttcatagaaaatctggcacataaatttggagtaatttctaacaaagcctgccaagatttaacccccaggcgatgcctctcgacttccatcgggccattaatttcctttttttcattcaaaattgactctttttg

SEQ ID NO: 30131 - DNA, 1022 bp, Heterodera glycines
aaacccacttgaaaaaacgttgcactgcaattgctaagcaaagtgcagaagactgacactgtgccctgttggatcactttttcatccattgaaccttcagattgaaggtcgtcattggtgagtgcaaggcgatcattaagcgtcgcactgcccaacgctttgatcattccgaagaccctttgacggaatgaaattgcatgcgaaatattgataaataatttaaaatttaacatgttatcttgcaaaatattgataaaatgtataaaaataattattaaatagttacttttccatcaattggtcaataaaagtgccaaaatgggctgtgtcgcggcacagctcttgttcttcagccgacaaatcattgcgcgtcgctgcctgagtgcagtcctcgaccacaaccagatgaagcaaattgacacaaatctgcttgtgagaggaatattgaaaatttgcaaaaataccgttacttgaaacaccaacgaagacttcacaatgtcgttgacatcaatgcccggcagaatgttgttcagaatgatgatggcatgtcgtcgatacgatttgaggtgcgcgttcgcgtacccaactgttttcattggaactcgccgttcagcattgcagtggtcgtctcgcaccagcggaacacttttgagggaaatttaaactcataagaaataaatctcaaaaagaatcaaccaataccctcttttttggcccagggatgatcccagggttctccttggatgggaggagccccgacttttgcggccccgacatttgtgcctacgtccaaaatctgactcaaagttgaattttttcaaaccctgacagcctaattagccttaaaattaagaaaacattgtcttttggttcattatgttcaataatttgttgtttgaaaattttattattttttcaaaaaatttttgaagatcaaatgatcggatacacaatcactttcaatcgcttatttaaagttttttatgcgatcagggattgaaaaaacttaattttgaacccga

SEQ ID NO: 30132 - DNA, 1036 bp, Heterodera glycines
gactcaattccaccgaggccattgcgacaagtcatcatccgaggcggacttttctttttcgttgtagggtttttttaaattttataatgttttattttgctaatttcaatggcaaaattcatagggttgggctgctaaaattccactatttttttaaggacaaataacatacaaatacaattccattagctaaaatacaatcccattagctatcgttaattaacattttttaattgccacatccttttgtttaggccagcaatgtcttctcaatgattgctgccgttaatgactttgagatgacacagaagcgattccaatcggtgattgaccaggccatttacgaattccgtcgcactttttccttcactccgccgtataagcggaaaacggaagccgccaaattgatttggacaattatcggtgccaatgtggccatcttcctactctggcgagtgccaactctggtaccattgttgtggcagtatttctccagtggtgtcgcttcgagtgaggcttttttggggggaggggtgggcacagtttggtggtgccgatattcctatttttgaactacaaatttcaatgatcgagtgtttattccacttttcagaaagtctttgcatgccaatgcttttcagtgtgttctcccaccaaaatctcatgcatttgttcttcaacatgtacgtgttgaatagctttgctatcggtgcaattacccttttgggtccgtctcaggttttttttttggtttttatgaaatcattattaatggttgtgtccgaacccaaattaattcgacccagtcgttaaaattaaattcaaaacgcatatactcaaatggaattttttttggccatctaataatgtgtgtccctttcagttcttggcaatgtatttgagtggcggtctgttcagttcgtgggtgtctctgtgccaaaaggccgttatgcgcagcacaatgccatcgctgggcgccagcggcgcaatttgtgacgtggttggatacatttgcgcgaaattgccagacacgcgg

SEQ ID NO: 30133 - DNA, 894 bp, Heterodera glycines
ggcgcccggtaaatgcgtcagtgaaaaatgcgtcagtaaaactttaaaaaaaaaagaaatcctaagggaaaaccgtactctaatatgattgaggcggattaaaaaaccattaggaatattaaataaaacactaaaaatttcgccatattaaattgcgtttggcattctgtaagcaatagagcgaagatattccaatggctgtcgctgtgcacggctattaaaaatcgcaagtaatgccgcatcctgttcaacataaacactttttcgacccattcctttgcccctaattccattgtttggggcattgttaaaatcctccacaacatgttgccagtgcaggtcttcttgagacatcactttgacgaatgtactaagaggagggtgtgacgctcgaaacaaagcattgaaagagcgatgccacccctcagttgaattattagtcctgcagctttggttctcaatttgcataacacgcgaacaaccaacccaacttctcacaaaatatttgacgatttctttattaattatttttttaaatattaattttagggaactttttttaccgtaccttcgacttcctcttcttgaggtaactgtctaataagaacacacagataattatatagtggttcgcctgggggagtgaaagcgagactgatcagtgatttaatcagggtttttgtatcatccggatcatgcgggtttaaaaaccgctcgttgagtcccggcaaattttgaacctagatttttatgaaatttagcaaaaaaaaacaatgggctcggcgcaaccttttaattacttttaaatattatgataattaatttttttattactttaaaagtgccatccattgctatatgagatccgtagtttgtgatcaaattttggccaaa

SEQ ID NO: 30134 - DNA, 1422 bp, Heterodera glycines
agtaagtggatcactcactcccttttgtggactttttcttttttgtataaataaatcatggaggtcaccatttcgcccgtcataattcataccctttctcatgggtcctcccttttcgcaatttttataatattttcattaggcatttctccgtgccaccactacttcttttgccttctatattatcgattttttattgtttgcgtcaacaaaattaaaatcattttcaaaaaagaaattaaattaggcagaaattcatagctttttttattgagttttgcttaaagaattataggatattttcttggaaaaattgtgttgttttgcatgcctatgtcgacgttagcttgcttaggctcggattaggcataagcctaggaaaatggtagccaacaattgcttaattaatcgaatcaggatcactttttggcaattgtctaaaatccgaaaatttgtttgtttcataaatctcgattggatttataaaatgcattcgaacatatagaatttttcaatattcagttacctaattatatgacacttttgtctctgttctattcaaaatttgtgcttacctaatttcatttaaaatgcctttaaaattaaaaatttttcttaaatatttgcaggcgaaaattaattaattttaaatgggacgacaattgtccaccgccgtcatttcttctgccattagtgaaaatcagcagcagcagcagcagcaaccgttgtgttcatttgtgaaaacatcttttggaaggcgacggcattggtaaaaatctgtcactaaataataaaaatgcatgggtctgttaaatgttttaacagttttttatcggaattttttttttttacctttttgcatgtaaattttaaaaattttgtgcctaaatgtccgggatctatctattagattacaaatttttcatttaaaaattaagttttatattcgaaatttcattgcctttttaagttatcacatttttggtgtgattatgaaaataaatcaattagtaaacccattttgtgccttttttatatgttaattgcaaaattttttatttccaaggttatttttttcacaatttcagttggatttgcagcgatgttttgatggacattttcccctttttcgaccatgctcaacttggtctaaaattggcactgatttcgccacgtttcgatgttttagtggacacgcatttcaatggcaaaaacgaattgaaaatttggagaccaatcgcgattcacaatatggggacaacaacaaaaatagagaagcttggcatctttaccaaatttgtgcagttttcaattccgcagcgtccgctgcacaataaaatccgctttgaacttcttgaaattgagtaagttcaaaattttattgaccaatttcggtatactgtggtttgccccccccccccc

SEQ ID NO: 30135 - DNA, 1249 bp, Heterodera glycines
cggagggcgacgcgttggatcagttggggctgcgccgctactgctgccgtcggatgctgctgtctcacgttgacctgatcgaaaagctgctcaattatcatccgctggagaagtgatcggagagacagacagtgacaaaagcgacccattgaaaaaacaatcatttttattttattttgttttactgtttttttttttgcttaatatttaaatgaatgaattccaaaaatgtagattttttttctcttcagaaattcctgtggaaaattttaagaattcagtattggtgtcatggcaactcgtacaaaaaaatgtctaagaatttttaactaaaacttagaatttttagataaaaaaaaatctaagtggattttttggcttagaaaaacttttttaaaaattctttaaagttttttactaatttttcagttgatttttttaatttcttaaattttttgaaaatttaagtgttttaaaaagtttttctaggctaaaaaatccatttagattttcttttatctaaaaattctaagttttagttgaaaattcgtagaaattttttttgtacgagttgccattgaccattttttcttttttctcgaatgccccactttccccacaggcgttcgttggctcaaaaattttgagtccccatggatttcgctgtgtttggccaacaaaagccagctgcacaacgccaatcggcatgatttgattgacggtacgccacaattacaccaccacaaattggtgattcgccgtgtcacttgggacccgtgcgtggaggagccgttgttggacgacatgggcgcgctcaaagtgctctatttgcaggtgccatggcaaatagggtggtggcatattttgaaaaatcagagttcgacacgacacttataccccgaccgagtttttgaagttggtaaactgatttcctccggaccaggccctttaaccataaaaaaatcggatttttttttttttgctcattgaaccctaaaattttgtttattttttccggcctaattttttttaatccaaaattttaggtgccatgggtgaaaattttcgataaagcgaccagttttttgcagtttaatatagtcgaaaaaaatgcgtgggtcataaaccccaataatcgcaatgcacaggttttttaggctgtcagcgacattcaacgcgccattttcaacgtgtcacaacaattgcgggagaagctgcgctcgttgcaggaatacggcgacttcaagca

SEQ ID NO: 30136 - DNA, 1964 bp, Heterodera glycines
tttcattttttctagtctaatctactcaaaacggttctgatttcaataaaaataacattcacggtgcgaaaaatggggttttaaaagtttattggggaaaaaaagactttacaaaataatacccctgggagaagggagtgggaaacatgatttcattattttcaattttttctagtctaatctactcaaaacggttcagaattcaataaaaataacattcacggtgcgaaaaatggggtttgacaagtttattggggaaaaaaagactttacaaaataatacccctgggagaagggagtgggaaacatgatttcaaaattttcaattttttctagtctaatctactcaaaccggttcagaattcaataaaaataacattcacggtgcgaaaaaaggggtttgaaaagtttattttgaaaaaaagactttacaaaataatacccctgggagaagggagtgggaaacatgatttcaaaattttcaattttttatagtctaatctactcaaaacggttcagaattcaataaaaataacattcacggtgcgaaaaatggggtttgacaagtttattggggaaaaaaagactttacaaaataatacccctgggagaagggagtgggaaacatgatttcaaaatttttgttgaaatatttgtcgtgctctgaagggcgtgggaggggggggtgaaggcccaccacgaggccgcgaagaggccgagtgagtaccttcggtgcaggaaaattattaaattttaaaaattttttaattgctttttaaatatgccaaaaaatgtaggcttaacttttttagtgaaaattcgatcactcatattttttgctaattgagcagaagcgtaccaaactttgcagggatactccccggtaaaggactaacttacactgaaatgagcgccgagctagctggctcaaaaaaattttcgaaaatctgagtctttcgtttttatttattttttgcaaaattaattccttaaatattttttcagaaagggttctgaaacgcaccaaattttatttacatgttagtttaggcactctgatgctttttctatcaaaaagggagatgaataaaattaataaaaatttttaattcctttttaaacaggccaaaaagtttaggcttaacttttttttcagaagctgatcagaagcgcaccaatctctgcagggacactgaaaggaagagaaatagcgtattttaaatattatatagtcagttcatttaaataatttctctccaaaaaatttttttttgtgttttcggggcagtccccctgaaccgatgcgcccagatttatggggagaccgaatccttccggaatagcttcactatagcctgtactttaattctgcgttggatttttgctccccataattgtttgagtaccccaaacggacacttgaaaaaatcgatttatttttgttttcggggcagtccccccgaaccgatgcgcccagatttatggggagaccgaatccttcgggaatagcttccctatagcctgtactttaattctgcgttggatttttgctccccataattgtttgagtaccccaaacggacacttgaaaaaatcgatttttttgttttcggggcagtccccccgaaccgatgcgcccagatttatggggagaccgaatccttcgggaatagcttccctatagcctgtactttaattctgcgttggatttttgctccccataattgtttgagtaccccaaacggacacttgaaaaaatcgatttttttgttttcggggcagtccccccgagccgatgcgcccagatttatggggagaccgaatccttccggaatagcttccctatagcctgtactttaattctgcgttggatttttgctccccaaaagtgtttgcgtaccccaaacggacacttgaaaaaaccggggaagttgttttcggggcagtccccccgaaccgatgcgc

SEQ ID NO: 30137 - DNA, 1038 bp, Heterodera glycines
cgaaaaattccattaaaaatgcaattaaatcgaaaaaatacacacctaagaaatggcttaaaaaatgtcagaaaatacacacctaagaattgaaaaattttctcaaaaattgatcaaaaaaatttcatttttttcttgacaaaaaattttaggtttaaaaatttttcttaatcgaaaaacattataaaatatttgaatacaaaattaagttttttgattaagttttacgtgttttgctccttaaaaatccttacacaaaaatttttaaatgccttttttcatgaacgcagttttatatttgacaatgattttaagttatttagaaattttttcgaaaattaaaaattccatttatccccccggggtgataaatggagacggggggataatttttcaaactcctcacaaagggggggggggaggggataattaattggagacaatgggattaatggagacgggggataaaaagagtaaatacggtaatgatgcaataaaaattattttatgttctatgtcagaatttcaaataatggacttttaatttcattggaaaatttttacattttaatttttccattgatggttttttttagaaaatttcagctaatataaatttattgtttaaaattcaatgggaaaataacacatacaaaaaatggagaatttttttcttatattcagagaattttgaaattttttaatcctattagtagggatgtcaaaaatatgtacaaaaagtggtcaaaatatgtacataaaaatgtaaaaaaaatcccgaaatatgtaagaaatatgtataaaaatctaaaatatgtacgaaaatatgtaaataaaaattttttgattattttttcgaaaaaaatcttggtaaagggttaaataggcacaaaatgtcataaaaatgacctaaataggtttagaataacattttaacattaaaaaaatttttttgctatttttaggggtacattttcaaaaaaaagaatttttattttttcacaagaaatttctaaaaaaatttcaaaaattctcaaa

SEQ ID NO: 30138 - DNA, 880 bp, Heterodera glycines
tttatgtgcattaacaaatgagaaaaaatgaaagaatggaataagaaaatagcgcaaatgttgtttttaccttatcaaatgataaatcaaaacatgatattttgttttcatctcttggttaattggtgatctgaatgtcggcttccaatgtcaatgtgtcctcctcgttgtccaactcattagccacttgtaccaattccttaattagtttgctaattaattgctcgtgtgtttttcacaccataaacattaagccacggaatattttctttctgtcggaagaagtgtgaaagatgttgtgcatttcttgtaaagtgtaatctttttttgacttattttgtgccacaattcgcaattttgccgtacattcgtagcgccacttcgcttaattattgtttgatagattagggtaaaatggcacagtgtttcttggaaaagggataacaaaattatcatagaaaagcgctttacttggtcaggatcaggaaatatttatggcggagagaataacgccaaaattaccagaattttctagtattaattagagttgagcgcgacagggaaatttgacaaaaaccgggaccgggacttgccgggaccagaaaagtcgggatcgggaccgggaccaagttttttgtccgggaccgggaccgcgagaaaagccgggaccaactgggaattttcccaagagaaaaattttttgaaaaaattttaaaatttgagtgcacttggttacaaaaatttcctaaattcaaaaatgtgcccagaagattttttaattttcttttgggggaggaattcgaagaatttttctattattctctggaaagtttttaaaaattttcatttcgggggcgggggtcttggaattttctgagtc

SEQ ID NO: 30139 - DNA, 1365 bp, Heterodera glycines
atttatacatttttaatttaatttaaattcatattcttatatactattcaattggtaaataaatttccagagtctcatctggaaaaattttgctacataatctaaattcctcctcagaatttgggtgcatgttaatcatgagataactaaattgattattggtcgcatcatgatatgcatccatgaaataattcagtctttttgggaacagttgtgaccccaatgttctcacttgtaattggccggaagggttgcgcattaaaaccagataatgtgcgttggctcttgccgttttaatgtcccgaccatagagactttgggttacaaaaattacgcttacgttccaattatgggagcccctggtaaagagtagatcgaggaaagtattctgcatattaagcattaaatcatcaagtattaacaaaaggggtttttcctgttctttaatcttattcatgtccggaatcccgttaaaagtctcaacgccctccccgattaatcctaaaatactatcattcatctcaccataacaataaagaattttcttaggcgatggttcaattagattcttatgatgttttaaaaaccgtaatagccaacgggtcttaccactcccagtagcccccgagagaattagagtgaacggaccgcgaaacatttttaatgcatcttatttatttgacctatttatattttcatagggaacatgtttcgcgcatttggggcatagccagaaattatcaaaaaatgatgtaccgaaatgcaaaagactgtgctttttacatctgttacaaatctcgtaatgacagggacagtaatgacaacacttaattttatgtggacagttcatttttcaatttaattttatttttggttgctatttatagaaggggtatataaagggagtggaaggaccatttgattggtaaattgtatcaaaaatgcaaaaaccgataatcgtaaatataattgctctcgctaatctcggtaccggaattaaactaaactctctgacgatcaccgagtgtgaatttaagtataaccctagaaaattcaatgccgcggttatcaaatgtgcaagccccatcaaagccacggcattattatgggaatccgggaaaatgatatgtctggggacgaaaagtctgatagactgtgaaaatgctattaaaaattttatagaaataattaagggctcggggtgtccgggggcttcttacaccggacacacggttgaaaatattgtttcgacctttaaattcggacgtgaaattgaactgaacgagtttcgaaaaaatcgtcgtgcattttatgaaccggaaatatgttgcggtttaaatttcaagacggggtaaaagcatgaca

SEQ ID NO: 30140 - DNA, 1415 bp, Heterodera glycines
  unsure (1)..(1415): unsure at all n locations
ggctcgtcgtcgaccccgtgggctaaggagggcggcataaggcgccggaggggcgccattaaacatgccaaagtgcacggtgtgcgcactttcccaccgttttttgaattgcctttcgcttagaaatccgaggccatcaatttgtggccacttttttccggcagcccactttctgctctttgtgcagcgaatttatgtggtgagaagcacaaaagggcggggaaggatctgttcgtttccctcccttttgaggggactgaataagcagggatatcggtgccgactctgcactttgggtacattttgagtctttaaagtccaacgaacaatccgattcattttcagcggttcacaaaaaatgtcacgaaaaaacgctaagtcagtgcccgggatcagccaaaaacagcaaagaaaccatcgtaagacggagcaaatggagcagacaaatggccaaattccccttttaagtacctcaaagaacggttcaaaatcgatgtgccgcacagattcaaacaggcaaaaagaagaaaagaaaagaaaaagcaaaataaaaaagaaaaaagaaaacaaacaaatggtaaatgaatgatttatttagtacaatttcaaaagtctgaccttctgcgaccattgcggctcacttttatacggactgttcaagcagggaatgaaatgcgaagtgtgcggagtgaattggtcggaaagaaaagcaaaaaaaggaaaagcaaaaacattgccaaataatttagtcacaatcgctgcgaaaggcatatgcccaacctttgcggcgttaaccaaaaacagctgtccgacgcacttttggagatcaaacgaaggcattgccatgaaaagcaaattgattattcatttgattcgcctattttcagcactccgccgggctctgtcggcggagggacggcacaacagcagcaaatgttcaacggaatgggcaacaagttcaaagtgggcgagtgcatgccgtaataaaccaacaaagtgccattgccccttaggccctcttccggccacaaacggccggcagtttggacattgtggggacggaaaaggacggcgccgaggagggcgcgggcggtgactcaccgcgacatttcaaattgcaaaacttcgccattcacaaagtgttgggcaaaggcagcttcggaaaggtgcagcgggtgaagtgaccaaaagcaaagggaccactaaatgcaaaataatctttaaaaaggaaaaagttacccaattaattgcccaattaattgccattcctttnaaaagtttgcccgttttaatccccaggttttgctggtcgaactgaagggacgtcagcagttcttcgcgatgaatgccttaaaaaggacgttattctcgaggacgacgacaccgaatgcactttcatcgagcgccgcgtgctg

SEQ ID NO: 30141 - DNA, 1122 bp, Heterodera glycines
ctgctgctgacgccgtcgctgctgtttcgtcagcgtggggcgatggccgtgggaggaaacgtgctggaagcaaaagcaaggaatttatgctgcaattcttccgaccggtacggctaatgaatgttatttttaaagaaatttgtttaaaattgcaaaaaaaaaaaaatatattcgccatcagaaatgcccaattttatgtagaggctaaattagtgtgagcggaggaattaaaaccaaatataccacatgaaatgggagcaatgcattccccgcacacaccgaaattaaaaaaaaataataattaatattgaaaattcttacaaaatttgagttttttacgcttttcaaaaaatttttcttttatgcgtttcaatgaaaatttcaaaaaatttgccatgggaggaagggtgaaatggtaccacttgtcattattattattaatagggaccagagcgtttgggcccccgtttttgggcccccgcgtttgggcccccgtttttgggccccggggtcgtttgggccccaacccaaaaatcaaaaaatgtgcttttttaaaaattaagattctaaaaactaagcctgagggatccctcgccacttggcataagctaggtttaattaacattcgctcattttttacaattttacttattccaaatcctattattttttaatagttaaccaatttgatgtacattctgatttggacatttttcagaaatggctaacccaattgcaaccaaaaaacaaaaagtaaaattgtcttacgaaggccacctttacaccttcgctaaaatgagttctgatgggatgacaaaattttggagaatttctcgcaactatcgaatgaacccgtgattttttgttttattgtccaaatcaccttatgaacccgcgaatttctgttaatttttacattttttattgttaaaattattgttgaatttatttttaaaatgttattttacatttttatgctgaaatttaaaaagttgtttttactgtgatttttcatttttctgtacttggggcccaaacgaccctggggcccaaaaacgagggcccaaaaactggggcccaaacgcgggggcccaaaaactggggcccaaacgcccccgactc

SEQ ID NO: 30142 - DNA, 1035 bp, Heterodera glycines
caaattttcacggacaaccccgtactggaaaattccaaggaagtattgggttcactgctatataatttcaagggccgactcagtccacaaggatagaaaaaagaaatagggattttggaaatatttttcaaattttcacggacaaacccgtactggaaaattccaaggaagtatagggttcactgctatataatttcaagggccgactcagtccacaaggatagaaaaaagaaatagggattttggaaatatttttcaaattttcacggacaaacccgtactggaaaattccaagaaagtattgggttcactgctatataatttcaagggccgactcagtccacaaggatagaaaaaagaaaatgggatttttggaaatatttttcaaattttcacggacaaacccgtactggaaaattccaaggaagtattgggttccctgatatataatttcaagggccgactcagtccacaaggatagaaaaaagaaatagggattttggaaatatttttcaaattttcacggacaaacccgtactggaaaattccaagaaagtgttgggttccctgatatataatttcaagggccgactcagtccacaaggatagaaaaaagaaaatgggatttttggaaatatttttcaaattttcacggacaaacccgtactggaaaattccaagaaagtattgggttcactgctatataatttcaagggccgactcagtccacaaggatagaaaaaagaaaatgggatttttggaaatatttttcaaattttcacggacaacccgtactggaaaattccaaggaagtattgggttcactgctatataatttcaagggccgactcagtccacaaggatagaaaaaagaaaatgggatttttggaaatatttttcaaattttcacggacaaacccgtactggaaaattccaaggaagtattgggttcactgctatataatttcaagggccgactcagtccaacaggatagaaaaaaaaaatagggattttggaaatatttttcaaatttt

SEQ ID NO: 30143 - DNA, 1370 bp, Heterodera glycines
accggacaattgcggacgacaattgcggaccgtacttttgcggacgacaattgcggacgacaattgcggaccgtacttttgcggacgacaattgcggaccgtacttttgcggacgacaattgcggacgacaattgcggaccgtacttttgcggacgacaattgcggaccgtacttttgcggacgacaattgcggacgacaattgcggaccgtacaattgcggacgacaattgcggacgacaattgcggaccgtacttttgcggacgactattgcggaccgtacaattgcggacgacaattgcggacgacaattgcggaccgtacttttgcggacgacaattgcggacgacaattgcggaccgtacaattgcggacgacaattgcggacgacaattgcggaccgtacttttgcggacgacaattgcggaccgtacaattgcggacgacaattgcggacgacaattgcggaccgtacttttgcggaccatacttttgccaaaaaattaactggaagggtgggcctcgtcagtacgatcccttccgtattacaaatttgaaatcctaagtgtgtttcggcccttccgtagacacaccaaataagaaagctcacagcaataaattaataaataacaaatagaaaacacaattaaggagaaaaaagcaaagcataggatgataaagctataatatgtttattttattggcttgctgaaggcccaacaacagcttctacgatatcaccaaaattattggccccaattatcgatgtgatttcccgctagtctatattgtaaagctctaagatggtctaaatactgttgatcggtcggttcttcaatctcatcgaataccattaccattcgtttaattgctgcatcattttctctatacttttttgctcttggtcgaagatttatcccccgtgtgttgtcaacttcatattctcttaatctatctgttgcaattctttcttcgctttttaagacattaatgagcctttaagaaatttttatattaaaatcttgacacatttttaccgtgatagagggggatgttctttggcaaattgtcttctcagtgccaaatgaaagagagccttgggcaatttaacaacgcaattagtactgattttcagtataaaaacactgtgtaaccaaattaattaattaattaaaaatgaaattattgtcaaaaatcctttttctgaccaatttatttgttgtgagcaattgccacccaattgctaccctttaccaagccgccaaaacactaaaaactctaaagagtgagcatattttaacaagcgcgacaatcggtgccctcggtggagcaataacggcacaattaatcgaggacttaatcgagatgct

SEQ ID NO: 30144 - DNA, 948 bp, Heterodera glycines
ctgcatttccaacagttcaacagtataaataaatattaggcaaatgaaaaattttttttccttcctctttagaaagtgtctaaaaatttttgtttttaatattcagaaaacgtgttttttttagtgacaatttttttcaagagaaggatatgaacaatcacttataaggctcatgcttggagataaaggaatcggaaaaaaaaattatctcaacaatcagtcgtgaaacagttcaataattcggaagcagtgccatattgggaaaagatgcacaagtagagtaggctcgaaataaaggcaactgccgaagattaacaaaaattcaaatttattggccccgttctgctttgacaggccatatctcgccagggagtggcggtagaccctttgttgatacatttgaaaatgtagagcgcgtctagctcattcgaataacatcaaactggtttgtttttgtcacgaaacaacccgctgatggccacgtcgaagaaaagtcccaaaatttgacatccataaaactccattttttcataggccagcgtgtttaaagcaaacccgaaactgataggaaatttaaattgatcataatagaagtttaatttttatttgtcccatgcattttctgggaaatcttttcgcgaaaagttgaaaaatttcaaaacggcagacaacagatgcatttcaaacaattcaacaatataatataaaatttaggcaaaaatttttgttccttcctctttggaaatggtcttaaattttgcttgtaaatattcagataacaagttttttttactgaaaattttttacacactacaggatgaaacgcaataaataatgtttgtagacaaaagaaattggcgaaaaaaattgcctcaaacatcagtggttaaactgaaagaaaaaacttccccaaaaaatcggagcttttccgacgcatcagctgcattt

SEQ ID NO: 30145 - DNA, 1501 bp, Heterodera glycines
aaagtaacgcacaagacaaaaaaaaaactttttttgatcatttttgagtaaaaaaaatccaggtttttttttcgtgttttgcctgaacctggggacctgggtttttcacatttgacctagacttggatttccggacaaaaatccaggtccaggaaaaatccaggcctggatccaggtccaggccgatctatacaagtgatgaagcaagatcccccacattcatttattcattcatttagactaattacctcactcccattactgaagttggcactaaatttgcccaaaatgcagcaatttggctgcctttccctgttccccgttggcatttcagccgggctattaataatgccaatgcttttgctgttactgatgccatcatccactgatggcattgaaattgtagtgaatgttgatgaaaatattgccaatgaaatcaatcagcagcaaatcactgtcaaggtcagggcttctaggggtacagctgcttatttgagaaagcttgctgatttttggggaaagaaaccttcagaaatggccatttttagcctgtcgacatcgccggccccaaatttccctaacattttcaaaatttgaccaataaattgccaaattatactcaaaatttccaattttttctcccggtgggcctgtcggcacccgccgggccccaaaaactttgttttttttttcttataaaattggttaaaaatggaaaaaatcgtttcatttttggtggaaatctgattagcaaaatgcattcaaattttcaaaaaaaaattttcccggccgcgccgccggcccactgtttccacagaaagttttcttggaaaaagcgcgccgccaaaaaacccttttattgatttttttttattattattataaaaatttttccaaaatgttgatttttttttgcctgccaaatgaggcttttgaaaattttcatctgggcgccctgctgttaaggtagatggctcaaccattgtgaaagagttgaaggaacagatcaaaacaaaggcaaaaattcaacccagcaaacaaatattgaaactcaaacacccaaatggcactttgactgtgcttaaagacaaaaaaacattgaaaagctatggcattgtaaaggatggcactgcaatttttttgtctaaaatttaaaatcacagtggaggcgaacacaatgataacaaagtggagcaaaatgatcaatgttgaggtgtatggaacggaaacggtggaagaattgaagaaaatgatcaaagccgagagtggaattgagcccgaagaacaaacattggtaatgtgcccgagtttttaagctatgtataactttttccattgtcaacaaaatccaacaatcttgataccattcgatagcactaagtgtcctctattaatatgtaaaattatgaaaaagttcgttaggtttgaaaaaagtgttggccaaaaatgttagaagaccagtttttttttttgaagttttctggccaataacttttttgaa

SEQ ID NO: 30146 - DNA, 1129 bp, Heterodera glycines
  unsure (1)..(1129): unsure at all n locations
gagctgaaggctggctggcactggtgaaaagtgaacaaaaccgtcgtcttttatacaactttttttgctgcatgaatttttgcacccaaaattttgtatataagcagatggattttgcacattctcctcactaagcagcagcaacactttcacaaaaattttgatttgtcctttgaatttttgtttcaatcaccgcaaattttgcaaaatgaaaaaacacaaacaatcagaaagagggagcagctcggtgttacatatttatcatataaattcagaatacaaacttttttgtctgtaaactttgaaaacaaaaaaataatttaggactgagaccatataaaatgtaagattgtgagagagattggtgagagaacgcattcagagcgaagcaaagaaagaaagagaaatgtaaatgcaaataaaggcaaaaatgatcaacaaatactcaaaagcaaatacataaatggcaagacacaaatcaaatcggtgaccctttttccgatttgccttcattattgatattggtacgcctcttcggctgtcatcagttgaaaataggtatttatttggtgccgccaaatcgtccaccaccaaaacactcgcgttggccgcctcagccgcatcgtcgaaagtgaaagcggcgctagtctaaaagaggaaggcactgattacacgtgaaattgtttgttggaatccaaaagacaccaactttcccaaggcgttcgaagcggacggcttccccgacagtttgcagtgcctcgagaatcttcgaaatgtcaaaaccgaagtccagctgaaccaggggctgttgtggtttattccttttccctccccacgtcactcgcctgcgttattttcagcgtgtttttcacccccgcgccgccatgtccgtcccgatcctcagaaacggagtcttcgcgcgaccgcgacttctccctgtactgtgtgaaagacgagtccgtggtgcgtccgtcggatttgttcgcgccctcatcctcgtcggctgatggcgtccctttgccctcgtctctctcttcgacctcctcttttccctgctgctcttgcccaactcgtcgtcattttctttgtcaattncgtcgtcattctcctcattggcacctcccaatgc

SEQ ID NO: 30147 - DNA, 1695 bp, Heterodera glycines
tatttaaatacgaaagggtcggacgaaggcttccgccgccgcgctgcgttatttgaccgaccgcgcgacggacggtcatcgacagacgacggcagctaataaataggcaaaacaaatcgtaaattgggcgaaaggagcataacgaaagaatggactgaatgaatgacaatgagtcggtcagtgacaaaaggaaagggaatcacaagggaaatggccaaagtgagggcgaaggattcctcacaattttgaactcgaagatggcttattaattaggcggaagatgcatgttttgctgtctttccgctgtttgcccggggggggggctcagattgaacaaacactcgccacagtcatttcgtcgtcctctcctctcatttgaatatttgtgctgttccctccgctgcttctgctgtttgtctcttttcttaacttttgtcaaaacatgcgaatatttccgcgatgagaatgaattgacttctccgtgtccttttcttttcattcttttgcccttttttcactttttgttttgaatttcttttttcgggatttttacaattaatttatttaatttgttggccaaatggcggcctaattagccattgtttattaatggtcaatgatcatttgtcgttgatcaatcgcaatggtcgttccttcattcattctttggttgtgagttgcttcctctctctcactttggctgtctttttacaataattttaatttgtcgtcgtttctccgtttctttgcaaatcgcccaaatttcgtggcgtttggctccgatcatttttctttttgggtttccttgtggcgcttttggtgccctaaaatggcaaaatgaacggagaattctctcgcgcggcaaaagtcagtaaagagaaaggaaatggaccaaagagcagcagaaagtggggaccattcttatcggtaatcagatcagagaaacacttgcgcatcattattataagcagcggaattggtcgacttcatttcccatgttttcttcttttacatttttaattgcttttcttccttttcctttttccattgcttttgctcctttttaccctttcctttttctctttcctttgctcctttttctctttcctttgctcctttttctctttcctttgctcctttttctctttctgttttgtgcttttcctccttttgagcttccccctgttctgttcctccttcctcatcagacaacgtcaaattgttgttaaatttacccccccccccctccctccctctctttttgttaatgattttgtgcctcgggcaaaattcaaagcgtcaaattccttttagcattcattccatttatctgatcatatgttgctttacataatattctttcttatattcactaaatatttcataaattcatttttgaattaattcaaaaaattttcgttcgaaattttatttttatatttttaatttcctattaatttactgttgtttggtttcataaatgcacatctctaatcatttaattttgttgtttcatttggtcgcattttaaatttacccccccccccctttcctccaattcctatggccccccgctgcttttcatccgtcggcatttgttctcccaaattgctcatctttccgtccctgtcgttcgttgtttcgcattccgtccccccccctccccctgcgaaattgccgggggggggggggggg

SEQ ID NO: 30148 - DNA, 1253 bp, Heterodera glycines
taattaaagtgatttttgataggatggcattctgtgtttgcgaaatttcccatctccaaatgttgtcgtcccttaattttctactttgaaatgaaagtcaccaaattgggaaggtaaaatgacatttattaactaattaaattcacaaaattcgcataaaattattgtttttgtgcattttttgttaattttcatatatttacatttttatagttttgtctcgattggattcgccaccaaggaaatgccactggacggagcaatcggacagcatttgaacagttacgggtaccgaagcgatggctcatttggctgcaatggtatcagtcggccgtataaaatgggatttggcaccatgccaatgccattcaacgcggcgattggacaacagagggaccgccgctacgttgggagtgccaattggccatttccattggaatttgtgcccgtgccaatgccatcggacggcgcattggcattccaatcgccagcattttccaccggagatgtggtcggatgcggcgtttgtttggccactcgacagatctttttgacgaagaatggccgacgaatcggtgggccaaacacaaaacgaaaaagcaaataatttcaatttcaatttgtcagatgactcctcttttttcactacaactcccatcaattctctgtttccatgcgtttctctgtggactggcgacaaaattgaggcgaactttgggccaagtttcaaattcaatttggccactctttgaagaaagccgaagaaacaacggaaagggcgattactcatttaattaattaattaattcaataatctttttttctttattttatttttaattttttatattattttatgatgtatttgttaatcagataattttctgtttttttattcacttttattttctgtttttccttttttatgtaaagatttggttaaaaagagaccaccgaagaaaatcttgaagttgaagtaattagtaattttgaagaaattgctaaaactattaaattccccaaatttcctctttgttctttccactcattttggtgccattttattaatatttaaaatcgtttaatgggcctttttattaattttttcgcacttccagcagaggcaacaaataaaagttatttaataaagaagcatagatttttcacaaaatacaaagttataggaatatgtgatgaatgttaagcagataaattttaacaaaaataaattctttttcttacaaaataaaaat

SEQ ID NO: 30149 - DNA, 2109 bp, Heterodera glycines
  unsure (1)..(2109): unsure at all n locations
cttcaaaattgtgaaaaataaataaaataataggagattcagaattttgaaaattttttataaaaaatgatgtcaagctaatgtgataaaacaggttaattcttttcctttcagtatgcctacaaaatttggggcgcttctgataagattctgaaaaaaaagataagcctaaacttttggccccgtctaaaaaggaattaaaaataaatcaaaatttatccatctccctttttaatagaaaaagcatcagagtgcctaaactagcatgcaaataaaacatggtgtgattcagagcattttctgaaaaaaatatctatgacctaattaggcaaaaaacaaataaacaagaaagactcagattttcgaaaatttttttgatccagctagctcggcgctcatttcagtgtaagttagtcctttatcggggagtatccctgcaaagtttggtacgcttctgctcaattagcaaaaaatatgagtgatcgaattttcactaaaaaagttaagcctacattttttggcatatttaaaaagcaattaaaaaatttttaaaatttaataattttcctgcaccgaaggtactcactcggcctcttcgcggcctcgtggtgggccttcgcccccccctcccacgcccttcagagcacgacaaatatttcaacaaaaattttgaaaaattgactagagcaatcgaacgctaacggacgacctaatggaaaaaaatccccgaaggagagaatttaattaaatccattccttcgggggaccgtgccgggtgccgcggggtaagcagtgctggttcgtttcatcacggcaccgaaccttttggctagtcagcaatcgttgcttaacttgccagatcggacgggtgcgcatgattccactgttccaagcaccccaccaaaagcaaaacgatataaccaaaatataaggaaaaattttttaaaaaattttttctccatcttcctttttgatactaaagcatcagagtgctaaaattaagttgtaaataaaatttggtgcgctttagagcactttctgaaaaaaatatttatgaaacaaaaaaatcgattttttcaagtgtccgtttgaggtactcaaacatttatggggagcaaaaatccaacgcagaattatagtacaggctatagggaagctattctcgaaggattcggtctccccataaatctgggcgcatcggttcggggggactgccccgaaacaaaaaaatcgatttttcaagtgtccgtttggggtactcaaacaattattaaaaatttttagattnttattcatctccctttttgatagtgaaagcatctgagtgcctaaaataacttgtaaataaaatttggtgcgtttcagagcagtttgtgaaaaaatatttatgaattaattttgctaaaaaaataaaatagtgaagctttaaaaattaataaaaaattttaaattcagaattactggagttagcatcatagcagtgcttttccttgtctttttgatgccctcgcaaaatctggtccgcttctgatcagtttataaaaaaaaagttaagcctaaaatctttcgcaaatttaaaaagcaattaaaaatttttagattttttattcatctccctttttgatagtgaaagcatcagagagccttatttaacttttaattaacatttggtgcgtttcagagcacgttctaaaaaatatttatgaattaattttgcaaaataataaataattaatgaaaaagtcagaatttcgaaaaattttaaaaacaacaagcgttggcattttttcaggttaagttagtcctttacaatggagaaggcctgcaaaatttggagagattatatcgattttagtgcgctaggttcgatgaaactttttaaaatataagcctaaactttttggcctgtttaaaaaggaattaaaaatttttaaaatatttattcatctcccttttgatagaaaaagcatcagagagccttatttaacttttaattaacatttggtgcgtttcagagcacgttctaaaaaatatttatgaattaattttgcaaaataataaataagtaatgaaaaagtcagaatttcgaaaaattttaaaaacaacaag

SEQ ID NO: 30150 - DNA, 867 bp, Heterodera glycines
acctgcccctcgaggtgcgcgagcgaggagcggagcgaagcgaagcgacgagcgagtgtaccgagtcaatacgaacctgatcaattcttttggatgccgcgtagggtggggggtgaacggctaggctcggctgctctccggtagctgctgctgcacgaacaaccagccacgcatctgcgcctgagctgctactgcactaacaaccgcgacggtgcacacctcacacttctacccctcgtgtggcctaccagccgaccccatcaattgcccagccatctaccgggacgcctagttatctgtatataaaaataacgggggggctaaccataaaacgatttggcggcaaagaactacgcaacggatcgccacgagaccggtaccattcgaaagagctcggttttttctatcgttctatccttgtggaaaaatttacgataggcagaaaatttcgagaaaatcgcgttcgaacgaaaaaaacccggctttttacaactggccaaaagtgggttgtaaaatgtgtgttttcaccttatttctcgggaaccgtaagagctacgcttttgcggtaagcgaacaatttgtagagctcgtcgagaggaagggtgagaaaaaaaattcgtagctctacgacaaattcgaacaaagttataccccggcaaaggtcgaaaaaagccgattttttttgtgttttcgccttccggtttacaatccgtttacaattgtaaattcgtccggaatgtccggaatttcgaccgaccggatggattttgtgtttttgcatgtgttttcaacccggtttatatgtgttttcggcgtgcgttctttaaaccggttccggtttttcacgtgttttcttcacatttacgt

SEQ ID NO: 30151 - DNA, 1568 bp, Heterodera glycines
gccaattgaaagcatttagctgcaaaaatcaacaatttcaaatgagagaaacgacggtcgcaaagaatgtcatcaaaaacaacgaaaacataaataaaacaggattccgtcaacgtttaaactcttttttttgatgagcttatgtcttcattgatagatcagggtcttggaaatccaaaacatttaccagagatttttataaaatgtgaattttagttacctttttgttagaatattgttctaaatggatccatctgattttttccgaatttcacgaaaccaaaaaataacggactgatttccgtaaattttcaaatgccagtcaatggatggcctaaccaacggatgaataaattacggaaaagtgtcagtgttttggtgttcgtcatcaaatttggtctttcaaagcatcgattctatcaaagtgtcgcgcaaatcggtggaaattgcgctcggcgccgcgtctcccaatttgaagatggactccaacacggacagttcggcggaggtcgtgtcgaggcctgcaaatgggaagacggaatttacaattatataaaaattgttgattaaagtgacggccccgcccacatccgtcgccaattcctggaaaactaaacaattcgaccgaattcgcttgatgagtttcagtttttgggatttatgtcttttctgaatatagtttgcttcaatccgattaataaagttccgtatgagagcgttgaaaaataaagtccccaactccgagatttttgtttcatcgaagaaattatttaaaaatacccaaacagtgtgaaaaatgctggggaagtatttaatttggaataaaaaagccgaattgagaggacacggcacgactccaccaccccttgcctgtgaatgcgatccaatcagtaaagcaacaggcggccccaatcagttgcgagccgcggttgcccgtacaaaaaaaaaacaaaacatagaagagcgaggagaactctcgacacacctccgtcggtgtttttcccgcccacagccgcaccgtttgaggtaattgacggctaagattcccacttaattcctcttccggtaatcagtctaaatacagccatgttctcctttaaccctaggttctcgacccccccccccccccccccgcctcgtgcgttcgacaccctccgaccccttgcactcgcttgaataaaaagtttcaaaatttcttaaccacaattttcatagaattttttttcattttctcctgaaaatattgcactcaccggctctgagtgtcccgtcttgtctagagcgtctgcttcacctttccgtgccgaagcggcaagtgcaatttcctaaacattttgattgacacaatccaatgttttggcaaggacagagtccgaatacaaaggctaaaaaagaaaggaggggaataaaatttgtggagagagaaaaaagactttgttcggctgacagtcaggggagggcaattggcgaccaatttggacccgagaagtgtcctggaaattgctactctaaggggacgaatgttgagaaaggggcaaaggcatcccaaggggctgaagaatgggaaa

SEQ ID NO: 30152 - DNA, 1294 bp, Heterodera glycines
ttcataaatagcggcgaaatctttaatgacggactcagccgatgcacaaggcaaatttcattgaaatgcaagccgggagggccaccaaccagccgaaaaatgcaaaccacgtcccgtgccttttgcattaagacctgaagttgagaaggtcaccgataaaagatcaatgatggagtgttggagcaagtgacaaattctgattgggcgactcctttggtgattgtagacaaacgcggaaacaaaattcttgtgttgcgactacaaagtcacagtaaaacaatggctcgacatttatcaatacccgttgccggggctttgagagttgttcagcttgttgaaggaagttaaattatgatttcgaaatcgaaaattattcaacctgttgtgtccacaaggaacaacagaattaaatttattttagaaagacaaatgataacaaacaaataaataataaaaccaaacaaataaaataatgatgacgacggagtcagaggaaggcaaaaatggaaggagcaaaacagaaataatttagaactgaaaatgataataaaataataatgaatgaaacaaaacagcgggggagaatattgactgaagaatatggcgacaaaaataacaggaacatcatttctactgtattggcgctaattcaaataataattaaaatccatcatatccaacatctcccttcttaaattaaaatccaacatatcccttcttaaataatgttgtcgtcacggcgagtaacgtatcggcggacggcgttgtctctgaggacgttgcgttggttgaactggcaagttggtcggcggagtagtcgtgacagtgctgtggcaaggactcttttgttgcggaacttggtcaactgtatcattcggaaacgtcgtttctgattgataagggacaaaagaacgcatttggtttacatgtctgttgacagtaatattcaacaatggaattttgactttccaaatcagacctttaccagcgacgactttgccttcaagccagttaggcttgccagattttccgtagttcaacacacgaacagtgtcaccgattttgaaatgacggggacgttcatcaattgtgttgacttttgttggggcgcttgacaaatccaatgttgtcgcgatgggagactgcgtagccttctcaaacggcacaatccaatcaagtcccatgatgtttggagctccggtgttagctactgaacatttgagcttaaattcaacacctttaaatttcaccaaacaatggaattcgcccaacaaatttaatttatgcccggaaa

SEQ ID NO: 30153 - DNA, 2027 bp, Heterodera glycines
gattttcgtgccaacaataaatttcaaaaaatccaggtccaggcccggatccaggtctcgaggagcctggatttttcccggacctggattttcctggatttttgtccaggaaatccaggtccaggtccaacatggaatccaggtccaggcttttttcaaaatgttatctctaccaaatatgtacataaatatgtaagaaaaatcccaaaatatgtacaaaaaacccctaatatgcaaataaaaattttttaatggtattttttgggaaagaaattccccgtaaagtatgaaatagccacaaaatgacataaaaattacttttttggtatttttaggcaacattttcaaacttattttttctttataaattttcaaaatatgtaaaaaatgaaaatatgtacaaaaatatttgccgaaattttggatttttttttgaggatttccaaaaatttctgtaaaactcaaaatatgtacaaatatgtaagaaaatcccgaaacatgtaaatatcagtgattctttttttatgtaaatacatattttttcctggattctccatagcctaattagtaggaaaacactttcttttttgttttgcgaacaaaaatcgggacttttatttacatatttttacatattttggacttttcgtcattttttcctacatattttgcaatttttgaggatttttaaggaaatttttattaaatgccccaaaaaatccaaaatttagcaatttttcgtacatattttcattttttttttcatatattgagaatttatagaaatttcttgtgaaatttagattttttttgagaaatatacctctaaaaaatcaatttttttttcaaaaacagataccaaaaattaatttttaaagtactaaaatgtgattctagtcctatttgggtcatttttattgcaatttttccaaaaaaagtaaccgttaaaaatatttttatttacatattttcgtacatatttgggagtttttgtacatatttcatacatattttagcattttttatacatattttatttacatatttcgcgattattcttacataaaaaaagaatccctgctgatgacaccgaaattgtccaaacgtccgacaagcgaaataggcaacgaacaaaagccattcgaagggtgagaacgatccgtccaattagcccctaatgaatgccaaaaagagcatcaattcattagattgaattgaagcaccagaacagagactgcgtttatttacaaagggtttttgtcgcgtgtaataatttaggcaattgtgaagatcattttggtcctgaaattttttaattaatttttttttctaaaaattttttaaacacttttataggggtgttttgaggcgctgagcacgaatccggactcatttcgaccaattccgaatccctaacccaactcgaacatttttcgagatttaaattttaaatttttttaaaagtttctcttaaaacattgttttgtgttttcgggattgttaactttagacaaaagccgtttcaataccaaaaatggtcattctgtaaagatacgaacaaaaaaaatgaattttgtcagcgccttaaaacacccctagaaaagcgtttaaaaaatttttagaaaaattaattaaaaaatttcgggaccaatgatcttcacaattgccgggattttactttgtattagagtgaagcgggaccgggtcgggaattcccggtcatccgaggtccctgtcccgggttttgaaaagctcaggtcccggtagggcaaccgggaaaaacaagcactggtaagaatgggggtctgagtgaaaaattagtgatgaaaattggagttaaaaagaaaaaattttaaaaatatattaatatattatttaaaagtaacactggcggatggcctagtggctagtctccttgattttctacttttttcccatggttcaatccctctacagaaattaagatatattgaattttgtttttgtatactcatgggtttcctatcaacaaaatatgattgctcata

SEQ ID NO: 30154 - DNA, 990 bp, Heterodera glycines
tggggaaaaaaaatctttccaaaataaccccccggggaggagggagggggaaaaatttttttaaaattttttttttttttgttttatttctccaaaacggttcagaattcaaaaaaaaatcattcccggtgagaaaaatggggtatgaaaagtttattggggaaaaaaagcctttacaaaataatccccctgagagaggggagtgggaaacatgatttcaaaattttcaatgtttttaagtttaatctactcaaagcggttcagaattcaataaaaataacattcccggtgcgaaaaatggggtttgaaaattttatggggaaaaaaagactttacaaaataatacccctgggagaagggagtgggaaacatgatttcaaaattttcaattttttatagtctaatctactcaaaccggttcagaattcaataaaaataacattcacggtgcgaaaaatggggtttgaaaagtttattggggaaaaaaagactttacaaaataatacccctgggagaagggagtgggaaacatgatttcaaaattttcaattttttatagtctaatctactcaaaacggttcagaattcaataaaaataacattcacggtgcgaaaaatggggtttgaaaagtttattggggaaaaaaagactttacaaaataatacccctgggagaagggagtgggaaacatgatttcaaaattttcaattttttctagtctaatctactcaaaacggttcagaattcgataaaaataacattcacggtgcgaaaaatggggtttgaaaagtttattggggaaaaaaagactttacaaaataatacccctgggagaagggagtgggaaacatgatttcaaaattttcaattttttctagtctaatctactcaaaacggttcagaattcaataaaaataacattcacggtgcgaaaaatggggtcgaggaaagtttattgggggaaaaagactttacaaaataatacccct

SEQ ID NO: 30155 - DNA, 2344 bp, Heterodera glycines
  unsure (1)..(2344): unsure at all n locations
cccgcccattcaattagtagttcatacttgccagactaaccgctccagagaaaattccaaaaatttggaaccaattctaggcgaaaaaatgttatccacaaaaatgtaaattccaattatttattctctttttgggagccggtgaaatttttttattctttcaaattaaccatgatgtttcgctaacaacaactttgttttgctgctagaaaaactcaaatattcttgattttttcttcaaaaagattatttgaaaaataattgtaaaatcaaccttaaattttttttttaatttttctaataatattttgattttttcctagaaaaaattctaaattttctttgaaaattaaagagaaggcccaaaatatatggggatcgagagctgggagctcggcgtcgtggcttaacattaatacaaaaactcattaccgtatctcgtttttttcaagaaattctgattaactccgcattttccaccggcccatttccggtcacacaccgaaagtaatttacgacgaacgattagggtggggggggggcgaacagagctcgttttctcattaaataattgttaatgctttaattttttaacccaaccgccgtccattttaatcaacattttttgttttcacaaatatataaattaaaattgaaattttcaatttcatattttctgttcagactaatgctaatgacaaaaaatggttagccaattttaagcaagacttagctgaagttcaccatttgttgttggaaaatttgttagaaaactcgaaaaatactaattttgatactgtaccgatgcgaaaattggcagatattttttccaacaaaaaagcaatttgggaaaatgaattgacattccgtctacgaatggttgtttttttgaagaatgctttaaatccaaacttaatgaaaacgctgatcaaagatcggatttacgaaatatttggggcgaaaaatgccgaaattacgcaccaattgtacgacaaatacccatcattaacatatggaattggtgacttaatataaactataatttttttttaaattcagaaaatcaaatcatattaaaaattataaatatattttttcaaaaaaataataatattttcgccaaaatttgaatttttaaatgagtttgtgaaaatatttttaacatttttatgaggaagtttttgcttacaaaaaaaaaagaaaatttanatatctttcattcggttttttgtcaaataaatttttgctgaaacaacaaatactaaataattaaataaaataaaatttagatttttatgattggcatttgtatttatacaagcaattttttgcgctgcattttttggtagcagcaaaagtcaaaataaagatggatttttttgcctattttcatgccattgaagtgatttttgaacaaaaagaatacccaataagtgaatggccaaagcttcgaattcaatgtgctcaattaattgatacaattccattagaggtaaattttaccgaaaatgatgaaattatgaaaatgataaatgagctcaatgcaaaaattggcaaaatgcaatcatttttaaaggagaacaaaaattgcatggatgagaaacaaattgagaaaaccagcaacgaacttgagaaaaagattgaactgttaaagatacttaagcaaatttctaatgagattgatcagttgttagctagagaaaatcaggacgaagcccaggaggaggagggtaggaaattgtatgaaaaagttaaaaaaattcaatcagaatttgaagaaattgagctgggtgatcagcagaagcagcagcatttgttgtcagatgttgaatttggatcggaggacagtaaagaatttgaaaaggataaaacttttggattaggagaccaaaatgggcaaaacgttgagttctccggatcaaggcctgatcaaaacaagcaaactgacaacacagattatgatcagtatccatcatcatctaatgaaatgaggtccaatactgctgctgatcgtaatcaatcgtatgccaaatatggacaatttatacctgctgatcagcagattggatcagatgccgaaaataaagctagaagttcaaaaaattgtggcactgtaccaaatccaccgtttatcaatttgaagacactttttttgttgaaagcggacatggaaaagcttaaatcaaatgacaaaaaagaaaaggaatcgaaaaataagaacaaaagcaaagaacggaaggcaaattcaattgatgatttaacggcagtgcagaatgatttaagccaaatgcatgtgcaaacaatggnaaaagtgcccatggtcagggaagaaatttgccaaaaa

SEQ ID NO: 30156 - DNA, 1212 bp, Heterodera glycines
  unsure (1)..(1212): unsure at all n locations
atttttggaagcgatcacanccgacgcaattaggttcttcacgaaataaacaaattcaattgtccccggcattcgctccgtctccccaccatttgctccccctcgtgcttttcctcctcgtcgccttccttttgttgctcctctgtttcatccctagatgatccatcctccgtttcctcttcactgtcctcggccaaatgcgcctcaaagtttccctcgtcatatgcctgtaaatcattcactgtgatggcacatcagtgccaaaatggaaaaagactttgttcaaatcgcgtcgcattttccgagtgaatccgctcgcctccaattccacgtccaaattgcgtcttctgaccatgtccccaaaacggggccaatcctctgactcaaacttaaatctccgattgaaaaaggtgcgtacacattgcacatcgcgatcaaaataaaagtcggcgttcggatggtccatgctaaccatttgaggaaaatcgatcagaatgggagactcgtcctaaagcaaaaagacattatgaccattcggaaggggagagggagtggaaattgggtaccaaaaatgattatcgaaattaatgactcgcttattttaacagtttagtgggtgggacccgttgatatttgatattaaattggtttcaatgaccacacaatggtactaatgcagtttgtaccccccttttgggtcaaattttttcaaaatttttttttcttttttattatcagaaatgcttttagattaatggaaacgcttaaaaatttcactcttgacgatttattcaaagtattggctcttcaagacaaagaattcgaagaatggctcaaagaatttaagcttctacacaccacccgtttttgtgactgtggcaatgaaatgagctacaaatgtattaaagactggaatcaaggatatgcaatgcaaagaagaatcatgacggcaaacgaccaactattgggttttacactggcactttttttgaaggagcccatttgtcgcctaaacaagttttttaaagtccaaaattgcatgttcaattgttactaaggtattcaaattttcttactattggcacgaaaattttcaaaagatgaaattatgtttcaaatgaaattgggaagtgatacagtgactgattggaaaaatttcatgcgcgacgtgacagcagagtttttcagcaaaaatccaatcaaaattggttt

SEQ ID NO: 30157 - DNA, 1274 bp, Heterodera glycines
tatcaatcgaaagctcttaacatactctattatccttaccaacaccgaaaagactttcaagcctgtaaattttattacgtaaaaacttcaaaaattttgacttttcacaattttcatgtataactttttttgtaattgtctaatcgcgaatcaatagcttagaaaaagcttctaaagacgttaagctttcgaatgataccaaaattgttggatttgaaagacatagaaaaaagttacagaaagttatagtggaaaaacatgctggcgcccaaaccacagcgcccaaacgcccgcgcccaaacgccagcgcccaaacgcaggtggagccgaaattttatagatgaatttattgcatttttgttaataattttggttaaaacgccaaaataggttttttcaaaattttttatgcttttaggctctaaaaataaaactccgacgggtcccaaattccattaaaaaaaaaaaaaaattaaaatttgtgaaacgaaaagacacactatggtaaaaatttgtcccattcagtttaggcagccagatgttttggcatcgtaaacttttatttatttcaaataatttcattttaaatttttcgaagaattttgaaaaagaatatttttaaaattaaaaaaagtattataaatagggctgccaattttatgtaaatacatacttttttttacatatttcgggattttcttatatatttgatacatatttttgacttttcttatatattttcgtttttttacgtattttgatgattttttacggaaatatttggaaatcctcaaagaaaatccaaaatttcgtcaaatttttgtatatattttcatttttatatatttatagcgaaaaaatacttttgaaatgtacctctgaaattactaaaaagtaattttaaaaatactaaaaagtgattctaagcctatttaggtcatttttatggcattttgtacctcctatttttttaaccaaaaattaacgatttaaaaatttttatttacatatttggtacatacatacagtgccccaaaaaagtcttgccccaatgaaacatatttatgtacatattttgaccacttttgtacatgtttttggcagcgctaattataaatgatgaatttttaaatatattttgaaaaagaatatttgtaaaactaaaaaaacataaatggatttttaaacacataaattaagattttttgaaatttttattaattaatatttattttttaccctcagcttctcgctgtaccaatgcttcttccact

SEQ ID NO: 30158 - DNA, 2349 bp, Heterodera glycines
  unsure (1)..(2349): unsure at all n locations
ctagagaccggaaatttcaaatttgcggatcccgctgcgggactggaactcaaaattttttgcgggacgggatcccgcgggattaatcccgcaaatcccgcatttaaaatttgcgggatcccgtgcgggattttggaaaattcgaaaaaatttcaattaaattcaaaaaatttccaaaaatcaaaaaatgctgaaaaataaatttttaggggctagcgggatgcattaaaaggggctgatgggtcgactaagattttcgattggatccgacggtaaaaagttgatcggaaatcaaattattaacggttcataaatttgactatttttttcttttcaaaaccacttttttgcggtgcaagaaatcggaaatttttcaaaaaatatacaatataataaaaaaatttctaaatattttaataggctaaattttttaattcttaaccaagtaaaaggtatttcacaaatgtttttagtatattcgcttgaaaaaattattcaattattttatcaaaagctttttttgtcatttttcattattttagaacattttttgggaaaaggagtgactatttacacgttttttacagcgcgattttttcaaaaactttttgggaacttggaggagagtacggcggtgccgataggcgccgccggaaaatttttaaaaatttcagttcaatttattattagaaattgtacaanacttactagttttaaaaaaaaaaattaaaaaatttacgacttttcatcaaaaatttcggaagtcggaattccgacccccaaaaatgttggaaatcggaagtctttccgtgccatacctggtgcctatcgacatctgcaagaaattttatgaaatttaatgcgatttgttaacagaaaaagtagagcgagggaaaggtgggaaaatagtgcactgtctgattgtctatctacgcgggcagcggcgggtgagaggggcgatacgagtgaacagacgcgtgctgctgtgcagcagcgagtctgttggacgcgtgcgtgtgtgtgggagaaggagggagtgggaaaaaagagagtaaattgcaatggaaaagaaaagagagtaaaagaaaggaaaaggagagataatgggaaatttctctcacatcccttccttatttataacctattttttattgtataaaaaatttaacaaaagaaagaggacactcattagtttgttcactaagaaaatcctataatattaacattgtgttgtgttgtataaatgctttgaaaaatgaaatgtttttgttttacattttttttcttttgtcattttgtgtaaaaaacggtcttaaaaatgtttcttttttttctttgttgtgtgttataaattgatttggttttgatatgaaagatattgttttgcttatgtaaatggtaatgaaattttaaatgaatgaatgagaatttgtttgaaaaatttgtatagaagaaaaatgttgtgcgtaagaaaaagtcaagaaacaaggaagaactgttatgccataagaaaatgccaaaagaagagtgcgagtccgcgaagcggccgagtgagtacctttgacgcaaaaatttggtgagtggggccgaaggcccnccgtancggttgagtcccagtgattggaatgctggtgggttgagtgccagtgattgtaatgcaggagaattgagtgccagtgattgaaatgcaggagaattgagtgccagtgattgaaatgcaggagaattgagtgccagtgattggaatgcaggagaattgagtgccagtgattgaaatgcaggagaattgagtcccagtgattggaatgctggtgggttgagtcccagtgattggaatgctggtgggttgagtcccagtgattgaatgctggagagttgagtcccagtgattagaatgctgttgggttgagcccaagtgattgaaatgcaggagaattgagtcccagtgattggaatgctgttgggttgagtcccagtgattggaatgctggtgggttgagtcccagtgattgaaatgttggtgggttgagtcccagtgattgaaatgcaggagaattgagtcccagtgattgaaatgttggtgggttgagtcccagtgattgaaatgttggtgggttgagtcccagtgattgaaatgcaggagaattgagtgccagtgattggaatgctggtgggttgagtcccagtgattgaaatgttggtgggttgagtcccagtgattgaaatgttggtgggttgagtcccagtgattgaaatgttggtgggttgagtcccagtgattgaaatgttggtggattgagtccccagtgattgaaatgttggtgggttgagtctcaggaccnntgcagg

SEQ ID NO: 30159 - DNA, 1608 bp, Heterodera glycines
tttcaggtacaatattctctttctcttcaccattttctacagctccattcctcaatttaataaaatgaatttgactcataaaaattaaaaaattcaaacgccatagattttttttcaaaaaattcgaattttggtacaaaaatttttggaaacgggtaaggggttaaaaaccaattgctttgccctagaatttttcattaaaaaatataaatgctgccttgtggtacagctcgggcgccacgcgcaagtacagcttcatgtccaagtcgttgtggtgcgtggtgaacggtttcgcagtcgcaccgccagcgattgggttcatgatcggagtttcgactaaaaattccggaattttttttaataaaattttttaaaaatcaatttttcgtaatttccagttttggatcctaattgactcgaataattcgggtgaatttttttcaaacatgcaaattcggacatgctaaaagatcggagcatgtcacttccccctttccccgatttgaaaaaaaaattttcaaacattaatttcaaaaaaaaattttaggaaattttttcttaagaaaatttctagaatttcttttttagaaaaacattcagcgctttgcaaattaaaaaaaaaatttcggatggaaaacgacggggggagggaatgaaatgcactccaaaaaaaaacaaaaatttcttgtataaaattctaaattttcgcaaaaaaaaaactggaaaacaaaaaaaaccttcaagaaagccgagcgcgtccaaatatttgcgcaaaaatgtgataatttttgcgcgcgtcacgaacttgtcacgcacttccgggttcacgatcagatccaagtagcgcatacggtagctgaacggaatgaaaaataccgtaactcgtgaggaaaaccaacaaaaaagaatttctaacgtaagcaaaaaaaaaaaaaaaattttttttttttgaaaaaatctgcgaatcacttcgcgcgaataaaatgatcaaaatccaatgttcaagaggcaagtaaattgtaaaattaccgtgtctcgatgtttttgatgccaaaatgtgagcgcttaaaaacaaaaatttatttgaaatttatagagacgatactcaccgggagcatgtgcaaacagggggtcaacagcacgacctaaaaaacagagaaaatttaggtggaaaattttgtgaaaaccattttaagcgggtaggcctggaaagtttaaattggaagacagaaacaaaaaaaaaatacaaatctcatcatcatgccgtttcaaaaattgaaaattaaaagacgcaaaaaaaaaactattttttttttggtttcgggatgggagtgtatatttttgcaactaattttttcattagattaaaaaatggataaaatgaaaattctaaatgatacgtgaatgcctcacaaagggcaatttaaaggagagaaaaaaaaacggacctccgtaggcacaacagagagttcgccccgtttggagcgcgacgggtggcccacgacgccgatgatgtcaccgcgtttgatccgctcatggcacatcagaaaatcgtcaaggcccgcggcgtgggatctaacaatttttttggaggatagttgccattta

SEQ ID NO: 30160 - DNA, 783 bp, Heterodera glycines
aaaaatcgctaaaaatttctcaaaaatttttttttcttttaattttcctatgaaaaaactttctaagattttttctaagttagcaaattttttttaaaaaaatttctcggggaggggggaaacgagctgctcccatcaaaaatggccattggattgctgaaaaaaactggaggacgattaatttttcagcttaagagggtattgttgattaaacaaattaagcttctgattccaaggttgttttaaatatttttgaataaagatttaggtatttaaaataaatctggaaaagattcaaatcaaatgcattattttaccgctcctttaccctgttttagtgccgccttttactcgggcactgtcgatggttcgtcccatgttcatgtccgtccccgggtgaacgacagcacgacgaacaatcagtggcagcatcgcgggtcccaatttgtggacatggaaaaccaaagtgaccactcggccgggcacagcatcggacgctcctcctgcgcatcatcgacaaaatcatcaaacaaatcgacgctgtcattgggtgagtttttgttgtgttaatggcacaaaatgccatttttaaatcactcgttctttcagggagtatcttttcctttctgcgtaaccacctctttcaccacaagaatacaaggcacaacggactcggaagaccacaggacgacattctgatcggcatcaatcacacgcacatcacactgatcgacccacgacagcacaaactgttggatgtgaggcggacgagcggggctgggg

SEQ ID NO: 30161 - DNA, 338 bp, Heterodera glycines
tttaaaaagaaaagggatattaaaattggaacggatggacagtgagcaaagcgattgggagaagagattggaaagggatggcatggcacgaaaagaaagagacaaaataaagggaaagggagagggaagagggaaagggagagggagagaggggaaaaggggaagaggcggcggggggagggaataccatttaaaatgcttggaatgcaccaatcctcgcaaggtgttcttagtttcttcccttcatcttctgtcaatgactcgcacattcattctgcttttacatatcttcgtcaccacccgtgtcccttttgccgctgctcccttccccccccccc

SEQ ID NO: 30162 - DNA, 1262 bp, Heterodera glycines
taaaatacacaaaaccaattggtgaacaatgtgatagaggtcatgggaacactaaagagattcgaataaagtcggtttggccaatgattttggcgcgaggttttgctaaaactgaacagacagtaacagagaaaagctgtaggtgtcggattcagggaaatgtccaacttggtcaaattaatgtttctttatcttgtaatcaatcattgatcacgatcagtatctatgatttgtcattgtttttttcctcttctcataccttatgtacctttgcaactgttctctccccctttgtctgtcttctcacaaaacattcctccactctctctttctctttctctctctctatttttgtgatggtcactctctgctgctgtctctgatggtcactcgcttcttaaattccttgacggaccaacgaacgaaaaatggaagtgaatgttcggtggaagggggggggggggaattctgagggtgatgagatgagtgagttaagttggcgggcgtgcctccgttcgcccgtccgtccgtccctcccatcgctcgtccgtcgtcccaccgcgttcccccgcctcgcccacctttgacccctcccctccctcttcgttcgtccctctccgaataccacactgatttctctctccctcctctcctcttcccactctttttcatcgttttgtttcgtctttctttctgtttttggcgtcctttcctcgctgaccttcgacccgtccgtccgtctctttgcttcgtccaccacacatcacatcatagcggcaagaaaccaagtccggctcggcccacttccaacttatgtgacccaaatataattgtgtcgcctcatccctcctcaatccgttcatcctcgttctgctgagcactcctttcccgtcttgtcttgacctctggctgacctgaccccggctttgtgtgaccacgatggaccatcatcgcttcgcccctcctatcaaccattcccattcctcgtccaaaaccgcgctttctcctcccatttcatcggcgatcacatcttccgatacagcttctgtagcggcaccgtccttttcatcgctttcaattcgaatccatggcgatcagcaggcgcaacaacaacaacagcaacaactcagacattcttctcatctgttacttttggatgacggccttagggcaatttcaaatattaaaaaggcgaaagtgccaggcaaaaccgcgctgtccatcgcttcgacatttcacgagctgtcagagcttaagcagaa

SEQ ID NO: 30163 - DNA, 1842 bp, Heterodera glycines
cgcaaactgcgatagagccttgtcttcctcctcctccaccttccccggttcacctttgattgtgtcttcgtgctctttcgccccataaagtgccattccgcggtaaactttcggctgaattattaatttaattggtacatagacaaaatgtccgatgggctaatagtaattgtgaccacctgctgggaagtgcccggctgctccttgcgcttcgccttctccccgtatttcttcctgtcctcctcctcttccgcctccctcttttcccgctccattcgctctttcttcagcatttcttgaatccgttcaaattgagattgcgaatcacgtccatattcagtgtcaacctaaaaatgccattgaatactaaaatccgaaggttccgccggagtgactcacttcacttctcgccgttgcgcccatgtcactcggcccagtccgctgcgttccgctggatgcaaatttcacgtcggggtcaaacgacgtctgtccttctcgccccgacttctcgtccgattcgtcctccgaggattcctcttccgccaacgcttcaatttccctcctccgttttttgctagtctgaataccttttttatttttatggtgtaaataaggtccgactgtgtgcatcaaattgcggccccgcaaatgtttgcgtctctccacgagtttcatccgcgtcgcttccgccgctgctttcgccccttcgtcgtcctctgttgaagtgccacttccgtcgctttcttcccctctctgtcgctgcttttctcctttcccttccgcttccatcgcttcctcctcatcttcctcttccgccctcttccgttccctccgtttttcctcttcattttcgtcctcctcccttcgtttgcgcatcgtcgtcgtattcatcggttttcgacgcatgcgaaaaaaaggcacattcggtgcctgttcagcagaagaagcattattagcaggatccatttcctttgctgaataaattttcaaaaattaatttaatgaaaataaaattttcaagtggtacataaattcaaagcgagaatttaataatgatggttcgagccgggatttcctccctgctggcaaatgaatgaaaatccttctggcaaggccaggactgaagtgtccaaattcctcaaaaaaattaagttaaattttcaaaattttgcaatatgatcttttaaaataaaatttaaaaaatgaatgttttcattcgttttttcatttgacagacggatacatagaccaataattgtcgagcatttagccgtatctttaagctcaaaattcttgatgttttatgccaaattttctcggcatttttctccggctctgattgggcaactttctttgcttcggttggcccgttgcgctccgcgctccacgcgtctttaccatttgacacgacatttgggcgagtaacgacacaatgatttaatttaactaaaactatccaatttttggtgcatttcaggcggtgaagtggtcgaaatccaagggccggcttttgcggaatcgatctccgaaggtgacatccgctggaataagcaagtgggcgactttgtgaagacggacgacatcgtggcggaaattgagacggacaaggtttgggcatttggcctccaaaattacgtatgatggactgctttttaagacatcagtcgaagtgccagccccatttgccggcaaaatcgtggagcttttggtggaggaaggagcgaaagtattggccaaacaaaagctatacaaattggagaagggagccgaggggggtgaagggccggcgaaagaagcgaaggaggaaatgccgaaaaaggagggagaagtgccaaaaccgaa

SEQ ID NO: 30164 - DNA, 1689 bp, Heterodera glycines
gttttttacaaccacatattgccaatctaattcttgcagattgaaagccatccattgcctgccggttctcggcacagcaaagcactaatagggtgtttgactcacttcaaaaaataattccatacccaaaagttttttacaaccacatattgccaatctaatttcttgcagattgaaagccatccattgcctgccggttctcggcacagcaaagcactaatagggtgtttgactcacttcaaaaaataattcattacccaaaagttttttacaaccacttattgccaatctaatttcttgcagattgaaagccatccattgcctgccggttctcggcacagcaaagcactaatagggtgtttgactcacttcaaaaaataattccatacccaaaagttttttacaaccacatattgccaatctaatttcttgcagattgaaagccatccattgcctgccggttctcggcacagcaaagcactaatagggtgtttgactcacttcaaaaaataattccatacccaaaagttttttacaaccacatattgccaatctaatttcttgcagattgaaagccatccattgcctgccggttctcggcacagcaaagcactaatagggtgttttgtgataattgacttcctttttaatttaaattaattaatttgtggcattatgtttcgttaattggttttcctcaattcattttggtttttttctgagttcttcggattgatattttttttgctgtgaatgacttttttgcttctcaatttctctctcctccgatctttgaatattttttggaaataaatctctctcatctggtgaagtcgtttggattgtcgtgttcgtcttttgtttaattttgtttggacagggttttaattgttggaatttgccgcggtgtaattgttggtcaacgagcgaaaatttgtgcctgtttcagtcgaaaattggagagtatttgactcagctgtcaaagagcaaaaacagaaatccaaaatgcattcttgcccatggtttatgagtcatctaatgagcctacctcaggtaattaataaggttgtaaattatatggactaaaaacgccaaatatggacataaaatatggactaaaaactgccaaaatataagttttaagcgctcaaaaaatccgaaaaaatggatttatagtttttaaatgccaaattttatcaaattctagcttcacaattgaaaaccaaatacatttcaattttttggttaataatctcattctttgtcagcgaaatttttcttaagcgaagaaaaacccaaaaaaattttacaaaattttggagaaattctcatttctgggggtgtattttttaaaaatttcccaaaaagtcgatctttatgagtgtatttttctctttttttgcatttttttgtggaaatttgctaaaaaggcaaaaatggcgaaatggatttattcccgaaaacccccaaaatatggatttataaaaaattgtgactctttattcagcgtgaactcaatttcctcaaattttctcgtaaaaattcaaaaaaaaattcatgaacctagccaagggtatttattcagcttgaaaaataaaatatttaattggaccaacaaaaatgaacaacaattcaccggccttcagattgctgacattattgatgtgtttgttctgctgttttatgttg

SEQ ID NO: 30165 - DNA, 997 bp, Heterodera glycines
ctctctatctcaccatccctttctctctctttccttctctctcatcctcatcaacttccttacaccctccctttcttcccctcttccttctctctctttccttctctctcattctcatcatcttccttgctctctttctcaccatccctttctctctctctcttcttctctctcatcctcatcatcttcctctctctctttctcaccatccctttctctctctttccttctctctcatcctcatcatcttccttacaccctccctttcttcccctcttccttctctctctttccttctctctcatcctcatcatcttccttacaccctccctttcttcccctcttccttctctctctctccttctctctcattctcatcatcttccttgctctctttctcaccatccctttctctctctttccttctctctcatcctcatcatcttccttacaccctccctttcttcccctcttccttctctctctttccttctctctcattctcatcatcttccttgatctctttctcaccatccctttctctctctctcttcttctctctcatcctcatcatcttcctctctctctttctcaccatccctttctctctctttccttctctctcatcgctcatcaacttccttccacactcccttacttcccctctggcttctctctcatcttcttctcgtgcattgtcatcatcttccttgctcgctctcgcaccatccctagtctctctctttccttctctctcattctcatcaacttccttgctctctttctcaccatcgcttgctctctctctcttcttgtctctcatccacatcatctgcctctctctctttctcaggatacgtttctctctctctctctacttctctgtcatcctcatcatcgacctctctctcttactcaccgtccctatctcgctatccttgtctctcaatctcatcatctcccatgctctcatcctcacaatacatatctctctctc

SEQ ID NO: 30166 - DNA, 563 bp, Heterodera glycines
  unsure (1)..(563): unsure at all n locations
ttgtcacagccgcgcgtcgtttgatggccgtccgtcccctaaaagccncgaganggggngcgccncgggaacagaggtcctttatncgacgcgagcacaacgacagcgcgcagggcggcgcgcagccgcgccaagcaaaacacagccacggcgcctttcttctcgcatcgccaaaacttcaattctccgtcagcattcatcttttcgtatacgaacagatggccttcgtgctgcaattttagttttcctttttcagataaaatatcacacattttgcactaaattttgtaaaaattttagttttggatttatttagcatagagtataacaatacagatcaggcagaatttctaaccactcaatttatattgtatttttagtggttttttggaatttttttttgccaaattttctggcactgaattgtcaatttttcaacgtacactgaaacgtcgtcactgaatcgtcgtcactgaatcgtcgtcactgaatcgtcttaacactgaatcgtcgtcactgaatcgtcggcactgaatcgtcggcactgaattgaccggctccga

SEQ ID NO: 30167 - DNA, 1218 bp, Heterodera glycines
tttttattgaattctgaaccggtttgagtagattagactagaaaaaattgaaaattttgaaatcatgtttcccactcccttctcccaggggtattattttgtaaagtcttttttccccaataaacttgtcaaaccccatttttcgcaccgtgaatgttatttttattgaattctgaaccggtttgagtagattagactagaaaaaattgaaaattttgaaatcatgtttcccactcccttctcccaggggtattattttgtaaagtcttttttccccaataaacttgtcaaaccccatttttcgcaccgtgaatgttatttttattgaattctgaaccgttttgagtagattagactagaaaaaattgaaaattttgaaatcatgtttcccactcccttctcccaggggtattattttgtaaagtctttttttccccaataaacttttcaaaccccatttttcgcaccgtgaatgttatttttattgaattctgaaccgttttgagtagattagactagaaaaaattgaaaattttgaaatcatgtttcccactcccttctcccaggggtattattttgtagtctttttttccccaataaacttttcaaaccccatttttcgcaccgtgaatgttatttttattgaattctgaaccgttttgagtagattagactagaaaaaattgaaaattttgaaatcatgtttcccactcccttctcccaggggtattattttgtaaagtctttttttccccaataaacttttcaaaccccatttttcgcaccgtgaatgttatttttattgaattctgaaccggtttgagtagattaaaactagaaaaaattgaaaattttgaaatcatgtttcccactccccttttcccaggggtattatttttgtaaagtcttttttcccccaaaaaattttttaaaaccccattttttccccccggaaattgttttttttatttaaaatttgaaacccttttttgaaaaatattaaattaaaaaaaaattttaaaaattttttaaaatttttgttttcccccccccctttcccccacggggggatttattttttaaaaaggttttttttttccaaaaaaaaattttttaaaacccccctattttttcccccgccggaaaaggttttttttttttataattttcaaacccctgtttgggaaaaataaaaacaaaaaaaaaaaaaaaaaaaaa

SEQ ID NO: 30168 - DNA, 942 bp, Heterodera glycines
ctccgcttattatcctatcctatacggaaaagagaattattattggctttttcagagatttattttttaaataaactatcggccatacaaatcgatttaagaaattgctttttcacattcttctgctggggaaaggagaggcggggaattttctccccgtggggacggacaaaaacggagagatgctgaagacggaataaattatttttaattgttgcaattgaatgggatcagaatgcaaaggctttatcatcaattatgcaggcctttattatgaatagtcgatgattcacaaaatgaaacaaattgaaaatgccaaaaaaattgggagggctaagctaagaacagaatgtgcgattgaaagcgtcattaaggatgcaaattacatgtaagaaaaatcggaaaatatctgtaaaaccagagttaccctttgtccttatttgtaagatttgtccttatttaagctctttgtccttattttcgtcttattttttggattcagggaaaaatttagattttaaatgataatttttgaaagaaatgttttttgaagcgaattaatatgcaaaatcttaacaagattcagttaaatattcaaatttttctctcagcggtttcttattctcttttaaaaaatggctcaaaatcgtaattttgtcattttttgaacaaaatcgttaagaaatcgaattaaaaattataactattagagcaggggtgtatgtatctgttcttatttttaagaaatgttctgatttggggtagtgtctttttcatttaaaagaggaaatttctgaaaaatttggctaattcccaacaaaattcattaaaaattcttaaaattttcccccagcggcgcctatcggcatcgccggccccccaaaacccctattttttcttaaaaattaacccaagatcgcaaattttggtcattttttggac

SEQ ID NO: 30169 - DNA, 1586 bp, Heterodera glycines
  unsure (1)..(1586): unsure at all n locations
attccaatcactgagactcaattctcttgcatttcaatcactggcactcaacccaccaacatttcaatcactggaactcagcccaccagcattccaatcactggtactcaacccaccaacatttcaatcactgggactcaacccaacagcatttcaatcactgggagtcaacccaccaacatttcaatcactgggactcaacccaccagcatttcaatcactgggactcaattctcctgcatttcaatcactgggactcaacccaccagcattccaatcactgggactcaattctgcatttcaatcactggcactcaacccaccagcattccaatcactgggactcaattctcctgcatttcaatcactgggactcaacccaccagcattccaatcgccaggactcaacccaccagaatcaatcaccgagactcaattctctggcatttcaagcaacgcgactcaaattaagcaattctccgatattcttccagtctctcaatcaccagacaaaaaattgtgccaaattcatcactgcaatataatatcgtgtaattttaggtctatataaaaaaataaatgcttattaacaacacaattaataaatataaaggtaaaattgcaaattcaacaaaatagaaaaaaatgttaagatttatcaatgaaaaaaaaattgatcaataatcaaattatataactaaccaagaacttaaacagacctgttcaacgttaatttttaaattttcttattaaaacttcattaaattacgaaacacaattaattgtggaaatccttaagccacattataaataaaaacaaaacaatacaccacataaatgaacggacacaaacacatacataacgttttaatatccaaaacaccacacaaatacaaacatagaactgacaacacttttaaattcatacaaaaatctagctaaacaccatccaaaataaattcacaataaacatacaaacataaacattcacttatttatatgtagataaaaagaaaaaagcaaaaacaaaaaaacacactatttcttagccgattgcggactcaaattgcttcatcactctttctcttgaccggagtgaccaacttatcaccaatcgtcactttacatccacacacattaacatcagaagccaaaacattaagctgcatacactcatctacaaaataattaaatcatagataaacaaaaaagcaattaggcaaaaaccttcaattttgacaaaacaacgttttagttcaagctggtccttgctgtccaattgcccaaacatttctgggagtttttcgcccgaaataaataaatccgcgcgcttcccacagaaatcgccaacaacagcagcgaacatttctccaattaatgaaaacggagtcgttaaaacacacttaatttctnaaaagaaaatttaaaagatttttatttaatgcattactatnaaaacggcccgccacaagctgcgtaaatttctncgcccgcaaaacttcagtcttgacccaaacaattttcgagtgctttgtcacaaacaactcaaacggaatgnagtctgaaaaaatttttgacatcaaatt

SEQ ID NO: 30170 - DNA, 730 bp, Heterodera glycines
aaaaaaatttataatacaaaagggggtaatttaactaccctgaaagttcggtttggaagttccaacgttagttgagtacctctcctttattaggcggcggcagaccacccaggccaacattttgggaagatttctggtcaacagtttcgacggtgagtgcggttttaatcgaagagtaagaaggcctatcaaaaactagagggcggcaggagtttaatgggagtcccactcccggaagattccggattcccgctcacgtaaattttcacactaagtacgggagtaaaaatacactggtaataattgagttttttgataaaatataatttttgattgaaaatctgttaaatatctaggcaaaatttcaaaaaaattcccagcggcacttatcggcaccgtcggacccttaaatttaattttcttaaaaatggctcaaattcgcataaattagtaatttttagacaaaactgataatatattgcactcaaatactacatacatgaaaggggggggggtcgaaaaaatacttctttgactaaatctttttttgtgtactaaatgtgttgcccgtcattcgaacaggaagaacactgctgatgtgaccatatatttttataaatgtttacatttgtacaataaagtctgattattattatagattaaagcatatttactcctccactattgtacggaggagattgattcataccaataccatccatctataggg

SEQ ID NO: 30171 - DNA, 1255 bp, Heterodera glycines
taatgttatggtggttatatatattatatccaattatagttgttaattctatcttatttattttccataatagccatagccatagccgccatagccacaataacaactgcgatatccgtagccgccaccccagccgccatagccgtagccgccccatccaccgtagccgccatagcgtctaccgtagccgtagccgtatccgtatcgtttatggcgtaccaaacttaaaaacacacgtaatttcaaggaaatttcgaaccggatttgagttcaataaaagacccgggtctaataatcgaagaaatttggtaattatactattaattgtcttgtatcgcatttcatctcaccttgttgcttcatccgtgccaatggaagccgctaatttgccattgtttgcttcaacaatggcatttgcttcttcttcaatcggtgccgaaactgccagtgccacaaaggcaatgacgaacagcagaagaagcacagtcactttggcatgggacgaggacattttgtgatttaatttgggcaaggctatgggtttttgtttacaaaattaatctgaaaattaaaacaaattatagtaaaagttaaaaaaatattttaaagaaattaaatttagtaaaatttttttagtgtttttgaaggcattaaatttcatttttggccaatgacaaatcaaaaattaaatttataaagtgatttggatttggaattgtctgtcgttaggaaatttgaccttttttatattgtgtgtttgggtgttccattaaaacaaagtcagctgcgaaatttaacgaacaggttttcaatttatttatttttttcttcgacaaattgggggaacaaaactgacagaaattaatttattttaatttcaaaaaagaaatggtctttttttttgtctttgagattgataattctcaacgaatttggcgaatttttgagtggaattgaagcggaactgattaatgttatacaacaacattggccaaataattgaataaaaaaaaattaaaattaatttagggcgtaaaaaaattcactcgtgaatttctgaaattgaatatggtcatattactttgataaaaccatggctaccaaatgtgatgcttaatcataattttgttttttggtgcttttttcaaaaaaaaaaaggttttttcccaaatttttattatttattagaattttggtcaaaatctattaaaaaaatcgccttaattaaaaaaaattgaaaataacatgaccatga

SEQ ID NO: 30172 - DNA, 857 bp, Heterodera glycines
  unsure (1)..(857): unsure at all n locations
caatgtctgctgacaagagcaagaaatgtttgggcttttttatcgaatgcaataaaaatggtaaaaaacaatggatttaaattcatttaaatgccattcatccaccggcttaatcggcatcccgtcacgcttttcttgggttcccgagccagactttttgaaaaaaaaatgccnggatcagaattctggcagtgtatcctatcgcgcgactttcccaactttttttttcaaaatgccgtgatttttccaatgaaaaaaatgccggaccgacgtgttccgccagacaaaattcagaatgtccttcatttatttttttgaatcacattttaaaaataaaattttggataaaaaaaatttttccaaaatccgaaaccaccaaatgcctatcactaacaattaattaattaatgtttttttaattgaatttgcccattttgttgtacccccgatgcccattattcacagaacccaattggtgctgtacatgttcagcaacactgcaaattgttgtgcaaaggaaatacagaaactctcccggcgccaacaagcagttcaaggatgccaatttcagcgccgaaaagaaccaattgggtttccgagacttcgtacctattgaggtgtgtgtgtgtgtctggtcagggatcttacaaaatcacagttaggtgctcgggatgatgtcgatttcggccctccagaatgcttggaattttttttttgctatgccaaaccgtggattggcattggaaattttagtctccactcactgtggtcgggttgttgtacttcagtctagggttgaccggtagcggttccggtgctggccggtaattaccgccttttttggtaccggttccggt

SEQ ID NO: 30173 - DNA, 986 bp, Heterodera glycines
ccctttgatcggtacaaaattggccgaaaaagagatagccattttctgaggcccgaaggaaaatttgagagggctaatttatatgtaatattcgaaagtgccaagctaattagcgattcaggcgcacattggggcctgaattaagccattttccctttgatcggttcaaaattggccgaaaaagagatagccattttctgaggcccgaaggaaaatttgagagggctaatttatatgtaatattcgaaagtgccaagctaattagcgattcaggcgcacattggggcctgaattaagccattttccctttgatcggtacaaaattggccgaaaaagagatagccattttctgaggcccgaaggaaaatttgagagggctaatttatatgtaatattcgaaagtgccaagctaattagcgattcaggcgcacattggggcctgaattaagccattttccctttgatcggttcaaaattggccgaaaaagagatagccattttctgaggcccgaaggaaaatttgagagggctaatttatatgtaatattcgaaagtgccaagctaattagcgattcaggcgcacattggggcctaaattaagccattttccctttgatcggtacaaaattggccgaaaaagagatagacattttctgaggcccgaaggaaaatttaagagggctaatttatatgtaatattcgaaagtgccaagctaattagcgattcaggcgcacattggggcctgaattaagccattttccctttgatcggtacaaaattggccgaaaaagagatagccattttctgaggcccgaaggaaaatttgagagggctaatttatatgtaatattcgaaagtgccaagctaattagcgattcaggcgcacatttgggcctgaattaagccattttccctttgatcggtacaaaattggccgaaaaagagatagccattttctgaagcccgaggaaaaattgagagggct

SEQ ID NO: 30174 - DNA, 1756 bp, Heterodera glycines
atctccccccaaaatgccctcctacccttttggctccctctccaaaaatggtcaatcttctgcccccccccaatttcccccttctcctccatatgcttgttccagtcgcttttgtaattgacaacatcaaacattggccaatatgttttttgtggtccaactttctttcttccaccgcaatattttcctcgcatcgccgccactcccccaggcgatgagttcccttgacgagtgcgaatcggaccccattttgggccgtccgatcattcgcattcccattattctcgcgtacatcgccgtgtttctgatctgtctgatcggtcggtcggtcttcgcttttctatttgacccatcgctcccaggcaattcgttcgcaattctcgtcatttgtgcccaccgttccatgcgcaccgccaccaatttctttttggctaatctcgccgttgcggaccttttggttgccattttttgcattttctaggcaaactcttctccccgaagcaataggcattctcactttgttgtagaatatgttccatttggttggcattgtcaccaacgacggacgttggcttttcggtgagaatggtcaaatggcgtgccattcactcatccttcgctttgaggtgccactttgtgcaaattgtacgcgttcgtacttcacctcttcccctgcaccagcattggcattctcgtctgcgcctctgtcgagaaatacatcgccggtttgctttccaagtgtgccttccccttttaaagtgaacattcgttttggtgctccacccgcttttggccctcaaagtgttcaccccgcgcttccgcgttttgctaatggcctccatttgggccatttctctcctgttcagcttgccctattacattttcaccagttacatcttttacaagaatgttgcggtgtgtactcggttgatgcctttgactaattcgacaaaaaggtcgaaaaatgcttaaaaagggaagaggggcgctttttgtgccaaaatctttgataagctttaaaattttccccggatttttttttggcttgaagaaaagtccttggattctattctctctgcgaattatttctggttccggcgttggccacagttatttagtggtggggagtgtttcgaattttgttgtttcatctgctaactgattggaattgtcacaggttaacaatgtcctctccttttgagcacgcgttaccgaattttccattattattattattaaattttagctgtcattgtgattccaattcccttatctctaaaaaagcaatgtgtttgtttggaagggtttgttgtgaaagatacgataaaagggcagatgaatggtgcaaaactggaaaattgattagcaattagaattggacaacgacaaaatgggaaaaatgtgcccattgattgagtgaaggggcgggggcggcaaaaacaatcgcttcattcgccgctttcactggcattctccgatcagtctgatgagcacccgaaacatcgtcacctcctccttcgtcctttggtactgcgttccgttgctgatcatcctctttctttacactcgcaatggtttggtcctgtggcatagtgcgccgctgaagaaactgacccaagtgggcaaattgcgaacaaacagcaacggttggttaagagaagggaaagcaaaggatcagcacaaaaaggcgattgatcattgatcagagacgacgacaattgcctcggggataggcagtgccaaaacaagagccaaa

SEQ ID NO: 30175 - DNA, 1483 bp, Heterodera glycines
attaaaaatgaaatcaaaaattcactccaaatttttattcccatcacattaattctttaaataaaaaatttagttttattcataaaaatgaagatccactcttgaacaataggctccattctcgccgtaaattgagatgttttggaaggcgccacaacaatttactgggccaccagcaatgcttttgtcttcctaaaattgaaaaaaaagaaatttagaaacaattgagatagaaaatcttaattttctcaaaatccgtgaatttttgtgtgtaaaaatccgatttttatttattcattaattacatcattgactgaagcagaaattagtgccgaaacgtaacatggtgggacaaaatgtgttgatgtaagtgcccgaattgccgaaaatgttgccgcaaatcctcccaaaagaccgaatactaaattattaaaataaaattatttataaaaaaaaaaattgtgcaaaattgtcaccgctaataaaagtgcagaaaaacaacagtttaggttccgtaaaattgatcacactaaagcaattaggtaattaaattaaaatttactatttatattttttgattaaaaatattttattttgatttattttcgttgtcactcagaaatggtggctcgttgttgaaaggattcaaaatgcttctccttttgcttgtcagccttatttaaccatgctcggcgcatttccgttttcatgaaaaattcaaatatataaaaaaaattaaaataaaaaaaaataatatattaatttacttttaaatgtaaaattgctgagtatttatgcaaataaatttattatcagttattattgtaatatttaaataattgtttctttaatacgataattctttgttattgaagatattaatttattatttattatagaaatacaataaatttatcttctttaaaattgtttgaaaatttaaataaatattaaaaatgtaaaattatttttaaaaataaatgaaaaattttttaaatgttattttaatatctaaatttttattatataaaatttatttttattttctttttcatacttctcagcggcgttcaaaaacaaataacaaattggcggaaatatcaaagacattgagctttgcgttgagcctccactcaaatccaacaatgggccaaatgttggcacagattcggccacaaaaattgccattcccatcacaatggcacggaccaaaatacgttggatgccaaattctaattaaaaaaaataaagttagaaaaaatacaaaaataaattttaaatttacttggtggaattttgaaaaatttttcagcggcctgatttactggatttaggacaatgattatgctgaatattgcatgcccagtaataaatgaatttgcaagctaaaaaataaattttaaataatttttaaattaaaattttaatttattaatttaaataaaatattaaatttaaatattaatttattacttgctgaagc

SEQ ID NO: 30176 - DNA, 1700 bp, Heterodera glycines
ttatttcgcttcttctttgtgttttttgtgattttcgacagtaaattgaattcgacaatgagtgatttcgacagtgaagttcggctccgaccggttcgtccccgttgctaataatttttctcattacccatcaaattaaatatatgttggtatcattcgagagctatataaaatttaaaaaattttggtcagttaaaaaaaaagttatggccaaaaacctcaaaaatcaactttgagcttgttaccagatttgctatcgtgaactgacaaagaaaaaagttatagcatttctaatttgttggcgccgaaacgggccgtgccgaactgatctcggccctattttaagggggggggggggggagagaccgaattatcagggctgctgctttaatttaattgatgggcacactaattaggagtttatacaatatttgttttccaactagtccaaagagaaggggcagatttaatttggatttttgttttgaattttttatgaaaaatggtgaaattcaaaaattttaaaaattaaatggcttttgtatgtgaaatgaaaattttcaacatttaagctcacttgtatgatttatctgagtacggtttcttcactgaaattttcagttgattgttagcaaaaacatttgtcgaacaaatgagtacaagtgtaaaaagaagaataatattcattgatctttattaaaattttgcataaatattaaaattattcattgttattttgattgcctaaagcaatatgtttcataatgttaatgactacctaaattcgtaattacctccccataaatgccacgaacacaaattgatttattttatggttttgtaaaaaaagccaatttccgatttatttggcatacctatgtttacgtttgtgacaaataaattttaaacaaaaaaaaataagtaaatatattttttattttattaaatcctctatagaattgaagaatgtttctcggcacaaatgtaattcatcagaaagtagttgatgttagtcaaaaaccatcaaatgcaaaaaaaaaaaaattcatatatagagaccggatttctatattttttttctacggcttagttatggcgtgagaagcccacaatagcattttctccgaacaatttgatttagagcgacttaaaaaacatattaaaaatacatattttggcgttttggcatatttgggctattttggaatttttagcacatattttagcatttttgaaaaaaaatcataagaaaaatacaagaaaattgaaaaatacaccccctaaaaaccaactttcttgtcattttattaaatattttcaaaatttctttttttatttcgaatcctgagagtaaccaaatcgaattcttaatttgtcaatggattacgaagttccctgctggaattttcaatttgaaaaataatttttcagaaaaagaaaaaaaacattttacccccgaaaacttggaaatgtatttgatttgcaattatgctggcgaaaatgaaatgaatgagatttttctgatatttttatgcatacagagttccggatttttccaatatttaatacatatttcgcaaatattttggcacttttttttttggtttttagaacatattttattacatatttcaggattttttaacacaaaaaaatctttttagccgagactcgatatatggtcaaaaaaattttttggc

SEQ ID NO: 30177 - DNA, 985 bp, Heterodera glycines
aggcttaacttttttttcagaaactgatcagaagcgcaccaaactttgcagggatactgaaaggaagagaaataacctattttaaatattatctagtcagttcatttaaataatttttatccaaaaaatttttttttgggttttcggggcagtccccctgaaccgatgcgcccagatttatggggagaccgaatccttccggaatagcttcactatagcctgtactttaattctgcgttggatttttgctccccataattgtttgagtaccccaaacggacacttgaaaaaatcgatttatttttgttttcggggcagtccccccgaaccgatgcgcccagatttatggggagaccgaatccttcgggaatagcttccctatagcctgtactttaattctgcgttggatttttgctccccataattgtttgagtaccccaaacggacacttgaaaaaatcgatttttttgttttcggggcagtccccccgaaccgatgcgcccagatttatggggagaccgaatccttcgggaatagcttccctatagcctgtactttaattctgcgttggatttttgctccccataaatgtttgagtaccccaaacggacacttgaaaaaatcgatttttttgtttcataaatatttttttcagaaagtgccctaatgcgcaccaaattttatttacaacttaattttagcactctgatgctttagtatcaaaaaggaagatggagaaaaaatttttccttatattttggttatatcgttttgcttttggtggggtgcttggaacagtggaatcatgcgcacccgtccgatctggcaagttaagcaacgattgctgactagccaaaaggttcggtgccgtgatgaaacgaaccagcactgcttaccccgcggcacccggcacggtcccccgaaggaatggatttaattaaaatctctccttcggggatttttttcccattaggtcgtccgttag

SEQ ID NO: 30178 - DNA, 724 bp, Heterodera glycines
atgccacaaaggcattctgatcggatttgagattggatttctgaaagataagggccgtccgacttatgtccccctcctcagcagtggcttacaatgtaaaagcaacattttcagcgagtaccagcagcagtgccatcggaacaacatcattaacagcggcggcagctgccctttggcactttcgtcgtccgagcgaatggtcagcgaactgatcgcagcggtcattgagcagagcagacaaaggcaacagctgcagaaacaccagcaacagttgctgatcagtacgaacaaagtagaggagaccaataacagcggaggaagcgaaaatgaggcggagggggaggaaagaggggacgaaatggcaccggaggagggcgggagcatttggcaacagagtaagggcgagaacggcacggtaacggcggaagctgtgccgaaccatccgacgacggcaaatgccgggggagacgaagcacaacagaaaaaggaaatgttcatgagggtacggcatattggacaatcattatcagaatgtatgctaattggtcaattaatgtcccctttcagtgggtccatcagcacggcaacaacatgtacccgtcccgagaacagaaggaacggttggcggcacagatggacaccagctatgagaaggtgatcagaccaaccaaattattaattgaatagtttggttaatcttttttctcattttctgatactttta

SEQ ID NO: 30179 - DNA, 1476 bp, Heterodera glycines
  unsure (1)..(1476): unsure at all n locations
aggtagatggggtcganctcgttgaagtggttgaactactcggagttgatgaggttgaagttgacgctgtcgaacttgtagaaatgcttgaactgctcggagtcgacgtggttgaggaagatggagtcgaatccgttgaagtgctcgaacagctcggagttgacgaggttgatgatgctgaacttgttgaactgcttagagtcgacgaagttgatgatgttgaactagttgaactgctcggagtagacgatgttgaactactagaggttgttgacgttggtgttgttgcagttgaggtacttaaagttgttgtggaagttgatgaagtcgatgttgaagatgtgcttgttgtcatgctttctttgcagcagcaaatgtaattagtgtattttgacgaaaacggattggatggttgtcttaaatacggatacatcgttgcgccggcttcatggcactgatggcaacataatgcccgaatgcaagatcgcatttcctctgagtctgcgctggggttactattgggattgatatttggacaatcactcgcttgtggtggtgaattttcgtcatatgaacattctaaaaaaataagaataaattcttgaaaaaattttaatttctaacaacaaaattaaatataaatattgtattgaaaaaattatttgagaatgaggaggggtccgcgatgccaaagcgccgccgggaaattttcgaaattttattgataataatcagattttgcggttttgtgtaaattaacaaaaaaacaattttagccgtttttgtttacagattttggtaaaagacattctcctttttactttcttatccgcccccaccataaaactaatgttttaattttacaaaaatccaggaatctccttaaatccgaaatcctaatcaatcatatcaacaaaaaacccaaaaaaaaatgtagaaaatcctcaaatttcacagccctatcttaagagatttgaattataaccaaaaaacatcgtgatattttgctattcatttaacttttttctgaaatttacctttaaccatttgtaagccaaaaatgctttgacatttatcctcagaaagcacattcctgtatgtaaaagtcaagatgatggcaacggtagcaattttaaaatttaaattcatttttgaatcaaattgaattattttcaatccgttgttaactcaaacttttgatgtaatttggataaatttatatgaaaatgtttccaaaaatgaaatatggtgttagttttgcgctgattaaacaataaatctttttttgggtcttaggtttggatttatttaaattacccaataaatcttcaatggtttcaagctctattgtgtattcagtggcttcaaaatactaaaaattgtttgaataagattttcacgattcggataaagattctaattaaagattaaatttgtggtcgagatggaactcgataattaaaatattgataaaaa

SEQ ID NO: 30180 - DNA, 1008 bp, Heterodera glycines
  unsure (1)..(1008): unsure at all n locations
aaataaatacaatttttagaatttgattcaggttatctctcgccgtccaacggcgacgccaacgaggagtaccgtatgcgcaactttacatcggcatccgccattgataaggtaatgatgggcccaccgtcccaacagcagttggtggccgcgcggatgcgtccctcctcctccacgctcggcttttgcccaacgccgccatttgtgcccgtttcggcgctgggctgtaacaacattggcaccacacagcagcagcagcagaacggcgcaacaatgaatggcacaagcagcggcagcagcacaagggtgggtgggcatcaattaattgacatgactaattattttggtcatgctcggctaattagagggcattggcacggctatttaggggaacattagggctaattagggtattaacaaggccaattaattatagggtattggcagtgataattagtgggtattataaggacgaattgggtcattggcaggattagtaggaccaattaaagggcacttacaaggataattagagggcattatatagggccaattaaagggcatttacatggataattagagggcattagtagggccaattaaagggcattgacagggataattagagggcattagtagggccaattaaagggcatttacatggataattagagggcattagtagggccaattaaagggcatttacatggataattagagggcattatatatggccaattaaagggcacctacagggataattagagggcattagtagggccaattaaagggcatctacagggataattagagggcattatatatggccaattaaagggcatttacatggataattagagggcattatatatggccaattaaagggcatttacatggataattagagggcattagtagggccaattaaagggcatctacagggataattagagggcattagtagggcccattaaggggcattacatggatantagagggcattatata

SEQ ID NO: 30181 - DNA, 1361 bp, Heterodera glycines
  unsure (1)..(1361): unsure at all n locations
agtttttagcacctaaaatcgtatccctatttcgagtctcggggtcaagtctctgtatgggaataaaaatttagcggaaatttgtgtaaaaagacaaccattttttgctcgtatttgaatttatggttattcatatgttttagatatgtcacgatttagtccaaaaggcattatttgttttgatccacatctccactttattaaattggcccaaattatgtggatttatctttttgcttaccttttaatagtattttcttctcagacagatagtaagttgttaagttttcgtcattgtctgctccttttatctcaatgtctttagatggttcagcgacagcccattcgtcaccgccccgttcactttgggcccaaacaagaaatggatgagcccgtggaacagttcaacagcacaacacaccatccatcggctcttctccccatgacgaacccatctgttcattcgtcccaaagtgatcaattaatccatctccaaattcgtcaatacaattaccaaagccgtcctcccccgtcgtagcatccaccagcagcgccatctccgctgattgtctttcccaacaacagccgatggatggtcaactgattgcttctgatcagaaatcgctttcttctgtctctggtgcttcctcaagtgggactcagttgacttgtactgtttgcggagatgtggccaccggtcgacattatggctctgtaggcaaactctcaataaacaagaaattcttgttggttaaggtggcgtgcaacggttgtaaaggtgggaaattacggcatttggtaaaagcgaaggacatgacacatataaccaacttaggctttttccgaagaaccatccgacgcggctacaaatacacgtgtcgtttcaactcaaactgtcagattgacaaacgtagaaataaaaacccatccagagttattgaatgaaaggcaattcacagataaccgtgctgtttgtcgagcttgtcgttacgcgagatgtattcagttcggcatgaaagtggacggtgcgttcgagggaatgttctgtcatttataacgggattgcgtttgatttagcggtacagagtgagcgcgatttaatcggaaaacgctcgcgtactttccccacgacttctccttcagcagcctctactgctgctacggatgcacccacagaagaagaatcgcagggggcgttgtctccagagcctaataaaaatacaattgttcaccagaaaatggaggagaggcataaatgtgagggaaaatgaacataatagtgacatttaaaacggtgtgaaattaattgctataggaatgaacagttgttttgttattttggtgtgccantataatgatta

SEQ ID NO: 30182 - DNA, 1036 bp, Heterodera glycines
ttttgttgtgcttaatcgttgttggtccatttaccgcctttatctgactgatgtttgctgttcttattgttctctcgtttatttacctattttaactcaaataaatcattgttttctttttttaaaataattgctcaataaaaattttgtttgtcaattcaaagaaatgcttacctaaattgttattgaaatcacgacttttttgttgccatttttcacagtgtccatggaattgctttttcttccccgtcttcggcattgtcttttgttgcgacgacctttccgaagacggctctttctcggagtgcgtctacaacaattgtcatcctccacgtcgacgtccaattcggcctccgaatgtgaaggggaaacggtggcggaggcccccttcggctacgaccccaatttgaagttggtcgccggccttagcggccccgtggacgctgatgacgtgtccatggaacggccgcccttccgcttggacggcgtggagaaagtcccctcccccctgaggggtcgttttaaaccccgaaattcccttgcagaaggactatttgcatttgtacgacgaacagttgcgctttgaggagaccaatttcaccgccgtgcgcaatttggccagacggagcagagaaaagtcgatggaggaactgatcgaagaatgggaatggcaggccgaaatcgaacagaacctttttgcggcgttggagaagacgcgcaaatggacaggtgggggaaatgagtgaaaaaactgccaaaacggcggggacaaaaaacgtttttcataactctaaaagtgtaaattaattttttaaaaaagagaaaatagtttttcgatttttaactttttttaaacacgtttttccattattcgtctgtcggtctgtaaggctaagaatggcaccttcaaattgttttagtgcgtgcctgcctgaagcagagtttggtgcgcgagtgttcccgccagttggtcaaactgacacacgccattctgtgccgaggccaacatgccattccgaccactgagctcaacgac

SEQ ID NO: 30183 - DNA, 1633 bp, Heterodera glycines
  unsure (1)..(1633): unsure at all n locations
agcaagcattggacaacatcgacgaagacaacgacaccggaggatttgggacatctcatcgtcgatgtgtcattgtccaagtgcaagcatccatggccgttgcaatgctgaagcgattcaccaagaattgcccttggtttttcggtatttccaacgaaattccgacagggagtgatcgccgtctccgactgggtgacgaagtcgaaattgtcaacttcgcttggaaaagtggctacgaagtcctgcggcatctcgaccaggacggcacttcttccccgtggatcaatgccggaaacatcaacatccaagcatcgcaatcaaagccaacatggccaatccgacgagcatcattcccaaaattggaattgtgctgaacgtcaaacgccgtggaacgcgcaaaacgaacgtcattcaaagcctaacggttgtggcacctggaatgaaagtggcacaaagcttaccaggctgggctcttggcgagaaggattggtttagaacagggcaagccgtgcttgtcgaaacggttgagttaatgagacccaatttgtggaaagttaattcaatttatgcactgccaatcaactgcctatttggtcaagcaaatgatcggaaagcctatcatcctctcgtggccattggcattgatcagtcaccaatactgcacaaattcccattcaaaagaggggatttggatgccacaattgcgcagggcgaacaagcaattgccgcggcagtcagatcatgcttggacaagctggaggaggacattaagcggtttatcatcactgccgagcctcaagtggaatatggagcggaagccgacactgccataatcaccatttgacatcgcttagacaacaagcaggaaatggtcgacatgtcgaaaatgtggactgaagaccagccaatccatgtgcgtgtggcagccaaaggggccaaaccatgtgccaccggcttcatcatgaatgttgaacgacaggaatcggaaacgggactcagcattgtcgccaaactcttcctagcgtaccaagaagccaagaactacgattgtgaggaggcatgggaccgaataatggacggggaattgaccgaaattgagcctttgcattctaggaaaatcctaatgcaaagggccgaaaaattttcagttaatttattcactgaaatggcgaaaaacacaacgacgggactcggcacaattatgtccattctaatggcacgccaaggggaacgaacgcctccacaaaattcatgggatgagctattcgtagctacgtctgctgatgttgaccactccgaccgggaattgctgctgctgcttggttgtcgtcaagaagactaaaagcaaatttaaattatggcaattccatgttataccatcggagagtgcaaaatggaggtggaacaaaatgctgatcaaattttaaaattttacatttagctaaggatgggactgaaaggaccgtcgctgatacggtggccccaaatgtgaacaaaatgttggtaccgaagcgaaaagtcactgctgacgcattgttggattcttttcggagagaagacgggtgaatgatgaagagcaattaatctctttaatgggccctatacatatttagtgccanaaaagcataaacaa

SEQ ID NO: 30184 - DNA, 1132 bp, Heterodera glycines
  unsure (1)..(1132): unsure at all n locations
gagcatcattttttgaaatgccgtcaatttaattttgaggtgccaaatattattatcagtcgcttaatttgatcatttttatttgattttgtgacgcaatgccatttcccattcccccacccgcccaacgtttggcccaacgcggccggcggatttgcaaattgggcaccatccgaaaggccaacgcctcttttatagggctgatgaatccgatcattaaacttacaaaaattaaatgccaaaatcaaaaaaaatatattagatttacgaccgttggtgcgcaattggccaaatgccgttataaaacaacagcaaattgatttataatcattgataattattgtcatttcttgccattattttattgatgccattcaaagtttgattatatcaattattagtgtcactattccagaacaaatcaacgaatttgaccatatttaattttatatttgaataaaaaatacggatctcattagtccacccatatttaatatataattaaaaatattggagacttttcaattatcgagaaatttttggaattttttatgcaattaacagattttacaccgaaattgacagtcttcttgatttttagggaaaatttcgaaaatttccatgtccggcggagaaaaaattatacgttttttaatggaatttgctaaaatttctccgatttgtctcttttttgttcagccgctgtttccgttggtatcattcgttttaattatgtaattaacgcaattttccatcaaatagtcactgatgaatcccttctccgtcactctgttgtgaatatcttttttggccaaattaaatcggcaaaagaatgcgtctaattggtcaatactttcatcaagaaaagccattaataatttgatcatcagcgaattggcctcacaattaaccaattttttggtcgcacggaacacttccacaaaaactttgccgatccgtgcagttttgaattgttggtcatttgtaccaaattcctcattacttaattgcattgccgaatttgaaaatgcgacgaacgctgngacaataacaacgctaaaaataccgaaatatcttctcgtttcaatgaaatcttaatactttttgaacaaaagatcaaaatttatttttt

SEQ ID NO: 30185 - DNA, 515 bp, Heterodera glycines
tttgagtaccccaaacggacacttgaaaaaatcgatttttttgtttcataaatatttttttcagaaagtgctctaaagcgcaccaaattttatttacaacttaattttagcactctgatgctttagtatcaaaaaggaagatggagaaaaaatgttttaaaaaatttttccttatattttggttatatcgttttgcttttggtggggtgcttggaacagtggaatcatgcgcacccgtccgatctggcaagttaagcaacgattgctgactagccaaaaggttcggtgccgtgatgaaacgaaccagcactgcttaccccgcggcacccggcacggtcccccgaaggaatggatttaattaaattctctccttcggggatttttttccattaggtcgtccgttagcgttcgattgctctagtcaatttttaaaaatttttgttgaaatatttgtcgtgctctgaagggcggggggggggcgggggccgaaggctcccgcgggggggggggggggg

SEQ ID NO: 30186 - DNA, 1850 bp, Heterodera glycines
ttgcttgcgcaatcccacaattggcccttaatgtatactttccgttaaaaaatcatttgaaataatactatattaaaaatatatgaattttccttttatgtatatgcatttaatatattttagcaattaaaaagctaaaatctctaaattaacttcaaaagaactaaaaataagcattaaaaattttagtaatcgccgaggcggacaataaatttctgaataaggaacttggaatgaatttaaaaaaacctttttaaaataatatttttttaaaaagatagtctaatttaactaaaaggaaaataaccaactttatttttattggcataattctaataaataattgcatccaaaattgatcagaaattgagaaccggaaaaaagggtataaaatgcttcagaattcgggatactcaaatttaaaattatttttcaaaatttgtactggtcccctcatttgaatgcttatgatttcaaatcctatttatttatccaaacttacatagagcgggtaagcggcggtcctttgatcgtgactcatctaaaacaaaatttattaattaattttaaaaatgtaaaaaaattacatcctgggcgcacaccaactcatggtcagctgcgcaacagccatcgcctttagttccgttcgccgggaaacatttcccagagccacggacgcatctttttttcagaaggtcacagtccgtttcctttttggggatctagaatttccttttttaaatgggtattaaataaatacgatgttaaaaatatcttttaattttttacctcttcacagcatttgaacccatagccggctttgcagcattcgtctccgatggcgccttcgtgaggatggcacgctccccaggtgcagtctttcgggcattcgctttgcattttttggcagcctttcagcacaggtggaggctaaattcagcatttaaacatgcgaatatatatatatatatagatatatttaatggcttttccgctcgctttatactcaccttagcgcagcattgccacgcgtagcccttctcacagcaatcgccgatccgtgttttgaccccagctgacgggaaacagcttccccatccgcagctgcatcctttccggcagacgtcgatgagttggggcgcataaatatagaaatgattcaaaatataaccctaattccccatatttttctaactttttcgcagcaggtgtacgagtagtcctccctgcaacaggcgcttgcgactgctccgggactaatgtggcaggccccccagccgcaggaggtacacgcctttgcgaccgattcgcaatctgtggaacaaattatttatagaaaaattacttaaaatggtttttaatagatactcgtgcaatttttatttttttactcaaattctgatttatcaattcttagtcccaaattgttgtagttttttgaatttattttcatggtttttcaaaaaattataccagcttttttacaattttcgccattgcccattttagcattaattaaaattatttaaaatttaaattgggttacccttccggaatgcttgttcgagcagtttttccgttgcggttttggcgaccatgatgatcaggtctttgccaagatcgagcaggaatgttccgattccgccgaggcctttgagcagcgagaccagcacgttcgtccagtcaaaggatcttttgtggcggatggcaacagcagttgcgttgctagcaatgggctcattgtccaggatgggattgctccgaaataaaaccattggccaggttccattggcaacgttttttccgtgggcattgttcggggcagtggcatttgagccttaattgcatgc

SEQ ID NO: 30187 - DNA, 1110 bp, Heterodera glycines
cccccccccaacccccatccccgcgaaaagccacccctgcccacggggcccgaaccctagtttaatgatcaaatgctacaaatttattttattattatctgtatgtacagctataaaactaatacattgattatgtaaatgacacaacacaaaatgctgagaaatttgcgatattaaaacataatttcaaaatgaggagaccgaaaatgaacgaataatgccccttttgaagtgttaaaaacaggaaataaattgattagcaattcgcacttatccaaaaacccaaaaaggaccaaataataatattaatatttaggtaattgtattgaactgataaatgaaagcataaatatgaaaaaagggtgagattttccaaaattggcaatgtttggtgtaaaaattgagggggccggaatttgaggagataaatgtgagggcttggggcttaggcattcaaaacgcaatttggaggtaaacagtcatttcggcagaaggacgggacgcaacaaagaaaaagaaaacagcgaccgatgatttacggggctaacataacaaaagacaacaaatcgaccaagggacaaaagggcgtgccggtcagaaccgatgcactcactcaatggctcggactgacggggcatcacataattgaactgaaccaaacaaatcattatggacccttcccccttcctaatatctaattaatacatgatgcgcccgcgggcaatttgttcagaaaagtgcaagataaatatcattaaaagaaacacattcacacaatgaatgacaataaaaatgggcctcctgagctgacgttaaaaagaaagaaagatcttatagaaagaacatgtgaaaatgggaaaacagaaaatgaaacaagaggaaaaggggacaatttggggagaaacaaaaaggaaaaactgcaaattatgtaagaggggggggggggggggaaaatgaaaaatgaaaaaaaaaaacggtggacttgataagaaaatatgaacttaaaaacacttgaaaaacaataaaaattcgaaaaaatccatccattctggaagagatgcacattcggaaaacggaaggaagcaaaggaagtcgggatttggtgccgtt

SEQ ID NO: 30188 - DNA, 842 bp, Heterodera glycines
ttcgcttcttcatccaaattcaatcatcctttccccatccattccatcccaggcaaaagtgccaaaattgccaaagtccgagactcccgaatatttcttccatcgcccccatattcgtcctcccatcacatccatccttttcctccttgttcatccctcctttcttccacacaaattcacccatccataaagtatttcatcgttgtgcatttccttcgtcaattcatccaatattttcctcaaagatggaaatgaacggacggcgattccgatggatgggatgaatggggagaggggaggggggggggggacggacggatgaattgaaaatttaaattggaggcggagtggggggaaagagttgggccctgcggggtcggtcggtcgaattgtccttaagttgtaaatcgttggctccaaatttctttcaaaaaataaacaaaaccgtttaatcaaaattcaaatttaagctattaacaatttctttattggccgcccccattaaatgaccgcgccgatttttttaaaaatttccttctcttcctttttcatttcatcgtcatcttctttttcctcttcctcctctctctctcctcgttttctttcttcttccaccgctagttcttcctttctatcttcctcttcccccctcccccttctctctctcttcctcctctatttcttctctttttcctccccatgttcttcctttcttctcttcctcctcctcccctctctctcttttcatcctcctcttccctttctctctctcactctcttcctcctcctctctcttttcttcctcctcttccttcatttcgctctccctcttcccctccccc

SEQ ID NO: 30189 - DNA, 1446 bp, Heterodera glycines
gcggccttcttcatttttgaattgaaaaaaaattggtaattactctttctttttctccatattgaccatcatgctcatttaaaaaacaccctcttcttcttccgccgccctcctctcttgctagttttccctgcaggcggggggcgccactctgaaagaatcaagccaccctccccccccccccccccccataggttttcaccattaaatttcacctttatccctgcgttttttcacctcttttcaccgcttttttcacctcttttcaccgtttttttcatctattgaagaaaattccggccccgtgtgtacaccggtttcgcgcgatggttcgtggtggggtgggcggggttgggggttggggcaattttagggcaaaaaaatgtactaaccactactaatgacattgaaaattgatcaaaagagcattttaaaatggaagaagcaatttgggatggtcaaataattatgtaaaattagaatttaaatattctatgaaatttttattatttcttttatcttcttcaaaaaaagttttaaaaaaattttcccattttgaataattctcaaacaaaatgttgattattgttttttaaataaattattgatttttttatttctgttgataagttgtatttattttcattcattaatttacttatttaaacttggataaatgtgaaagactatccaaagcctaaacttatattagccatttaaaatttttttttaattcattaattattttctatcaaattatcatgatagggcgaggtacgtcagcaacattataaaatagatactaataggatgtagaagagcgtggtcaattttctatttatgttattggctttttggtctgggcgtcaaaatgattataaccaatcgataaaataaataaaatgctagcatatgttaatatgtagcggaatttgtaaagaaaatcagcatagatttcccattaatttcgctctcttctccctttgccgacgaccccgcccccacctcttttacagccactccccttacaacgacttaaacttttttttatgaaaattctaaaaactttttattcatcgacttttcgggtctttgattgactcgaattcgaacaaaaatcgaaaatccaaattttcgaaattagggtttttggttcaaaaccggtttaaattcacggaagcaacattttagaatatttgtgaagaaaatgaaattccgcctattattctttccaattatattttttattatcaaaattcatcaaattaaaatggaaaataaaaaattaacgcaaaaatcatttgatgaaatatttggagaaaaatgggaggaaaaagaagaagaagaaagacgaaatgagcaaaaaaaaagagaattattgtcaaatataatgaaataaaagagaaaataaagcaaaaagtgagaaaattctcaaaaaaagaatgg

SEQ ID NO: 30190 - DNA, 1441 bp, Heterodera glycines
aaaagtctgcccttttttcgatcggaaattcgtccattagtcggaaatggcattgggaaaaatccatcagatatcccatgacaatttggaagggaatggaagtgattaacggcgatcagttcatcttttgataaaacaccagatggaactaaaaaactggattttaaaacttataaaaaattataataaaataaattcgttttttataaaatcggcagctgctcatcggaaaaaattcaaacattttggcttggttatttttaccaattttcttcgaaaattcctcatttgggatcaatggaaagcgaattttgaacagtgccggaccgagaacgacacgacgattccctgccgagcgttcaatgcaattttgacggcacttcgcgtcggcccaacggagtgcctttattaatgagaaataacaaattaattagaaatattacttatttatagtaaaattacagcgttccaaattgaaatttcttcacggattttcaattcttcacgtcccaaaatttcacacaacaaattttggtcaatttgcaaaaattcctccgatttgatcaaatcgtccgcattttcatcaatgtaaaacaagcaatggtaggcaaaatggtctttgattaactcataaatataagcgggcaaagccgcttaaaattcagtaaattcactatttcaatctgtccaacccacctccaattcataaagttcggcctgaacataagccacgaaaacattgcgcagtgatgaaacaggaacttgcaaagatgcgtctaccaagcctgggatattgtactttttggctaattaaaaaaaattaataaattaaatttaaaaaaataaaattcaccggcgtaaagtactgccattgcattgtctccgttcaattcagccaattcgcccgtataaatgaagctcaacatcactttgaacgctgctgcttcaacatcggggacctctacaggataatcagtggtggctaattgaaaattaattaaggtaataaaaagaggctaattttaacttgctgaaatatgattaaaatatctaaatatagaaaaaatggtatgtgtaaaactgaacataaaatacattcctaaacgcttcaaactaagctaaaaaaaattatttaaattaatttttaagaaataaatgtgaaaaaatggaaatacataaaaatccggtccctcattaatccctaattttaataattttaatagattaatattccaaatattttttaccattttctgattttgcattctttgaatcaaagcggaacattgcctcaaatacttcggacgcgtgcttcaaaatgagtttatgtgctggcacaagcttaaaggaactaatgtagaaaaaaaataaaatacataaaataaaattaattaaaattatatagaataaaattattcattcttcaaaactcgcctctttt

SEQ ID NO: 30191 - DNA, 1018 bp, Heterodera glycines
tttgttatatttttataaaattttaattattttttccgttttacgcacatccgaccaaactgacaaattattgtagaagatattagccgcaagaaataaaaaattaaaaagttaagaaatttgtccgaatgcgggttcgggcttcgaaacatggattttttgcacaaatccgaccaatttcagtcctaaacaggtactcacgcgaaaacgtaccccacgcgaaaacggccacgcgaaaacgtacccacgcgaaaacgaccccgaccgattttgtctgacactggggcggtaggggtcaactccgtctggccaactccgtctcaacatcgttcaaaaagctataacttttatctttgttggccaaacttcacaatcatggtatcattcgaatgccctagatgtttagaagatatttataatctatttctcagtgattaatccgctctcaaaaaagttgtcagttgaaaaccgcaaaaaaggcagaattttcgaagttttttatttcaatctttttttatagttcgaaattttctgtaatttttagtaggctaatagagcctgtgaagagctttcgaatgatatcaagattgtttgattcggtcaataacttcaagagttatattgactaaagtttgctcagacggagttggccagacggagttggcccgttccgcactgggcatagcggtaggggtcaactgcgtcccgccaactccgtcccagacatgtttaagaagccataacttttttttcagttgaccaaacataacaaccttgatatcctttcaaagctctggatgtttagaagatatttctaagctattactaagcgattaagcggctcacaaaaaagttgtcgcttgaaaaccgcaaaaaaggcaaaattttctaagttttttatctccatctttttttacagtgatatcaagattgttggattcggtcaacaatttaaaaagttatgctgttcaaaacttggctgggacggagttggcgggacggagttggcccgttccgc

SEQ ID NO: 30192 - DNA, 791 bp, Heterodera glycines
cccccccccccccccgaatgaaaaaccaaaaatttttcaagcaaaaaagggcaaaatttctgaaaattttacacattttcttatcatattgcatttaattttccaaaaattctttccggcggcgcctatcggcacggcaccgccgggccccaattggatcattatttttttgaaaatttgagcccaaaatggaaaatttgttgatttttcggcgcaaaaccgataataattcctgttttttggctccggcgctgaagaatttgaacataacactggtgcaaaaaatttttgttgcaaaaaaaagctcttcgcgtgccctccccgaaatttttttctggatacgggcctgagcacaaccaattaattaatgccaattaattaattattattgattgattaataattagtgctcgaaattatatggttttacatattttttctgcgcatatgctataaagaaaggggctcaaaaatagtatttctacgataaattttttgaattggtgaaggcttttagtccatataaatccatatttttggggttttcgggaataaatcaaatatatttcgacatttttgcgtttttagtccgtattttggccatttttaggaaattttctcaagaaaaatgcaataaaagcgaaaaataaacccctaaggatcgacgttctggaaatttaaaaaaaaatacacacacaaaaaaagaggaatttttttttgaaattttggcaaatttttttaggtattttgttcgcttccgaaaaattttgctgacaacaaaatgagattat

SEQ ID NO: 30193 - DNA, 1076 bp, Heterodera glycines
ataaatgcagagcatttgatcgtatgcaaaaattcctgaaatttttgttgaaaattttaatcaaaaagtgctacaaatgcaaaactactaccaaaaaattctatattttgataaaaaaaattatgatttcattgaaaaaattcattaaatgaatataagcaattagaagcgaaggacttgaaaaattataaaaagtacatcaaatgcgtaaccaattttttctaattagccaattaacctaaacaaccacctgcaataaagccgacggcgaaatgggcgcgaaacagcggcaaaacgttcaaaactcatcactgtcagaatggcgacggacaacagcttgttgatgttttccaccgtaaaaaacacctacaaaaattgaatttttcagtaaaaaatattttggccaatgttttatgtcaaaaaaataataattttaatgctcactttgcaaccgaacagcccaaaacgccaatggccgtccagaaagtagccaagcaacattggcaccatgcacaacacctgcggagacaatgaataacgcaatgccaatttaaaaaataaataaataaattattttcgccaaattacattgacttccttttctcgattatttatccagcaaataaagtatgaactttatttgattatattaaataaacaccaaaataattttgtttttttaattgaaaattttctgaaattttaaaaacatggaaaattttcctgaattctcggatctttctattttaccgccggatatttggaccccccaaaaattatcaaaaatttaatttttcatatttttggctggcaaaaccatattcgatttggtcaaattttcatatttttttgacaagaaccctagcttcaaggtgattaaaagtatcgaaaactgtttaaatgtttagcggagacaaatttccgggattataaaatgctggggactcaatgtcttgcgtccaaaaatggcattaaatgcaaaatatatatatatatatatatatatatatatatatatatatatatatatatatatatatatatatatatatatatatatatatatatatatatat

SEQ ID NO: 30194 - DNA, 1083 bp, Heterodera glycines
caactgttgcattttcgggagtcggcactttcggtggtgttgtctcaggtagtcctcggctcaagaaatccgttagatttcggatacttttgttcaaacataagtccggtttcaaataagaaactggcctaacgcactgcaggtggtcggggcaaatggaacagtcaaatttagtccagcctttcattttttggtgaggaattttgaagaatgttgtccaaactatgacgatctgggccatatccccccccccccccctccccattggtacaaccccctgaccgttaatccgcactactttcctaacaatttatttattcacatctgggcattttcgctatgttattattagatgtttatcaacacatagtaaaacggccgggtgtccaacccagagtttaagagagatgcccattaaggaccatggaggaagtgcagaggaatggaagagggaaagagaagcgggaattggtgggtgaaaatccgggccctggactcccaacctcccgggtcctaagcccaaatccgtccgcgtccggaccaataataaatcggcggagaatgatcaatgctttattggaatagcattaaaatataatggtcgacggataatgcacaagttggccaactgatcccgagtgtagaaagtcatcagtttaaatagacaaatgtgaagggaaaaggcaaaggggcggaacaacagcagaaaagaaattggttataattgaaacagatgaaacattgtggaatttgcaatattatggcagaattttctcaatggaaaaatcatctgatagggaaaagacacagaaacgcgacatccaatctcatttatgacttgacaagacaattaagtggtgaaatagattaaaattggattactaaattttgatattcgcttttgatcaatatgtgaaattgaattaaattatctggattttttatcgacttcattttttaatcattcaatttaatagacaaaatgtcattagagccgacttcaggaagtgccgagcaagaaatgccaaatgtaacgacagaagggacaacatcaggtcgtacgaggaattacacaggtagaca

SEQ ID NO: 30195 - DNA, 1342 bp, Heterodera glycines
  unsure (1)..(1342): unsure at all n locations
aaaatggaatttatttcaatttccatccaatttttaattgttgcttcgcttttatgcgttcccgcaattatgccaatacaacaaaaacaccaacaagttgctcggaaactgaacacatcaattctaaagtcgctcaatgagcgtttatacccgcaaccgtgggtaagaagaaataaaacaaaatgccaaaatcaaaaatcaaaaaatagtggatgggaataggccgaaatatgcatttatagccccatttattactaattaacttcaggaattaaaatggcgcaaggtgaatgtgtcagaaactgaccaaaacggtttcattttgacacgtaagaatagtttttttaaactaatatgtcgaattttctgttatattttagcgtgctttcatgatttggccgaattccccgcggcaaatttgttcaacaaaaaatttcgaattcgaatgaaggccgaacttgagcaggagcagaaaacatgtaatttagtaatttaaaaaatagaaaattaaaaataataaaaaaagaaaaataattaaataaaacaaacgcttgaaagacattgtaaaattgaaaaaaaactattattgtttttccaattttaggtcaaattcgatttccgactggcgttcgtctccgttatcggtttcgcttcgttaatcccaatgtggccaatttttttattttacttattttttaaaaattctaaattaaatcacgtaaatattcaaaatatttttgtaattcatcaaatttccattttttcaaattttccatccattaattttcccgagttcgtcagactcaagtcttttttacgtatggcagctcaaaggaacgaatggtgttcttttcgcggaaaatctcaacttttgagccgggacttcccgataatatttggaagggtaattaattttaaggataattaattatttttaatttaataaatattttcaaaacatttttaggcattattcacatcccatgcaaattttctctgctgatttttaacccatttgtggccggcgaagtgttcgaatttcatattctcgacggcgttgaacatttggacaaatgctctgctggttgggactaaatgggaaagaaaatcaaaaatttaaaaaataatataataattttaagtgaaggaatgaaaatgcaattaattttaattatttctttttaatgagacgggtgtaatggttaatgaacagagtgtgtttgatgttaattgaattatgaagaactgcgcatttatttgttcattaattattttgctccgcaccanatattttttctccaaaaataaaaatggaaatgatcaaatttattttttatttttt

SEQ ID NO: 30196 - DNA, 1065 bp, Heterodera glycines
  unsure (1)..(1065): unsure at all n locations
agtgagtaccttcggtgcaggaaaattattaaggaagagagttcattatttatttgttttttgcataattaattcataaatatttttttcagaaactgctctgaaacgcaccaaattttatttgcaagttattttaggcactcagatgctttcactatcaaaaagggagatgaataaaaaatctaaaaatttttaattgctttttaaatatgcgaaaaattttaggcttaactttttttttataaactggtcagaagcgaaccagattttgcgagagcatcaaaaagacaaggaaaagcactgctatgatgctaactccagtaattctgaatttaaaattttttattaatttttaaagcttcactattttatttttttagcaaaatcaattcataaatattttttcagaaactgctctgaaacgcaccaaatgttaattaaaagttaaataaggctctctgatgctttttctatcaaaagggagatgaataaaatttttaaaaatttttaattcctttttaaacaggccaaaaagtttaggcttatattttaaaaagtttcatcgaacctagcgcactaaaatcgatataatctctccaaattttgcaggccttctccattgtaaaggactaacttaacctgaaaaaatgccaacgcttgttgtttttaaaatttttcgaaattctgactttttcattacttatttattttttgcaaaattaattcataagtattttttcagaaagtgctctgaaacgcaccaaatgttaattaaaagttaaataaggctctctgatgctttttctatcaaaagggagatgaataaatattttaaaaatttttaattcctttttaaacaggccaaaaagtttaggcttatattttaaaaagtttcatcgaacctagcgcactaaaatcgatataatctctccaaattttgcaggccttctccattgtaaaggactaacttaacctngaaaaatgcccacgcttgttgtttttaaatttttcgaaatctgacttttcattacttnattattattttgcaaaattaattcataaata

SEQ ID NO: 30197 - DNA, 1475 bp, Heterodera glycines
tcaaatcgaaaaattattatgtaatttaaaaaatggatttgttatttttttaatagattagaaattttttatttataaaaataaaattaattgtccacaagattatatccgtggtgtcgatgaagataacgtatatagcaacattttatttgtttattttaaataatgaaaattttaacttgaattaaaaaaatttaaaaattttttatttaatgaaccataaactcatacatatatgataaagattgaatgtcaatcatattaattttaagagttcggtttaaatcatattattaattcagcaaacataatcgtcgatcaacaaaatatttatcaatttatgcgtaaatgatttgttaaaaaccatatattttctttctcctgtattatttaatattataacctaccattttaactcaaatttatttttgaattctttattttcttatggtagtattccataaattttctttgcagtaatgataagcataactttaattttgtaagaactgataataataaaatggtatgctaattaagcaattgtgattgtttgattaataaataagtatattttaaatgggtttgataggatacatgaatagtgaaaatttatttagctttatgtttgtgaaaatttaattgaaaaatatttttgtgaatgtttttacacataaatgtttttttttataaattgccatgagctatcaattagagtgccacgggaccgggaatttttgccaaaaaaaaattatttatttataaaataacctttaattcattgctttcttatttaagtaaatggaaaaaatggtattaaattgtaaaacaaaaagccaaagtagtatttgaaaaaaaaagtatttcaattttctattcttgaaataaaactattattttaaatttaaaacatatattacagcttcgaatccttctgcatgagttgttataatagcattaagcaaaagtccgaaaagagtgaaataagcagcacagacagtcaacgaaaaaaggttggattttgcagattattaagctcaattcggcaggattttcatttaaaaaatgataaaatatgtatcaatttaaaaaaaaaactatgaggaatcatattttctttataggaaacccacgagcatacaaaaaaaaaattgaaaataatctaatttctgtagagggattgaaccaggggaaagaagaagggaaagactagccattatgccatttgcacacttgggcaatgttacttttaaagaatatattaatgattatcttttatttttccctttgactcccaattacttaaataatttttcactcatgacaccattcttagcagacgcttgtcctctcatctcaccgcatgccctacccaaacattgaccgggacctgtgatgtttatgacccgaaaacgacaatcggaagtaaaaattttgaagaattttcctgagcacaatttactgtgagctaccga

SEQ ID NO: 30198 - DNA, 1719 bp, Heterodera glycines
ttgtacaatatgaatcaaaactaacaaaaaaaggttatgcctttaatgtccaatggatgtaccgataagtacaacacaacaaatatttttctgttagcaaaatatctttacgcataatcacaaaacaaaaaaggcaacaataaatggagaaggcccccaccccattcatatgatgattgaaagcattgaaacaaaaccgatggcacccccttccccaattagtgccatccttcccaatcaatcaatccaatcaaacagcacgtccattgccatcatctccagcagcaaatcagtgcttccgcgcattgtcctcacttccgacctcgtcgctgtccaattggacgtcgcacaaaatgggcaaatggtcgctgggcgcaattggagacggaagtgcgtcgtatttggtgaccagccgatggtccggcattggccaaatgtgctcaatgcgcagcggagggtgggcccaaatgtaatccaagcagccgttgaagcccagggaggagccggggggacacgtgaagttggtgtagtcgggagaaccggacagaagttggcttttgaagggcgctaaacagacggaatgccaaaaaaattcaaccacgacaggggaggaagggccagggtttcggtgctaatcactcagcttggccagtcacctttaactttcagagattcagcgttagtttcgtagtttttttcgtctggtttcatttccaaagtttggtcgtcgccaccaatcaatgcaattgggcgactttcgggagtgctgaaaaagggcgggacaacaaggaaacgaaacttgcatttaaacaaaatgaaaaacactcaaaaaaacgacgaacgaactgttcgaatttgacgatgcccaattaagcattcgactcacctgttgaaatcgccggcgaatatcacttggatttggcacgacgaatcatttgaaagttgcgcacggattttgtcaatgtaccgaagacagagaagggtttgaatgattttcttaaaaagaacgacattttaagaaaacaaaacttttaccgttttcttccataaaaaaatgaaatatttaaaaaaaatttaaaaaatgagcaaaaaagacgaccatcaatatgggaaccaaagattttgaatttttttttattcaaagacaaattgaagaagcggggaatgaatggaaggctaacaaagccaaatgaaagcaccgcccactgaccacttcctcgtatttcgggtcataatacaaatgcgtgtttgcacacaacaattgttgtcccccatgtttagcacgtagtcgaaccaacttaaaaaaagtggagcaattttaatggcataatccgagatttgatcggacttcacaaccaattttatttccgttagatgatgaaaaacctgaagaattgtcggacgtgaggtgattttcttgcgcagcatttccctatgcctcaaatacgagcgaatgtccgaattttcggtgtcctcctccaaaaactgtgacaatttgaccgtaaaattgtccccgtcaccctccgccagcgaatggaaatggtcgttacgaaaagcgatgagaaggcctagcgaaaaagcaaacagtcaaaagtgaaaagggcaaactcagtgagtttcaacggcacaccttcgttcacttcgttccctttgcaattaaaaacggaagaataattctaaaaaacaaaacaaaatcaatttaaatgcacaaaaagccaa

SEQ ID NO: 30199 - DNA, 868 bp, Heterodera glycines
attagtatggtagtccaagcctattattattttttttgactagtctctgaatggggttatcccagttttagtatcctttttgaaaaacaaaaattttaataactgatacggtagcccaacatccattgccccaatgtacccttcggtttgtcaacgggagctaacaattgatgagtttgtttggtttcttttttaagcaattttccgtcattgctcaccaactgttaggcgtacagcaacggcggcacttgcatccgatgcagctgttcacgggctctctaaacctatttttattttttttctatctcttctctgaaaggagttataacaatttttcacaacagttttgcatttaacagacacattctaaaatttctaattagtatagtagtccaagcctattattattttttttgactagtctctgaatggggttatcccagttttagtatcctttttgaaaaacaaaaattttaataactgatacggtagcccaacatccattgccccaatgtacccttcggtttgtcaacgggagctaacaattgatgagtttgtttggtttcttttttaagcaattttccgtcattgctcaccaactgttaggcgtacagcaacggcggcacttgcatccgatgcagctgttcacgggctctctaaccctatttttattttttttctatctcttctctgaaaggagttataacaatttttcacaacatttttgcatttaacagacacattctaaaatttctaattagtatggtagtccaagcctattattattttttttgacttgtctctgaatggggttatcccagttttagtatcctttttgaaaaacaaaaaattttaataactgatacgg

SEQ ID NO: 30200 - DNA, 184 bp, Heterodera glycines
cggggacctctagagtccgcgctaccgggggtcggggctgcgccaccaccagtcgccaaagccgccggacggaacgattacgatcaagtggcagccggacggcacccacgcctattcactttcaggctcgtacgcgttatcgcgacagctcgccgttcaggcgttagtcgaggtaagcgctgag

SEQ ID NO: 30201 - DNA, 938 bp, Heterodera glycines
  unsure (1)..(938): unsure at all n locations
gttacggtgtacaatcaaaaaatttcggtctcccagaggaaaattatttattgacctttatgcacaattttaatcataaattaggatttaattgtacctcattactaggacgctaaggttctaaaaccaacaaaatcacttttctagtgtcgaattgccacaaatgccggcgaaatatttcgaaatgtttgcgtaaggctagaaaaacaaatctatttgattctttagtggttaaaatattacgagtttttactccaagacgttagagggcaatttgaataacgaactcataatctaattgcgaatgctatctaattaaaggtagcgattagcagcagaaaaggttcgtaaatactgataggctaattttgccaaggattatcgtcctattttggacattggacttaaaagggttacggtgtacaatcaaaaaatttcggtctcccataggaaaattatttattgacctttatgcacaattttaatcataaattaggatttaattgtacctcattactcggacgctaaggttctaaaaccaacaaaatcacttttctagtgtcgaatttccacaaatgcaggcgaaatatttcgaaatggttgcttaaggctagaaaaacaaatctatttgattctttagtggttaaaatattgcgagtttttactccaagacgttagagggcaatttgaataacgaactcataatctaattgcgaatgctatctaattaaaggtagcgattagcagcagaaaaggttcgtaaatactgataggctaattttgccaaggattatcgtcctattttggccattggactttaaagggttacggagtacaatcaaaaaatttcggtctcccacatgagaattatttattagactntatgccgaattttaatcataaattagggattaattgtacctcattactcggacgct

SEQ ID NO: 30202 - DNA, 1193 bp, Heterodera glycines
ccccatcaaccccaatacaactgacgatcgcgaagcgacgcacgcacgcctctcctatgcatctacccgtctgccaatgacctattttctgataaaaaattgcttaacttccatagaagggctgaatgaagactaaaaagtgattcaaaacaaatttacaaatatgaaaaaaacaatcattgtattcaaatttgaatgataagtaaaaatagccaaataaaaatgaaaaatgtctgaccaaattaaaattgaaaaagcgaccaaaaatttaaaacattttcacaactttcggtttcaaaactaattaatcaatatttagttggtgaaaaaaaacattaattaatgattacaaaattcttaggcaaatatgaaacgaaacattcaatgccggcctaaaaaagacacgtggccagcgatttcgcaattgtctcgagggtgaatgaaaaggggtgccactccggtgccggtacggtataaaaaaaggcacgtgaccaacgatttcgcaattgtctagggggtgaatgaaaaggggtgccactccggtgccggtataaaaaataagcacgtgaccgctttttttttggttaacagaaatggtcattcattcggtgccaacctaaaaataggcacgtgactgctatttcgaaatatctggtcacatgacccggggacgcattcggtgccagcctaaaaaataagcacgtgaccgcgatttcgtaatgaccacccaaaatttaagtgggcgtttctttcggtgccagcctaaaaaataagcacgtgaccgcgatttcgtaatctttggtcacatgaccacccaaaatagggaggtgtgtcatagggtaccattataaaaactcgagatttcgtaataactggtcacatgaccagtgcagtgtaaattggtgcaaatataaaaaatcgtctcgtgttttaatcacgtgactatgacccgccctatataaagcgatttgagccagaccgaaagttctttcaaaatttcattttagccaagccccaatgttttttcaaaattttcccttatctaattgcaatcctaatgaatttggaggccgtcgttattaacgacaaaaaattcaaaaatttgaatgcgataggcaacaaaattgtggtccctcttcaaggctactttttatgtaagtttttttttacgcgcactgccaatggacgcctgc

SEQ ID NO: 30203 - DNA, 1046 bp, Heterodera glycines
acacttccgacaaagaacaattgcgaaaggggaaacccgttggagcaggaacaacggtacttgaccagccaaattcgcaacatggaggacatctgccgcagaaaaagaaagcgaaacaacggcataaaagaaaaaaaagaggcaaaagaatggaaagaattttgggtacttttggctcaagacttaactcaatgttttttcctaattttccaaaaaaatcatttttttcaaaaattttctggagaatttatgtagtataaattttacattttcttaaaaattggtaggtttgttcaaaatatgtaaggaaaaaaatggaaaatttcaattctttagttggtttcactaaaaatactgaaataaacttcaattcgggaaatttaggtcgcatatttttcaattttgtgtgaaccggttatgcggaaaatgaaaagcgctacgatatatgtgtacgatacggtagtgcttaattgtggtattaagcgatggtttagaaaaaaacattttcgctgatgagctgtgcaaccaaaaccctccattaaagcgtcgattgctgaaccattggacgggttatagcaaaggcggggggggggggggggaaggaagcgggtgagcagagcacgggcatcgcatccatcaagggaatgcgcagcttcatcctaatccggttcaagcccctaattgttgaggcgcataaaagggttggcggagaagccgtccttccagtccgtcctttgcttttgcttcgccgccggcggtgtctctccgccgatttttgcctccctttgcatttctccccattaacagtccgctgattactcccctttatcgcagaggcgagaaggccatcaccaccgcattgtccttccggctcgatcttcgtccgcctttcccactgcgactgactctccgcccacagaccgtccgtcgtctgtccgtcgcttagccaatggactcccagcagtgaagcatgaaagagacggatgagcaccgtcagatgcgccgaaaggcttcgttgcggtcgttgtttcgacggtgcgaaaaag

SEQ ID NO: 30204 - DNA, 2331 bp, Heterodera glycines
  unsure (1)..(2331): unsure at all n locations
ataaaaagtgtattatattttaaaaaatgaaaaatataacacatcgattttttatctattttgaataaaaacaattccttaattaccgtaaatgcaatatttgaatgcccactttctaatctctgttgtacctcttttaatctctgttgtacctcttctaatcactgctgtacctcttctcatcattgttgtacctcttctaatcagatttgtaccccttctaataatgctgtacctcttttaatcactgttgtacctcttttaatcactgttgtacctcttctaatcactgctgtacctcttctcatcattgttgtacctcttctaatcactgttgcacctcttttgatcactgttgtacctcttctaatcactgttgcacctcttttgatcactgttgtacctcttctaatcactgttgcacctcttttgatcactgttgtacctcttctaatcactgctgtacctcttctcatcattgttgtacctcttctaatcactgttgcacctcttttgatcactgttgtacctcttctaatcactgctgtacctcttctcatcattgttgtacctcttctaatcactgttgtacctcttttaatcactgttgtacctcttctaatcactgctgtacctcttctcatcattgttgtacctcttctaatcactgttgcacctcttttgatcactgttgtacctcttctaatcactgttgcacctcttttgatcactgttgtacctcttctaatcactgttgcacctcttttaatcactgttgtacctcttctaatcactgttgtacctcttctaatcactgttgtacctcttctaatcactgttgcactcttctaatcgctgttgtacctcttctagggcgcgaagcgcccgcccaagcccaataaaatttgaaaacgggcgcgaagcgcccgtctgagtccaacaaaatttgaaaaacggcgcgaagcgcccgtatggccaaaacaaatttaaaaaacgggtgcgaagagcccgtaagaatccgactacattattatgggaaaggaataaccctgtacctctatctgatccatctgaatagctacagaaggagcatttactcgacaacccttgaatattgcactttgacgcactgattgatttgatattgaaaagcaaatcatttagagaaaaactcacagaaggtaaaaattaaattgccataattaaaaaatatataattttttattgtcaaaaaggctttgataatgatgaaaatacaaaacagcgctttttggaatttgtcctgccaaattatcaggaagcggtgctgaaactgctcaattctggtgattttgctgaatttgagaatgaaattgcattgaaaatggagcaggaaaatggagaaataattgaaaaaatggacaaagaaaaagcaaaagccgatcagaaaatgaaagaactgatcggggaagaaaaaaggacaaaaaagaaaaacaaaagagcaatgaaaaggaaacaaaggcaaagatcagcagctgatcagaaagagggagagagtgagcagaaggaggagaaaggaaaagaaagaaatagggaagagagcgagcagaaggaggagaaaggaaaagaaagaaatagggaagagagcgaaaggatcagtgaagagagtgagcaggaggaggagaaaagaaaagaaaggacagaagaagagagtcaatggaataccaaagagagtgagcagaaggaggagaaaggaaaagaaagaaagggagaggaaagtggacaggattttgctagagaggaaaacgacgtggaaatagtgaatgaccaaaatggtggtgagagaaagcaagcaaagaaaaattgtgaaaacaattcaatggagttaagagaaaaccaagagagaaaaattagaaaagaaaagaaaacgcaaaaaagagagagtgcgcaaaaagagttgaaacgaaaaaaagacaacgatggaaaaagtgagagaatcagtgaagaaaaaattgaagaaaaaggcagaaaaaacaacaatgagagaaaggagagcagagaaaaaaatgaaggagagagtacgcaaaatgagaggaaaagaaataaggaaaaaagaaaacagaaattgaaagcattggaggaaaataatgaaataaacataaatagttggaataaaacagcaacagattcagtgacaacagaagaaagtcaaaaacagggacaagaatatggagaagagacaatggaaaagggaggaaaagcatncgcagagaaagaaagggaaaatgccatcgaatgatgggagcgaaattggcaaaagtcaatttgngaagtaagtaattacaattaaaa

SEQ ID NO: 30205 - DNA, 1172 bp, Heterodera glycines
gggagaggaagcgaatggcgcgggctcggcttggcgtgatgcttgcgtagacggaagagttcgccaccgctggctgctgtttctgctgctggtaccccaccccttgggcgtcgttgtgccctccccacgcccaccgcagctgcccccccccccaggggtttgcctttctctcccctcttcccccaacttctcccccctcgcccccccccccccaattccgccccgagcactgctgctccgctcttctgctgctgaaacaaccaaagaacggtgaaccgggggttgggatgggtgacgacggaaggggaggaaaggacgcccaccacccatatttggggtgggggacagcagcagcagcgggaggggggaatatggaaagggtataataaatataatatggagatgatgatgatgatgatgaagaggaagggaacgtggaaacaattatgggggaaggggcgaggaaggttgaagagaggagaggagagatgctttggtgatgattataattaataatgatgataataggaaaagagagagagaacggggcaaaaaggaagaggaaagcggagagaaaggagaaacaaagggggaaaaaggaagaagagggtggagagaaaggagaaacaaaaggggaaatggaagtgataataaaatgagggaaagtggaagtgataaatgtgataatggaaaagcagagagagagagagagggacaatgataaaggaagaatgggagaagcagacggggggggggagaaacaaagcgatgaaaatgtaatgataattataacggagaaaaggaaggttaaaatgataagagagagagagagagagagagagagaaaagaaagagagagagagcaagatagtgatagcataaagagagtaaagatagagtgataaaagaaggggaaatgccgaaaaacttgaaagttatttgaaaaacaaagtgtttggatggagtacggcatttgaatcaaaaagtaagcaaaaaattaaaaattgagaacggcactttgcacaaatgcaactttaaaagtcgtaaccgtgaaaataattttggccatgaatcaccaccacactatcattcaacaatgtctagcatagcaaagaatctcccccctccccctctttttatgctttgtgtttgtgatgagtgtgacgcgttcg

SEQ ID NO: 30206 - DNA, 1142 bp, Heterodera glycines
  unsure (1)..(1142): unsure at all n locations
gggggtatcgcattacaaagcatcaaaaaagcaaaaagggaaaagccgaccaaaaaaaggtaaaatattcaaaacagcgaccgactctcattaaatgataaaaaagcaaaataaaagcgaaaaaaagtgtgaaaagtatttgataaagtaagcacaaatgcataatttgaaattgttgatcactcggaattaacacgaaaaaactcatattatttactaaaatagagccaccccccaaataaagccctaaagcgcccttatgaaggaaacgggggatttattttatagaacacgtcaaataacaaaacaattcattagcatgaaaaattcacattcaacaatttaaccattgacaaaaattgtcaattaccgtatatgctctaattatagcccagtctctattaatcccgcagtctccaattatccccagtctacgaggtgttttgaaaaataatccctctatcataatcccccagtctctaattntccccccttttctgnggnggttgnnnnntnntcccccctgggctntnnttngngcntntncggtnttntttgtcccttntttctcttggccnntcccncgntccgctgnctttttccctttgctctgttcctccgnttttctgccggcnntggcccnttcgccccctttgccccctttcgcttcactttttctttttcattttcttttttccgtctttgagtgatgtttcattttgagattgtttctcaataaatgtttatcattttctctttttgtccactgtctttggctttccgttctgattggattgataagggaaaatgcctaattgccttggtagttcagtggtaatgaactgccatatttgggcggatgcgtgagttcgattcccacccgtgtccttacttttttgtttttgaacttaaaactgtgtcagtgtccttattaaattgggagaatgtcagcttcttccactttcactcttttcctgttcaatggaattggaagtatttattttttaaatcatagggacagacaaagcaaatgccaacgaatgatcagtcacctgatcagtcatcagtcattctttctttctttcccatttctcttttatagtgcccccttttccgtgtgtttatattccccgngggattct

SEQ ID NO: 30207 - DNA, 949 bp, Heterodera glycines
cggggcagtccccccgagccgatgcgcccagatttatggggagaccgaatccttccggaatagcttccctatagcctgtactttaattctgcgttggatttttgctccccataattgtttgagtaccccaaacggacacttgaaaaaatcgatttttttgttttcggggcagtccccccgagccgatgcgcccagatttatggggagaccgaatccttccggaatagcttccctatagcctgtactttaattctgcgttggatttttgctccccataattgtttgagtaccccaaacggacacttgaaaaaatcgatttttttgttttcggggcagtccccccgaaccgatgcgcccagatttatggggagaccgaatccttccggaatagcttccctatagcctgtactttaattctgcgttggatttttgctccccataattgtttgagtaccccaaacggacacttgaaaaaatcgatttttttgttttcggggcagtccccccgaaccgatgcgcccagatttatggggagaccgaatccttcgggaatagcttccctatagcctgtactttaattctgcgttggatttttgctccccataaatgtttgagtaccccaaacggacacttgaaaaaatcgatttttttgtttcataaatatttttttcagaaagtgctctaaagcgcaccaaattttatttacaacttaattttagcactctgatgctttagtatcaaaaaggaagatggagaaaaaattttttaaaaaatttttccttatattttgggtatatcgttttgcttttggtggggtgcttggaacagtggaatcatgcgcacccgtccgatctggcaagtaagcaacgattgctgactagccaaaaggttcggtgccgtgatgaaacggaccagcactgcttacccccgcgcacccggcacggtcccc

SEQ ID NO: 30208 - DNA, 1167 bp, Heterodera glycines
ttttggattcggaaccaaaggggggtgcacatgttttttgagtggaaaaattttttcacccaaaatcttccaaaaatatgtctttaggggttatttgggccgctgatcacgaatacgtgatcagattttacttttgacatcgttaagccctcggaatccccgtttgattggggattctgaggcatcatttgaggggggaggggggggcaagttcgaagccgggcggtgtacattatttttctgtgcattttttgggttaattttcattacttttaataaatttaaatgtttggttttattaataataaatttttttagtttaattaaattattttttgatgaataatgattttcatttaaattatttattatatttaattaaagaatttcagctattattttaaaatttaattgtaaaatttttttcatttcaatttaaataactattcaattattatacatttcataatttgtttttcattaataaaaagtgtattatattttaaaaaatgaaaaatataacaaatcgattttttatctattttgattaaaaacaattccttaattaccataaatgctctatttgaatgcccactttctaatcactgttgtacctcttaatcacttttgtacctcttctaatcactggaagcggcctaaaatcgcggataattttttttaattcccaattttggggggggggcggcagtttcgaatccggccagtgtaaattattttctatgactttttacgttattttcaatgtttttaactaatctgaagatttgttgtagattatttttaaaaaattttttacattttgtacctcttttaatcacagttgtacctcttctaatcacttttgtacctcttttatcacttttgtacctcttttatcacttttgtacctcttcatcaaatttgtacctcttcaatctctgttgcacctcttctaatcactgttgcacctcttttatcacttttgtacctcttttatcacttttgtacctcttttatcacttttgtacctcttcatcaaatttgtacctcttcaatctctgttgcacctcttctaatcactgttgcacctcttctaatcacttttgtacctcttttatcacttttgtacctcttttatcacttttgtacctcttttatcacttttgt

SEQ ID NO: 30209 - DNA, 1075 bp, Heterodera glycines
tatgagatcgaattgaaaaatagtcaaatgagtcaacaaaaaaagaatgattggggtttgtatgtgttgaaaaattttgtatttttttttgaatttggggttgcttacacaccagggttgttccgggttacccgaaacccgatacccgaaacccggcctttttctcgacccgaaacccgacccgatgatttttcggccgacccgacccgatatttttctcgacccggaacaaccctgttacacacaaaccccgaaaaccttgaaatcagtgaaaattttggttcatctgtcgtccaagttcatgcaattgggttgaaatggtgttggcattaggcggatggttggtcattccgttgcgtttggcctgtctttgttcgtattccgcctggagttgttcacggctgagagacgggcgaatcagcaaacggccccagtttggcagagaacggaggcgaatgcgctcctttttccagccgccgagggcgatgtgctgatggaccgacgcgggcagcaccactttgagcaggcgtggagaggcacggtgaacatagggtcggcccattcggtaggtcgtcgttggcaccgccacaacacccaattcgtccaaaatccccgagacaaccttttgatcctcgcgaacacgctccgaaggacgggttgaagcgttctccggaagaccgactatgaccaaggaacggcggcgttcctgttcctcggcactgttgttgtttgcgttgttgttcagaccatcgatgacgtgttggcacgtgtggagggtagtaagcaaaacgccaaactgaagtttgacggcctgtgaaatgtcgtcctgaacaagcagtgcgttgactgcagcagaaagtgagtcgatttgtccagccaaagcgtccgcggaaatacgtgtggttttggaagaaggcggagttgctgttgagtccattgggcgtttcatgattcgatgtagaacaaaaattaggaagaaatgaaatgcaaattgtgtcaaatcttaattggacaattacttgaataggcacaaaatgccataaaaatgaccaaaataggcttagaatcaccattt

SEQ ID NO: 30210 - DNA, 1069 bp, Heterodera glycines
ccctatcatgctcgagagcatttgtatgtgtactatatttatcaaaaaaagagatagccatttttctgggataacctctaaatataaaaatcctctgtgaaataaaatggcgattgtgcacagccctccgtctctacgcaagcgcttttgtgaggtataaaatttctcaaaaaaagagatagacatttttctgggatagagtataaatttaaaaattccctcaaaaataaaaggtctattgcgcaccgccctccctatcatgctcgagagcatttgtatgtgtataaaatttatcaaaaaaagagatagccatttttctgggataacctctaaatataaaaatcctctgtgaaataaaatggcgattgtgcacagccctccgtctcatacgcaagcgcttttgtgaggtataaaatttctcaaaaaaagagatagccatttttctgggatagagtataaatttaaaaattccctcaaaaataaaaggtctattgcgcaccgccctccctatcatgctcgagagcatttgtatgtgtataaaatttatcaaaaaaagagatagccatttttctgggatagagtataaatttaaaaattccctcaaaaataaaaggtctattgcgcaccgccctccctatcatgctcgagagcatttgtatgtgtataaaatttatcaaaaaaagagatagccatttttctgggataacctctaaatataaaaatcctctgtgaaataaaatggcgattgtgcacagccctccgtctctacgcaagcgcttttgtgaggtataaaatttctcaaaaaaagagatagacatttttctgggatagagtataaatttaaaaattccctcaaaaataaaaggtctattgcgcaccgccctccctatcatgctcgagagcatttgtatgtgtataaaatttatcaaaaaaagagatagccatttttctgggataacctctaaatataaaaatcctctgtgaaataaaatggcgattgtgcacagccctccgtctctacgcaagcgcttttgtgaggtataaaatttctcaaaaaaagagatagaca

SEQ ID NO: 30211 - DNA, 1159 bp, Heterodera glycines
  unsure (1)..(1159): unsure at all n locations
gaggaaatgaaatggaaacanttgtcgcaatattacacnnatcganaacatcaataaaattacnnaacaaattacattttttaagtcataataagtccattaagatgaagatgcaaagttgaaaagtcgtcagtttgacattgaagcgatttcaacaaattcgacgacgactcgcgaagatgccatttccgaagaacaaaaagccgaatcgcagcccctagtggctaagaacgcttcgaaaaacgatggacagaaagaattacggtccgagcatttgcttctcttggacatcgattttgcacaaacaacggcacaaagtccgaatgaggagggggaggacaaaatgaaggactaaaagcacaaaagcaaatgcttaccaacaaaaatatagaatttttaacttccagttttccattgctaatgtgatcttacaaattattgcagttaaatcatttgtgttttttctcttctgtaaaaatatttaccatattttttcgattaccatactccgttcgattagaagagaacttgttcaatgcaattttattttaaaaatgacattacctcggaaatatatttttaaactttttggtttcatagctagcgtacagtcaacagaacagcagcagtgtcacactgcataagaccttcgaaaaaacactcattgtcaggtgggtacattttaatgtcactacaaaaaaaaggaaggattgggaaaaacataagatcggatattaatgcgcaattgtatttttgtgtgttggcatcgcaaaaacggcacagtcaaagctggccattgcaattttcctcaaaaatttggcagcaaagcgtaggcacatgtgggacagaagcgagcaatttgcatgcctaaattccatttatggaatccattttcatggcataattgaaaaattggttatcaaaaaagttaattattgcgaatgtttgacaatgtccgtgcgaagttcgcttttgctacctttccgagttgttgctccatacgttcgtcatgtttgtcagcccattcgcgtactctgcccaaataattgtccatgtaactcttgcaaatgggcaagtcgggcctcaatgtttcgcatttgccttgggaagttgggagaagagtgttcactgatttcaatttgcttctcactctttgcca

SEQ ID NO: 30212 - DNA, 2066 bp, Heterodera glycines
  unsure (1)..(2066): unsure at all n locations
ttaaaataatttttttgggtggagcccagattctccccttttaacgaatttaaatgaccatttcttgttttgtttttctcttttaaccgaatctcttcccacaaacactcacttggtaccccgccttctcccgatggtccaaatatttcaaagtgctttcgatgttcttcctgttgattttgtacgcaataccccagcaacttccactgacatcgggaaacaaactcacgacacggccaggctgaaacaaatttatctgaatgatatttgatgaagtgttacgttgtcgggggtaccccgatggtcaggcgaaagatgccaaaatctgcgaacgtatccaatcacaacgccttgaattgcttcgtcgtaaaggaaatttgggttccagagaagacttccatagccaaatatatacattatgaaaagagaaagctaaaataaatgtaaatggaaattaaaatcaaaaataaagcagcattaaaccgcttttcgttcaatacgagtgaaagataaaagcaataaaaataaaataaaaacataaataacgaaaagaagttaaattcgaagaaaaagcgtttaagaagacgcattttcggaggagtatgaatagacagcgtatttgtttttgatgtcagaggaaattatcgatgctatcatttgaacggaggccattgcgccgtatcccttgtccccacacatcatttccttctcaattggtgggatctccttaattaaaaaaaataaaagttcaatgaaaccacaaaattattagacaaatttaaatctcaaagaaaaaataaactaaaaatattttttttaagttaaggaaaaaactgtttttagtaacctcttataaaattcaaaaataccctgtacaggagcagttccttcagcgttttcaagtgttgatatgtcaatgggttctcccacctgtaatttgttaataaacattggcacttatttaaaaattgaactctctgaaattattaaaaaccaaaggggagaggcccttttgtttgtaattttttatattaataagtcgtgaaagcgtgtttcataaaggttttcgaggtaggatcacgaatcggattaactatttccgaatccctaacccgtacaaagtttctcaagtctcacatcgctgtgttcatcgcaggagcaaaataaagcggttttcgctgatcccacgctcgtacgacactcgtcaccaaattgtcacaaattccgtttgctatcttagcgagagaattcgcatccaaaggtgcgaccagcatcgaatcagcccattttcggagttctttataaagttgtatttgttgagattcgatcataaaattgactttaccaatatggagcactgggtctccgcgcttcttccacatattccattcatctctgtcatcgtaaacaatttcttgtgtgtcagccgcgtcaaagaagttcagagcactttgggttgcaaccacctgaactgtggaaaattagacggaataaaagaaagtgtcgactttaattgctaaacggttctcgggtgattgcttgtacaattcggcgatcagttcattcacttttattgaggccacggagcccgtcaccgctaataaaacatggtattttccaccaaggcgatttatgcgatgggtcgcgtcaaagggagccctgtgcgaaacagccgtggttttggcactctgaatttattttaggaatgctaagtaaacaaatcaaaagcacactttcaatgtaaacaggcaaaaattctttgttacctctgaacttccaccattcgcgctgttatttttttctgctgacgtcgttaaatcctttttgtcattttcccgtggccgcttctgtgggatttcttcactgtctgtgtttgatagtgtggccatttgagcaaaagaaactaaggaacaaaaataaaattataagattgtaaataaaataaatgaatgagttagatggtgatgngtagggcatccaaaaatatgcacataaaatcgcaaaatatgcgcataaaatatgcaccaaaaatggcaaaatatgcacataaaaagtgaaaatatgca

SEQ ID NO: 30213 - DNA, 1146 bp, Heterodera glycines
cattttcacagttacatcgatcactccgtcatcgcttctcttcgttcaaatcaccaaattttcgacaaaagaggcaccaatttatatttgtggctttcatcaccacataacacggatggccagcagctgatttgggacatttttgttcgtgaaatttggccaattttttctgaaaacattcgccactttgacttttcccgtggtgatcatttggacaatttgcttcgtcaaatttcgccgacaattctcactgatctcaaccaattgacttcaatctattcctttgatttgttgcccgctgcgtttgatgatgattttgatgtgccaaattcaacaatttctgctggccaagcattgtccaaatggttgcactctccgagaaaagatggccaacccaagcgattgcgttgctataattacaacgcacaagcgaacactgattggatcaacaatttcaaggaggtgtggtccgggggggggacaaaatgtcgccgcaaatttttattttaattaaaaaaattatttaaaatttagttacctagcctaaatcaaaaaaaaatagataaattcgaaaaaaattattaagaaaattcaaggaaatgtaaaaaagtcgttttttatttttctggaaattcagaaaattagtttttatacgagacggcgacgttttaggggcgtacccggtctgtggatggcattctgagttattttctgaaacccgaccccaaaaaagttttaaatcgaaaatttttgaaaaattccgaattttatcaaaaatttcggaaatcggaattcagtgccatccctggtgtgttccaacatttttggcaaatcactgatttttgttttccaaattgtttagcattttcttcgtgccaatgccatttcttccgtcagttacgaaattcatttttatgttcatgtgccgtcaatgccaatggtgccattcgaattggtgaacgaatggacaaaggaaaagctgacattggccaaaacaaatgaaaatgaattggacgaaagttggataatgaaacgatgcaaatttggggagacggcggcggttcattgggaagacggaaattggaacaacaattgtaacaatgtatccattcgtctttttagttgctcccaattgcattgggtgag

SEQ ID NO: 30214 - DNA, 926 bp, Heterodera glycines
aaatttgaataaaatttgttaacagattttcaccaaaaaaattaccaaattttgcgattttgggccatttttctaagaaaaaataggagttttggggcgcggcggtgccgataggcgccgccgggggaaaattggaaattttgatcatttataaagaagttttcactgaaaattagcccatttataggtaaaattttgaaaaatttcaggggaatttaatccaattcttaggggtgtaaaagtcgcgtttcgcgccaaaatgcgaaacgcgaaacgcgaaagcaaaagtgccaaaaaagcgaaatatgcgaaagcgaaacgcgaaagcgaaagcaaaagcccatccctggtatagagttaagggatgtgtacttttttttattaatgtttgttttattgccttattgtaattaattattctcttatatagtttatttttcgacgatgctatattaatacctattcttcatattaacaatcaataatttgttttcattttgccttttatataaaattattttaattaaattttatttattaagcctcacagaactaaagggacgatctttttagatttaaatttatgtgattatagtaataatatatcaaatttgtagtttatctttcaaattagcctttaagttttatttttaactgcgttttttctctttaatctggttgcaggcagttggatgatattgaattgggcattattagaatacgtgtcagtattttattttattaataatatttaattttcacttttttctatggaaattattttctcgaatttttgaattatgcattttatttccataattattctcgccatcagatagccttttcgcaattgttttcaggaaaaaaattcgaaactaaaaatctaaaaaggaatatttattaattatgtattcagatttatatta

SEQ ID NO: 30215 - DNA, 1133 bp, Heterodera glycines
tatatatatatattgtataaatccaaaaaaatagaaacatgcatgacttttgaacaaaatcttattaaaaattgtctacaaaaaattgggtaaacaaaataagctaattgtaagacataaaaaattcatcccttttccgatttttattttttcatgtttcatttctaccttttgaagcttttgttttctcttgagagatgactccattttcaccccccccccccttgggagggggcggcggctttattggaggggggttataatggaggcggctggcggctatattaggggaaatacggtctaatcctcacggcacattttgcttcaggcggttcttctttttttcgctttttatatttttaaataacttataaaatcatttcaataaacaattaataattattttactctgacaattaattccttttttcctctctttctcatgccgtccgtcggctggcacattgtctctcgtcataatttttttttcttttgtcttttcgctgctgctggtgacaatgtccccccccccccccattaccgtgcttatcctgtattctccccccttgtgcggaggcgccgcgttttcattccatataattatattgccacggccgcccaacccccccacccccccaccatcaaactggggtatttggtcgtaaattttatgatggtaggcgagaggggttcaaacattggagacattgttcaaaattttaggataacgggcggggggggggtagaaaaacggcggcatgcggaaaatgttggagaaaattgtaggggggggggggtagaaaacggggcacgggggaaatggtggaaaattataggaggggggggggtagaaaaaagcggggccaaggcgactaattatgtgtaaaaaatgcttttaacgccaagagtaaatggcattaagaaaacgtaatgtgtgtggtatatagacaggtgcttggagtgctttaattgatggtggtggaaaaattgaaaaaaaaaacaattaacgaagctaaaagagaggcggtgccattggtgtagggggggggggggggacaattaagtgtgacgcactactaatttaatgctttaagaaaactgattagaagggacgatcaaattttttttatttt

SEQ ID NO: 30216 - DNA, 1699 bp, Heterodera glycines
  unsure (1)..(1699): unsure at all n locations
aaactttactggaaattttataaaaaaggagcgtgacnnatgagattaaantagcaaaaagagacaaaagataaggcatattttatattaacttgataaaaagaatttttccattaaatgtaaatttaatcagacataaaaacttttagaaatttaatgttgagaaaaaatataaaataaaatcaatttaaattcaatcattacgaagataatttatatatattatcctaattttttattaagacaaactaacttaaaatcacaaaaatttgaaaatgtaatgttgagcattttatttaatcaattttttaggaaaatttttttaaaataattttaaaaaacattaaagaatagtaaattatataatttgaaataattatttattttttaaatacttgagagatttttttcagaaaaatttacaaattttatttttcttacaatttttttaagtaaaatgtattgttgctaattttgattttggctttttaataatgcatatggaagatttattgccggaattcagtatataaagatataattattaaaattttttacgtgaaaatttaatccatttttcgatttttctgggtttacatattctgtccaattgatttccgtaatttccgtactctccattcattcactacaagtagcttatatttttgttttttattagtgtaatgtatgaatattatgaaagcattttttattttcttttttttttaaatttttattaggcaatttgtgaaaattgtcggtgcttttggcagcgccaggggcgcagcggcacgccctggtaaaagtaagtgttattttttattcctttaatttccttttttcatattaaacgaaaacagtaggttcttcctttaaattttattaatattttaagtcatcattagggcgaatattattaggctctaaaaactcacaaaaggacacaaaaaagggtataattacaaaatcatgttttttgtgcgtttttggccactgggtgctcagaaaaaataaattaaaattaaattacaaaagttttcaaattaacgtatagataaaaaagcaggcgcaaaatcatttcattaaaaaattaataacagttaaagaaaaaatattttaattaaaaaatattaataatacgtaaacaaatagactccaccatttaacaaatcaatgtgagtacctatgtaacatgagcatgagatgaaattaaaatagaaaaaaatggtaagaaaaacaaacaaataacaaatataaacaaataataaaagccctttcacaaattatatatccagcaaagaataacatgagattaaaagagaaaaacataaataaaaatatataataaagactaatcgagaaaacaaagagctaccgaaatataaagattttaaaatttattcattttcactgaagttatgataatttcctatcaaaatttttagtaataattatagaaaattttcagatttttaaattaaaatctgctaaatataaattgttttaaattttaacttaatttttttttttgtgttagaagaaaacatttttggtaaatttattttttttttattatttcattttttaaaaataaatgaataaataatttaatttattattatccgttactgatattttgatttcaattgattcaagtaatatatgtcctatcgaaatcatgctgatatgaattacaaaa

SEQ ID NO: 30217 - DNA, 1431 bp, Heterodera glycines
  unsure (1)..(1431): unsure at all n locations
ttataccatgttttctcgaaaaaaaaaatttttggggggtataanctggaaaagtatctaaatttctaatacaatttcnccgcattttcagttggctgtgcaacgacatttggatggacattttgccgctttttcgttgtcctcaactcgnccgcaaattggcacttctttcgccacgtttcaacgcgttggtcgacaaacatttcgacagcaaaaacgaattgatcatttcgagaccaatcataattgacaagatgaaaacaatgccgaaactatgtgtagttaagaggggcattggaatttttaagcaatttccaataccagaccatccgatgcacaacaaactccgttttagcaaccttcagattaagcaaatcaaatcgctgacctacaaaatgtccaggccacgaaatgtcgacaagagtaaaaacccacgaaatgtccagaaaaaaacaaaattaaattttataaaaatctggaaaataagttcaccgactccgaaaaccctaaaatagacttacagacttatttttcggatttttataaaatttaatttcgttttttctggacatttcgtggcttggacacttactttgtgggggcgccaatcaaattcaaagaataaagcattcatcattttttaggtacattgaacattctgtcatcacatttctctgtgccaaccagcaaatttttgacaacgccatcaatttggatttgcacgtgtcgccttcctcctatacccccaagaatgtgcacccaatttggagtgtttttgcccgcaaaatttggcccatttttgcgccaaacattcgccatttgaactttgctgatggtcgtcaacttgaaaatttgcttcgagcctcttcgccgacaattctttgcgacctcaatatcaaatcaatcaattccaattatttgttgcccgcggtgattggtgatgatgcaaaagggccaaatgcaaaggctggccaagcattgaccaaatggttgcacactccgagaagcgatggccagccaaagcaattgagttgtcgtggtgatatgtcaagagccattaaattggtcaacaattttaaaaaggtgtggccaggggcgtatctagaaaaaattttcggggggggggggtggacccgaccgatctaaaggccctttttttgccgctgctggataaaacggtattttttacgttctttccaaaaaaaaagacccgattttggctgttttaaggcaaagtccggcggtgccgataggcgccgccgggaaaatttttttaatttgagaccaatttgcatacattaattagtagggggagtcgacccaacttcatactccaaaaaacttttggagaccggggggggggggagtccggcggttccgataggcgccgccggaaaaatttttgaaaattggagtacaatttgtaaaaaa

SEQ ID NO: 30218 - DNA, 1364 bp, Heterodera glycines
tcccatttgttagtccaccaaaagtgccacctcatcgtcagaatgtgttcgagcgctgtgcgagcgtatttcgatggtccgattctccgggtcctcctcctcgagtgggtttcgcgtgacaaatgccaatttgagtccgaaacttcgcaacgcttctcccgcactttgtccgttcaccgtcggcccagccgacgacgcaccgacccgactctcctcccaactcagccggtgcagcatattctcccgacggaggtgcaaatcgcgtcgatattgcactggaaagagaaaagaattcaaaaatgttgaagataaatgaatgaatcaattgaatgccttgcaaattgaccattttcccggcttgtttaagtgcacggacagctgcaaaagagcaaattaattaaaatttggcatgaaaatcacttccaaatgcaaaacaaaccctcgtcatgccgcgcattgactaatgactcgccattgacctcaaaaatgatggaacgcttcttcccttttgttgcgaaatcttacggctaaaatgatatcgcccacaaaaagtgcgcccgttttatccgcagacattccgggaaagattttactgaaaggcaaatattttatgttcttaagttggagagacctaaaattccgaaattgcatcaatttgaaaaaatctaaactttcaaatagggttgagcggtaccggtaccggtaccgaccggtaattaccggtttttttggtaccggtaccggttttttcaaaaatcaaagtatcggtaccggtttgtctagtaccggtaccgccggtaaaaatttgcactggtaagaatgggggtctgggtgagaaaagagtagggaatggtgaagaatgagaaattttttgagaaaaaattaaattttgtttcatttagtcatgggattacacacatgcacatgtggtgcagtggttaaactttctacctttcataatttttcgcctgggttcgtttccccacttggatagaatattcctcacattttctttaccattattttaattaaaattttaattttaaaaaatattccaacttttttctttcatgttaagcatcctaaaaacccaaaacttaatcaattggtcatttttttacaaattctgttaacaaatcgcattaaaaattacaaaatttttcccggcggcgcctatcggcaccgccggccctccttgtcccccaaaagtcttggaaaaaacgtgccgcgtaaaaagcggtgttgaaagcaaaaaaggtaattgatttacattaatttacatggccggagaccccttcgcaaaattggaaaatggctgctgaccccttgttttgcataatctgaattttgaggtctacatctga

SEQ ID NO: 30219 - DNA, 1102 bp, Heterodera glycines
cccccccccccaaattccatttgctataccacaaaaccccacttaactcccccctccgcccgcattcttcactactgctgtggtgatggtggtgatgcataagttcattttcattccattccccccccccttttatggaataataatatgtatgagaaaattattttttattaatttttattgagttttttttaattaaaaaaattaaacagaaaggggcttgagttttcgatttagattttgactccaaaattctaaaaaattaaaacttttctaggcatgggtaaaaattattactttttttgagaattttattaatttactaacaaccaaggattttatgattaaaaatctgagaaagtaagtcaataaatttgccaaacaatattaattttttaagaattttttaaatatggaaaatattttcgtatattttcaaattggtaagccaacggagattttcatactggaaaatttttaatccctttaattacgggacaaatttaattaattaattttatcatctcatcattttacattttttctttctttcatcacttatggtccgcaacttgaggccaatctctaattcgaattaattataaaaatgaatttttttatttaagaattaattgaatttcatctttctaaccctaacctgttttatttcaaaactttctttaaaaaacaaaaaacaacaactaaacagcccattcttattgttgtatgttgacaaaagagtgcttttttgtgctccagtgtgatttgatgattcattcaatcattcatttatttgacgtaccaattaaaaatattttttaatttttttaaattttaattatttttattggaaattgatgaaatttaataggaaaataataattttatttttcagatttattaattcatttcatcttacacaaaaacaatcgtcttaaatgtaagagaacagattattataaaataaaatatctttctaaaaatgattcattgtctctctatttctttttgtcggctaaattaattagacgtaataattttaacaaaaataagtttaaaaatactgaaaaatttgaatttttttctttaatggtaaactaat

SEQ ID NO: 30220 - DNA, 1625 bp, Heterodera glycines
acatcatatttcattagttataactgaagaaaatacaattggatttatccacaggataaattttctttttttgataggatttaaaaatttatattttccattaaaattataaattcattttttcaatctatacatcataatttttattagttataacagaaagatatgtaaaattttctttttttgataggatttaattaaaaatttatattttctaaaaatgcaattatattttccatttatacaaattatatttcgattaattatataattaaaatatacaattttgtttttccacaggaattaattaaaatttaaataaaattatctttttccacagggaattaattaaatttaaattaaattttatttttgattggatttaattaaaattttacatttcccataggatatccttgtcgtcatggagcacaacaattgagccaacttttgtcaagttatgttcccacattcgttgaatcggtcaaccacactgaaaaaatcgtggtgtgcaacaatgtcattgaggacgtaaaaagtatgaaaatctttttaaattccatggacaaatgcgaaaatggcggaggaacacgaattattggagtaattaacgaccaattgacggaagaaaaaagtaaaaaaaaaaaaattcaaaaagatattattaataataaaatcatattaaaaaatagaaaacaataaaattttattttcataaaaaatgaaatctataatgtaatctaataattttaaagacatttacataaaaaaaaatattttaacggttattttttagtttttattgacttaatttaatttttggctataagaaatttcattattggaaaattttaaaaattcaaaaattttattttattaatttaaaaaatttctcaataaattttatatttaatttcttttttatattatatttatttacaaatattaaacgcttttttatagagaaaggcttttccgcatcaagttcaaacattcaatttggaaagcatttgctgacaaagaattcttttctgacaacagataaacttggtaatattttgaatttttttaaaaaaaattattgaaatataaaattgttgtatttaaataatgccaaattttagaaatatgcgcatacagcttgagctttatccgttccattttcaaccttggcgttgaatcgctgaattatcttcagctagtgacgaccgcttcaaaagctaatattaaaatttttaaggaacaaatcaaacaaattgacagcatttgtaacaagtttcaaattggcattaatgccaatgtttatttcgaagcgccatggggtaattaattaaaaatatttatttatttaaataaaatattttttgattgtttatttttgcggaaattaaggtaacaaaattgtcccgcttttacctcaaatggtcaataattattctgattattcgctttcgcttgaaccaagccaatttagagatgaacttggctcatctgatgaagaaatttgatgaaaatctttttgaaattatgatattaaacatttatagttattcttagtccatttagaagacaaataaaaacgatatttttttatttgagaattattcatgatagacaatttattg

SEQ ID NO: 30221 - DNA, 894 bp, Heterodera glycines
  unsure (1)..(894): unsure at all n locations
tcctctttctctcttccttctcctctttctttcccctccatcacgagcttccttctcctcnnncnnnccccnccnnctcctttaaggcgtcnccnccnncnnnccccnccncgngcncccttccnncgccgcgggcgnnccccgccgcggtctcccttccttctcctctttctttcccctcctctttctcccttccttctcctctttctttcccctcctttttctcccttccttctcctctttctttcccctcctctttctcccttccttctcctctttctttcccctcctttttctcccttccttctcctctttctttcccctcctctttctcccttccttctcctctttctttcccctcctctttctcccttccttctcctctttctttcccctcctctttctcccttccttctcctctttctttcccctcctctttctcccttccttctcctctttctttcccctcctctttctcccttccttctcctctttctttcccctcctctttctcccttccttctcctctttctttcccctcctctttctcccttccttctcctctttctttcccctcctctttctcccttccttctcctctttctttcccctcctttttctcccttccttctcctctttctttcccctcctctttctcccttcctcctccttctcttcctcctctccccattttcttttttttcttcccctccctttctcccttttttattttatttttcctcctccgtttcgcccttttccaggtaaatgtccaagtgctggagaactttctgctcgcgttggaattggcctactacgagcacaacaatccctnccacacncggcaaaacccgggagacttccctccgttagtccatcaatgaaacgaaagcg

SEQ ID NO: 30222 - DNA, 1541 bp, Heterodera glycines
  unsure (1)..(1541): unsure at all n locations
ccatattaattaaaaaatgaaanattatttggcacgcatcattaacatgaaaaactgcaacaaaaaaaaaggaatatttttaaaattattaaaaataaaaaataaagaaatttaatcggcattgaatttaggatttaacaatgaaataaaaaatgtctatcaacattgcatataacaattacaataaagaatagaatttgattttctgatttaattactcatattagatgctttattgaaaatattagtttctttttttctgatttaggattgaatttataaaaaataaatactgaaaattaatgaaaaaatttaaaacaaataattttttaaatttaatcaagctgcagaaaaattattaaaatgataaatttatggcgatttggttcgattaaaaagacatgaaagtaaaaaaaaagataaaacaaaatcgaattatatttattgtttgtaataaatattaaacattcaagaaattgaatttattattattttaatgcataagataatggaaccggccggacttattaataacataataaatcattccaaataaaaaaatattcttttaaatttatttgaaaaatgatactgtttagacagaaaattaaattttatttgaaccttacggatgataataataaaaaaatacaaatatcatgagaaaatgatgagcctattatcataaatacgaatatacgatttattataactaatttaatatctacagtcaaattatgaatcatgttctttggaagcatttcattttgtaatttaattacatttcaatgatttaattgcccaagttccgagattacgggagaagaaaaaaaagaaaaattaaaatactattattttttaattaataatttgtcacttagacttaatctgtctagatttatattttgatttccaaacgtatgtactttaacaattgatttataagtgacataaaaatagtaaataaatccgacaattactgctttaaaatccattaattaaatattaaaaaatctgaattaatcataaaattgcagttatttaggcgaaccgagagatttttggattgagtcagattatccaattaaaattcagatacaagaaatttgtttattttcaaaaacacaccccctgagaaatgaaaaatgtttcaaaaaatcatctccaaaattttgttaattattttatcgacgatatttattgatcttgaaaattatgtattggtttggcataatatttttgctttttgaaaaaattcaaatgcatgttgaatggaaaagtaaaaatgcaattaaatcggtaaaatacgctactaataattgaaaatttttgtcaaaattgatagttaaaattttatttttttttattgataaaaaattctagattaaaaaatattatccgaattacaaaatatttaaaatcatttaaatgactaaaattaagttttttttgataatattacttgagttaattagagaccggataagagaatcggtctaaccaggggagaaaaaccgaaaaaatcgaaaaactcaaaaatt

SEQ ID NO: 30223 - DNA, 1376 bp, Heterodera glycines
tttggaagagatttcccatggaaaatttcgcgtcgcttcgctttcaattcattttggaggacaaccacggaaaaagtggtaaaaatggcagaaaaattcgttttgccattgactgcacaaaattttcgattggaaaggaaaacttcaggttggtttaagcttatttttataatcgaactatttaataatacaagaatattgccattacttaatcaaagaatgtcaacaaaactctaaaaatttctactgacaaaagcgatttgaatgaagaatcctaattgtaattgctcttcaaaaatcatagaatcaacatctagataaataaaaattgcgaattttctgctcagaattcgcttttaagtttttaaatttgttatttaaattcaaattcattttccatattcccagagaatcatatgaatttttcatcatttaatcaatttcaaccaaatttgtcaatttttgaaggttttccctttaaattagaaaaagactctaagcataattttgaaaatttagcctcattaggctctaaaaaaccacaaaatgaggataaagcctcacatcttagggaatactgaatatgatcccggtcaatgccgatccgatcccgactctacccataattttcatttagggattaatctacgctgtgttagtagttttgtccatttagcatcacgccattttcccagatcactttgcatatcaaggctaaacaatgttttgcgcaattaaagattaatgccagtaagaaaaatgctgataaatataaatcaaaaagctaaaatttttaaaatatttcttaaggaaataaattaaaaaaaaagaaatttagttgaggagcctttattcatattaggccagaatttttttgaacaattgcattatggtgcatttttggacgattacgcgggcatttggttgtttggcattgacacgatgcaaaaatggggacgaagatcaacgaaaattgttgttcacagacaccaaaaatgtggactaatggtataacttaattaagtgaaaaattaaataattaacatatcaatttaatatttttaataatttatttaagtgtgaaagttgtattggtaaattagaaaggaaatttgaaaagtgcacaattttcaacacaacgagaattaaacggaaaaaaagaggaagcgacttacacattaaaccattggtaaatattttttaaaaataaatcgattttttttttgatttttattttccccatcaaaaaaaaatttttaacaataaatttaaatgcaagattttgctcaaaaatcgaatgcacaaaaattaatcagtttattaaaatttaaatgcaagattttgatcaaaagcaaaattcaccaaatttaatctta

SEQ ID NO: 30224 - DNA, 1308 bp, Heterodera glycines
aaaacttagaaagttcgttgtataagaaaattcttagaaaaaataatttcaaaaattttcagctattgtagaaatttttgaaaaatcctagtaattcgctgaaaatttttgatattggagtgggaaacggagtgcacccatttttttctatttttacagcattgcggcatcggacggcgtgatggtcgctcggggcgacttgggcatcgaaattccagcccagaaggtgtttctggcccagaagatgatgatcgcaaagtgcaacatggccgggaagccggtgataactgcaacgcaaatgctcgaatcgatggtaaaaaattagggttttaaaaaatgaatgaaaatgtgtgtatttaatttccaaatttgtcattaggtgaacaagccgagaccgactcgtgccgaggtcagtgacgtggccaacgcagtgctggacggctcggactgtgttatgttgtcgggcgagtcggccaagggcgattatccggtggaatctctcaaaaccatgcacgacgttcgtttccctcgttacatttgataattaaagactgaaaatttaatttttcagatttgtctggaggccgaaaccgcctttttccactcgaggtacttcgaggagttgttgcagaacacgcccagccccaccgggccgggcgaaaccatcgcaagcgctgccgccaacgccgcgaggagatgccgggcaagcgcaatcattgtgctgaccaccaccggaaagtgggcattcatttttttattgtttgaactatttgcaaaactaattttattgtcctaattccaattacaaaaaagaggcataacttttgaacaattgcattctgcagattctctggtcaggagcaggtcgtttccctctccctttcgccgcccctccccccgaaaatattacttagtttttcctttggttttgaattataaaatttaaaaaagacaaatatttaaacctcaaaattttgaactttttccagtgaaatatggactataaactaattaataatcaaaataaaatatctgaaaataacaatttttcaaccgcaacacacccaacacgcactctcaggtcggcccaggagtgttcccgcttccgcgtgccaatccccgtgttggccatcacccgctatgagcaggtggcgcgtcagctgcagttgtgccgtggtctgttcccgctgtactacccgcacatggaacgcgacacggagtggacggaggacgtgaacaagcgcatcgcgtacggcatcggagtgggcaaggagcgcgggttcatccacaacggcgactttgtggtga

SEQ ID NO: 30225 - DNA, 1499 bp, Heterodera glycines
aaaaaatgaccaagtttgcgattttgagccatgaaaaatggggatctggtgctccggcagtgccgtcgctggcccctttgcgagcgagggggaggggggtccgccccctaaaaaatgtatgattatcaaattgccattttatctattttatgcatttattatagcattgttaaagtttgtttccatttgtatttaaaagtttggcaatgttaaatctctccgataagagaggtttaacagaaaatgttggaaaatgtgaacttaatgaccggataatcattccttattttctaaaccccaaaagaaatagtgtgctagggctgctcgccaatcttgagacacgctgttctcgagccgagcaattctcgggttttaaaaatttcattctatgaaagttccagcaaggatcttcgagatccaatgaagaattaagaattcgttttgactactttcggcgttcggaataaataaagaaattttgaaaatgctgtaagaaatgacacgaaagttgattttatgaatttatgtttgaatttgaacctttaattatataggcgctgacccacaaattgtccaagccacgaattgtccaaaagagtaaaaacttacgaattgtccaaagtctaaaaagctcataaaaagccggaaaatgggtctattttagggttttcggggtcgctgaataccaatacgacatttatatagccccttgcctaaccctagacccaaatataaacataaaattgcaaaaaaatattcaaagctcttaaaaagagtgctgatcaaaattcgaacaagttttagggttcctatgccatccgaattctctctatagacacaccctcagcttcacatattaaaaaaaataattttattaaacattcaataaaattctttacgacgtggacaattgaatcatcaaaattctcgaaatccttcaattttcctgcatatccctcaatttgtaaaccgagcgccgtcataagatcatggatgtcaccgttgttgttgtacgacgcgtccgccaaaattcgcagaatgacagcatcctggaggatgaatcgctggtgccacacgagcgagagggggccacttgacaggcttctttttacatgaaacccatcggatctgttgcccatcggaattgctctgggactttctcaaaaagcatgtccttacgcgaaggaacatgctgcccttcattttgccattgcttccaataagcagagcatggtgtcactgggagatcgcctcgctgaattacctcagttttgctcaccagttggaatgccctggagacaacggactgatggcttggcaaacgaatggacaagtgaacgacgggatgccagagattgggaaacggcgtggagtggacaaatgcaaaagcttccgtgtcacccacggaagttcattttgagattttcgagccgggatcatccataccgattttgctgccggactcctctttgactcgacattacaatgtccaggccctt

SEQ ID NO: 30226 - DNA, 1064 bp, Heterodera glycines
tctagagtcaggcaagtgcctttttctcccagcattttccattcacatttatgaaaaggaacagatttataagcaattcaaaaaagatgtctgggaatgaatgaaatttgaaagaaaacgaatgaaagtgtttgaaattgaaaggaaaaactttaaaagaaagaatctggaaacatgaaaatagtgagaatcgacagttcatatgacagaaagtcactgtagaaagtgctgctgctgttctggccaaactgacaatgagccggaagcattgtccattccaacggctgttccgatgctgctaaattggggcagccaccgtctttgatcctcggaaactattggcaataaagcatttgagtttggtaaatacacattgggagaagggttcatcaacaaattgtagttcagtgaggtcggtgcagagatgccattgcctggcaaagagagggcgtctggccaatccggattcacgctgttgtgcggcattggtgggtcaacaaagcgcgtctcttgtccatagttcggtccgtgctcatttccaatgaccatttgctggtgttgttggtaataattcattgtgttgttctgttctgtcgttgctccatcagtttgcccctcttcgtcctgttccacggcgattgatgcaataagaaattcgagttttccagaatgagggtttgtgaaagcggaaatgcaaaaagaaaccggcagatgaccaaaaagttccgtaggattttgcgggtcgtacttgcaccatttgcatgaaatgatctgaatttggaaattcagttgaaaccaatcagagagagaaagcttttttaaaacgggtgcactacgtttcccccccgtatcagttcccccccccccgagctcggttcccccccgcatcgtttcccccccgagaaattttttttttaaaaattgctaacttagaactttttcagagaaaaatcttagaaagtttttttacaagaaaattttaagaaaaaaatttttttgagaaatttttagcgattttttgaaaattttttgaaaaatcttagtaattcaccgataaaaatttc

SEQ ID NO: 30227 - DNA, 439 bp, Heterodera glycines
gggaagggactgctgacactcgtcgatgagtggggcggtggttgtgctggaggcacactgtagagaaagaagaaaaggatgagggaagaggggcacagatgagaaaggtcgccacactctctcgccatctctttgtcttcctctctcattatctctttccatctctctctatctatctctctctctgtctcttaactctctctcttcccatcgtctctctcgcaccctcttcaattagcagcattagtgctctactctctttctcccttcctttgatggtggtgctgtgtaaaaggtgcgcaggtggcgtgttagtaatttatttatttatttattatgggcaaatgtcggcggacactgacacgcgtacgctaccgtaagcgcgttcattacggtatcccatttctcgaggctatttgtcccctcgccacaattcccc

SEQ ID NO: 30228 - DNA, 1071 bp, Heterodera glycines
aaaataaaaataataaaaagcagctaattatgacatatttaataaaaatcattttataaaatatatacattagatttaaagagccgttaattattgacatttttttatttatactatttcttctttgcttttatccaagtaaattctaaatttttatgatcaatatattaaaaatttacatccaatacaaaagtaactggcacaaaaaaatcatccacaacccaaaaagaatttagaaggcttatataatgggatttgttaaatgatgaattatacctaacaaaaaaaaagtaatttacaaattatttttagcatttttaaatatttcgatataatggagaaattggctcaacagaatccgagtctagtcgattcaacagcatcatctttggaaaaagctgcccaaatggagttggacttcatccagcgcgttttgttgggcccacatcggggcaatttgacggcaattgaatgtttattggcccaaaattttagccaaaattcatcgatgatgcctaattatggcggcgcaacatggaaaaattcgaaaatgccaaaattagaaaccgaaaagcacattgttggtgatgttgatgaacccaaatcagacaatgaaagcgaaacggaccgaggtgatcagaagctgaagagaaaaggagtggaacgaccgaaaaggaatccgagtgaatgcaaagtgtgcgggaggaaaagcatgtactgttattacagtgtcagatgttgcgaaggtgagtgacgaaaaaatattaaatttttaattttaattattttattagagttgatggattataaaatactagataagcgtttgaattaatcttggtataaaacggaaaaaactgagttgcagcaaatcccgcactatcacgaaaaaagactcgggaccggaacttagacgggattccgattcagtatgctcccggtcgtttttccaaatatcttcggtaatgattgggattccaaattgggatccctcccgatcgttttcccaaagtcttcggtattgattgggattcctatttcggcatccctcacccttgttcggtctctagt

SEQ ID NO: 30229 - DNA, 1714 bp, Heterodera glycines
  unsure (1)..(1714): unsure at all n locations
aagaagaataattgatattcttgatttttttttgtgtgaaacaattatttttgataacattccataagttaatattctgactccttgttttacctttctcaaaaaatagattcacccattcaagctcgttaaggttaacaacatgataaacattgcccatttgttcgtaaatctcttcaattttcagaagcgaaatttgccgttttgccatgctgtgggtcgacctttcttggtagcacttgccggagctaaattttttctattaataaatggttatcttttgctggtcttcataatacatttcatagagacaaatcctcaaaatttcattcacagcagggacgtccgcctcgtcgaaatgactacagtagggaagacagacggttcgcagggacggacagtcgcgcagaatgtatggggcgaactgtcgcaaacatcggaactccgctggccaaaattccatgccgcagactttgccccggagcaatggccaaagcttgcacataaggtactcagcagtgcgatcagtgagtgagccaaatccaatggacaaattaatcccagaagagccgaaaagagagcgaaaacggtggagaaaggagacgacattttggtggaagtatctgaaaaaaaacgagaaatgttagccaatttttcataaatgttcaattcactcgattgtaatgcatttaaatccgatgattttctttggcatcggcttttgcggaattggcagtgccttcccatgcgaattgacaattagtacttctttggtgccattctctccgattttgcgccaaatgtccattgaatcgaatgcccattttctcgttttaaagtgttcatcgacaagacagtcaaatcggtggctgagcagtgcaatttcgaggccaagctgagaaggcgcaagaaaagcaaagaccgccagccgccaatcgccacgggggatgaagcagctgaaaaacaattataaacttaattaattattaatttttgctacttttcttttttgtcgtcaatggggcgccgtcgtcgtccttttttgacgtgtcgttttttggcgtagtcccaacacatccaaagaatggcgcaacagccgaccaacaaaggcacaccgaacaaactgaaaagacggaatgagagaaagaaaagagggataaaaagaaagagagaaggaaagagaaaaagaaaaacatacagaatcttttttgaagacattgcggcggcaaaaggaaaagaaaaagtgagtgaaagagtgaaagaggcaaagagaaaagccaggacttttatagtgaagaacagtgaacaataggaaaaagagaggtacctaatttctgcgtaatacaacataccgtatttcctaaaataaagccgccccctaaattagtgccccctttcaaataaagccccccaccttttgagggnggtggggtggacatatagagcaccctgttggatcgatttatagaagtacccaattacagagtcactgaccgcatctcgatgagtcctgggcgatgtttactccttctaacctcgacagaaatcaatgaccatcactgtacaatatgcatgccgagcgaataggagacgtctattacgctttagaatgagaaagggaggtagatcgtgcgtaatactgttataaatagggaccggatcttgaggcatatgtttttttttttttgctaatctgctatgacttatatacatg

SEQ ID NO: 30230 - DNA, 1140 bp, Heterodera glycines
  unsure (1)..(1140): unsure at all n locations
acccatttttgggcggaattgcaccattggaaatgtttcctttcaaggcaagngnanccnnnncacggcgggcancaaaacctttggagangctgncacagctaccccaataaacggaaacccaaaaacggagcagattgagaatactcttaattggtcaagccagagcggaatatgaagcattggacccaccacccgaaaatttaaccaccgctttgaatcatttaaaatcaaaatttgaaaacgaaaatacccgttccatagcgagacaagcgctttcgatttgcaaacaagcaccaggcgaaagagtgtatgagtttgccaacagactgaatgaggcaatcagaactgccctcgctggggaaagtgaggaggccatacggaaaaggcttatggaggagttcatggaaagactcattcccgagctccaatttgaggtaaaggcgggaagaccaaacagttattcgggtgcctacgaactcgcacaacattttgaactgcttttggcatcccggagaacaaatcaaatttctgtagccgactctgttgcagaattatcctcaaaagttgaggcatcgagccttgggcaatatcaaagagaaaatgtcaaaggagggcccgacagacgaagatgctattattgccgtcgccctgggcatttggtgagggactgcaaaacaaagaaaagagatgaaaggcaaaatagccgcgggccacaaagaaataacgaatattatgggaatgagagacattggaacagagggccaaatggtggagaaaattctcgttttgtgaacggaagggaacaaagaaatgaacgagaattccgccggtcaccaactccgaatacgcgccctaggggataatatagctgctaatactgcagttagcccaatgatttgcctatcggatgctccctcaagtctctggtctattccttctgaccccttttgcccaacttggaccccaacagtggaaccgattcccgcaaattttgccatttttaggcaaaatacaatacagtacaaaactgaggctacggcttgtaaatgtatgaaaacaagcatttcaagaagaatcggtttctttggagggaaaaaagaagaaataagtacaagccccagtggaagtcccanacag

SEQ ID NO: 30231 - DNA, 895 bp, Heterodera glycines
ggaaatgaatggaagcgcgatttgaattttatggttaactaaagtaaagtcaagattttgggtcggtcgagtctctttaatcattcttacaattaattagctcagtgttcttctctattagcctgcaaaatttcaaaaaattggtcagaggaactcagaaaactaggtttacagtatgccccacctttgaacaagcacttactattggatcatttgcgaataattttcgggaacccgtttagcaccgtcaattacgggccgcagccgcaaattaaaggggcagcaaatttatgggctcaattgcacggcataaaggtttataaaggtttattctggtaaagaacgaccgaattttgcgatttttttattaacaaattttggtgctaggtcgatgcgaaaaaaaaactcagtgattgattggtcattttccggaagccgattgcaccactttcgggcaccaaaaatgcctgatccggaagccgaaccggcccgggtaagaacaattttttgttcagtttttcaagtgctatctcccaggccgggtccggttcttgatccattcatttggagcccgtcatgggtcgggcacatctgccgaggaccctcagcctcgcccccgactctgtcgatggccaactcaagctaagcttgccggtagcagcggcttttttgtacagctcgatgagctctacaaaacggtattaatggcgtccggttatgtctactacaaacgtagaaaattgataagaagtgatgcgaaaaatgaaaaattaaaaaaaaattgaaaatgacttgcatcccgccgtacattagtgttaaccgggacggcgccgggattttgtgaataaaattatttaattaattttttaatttaatcaatcactggagttttttt

SEQ ID NO: 30232 - DNA, 942 bp, Heterodera glycines
ggcctcagtacgggggcgcttcgctccatttataattttttttgggggaaaatttcgggccgcttcgcggcctcaggacgggcgcttcgcgcccgttttttaatttttttggggacattcgaccgcttcgcggcctcaggacgggcgcttcgcgcccgtttattaattttgttgggaacattcggccgctgcgcggcctcagtacgggcgcttcgcgccatttttaatttttttggggaaattcggccgcttcgtggcctcaggacgggcgcttcgcgccatttttaattttttggggaaattcggccgcttcgcggcctcaggacgggcgcttcgcgcccgttttttaatttttttggggacattcgaccgcttcgcggcctcaggacgggcgcttcgcgcccgtcttttaattttgttgtgaacatttggccgcttcgtggcctcagaacgggcgcttcgcgccatttttaatttttttggggacattcggccgcttcgcggcctcagtgcgggcgcttcgcgcccgttttttaataaattaaaaaataataaacacggcctgggtccgaacatgccgccccacccctcagaatccccaatcacacagggattctgaggtcttaacgatgtcaaaagtaaaatctgatcacgtattcgtgatcagcggcccaaataacccctaaagacatgtttttggaagatttttggtgaaaaaatttttcctctcaaaaatcatggtcacacccctgtggtcccaaattccaaaatcacttttatttctataacttttttcaaaaaagtgataaaaagctaaaataaaatttataaaatagagcaaaaaattgcggattttttgagtatattatttttataaaatacttttttagaagggagttcaaaagtttttctgaaaaatcgaatttttccagaaattctgga

SEQ ID NO: 30233 - DNA, 921 bp, Heterodera glycines
tttttgaaaattttatgcaatttgctataagattttgtctaaaatgactaagattttggagctaatatttaaaaataattaggaatttttggggcgggcggtgccgataagcgccgccgaggaaaattttttttcagaattttaacgaattttgttaaaaaatagccaaatttttagcatttgctcttttccctttgctagccttccccccccccctttatgtatgttaataatactacaaattaccaagaataagtcagattaaatcgaaatatgggtagccttttaataaaaatagaaaaaaaaaaattcattttataaaaaataatcttgcaagaaatcgtctcgaacacttttttcaccccccccccctttctctctctcgccccctctctctctccccctctctctctctcttccttctctctcgctctctctctcggtgtctttgtcacacagtcacatatccttatatactcaataaaagcatattttaaaggaatttttaattatttaaaaagttttaaaaataatgataaaaaagaaaatacagacggaaacaatacataaatttgtttatttttaaaatttctttcatacattttcttctttaattttaaaggttttcgcgtcaaaaaataaacttaattcaaaaaaaccacaccatcgaattagtatagttagatgaaatctttaaagatgggctattatttgcgaagagtctggaagtaaaagtaacgccttgtaagaattggctaaaccaaccgcaccctgttttgagaggtgcaaaaagaattgggacaaaacgtttattctacagtaattcaaattttatgtatagaaaaaaatctgaaaaaatccctgctaagctaactttttgatactggatcaaaaaagtctttggaacaacatgacagatca

SEQ ID NO: 30234 - DNA, 1004 bp, Heterodera glycines
ttagaaaaaaagatttttataagaaaaatttaaaaatagcttttttttgtgatataaaaattttatgaataataattacgaagttttctctcaaaaattttccaaaaaatcgctgaaaaattatttgatttttttcttgaaaattttcttataaaaaacagctaaagcaacaaaacctaccgttctggcatgacttcgccgatagccgtacacgttgagcgtttcgtcctgcaattggatgagcgcgtgatgaccgccgaaccctggcaaagtttatccattatttggcaacaaatttcaagcattttaagggaacatttagtcgccaaaatataaatcaaaaatttttggtgctatgacgaagcttacaaaaccaccgaattgcattttccgggtttcctacccgctgggccgtgctcgtccatgtccgacaaatcgggcgccgagtgccgtgctcgaatgggcggcggtggtagtggaccagcggcagcagaagcagcgccagaagattgtgccgtatgtaaatgccggggggacgacgaagacggtgccattcgccgacacttttgctgcgggtggttggccaactcggagttgctgttgtcgtgcaacaaatgttgctgtgtgccgtaggagtacgaagtggtgcagctactgcttgaagaggaggcggaagaagacgctgaaagggagcaaaaaaaaacctaatttgctattttgataaatttcaaaaaaaaaaaattctagaggtccccggattattcacaattacttaatttttttgcaaaatgctcgaaaaaatgcagtctttaggaaaccgattttttatatgggcctaattgtaaggcttttacaacaaaaattggataatttttgtcattctgataaatggagagcatctaaaccaatctaaagtcagtaactctacggaaaaaagaaggcctaggcttgaaaatgagtgaaattattaccgttcaatgaaaattttggatttgaaaaaaagt

SEQ ID NO: 30235 - DNA, 1509 bp, Heterodera glycines
ttttctatcaaaaagggagatgaataaattattaatcattttttaattccttatttaacagttcaaaaagtacaggcttctcttttttttcagacaccttctcagaagcgccccaaactctacagggattctgaaaggaaaagaattaacctgtattatctcactaccttgtcatcagtttttataaaaaattttcaaaattttgagtctcctattattttatttatttttcaaattttgaagggcggggggggggggggggcgaaggcccaccacgaggccgcgaagaggccgagtgagtaccttcggtgcaggaaaattattaaattttaaaaattttttaattgctttttaaatatgccaaaaaatgtaggcttaacttttttagtgaaaattcgatcactcatattttttgctaattgagcagaagcgtaccaaactttgcagggatactccccggtaaaggactaacttacactgaaatgagcgccgagctagctggctcaaaaaaattttcgaaaatctgagtctttcgtttttatttattttttgcaaaattaattcttaaatattttttcagaaagggttctgaaacgcaccaaattttatttacatgttagtttaggcactctgatgctttttctatcaaaaagggagatgaataaaatttttaaaaatttttaattcctttttaaacaggccaaaaagtttaggcttaacttttttttcagaaactgatcagaagcgcaccaaactttgcagggatactgaaaggaagagaaataacctattttaaatattatctagtcagttcatttaaataatttttatccaaaaaatttttttttgggttttcggggcagtccccctgaaccgatgcgcccagatttatggggagaccgaatccttcgggaatagcttccctatagtctgtactttaattctgcgttggatttttgctccccataaatgtttgagtaccccaaacggacacttgaaaaaatcgatttttttgttttcggggcagtccccccgaaccgatgcgcccagatttatggggagaccgaatccttccggaatagcttccctatagcctgtactttaattctgcgttggatttttgctccccataattgtttgagtaccccaaacggacacttgaaaaaatcgatttatttttgttttcggggcagtccccccgaaccgatgcgcccagatttatggggagaccgaatctttcgggaatagcttccctatagcctgtactttaattctgcgttggatttttgctccccataattgtttgagtaccccaaacggacacttgaaaaaatcgatttttttgttttcggggcagtccccccgaaccgatgcgcccagatttatggggagaccgaatccttcgggaatagcttccctatagcctgtactttaattctgcgttggatttttgctccccataattgtttgagtaccccacacggacacttgaaaaaatcgatttttttg

SEQ ID NO: 30236 - DNA, 1390 bp, Heterodera glycines
  unsure (1)..(1390): unsure at all n locations
tacgtaaaggaaaacaaagatttatttaaaattacggcccttcaagaggacagtcgaacatgaatttgccgattgaaaacttaattatagagatgttttgttgtatntngnagggaagaaagatgaaanannnnggggtanaaaatttntnaaagctcggttactgaaggatccaacagtaaaagacatggttgataaatcaaaggtcatgtggggacgtggaaggaaaaaggcaataaaatatataaaaacacccggcatagtgcgagagaagaaacccttcaaaccactaatatgggccagactgtagagaaaatttattttaatttaaaatctccggcaagttttgctggaattcaaaaaattttaaatgaggccaaaaagattgacccggaaattacgactgatgacgttaataaattcctagaaaagcagaaaacatacacgattcacaagcccatcaggaaaagattcccgatactaaagacgatatctcgagttccatccaaacccaaataaacacactacgggaaacaaatcctcaaatttaagaagagcctgatataaaagtgtggtttgacaaaatggtagagaatgggaccgaaattaaaacataccgaaatgaacttaaatcttttcaagaagaagtagataaagccaaaaacacaacattagagcatgtggcaaataatgacatgaaacaagcaaagaaatcagccgacgtcgcaaagggaatcgccaaacaggcaaagatcaaatatacatcaattctcgagggatataatgataaatcggaaaagggttttagtggtaaggtgaataggcttaatgaggtgcttggtgagcatattaaacttaaagatattgaaaatagacaagtatctgaagctgagaaaggccataaaaaagagagagactagccaatgaggatgttcaatttcaatatgacagcattgatcaaaaatgtattgtctatctttccgctgctgtctcccacatagatttgtcaaaacacctcgcctatgtgctcggttttaagaacgcaaggctatttcacgcggaagaggcgaattatatgccagatttgacgggtggcgtaaggcaactatacatttatgcaccaaatttaatagaaaacacaattatcgggaaccagatggctccactctaagaatattaacgtcgtagatgacccagggtcgattagtaaagttatatatagcaccgagtactttcatcgtctacagtcgaaacgaatttcagaaattacaattgaaattcacacaccatttggtgaattcgttaaatttcactggggaagttgtattcttacattacattttaagaaaagtatattttaaaaatgacacacgtatttttcgatcccgag

SEQ ID NO: 30237 - DNA, 1684 bp, Heterodera glycines
  unsure (1)..(1684): unsure at all n locations
agagtcggccgaaaaatattgggtgtttgtgactagaaaaatagctcattcatatcaaatgactacagaaaattacagcctccaagaacttattgctttgcacaagcaatattttgtaggacccatcaaacacattgtgcttataggaaaggcagaattaaacaataggggcctttttattatgattacaacaaatcagcatggcgtctcgctgatatggtatgtttcagttaaggtttagccgatctacaaatttcggcactgtctattttgtaaaagcgaatcaaattcctttggattccaaagtggaattacagaattgcgacggcaaatcctaaatagacaacgacgctttcattataaagctttaagggaggaaaagtaatacgaaatagaaatttttaaatggagttttgtctattttaccagctttatccggtctccggattcttaaattggattgagaatttttccccgaattctcaagcgatttcaaatcgctttgtagggcttccagggcccgaaaattaggaagtaaggcccgtgttgcggcaaggaaacggcggcatggaactgggtcgatccccataatagtactgaaattgaattatcactcaatgccaaattaacgttttgtttatggaaattttttagaaatgtcatgataccaagcttggtaaaatttacaaattccgaaaccagactgatccgttgaaacacaccttggaaacagcaaccaaacgaactgctaaacttggaaaattgttaaaattatgcatgctttgntgatgccaaccacctgcagatgaatggacgcccagttcggcaacactgtcgagcaccaccctcaaattgttcaacaccaactcagaggccatttgcaaaaaagtgaaaaaatagcacagaaaaatggagacaatattttaaaaagagcatcaaatcgaaactccgaccaaaacaaacaaacaaaaaactttggtaaaatattgacaattattctgaggagacggtgttgcacaaaaaaatgacatgacaatttttttgtcattaataataataatccatcgctatgatccacaattggttctcttcgggcgcttaaagtcggaccaaattgttgaactcggccaccagttgtggcaccgccgcactgccaaagttgtggctcaactgcttcttggtgagcgtgaacttctgcaacggtgccggcggcggtcgcactccgtcaatggtgcacaggggcggattacgcggatgtttcttgcctaaaggcatcaaatatggcaatgatcaggggcgtaatttttgaatatgacaagtcttttgtgagggctttggacttggctaaaatagatccaaattcgtgactagcgacaccgaaaaccccggtaaacaaattttaaagaaagtacgacaaaaaaaaatttttttttttttgagaaaaggtcccctgtttttaattttttataagatagataaacagaacaaatgagccgatttcggattgtccttggacaatgccaaatccgagaatatccttannatccacttaatgcactcaccctggtattggtcacggcgccgtttgctgggcccgctggccatgcgaaagccaaaccgacgatgcatttgggcagagccccaatggctttttactgtcaaaataataaaataaaaattgaaa

SEQ ID NO: 30238 - DNA, 985 bp, Heterodera glycines
ttttttggggtacattatcaatttttttttttttttacaaaaacttctataaattctcaaaaaccctattaaatatgtacaagaaaatgaaaatatgtacgaaaaattgcgaaataggtatgaaaagtccaaaatatatataaaaatatgtaaatatgtaataaatgccggtccctagtatcagccagcaaaaaattaatagagatattcctcaaattttcataataccaagcaatttaacatttatatggaactgttgttttagtttttaaagcggcaaaacttaattaaaaattccaaaaattaaaatgcatcgcttaaatttggcttaccagtcgaaaaaagccatgcgtaagtgccaacaatgatgtaggttttattgattctgacaaattgcattgagatgtaaattacggcggaaattgaatcgaacaaacttatgataagcacttggaaaaacgactaaatattatttataacttaaattaaattttttttttgtttgtgtaatagaactaaatgctattacaatggaaagccattttattagcaaattttcaagtaaaagttttttttttgttcttcggtccctaaaatttttccaattgtactgctcaaaaataacatttattgagttttttaccaaaaattaattattaattcatttcgatcaggaggtggtggaatcaccccgtttctaccccccccccccccgctgattacgggcctgatgactttggcatttttcaaaaatatttatttaaggggagaagcgctgttcggtgcccagcaaattcagcgcttttaccgcgatatcgacgaaacattggcatggatgggcgagaaagagcttacgctggccaccgacgactttgggcgcgatctgaacaatgtgcaggcactgcagcgaaagcacgagggcacagagcgcgacttggccgcattggagtcgaaggtggcacggcacggggaaattttatcagtg

SEQ ID NO: 30239 - DNA, 842 bp, Heterodera glycines
taaaaaaattgttttttttttttttggggccattccccccaacccaatgcccccaattttagggggagccgaattctttgggaaaaattttccttttaccctttctttaattttgggttgggttttttcccccccaaattttttggattccccaaacggccccttaaaaaaattgttttttttttttttggggccattccccccaacccaatccccccaatttttgggggggcccaaatctttggggaaaactttcctttaacccgttcttttattttggggtgggttttttcccccccaaattttttgggttcccccaacgggcccttgaaaaaattggttttttttgttttcggggcagtccccccgaaccgatgcgcccagatttatggggagaccgaatccttcgggaatagcttccctataccctgtactttaattctgcgttggatttttgctccccataattgtttgagtaccccaaacggacacttgaaaaaatcgatttttttgttttcggggcagtccccccgaaccgatgcgcccagatttatggggagaccgaatccttcgggagtagcttccctatagcctgtactttaattctgcgttggatttttgctccccattattgtttgagtaccccaaacggacacttgaaaaaatcgatttttttgttttcggggcagtccccccgaaccgatgcgcccagatttatggggagaccgaatccttcgggagtagcttccctatagcctgtactttaattctgcgttggatttttgctcaggaaacaattgtttgaggaaacggtggtaaggaaatgagtcgacccctccaaa

SEQ ID NO: 30240 - DNA, 1590 bp, Heterodera glycines
  unsure (1)..(1590): unsure at all n locations
caatttaaatgcttcaaattgggggtcttttttttagagttttaacggtacgaaaaaaagagattaaatttgagagaaaaaataataatttgaatttatntactcatctttttaggtacgatgtgacatcagtaagttcttcaattggcgtcaattatttattttaattaatattttttgccaggaaagttcgtttttgaatgtgcgcaattggattgagtcggtgaaggcgggcgttgacaatgaaagtgtgctctgtttggtcggcaataaggtcaacaaatttaagtcatttaatatattattatactattttgtaatttcttgcaatttaaaaataataaaaaatattaaaaattggaataaaataataaaagaaatcattttcaggtggacctttacccaaatgaacattgccgcacaattacatatcagcacggcaaagaccttgcagaagtgagaattacaattaattgtaacaaatctggggctatgagacctcagcataattatccactaattattctttccatggagtctaattaatatgctcaatggagattatttttgaataaaattgagaattatttcaaaaatattttgaattcgaatatttcggattgttcctctgatctgatttgctttttcacctcattttgatcatcaatttttcaaaccttattaggaatatggcatgttgttcttcgaatcaagcgcatttactgggcaaggcattgaggaaacgatgcaatcgttggcactgtgaatttaaaattattataattataatagtacaaattatgcatgattaattcgaatttagtcgtcttcaacagagagaggatgatcagttgaaggaattgataaaactcgaaaaaagacagggcaaacggcgaaattggtgttgtatttagctgggcctttttgttttcttattttcatcatttttttatatattacggaataaattgaaaattgatttaattttattttttaattttgcaaaaatcatgtttttttctgcaaattaaggcagggcgcggatctgtcctgattatcagaaatgccttgatttggtggtagcgaccaaattttgtcgattttttaaaaacactacaattttgaaaatttaaggcagaatgtctctattttattaagaaaatataggatttgtggcaaaatttggtcatttttttttgtttcgatcagagaactgaattaaggagacgaatttttacataaaaatttaaaaataaataaattttcacaaatttattctttcctttccctttttttcccattaaatttattcatttatttctctttcccctaattatcagctgatttgatgattagcagtgccaatgacaaaaaaagattcattccatctgtccattttcatgtttttttttttgtgctttggaaccggccttcgcccgacggcagacgaacgaagcgaaagaatggacgacggcggacgacacaatccctcctttttcttacaatgccctccctcccccgcggcgtcaaaatgtaacgtaatttccccctgcgggggggggggcggggctgatgggcacgggcggtcgc

SEQ ID NO: 30241 - DNA, 986 bp, Heterodera glycines
attacggattgcggattacggaaattacgtggttttggagttacggattacgaattacgggttacgaatttttgtgatttttccgtaattttgatccgtaatttattatttttcgagacgatttcttgtaagattgttttaataaaaacaaatttttctattttctatttaaagggctacccgtattcgattattcaggaaataaaaatcagatattttgttaaggctacaccctaattttggtatttcgcctagaaaatagaagcatcccttttttgtcgaacttattttttactcatttatgaaaattcataaaacctagtcaggggatggaaaggaattccctcccccgaaatgaaaaattaaaaatttttccaggaaaagtcgacatttttaaaaatttatcgatttttcttaataaaatcattaaaattaacggctacaattcctgtttttgctctccggcgctgaaattttttaaagaaagattttccgagggatttttttgaatatttatagaatataaaagcagtttattttattttataatattattgttttatattttatgattatttttatagggatttgtttccttttcaaaaatatttattttacaaaatatcttcattaacatattattttttatagcttactcattcatatataaaaactttaattcttttgaattatcgtaataaattcaattttagtatttttttctaaaaacttgcactcatatacatattctttatttgacgattattattatagaaatttaaaaaaaaatttacttgcaaaatttactgaaaaagtgttttattaatttttagcattacagttaatgaaaatattgatgattgtataaacatttaaagcatatttacaaaaatgtataaaaatattttctttgttatcattcaaaatgttaatattaataattgaaatgtttttattgaagtgtttgttttttaatatttttatat

SEQ ID NO: 30242 - DNA, 709 bp, Heterodera glycines
cagaagaagctcagcgaggatgagtgcaaaattttcggcaaaaaaaaagacttgcccgtgcggtcgtatcaaatgcgtccaaatgccaaagaacaaggtagggatgatatttgagactggaattttgctcgaaaaatttatggattcaccggattggattagcgacattcaaaccccagtttctagccttgaatgccgatattggtcgaatggtcctgatccagagtggcattttagagtcgggaacccacccatgatttgggttttttaagaaattaaagttcaaataaaactttataaaaatagctaattaatagaataacgaaatatttctgctaaaatagactccattttaatgtccgaaaaaccctgacaaatgtccgatttttggacaaaataactccccatggaatgaagtgattctcaaaatcccaaaatttgtttgtgttgctgcttttatccaatacacaacaaacaggttccatgcactgcaaggtcgtccaaaagatgcattttcgaaatgaaatccacctctgcgagccatcttcgcacttctgctacatggcgcactgccataaaatgaagtaaaagtctaattgatcaaaaataatgaaaaatcattttcaaaaattaataacgatattttatgaattaaattgattacagtactggtaagaaactgatgtcataaataatcatcaagtgtatt

SEQ ID NO: 30243 - DNA, 1418 bp, Heterodera glycines
tgtttatccacacacacagtgtgctgggcgtatgcaccagcaaacatgacgaggaattgtgcaaagcgggcggtgatgcgtgcgaatttgtgatcgacggttattacatttcggtggcaatttgcgtggtcgtcggtctgctgtggtatcggtcagttctgttatattatttctcgatacgatacgaccaatagaaaaacagtatcagaatgttccgaactggtctaacaacattgagaaattgttttgctaaggatgaagaagaaattttctaacaaattttattggaactttacaaaaaaaaatttccgacgcgcggttcctcccccccccccctccgaaaattgtgcggacttgtgtctgaaattaggtacgattcagtcttttctccacaattcaatgtggcgttgttttgttttatcgtattgttaggcccactaaatttgattgatagtttttacgatttttattttagaattttctaccggcgcatcaaatacttccagaagattccccgtcaagattggcgcgtgatcaaaacaaaatgatgtgtgtctgtctgtctgtatgtgatgatgaaggcgttttgacatttgaaagcaccaaaaaagaggaatcattattttattatttttttttgctcttttattttacctattgtatttttctgtccctttattgaattctgtgatttctattattttatgtgtcaaaattttatttccaaaaaaggagaaatgggaaaagctttactcatcgaatgtacatattcattttcgcagaaaatgccattgatttggttttccatcattgtttttcaaaattgcattaaatttcttggcaaactgcccatttgtaaatgttgcttcaccattttctggccagatcagctactgctgcgcttcctttcatcaaaagcatttgccgtaactccgttcgcacaatgcgcgtggttccaattccggccaacaccgacaattacatgtatttgatcatcgacgatgacgacaaataccaaaaaggacatcgaccggcggcactcgttgacccggtgaatgtggaaaaggtgcggcatttaattgtggtttttggcacttttagttctttttgtctttcattacttctattataattggcaaaacttttcaagcgcagaagcaaaaatttcccaggattttttcttgaaatttttttgtttgaatgatgtttggggtggggaaacgacgggggcgggtgaaatgaagtgcacctacagacgtcgccgggaaaattttttttgtaatttttaatgcgaagccatgacaagcctggatttttgtccagtaaatccaggtacatgcttttttcaaaatgctaaactctaataattttgaaccgaagtactttttctttttttatgcatcaattacaaataacaa

SEQ ID NO: 30244 - DNA, 901 bp, Heterodera glycines
aagttcctttttgttcggccgaacaattttgaataaataaaatttagctgaaaaaaagaatgactaattaaagattaaattagagttgtgcggtatcagcaaaatggtaattgccagttttcaggtctcggtatcggtaacgttttttaaaaatattgctattttatcgtaataaactttgatagtaccgctcaacttttgttttatttttattaaaaatcttactagttattattccaaattttttcatccaagcataaaccgtggaccgcctaaggccaatctttttcgcaattttctcttcaatttttttattcgtttttaaattgaattcttttgcaaatttttctttcactttttgaaattgctcatcaccgttactctttaaacgggttttggttttttttttcttgcccaaatcactgcttcgttttctctcaattatccagtgatgtaaaacgggccaaatcactttgcaactccgtttcttcccgccatttaaacccgctcagagagcgtcgcccccgcggccgactccccaggggggggggggccagccgacggtcctcaacgccgggcgatcaccaaaaatgctttccagcgacgcccccagcgagcttcacgctcaggggacgacgccgagtctcgtcatcgcgggtgctttggcgagcaaggtggaactcccaccgggaaaccgtactacagaaatgatcctgagaagtacagtctcaagaaaggaagggattggctgggaacaagtggaaaaggaagagagaaattaatgatgagttgaaaagggaggaaggaaagagggagcaaatatgcactttctctctcacttctcccttttctctgcccattaaatgtacgcttttttcttcctttgcatttcttctgcttg

SEQ ID NO: 30245 - DNA, 418 bp, Heterodera glycines
accgtattttctctttttatccccccgtctccattaatccccccgtccccatttaccccccccccccgggggataaatggaatttttatttatcaaaccatttttccaaaaaaaaacaaatagtaaaaatgctaaaaaaagcccaaaataatgacgaatagtgacataattttgttaagaaaaaaaaaatttgagggatgaatttttgagaaatttaccaattttggcaataagttttgtggtttcttcgaaaaataagtttaaaaatttaataaacacagccaagcgggctcgaaccccagaccccgtctcatatgaccattaagcagggttcggatctgtcctgatttgtaagatttgtccttatttcgggctattcttcttatttcttaaatatattcataatagagaccggcgg

SEQ ID NO: 30246 - DNA, 2096 bp, Heterodera glycines
tctccgccccatcgcatgcgatcgagacgggactatgttgcgccccaacaccgcagtgccagggatcacacatcagctccgtaagaagccttcactttcattgcgcctttgggttttgaacacccaatgacttgcgcatacgctaaactccttggtccgtgtttcaagacgggtcgaacagatgaccggcttttacaccgagaacgcacaactgagagcccgagctggaccgaactggttgctggtacgtgtcgcacgcgaccgccaccgacccccagctcgagtcaacacggacccgaaaccattgcacaattcacccagagtaaacagcactcccccgatccgggtaccagaccccgaaaggctggcctcaagaccgagctcacgcagctactccgagcatctcagcgcactccgcctgcaaatgccccattcgccactgaacagaaggacagcaaaccccagtctggaggctagcaggccaacgtacagcaacaaacgggtgaatgcagaccagatacgccagctctgtccgtttccacctcatcggtttcacgtcctctttaactctctcttcaaagtgctttgcaactttccctcacggtacttgttcgctatcggactcgtggccgtatttagtcttagatgaagtttaccacctgatttgggctgcgatcccaaacaacccgactccaagacacgtaaagatgggtaggcaccgccagttggacaggtcttgcaccttctctggagccccggtcaagggaaacttgaacaagcgggccaacccaagctcacggtctatacgctacacctcgcaaccccagaggagctgcgattcagcgctggactcttcccactcccctccagagagctacagcaatcccggcaaaattcagttcagtctagtcggaggggaaggaagtggatgacaatctcccaccaattcctcgtcgtcggacgtggcactgtgaccgtccttcgtttcgccgtcgctgccccacacagagacatccaatcggcggtggtggggtgtggtcgttgtcgacggagggtaagtgacgggaggggggggggggggggtgtactaaaagcttaacgctgacgatgttataaagcgaaaaatggacacggattgggcgggtggggacagaggacggacacacgtcggaggagttgtaaaagttgacttaatgtgcatatatttattggttgtgttggtgatgaacactgactgaagagagagagagagagagtggtcaatttgagagagcaaccagacgagcatagattgggcgagagagagagagtacatagaccaaaagggtggtgaaggaggacagagctggaagaaagagcagaggaaaagcatagagtgccctggacagacagattgagagagagagagaaagactaatggcatttgtgaagagccgaacagacaagcaaagatagggtgaaatagtattagacagacagaatgacagagaagactaatagcatttgtggagagccaccagacaagcacagggggcgagacagtacatctccaagggggtggggagtaaaaaggcaattaggcgaacaaaacacaatggtaaatgaagagagtaagcagtgcggtagacagacagagacagacaaaatagggggctggggacgggttgtaggtgtaccccggcgctgttgaggacaattgaaaaattttgtttctttttctccgtcgttgtcgccctccgccgtccgtggcggggcggccgaccggcgtccgtcgaccatccaacgggaatgaattaggcggcggcaaggctttgtgcttggtcattactcgataaatgaagggtggtggcgacaaaggcgtggacctccccggcgcagcggcgaccggcataaaaagtcgtcgccgtccctcgtccattcctccgcccacccgcgtcgcgctcggtgcgcaaaaacgcgtcgttttgcgctccccgaccggcgtggggacggaggtgggaaggaaggaggatgtgcccctccctttccccgtcgctgtttctgcttttccttcctttttgctgcgccattgatggactgctcgcgcgggggggggg

SEQ ID NO: 30247 - DNA, 900 bp, Heterodera glycines
agccagaattagcataaaattaacgacacataatgtgttggccccagtgccgtacagaggctgcaaaggcgtgcagaagacttccttgcttttatatttccgcacgggttcttagaaaagagccagaattagcataaaattaacgacacataaagtgttggccccagtgccgtacagaggctgcaaaggcgagcagaagacttccttgcttttatatttccgcacgggttcttagaaaagagccagaattagcataaaattaacgacacaaagtgttggccccagtgccgtacagaggctgcaaaggcgagcagaagacttccttgcttttatatttccgcacgggttcttagaaaagagccacaattagcataaaattaacgacacataaagtgttggccccagtgccgtacagaggctgcaaaggcgagcataatacttccttgcttttatatttccgcaggggttcttagaaaagagccagaattagcataaaattaacgacacataaagtgttggccccagtgccgtacagaggctgcaaaggcgtgcagaagacttccttgcttttatatttccgcacgggttcttagaaaagagccagaattagcataaaattaacgacacataaagtgttggccccagtgccgtacagaggctgcaaaggcgtgcagaagacttccttgcttttatatttccgcacgggttcttagaaaagagccagaattagcataaaattaacgacacataaagtgttggccccagtgccgtacagaggctgcaaaggcgagcataatacttccttgcttttatatttccgcaggggttcttagaaaagagccagaattagcataaaattaacgacacatcaaagtgttggggccccagtgtccgtacaga

SEQ ID NO: 30248 - DNA, 1176 bp, Heterodera glycines
tttatgttttatacagtagaaaattgtgctagtgcttactgtattttgcataaaacaagttacggtgataaatgacttcttgcaattcaaaggtatggcaaaaaatatcttttccttacactattttcataatttactttctctgtttcactgtccacttatttttgcggttagagacgcatacatactttagcgagtcctttcattattcatcaccgatggccttaaaaatttcggcaaattgaattccgagcctcaaaaatatttgaaaccagaaatttcgagggcccaaaaaatttagacaatcaaaattttgacgaccaaaaaaaaatgaagagaatttatgagaatagtgattctatcgtccaaaataatttgactaaaaaaaagggaacacaagcccaacaattagagtagtaaaaggatattcgttagaagccagtttgtatggaaagcatcaattagtacaattgaaattgtcaaaaaaaacgaaaaacaattataattaggaagaacagagtgacacatcatcatgatcataatttttcactcttttctaatgcttccttctcgtctggatcagctccctcaaattcttctccgtctcggcaatgcttttgtccaaatagtccttctggcggtccatcaccgttatgcgttccccactcgttttgatgtcctcattttgacgttcaatttctgtgtgtatataaaaaaattggcactactgtaaaagtgacagtttttgaaaattttttcaaaaggggggagggacccttttgttttgcaaaattttttttgtgatagtcataaaaatttattctctgggtttttggggtccccgatcacgaatccttcgattattttgatcaattccgatttcctaatctaaatttgaacaaaaaatcacaattttaaaaattcaaaatttcgatttttataaaatctgctaaattttcgggaaaaacaaaagaaaaattcttgcgaaaaagcaggttttttaaacaaattttttgccgtttgggtcaaattttcgaaaaataatggttaaacgccgccgggaaattttttttatttttttgtaaattttaatgaaatatgataagcaagtatggcataattttttaaagctttaaatcatttcttattaaaaatatttttcgtttcggggggggg

SEQ ID NO: 30249 - DNA, 990 bp, Heterodera glycines
atactggaaaaatgtgaatttacaaccaaaaaatggacagtaatatcgtcgtcctgtttctcaattgcgattttcgtattggccgtcacaatgccagttgcccctcactgactttctccatgggttttcttgggcagaagaactgcttgaatgttgggcagcacgccaccctgggcgatggtcacaccagaaagaagctaaaggtgaaatggtagaaatataaaatagtggcagaaaactttgttaagctcttcgtcattgcgaacagcgagttggagatgacgaggattaatccgcgtctttttgttgtcacgcgaagcattgccagccaattccaaaacttcagcagcgagatattccaacaccgctgccaaatacacaggggcaccagctccaacacgctcggcgtagtgacctaattgaactaaggacaagaaatttgttggatgggacctttgcgcaaaaggcgatgaagacgaccaacagggaattgcagtccggcacgtgaagaacgcgacttggccttgcctcctgactttgctttgccaccctttccgcgtccagacatttttcaaatataatttttttttgaacagtaaaaaataaattccgtggctgaaattttggggcattttacactcaagaaaatgaaatcatttgtttgtcaataaacaattttttaaatttttgactaatttagaaatattcttcagaattttcccttcaaaatgagcataaaatggttttatttggtctagtattgaccaagttataagtagggagtccaattatatggaaatccatattttttcctggactgtgggaggcctgaaacgcacgaaaaacatgtttttagcttggtttgaagcttctaggaaggatttctatatccatattttccatatttcgcgatttatgtccatatttccgggatcgagccatttccctaccgccaattccctaccagccatttccctaccggccacttcc

SEQ ID NO: 30250 - DNA, 965 bp, Heterodera glycines
tgttttgctctgacgggcgcttcgcgccccgttttttttaatgttgttttgctctgacgggcgcttcgcgcccgtttttaaattttgttgggccttttcgcccgcttcgcggcatagttcgggcgcttcgcgcccgtttcaaatgttgttttgctctgacgggcgcttcgcgcccgttttttaaatgttgttttgctctgacgggcgcttcgcgcccgtttttaaatttagttgggccttttcggccgcttcgcggcctcagacgggcgcttcgcgcccgtttttaaatttagttgggccttttcggccgcttcgtggcctcagacgggcgcttcgcgcccgttttttaaatttattgagatcggacgggcgcctcgcgcccgttacaacggtgttagaagaggtacaacagtgatgagaagaggtacaatggtgattaaaagaggtataacagtgattaaaaaattagtaaatggtttatgaaaaatagaattaaaaaatgtattaatattttttaaaaaattattaaaaaatgcttttttttattaattaaaaataaactttgaatttacaatgattgactattattgtattgaaaataatttttttgacaatttctaatttaaaaaaacaaaaaagaggtacaacagtgattagtaaattcattaaattaaaatgaaaatattttttaacaaatttaatttaaaaaatacatgaaattctatcaattaaaaaaataattcatttaaacttataaaatttattcattaaaaaaaaattaatttaaatataattttttatttattaactcaaaaaatattttaaatgaataaaaattgaaaaacacgaaaaaaatggtagaaaaataatgtacatcgcccggattcgaacttcccccccccccctcaaaatgatcctcagaataccgcaatcacacagggattctgaggccttaacgatgtcaa

SEQ ID NO: 30251 - DNA, 1439 bp, Heterodera glycines
tttgcaagagaacataaatttgactgaacaaaagcggcgccaaactgaaagtgccatctgcgtacgcatttttcataataccggcccattccgaagtcgaagcgcgagcaaatatcaaaattcttaatacggtattttaaaaaattaatggttttattattttaagtttttacttgtaaataattgacagaaaaaaaaacatttgtaaaaacgacttgccagactaaaacgaccctctgactaaaccggaaagactaaaccgaccctctgactaaaccggccagactaaaacgaccctctgactaaaccggccagactaaaacgaccctctgactaaaccggccagactaaaacgaccctctgactaaaccggccagactaaaacgaccctctgactaaaccggccagactaaaacgacactctgactaaaccggccagactaaaacgaccctctgactaaaccggccagactaaaacgaccctctgactaaaccggccagactaaaacgaccctctgactaaaccggccagactaaaacgaccctctgactaaaccggccagactaaaccgaccctctgactaaaccggccagactaaaacgaccctctgactaaaccggccagactaaaacgaccctctgactaaaccggccagactaaaacgaccctctgactaaaccggccagactaaaacgaccctctgactaaaccggccagactaaaacgaccctctgactaaaccggccagactaaaacgaccctctgactaaaccggccagactaaaacggccagactaaaacggccagactaaaccggccagactaaaacgaccctctgactaaaccggccagactaaaacgaccctctgactaaaccgaccctctgactaaaccgaccctctgactaaaacgaccctctgactaaaccgaccctctgactaaaccgaccatctgactaaaccgaccatctgactaaaccgaccctctgactaaaccgaccctctgactaaaacgaccctctgactaaaacgaccctctgactaaaacgaccctctgactaaaacgaccctctgactaaaacgaccctctgactaaaacgaccctctgactaaaacgaccctctgactaaaccggccagactaaaacggccagactaaaacgaccctctgactaaaccggccagactaaaccgaccctctgactaaaccggccagactaaaacgaccctctgactaaaccggccagactaaaacgactctctgactaaaccggccagactaaaacgaccctctgactaaaccggccagactaaaacgaccctctgactaaaccggccagactaaaacggccagactaaaacggccagactaaaccggccagactaaaacgaccctctgactaaaccggccagactaaaccgaccctctgactaaaccgg

SEQ ID NO: 30252 - DNA, 2252 bp, Heterodera glycines
  unsure (1)..(2252): unsure at all n locations
aaatgcgaaacgccaaaanatgcgaataatgcgaaaggcgaaatgcgaaaagcgaaacctcggcccatccctgataagtatcgtagtaatccctgatctgatgtcatttttgttacatttgttagcggaaaaaaaatttgttgtcacaaaatggaaaagttgattagttaaaaaacggggcgtgaagcggatacacaaaaatctcacaaaacaaggtgaagaagcttccttttttcgtgaccgaaaaatgggtgaatttaaatgcgttaatgagcagggacttgttgaaaaacgagatacggtagtattattacctgaaatcataagtgtgttttaactaatttaatttaactaatttaatttatcgagcaaaccaaaggcacatgagtgctcttatatggtgccaaaaagaaaacaacaaataaatttgatcaaaataaaaatacaaaatgaataccgtaataaaaatgaataaaagcgaatcgtatattttagtgcaaacgggatcaaaaaatcagatttttaacaaaaaaaaaattttttgagtcgcatttttttaagtcttggggaacgggtgtgggtccagcgataccaataaaaaattttctaattttgatgattttttagctaatttttaagaaaaaaaggattttagggtccagcgttgcagataggtgccgccggaatttttttttttttttggcaaattttataacatttatgtccaaaaaatgaccaaattttgcgttatttttttcaaactttaaaaatctagataaaatattgaccataatgcataaaatttcaaatatttttgtgtattcttataaataagaacaaaaaatccgagccccgagttaaactgctcttttgtgaaaaaagactagagtcgaaaatggcccttttcgaacaaaacttattaacaaatcacattaaaattataaaaaaaaaatttcctcgacgccgcctaatcaaatggaatttctcaactttttgaccttttgtaaaattgaaaaaatgattaaactcgcgaaaacgaaagtcctttattgatttctttttaccccgtaacctttttttaatttaattataaatttattcaataaaaaattgaaaataataatatctgaaaacaaatatacacaaataagcgacaaaaaataaatgtccaactgcattcaaagttcaatatttatagctcgttagtgcgttgccgtataactaaaatacttttattatcacaaaaaatatttttatttatttatttttttacccttttgttattccaaatgcgcgtaaattaaacgcgtcgccgcgggcgttggccccgcaaacttccgcccatcggcgtcattgttgttaacgcaatggaagcgccgcctgctgagggcacattgttattgttgttgttgccgttgttgtggttgttggctgaggagggccataatacggtgaccgtatcccttaaatggataatatatttatgggaaaattattttactcgcaaataaaataatttattctttttatttttgattgctgatgggatatttgagagaaaatattataggtaaatattttttgtttttgcattacggaaagattgaagttttaaatctacataagcaaaattctaatgtttttatacaaaaaatgcacttttttatttcttaaagcagaacccccccccccccttcttctcaaattctcaaaatagaaaaataattaaattttaattaattatttgtttattgtaaaattggtgcaattttttttaattattcccctgcttgattttccggaatatcactaatttcatcaataagttggtctttttgttagtcgcatttcatgttgttattgctattttttctcaaacaaaaatttaaaggattttaattatatatttttttaaaatttcttcgtgtttttgggtgtgcacagttttcccacctcatttctctgttcattgctgcataaaatatccaattgccagcactgttcaaataaggcaagaaactgtaaattaaaaaagtgttaaatggtttttgaaaattcattttaaaaaattctcgcctcgaaaccattcgaatatttcgtgaaaattcggagtccaatgccctcggcagttgagacaattggaagtattcaatgattgggatgaggacgaagaccctgaaaaatttgtttaatgtatttcccaaatagaaaatcctgttgattgntttttcacccctcccctctcccccccc

SEQ ID NO: 30253 - DNA, 900 bp, Heterodera glycines
accgccgtttccataccagccatttccataccggccatttccatgccaccgtttccataccgccatttccatactaaggtatttaggccatttccataccaaaaatttttcgaaaattttcaggtaaaattcaataaatagataggggtttttcaactgtttgatgcttaatatgaattataaattcaatggattctcttttcaacgtatagattggaaaatggaagcaattctaacaaaaaagaaccgtaccaagcttcaacacaacggccattcatacatttttcacaagccgagtgccgatggtgaagttcgcttttgggcctgtgaacatcatcacgcataagacatcagttgtaaaggacgccttcacactgacctcgacaaccgcattttgcgtgaatttgggaaccaccagtgtgaaccaagtgcagctcgaatggaagcacaacgagtgatcactggaatcaaacgcagggcggaacaaaccatggaaccaccagcgacaattcgctcattggtcttgactagagaccggaaatttcaaatttgcggatcccgctgcgggactggaactcaaaattttttgcgggactggatcccgcaggattaatcccgcaaatcccgcatttaaaatttgcgggatcccgtgcgggattgcggattttaggaaatttcaaaaaattctgtattaataaaaaagtcggctctacttcagtttatgcgtccaatcaaagttttatgcgtaaagttttatgcgtccaatcattttttatgtatcaaattatgtttttttgccaaaataaaggttttatgctttcgtgagtcaaaaagtttgccacactttttatgggcagccgctgcctttttccattagtcggcattgtcgaccctcatgac

SEQ ID NO: 30254 - DNA, 1408 bp, Heterodera glycines
tctaggtagcgaagctcccaaagcgcgaagcgcttttccccagctaaatagccgacggttcacgcacccgctagtatatacgttatattgacaaggagtttcgtttcaaaaaacaaaatctcccggccgaaggccgggagcgccctgaaagtagtggaagggtcttacaactttttgaggagaatccgggaaaactatagaaaaaaatttagcgcggacgactgagtcccagggacggatttctcattttttcgtgcgtttgacggcacataactttttttctaaaacccgaatcaaaaaatgtctgctgtgagggggctaagttgaagtgttttctaaaaaacaaaaaaaattccaaacctctatctgcaataggaaaggctgtaggttcgtgaactttttcagtaccaactttgtccagttcagtcccggttgaataactcattagggtttgatctgggcggggagttaccagcagacttattgtagagttttgaaagcccgatttttccaaatttaaaaatttcgaaaattttcaaaaattttcgagttaggcctaaaaaacggttttcgggtttttgaattttaggattttttaacgatttttcccagagaaacgaagaccacttccaaaacatagtttttcgagctctatcgattggtgatatttttgaaaaaatttcgatttttttccggaaatagaaaaattttttggcctgagcgggacatttgagtcccgggcccataactcgtcaggagttgatcttatccaaaaattgccttagagcaaaattgtagagcattttaaatgctatcgaatggtgtactacatgatgtaaaattttcaaaaattttcgagctaggccccctagaaaatttcaaaaatttttttggggtcgaaaaagggggtgaaaaatttttttctggggtattttggggtgctgaatacgaatatgatgtttattttaagtttcggaaattttagaattttttaaaaattcgaaaatattttccaattttttggcctacgggattttgggctaatattgaaaaattcatatctagcctaagggttgaccaattttgagcaaataaagctttaaaaatagagaaaaatcaggagaattttatggactttatttggaatttctatctaaaaaaggaaaaaagttattccagaatttctggaaaaattcgaattttcagaaaaaaattcataactcggttctgaaaagatattctggaaaagtaaaatactacaaaaatccgcaattttttgctctataatataaattttattttatatttttatcacattttaaaaaaaagattttaggggtagtttatgacgctgatcacgaatacgtgatcacattttactttttgacatcgtaagacctcagaatcc

SEQ ID NO: 30255 - DNA, 1088 bp, Heterodera glycines
  unsure (1)..(1088): unsure at all n locations
ctaatttgggcctggatccggtctttatgcacacagacagctgactggtcctgacacgataaaagtttataataattatttaccctaattaaaattgcattaaaaatgaaagctgaataattaataaaaattatattcaattacattgtcttataaaataagtttaataagatttacgcactttttcctcatcaaaagattcgcagtccgttggttattattgttatgatgactattattgttcgtattggtgccgtttcttgccatttttggcagatgaaaattcgacccattggtccgtccgctgctcggcattttgcagggcgacgaattcactgtcgatgtccctacaaatgaagtgaggaatttgtctaaaaagttcgaatcaattttgaactattcagtaggatcggccacggtagtttaaccgaaaccgaatttctttttttctctttttcttttcctttcttctccttttccccatattccttcttcctttttgcttgcccgtttgttcctctgtggccattggtgcttcttccaaagtgtacatttggggcggtgtttcactttttatgccgttattttgccgcgaaatgccacaaacggaagggggacgaatgtcggagaaagtgaccaatgaattggactgttggccaaaagtgtcgaccattcaaatgacgaataaaagagcagcagaataaaaattacaatttactcaatttatcaaatttttcgcggattttgcagaaaatttttggggcgagtaaaaattaagtggccaaattgttattttgagggataaataatgtaaaaaagggctaatgtttggctgggatggagcaaagggcccctggcgacggaaagagtcggcggaatgaatgagttatttggngaaggggggaaggacgtcccccgccccccccccctcaggtgaatgaattgtgactttggtggcctaggggtgggccgagcagagactgctgctgcttctgctgggcgtcatctttccccgatttacgcccccaaagggttaagccaaaagaaggcccttcggtgtccctttacttaacacccccccccccccc

SEQ ID NO: 30256 - DNA, 1944 bp, Heterodera glycines
  unsure (1)..(1944): unsure at all n locations
tgtaaanatattaaagctatgtgttaaatgttctaattttgaccctagatattctaatttggaaaaaaaatctataaaaacctaatataattaccatccctatttttcacaatcgaattgatcaattataaatattagataaacatttgaacaaaacttagcacaaaactaaaaattaaaaagccaataaaaaaattgggttttagcaaatcccgataatcccgcgggatcccgaaaaaaatcttcgggattcatcgggattcggtcgggatcccgactcgggatccgtctcgatcgtttttccaaaatgttcgggattgatcgggatcgggattcagtcggtatcccgactcgggatccctccgaccccagttgtccggtctctactgcaaaagcccgcagcaatggacataaactcaaaccctatgtgttggtcaacagaaagcgaccggttccgcaaattatcaaccaatttgctggaaaattgttttgtttttcagaaaaaattagtgccaaacaatgttctcaaaattctatttatcccccatggggggtaaatggagactgggtgattattttttaaactcctcagaaagggggggggataattggagactgcggtattaatagagactgggctataattagagcatatacggtaagtttggcgttttataaattatttttgactctatagcactatgtgtccaatcgcattttttgagtccaatcaattgataaaacctaagtttgttcatgttcgaacaaaccctatctttttggtatcattcgaacgcacaaagtctaaagagctaaaataataatttcagcgtttaggcaattgccaaaaacgattgattaattaagcaatagttgattagtttcgtttgtaactttctttaaatgttaccattttcttgttttcccgtattattatcttattcagactttgtgctttcgatgataccaaaaagataggctttgttcgaacatgaacaaatgtaaaaaaccaggtatgttaattgattggactcataaagtgcaatagagcctaattttttgcttttctgaagtcatacttctctggcggctgctctagcgtcggctaggtcatcagcatggccagtgctaacaccgaccaatttgatttccacggccttgccggccatcgttgccattaatgctgctctcaattgcgctggcgtgcagtcttcattcggcctccgtgttgacaatgtttggccatcaagaccattctggccaatgatggtggtgctgatgaagcttttcgcgatgtcctcattcaataggaccactattgaatgtgccgcttcgtgcgcagcgaccaatgcgggtgtagtttcacctgtttcgagtcgtaatgcgctttgacagcaccacgtaagtgtagtcagtgagctgaaataataatttaaaattaatttttaattattaattgaaaaataatgaacattaaaatgaccggggggaggaatgatcgaaaacccgcaaaaaaactgacaaaacaatgtttggtgcccccttttttagtgtctcgcccccatttgcctcctttttgaaattgaaaacttaagaaattgttaaaattaatttaaaaattccaaaaccaaatttattgatgataatttctgagattttttcaatttctttaaaaaaaattttgagaaatgatacggggggaacaagctgctccctcctcgggcgctgcaccattttagactcacgaaagggtgcacaaatagttatgctctctcaaattgaacagtgaattcagagttcactagtgatcggactgatttttcgacaagaatgatctatcaataaatcgaacgccgattcagaccagaacggccaatcgatcgcattcaaaaatacatcaacagttacgataccaatcccacctcatctgaggatcacacccat

SEQ ID NO: 30257 - DNA, 1499 bp, Heterodera glycines
ttcaagagaaccgacaatctgaaaaaggaaaaataattaatttaattaattagacataattagtaggaataattaattagtcataattagtaggaataattgacattaataaagttaatgtcccgaaaggtcattgacacgaggcgatagattgtttgacggattccatttggagtgctaatagtgatgttgagctgcccaaactctgccaaagacaataaattcaatgtgagatgaaatccgctcaaaaaaaagaaaaactaaatttgcattgtattcgaaaaatcgcttaattcaatggggtaaaatgaaaaggaattagaaaattacatatttcaattaaacataattcggataaagcatatttttggtgtcaaaatccagaacattaaaatgtgattttgcttcatcattttatgttgtttatcagttttatccacaatttcaacatagtacaatgattataatttggactaaaattggctaataattgtggatttatgccgatttttcgaatcctttgctttgccttaccttcaccctcctcctgtaccgtttcaattcgcatttcgaacggttcgtttggattaaacaaactcatgttgggctgtgatccgaattggaatttttccttgaaagaaatcaaattaaaacaaatctcgccaacagtaaaactgtattttatgcattgggaaattaaatggtggcacggaattccgattcccgaaaaaaattggatgtcagaattccgatttccgaaatttttgataaaaagtttcggatattttcggaaattttttgagtttttttcaaaaaatcttgaatttttgaacaaattctgttaataaattgcctgaattttcaatttttcccggcggagcctatcattatctcttgtaataacggctcaatcaaaaaatatttaaaataataaaatatttcataccgcaaaattataatggcccatcgtaaaattgccatccttttggaacaaaaaccaggcaactttggacactgacaatgagagagaaaaaataaatgaaaaaaggcaaatttacagtgataaggaagcgggaaacggtagaaaatgcctaccgtaacgattaaattcgggcgaattgtgcataagatagaaggacagactcagttgtttgtcgcccatttctggcctccccattttgcctctgatcacaacggtgtccccggcgttcaacgcattttcaaattttttggaccaactttggcgttttgatttgacactttcgggcttaaagttaaaacattgaattggaagaagaaaaatcaactatgtttgagttttaagaatttaagaaaattcgaaataattaaaaatttaaaaattccaaaaatgcctaatctgtaaattcattttttaattttttcagcaaattccaaccctttccttcacttggggctcttcaatactgcttgggtagacatcgcccgcaatctgagcaatttacattattaaaatttaa

SEQ ID NO: 30258 - DNA, 1250 bp, Heterodera glycines
attagcaaactcgcggcagcgatctcttgttctttttctgatcactttttggcaaatcaattttctgcttacaaatttttattgtattttaggcgtaatgggcgaaaaaagcattttttggggggtgaaatgatcaatttttgggtttttgattcataaaatttataaaattagtcatcctatcgacatcgataggcttcattacgggaaatattgcaaattttaacaaaatcattaatcaaaaattaaacatttaaaaatgcaattatttttcttcaatattttttattttcgacttaaaaatcaacaaaatactttctcatcaatgtcaccaatcactggagtttaattatttatttaattaatttgcatttgtttaaacgatttctctcaaattgtggcacagaatttccgtccaaagtgccaatctcttcccggttgtgtgtcttggtctcacaaattgattttcatctcctgcaccgagtaataatggtgtgccggcggcgtttggtgctggtgataaaaggttccgtccgctgatggagtcaaaaaaggcgccggaggcaaaggtcgtcgcctaattaggcaattaattaattaattaatgagacaactgacaaagaaattttattaccgtttaatcgaaagggaaattaaaatccatcctttttcttttgccatcatattttttaaaaaaaacttagtaatccatcataaaattttttagtaatcgttaggaaatttcaaaaatttttcatgaaatttaaaaaaattctatgatttttgaaaaatattaccaaattttggcaacgcttttctgtgagttgtgtgaggaggagggcggcggaggcgaaggaaaagcggcggctgccgaagtgatgaaatggttctgatggtacggtgccaatgtgtagtgcttctcgtcaacggtggcggcggcaccagcggacaaatgcaaattgtcaatggacgacgagcaacagcagcttggggaaaatggtggcaaaatcagaggaaaatggcatagaaatgccggcaaaaatgccatagtaaaagctcgacagcctcgaaagataggataaaatttcgcgaaattaggaccagagttggcacatgggtcgaaaatgttgcttggattacaaataacccatcgggtctaacaaaaaaaagttggggcggcaaagaagcttagaattcggccagaaaatgccgaaaaagtcaagagaaagttggcaaaaaaaaatcaggat

SEQ ID NO: 30259 - DNA, 1669 bp, Heterodera glycines
ttaactcgcttcctccgtcctcctcttccgctgtgccgtccctctccccatcaaatgacttggacattgtccttctctctccgtcttcctccgttgccaaaccttcgctgctgctgagccattcgcccgaacaatttgcccaaagtcatcttctgctaatcacggacaaccgcgagcacattgccggcgcgagaactcagcgaaagatcaaaggaattggcgaacatttggccacaatgggcgtttcgtttgagagtcgtccgctttcggtcctttctttcatccgtcgataatcacaattaattgcattttaaggttggcgactatctttgggtgttgcagtggacaaattgggagggcaaaagacaggaattggtgttggattatgtggtggagaggaaaaccctcgacgacctccgggttttatttccattttaaagagaatattcatttccattcagaggagcatcaaagaaacgcgatatttggagcagaaacagcggctgaaaaagtgtgggctaagaaatgttgtttttgtgctggagggagggacgacggccaacgaccggcagttggagcaggcgatggtgtcgagtggcgtggagagcgggttcctcgtccatcggacgccgaatgtgcaggggacggccaaatttctgcaaaatttgacgcgatggctcagagagcgttgttctaagcaaaaggtcgttagaagaaaacaatttgctgatggtttttactttaagtgaccgacatcaaaatgtgaaattactgttcaattgttcaaattgaacccatgggaggggatgaagcggattataccaaaaagaaaatatgtataaaagggggggggggcggtaaagcttaacaactcgcatttccgaacgcccaccttaaccattgagtgtttttcgtcccttcaggtcactggccctcatttcgatttgtttcaacaagagagcaaaaaggcccatgccacgactgtttccgattattgggttcgccaattgaccgtttgcccgggggtgagcaccgaccgagcacgcatcattcgcaatcgcttcccgacttttcgttcatttgtcgaattttgccgtgaaaattccaccgacaaaaattcgataagagacgactattcgagtgccattggagtcgaattgccccaattgtcagctgcccctactaaaaaccttatgagcttttttaggcaagcaatgactacgaatgactaagacgaaaattaacttttttcaaaattgtctcctttctttcatagacttcatttgcgcttcatttagattgtgttcctctatttttatccgcccaagatgtataaatgacaatttattgatgtctgtgtagtgacaggttctagtgcagggttgccattcgtccttgaatggcaaggacgtccttgaaattgggccctctttcttgaaaataaaaaatgtccttggatgccaaggacgtccttgaaaatgaatatttagaaaagttttaaaaaaattcaaagaaatttgagaaatctttgtaattttcaacaatattttgattaaattatggcattatgtcatttaaaaatgtaatttttgagaatttttgaaattttatggcattaagtcactagtcactatttttcttaaaaaattagccaaaaatcgcaaatttt

SEQ ID NO: 30260 - DNA, 1654 bp, Heterodera glycines
caaaaaacaaggcgcggcgagttggccgcggcgagctgggcccgcggcgagaaagcttggccccgcggcgagatggccgcggcgaagtgaccccaactcagcctagaaagttgcaaacgaaaataatcaaccgttacttaattaatcatatcttttttggaaattgcctaagctgaagattaatatactttagcttctttaggcttttgctttcgaatgataccaaaaaataatacttttttcacaccatgcatttttaaaaaatcgaaacttcaaaaagaaaattttttgcttcaatactattgacctgactgtatatttccctgaatttgattttattgcgtaagatttttggaaaaaggctcggatttgtcgttggataccaaggacatcttggatttgtgcctcgctaattggaaatggaaagagtccttatttcaaggatgtccttggtaattaatattttgcggcgccgcttgatgaaaattttcaacaaaaaactatccattacttttgtcaacgtcaatcaaattaaaaattcttcgtatcattcgatagccctaagtgttttctagaaagttttttattagaaattttcacttgatggttttttgtataacgctttttttatggtttttatataacgacatagcaccaaaattattactaaattatatattttttatataaattcttagattttgtaaattttttgtaacattttctcgggtgaggcaaacggcgggcgggaattcacccggaattatggcactttcacaaaaccttaaaagtatctgatgacgaacagcgaaaagtggcgaatgaggctgccccatgatagtaattatatacatcacgagaaatttttgttttaaaaaattttgccaaaaagacaacttcgttattagggttcaaaatcttacacaaatgcatacttttttaattggtctcggtccaaaaagtactcgatcacttgttttaaaacttttgtatctgttgacaatgatttcattaaacaaatatttatatcggtaatgaaaatttaaaatgcttaataaaaaactaatttcgatcgaagcaccactttcgtttctcatccattttttatttaaaatttcagaatattctatggttttaaattagtttaccgattctcgagtttatacttaacaacaatctcctaacgggaatcttatttcagattcgtggtcatcggcataaaatgtgctgaacgtttcctaaaaatgccacccatgcgcgttttctaaatgcgccattttaatataataaaaaaattattattcgaactaatcgattgattattttgattttattattcgtgaaaatagatttcatttgacactattgttggatatgatggattttaattattatttgaattagcgccaatacagtagaaatgatgctcctgttgtttttggtcgccatattcttcagtcaatattctcccccgctgttttgttttcattcattattattttcattatttttatcatcatttttcggttctaaattaaatctgttttgctccttccatttttgccttcctctgactccgtcgtcatcattattttatttgttttgttttattagttatttctttgttatcatttgtcttccaaccaaataaatt

SEQ ID NO: 30261 - DNA, 1672 bp, Heterodera glycines
  unsure (1)..(1672): unsure at all n locations
taaagagttttgtctgatttttaattcatgcaccgggtcgggtctttgaattttgttttatctcacnatcataaaaatctttaaanattatattatcactttattcatgnaaaattaagcttaaaccaaaatccattcatttcaaatntagacaatataaatatttgttaaaagcagaaatagcaaaatgctttgagtgatcaaaatcacttgaagaatggaaacataattctccgatttgctcttttggttatggttgtcgacaaaatttaaactgttgatgcgcaactttgtgaacaggcgtgccttttgctgctcggcacggtcattggccaacgcaaatttgaccagtgccctgcaggaggcgggcaacggcgcgtcaaagcccaactgacggtagagcagctcgaaactgatcgtaagaagagtgaccaaaatttattatgaaattaatcactaaatcttatatgtacaaaaattatttcttggattaatagttttttacaaggaccacatgttgatgatagcagcagttgtcattctcgaatgaggaattactaaattttttgcaccaaagattttttttgagagaaatcttcaacaaaagttgatttacgagtgtcgggcagtgccaatgccaaaaaaattttgaaaaagccaagattccggattttataagacgtaattttacggttgatttgaaccaactgtattgtctgactaccattcaaacattatggattgtcgaacacccaactaaaccccactcatattgctcataaacaattctcgaattcctcctgtgttcatcaaaatacctcgagaattccaatccgatgaatttgagcaacaaattggccggcttttcgccacaattatctttgattattgggagagtgcaacgaacaactgatgaaagatcccttaaaattaataattataattaatttagaaattcaattttatttttcgaatcgacctgcaaagtgaattgaagcgcaattgcatagaatggaactcgcgactgatgatcgaattggtgaacaacactgtggtcatgctggttggaaaataaattaatgaagcaaaattaaaaagaattcaattataacagttttttttatgataggcatatatagaactaagaatgacattttttattctagtttttcaaaattattttttcgatggaattctataaaatattttccatgtttttccttatttcccatttatttttatattcacctatgaccaaaattttcatgaaaaacaaatatttctttcaaaaattatcataagaatgccttcaaatattatttttgataaaaaatataactaaaaatgaagaaaattcgtttggctccttttttcgtaaaattaataaatttaactttgtttgtagtttttctttgggaattatttttaatatcaattcacccattttagagcgtttttttattaaaatttaataaagtgaagatttagaattttctcatcaatttggaaaaatttatgtccttatttttgcaattttgtatccatatttcgcgatttttgatccgtaattgatgaccatatttcttgcttatttaccatataattaattacctgtcctaattatgcaatagtttggcatttcgaaattatttttggaaaatgcaattttatt

SEQ ID NO: 30262 - DNA, 1859 bp, Heterodera glycines
ctttttccaaatcaccaaaagcggactcaaattcctttgctttttcttctgccgctttctcttcttcttctccgcttggtcatcatcattttcttcgtcattctccaacaaaatctctcgcgaaattctttaaaattttgctcaattaattaattttttttttgttaatttgatataatttaatttatttttttaaattttgtttttcgattttaaatctttttgtttttagtaccgtaatgcttcgccgagtttcccccgcaattcgatgtgttctttttgatcaccgcccccaatttctatgataattcgctcggaaaattttccacttgatttgcttcgctttgaagagccttctgaaaaatgataaattgaaccaaaaaatcacaattaatgcaaatgattttgactttttttattattgaaataccgtacccttggccctttgggcaacggtagtgccattgtccgctgaatttttctgcccgccggcggggggagcagctgaaggacgatttcgaatgcgtcgaacagattcaaagggttggtcataatcttcgctattgctgctgtcactgccgtaatcattcccaagccgaactttgtcttcttcggataagcaatggccacaagttttggcacatttgtccttgagaaagtcggaatagatctgaaaggccaattttatgtgtaaaatttgttaattttcagttattttttaaaaaattaattcataaattaaaatattattaaaagggatataataattagacattcttaattgatttaacaaatgcaaaaagtttttggttaaaagtcactttatctgtacaaagccctgaattgtccgcgcacgaaggcgacatatcctggcaaatggcactttttggactcgcagttatttgactgtttttccgcacaagaacaatgaccgaaaattaaacttacaattagtatgaataatctgagctgaaagattagatctactactacttattatccacatacttattttgcttaaatgcgtatgccattcgatgagaaattatgaacgtaattccaggggatggcacaaagctcgaattaataaaccaaactccgtatttttaggcattggaattcaaatccttccctaataaatgaccatttaaactgtttattcctccggctttcgcttaattaatataattacctccttaggcgtcttctgtacgccaaccacttctcgtgactccgcgcctccgccgcgtggtgccgtctccgctcgttgctgcggcgtgcagagaccgcacgagcgcgcgcactgctgacggacgagcggagagacggcctggtggaagcacagatggcctaacgacgtgcagtcgtcggccgcgtcaaaacatgcgtcggctgcgcacaggccgcacgtgtgctcgcacatggacatcatcacctgacaaatcagggagagaacggcatttggttaattaattaaagggataatcaaataataaaacaattaacgggcaattaaaatgaaataattaacgggcaatttatattcatagagagtagaagaagacaaattttttaaaaacggatttccttctggtaaagaccaattttgggacccgaaactcggttgtcagtcaaaaaagagtgcctactaataagatactcctaattagcacattaattacccttctccaactcggctctttgcatttggtcttatgcgtcgcgcagtcaatcaccgtgccgccgctgtccacgcaattgaactgcggcgtttcgcaacaaaatgcgcatgttttggcacaacggcgtgccaaatcggacaattctgtcattaaataattatttttcaattttttgct

SEQ ID NO: 30263 - DNA, 1143 bp, Heterodera glycines
atttcttggtaattagtgcctttcactcactgatcagctgtgatcagatatgtgtcccattcttttcctgattagtctgttaataaattgcccatgcccctctgtgggtggccaaatggccgtacccaagggatgtccgagcgatcaaaatagcgacaattcaacattcaattaattgtccattaattagtggaatcttttagcgccaaaattggattgccaaaaattggtggtagggcaccaagggactgactcggtgctggtgctcaattggccaccttgggaaaactgagctccgccgagtgatcgtcgaaataaaatcaaattccacttgatcagcaccagtccccccttttcgtgatcgataagtttgatcagcccaccacaaagcatcaaatgaaaaattcaattgtgtggtggcgatttgtccctcagccgcctctgtcggcggcggcggtgtctcttttttccgtcgcgtttttctcgcgcagccaatgggcgcggcctccgagaaaaacggggcgggcggggggaagtgtccagcaccattctcgagactaagcactctcgaccagctaatgatggtcaagactgactgattgactgactgactctcggctgaccgatcgttcgtttcggccgatcggctggcagcagcagcggcagctgtaagtaaaatgtgacagccgaccgacaggaacaaaattctcaaattctcaagtactctctctgctgggccccggggacagcagccgaataaataattcgaaatttgtgatttaattggaatttaatttgaggggaaaactttaactcaaccatttttaattgcttttcttaaccattttgaaaattcgttgattcttttttatatttttttatttttaaaattaaattttatgtttcatttatttattttaattaaaaataaaatgaaaattttccacttttgcgcatttatttgtttttacaatttttaatattattttactaatgctataaaatcttgattattttcccctaatttttgaggggtcgccgcttttccccgtcatttgcgaggattttctgctattacgctcgattttatcccgactgtttttcagagggtttttccaccctatttttctggccgattttcct

SEQ ID NO: 30264 - DNA, 1553 bp, Heterodera glycines
cacacattagcaattcctttcaaaagggaagaaagacatgcatcactgtgaaaggaaatcaaccgataaaatttcaactaaattttaatttttcctattcatgacttactttttcacccaattttttttgcttttgtgtaaagggaatgaagaagtttaagacttagttgaggtaatatggcaaaaaataacagaccgataaaatgtttgatgaatggccaataaaaaatgctaataatggaatgacaaaatgctgaggatatgagaaaatgggaaagcgaagaagaaaatggtggcaaatgggggggggggaagtgtgaatgatggcccaatttatgacggaatgatccgtcattggctgttatttgccaagagatcataaacggacaaaaagcattagaagaaagaagcgatggaagtgttaagagctttctcgctcaatcggcccattgaatgtgtgtcaatttctggtgaaaaagtctaacgactgttctgccgtttagagaattttagggcaatggaaaaggagaaactttggggagggattgaatttcgtgagaaaaacggagaatggaaggaagagatggagaggaagaaggagcagggagaagagagagagcagagcggaggtaggggccagaggggggagaggggtcgagactctcgaaccggtagggcggaaaataaatttgggtttgaatttaaaaacggttttagcaattatgctttgaagtttgagttaacacttattaaaataaaaacaaaaaatctttgccaattttctcttatattgcgaatttcttagacaaattaacaggaaagaatttatatagctatttttaattaaattaattttaaacaaagattataattaattaattgcccctcccccctttgtttcaacttactatctcggacggtagaaagacattccgcaaaacgaggcaattgaatttggctgattcgtccgtttattttccgtaaaacgaaaaaaatgctcagaagaaaatgataatttgtgaagaatcgaagagcggactcccagcaaaacagcagcagaaatgcttaagtgcttctttttccctcatcgtttggggatttgcactttttaaggccaataaataaatgccaagaagagagagtgccatcaaaagagggccaaagggaattttgaggggcgcagaaattggggagagaataatgaagagagacagagaaagggaacagagaaatagtgaaggaaggaagagaaagagacggcgaacagtgacacaaaaagggaaggaattgaagaagggaattcgaaaatgatgcttttgtactgtgaatcgaagctaacaaaaaaaggttgttcccggacggggaacaagcttctcccgtgcgagagtatcgcttctttggttctcgagaatttctcagggtttcgattaagcagcagaaatactcataaacagggctgttttttcctggattctatgtagtctaattagtaggaaaaacatcttctttttggtatttgcgtacaaaagtcgtgacttttatttgcatatttt

SEQ ID NO: 30265 - DNA, 1397 bp, Heterodera glycines
tttaattttgctagaaatttgaacaaaacaatttctcaatatataaattttttaatatttaaaaaaaaattcagtggagaaattttttcaagtttttctagcaaaactctctctctctctctctcttcctccatctctttttctcttcccctctctctctctctcactctctctttctctcccactcactctctctctcccactctctctttccctcttccctctcctccctctctccctcgctctctccttctctctctctctccccgtctctttctctctccctctctctctccccccgtctctttctctttccttctatctccctcccctctcttcctccctctctctccctctccccccctctctctctctctctctctctctcttcctccatctcttttcctcttcccctctctctcttcccctactccgccttccttcctctgttttccagcctcgtgttcggccctctgatcaagctcttcggtaggatgccccttttgatgttcggtgccgtgataaatctgttgatgatcatcactttgatggttcgccttccttacttcttttgtcccatcattttgatcaatagatttgggttgttaatcccggcgatcggactttgtttaacgctgtcgccggtgtttgggggatggcagacggagtttggaatacgcaattgaatggtaagcaaagggaggggcggcggggggagggggaggagatggcctatgtccaacaacagtattcccggaatccgctcccacccccaccttttgcgtccactccccccccccccttccggggttggctctgactttatgttcaaggcttttgggtcgcactgcttggtcccggccgtgaccaattggaggtggcatttgccaattatcgtttttggatgtcttttggcctcgcgctcggcttttttctcatccgcgccacttccatcgacactttccttctcatctctttcgccttccttctgatgggcattctcggctattttttggtcgaattattcgaaatcattgcggtaaaatcgaaaattcgaattgggcttaaaagaaacatttcttcagatgaaattggaattagaaagaagaacaacggaagtgataaaggaagaaaaaggagaaggaacggaggcaaagaagaagaaaggacaaggagaagaagaagcggaaaaggagaaaaaaaaggaggaagagaaaaaagaagtgacagttggaatggcatagaaagaagaggaagaggacaggcaaaggaggaggaggaggaggaggaggaggaacacggatgaagagcaaaagaaaaaagatggagaaaagggagaaaagggagaagaaactgaggaaaagaggaaataaacgggaaaaggaagagaaaaggaa

SEQ ID NO: 30266 - DNA, 1733 bp, Heterodera glycines
ttgcttttctacatttctattctggcaattatggcatcattaaaattttttaattgaaatttaaaaaattaataaatttaatttttatcctgagttatgaatattgttaaatttaaaatctttttttttctattacgcttttgaattttccattttaattccaataaaattatccacgtataatttcagtggatttggtgagcgattttgacataatgaaaaaaaattcgcctaaaattttgctgagcaaataaaattccgttgaacttttaaatttcggagtgagtttaacaaatgtttgaactatatccacgtaaatttcaataaatcgaacgatgtgaatagataaatcacaaaaattcgctcagaaaattttactgatcaaataaattttgaaaatttgtggggcacctgaaaaaactgtacaaataatgcatttgaatatgccgacggaagtcaactttcaacattgcactactgttcaaagcatataaaagggcttagtgaatttggagtgtaagcatttaatttaattttaaaatttaattattatttcgaaaaatttatttaaatttccaaaaaaagtttggggttttcagtaatttcaaaaaatgaacgccttcttttcgttcggcatttttcttgccattcaattccatgcccaatttgttttggctgatgttacggcctcaataaagccatcgtccacatggaacggtggtggccaatacattttgagcttcaagaacaatgacaactccaagacagtgtgctccgtcaaattcacgttgaccccagcaagcggagtaaaaataaaagaaatgtgcaaaatgccaaaatataattttttaatggggaaaagtggaaaaatgccatggaattaattaagtataaatgccaaaaaattttggaaaatgtcaaagaataattttaaaaatggggaaaatgtcaaaggataattttataatagggccaaaaaatatttttaaaatggaaaaaaatcataagcaattttttctttttctttgtccaaaaagaaaaatatttttcaaaatgaggtaaatggccaagaaagctttaaaaatagtaaaataaatttactccacccattaattgatattatcttcctaattactccgctgattcatcattcacaaattactaattagacgtccatctcggccaagtggggcttcgacgcggtcagtggcgcttccaaccaatacactctgtacaacaatgccgacatagcaccgggcgccacaaattcaaatggtggcctcaacattcagggcaccaaccctaacggaccaccagcaacgccaacactccaactgattgaggccaaatattacagcaacggtaattggaggagggcaccaatcaattttaattagccatttttaagtattaaaattagttttaaaaatttattaaaattagttttaaaaatttattaaatttaatatattttttaaaatgaaatagcagcagcacatgaatttttcttttaagaaaaaattataaaaaaaattttttaccgctctaatatggttggcaaatgtgtgccaattttcactccattcttagggggtggttttattagaggaatgaaggttggctctaatagagagaatgggaggggaggtggagttatttatttttattttgcatttttttcaccagatgtatgctttttataaaagaacagcagagggttgggtttctaatag

SEQ ID NO: 30267 - DNA, 1216 bp, Heterodera glycines
atagaaaaattgggaaaatgtccaaagaacttttttgagagtagtatttagacgtaataattatacggttgatctacctaattatgctgaattgttatacatttatgatcaaaagtcgcttgagagtcgtaggttaaaaatagacttaaaacttttccatgaaataattttaggcaaaataaatttacaaaataacgaatacttttctttttccaaaaaccctgtaaaaaacgaattcactataagaacagcttattgctcaaccaatgctagatacaattcgttctttattcgaacggtgccgcgtcgttgcgcgaaacccgcaaaaatgggtatttcgcgaaaaccgcataaaagggcgttgcgcgaaaaccgctaaaattttataattaatttatttaattgttattaagcaaattaatcaaataaaattattttataattgatttttttaaattattaagcaaatttatctcaaataataaaacatttgtataacattcatagatttattttttttgacaaacaactagggaaatctcgactgtaatatatttactcaaatgataaaaatatatataattttatccatattttaattttatattcttttgatggcagatttaggaaatgaaaggagaattcaggaaatacgctggttataagcccatttggcggatttagcaaaaaagcatggatggcggtttttatgcaccaacatctttgaagaaacagaatttgctctttccgatatgattgaaactattggaattttttattaaaaaatttatgacgattgttcaaaattcatagattttttagtacccaagaggtcaaactcgtaaaaaaatttactaagaagaaattctttggcgtgccataaagccgcaatccaaatggtaggtcgttaatcctagagaatgactaaaatatggattatgactcttaacataaataaatggtgatggaatgtttgattataatcctatttctgatgaaccagcatttgaaattattagctttattatttaatattataataagttatgttaagtattaaatagatttggataatcctactgctgaattgactaagcaagagaatataaaccaactttatttacttcgagcggggacattttcaagcaatcatggatccaaattgattgaattaaatgcttgattatagattatatttattagggatttactttaa

SEQ ID NO: 30268 - DNA, 974 bp, Heterodera glycines
ggggaggaaaaagtgatggccaatgggaggaagagggaagagtggcaaattggagagggaggtgaagagaggaaaggagagagacggaaaagggggaggaaaaagtgatggaaaatgggaggaagagggaagagtggcaaattggagagggaggtgaagagaggaaaggagagagacggaaaagggggaggaaaaagtgatggaaaaatgggaggaagagggaagagtggaaaattggagagggaggtgaagagaggaaaggagagagacggaaaaggggaagaaaaagtgatggaaaatgggaggaagagggaagaatggcaaattggagagggaggtgaagagaggaaaggagagagacggaaaagggggaggaaaaagtgatggaaaatgggaggaaaaaggaagagtggcaaatgggagagggagatgaagagaggaaaggagagagacggaaaagggggaggaaaaagtgatggaaaatgggaggaaaagggaagagtggcaaatgggagagggagatgaagagaggaaaggagagagacggaaaagggggaggaaaaagtgatggaaaatgggaggaagagggaagagtggcaaattggagagggaggtgaagagaggaaaggagagagacggcaaaactgttcatattgtctcgggttttttgggtctcggtctcggggttttcagtctcggggtcgggtctcggggtcaagtctcggtctcgagtctcgggaaattttcggtctcgaacatcactaattctgagcaatgtccacaaaaatggggcacctgtatgagtttggctacccagatgaaattgccttccaattagtacccctcattattgcagaacagcgtttttctgatcacccattcgtcgggctcgggaaaagccatcgacgtggtgagcgagctgctggaacagattgaggaagataacggcgtaagtgcaactgttggctctagtg

SEQ ID NO: 30269 - DNA, 1871 bp, Heterodera glycines
tttttccatttattcagcgttgctgatccaatccccaatttcgtggcaattatttcgtcactaattttgaagtttctttcttttagttcaaaatattgttgcatctttttaaatttttcattattcgagaatggtgaattaaataagaaaaaagtttttttgaaatttctcttactattatggtaatttggcaccaattcttttttccatcgtataaaggtcatttccgaaatgcccaattctttcacaaattctttctgctgttttctttgggtacatatataattctttaagttcatcaaatcgttcaataatttctttcattttctcctcaaatgcgctttttaattttgtttttgttaaatttaattcattttcccatttctgtattaaatttctatttgttcctaataatcttccaatttttgtctcagttttactttgatctttccttttgtatttccctttcaaaaccatgacaatgaatgccctggcttactgtagactcctttatatcccattattaccatttcaatacagtatgcaacagtaacgactttattccgggaaaggaatgatacaattcttaggctctctacctacaataattcggctcgggaacagatactgcccggagggagaggccagatctgagtatagtgatcgagagctcgaccccgggagcgtcattaacgcgcgaggggactcttgagaggacacccgccgattatgagatggagtggattgtttgagacacccaatacttgttaaatattgaatagaatgacgattcataatgatcgatcatataaaatcactgatctattagtggtagaatattgtttcttccaccttatcagcgtttctcgtgagatttccaatttagtggaaattatttcgtcactcatttgcagattggctatttttattatacaatatcgcttcatctttgtcagattgtcggcacagagttttgggttgcttgatacagttattagaattggatccatgcctgacaaagaaaattttatgggcacctatttataggacagaatacagcctaaataatcgattaattttttattttatgaattattaattttagccattaaaaaaattggatgaaaatgtaaattttagacaattttttggaatttacattttgatattgattttaaatttgtaggtacaaattaaacatgaattgcattactttttcagaatgtgtcgaccatttagatatgctattttatattataatcagattggcataatttcttttaataatggcctagtaacaccgaaacaattcaagagaatgatcagcataaatattctaatcaaatataaatttgtagtaatttgttagagaatcaaattttcttgaaatagttataaatttgacccaagctgacaaagaaaattttatgggcacctatttataggacagaatacagcctaaataatggattaattttttattttatgaattattaattttagccattaaaaaaattggatgaaaatgtaaattttagacaattttttggaatttacattttgatattgattttaaatttgtaggtacaaattaaacatgaattgcattactttttcagaatgtgtcgaccatttagatatgctatttgatattataatcagattggcataatttcttttaataatggcctagtaacaccgaaacaattcaagagaatgatcagcataaatattctaatcaaatataaatttgtagtaatttgttagagaatcaaattttcttgaaatagttataaatttgacccaagctgacaaagaaaattttatgggcacctatttataggacagaatacagcctaaataatggatta

SEQ ID NO: 30270 - DNA, 1317 bp, Heterodera glycines
  unsure (1)..(1317): unsure at all n locations
ttttcgaacttttgcttaatgctattataacaactcatgcagaaggattcgaagctgtaacatatgttttaaatttaaaataatagttttatttcaagaatagaaaattgaaatactttttttttcaaatactactttggctttttgttttacaatttaataccattttttccatttacttaaataagaaagcaatgaattaaaggttattttataaataaataattttttttgtttattttttaatcttatttttgctaagatcataagtttctgttttattttgttttttatttccgtatatgcatttcattttttagaattcatttaaatcttaatttacttcctttatattctttgtaataattgatccagtccacggatgttggggaaggaattcaaattcttctactccccttttaattttcttttgtattcgggtagcatatcgctcactcttacagatcaggggccttatacccgttttggcagttaaaataggtaaaccacggttaagaaatttaaatcaattctcgtcttcaagtttttaaccatgtttaggcttaacaacggtacctcgattaaagggatgtttaatcatggttaacacctcaaaaccatgccttgcatttttaggtattctcgttttcccatactaaacagcgttttaatttttccctaatacttttaaccacattttatagcatgtataagcccttggataagagaacttttaataatattcgattaaaaatcgttaaaaaactttaaaaccgtcaaaaatgttaatttttgttttgtatcctttattatttttacattattttctttccgagcaattatattaatttttatgcctagcattggtagttaatttataattttaaatatttggtcgctttttagatttttaatgtaaatatattgtttatcatacttgaaagcgtcgggcgcaacattcgaaagatcgtcgtcgttatacactgctttataaataaaatttgaaattatttgattatagtattataaatatttttttacttatattaggtttctattcatattccttattaaaaagtttaatacttaatagtttcgttctttttctcttccaactcataggtagctaatatttttcagttttttaatgtttacattaattttacaaataattttacaatatagttagattacatgaaaattttaaatatttttgaagtcctgtttttacagaagtctatatattttgtattccanattatgttttggaatttagaaggtggtttttatttgtaaaatatgttgaactgatttatt

SEQ ID NO: 30271 - DNA, 1203 bp, Heterodera glycines
aatggaagacgttggcactgaaaaaggccacgatgcctgttcaaaacgcagagctgtttggattcgtcatccaattccatttgtaggtatgcgtcttttaagtccaaatttgtgaaaaatgcagcgccgcttatggctgcataaatgtcatcaggccgagggagtgggtggcggttgagttcaagtgcattgtttaagccagttgagaaatcaatgcacattctgattttgccatttttctttttgacggccaaaatgggtgctacccaatggctaaattctatcggattaatggcaccgatctgtaagaggcggtccagttccgtgttgactgcttccagtgagccatgaggaacgggtcgggctttacagaaaaccggtcgagcgtcggatttaagaatcaattgtgccttaatcttggtacactgtcctagctctttaccaaaaacatccggaaaattttctttgagagccgtcgtgagtgacttaacatcggctatttcttggaaaggtgcggcagatgatgctcggattccaaccgatgtgtgcgtctccggaaacatgatttctttgggaatcagttccgttgcctcaatccatggcaaaccaaacaaatcgtaattgagctcttcagtcacataagctgttagctttttggctggttgtcccataatgctgacaagacatctaaatttgccaattgttttaaatgtgacgtcgttgcagttgcgagtctcaatgtcggttggcaacaatttaggttgtcctaatttaatccatgtttcaatggtaaggactgtcgcctgagctcctgtgtcgacattcatttcgatttttgtgccgttaatttagaccaaaattgtccaccaccgtccttgagtcgtgccaatttgtaggcatgttgctttgacttggaccgtgtgaaatgaacggcgttgcttctttgtcgtgaatgctccctttcggcaaacattagcaatgtggccttgtttttggcacttgtggcatgtcgcttctcggaagcgacaatctgatctccagtgatcagtaccaccacatgagccgcacggctgggtcggttgtccacgaattgcttttcctcctgtggccggtttttgctgtgccgggtggttttgttgcacggcatttgctgatttggccttggtttttgattctctcccactgttgagggcgagttcggat

SEQ ID NO: 30272 - DNA, 1451 bp, Heterodera glycines
gtacattccccctccccaccttttatcattacccaaccattttttaaattttcaaaaaaagaaaatatttcaaaaaattcataaaattggcgataaacacttaaaatgagaatctacaattgaaaaaacgtcgtaatttgagttgacaaggcaaatttttatttcaaactttgtgatttttatttgccaaaaaacgcagccctactaattacgctaaagatgtaccatccgccaaattggtggctcacaatcagttggttaaattactatttttgaaggtccgggttcgaacccaacatgaatcatgttctcgattttcgtccctttgtctgatgaagcgcatatttagtaagacaaccattgcagcaatattttttgttacacaaattttcttcaaaacactgactgaaactgaccgtcactgagttgttggcacattcaaagtcaaacagtgggcccggcacttcgccaaccgcaattgtgaatgccacaatgaaatggatggcctcgcaatggaacactttgatagccggatggcattggttgtggctggacgaagtgaaaatggaggaggatgaagaaatcgaggacgtctcagtggtggtgccatgggcagaggaggcggaggaggacgagcagttcccaatgttttttaccggccttttacgcatccactgaaaaattttaaaaatttaaaaatggtttttttttaatttttagggcttatagaataccaatctttggcatcatgacaaaatacccaaggaaatgtacctcataaaataaattgagaaatttcaaaaaatctaaaaaatattatgacaaatcatacaatgtgggttggcaacttagaaaaaattttgagaaaattaaaaaaaaaacaaaaaatgatttaaaattttgtttttagttattatcgaatttttttaagatctgtcaaaccccttcctttcaagcacccaattttaagttgttcatgtactagcaatatttttgaaattaaaaacagaccatgatcaaatcgtggagatggcagtcaaatttcaagcgtgcaatgtctttgacaatgttcgaggtcagataggccaggccaatttcaaccctaaaaaacagtcaaaatcaatttcatattttgaaaaaagagtatggaaatgaatgaactctcccaaaacaaaccttaattggaatggagaggacggcgttgtcaagcagtggtcatagcccacaaaaacactttgcaaatggacatgcatatttgcctaacataaggaaattagttgttttttcgtttttaaattgtgttttttttaaaacttttttcaaaaaattccatttgcccactcccccgccaagaaatcgaataaaatgcttaattgtaagaccatcagtacatcccccagcccatcaatacacacttcaacttttggcagcacatagcccggcactccttc

SEQ ID NO: 30273 - DNA, 1515 bp, Heterodera glycines
  unsure (1)..(1515): unsure at all n locations
atgcctgcannggtcttgcaaaaatanttgcaaannttcatataaanntagcattttcaattaggaagaaacaattntggagaagaaatgtttaagaaaagagcggaagaagaagagtgatttatttgtttgtgattttcaatttattgtcgcttttttctttcttaatttgccaaattataaatttcctatttttcaaagaaaattggaattagtcgtttagatattgaaagctagaagaaccaattgaaaaatggatcaactaatttggcattcacacctatgcattttctaattaaatttattcaaaaatacaccaaatttctatgtatttaaaaaaaaaattctgaagaatttgaaatttttatccaaaaatggttaaaagaattttttgtgttagatttcgagggcgctttcataagttaagtcccggattttttttagtttttgtgcatttttgtcaattgttacaacccaaaattagtataaaaattatttatttatttatttatttatttatttatcgagcaaaccaaaggcacatgagtgctcttatatggtgccaaaaagaaaacaacaaataaagttggtcaaataaaaaatacaaaatgaatatcgtaataaaaaaaatgaataaaaataaatcaatcaaatgttaaaaattcacaggtgataaaaatatagtgtaaatatggcaacatggaaaatcctactcagaactcattgcttttagtaaacccctgaattcctttgccttattaatttgcaccgctaccactggaaggttattccagctttttactattctattgaaaaaattattttgagttttggccgtgtggcgctttactcgcaaaagtaaaggcctcctgggcctttccgagaaaaagaaacttttttcagcatcgaggctggtgaacccttttataattttaaaagctgttgttaaatcattgatttttcttctttcttccaatttgtgtaaatcagtgatttttagtctttccttatattttctgtacaaaaaaccacattttctaaatgcttttcttgtgaaaaatttttgaacccgttcaattttgtcaatgtctttttttaaatttgggttccacacttcggtagcgtattctaattgaggtcggacaaaagttttataagctgttgttagagtctttatttccctggtttttaagacttttaaaatctggaaaactctaagataagcgtttcgtacaattttgttaatattttctgaaaaattcagtttcgagtcaattaaaatgcctaggtcacgaacattatccgattctgaaatcttttttgagttaattanataatcttttttcatattatttttccctaaatanagaacaaaacatttcccagttgaaattctaacccatttatttttgaccatttttccaagcttcattgcttntatctaatgattgtttatcatcatttcatgggcatatataatttacatcatcgcatacattttatgccactgatgat

SEQ ID NO: 30274 - DNA, 433 bp, Heterodera glycines
gagtagagaccggacgggatcgggatcccgcgggatttcttcgggatcccgctggattaaattcgtgatcccgacctcgggatccgtcccgagcaattttccaaaatgttcgggattgatcgggatcgggatttcaccgggatccctcccgaccatttaccaatcccgcgggattggtcacgataatttttcgaaaagtctccattttaaaattaagatcttgaattttaattaaaaaatattgtcatttgctaatttttcttaaaaatcccttaaaaatgcgaaaaaattttacgggtctccaaaattccactaaaatctcaaaatttgacgcaaaatttggccattttgtgactttttccaaaaaagaattgaaattttttttttattcttaaaacaaaattctaaatcttattagctggggctgggctac

SEQ ID NO: 30275 - DNA, 1657 bp, Heterodera glycines
tcctcacctgtatttgtccgtgtactgcttgacagcgtcgcaatactcttccattgcctcgtcaatttccgtctcgcaccactgttcaaactccgaatcgttcagatggcccatcggaattggcacagtcggaggaggcggaagttgcggagattcggacacgcgctcatcctcaaagtcaataggaacggttcgggtgccctgcaaattaaaatttgctaaaaaagtaacaaaaacgctgcaaaattcaattaccatcgaatggtgcgaacttttcggcgtttccgtaataaatatgcgggttaaataataaaggatgaaaatgaacatctgggtttttgaaaatcaaagaactttcaaagaatttatttaaaataggaatttataaagaacggaccgtgccgggcccggcaccgctttttgtcggcccctgtgattttggaaaacttcagtttggagaggccggtcccggaaaccagttgcttctgaaaatatcagtccggcccggcagatttgaaaattccgatctctagaatttgaacatgaaaaatggatatttttgaatttttatcaaaaatattctgtttttagaagtgtatttgttagaaacctaaatataataatacctatgaatgttaaattaaatgtgactatttttatcagatagaatatgctaattgtttttgaatacgcttttgatttgctaaatctatgctttccgcacatgcgattgtaaggattagccagtggacagttaaaatgcataaaacccaaaagggaaagacaaatgagcattgcaactgctggtagctcagagggtaatttcgtccaaatgaataatagaaatgttcgtttaccgcttttgagatttaatggaatttttttaatttagtcaatcactgcctcactcggtcacttcgcttacaaattagtgtcccaagctttaaacttgcagtccgatgaaaaacataaattaaaagcctttccgtttttttttggattttcgagacagatttttggctttcaaattgaaagcgtgattcataggcctgatttaagagcccaaaaatgtcgataattcagattcttcagttctcgggcggggattccgatttccgacaaaattttcttttaatgtgaatttcatgacaaatttttgaccaacacttgctggttcgtggtccacgtgtcttccttcaatcatgggctttttatagaacacaaagtgcacggactttgcaaattctcatgcgtctcaatgggcgagtgcttttgatgttgttgtggcacggcatggcactgccggcaccggtgccaacaaccgtctcacatcgcccaattcgccatgagcaaattgacaaagtccgtggcctccgttcctcggccactcctccttttttggcccgtctccccacgccggtgccaccattttgtgaggggcaaagcattgcccgaaattataatttgatgcagaatttttggcaccgaacggccctcagattttcataataatactcaatgcttcttcattcgtcagacattgagatattttgaaaatctgcagtccattccgagcgctcataacacacacagtagtgaaaacaatggggaatacagtagtaaattgttatgagggaatgaatcattggagaagact

SEQ ID NO: 30276 - DNA, 2201 bp, Heterodera glycines
  unsure (1)..(2201): unsure at all n locations
gagcaaatgacaaaatattacnatagattgcctcatttttttttacaatttgaaattttntatntgataaatttatttttcttaacattttatctatcttaatttacctgcactttntagggttaaatccatgatcaaacagggatgtgccggggaacatcaccaatccagagaatttccttgtgccgaattccgaatcccgccccgaaaaagcattggcccctatttttcgtttcgtgccagggaaggcacggaattctgatttctgacatttttggggtcggaattacgatttccgaaatttttggacgtcggaatgccatccttgggccgcgcctttttttgtgacaggcatctccaatttgagcatcacaaagtttgggctaaattaaaccattcggtaaaattaatttaaaaaataattgtaataaaatttagaaaataatataaatttgtttgctttttaatgtcatgcgccaaaatatggagatatgcacaaataataaaaatttgtaaataaaaatatttttttatttttatttttcccatcaaatgttttcccgaccatttcattttatgcttttagcaccgtgacatgtcacataatgataaaaaattttttttgttattgatgacacaaacaaaattagcatcagctgacacgagaaagaaattatgatttttctttttgtataaattaaaaaaaatttcccacaatattcatactggcatagctattatttttctcgtatacacttaatagaaaactcattctcggtgaaatggcaactcgtataaaatttctttgaaaaaacaattaaaaattaacttttttttataattttcaataaaaaattaaaaaagtaataaaatccgaaaaaggaacataactgatatttgattatttttaaaatattttttatccaaattaacaagtttttcacacatacaaaattttattttaaattaaataatatagaaattaattttattccgacaactttttttcaacactaattactcccctcgatttaaatttttttgatccgcataaaaatgctgatgattacgctggcatttgtgaaacaaattgtgaagttgagcctgtttttcaacggcatttcctgggatggcacggactgcacttcgttgtgcccggcccaacaaatggtgtccaacattggccaccaaaaaccacgctgattttttgtggtggcttcaaatgatgatcaaaaatgggacagaaatgcgcaaattttttgacataatgcttgaacagatcaaggcggaggtggaccaattcaacaagaattgtgaagaaattgttgaaaaatgggcacaaaagcacaaaaaatcgaggacagcaacaaattcatcagcatcaatagcatcatgccaaaactttggacaaaatgtgccaactttgcaaagttattatgtctattatcaactattccggcatttgaacacaatcagagcagcacaaacggttaattagggtgtaaaaagggcaaattagtatcattaaaaaagtgggaaaaaacagtattagtggaaatcaacattcaaatttattacaaacattaggtacacccaaaaattgggaaccaaaattaagactttccaaaaattcggtcttagcaagttagggtttctggaattgtcattattctactagctatttttttacacagttatttgtccaaaaatgccaattaaataagcacttttttgcttataaaaattaaaactctgaaaattaaaaaaaattaataattttaagttaatataaaatttccaactttttagatgacatctgagcactatttgctcagttattgggttgccacaatgactgaccaattaaaaatacaaataaaatattttgcaaccaaaaatggatgtgcagagatgattcaatcgttgatctgatcattattttttttacctcaatttggttttcgaaatttttttttgtgcgaaatttaataattgccataattattgaattgagcctccggggtctgtatttccaatcccttccccttgaaaggctctgtggggatggacctaaaataattcaataaatatggtaattgaatttttttgtcaaattttgaaatttatcatataattgaagctaaatttcggcatttcaggccaataggcattccttgctaattcctcaattagactaatta

SEQ ID NO: 30277 - DNA, 1349 bp, Heterodera glycines
  unsure (1)..(1349): unsure at all n locations
agaattgagtcccagtattggaatgctggtggcctgattttcattgattggaatgtcattgaaagttgttgggttgagtcccagtgtttggatgcccggagattttagtcccagagattagaatgccggagaattgagtcccagtattggaatgctggtgggttgagtttcagtgattggaatgtcattgaaagttggtgggttgagtcncaatgtttagaatgccgcagatttgagtcccagtgttttggaatgccggagatttgagtcccattgtttggaatgccagagatttgagttccagtgattggaatgtcattgaaagttggtgggttgagtcccaatgtttagaatgccgcagatttgagtcccagtgttttggaatgccggagatttgagtcccattgtttggaatgccagagatttgagttccagtgattggaaagcctgagaattgagtcccagagattgaaatgctggtgggttgagtcccagtgtctggaatgccggagatttgagtcaccgagattgaaatgctggtgggttgagtcccagagattgaaatgctggtgggttgagtcccagagattggaaggccattgaaagttggtgggttgagtcccagagattggaaggccattgaaagttggtgggttgagtcccagtgtttggaatgccggagatttgagtcccagagattgaaatgttggtgggttgagttccagcgattggaaagcctgagaattgagtctcagagtttgaaatgctggtgggttgagtcccagagattggaatgaaattaaaatgctggtgggttgagtcccagtgtctggaatgccggagatttgagtcccagagattgaaatgctggtgtgttgagtcccagagattgaaatgctggtgggttgagtctcagagattgaaatgctggtgggttgagccccagagattggaatgccattgaaagttggtgggtgagtcccagtgtctggaatgccggagatttgagtcccagacattgaaatgctggtgggttgagtcccagcgattggaaagccttagaattgagtctcagagattgaaatgctggtgggttgagtcccagagattggaatgccattgaaagttggtgggttgagtcccagtgtctggaatgcaggagatttgagtcccagagattgaaatgctggtgggttgagtccccagcgattggaaagcctgagaattgagtctcagagattgaaatgctggtgggttgagtcccagagattgaaatgctggtgggttgagtcccagagattggaatgcctttgaaagttggtggggttgagtcccagtgtttggaatgc

SEQ ID NO: 30278 - DNA, 1231 bp, Heterodera glycines
  unsure (1)..(1231): unsure at all n locations
aaatcatgttttcccatctccctttctcccaaggggtattattttgtaaaagctttttttcaaaataaactttttcaaaccccatttttcgcaccgtgaatgttatttttatgaaattctgaaccgttttgagtagattagactagaaaaaattgaaaattttgaaatcatgtttcccactcccttctctcaggggtattattttgtaaagtctttttttccacaataaacttgtcaaaccccatttttcgcaccgtgaatgttatttttatcgaattctgaaccgttttgagtagattagactagaaaaaattgaaaattttgaaatcatgtttcccactcccttctcccaggggtattattttgtaaagtctttttttccccaataaacttttcaaaccccatttttcgcaccgtgaatgttatttttattgaattctgaaccgttttgagtagattagactagaaaaaattgaaaattttgaaatcatgtttcccactcccttctcccaggggtattattttgtaaagtctttttttcaaaataaacttttcaaaccccatttttcgcaccgtgaatgttatttttattgaattctgaaccggtttgagtagattagactagaaaaaattgaaaattttgaaatcatgtttcccactcccttctcccaggggtattattttgtaaagtctttttttccccaataaacttgtcaaaccccatttttcgcaccgtgaatgttatttttattgaattctgaaccgttttgagtagattagactagaaaaaattgaaaattttgaaatcatgtttcccactcccttctcccaggggtattattttgtaaagtctttttttccccaataaacttgtcaaaccccatttttcgcaccgtgaatgttatttttattgaattctgaaccgttttgagtagattagactagaaaaaattgaaaattttgaaatcatgtttcccactcccttctcccaggggtattattttgtaaagtcttttttccccaataaacttgtcaaaccccatttttcgcaccgtgaatgttatttttattgaattctgaaccgttttgagtagattagactataaaaaattgaaaattttcaaatcatgtttgccactcncttctcccaggggtattagtttgtaaagtcttattttcaaaataaactcttcaacccccattttcgcaccgtgaatggtatttttattga

SEQ ID NO: 30279 - DNA, 960 bp, Heterodera glycines
atgggcatgcagttggacccgtgagcagttggaatgggcatgcgtggcacccgtgagcagttggaacccgagggcttggcttatgggcatgcgtggcacccgtgagcagttggaatgtgcatgcgtggcacccgtgctcagttggaatgggcatgcgtggcacccgtgctcagttggaacccgagggcttggcgaatgggcatgcgtggcgcccgtgagcagttggaacccgagggcttggcgaatgggcatgcgtggcacccgtgagcagttggaatgggcatgcgtggcacccgtgagcagttggaaaacgagggcttggcgaatgggcatgcatggcactcgtgagcagttggaatgggcatgcgtggcacccgtgagcagttggaatgggcatgcgtggcacccgtgagcagttggaatgggcatgcgtgcacccgtgaacagttggaacccgaggcttggcgaatgggcatgcgtggcacccgtgagcagttggaatgggtatgcgtggcacccgtgagcagtcggaaagcgagggcttggcgaatgggcatgcgtggcacccgtggctagttggaatgggcatgcgtggcacccgtgctcagttggaacccgagggcttggcgaatgggcatgcgtggcacccgtgctcagttggaatgggcatgcgtgggacccgtgagcagttggaatgggcatgcgtgcacccgtgaacagttggaacccgagggcttggcgaatgggcatgcgtggcacccgtgaacagttggaacccgaggcttggcgaatgggcatgcgtggcacccgtgaacagttggaacccgagggcttggcgaatgggcatgcgtggcacccgtgagcagttggaatgggtatgcgtggcacccgtgagcagtcggaaagcgagggcttggcgaaggggcatgcatggcactcgtgagcagttggaatgggcat

SEQ ID NO: 30280 - DNA, 1221 bp, Heterodera glycines
cgaagctggcgaaaaggcccaaaaatcttaaacgggcgcgaagcgcccgtctgaggccgcgaagcggccgaaaaggcccaactaaatttaaaaacgggcgcgaagcgcccgtctgagctcaacaaatttaaaaaacgggcgcgaagcgccctaagcgcccgtataagttcaacagatttaaaaaacgggcgcgaagcgcccgtccaaggccaacaaaaattgaaaaacgggcgcgaagcgcccgtatgagttcaacaaatttaaaaaacgggcgcgaagcgcccgtcttgagcctcaatgtggactaaaaacctctaataattttttaaaaattcaaaaaatctctctaaccaattcgatcaagcgcccgtactatgccgcgaagctggcgaaaaggcccaaaaaatttaaaaacgggcgcgaagcgcccgtctgaggccgcgaagcggccgaaaaggcccaactaaatttaaaaacgggcgcgaagcgcccgtctgagctcaacaaatttaaaaaacgggcgcgaagcgcccgtctgaggccgcgaagcggcctaaaaattccagataatcttttaaaaattccaaatctcttcacaacgcaatagcatatctaggtagcgaagctcccaaagcgcgaagcgctttttccggtcttacaactttttgaggtgcatccgggaaaactatagagaaaaattcagcgcggacgactgagtcccggggaccgatttctcactttttcttgcagtttagggcccctaactttttttctaaaacccgaatcaaaaagtgcccgctgtgagggcactccccacaactgtcctctacatgctggtattttttattttttgatcagaccaaatcccggacctgtacagacacggagactcagttaatttttttttcccacttcagtaccaggcgaataactcattaggatttgacctgagcgcagggtggccagcagacttattgtagagctttaaaagcccgatttttccaaattttaaaatttcgaaaattttcaaaatttttcgatctaggcctaaaaaacggttttcgggtttttgaattttaggattttttaacgaattttcccagaaaaacgaagaccacttccaaaacatagtttttcgaacaggatcgattggtaatttttttggaaaattttcgatcttggaggggaaatagaaaaaaatttggcctgagcgggacattt

SEQ ID NO: 30281 - DNA, 1009 bp, Heterodera glycines
  unsure (1)..(1009): unsure at all n locations
aaagaaaaaaacttaattattaatacggcaaaatatntaattaggaaaaaaagtaaaaaagaaatatgaggcattaaattgccatgaaacttctgcatttttcaaaaacgaggaaaatgggtgataattaattaacctacaattatttttgaattttttttaaagaatgggacccgagggcataattaaattcgatgcctatttcacgatccatcagctattttaatctcttttataccattatttttcactatgatttcttcaaaaaaatacttttgggggaacataagaaaggagtcctgctgatgtgcctgcctgtacgccgtcggcaaaatttttttggaaattttactcaaattttttaatagattttcactaccaattattgaggtgagatagcacaaaaagaaatttctaaaaattagctgaacaaccatgttttgagggcatttcgacttttttattttccaatatttatcaaaaatttaatcgaaactttcagttaaaaaaaatttctccatcaaatattttatgtggaattactaattaggtgtacaaattgtaattgcttaacattttgatgacgcggatagccgccgaaatgcacacgaacatacagcggtagaggtcaactccgtctggccaactccgtctcagcaatgttcaaaaagctataacttttttctttgttggccaaacttcacaatcatggtatcattcgaaagccctagatgtttagaagatatttataagctatttctcagtgattaatcagctctcaaaaaagttgtcagttgaaaaccgcaaaaaaggcagaattttcgaagttttttatttctatctttttttatagttcgaaattttctgtaatttttagtaggctaatagagcctgtgaagagctttcgaatgatatcaagattgtttgattcggtcaataacttcaagagttatattgactcaaagttggctcagacggagttggccagacggagttggcccgttccgac

SEQ ID NO: 30282 - DNA, 880 bp, Heterodera glycines
ttgtaaaatgccaaaatcgccattctattggctttttcttttcctttatcggaatgccattggcatcccctctgcttctcttcccttccctttcttccccctccccctaccaacgatggcatttcatttcaattatttgagattttctgtgcgctaaaacttgagatttaaaaagaagccaaaacatatgatcactcgaaaatggaaacccaaataaaagtatgtcaccaaatttcagactgccccttaggcgaaaaattcatcccttttatccctttattctccatcctccacagctctcttcctctctctctctctgtccgctctctctctctccctccctctctcctcactctctccctccctctctccttttcggtgctctaattaaccgcgataaaaacatccgaataaataaatagcttctgagataataaggtttatcataaaatttcatttaaaaataaaccctcaattattggtatgaacgatactttccaaacatgcacgcgttttgcgctcgagctatttatcatcgggcttgtcaatccaaagcgaaacaacaaagatgctgttttgaacgaataaagggcataggttattttgaagaagtgtcaaagaacatgcagcaataagcctgcaaaatctaataagtggaaaatacatgagtatagaatttattttcagaaagtgtccacatacttttggaaaaatatatttgcaatttatcaacaattttgagaagtgagttagaaatgataaacttcacgattcaaaccaattttcgttgctctaattaaccgcgataaaaacattcgaatcaattaaatagcttctgagataataaggttatcataaaattcatttaaaataaaccctc

SEQ ID NO: 30283 - DNA, 1664 bp, Heterodera glycines
  unsure (1)..(1664): unsure at all n locations
tcagcatcatccgtgtgtgtgcctaaccgctcgaggaggtgctcgttcagcaggtggaccgcacttcgcgacgggaagttaaggacggatattngctgccgcaggatgcgtaccgaaaaggcacggcactttggctttgaaccatcaattctttcccttacggttttnagcgctcgaccgaatgcgtttgnaggcgcgtcagttgggaatggcggtggaagagtgctttccggattggccaaagcttcggcaacaatactgtcgcattcggaaacaagcagtcagagagcgcatgcagcgcaattgggagatgatggtgatgatgcacggcggagagagaatgatcgacgaagactttgacgggcaggagcaatattacgacggatcaggtgccaccctaattaaaaaaagtttttgcagtaataaaggggaagggggccggggtaaaatgcaatttttttaattgaaagttggattttttagacttttcttatggtcggcaattacaacaaaaacatcgaattcctcctgacattgacatggacgtcgatgtggaggacgacggcgatggaaatttgcgctgaatgagacgagaaaagggaaaatctcggctacatgacatttcgcctactaacccaaaaacattcatttcgcctactaaggtaaaatcggacattttgcctactgacatttcgcctacttgttattccgcctaccaagccaaaaacattcatttcgcctactaattagtaggcaaaatgaatgtttttggcttaataggcaaaatgaatgtttttggcttagtaggcgaaatgtcagtaggcgagatgtcggtaggcgagatgtcgagtaggcgaaatgtccgtacaccaaaatctccattcttctattgactattaatttgtttttggtactttttgtaaatgcataaatttgtttatacttttttttgaatcctcaaaggtttctctcctacaaattatctattattttcgtttttaatggtaaaacaatttttaaaattcaaccttttttatttgcagatgaaccgattaacaaaaatccaatcgttgaacaaaatcaatgaacgggagctgagcttgggcatttccggcgatttgggcaaatcgtggcaccaaaaatacgccgattcggcttggatttacgtgggcaatttgccgtacgatctcaacgaaggcgatgtgcttgcagttttttcgcagtatgcatgttattttgttatttattaaaaaaaatttcggctaaccgacataattggtgattttttaggtatggagagatagtgaacgtgaacctggtgagggattggaagacgggcaaatccaagggcttctgcttcctgtgttaccaagaccaacgctccacggtgctggcggtggacaatttcaacggcataaagctggtcggacgggtcatccaagtggaccattgtgaaaactacaaaatacccaagtgtgtattggtggctaacacatatttcctgcctaatccaataagaattcgaacaaaaaagtcacaaatgaaattttactttatgcccaaacggcatgaaaaaaattgattaggagaaaatgccacttacaattagaaacaattttataacaaatgcttttaaagatttcgtgaggacgtgccggaggaaa

SEQ ID NO: 30284 - DNA, 2228 bp, Heterodera glycines
  unsure (1)..(2228): unsure at all n locations
gcagggctcggatctgttcttatttataagaaatgttctgatttcgggctattgttcttactttgttattatttcttaaaattcttcataaatttagaaatttatggcataaatgttcttattttacctataaattttaaaaaattaatcatttcgtcactgctcgtttcatctcttatgagaaaaattattaaaaattatttatttaaaaaaaaaagttctcagtcacgaaatacagaaaacacattaattaaaaatgagaatttgaaaaatggaaaataaatgaaaatttggaaggaattaagataatttaattaacaagacttcttactcctcttctactattcattttttaataaaatgattaaatatttgcatataatttagtcatttaaaacaaaaaacaactcgttgttctatcattgaaacaagtgcaacaagaaatttatattcagaagcacagatttggcttggaaaattaaaataaatgtcttataaatgaatgaaaataatttgaacatttttaaattaaaaaaaatatataaatcaattaagaatataacgattaaaatttaaatgaaaaaatgaaagtcgcaaaaaaattattggacaaacattggcaatggaaaagaataacaaaagaaaagaatggttgaattaaacaattacacaaaatatgaaaaaataatattaataatatttaaaataaaaataatattttatagtaaaaatgcaaaagatttcaaaacggcattanatacagcagctaaagaacagccaaaaagcagcagcagggttttggagccattttaaaaagattttgacgaaaaagagaaatgcaataccaaatattcaaatgctgaaaataaattaaattagatattaaaactttctttttttggcaaaatgcttttttattaccctttttgaaaacaaaaaaatttaattaaatattagaaaattcactttcattttgaaaatttttgtgcatattttcagtttttatatgtgcgtcttttgcaatttcatataactttacgcataaataataaattaaaaaacagcaagtacatataaatatgaaaattaaaaaatttctgtaataaattaaataaattttaattaacaatttagattataattttaataataaaattatagaaaatgcaaaaaaaaacattcatcaaagaagagaaaaccaattaatgtacaataatttaaaaggaactttcttaaatattcacaattaaatagaagtgatactgaaaataaaaaaatatattttggcaaaatttaaataattgaaaagaccttttaaggctcagcacaattttaaaataataatatcaaaaaattaaaaacaaaacaaaaaagaaaataataatgttattttaaagtaaaaaactgagcaaaccccattaaaaaataatgctataactataactatttaaaagcatgtatttaattattcataatttgacgagacaccacttaaaaaatgaatgagtgcgcgaattaatggacagaaagacactaaataattaacgaaaaaaaaaaatcaaaatttgcaaaaaacataaataaattatcaaattgcgccgtcaaattattacaaaatcaaaataagttcgaacaaaaggacatttaatttaaaatgtttaataaaaaaagatctgaagattacataaaagacatatatcagggatgttgctcgtctcgtgtctcgtaatctcgtattctcgtgttttagaccgtctcgtattcgtgtctcgtatctcgtattttggcacgagacacgagatttttatgcactggtgagaatggggggggggggggggtaagaaaaaatattttttggaaaaataaagaaaaaaaatttttagagaggaaacaaataatttgatctatcttttaaatcaaaataatattgaacatttagtctataggctaaacctccagccttccattgatttctgcctggttctagtcccacacacagtaaaattattttcttatttttattgttaaaattattttaatttattacgaaaatttttccaaccacaaaaaataaaaacaataaaaatatttatttcatttttttaaacatagccaaaaaaatcaattattttttatttcggcccgaccaatttttcgtaaaaataacaaaaattttgaattttattaaaaaaaaaattcgtctcgtctcgtggctcgtattctcgtat

SEQ ID NO: 30285 - DNA, 876 bp, Heterodera glycines
aattttcatcattttattttataaatggctttttcgaccgtttgcatgttaatggattttttcaaatggatggcttttggagttggcacaatttgcaatgtactaatgagccgcctgattatttggcacactcccaaattaatgcgaatttacagcaaagtaattataaataaaaaaaatttatctttttgaaataaaaactttttatttatagattttattgcaaacttgcgcagctgatcttttattgctcataatgaccatactttttattccggtaataataattgttaaattcaatattattaaaaaaaaatttcaaaaatttttaaaaaagtaaatgaaaaaagattctttttttgaatttattttaaaaaattattgaaaaaagtaatgctaaaaagcacgaaatttaagaatttctacaaacaaaaatttgtcagaaaattataataatttatttccaaaacaaagttttatgtcatttagtacacctttacaacgaacaaaggcgaacagatactgatagcaggtggtttgatcaatttgaatggatcaacggcagaaaatcatggcttgattttgctagcctctgtttcttggacttttctcgtaatggcatcattgtttagctatgtgtcacaattcatttaccgttaccttttgttaaattggtctgcaaacattttaacttttacttaatttgaaagaattggataaatgggcaaaccaacaaattctaaaaatttctaaaattgttgattttttggcaaaatttgagggaagctaagaaaaaagcaaccagtggcgcatggataaatttaaaatttttggaattaaatttccgtttaataatgtgcattttttggagattga

SEQ ID NO: 30286 - DNA, 1278 bp, Heterodera glycines
tttccatataaataaatgggcactaaaaatgggagaattccttatgaattgcttttcgaactcatttccgctcttccgtttgacattcgatgggccgtcacccgggtttccaaggcttttgatggttttgtttggcagaagcaattttcatgggttagagctgaactgacccgcaaggaagcacaaaggcaaaaagtaggctaattactcgctaattatgtggggttttggcacaaaaaaattggcacaataatggtgagcacatttgtaatgcttcttcatttagaaactcgagttccaggaagctgcccaatctctttcgacggctgcccactctctttcgacggctgctcaatcgctttcgaactcggcgttcaacaaaaacaaattgttcttcaatttgcttaccaagcgtacgatttatttgggcataatgttttacaatattctttaatattttcagaaatgtgttctgttcgccaacttaccgttgacatgttgcaggtaataaagaaatggtaaaaaatattttgtaagttcggtttggtacaattaatagggaagggttgggggattagcatttctcacctattggtccttaattgttagacttttctttttggatttttcccatctttagggcattgaggcccaacaagccgtcaaaaagggcggacggattccaaaggctggttgctcgtcggcaggcggcggacgcggcggtggtgcgggtcgaaagggcggcggacgcggcggtggtgcgggtcgaaagggcggcggacgcggcggtggtgcgggtcgaaagggcggcggacgcggaggccgatgagcaaattgacaatcaccgattgaagcaacccaatttattgtcatggagatgatttgcgggaacttccaacagacttttcgatgtccttgacttttattgttatttaaatgagttttgtgtaagcgttattagaggacggataaattatttgtttttgattgtccatttaattttactcggtaattaacctgtattttttttttaccatttttgattgtttttttaaatagtttttccaattttaataatgccatttgccgtttcgccctctttcaactttttgcgtcgtccgttgcctttgttggtctttcgtcgttccctttttaaaccgccattggactcaccgttctgtggcatttaccggacaaatggcgaaatttgccggacggatgacattttggtgtgccaacacaagatgaactatcaccctggagcaaatgtacccagga

SEQ ID NO: 30287 - DNA, 1631 bp, Heterodera glycines
ctaattaataatttaattaattaattaatcgccttgggtcgcatttagaaatgcagcaatatgttgaagaaaaatttttaccaattttttccaaaatcgttcttttttggtgttaattaattatataagtacatcataaaaaaatttaggccgaaccaaaacgaaacaatgttagtttaatatttgtgctaattaaaaatgtaattggacaaagttgatcagttcacttttcgtggtgatcataacatcaaaattgtttgaaatcaggtcgaaaaacgcctgggggttggaaaattttttctacaaaaagaaaattgagagaatcccgttttcgttccgcatatcacaaaatttccgttccatcatgaattttctcccaaacgcttaaacagttgcaacttttaattttcttttacagattctataaaatattatcttttatgataaaattaatcggattacttgaaaaaaatgaagatggaatttgttttttaaaaaaagttttgactgatttcagtcaatgaaataaacaaaattttttggaatttttattgtttgtgttggttgttatcacaattcccattaatcgcattttataattttacaaattaaaagcaatcacagaacaagataattttagaattttttggaaataaatagaattgaacaattttttaatccgattttagctcatatttaatgaattttctgctttatataaaaattcagtctcaaattatgaggaaacaggcatgttcggtggaatgaacatttaccatcaaaaatatttcacagtcccgcttcctgaattccgtccagaagcagctgcactcggtgcttcgactcactctgtttcacaaagtccaacagttcgagcatccgcttgatcccaatcgatattcctctgttaattgccgatttaattatgacgttaaatacattaatttgattaaattgaatgtgattaaaatatcattgatttccaattgtttggctgattgcgactattacacatcgggttatggtgagtgatcagtaaaagaatacttctggagaacatttataaattttcagaaaaattgtttaataattttaaaaaaaaataattttttttttgagttaaatttttccagctttttttgctaatctcaaaaaagatacagcctcctttcttactcattgatgcatcgcaattattttttcatgtcctattatgcatttgtataacccatttttgaatcgagagaagaagtcaaagtgaaaccaaattaaaactttcttgacatcattcgatagcccttaaagctctctatctacctgcttaatgcaaaaaatattttattactttcaaaaagttatgaacaagtcaattccgcgtcgtgccaattcaatgctgtaatcgcgggggtgtcaaaaaattgtttatcaattttcatcaaaattgataatttgtgcatttggtaaaatttagcgaaaatctttgcgacttaagaaatatgagcaaatttgtactgatttcttaaaatactcattaattttttagaggtttgtcacccccttgtaattttttcctaatatttttctaggcttattttgatgcttgatcactagggttataagttgtatgcgct

SEQ ID NO: 30288 - DNA, 1604 bp, Heterodera glycines
gcaacctttcgaattgtttcgaaatttttcaacgtggaaaattctactggggaacttttcggcaaaatttttaatcacacaacggatcaagcaggatttcctgatttcatttcatttgcggtgagtgattgattgcttattccttaattgatcaattatggctaactaaggaattgatggacccgattaatgggttttacagcaacaatgaggacaacgtgacattgacagttgactttatcttaaagaatgctgaaatgggcctatttgcttcttctgtaccaagaacatccgacaggacaattaattgggaaattgaaaaagtttccgaatttttccgtgaagccattggaagtgagcgcaaaagcgaaactgtgcacatcaaaggatttccgtggaaaattgtggccaaactaagccaattcaaagatttggactttttccttttgtgtgccatcccaaaaagtgagtgaacttaataaattaattcgaattagtaataataataaaattaattgctttaagcatcgaattggagttgcaaatgttcggcaactttacgaattggctcggatgattttagtgataggttcgataacttgatttttaacaatgaattacccatctgtcgatttgatgttggccttccgttttcgcatttggtaagaaatatttttgttttttcgaataacaaaaatatatatttaagttgcgcagagctcgaattttgaggcatatgccttttttctgcgcattagtttcgatatattaagcataaataacacattttccacttggttttatgctttccgttgacttttattatgcgttttttttttgcctttttcgggattttcgtgccttaaatgccttttaaatgccttttttcatgccattttcgggatttttgtgcccttttcatgtatttttcaattttttggtgcttaatctagtgcctttttcgtgatttttataaagatatattttttcctggctttctgtacgctccaacataaggaaaacattcccgccacctataaaagtcaaaaattgtcagtaccaaaagagaccctctgattttttcattttaaaaccaaaacaaaatggcctaattgcttttttaatgatataattaaggaattgattggcacaaacaaagggtggtacgacaaggaggaggacaaagtgactgtggtcattgattttttatttgacgatgaaaaaatggagaagccgtacggctcgattttcagttaaatttatgccattttttaaaaattttttctataatttttgtattcattttcaatatccgctttttatgctcataaattcccatttcgcagatcggggacgagcaggaagagaactaaattaatacatatattaattatatatataacttatactcagagaaaatttggaaatttgaaaaagaaaatccaaatcttgctctgcaaaaataaaaactcaaagacctttttgtcagactattttccaaaaatctttgatggacgaggttcaagcaaatgctagccaagtgtaactaaaaaaagatacaaaccgttgaaaatttgttttcgtataatgtataaaataaaaat

SEQ ID NO: 30289 - DNA, 1456 bp, Heterodera glycines
taggttaataggcacaaaaaatgcctctgctgcatttcactaccctttttcctttcctttccattttcggcttttatgtgacattcgccgctttattttctcagtttcactctaattttctgcttgcgactgtttaaacgaaacgccaaatggtgggctttttgaatttttctcctctgctcatttgtccgcctaatctctactctctctgccattgtttttgacttgggtaaataaagttgaggctgaggccgcttaaaaaattgtctggcttaatttgtagcttttcttcgcgttggccgggtaagaagaaataacatcgcattgccatccaaaggcgagcaaacattacttggcatattaattaatgccaaatactcgcgcccaaattatccagtccaattccgccagcgtttttttcttcgttcttcgtttctccttggcaactacaaaatgtgccattgtgcgccgacattcggtgccaaaagtgccatttgcctgtgggcagctgtggtgggataataaggcaaaagggaaaacagaaataaacgaagccaaaataaaaattaaaaaaacaattgccaatgaaaggcggaggagtgaaaaaggtcaacaaaaaatgatgaattaattacagtgggaggagcttttttgaattaagtgcaaagtaatgccaagccatcgccgtgtgccgtggcatttcgccaatttcgaagaaagcaaaacacccgcggcaaccaccgaccatttccgcaaaggcaaaacccccggggccaaataagcgggcggatggacaaagtggcaaattggcaccaagcgccacaacggcatcacctcaattcactcgccggggggtgtgacggttgggttgggcagcgattggtatgtccgtccgtataaagttaagtatccaattccggggggattaccctggctgatagcaatttacaaaatggaatgaaacggcacgggcatcggaggaaaatgggagaggggagggagggagacttttgccggcaaaagcccccgggaaaaggcaaattggagggggagggggacggactcacggcgaagggtacggtgaaggtgaacagtcaacggatgcatgaggagaccgtttcatcagaaagctagtgttatggttgactttggcacttccaattttgacattgctttacggcttttgttttcgaatggcttatgagcggccggatttaagggactttttggattaaaataattgctggtgccgctttgaatgtttcactcatccgctgatgccaacggcaaatgggtgaaaaagaagcgaaaagtggaagatgacagagaagcagatgaaaacagaaatagcgaaggaagcgcaacaaaagaggaaaagatggtcccctcacggaaggggggaagaggaattgcgaacaaaaaacaacaacaaaaacagaacctaactggatggaga

SEQ ID NO: 30290 - DNA, 886 bp, Heterodera glycines
cgtgatgccattggctgcggtgtatttgctggacaacaaatggcccttcggttggtctccgtttcccccccccccctcttcggtgggcttcgtccataaatacgcctccggcaacatttctcactatcattcattcatttctcttttctctcccctccctttgtcccattttccgccatatgcaaactccacgaaatccgatcttttctgcttcccatggatataactgcttattgtcaggccatttttggccaaaggacacgaaatgagaaaatgacaaaacaaagggacgaacaaattgatgagaaagaaatgggaaagaaatcgaaaagataaaatgggaaaacggaagggggggccaatcacccagggggcaaatggtgtcaaagccacctgctaattgcctaattgcttcgccagggcctttcatctgccgcttttgggtgaccgccgatttgacgctgtgcacagcttccatcctcaatttgtgtatgatttcggtggaccgacatttggcagtgacgcggtaattaagtgtggtaattaattaatgagttggtggcccatcattaataatttctcagtccgtttttgattagaatgcaaaaaaattggtttaatttttagtgcgcttcgctactccgccattcgagaaaaatggcgaattttgcggtcatcaaagtaatggcacagcccactggaaaataccaaaaatttaactatttaagaaccaagcaattgaattaaatataaaaaaagtcggaagtcagggtcacatggattcctttctagagaccggaattttgaaaaagatagacccggatttcagagtcgaacccggacagtatttcgtgataaactgtgttttctttgttattgcgcgcat

SEQ ID NO: 30291 - DNA, 1372 bp, Heterodera glycines
  unsure (1)..(1372): unsure at all n locations
ggggaggggcggaggctgtggcaccacagcagcagaagccgaccgaccgaccgaccagaaaaatgagctcggcttacgccgttggcggcaaacccaaccgaagaaacagcagcagagcagcgaagctaaaacattattagcattgtgtaagccgcgtcctctgcttctctggcgctggtcgctctctctccctctctgtctgctgttgggcgtctgtttttactttgcgtggcccaacagtaaaattggatgttctgccgccgtctattggacatatgaaatagaaaggcggcatagtttgggatgatgggaaaacccatacgcaaaaatgttttcttttggcagcggcaccaggccaaaaatcacccttttatttattcggcaaaggaacccatttgaaggaggctacaagggtggacataagaatacggagggtataaacataaagcataaatatgtgtatttatcaaccggcttaaacaacgacggatnaatgcgtagaaatgtgaagacggacagagatatttgaaaagaaactttgtcaaaaacttaccactaaacgataacaaaaagaaaggcgtcataataaagcatatcaaatacaaatagaaaaatcaaaaatgtaattttcggattcagagatacaaaaaacaaaaaggagaggaaaccatggagagaatgccaaaggaatgagagacaaatctgaatgaccaggggaagggggacaaacacaagaaatttgggagggtagaaaaatgccttaaacaacactctgtcccgacaatacgatgatttcgctccattttcattccaaatgctccgtctctcttccaattcactcgtttctcttccccctctgctccgctctccgcaccttctcgcggtacttccgcctctgttccgcgtgtttcctccgcgccgtttcgagctgtgccgcgtccatccgcgcccgcctctcctccgccttttgccgtgccttggccctcgcctctgccaattcgtccttcgtcatttgccgtctccgctcgcgctgctgttggttccgcttccggtacatttcggccctctccttatcactcatcaaaatgcggtgcagggaacgatagtcggcacatgtcgggtcgaaattggtcagtgacttgcggggacggcccggtactgaatttagaacaaaattggaaaaataaactgaaaatgagagaaaaaagcacagtaaattgaaaagaaattaatgaaaaaaaacaaaaattgaattgttaattgatgaacttttatttggaggcaaagattaacaaatcgcttaaacgtttttttaagaaatgatacatttgagtagggaggattattaagcaatgatggccgaaatgattca

SEQ ID NO: 30292 - DNA, 229 bp, Heterodera glycines
ggaaaagaaaagaaagagggggggggggaagagggaaaagaaatgaaagaggggggaagagaggaagggggggggaagagggaaaagaaatgaaagaggggggaagagggaaaagaaatgaaagaggggggaagagggaaaagaaatgaacgaggggggaagagaggaagggggggggggaagagggaaaagaaatgaaagagggggggaagagggaaaagaaatgaaa

SEQ ID NO: 30293 - DNA, 759 bp, Heterodera glycines
aggattaaaaaattttgcttaggatcggagagacttaaattcaattaataaaaataaaaagaatattgcgctatagcataactttaatgtttttaaatcatcatgttatgttaaatttaatatgctatttttttgagattcagataacttctgttgattatataaatttttgtccaaaaaaccatcaaaataaattatttaaaatgtgctacacctcattttgttcaaaaatataaaatttttcgacagaaaaaataaaaaataataaattaattatgagggaattaggggggaggaacagagaaatagaacagctgctggtggaaaacatcagtggtgaccaaagaagcaaagaaaagaaagaatgtgcgtgtgtgtgcggtgttgtacacaaaactggtcggtgtcgagcaaagaaaaatgagcagaggccgaagagagagagaggggggggggggggtaatgaggcgtaatgagggggcatcttttaatgttaatgatgatgaagacgatgatctgtccaacctcgctcggcccattaacacatagaattacgacgagatgaaaaaaaataatggtgggcggaaggggcggcgcggagtggggggggggggtaaagaatgggacggaccgattgactgactgacttttggggtggcggtggcgggtaaaaaggaacgggttaaggggaccgcggagcggacgacgtgagcacttgcgcaagtgttgagcggtggcggcggcggcgcttaataatta

SEQ ID NO: 30294 - DNA, 857 bp, Heterodera glycines
taacaaacgttttctttgacgagttgttaatttaaaatgtgaacaaagaatgtttaaagctatttcaattaatgttaacaattgatcggcatttgcacgttttaaaatttctctcctttttttcatcgatttggttttggcaagtaaacgaataaaatcaaaatttttatgtactattgctccaattttacaaaaggccattttttggaatgaaaatgatcttttttccttcttcttcatcgtctttaaatatcccactccttagtcgcaacaggggttcgaaattcggtcaaaaggtaacactttgacaggtcaatgtagttttggctcgagtgtattttaaaatggtaaggtgtgtcggtgagtgggttactcggcaaaatctcgaaaacctttgacgatgatacggtaacatttgtagggggtacactgaaaaagtcaacagcattggtaattgaatcaatgctgctcgagtcaattttgtgaaatgccattttatcttcttttttaataaagtccaaatgcgtctgacctgagtcgctttttgcttttaattagtggtttggtaatagtttttccaattaaagtctggtgcgatagaaggggtgatttgttagcttttatacgttttcttcgtccgcctgtaccaaattgacgttgaaatccacccttctccaaaatgttgtccgcgcctcgtttaccctcagttgtcaatgtttctattgtcccctttaaccccggcttttcatcgatcattcgatttataaaccgttttccaatttgcattgtttcgtccgtaccagtatctccggctctgaaagagaggcagaaaaaagcgccagagtcctcgaaaaatg

SEQ ID NO: 30295 - DNA, 917 bp, Heterodera glycines
  unsure (1)..(917): unsure at all n locations
tccataccttcttgtagagctcgagctgctctttccaatggtcttatcccggtctcgatccgtgccgaactcacaaagttatggagtgaaatgtgaaatattgttttcaccacaaggcattttttctgaaaaccggattcaaaaatctggggtttggtataaccgttttagaaatagcgtagaaaacagcttcgatatcaagaaaccaagtcaagtccagaaaggaatattttaaaacgatttcgttttgttttggcattatgataccgaataactttcggaaattatggaaacaaaattggagaaattcgaataattttttgactgcaaatttttttccttttttgaattgggttcaaaaaaattttaagagaatttttgattattaatttgaagtcttgaatttatttgacaaatccaagacttaaaactgggagaagcaaggggctgtggctgggggcctaaaatttgggccacattggagaattaattctgatttctgaaaaagtcccagaaataactattttttctttccataccttcttgtagagctcgagctgctctttccaatggtcttatcccggtctcgatccgtgccgaactcacaaagttatggagtgaaatgtgaaatattgttttcaccacaaggcattttttctgaaaaccggattcaaaaatctggggtttggtataaccgttttagaaatagcgtagaaaacagcttcgatatcaagaaaccaagtcaagtccagaaaggaatattttaaaacgatttcgttttgttttggcattatgataccgaataactttcggaaattatggaaacaaaattggagaaattcgaataattttttgactgcaaattttttttctttttttgattgnngtcataanatttttagagaattttcgatatt

SEQ ID NO: 30296 - DNA, 930 bp, Heterodera glycines
ttctatttaatgacactcctttttactattatttccttttcgaatatccctggaagaaatccaacccctgattgccgtagcatatgcccattaactatgaatattatataaacagccatgaattttcatttgaattctcatttctattaaatgactctcattttattattatttccttttcgaatatccctgaagaaatccaacccctgattgccgtagcatatgcccattaactatgaatattatataaacacccatgaattttcatttgaattctcatttctatttaatgactctcattttattattatttccttttcgaatatccctgaagaaatccaacccctgattgccgtagcatatgcccattaactatgaatattatataaacacccatgaattttcatttgaattctcatttctatttaatgactctcattttactattatttccttttcgaatatccctgaagaaatccaacccctgattgccgtagcatatgcccattaactatgaatattatataaacagccatgaattttcatttgaattctcatttctatataatgactctcattttactattatttccttttcgaatatccctgaagaaatccaacccctgattgccgtagcatatgcccattaactatgaatattatataaacagccatgaattttcatttgaattctcatttctatttaatgactctcattttactattatttccttttcgaatatccctgaagaaatccaacccctgattgccgtagcatatgcccattaactatgaatattatataaacagccatgaattttcatttgaattctcatttctatttaatgactctcattttactattatttccttttcgatatccctgaagaatccaacccctgatgccgtagcatatgcccattactatga

SEQ ID NO: 30297 - DNA, 541 bp, Heterodera glycines
cggcgggggggggggcattttgaattcgcattttatacctccccccccccttattagagatttccgtcttctgtatggccactgctgtcgcgttgggttttgcctacatttacacggtaaaacctgtttttagaacaatccggattttccctcaaaacttcccatttatcgctgaatcataaagattttaaccctaattaattaaaaatatatataaaaaaattcgtaaacagttactggctctccgataaacaaaaatacagagagaaataaccggcggaaagataacaaattgcaaatccatcccccgcaaccccgaaaaaaaaacaattctattattattttttttttaaatctaactaattatttgttgaaaaattattattttttagctgatgctgttcgccccgttgatctgttttgccaacattgtggaggacacaaagcagaggaaaagtggggacagcggcgccgctttggcctccgcccaatggcaggcgatggcacggacaaaagtccgttccatacattttttgaaaaa

SEQ ID NO: 30298 - DNA, 987 bp, Heterodera glycines
aaaaaagttattccagaaattctgggaaattttctatttttcagaaaaaaatttatatctcggttctgaaaagatatttcgggaaaagtaaaatactacaaaaatccgcaatttttttctctataatataaattttattttacatttttatcacatttttaaaaaaagatacaaaaataaaagtgattttggggttcgggaccataagggggagcacacggtttttaagtgaaaaaaatttttcaccaaaaatattaaaaaacatgtctttaggggtagtttatgacgctgatcacgaatacgtgatcacattttacttttgatatcgttaagacctcagaatccctgtgtgattggggattctgaggcatcattttgaggggggggcaggttcgaatccggacggtgtacattatttttctatgctattttcactgtttttaattaatttgaagacttcttttaaattattataattcatttataaatattcaatctgtacgtttcaaactctctttttaattaataaaagaataatttattttattttttaaaatttattaattgtattatatttttattttactttttaataaacatttccttaataatctcgcgcgtcgtttcgtcgtccaaacaatcacaaaccgatgcgagcagcaattgctttttgtcagtgttattgaaatgattgcaaaaaaaaaggaaaaatcctttaacgttggcaaggcctattaaccgaaacatttttttttcattaatggtaaaatcggctacattttttttaattcaaaattttggccaaaaaataattcgtcaaaaaattggcgacaaaaatgatcaaagaaatatttgtgcaaagaatatttatcaataacaattgaatttttttaagtttttgttaataagaaacgattatgaccattacaccgcactaaatttggtactttttataccccctaaaatatttttaaagagccaaaaatg

SEQ ID NO: 30299 - DNA, 1465 bp, Heterodera glycines
  unsure (1)..(1465): unsure at all n locations
tttgctccatatttcggacttttttccatattttgtcattattcgattatttttttcgtaaatatttatttacaaatcattttcaccaaaactgtacgaaggcacaagagtggtgctaaaagagaaagaatcaattatatatgataattgataaataggggtttatatttatagttgctaaaaagtgccaaaatagttagttttaggttctaaggaaattttggggatcaattttgagaaaatttttcgtttattaggggttcattttcagaaatttttgagctcgattcttaggtgtgcattttttacaaattcttaggagtgtatatttcgcttttatgcatttttgttaattattttggacaaaaagccaaaatgggtcaataggttttttaatttgttttggctttttggctctaaaaataaaaacctagaaaatagttgctaataactcaaaaagtaccttattctgcgcaatcatgcaagttcattcctgtcatagttgttggttttcgactgtattttctttaaagccccaattaaaagcgttttgaaaatgaaaaagtatttttaatttgaaaaaattaaaatcggaaaaatatctcaaaagttgataaattttgccaaattttcacatttttgaagcccaaaaatttcggaagtcgaaactcaagcctccaatgcggggtttttatgctgtccgtgtccacccctatactactcgccctgttttcaatgcaaaacggcagaagccgcgtcgtctggagaaaattagtcgacaaattttgcggcttttttccccgtttaaaatgctggttaaaaaagccaaagccaatttgtattgttctttcgaaacaaaaaaatcataacttttttaaaagaaaccaaattaaatatttcaaaaattttcatgtcccatcaatattttgtgtttttcaatctttatgaatttatgataaaaaatgaatgttactaattgtttgttgaatgagttttttttttttttgctttctaaaattgaaggtaaaaaattttttaaataaaaatcgttaagtaaaatttgaattttttaaattttttgaataatttataagtgaataaattctcatcccgtgtcttctgtccgtgtccttagcggatcgagaattttgggtctcgtattttattttactgttcgaaattaacccggataaaatatccaataactttaatttggttgacttatgaaaagagttatgatgactttttgcctacacattctacgaatttggcttaatgcaagttgtctaaacatgcctaatcctatgccaatttcgcgacgaaatgggaaccaaaattggccattcaatgtcaaaattgtggaatttaatccgggaaaaagctgcccaaagcctatcgcggaagtgcaaagatgcacaaacgcagcgacactgaacacaccngtgaggatggcatctgaaaaaaa

SEQ ID NO: 30300 - DNA, 1492 bp, Heterodera glycines
caaccctaagtttataagaataatcaggaagctaacaaacgttttttggccgccttttctatcattttccaaacctttagtacaccatcgatagagcttcaatagctctacaattttactcagaggtgatctttcgctttttctattgataaaaatggtttattgtttttttgggaaaagataaaaaaattcaaaaaaaccgaaacggtataccgaaaatttttcttcggtttttttcggttcggttttttaaccgaaaccgaccgaccgacaaatttttgagtttttcggtttttttcggtttcggttttttcggtttttataccgaaaccgaccgaccgaccctcttgtccggtctctagtttttagcaaagaaaatatcgaacttaaagttcgatgggtgaaaaggcaattgaaatccggaagaaatctttcgtaattattgagacggacccgggaattgaaacaatcgcacaattttattagattctttcaggcaaaaagtttgctttaaaatactccaattttatgtcttttttgtcgcgaaagcgacgaggggatacgatcggaaagaaaaagggcccaattttaactttttttttggcctctcattgatcccccattctctactaattttcgccgttcttctctcccccctcctctttctcccctcttttcccttcgcccttcacaattggactttgagccctcctccccggggttggccaacatttgttttttgtcacccgcctattatgttttctttgaattgcgctctctccttcatttgatcatcaatttccattcatttgcattttttcacatttttgccccttctcctcccccgcctttgttcgtgcctcctttttctacttttctgctcggaatttctgttctcatttctgtgctcccattttttcttttgtctcattttgaattttttgtcttcttcgccccgcccgcccctttataccatacccatttttactgtaccctccccatccccttcatataatcctccccttcttgtgagataggctcttcacttcactcttcttcaatttccaattccgatttttcgacccccttttttctccctcttttttacatcactttttcgccatccttcccctcgtttgcgtcaaataatcccatcacgcaataaattgttgagaagaccctccttttggtcacaggaaaggatttgagggacggcaaggtgggaaacggcgggaactccgacccctctccaatccgatccatcgttcggcgtcatccgcccttctcggcgcgcttcgaccactcctcctcccttttctcgtcgtctcggcttttcggcgtctccgctttttgagcgtgtctcgttcggtttcctccccccccccccccagtttgtcccctccctttttccgacaaactttttggtgcgacgacccgggaacacaaaccatgcacccttcaattcactttcgaccatccatcactcttctct

SEQ ID NO: 30301 - DNA, 1135 bp, Heterodera glycines
tccgttgcccgccgccttcttcgcctcctctcatcgacgaccgtgtcgagcgagtctcgaggtcttttccctctgaactgctctcccccgggcggctggttgactggcggatggcggcttctctgcgggggaatacgacgcaccatcgggcggcgcagattgaggtcgtcgtcgccgtctcgcgccatctcgatgagggaaaggcgggagggatttgaacgatggttaagggatggagagggacggacggacggatgaagaaagagtgagtgaatgaatgaatagaagaagcggaggaatgacggagaaagggaggcacagaagagagagagattctcgaaaagccatccaaagaatggtcaaaatgcaaccgtttaagaaacgatgggggggggggggaagcgacgacggagcaaaatttaaaaaaatataaaatgtttttcattttaaaaaacggtgggtgcgattggcgtccgccacaattgtggtgtttggacggaggagccgaagaaaaaaaccgaaagcgaaagatagaatcgatcagatggacaaattggtcgagaggcgactgactgctcaatgtgctgaaggaaaacagcagcaaactttttgtatgtaaatgcgactgactctctcttctgatgggtgttttgtaaatgtgaagcccacccccagcagtcgatgactgatcaaaaaagagggaggaggggagggatgatccgacgatgatcgaaccaaagaatgatgggggagggggggggacagtgtaaagttgtgtgtgcaaatcatatggtacgaggggggggggatgaatgcagtgcattttgatcagtgattggattggcacggggcgatcagatcacttttttgggaggggcaaaggcaaaacaaaacaaaaagagaagcggaggattaatgcaaaatttgcatttggtaattaacggatggttaaaaaagaaaacggaaaacgaagtcacccgcccctttcgctgataccaccgaattcttgcccttccattcattcattcgtcgggggatgaattgatgagaattgggggggagcggtgatgaaaaaaattttaaaaaggttatagcgcgaacggattagagtctagagtaacaagatagaaaattg

SEQ ID NO: 30302 - DNA, 962 bp, Heterodera glycines
  unsure (1)..(962): unsure at all n locations
ttcgtccacctgatcataaggcaccaaatggggggtccgtttttgcgaggcatcgacaaactgagaaattcgaaattaaagaagggaaggcaaggcgtaagcgatgcgaggaatggagggggcagcttccctcgggggatgatctattggcaaatgttcccctataatgccgttgcctccgatcactcccattttccattgttctgctgatcacctcgctgattccgaatgtccagccccgcctgatcttctctttggcccaaacgttgtgtgtgttccctgccaatgcttcaattagcggttccattgcctcgctcagttcgatttcgtgcgtgtccaacggttgcggcttatatccgttcgcttgcgcataattttggggcagtcggacgggccgaagtcgcgtcggtggctggtcgaggatctgccaaattggaacgagcattggcctgctggtcggcactcggtaccatgtgccagcccaacgcttcgatggttcgcattgtgtccaatgccaaactgacgttgtacgccttttccgtgtcgggcaaccgctcgaagttggtaaggcacgggtgccgcttcgtttgttcgttgcgcaccttaataataccctccgtctgctgctcgcgtgccgttcactcacctccccgtaagtccagcccaggtcaactttgcgcatcgcccacaattcgtgcaaattttctgcgaatcgcaagtgcgcctcgagagcaaagtttggcaaagcgatgtgagcggtgtccacgggacacggcacaaacggttcgatagcatggaaaagggcggaagggccggcaaaaacatttttggatgtgtcgccaaaggacaaacactcctttagcaagagaaaggngtggtcaaatgggaacaaaatagcaaacagcattggtcacctgaacggtcagcggacagttcaaagcctcgaaaatgggcgaaaagga

SEQ ID NO: 30303 - DNA, 1262 bp, Heterodera glycines
  unsure (1)..(1262): unsure at all n locations
cgattggtgccatatttgtcgggacgtnccacgggaaaaaacatcgtataagtcaagagtaccaaatttaatttattttntaaaaaatgtatttcttaattcactcatccacctgttgcagttggttaatggccatcaaaatttctccatgctcactctcaccggcagaagagtcatgccgtcgtcgcggatttggtgccgccaaattttcaatggccaaagcaatttcttgcagttgttgcagttccctaatactgctgctgctcctctcaagacgttgtcgtcgaccatggctcgacatattagtagacatttgcactagattaaattatttttattttataataaaatattattttttttttgaaaaaagcaattaatacgctaattacaatactattgtaattaattgtattattcacaaatattattgtctcattaatcaatgttcaaacttatttgtggtgaatgtttgtaaatgaataacgttgaattagtttgaattctctaagaagaataaataaatcaaaaaagcaatttgaaagagattaaaggaaatttgtgtaagggcgaaagatcactcactccattccctaagggcaaattgccgatttcaaatttttttggatttcttttttcacgtacattaaaacaatctattaattgtaattaacattatggatttggtactggggctatggtttgaatttacttgaatggaatggaattcgcattggtcatttcccatattttccatttatgcttttttaaattttttttctttattatttttctttaatttttcttttttgaaatgaaaaaacaaaataaaatatttaatattaaatgttttgaaaatgttaataaacatctttattaaagtttccgtgttttattattcaccttcagcagaacggaccgttccgttcaaaatcattttaaatggaattaaatcagtgagtcttttgctaaatttttgggtcaatagcagtttatacaatagagatttttacaaaacaatgcctaagcctaagcttatacctaagcccaagcaagtttatgcttaggcttaagcctaggctcaagcttagtttgaaagcttatgtttattcaaagcttttgtaaaaactgtctattgtgtactaactccgttgtacaaaccgcccattgtacgaactggcagcaggaccccaaattttcagctcgatttgctattaggaattttatgaaattttgatcaaaaaatttgtcaaaccctcaaa

SEQ ID NO: 30304 - DNA, 270 bp, Heterodera glycines
aattttccaaaaaatacacaattttttgatgaaaatctgctaaagatggctgcaaatcgcaaaatttgtcattttttggacaaaattcgttaacaaatcggattataaattgcaaaaattttcccggcggcgcctatcagcaccgccggaccccctgttcaacaaaaagttttttggaaaaaccgccgcaaaaaaagtggtgtgaaaagcaaaaaaaaaaaaaaaaaatagaattttgtcagcaaaccttcgtttttgcttttgcaattg

SEQ ID NO: 30305 - DNA, 1437 bp, Heterodera glycines
atgatttttgtcctttttccttcacttttctgtccgttggtcctccgtattaaatagtattggttatccaataagcttgtgaattctcattcaatcttccgataatttcaattaaacttcatggatatccattaataaatattggcttcaccaatggtggcaattttttcgtcaagttcgggtttttagctgaataattataatcattttattttaataatgaacattcaaaataatgtaaaccccaaaaaaccttcagcataaatccggattaaatattcatataaaatttctaaaattttcgatatttttggcattctgtcctttcatattcatcaaattcctttgctattttgtcacattgccaattctttctcataaaatacacaatgccaaggtatcatatttttactttgaataatcactaattttctttctgatcatttctcagaaatgcaatggtcgtctccctaattaaaaatgattagaccaattattaccctgcttaattgactgcaaaagataagcacgaaaaacaggttttccgcttggtttgggatgtctacgatgacttttaaaatgcctatttttgcctattttgggtttttgtgcataatgtgcctattttaggattttcggaaaaatccttaacaaaaatgcaataaaaacgaaaaacacaccccctaagaaatgacccaaaaaaaaatttcagaaaatacacccacccctaagaattgaaaaaattttcaaaaaaataattccaaaattatttttttttctcaataaaaatttttgttttaaaaattgtccgtatctggaaaaaaactttaaattatttaataatttcatttacaattaaaatatttaaatttttacgtgttttaatacctaaaaagcgttaattaaaattttttttgcctatttgatgcctattttgcgatttttttctgcctttttaggtgcctatttcgcgattttttgtgcctaaaaaaagaatccctaattattacgctattaaaaacacaaaaaattatactgactgtaccgaaggcgtcgggaaaagcgcatctcattaagtttcaaaatttttaaaatttgccaatttttcctggggaaaaaaggggtgaattccccaccctttccatctggttttcagtctttcaaattagatctattgcgaatttatttattttttaaaattgaaaaagcatttttgtttacagcccccaaaaatggatcttctcgtcagtctggagctgctcgacttgcactacaacatgatcgcccggttgccggacgaactgtttcggtgcctcgtgctgcgcacgttggacatcagtggcaatcaatcgctgaacattggcaacctgcaaacctggccgagctggtgctgtgcgagaaccaaatccggcacttgcccagctcagtcgggcggtg

SEQ ID NO: 30306 - DNA, 1036 bp, Heterodera glycines
  unsure (1)..(1036): unsure at all n locations
gaccagctcaatgtcgtcgagaagcaggtgtttcttttcttatagacaccatcctgtgttggaaattttgattttaaattatttaaacgattgtttnttgttttggcacactgtccaaggcactntaatcttatgtgaattggaattaggccctactattcgagagccgattttctaagaatntagatcgtgaattcaatccggaaagtcaaaacaacccgaaattcacgacaaccccgagaaatttatcgagtttaatttatacgatttgtttttggcaccattttgtttttttttggcaccgtacaagtgcaatttaatcttatggaaaatttagtaattaggccctgtaattggaaagccaatttttctgaaactcttgaccgagaaatgaaaaaagaatccgtaaagtcaaaacaacatcagattcacaattttgagaaataaagactctacattcttgaacagcctatctcatcccatagaataaaaaaaatcaactaacttaaaattttttggtacaaaggcattaaaagtgggactatgaccaccttgccccgcttgcagaacatcatcatcttctcaaacaaaaacaggtaacgttgcgccgacccattctggttgaccaatttgacataatcatgggccatcaatcgcccgtagtccaacaatcgctgaaaagaacaaaaaattttatattttaatttcttataacagaaattctaggatttttttaaatttctaagttttatgcttgaaaaaaaaatcgggaggaaacggggtacttccgggttttgccacccctctgaaattttttttctaaaaattttttctaggctaatttttgatgctgatcatgaatctggcgtttaattatagctacaacgtattttacgtgaaattttacgtgaaaaagttcaaaatttgaaaacaaaaatataaatagatggcataaaggcaagaatatttcgtaaaatctcattattgattgcttttagcttgattccttacatttaagccggatttgaaccaaaaa

SEQ ID NO: 30307 - DNA, 1600 bp, Heterodera glycines
aatcgatttttttgttttcggggcagtccccccgaccctatgcgcccagatttatggggagaccgaatccttcgggaatagcttccctatagcctgtactttaattctgcgttggatttttgctccccataattgtttgagtaccccaaacggacacttgaaaaaatcgatttttttgttttcggggcagtccccccgaaccgatgcgcccagatttatggggagaccgaatccttcgggaatagcttccctatagcctgtactttaattctgcgttggatttttgctccccataattgtttgagtaccccaaacggacacttgaaaaaatcgatttttttgttttcggggcagtccccccgaaccgatgcgcccagatttatggggagaccgaatccttcgggagtagcttccctatagcctgtactttaattctgcgttggatttttgctccccataattgtttgagtaccccaaacggacacttgaaaaaatcgatttttttgttttcggggcagtccccccgaaccgatgcgcccagatttaattcgatcactcatattttttgctaattgagcagaagcgtaccaaactttgcagggatactccccggtaaaggactaacttacactgaaatgagcgccgagctagctggctcaaaaaaattttcgaaaatctgagtctttcgtttttatttattttttgcaaaattaattcttaaatattttttcagaaagggttctgaaacgcaccaaattttatttacatgttagtttaggcactctgatgctttttctatcaaaaagggagatgaataaaatttttaaaaatttttaattcctttttaaacaggccaaaaagtttaggcttaacttttttttcagaaactgatcagaagcgcaccaaactttgcagggatactgaaaggaagagaaataacctattttaatattatctagtcagttcattttaatatttttatccaaaaaattttttttgggttttcggggcagtccccctgaaccgatgcgcccagatttatggggagaccgaatccttcgggaatagcttccctatagtctgtactttaattctgcgttggatttttgctccccataaatgtttgagtaccccaaacggacactgaataaatttttaaaaatttttaattcctttttaaacaggccaaaaagtttaggcttaacttttttttcagaaacttatcagaagcgccccaaactttgcagggatactgaaaggaaaagaattaacctgttttatcacattagcttgtcatcagtttttataaaaaattttcaaaattctgagtctcctattattttatttttttttcaaaattttgaagggcggggtgggggggcgtgcataatttttgacatatcatttaaatttataaaaacaatttattaccgctgtttgcaaatgcactttggcaaaaaagcagcgcaaaaattggtgaaagggcgcgcattactaatttgaatgtttcaaaaattgttctatataattttgatcaaccactggggctttttaaatttgaaaaatagagaaaaccattaaaaattattaaaattaatta

SEQ ID NO: 30308 - DNA, 1074 bp, Heterodera glycines
aaattcattcatttgtcccctctttttgacttgagttcgtctttctttccctttggcacttttgtccctttttcaatgcccttctccatccaacagatgccgatgccttcgctttgtcctccgcttacttcgatttgctttcctccgtcacttctccgtccgtcctttccaatggcccatttttgctcaatttgcgtcgattggaaattgcgtcgtccgtttggtattatgaagagagtgcccgcgaactgttcgctttcgccgattcgttggacgaccgaacggcacaatttgtgcgccaattggacaaaaggcgcgaaatgtggcaaaaaacggcggaggcgaaattggagggggcgacaaagctttgtctggtgcacaaaatgacgacaaaaacagcaaaagacgagaaattgcgaaatgccaacaaaaagtgggcacggcaaatcgacaaaataacgcaaaaggacgaaatgggcaaaccgatggtaaggcaaagcgaagagaagaaacagttgcaaaaaggcattggcattttgaaattgacccaaaaagcgttcattaaggtcccgctaattttggtggacgatgagtcaacttccgagggcatcaattgtttgaacagtgaaatttcggaaaaatttttgcaaaatttcttttcggtgtccaaccgaatttattggattcatttctttgtgctggacaaactgttgacaaagttcaaccgattgcgcgcctttttctgccacggtttcggcgtcgtttccgcctcggatttgaaagaacggcttcgatggattataagagataatgcgctgctcgcactcgaaaacgcgcacccccaactgatgcatttcggtgggaaaagcccaatttggacttgcggcatttcatagtgaaaaaatatcttcagctttattgtcaattattgacgggaataaaaaagcgcaatttgagtttcaaatccgaaaccctgatccgaacaaaaagccgaaaagcaccaaactttttccataattttaatgttccaataaattactttatagtaaaaattacatttggcaaacaaaaacc

SEQ ID NO: 30309 - DNA, 1316 bp, Heterodera glycines
  unsure (1)..(1316): unsure at all n locations
aaaatcgatttattttgtttcgggggcagtccccccgaaccgatgcgcccagatttttgggagaccgaatccttcgggaatagcttccctatagcctgtactttaattctgcgttggatttttgctccccataattgtttgagtaccccaaacggacacttgaaaaaatcgatttttttgttttcggggcagtccccccgaaccgatgcgcccagatttatggggagaccgaatccttcgggaatagcttccctatagcctgtactttaattctgcgttggatttttgctccccataattgtttgagtaccccaaacggacacttgaaaaaatcgatttttttgtttcataaatatttttttcagaaagtgctctaaagcgcaccaaattttatttacaacttaattttagcactctgatgctttttctatcaaaaagggagatgaataaatttaaaaaaatttttaattcctttttaaacaggccaaaaattttaagcttgtgtggtaagtgtgaagaactgtgttcctccaggcaaaaaattctaagaaaatttataagcatttgaagggttctcagcagtttccctgcaaaatttggtgagcttctgatcagtctagaacgttgggtgataaaatgaaaaaaataattaaaaaaaaataatgctggtgtggtaagtgtgaagaactgtgttcctccaggcaaaaaattctaagaaaatttataagcatttgaagggttctcagcagtttccctgcaaaatttggtgagcttctgatcagtctagaacgttgggtgataaaatgaaaaaaataattaaaaaaaataatgctggtgtggtaagtgtgaagaactgtgttcctccaggcaaaaaattctaagaaaatttataagcatttgtagggttctcagcagtttccctgcaaaatttggtgagcttctgatcagtctagaacgttgggtgataaaatgaaaaaaataatttaaaaaaaataatgctggtgtggtaagtgtgaagaactgtgttcctccaggcaaaaaattctaagaaaatttataagcatttgaagggttctcagcagtttccctgcaaaatttggtgagcttctgataagtctagaacgttgggtgataaaatgaaaaaaataattaaaaaaaaataatgctggtgtggtaagtgtgaagaactgtgttcctccaggcaaaaaattctaagaaaatttataagcatttgaagggttctcangcagtttccctgcaaaatttggtgagcttcagagcagtctagaacgttgggtgatcaaatgcaaaaaata

SEQ ID NO: 30310 - DNA, 1136 bp, Heterodera glycines
ttccctcctcctccttggtcaccaaaaaattttttcaagaaatacaccgcaaaaaaatttgtaaaaataataaagggattcaaaaatataaagttaataaatgttttgttcgaattaataataaaaaataatttatttaagcaatttgaaaaaattttctgatttttgactcaaaaaaaagattttttatttcaaatttgtcctttataaatttttctatatatttttaatttaataaattgattgtcctttaaatttgtgcattaaaaatatttttgtgagtttttaattaaattttcgaattactcccgctccagcacgggactggacgggatttttacgggaatcccgttcgggactcccgtcccggaaaattttgaactcccgctcccggaaatttttttttaccggactctagtttataccgtctcaagctgttgtcggacaattgctggtcctactccgaccaccacaattttcacattattgtcgcgcaaagccttcgctaaaaacaatcgattttttgcctccaaatttcagcttccccaacccggggtggccacgtcgggaccagagcgtttgggcccccgtttttgggcccccgcgtttgggcccccgtttttgggccccggggtcgtttgggcccccgtttttgggccccggggtcgtttgggcccccgtttttgggccccggggtcgtttgggccccaacccaaaaatcgaaaagtgcttttttaaaaattaagattctaaaaactaagcctgagggatccctcgccacttggcataagttaggtttaattaacattcgctcattttttacaattttacttattccaaatcctattattttttaatagttaaccaatttgatgtacattctgatttggacatttttcagaaatggctaacccaattgcaaccaaaaaacaaaaagtaaaattgtcttacgaaggccacctttacaccttcgctaaaatgagttctgatgggatgacaaaattttggagatgcgagttcaaaaacagcaccgacacatgcaacggccgaatctggacggacctccacgaccaattcattcgcctcgcaactccgcacacatgtccagcagatgcgtcccgtgttgatgctcaaat

SEQ ID NO: 30311 - DNA, 1074 bp, Heterodera glycines
  unsure (1)..(1074): unsure at all n locations
gtcaattgctgcaatgttttcgggatttacctatagaattaaagaataaaactgacaacttattaactgaaaattataggtgaatcacaagaaaattcaacatttgggcttaaaatccggagaaaagtcaattggcgcaatgttttcgggatttacctatagaattaaagaataaaactgacaacttattaactgaaaattataggtgaatcacaagaaaattcaacatttgggcttaaaatccggagaaaagtcaattggcgcaatgttttcgggatttacctatagaattaaagaataaaactgacaacttattaactgaaaattataggtgaatcacaagaaaattcaacatttgggcttaaaatccggagaaaagtcaattggcgcaatgttttcgggatttacctatagaattaaagaataaaactgacaacttattaactgaaaattataggtgaatcacaagaaaattcaacatttgggcttaaaatccggagaaaagtcaattggcgcaatgttttcgggatttacctatagaattaaagaataaaactgacaacttattaactgaaaattataggtgaatcacaagaaaattcaacatttgggcttaaaatccggagaaaagtcaattggcgcaatgttttcgggatttacctatagaattaaagaataaaactgacaacttattaactgaaaattataggtgaatcacaagaaaattcaacatttgggcttaaaatccggagaaaagtcaattggcgcaatgttttcgggatttacctatagaattaaagaataaaactgacaacttattaactgaaaattataggtgaatcacaagaaaattcaacatttgggcttaaaatccggagaaaagtcaattggcgcaatgttttcgggatttacctatagaattaaagaataaaactgacaacttattaactgaaaattataggtgaatcacaagaaatttcacatttgggcttaaaatccggagaaaagtcaattggcgcaatgtttcgggattacctatagaattaagaatanactgacaactatttactgaaa

SEQ ID NO: 30312 - DNA, 1588 bp, Heterodera glycines
gaaagaaatgatttacaatcgcgaattgatcaaagccatttaaatggacatcgatacggtaagcgattttaatcggttgagccttggcccgcaacagtcggagggataatctttggacataaggtagatgctcttggatcagcttgaatttaatggattgatttgcatgatcaaatttaatgcttgatttagcgcattcggttttgaatagggttagcaccatgggtatctgtcatccggcacccggacagatttggaaaattgagatattgggactccaataaatcgtaaaattttaatcattcaataggatcaacggaaatagactaaaatatgttaaataaatggttgtattaaatagtgacaacaatgacatttagataattccttcacaaatctctccgaaaatgtaaagcaaaaatattctgacttggaaaaattagaaattgtaaagaaatttttcgaattaaaagcaaaacgagtagcagcgaaagataaagcaaaattaaatgagcaaattaacaaagaaattgccaacgaattgggcacaggcgtgacaacaatttacacttggaaaagagaatttaatattggtgagttaaatggcaaaagttcaatgagtaattaatgaataagtaaatttattaatagcatttagattaaaacatttatttaaaaaagtttactgtaaaaaagtcaattaaaaaaacacaaaaaattgattaaaatatgttcaaacctattcctattgttaaatatgtgaaaatgacaatatataatagcaaaataattaaataaaatattgaagtattaaatgtaattaatgaataaattaaatctattaataacatttaattacaaatattttattttttaattaaattaatgcttttctccgtttgaatatgaattttaggaatgaatgaaaatgagaaacaaaaggaatttgttaaattgtttaagaaatataaaaagcaaaataaagaaatcatgaacctcgaaattgctaaaaaattgggaattcatcaaaataaactgttggaattcagaaaaagatttgacccaacctataaaagtaaataatttcgagtaaaataagggaaattatgggtaaataaataataaataatttttaaaatgtaaaaaattaattaaataaatattaaatttaatttaaaaaatattcccaaaaaacagaaaagcttcttgcgaactcagaaaaaattgcattagtgagaaaatattacaaattgaaaagaaaattcccagaactaagccaaaacaaaatagccaaaattttgaagattagtaaaaattcattaattaaatggaagcaacaatttggcaatcaatttgaaggacaaggtgaccaaatttaaaagattacgatgaatacagtaacataaaattacagtaaatgcccgggaaaatgacgatgaagcgaattccgaagaagacaggcattttttttatttgacagcaaaaattatgtaaattttattttaaacaattttattttttatttagtccaaaaaatgtctcatcaaaaaatgctgatgagacaatttgggcatggaacaatgaaaca

SEQ ID NO: 30313 - DNA, 1074 bp, Heterodera glycines
caaacactcacacgatattgaatgctacgaaaaaattctgccgaaaaaatggctgttctttttctctggggattgaccgcaaacttggtaccaacattttccttctctagtctggctctaccaaacactcacacgatatttgaaatgctaacgaaaaaaattcttgcccaaaaaatggctatctcttttttctcctggggatttgaccgcaaacttggtaccaacatttgccttctctagtctggctctaccaaacactcacacgatatttgaaatgctaacgaaaaaaattcttgccgaaaaaatggctatctcttttttctcttggggatttgaccgcaaacttggtaccaacattttccttctctagtctggctctaccaaacactcacacgatatttgaaatgctaacgaaaaaaattcttgcccaaaaaatggctatctcttttttctcctggggatttgaccgcaaacttggtaccaacatttgccttctctagtctggctctaccaaacactcacacgatatttgaaatgctaacgaaaaaaattcttgccgaaaaaatggctatctcttttttctcctggggatttgaccgcaaacttggtaccaacatttgccttctctagtctggctctaccaaacactcacacgatatttgaaatgctaacgaaaaaaattcttgccgaaaaaatggctatctcttttttctcctggggatttgaccgcaaacttggtaccaacattttccttctctagtctggctctaccaaacactcacacgatatttgaaatgctaacgaaaaaaattcttgcccaaaaaatggctatctcttttttctcctggggatttgaccgcaaacttggtaccaacatttgccttctctagtctggctctaccaaacactcacacgatatttgaaatgctaacgaaaaaaattcttgcccaaaaatggctatctcttttttctcctggggatttgaccgcaaacttggtaccaacatttgccttctctagtctggctctaccaaacactcacacgatatttgaaatgctaacgaaaaaaattctt

SEQ ID NO: 30314 - DNA, 1840 bp, Heterodera glycines
  unsure (1)..(1840): unsure at all n locations
taaatagcgattgagaatggggaaatggtaacgataccctttaagtgggaagactgagagatgacagagagagagagagagaaagagagagagagagatgagaggatgggagagagacagagagagagagcagggagagagaaaaagagagaagggagagagaatgagaaagcaaagagagagatagagaagagaaagagctaagagagaggtgagaggatgggagagaatagagagaaaaagagagaaggaaaagataaagaaaaaaagagaaagaaagaaagagaagagagaagcagtgagaagtagagcgaagagagagagagagaaaaagtgagagcgtggaagagagagcagagaaagagagaagggagagaaagaaatagagagagagagagagagagaaagagagagcgacgggatagagagagagaaagaaagcgggctaagggagagagagaaaatgaaatatagagagaagagagagagagagagagctaaggggagagagaaatagtgagagaaagagaaagaaaatcgagcagtgagagagagagcaaagagagagagagagagaaagaaggaaaaacaagaaagagagagggagagagagagaaaagtggagagagagagagcgcagagagagagcagagagagagccaaaggatagagaaagagagagaagaagaagaagaaaagagggagaggaagagatcgagagagagagagagagagaaaaaaagcgagcagtgagagagagagtaaagagagagagagaaagagggagaaagaaagaaatagagagaagatggatagagaaagagagagagagagcaaatggagagagaaagagggagaaagagagagggagagagataaagaaatagagagagaaaggtggagagagagaaagagagatagagcgaagtgagagagagagagagcaaagagagagagagagagagaaagagggagaaagaaagaaagagagagggagagagagaaagaaatagagagagaggagacagagcgaagagagagagaagaagaagaagagaagaagaagaagagggagaggaagagagagagagagagaaaaaagcgagcagtgagagatagtaaagagagagaaagagggagaaagaaagaaagaaataaagagaaaaagagggagagggagaaagagagagagagcagagagcgaatggaaattgttgtaatcatggtaaattagcaaatttggaagaattaattccagaatatccgcaaaaatttgaacttttatttgatcaaattaaatctgataaaaaactcatgagctttttatgaaaaacatacgcttatttaactcgtttttcttgcgcttcattaggatgtatgagattttgttatccaaataaaaaaattcctatttttaaaatacaaggcgctgtttatcactcttataacactgtcgcttttcctgaaaatgatgatcttccgaccaatggacaattgtatttcattgacacgaccaatcattgaattataggatgcagatgtgtaatgaaaatacaaaagaaacagaagaaatgagagttttaatgtcttacattgaaaattatttaagggaaaattatattttcgcaaaatcttatgaaattatgaaggacgtaattgagtcatcaaaaaaatcagaaaatgaatttgaaattcccgatgtgacaatgctttttagtgtaagagaaggngttgatttaagaagatataatattcctagatccnatnngagttgtgctngtatgtttagagatgcaaatgaagaaattcctgctgcgaatatttgtgtccactcaaaagg

SEQ ID NO: 30315 - DNA, 1037 bp, Heterodera glycines
attgtgccatcggcagaggaaaagcgcctaccacaaaacatatgggaaggcttttctttggccgtcgagcactgggcccattagggtgtcttttttgtcctaaatttttcctcaaattttgagtaaatttggctaaattatttgtaaatgttcaaaaaatgtcaatgaatcaatttattaattgctttatttaaaatcagaaatactcttcattataatttttttatcttatagtatttaaatgttaaaaataagtctattttgttaattttttttcatatttaaggcaaaaatattggagaagaaattaattatgaattaaaagtttaatatttttactttattctaaagattagttttcttagaaaataactcaaattacgaaaaataataaaatttccccaaaaaatccaaatatccatcattttctctataaaattctcaaatataaaattaaaatatttttaactatttatcagtctgactgaatgtctatttgggaatttttcatcagttctatttttttatttattaaatatagaatttaatttaaatttttcttaacttttttatgaaatttaactttaattttttcccgtatttttcaacaaaatgccataatttaaaaatttaatccactaatcacgtcatttgtttcatcgccgcgccgccagagggtaccactttcccctccctttcccccctccgtcccccaattccaccacttgtcatcatcgtcaaaaaattctccgccggggacctttctcatccctacaacaaaacttcttcaaaaaatgcactttttgatgttatcggtgtgatacaaaataaaaaatgtttgaaaaaagatttgtataaatattgaaatttttttactaataatttttaatttaaattcgaaaaaattcaatcttttattttgttgctttgctactgaaataaaataatggacccaatatttttaaacaaatgcaattttaaatagaaattgaaaaaaaataaacttccgccaatttaatccaaaccgttaatggact

SEQ ID NO: 30316 - DNA, 1475 bp, Heterodera glycines
ctgccttacgggtgccggttcggtgccggcgtcagatgtaattcaggtgaacttcagacgcgggaatggtaattggtaatggtagtgaaaacgcttttttgttttcggatccacttataaaagcgatgcccgattcatgctcattatcagcaagcaacctgaaaacctcaaatatttttcaccaccctgaatttttttcttttaatttagggtttctgttcacagacggatatgccatttattttaagctgtcactgaattttcttcgtcaatttaacgagtccaaacaatgtttatgagagtctaactaattaatgtctttttggtcacaaaattggtctttcaattaacaaacttttgataatatgtaaatcgaaagtccaaagaatgaacaagataaaatccctaatttttgcatataaacaactgactcataagcattgatttggactcataaaattgtaaacataagcaattttttagctaaaatttggcaatttaaaaccaacaatttgcagggcgtccaaccgcggtgctttgctccggcacttttgcctccgccatgtcggcactcacgtggtgctgtgcccgttctgtctgctcactttccccgtgccgcccgccgacaaacgctgttcggtggtgcgaatgcgcgagtttgtcaagcacatggcactgcatgatgggggtgagtttttggcattttatgtgccgaatattggcagtgccaaaggagcaaatcattcacagtttatagattatatccccccccccgccgtttccctccccggatcagtttcccccgtattatttcgccccaagaatttttttctttaaaaaactacaaaattagaaaattttcagaatttttttttcgaaaaatcgctgaaaaatttttcaaaaatgtttttcttcaaaacgaatgaacgctcgttcccatcaaaattgcccttttataatgatttgtctcactctttcatatgaataatttttttctcatttagtggtgtcttaccatttttctatgctttttcctttctatttcatcgtacaaattaattcgtttaaaaattctttttctctcctttcttttctctgattttatttgttctaaaagttttcttttgctattgtgtctgtccttttatcgattttccattttcgtctttctcatgcaaatcattaaaaatgaagccaaaggccaaacaatttttcgcgtccattcgttaacaccacatcttcgtgtttccatttttagtagagttttcgatttttttttctgtttaaaactttttgtgttttttttcaaattcctttcccttctaagaataagtttttgtttcccgtaacatttttcggtgaatttttcggctgaacgaaacgggctgaaacgacgggtggggtggaagacgagctaatccctattttcggatttatcaaaaattcttttttccagagaaatccctttgctgtca

SEQ ID NO: 30317 - DNA, 1158 bp, Heterodera glycines
  unsure (1)..(1158): unsure at all n locations
tagaattttgactcaccaaagaattttggttatcatagtgaactggattttaaaaattttaaacnaataaaaagtttgggtcgcctataaatcaataatataaaccaagcaataagcgtttacatattttacaaatcggtggtaaattctataaaaatagaagaaataatttacctcctctaaatttatcttgaaagtaaccaaagcattgtcatcacacccagtgttgttttgtaattcgacccattgatcaggaaaaaattccaagtacgatttattggtccactgatcaaagtccgtttgctcagtacagatgtgaccagtaccaagataagcagagattgtgatctgacgtacatcccacgagaaataaattttctttttcatcatcataactcgattaggattattcggatcaaaataggttaattctgctacagtagttcttccaacttcctgaaaattaaatattgtatatattcatatttaaacctgtaaaatatgagttttaaaattttatattaaaccctataacaggcataataaaatttaatgtgtgattaatcggaaaaattaggtttaagcgatgtaacagcaatatttctcaaatatttgctctcattattttctattgttaataaggctcccggaagaaaatgtgtcagaaatagatgtgttcatactagtgatgttcgagagtctcggtctcgactcgagaaaagtctcgggtttttttggtctcggtctcggtcttcgagactttcgagactcgagaccgagacttttttacaccccttatgattggttttttgtaaagaaagaaataaatatacttgttgtatgtttttgcttgtactatttatgtacctgtggcatggtgtcttcgtgatggctctaggtgattgtgtccattgtattgttgaaggggcgctcgtccccttgatttttgttttcttcaggttttccagattatttgttttttgagtgaattttgtcaccttttgaccttgaactttgtcttcttggaggttttcggagtacttgtgctttgactgcgtgatgagaatttcagactttgtccctggacttcacgatgggctccagcgcccttggcctttgactatcatgatgggccccagcgctcatggtctttgactt

SEQ ID NO: 30318 - DNA, 1656 bp, Heterodera glycines
  unsure (1)..(1656): unsure at all n locations
ggcaatgattacntaaatgattatnngtagcatatgnattgtaatttttatatgtgactntagtcaaaaaagaaaattatgaattctntattatttntaataactatgtaattgtttaaattcaaaaatattttaatggtgtcatccggtcgtttatgtgattgtcgacttgttcgatgtgtttgatcggtcgttggtggcatgcggtggtggggtcgtgtctccgatgtccattggcactgttggtgttgactgaaactgcgaaaactcgtccattgtcacgatggatctccaggttctagaattggcatgcagctctggaataagctattaaatgtaagagaataaatcaaatttttaggtttccattttttaaaaataatttattgacctcttattttctggtgttcaaatgcatttggcttcgaattaattttcttcttttattggctttttaaacgagttaaacaataacctttttaattatttcttatgtaaaaaactcgctttcccgcaattcgcctttaaagcagttctcctccaagcggctttgaaccccacccaaagttattatgaattctgtatcattcttaatatggctttatctgatttttatcagtccttttttagaaaaaggctaagaattgtttcagttgtgacacaaaatccacggggtccatcagacctctgcccccgcttcgccgtttattgccccaggagttggagccctggcatatgaaaaggccttctattgtattcaaactcgtacattaataaactcctccatttctgttcttctgaagttaaacataagtttaatttttcaaagacttggatttaaattttcaaaaatttaaagataattacagtttccgaagtaaatttgctcgctgctggcaaaaacattagaatttggatggtgaatcaaattttttgcactgtggaaattggacataaatgataaattggacatcgatgtaatttcttttttaattatgtcgctgttcaacatttaccagtggcaattagcaatgtttattttgaattatatgaataaatttgttaaaatttttatacgacattttaaatattttttaatcaccattttttctttggtgtgttttaaatttcatattatgtccactatttggtatgtctaacgctcaaatggaccgcctaaataattcaattttttctaaaaaagttcgataaaccatcataactttttttggaaccgacaaaattttatatgattgatatcattcaatagccctaaaaatttttattcaaaaaatataatttaaaaaaaatcggcaacgccggagccctaaaattccctttattttgtaaattgactcaaaaaccgcgaaagtactcataattgacaaatttaaatcggacagtgcacaatccgacagtaggttacacaaaaaggtaagaaaatgccgtcgccgaaggagactgattgtgccaaaataggcaaataaaaaatgggaatgcatcctcgcacacgaatgtcgtagttatgtggattataagtgaaattttgatcaatcaaattccaatgcctactttctttcatttctttgacaaaattgcttaatgttgtacgaagaaaatgaaattggctgttcaaaatgacctttccacaccctt

SEQ ID NO: 30319 - DNA, 1044 bp, Heterodera glycines
  unsure (1)..(1044): unsure at all n locations
ctatgagtgtttggtttggaaactgtctaaaatgttccggggtcgcccacattgcacaattttcttgaaaataccatgaaaaatgctctaactccaagagacttagttgagcgcactgcaaggagaaccctaacacagttcagcacaaaaaaattaactattcacgcttgagaacgcgaagtttgctgcggagaatggcaattatatgcagaaagtcaagtgcatatatctcagcgcctagtgcatgaataggagcgtttttactgttttctgagagcgcctgaaagcagctttcgaatggtatagctgatttttttggatctggaattttcgcagagatatatgcaaattagtaaccagtgtttcgtttcaaattatttctcgtattctaacgaaataattttttactatgagtgtttggtttggaaactgtctaaaatgttccgggtcgcccacattgcacaattttcttgaaaataccatgaaaaatgctctaactccaagagacttagttgagcgcactgcaaggagaaccctaacacagttcagcacaaaaaaattaactattcacgcttgagaacgcgaagtttgctgcggagaatggcaattatatgcagaaagtcaagtgcatatatctcagcgcctagtgcatgaataggagcgtttttactgttttctgagagcgcctgaaagcagctttcgaatggtatagctgatttttttggatctggaattttcgcagagatatatgcaaattagtaaccagtgtttcgtttcaaattatttctcgtattctaacgaaataattttttactatgagtgtttggtttggaaactgtctaaaatgttccgggtcgcccacattgcacaattttcttgaaaataccatgaaaaatgctctaactccaagagacttagttgagcgcactgcaaggagaaccctaacacagttcagcacaaaaaaattaactattcacgcttgagaacgcgaagtttgctgcggagaatggncattatatgcagaaaagtcagtgcatatatctc

SEQ ID NO: 30320 - DNA, 1457 bp, Heterodera glycines
aaatttttgtgaaaaatcaattactgaaatggccgccaaacccatctttttctgtggatcgcatgaaactgttgctgagttcgggggatggggcggacgttcacttctttggtgggccaaagggaccctaaaagaggcgagatgccgtggaaattcaaagcattacaaaattgttttggtttttagcttttgtcggctcacaaactcatttctgatggccgcttccgacgtgttcgaggcaatgttccgttttgactccgcaaatgcgacgacttccacttcaaaacgtaataaaactgttggcctaaaaacattccctcaagattttggggaaaagtaaaatttagagatttttttgaaataaaaaaaaactctatttactagaaaaacctctactaaaaattagaaaactaacaaatttcgtttttttcgcaaaaaatgatgcggtgtaaaggcgggggaaggaaacgtagtgcaccccctaagaatgtcctaaaaattgaaatttcccgattttcagcgccttcggatttggccagcagcagcaaccctgtggtggtcagcgacgtcgacgccgatgtgttcagggcgatgttgggctttatttatgcggacgatttgagtgggatgaacggcgacaatttgttcgacgtgctttacgctggtaaaactttaaaattcattattttcttcgtttattttaatcacttttagccaaaaagtacaacatcgccggactggtcaaagcatgcgccgaatttcccatttctgagttgggcaatgtcttccacactttggccgaggcgcgacttttcggagagaaagtaacattttcaaggaatacgaattaaatgggactgaactgctcgagagtgaatctcggcttcaaatcccggcacaatcctctacatatggaaaaacgcatttttaaaggcattcgccgaacactgcttggaatacattgaccaaaatgcggacactttgctcaaatcggaggaatttctgcgcattgatcagcaaatgttgtgcgacattttgaagagtgatcagctggtgatcagcagagaatttacgctttggaaaactgtaaaattggattttaaaaattgtttaattaattaaaatttgttttttcggcactccgttgggccgattggcaatgtgagcaaaaaggcatcgaatgttcgggagagaatcggcgggaaatgctcggcttggcactgttcgaaattcgcttcccgcacatcacaaaggaggacttttcgaagagcattggtaatgccaattttatttattaaattttgtctaagttgggtcaaattaaaaaacaattaattttggcgtcacgcggaaaataaaaaaataatttatgatataattttaatttcaacaaaacagtgccgtgcggtgtgctgaccgaccaagaagtgatcagcgttttgctgcatcattgcctt

SEQ ID NO: 30321 - DNA, 1590 bp, Heterodera glycines
tcgggtcgggtttcgggacgagaaaaatgtcgggtttcgggattcgggtcaattgacaaatttttattacatgttcaaaatcaatacgaagatttttttatccgaatgaaaaaaagaagtaaaaattttctgcggcgcgctttttccaaaaactttttgggaaagggggaggggtggtccggcggtgccgatgggcgccgccgtggaaaaatttaaaatttaattgcaatttgttaaccagattttattcgaaaaatgacaaatattaggtcggggaattgcacccaagcgataaataatgaaaggcagaaagcttagccactaggtcacatatttctaacagtctttgaattattcccctaaatttcgttctcttcccccgccgtttgtcccccgcattttcgtccccccaggcgctttcgttggtcctccgcattcattgcgccaattgccgtgttgaaattggccaaaagttgtcgaaaatattccctctcctcgtcaaaacggttcaccaatacgtcaagtcccatcatccaaaagttcgtttccgtgtccaattcgtcgatgcgctgctgtaacagttggccaagtgttttggcactgatcccattgaaaagcatcagcgtcccgtcctcgtcattccgtgccaattccaaatagcagctttggctatcatctgccataaagcctagcaccgcttccgatgatgggcgtgaagtgtgccggaagctcagcaaagcctttcagaatttattttaggtgcttttgttaaattgcttttcaaattttcatgccattttaattattgtttagctgataaaacttgcttaatgtcatgttttaggcaaatgaatatttttgttttttgcttcaaattttctaataaaataaaaataaagattgcatttatagaaacctctaaaatttcgaaaatgtttactcgtaaatgaatttttttttttaatattttcaaaaattttgaaattaaaaattttcacaaaactttactttctcataattttttattttattttgttgaatttgaagtaacaaaattttaaaaataaatttgatttttttagaccgttaaaagcaaagcgatgcgcggatgttgttcattccaaattcgaatcatctgatcaatttggtccaagtgtccgtccaaccaatccaaatcatttgtacaatattcaaattccttatccttcttatcaaatgcgaatcccttgtaaatgttggaaaattcgctcaaaaatttgttgtgctaaatatttttgttatttaaaattttcaacaatttttgccaatttaattggccaaaacttcacactttattggatcgctgatttggctttttgtagagcccaaaatggggttggatcagcagcaattcataaatggtgactccaagcgaccaaatgtcggattttgtggacatcttaaacaatattatttttgttttttaaatgtgctgagacgatgcgaaaaaaactcaatgattgataaaataattaatttattatatattcaatgaatttaataatacgggtgggtattttaaatataaatttaaaaagaataatataaaaa

SEQ ID NO: 30322 - DNA, 1665 bp, Heterodera glycines
  unsure (1)..(1665): unsure at all n locations
aatgccaaatatttttggataaattacttaataaattaatttaaaatgaactcattttcatcgcaaagttcattaaaaatttgtgaaattttcccggcggcgcctatcggcactgccggtttgaaaaaattgcgcagcaaaaaaagcggttttgaaatcaaaaatagtcaaatttatggaccattaagagatttttgtctgaaaattatgtttcactatttgtcactatttcgcacttttttcactatttggtcactattttggcacttttccgtcactattttagttaactattttgagatttttcgacaataaaagtcggggccctaataattagagaccggattttagttttttgattaataaaaatggttattttttctcaaatatttgttatatctattaattactttttttcctatttattattttttaaactatctcgaatagttccacatcttttaaaaaggtgtatagcctcagtgagtttgcgaccgaattattagcattttcctattntaataaaaatttcaaaaaattttcgctggctgcgcctatgtccgccggagccccaaataaagtaaaaatttaataaaaagtatttattcttagtttcttttttgtcatcaactttcttttcaatgctttgccatttcttttaattttgcatgttttttgctatggataaaaaattttatatacaagaaaatgtaaaagaaaatgttatcttcattctcaataatatattatttattgccccagtatgtttattttttgtctatttaaaaattcattttaattaattaaatctgatgcaaacatggtttaaattgtgatgccacaaggaactgagtgtggaagaaagtgggataaaggacataggagaaccgctaaaaggagcgcccgtagctcagttggttagatcacggcacggattgcttgggtcgggggtttgagtctcaccgggcgagttaccttttatgttctacaaaatgatatttttgtctaataaatattaatgtaaaagaagccgattcttgtcattatccaaaattataattttatgttttgtattagaaattttatatttgacaatttttgtagaaaaaaaataattattttctttaataaaaaaaattaaaatttcattttttctctgtttttaattttaaaaaacttttaaaattttataagttagtaatttatttgaaaactcttttcacaattttttaaatatatttatgaaataaattctcttttgtttgttttaaaatttctgttccgcttatctttgaggcttagccatttattaaatttattaaaattatttttcagttaatttttatttatttgtcaatattttatcaattttattatgatatatttaaatgagggattaaatgtccctaaattttcaaaatgacatataaataggttaatttttcgtgaaatcttgtttaaaaatggccaaaatctccaatttttttccccaacggcgcctatcggcatagcagcgccacaaaaacttctattttttctaagaaaaatggcccaaaaacgcaaaatttgatcattgtttagtgaaaatctgttaactagtttttgcattttttactttcgcaaatttcgcgtttcgttttttagtttccgatttggcccatccct

SEQ ID NO: 30323 - DNA, 1484 bp, Heterodera glycines
atataaaattctgctgtcagaaagtaaaattaaaaattcactacattcaagcacaagggttgcaccagggcatggaagattgtaacagaggagggaatgagtacatccatagtttggcaaccataaaggctgcagtccaattttatatttttgaatgctccaatttctcaatttcccaacggcacctattacactgtctatcaacggttaatatattgtaattgtatattttaaataaaaacatttacggattaataaaatgaacatgatattccaataaaaacatatttacgatggattgaaatgtataaattcaatatgggatgccactaggactcgcatttgatatgcaatgtatatagtacttttgttctaaaaatttttatatcatcaacacaggttgtgtctgtggactcggaggcggtggggccatcccatcaatttgttgttggacagccgaagccaagacaccgccagggacgagagccgattgctgcacctgaaaatcctctcattaacaaaataagaaatgttttatgacctgcgccacagtcgcattcttgagcaaattgttgtaccgttccatccgagcattgctaatcggtgtaatttggagaatatccgaaattatcgcgatcctaaatggcaaaaaaaaaggtttttttttgttgaccaacataaattacccctccgtttttgggacaatggcaaactgtcgggtgaaaaatttcatgttcaaaaagttggtagacccatccgacacttctttcccatcgcgaaaaattccttgcagcgataagacgatcaaattgtcctgaaaagcaatcaattcctaagcagaacatttgagtgaatggacaaacaacaatttaattaataacccacagaagtgaaattgaagtcgagtagaaatgattgtttgatgtgctcagtcggaggtaatttgctcagagcgactgctatatccataggtccacgataaatgattttgtcacgataggattgccatttgtgttgttggatgatgttgtgagaagaacggatgtacaggccgatcaactctctgaacagagacagaaaatgaattggaaccaaaattagaagggaacagggggggggggaggggggatcaacctgaagtatttgcgaagggttccggaggggtagaataattaagtaacccactgcttatgggtgttggtactccattagcacttactgatggtcacttctgtctctgtttccggtcggatgggtatccgccagaaaacacatcgaataggtaaacgtcgccttaaaagcgaattttactcaaatttaacattgcccattttgcgtacatttgcgtcgtatgcatttaacaattgttgtcgcgtctgttcaccatttggaccgtcgtaaaagttgaaaaattccaagagaaaattttcagccatcgtgcgaaaagatcttcggtgcaaaaaccgtgcttaaaggcgcaaaaa

SEQ ID NO: 30324 - DNA, 1071 bp, Heterodera glycines
  unsure (1)..(1071): unsure at all n locations
aattttatgataaaatgccctaagaactaattggaatctgtcataatcttttccttagcaaattggatggaaatttttcaaaactacttcccaattctatagtttcaaattttaatttggataacctttgctgtcgaacttcgtcctcctgttggctcagataagccgcgtgttccttgggatgcctgtcgcgcaaatgtcgctcataaatgtgcttgtccagaaaacggttcctgcaaatgcgacatcggaccatctttgaccggatcagtttccggatctccgacggtttggtcgggtgcgcaacggcacccgcaatttcgtccgcactttgggttcggatcaccaacggcaccggcttaagcaccttcacattgctgctgtggccttgaaaatgtatggggataaacaaccatacaaaaagaaaacaatgccgtgccacaaaagccggtgaaaagtattttaatttttgaaatttgtgtgggcggtgcccggtcctggcattcctgcgcaattcatcataaatagagcagcaggatttgaaaggaccaaaatttggcaactatactcgaccggattaaaaagccgttctcaggactcatagagtaatccacggcgtatttttcaacaaaaaaatacccgacaaagggacttgataaaaccttaatagccatgccaaaaacaggaattaatcttttaatttaccataccattaactgtcacgtccgaagtggacggtgtgagtggagtgagatccggttcagatgagataactgttgttgtggccgataaattggagacagatgctgtcgctgccggagcagcagtggaaggggctgaccaaaaagtgaacgctccattgattggtgtaccggacgcatttaacacctaaacagttaaatgcaattaactaattagcacaaataacggttttcactaattattgtaattaaaggtaattagcgcgaaattanagtttctatttaatcaccgttcgtttaaaattgtttcattgtattctgctgctggctcaagttgaagcttgagcgtctctctttgctgctcatcaca

SEQ ID NO: 30325 - DNA, 1540 bp, Heterodera glycines
  unsure (1)..(1540): unsure at all n locations
gttttttaaatagacaaaaataaagttgtgaaatgtttttgcatgtgttttgcaaatgtaattaagtactaaaaaagagtgttctccagttgtgtttttaaaaatcatttaagtaaagaaaatgcacttttgctgttgaaaatgcacatttttgcggttgttttttacaattgtattattttctttaaaacacatttacggtcatatgtattattgtgcaattgttattaagttgcagataatgcggatcttccgagcatcttgtgaaattgtatttaattattgtaaaacaaacatttcggatcaaaaaaaatttatttgaaattaatttacttcaaacacaatttttccggttttgtttttaaaatataattgaataaccgaaaatgtgcattttttttaaacaaattttgtggttgtgttttgcaaatatagcttaataaccggaagctgcgcaattaccagttgtgttttataatgaaaatctatttaacaattttttaatttaataataattggaacaccttttcatttaacgtttttctgatattttcaaaaataatggtaaagaaggaattaccaattttcaattttttgattttaatagctgagttgctgaagttgagaggtattgaccgtctgcttgtggcccgtcaattccccgcatattttttgaaaaaaacaaagtgatttcagagtcataatcttgaagttgacatccgatctgtttctaattagtttaaagtgggttggaggcttgacgcattgacctcatgatcaggaatttgatgaaacataaagacacttgcatttctttttaattctttggcattttgttttttaagcaaacaattttatccgctttctttgccgtccatgactgaatttcacagctttatccgtaaataatttaatagttttttatggatcaaaacaggaattgcattgaaatccgatttctgacttacagacatttttggtcggagtttgctctctcggtggagcaaaaagatgggatttgaacagattgacggaggagcagttgaatgaattaataattgttgtgttttttggttggaccaatccaccaccttattttatggaatttgtgtttttaatctaaattgttttcatgtgattttaatttaaaattaaacagttggtgattttagaccgacttctgttcataaagctatggtctctttggatgattttacgaatacactattcatttttttcaacaaatccattcttgtcctcattattttctcattggttttccaaaacatttgaaatggttgttataattatataaaaatggtaaattgattaatttgaaaactaagttttatggctgatcagtagggggtcgaaaaaaacatggatataaattccttaaatattccaccaacaaaatctcaaatttatggctanatttctcgaaatctcttcaaaagttcagaggtgatccgtcaatcaaatttgctgtttaggtatctgncaaaaagcgagaacgcgagagagagtgagagagagagag

SEQ ID NO: 30326 - DNA, 1629 bp, Heterodera glycines
  unsure (1)..(1629): unsure at all n locations
caatctcaaacaattgctcgccatagcaattgttaaactcaatgttatgacgaaaaatcaaacaaacgcattattttattaccatcaatggaaatcggaaatgcatatgccgtgagagttccatacacaacattaaaatgtgcaaagcgtgtaaaagtaaaaaggattttcaaatgataattacagtagaaagaaaacggtgaaaacgccattattgtacggtataactcaaaaggaagaaatgacagaaaagagagaccaccgagacagatcaaataaaaggtatgctctaaacaagtgcagcttacacgactataaaatccagtttttttctctcgatctgtactctatttgtcttgtcaaaaaattcaactataatccgaactttttttttcataactgaaaatgaaagtggattgatggaggccttaaaataagtcaatagattttttggtcactgtaaaatgcaattgaagagccaaaagggtggaatgtgtgattgattgactgattgatgctgtttctatttccgatttattgcgacgttttggctgtttttgaggtggtgatgtacatttttgaaagaaaaaagggatgtggaggaggaggacgcacactaaagcttcatgtaattcaaacatccgttttggcgccatcgcttggcattccgtccctattgctgttgttggtgctgtttctgcttttgcaatgcgtccaactcggggttgatcacgtccaaaaagtcgttgtacgccttgtccaagatgtcgttgatcaccacatagtcgaacaggctcggctgcttctccactggaatgggcaaaatgaggggggccatgggaaggaaattttcaatgaaatttccacggatttcgaaatttcgttgggcgatttatntaagcattggactgtcncaccggcttccatgtcctccttggcgtgcttcagccgcttcgcaattgtctcttcagtttcgcttccgcgctggcgaagtcgttgttcctgaatttttgattttgctttttgaaaacccagtactgtttcttatggtccgcttattataaatcgggtttcgtctgggaaaaacgatgaagaaaatcccggtcttacaggtccgtagccagaaaataaaaaattaggagggtgggagagggaaccaaagacttttctttatttctgacaatttaggtttggatccgagtcgatttttacaaaaataaacattccaatccgacataccttccgagtcaagttcatatccatcaagtaattttggctcagcgttttgtccgcgtccatccggtacatgtagataaagtcacgaagagcaggcaacggtgggaaatgtggcacgacggaacgcattttaagcatttgctcgtctagtataaaaataaaatataaatacagcaaaaatacagtatacatagtctttgttaaaactcaatgcttacaattagacggagaagcaaacaaaaacaacattatttgttttcatcagtgctatttcaaaattttcaagcgctgagagaaaaagcatgagctttaaatattcattttgcaattttggggtgtcaaattttcaaaaaatatagaatgtgagtccacagtgatgaaatatgtgccgca

SEQ ID NO: 30327 - DNA, 814 bp, Heterodera glycines
aggaaaggaaaagagagacggacaattcgaatgcctttctgtttaatgacacagtaattacaatttttgacccatttaacaatgaattaaaatgaatcgaccaattttttgcgatttttaggtgtgttcgtgcaattcgtcagacttttgcaactttaaaatttggccagacggtaaagaggagcagcagcagcaattcgacgacgatgacgaggacagcgatgagagtgacgacgaagaaaaggcggaggaacaaagtctgacgaacggagcgacgaggagaacgacgacaacaacgcactactcgagatcactggtcaccgtcacgaataatctgctcattttgatgcttcccacaatatttgcagtgtttactttgaacaattggaaatggaaatgaaaaaaaacaaacaaaaaataattcctaaatgaatacacactattatgttaaaaaatgaacataaatttaaatactaaaatttttcataattttaaaaaacccgtcaggaaattcttttggatccaacattaaaaaatgggcggtcagggtcgttttcgtaccgccattttcgtaccgccgttttcgtaccgccgttttcgtacgggggacgttttcgtaccgccgttttcgtacgggagacattttcgtacgagttcttgtacaagcgtcagattcaattagaaaaacttatgactaactaatcgaaccaaaattttaccatttttaaatttcccattcataaatttaatgtaaaaaatgcataaatttaacaataacaaaatgggacaaactagggtcgcatctcatagtttc

SEQ ID NO: 30328 - DNA, 1162 bp, Heterodera glycines
ggaagaatttgcccagaaaaccatttgatgaatgaaactgatcaccatttcaaaatattaaaagaactgtggtaattaggatttgggattgtgttttacagcatatattttgattaatttgctaactttgagccagctcgatttggaatatttttattaaaatttttcaaaatttttcaagaattccgtttcgggattgcctgtccccattacctgtcccaaaattttataaaaacttgtctcaataaatttgtatatatttttattgatttgaatgtaaaattatcaaccaaaaacaatgaaaattctatttttttttgtattagaaattatataaaaattcaaaacacattgcgttacaaataatttccattgtaatattttacaatttttttcattatttttaagattgtattctggattatttaaatatttttctaatatatttaaaaaaacaaaattaaatttgggtttttctaatcgacaacaaatagtatcattaagagtcaatttcttcatatttgttttgctttttattttggattatgaatatgaatagaaaatgtaaggcaaattacaacataataatgataagctagcgaacaatcttagatatattgtggatttcaagaaattttgtttttcaatctaagaaatataattgttttcaagaaattttgcttctattttcttgtcaaagagtttttcgtagttggcgaaatgcgcctaagaattctttagttattatgcacaaatcgcgccaaaatatataaaattaaaaaaagaaatgaattttaaataaaatgaataagaatttttatgataagaaaaagaaagaatttattgaacgatttgatgaatttaaaagtttatttggtcaaagaaaacaaaaagaatttgtgaaggaattggacatttataaaggcacacatttcgcaaatggaaaaaagaattagcgccaaaataccataaaaataagaatgtaagaaaattcataatatttatttaattttcttatttttaagagccataaaatgatgaagcaatatttcaaaattaaagaaaacaatccaaaaattagtgacaaaataattgttaagaaattgggaattgtatatgaaacactgagaaagtggaaaaagaaattcactttaatttagtg

SEQ ID NO: 30329 - DNA, 1261 bp, Heterodera glycines
aacttgagagtaaagaaaaacgaaggatttagttagcttttatccgggtcccggccctttgcagggtttcggcgctgtctagtctgaattttcattaaaatacatttacttcttgggttgaatgagcatctgatttctaaaaattcaaaaagtgtgcccgaaaaagtcaagggcaacatgaatttgattttttaaatgaaaaacttttgaaatttggtgaggtaatgggagacaattttgaaaattgtgaacaaaattcccatttatataacactccaaaaaatatttataaccaatttttgatgctcaattttttgccaaatgtccggcaaaagtgctaccgctgctgctgccactgctggtggcagcggaggtgcggaaacatcacacgcaattcgcgtgtaatttggactaatttgtcggccgggtgtcgttccgatgatttatttgtcaaatttcacaaatgcgcgcgatgatgacgacacaaaataatttccttctccacatcatcatcatcatcaatttttctgctaattgtcgtcgtgtcgtcgctttttgtttggtgaattgtgcggactgtttagcccccggggggggggggacaacaaacaaatcgcacctttttaaacgccaaaactgactcttgaaggacaaaagccattttctgagagtttgagggggacgggggaggggacaatgtgagcgatgagtaagagagttgaactttttaattggggaggggctcaaaaggagggagggaatttaacaataatggaaaaaccaaaaaaacactcacactcataaactgacaatgggaagagatggacacaggtggatgaacaaaagtgccgaaaagaggagagttttttgaagtttttgctgtgactcatcattagtgctggaaatgatgtacctggacttaaaaaagctaaatatggactaaaaagctcaaaaatggccaaatatgtaccaaaaatttggttaaataaatttaaaaaatatcataaaaattacaaaaaataaatttaaacctcaaaaaaatgccaaatttatcaaatctagctacaaaaattgcagaccaaatacatctcaagattttttggtaaatctcattctgtcagcgaaaatttttggaggcaaataaaatatttaaaaaaatttgccaaatttcgaaaaatttcttttttgtggtttatttttataaatttccagaacgtcgatcattaggtgtgtatttttcgcttttttgcatttttcttga

SEQ ID NO: 30330 - DNA, 1436 bp, Heterodera glycines
gcttgagcatttgtgtagtttttaaagctgcatccgatgggtttttcagattttgaaaattttcaaatttttttgagctaggccccctcgaaaatttttcgtttttgaattttattattttttgccgatttttcccaggaaaacggagaccactttcaagcaacagtttttcgagctctatcgattggtggcatttttgaaaaaatttcaaaattttccggaaatagaaaaattttccggaattgagctccccatttccgtttaaggcttataactcgtcaggggttgattttagcgaaaatttgtcttagagcatttttgtagagaattttaagctctatctaaagtgctttatctcatgtttttatcatgaatttaaaaaaagttataaaattaattgtgattttgaaactcaaaaccataggggggaccccatgtttttgcatttcatgaaaaaattttttactcataaaattgccaaaaaatacttttctggggtaatttgaggtgctgaacacgaatatgcactttatattgcgttttggattttttggagggtggtaaaaaaaatttgaaaaatcaataatttttggcccttgaaaattcaacctaaattttaaaaattcataactcgcctcaaaatggtccaattcagctcatttaaagcataaaaaatagcaaaaaatcgggagaattttatgagatttattttgaaatttatcccacataaacaaaaaaatttattccagaaattctggaaattttctatttttcagaaaaaaatttatatctcggttctgaaaagtcattagagaaaagtaaaatactacaaaaatccacaattttttgctctattacataaattttatttgacctttttatcatcttttaaaataaagatacaaaaataaaagtgattttggcattcgggaccaaagggggtggacaggatttcttagtgaaaaatttttttcaacaaaaatcttccaaaaacatgtctttatgggttatttgggccgctgatcacgaatacgtaatcagattttatttttgacatcgttaagacctcagaatccctgtgtgattggggattctgaggcatcattaagagggggcggggggcaagttcgaatccgggcggtaacacattatttttcaaaagtattttttcttgcttatttttagatgtttttaatttatttaaaatagttttgatttaatatttaataataaataaatttttaatttacatttttttatcaataattgttttaaattttaaaattcacattgtacctcttctaataaaatatgaaaaaattaatttaaagaaattctcaacaaaattaaaaaacgggcgcgaagcgcccgtcctgaggctgcgaagcggccgaatgtctccacaaaattaaaaaacgggcgcgaagcgcccgtct

SEQ ID NO: 30331 - DNA, 1703 bp, Heterodera glycines
  unsure (1)..(1703): unsure at all n locations
aaaacgaaacaaaatcgtcgtcctccttcaccgcttttcattcacagcatcagcgcctgacnnaaattgtacagttcgctgaccaacgcctcgtgacggaatgagacgcgaatgtcgggcacattagtgctgaaaattgatcaaatatgtttgctaaaatcggtcccatcgagataattaattcaaaataattcggagtaaattaccgcgtcatgtcgttgccgaatacgccctcctccttgtagttggagcccaaccagtacattttggtccggtcctgacaaatgagaaaaacaaattgtacaaaaggagagaatggtcatccccacctcaaatcccgactggagaacgctgaaatttaacggggaatcagtacaatcgaaagcggtttgccgggtcaatagcagttcgtacaatggcagttcgtacaaatgcgtttcgtacaatcgggtttcgtacaacgttttaatttgacgtttcgtacaatattaaatttaaaaaaataagtgatagtgacagcgacacatacttttcatcaaaatgacaaaaataagcaaattataaataagtaatgagctaaatgagtatccaaaataacaatattaatagcgcaaacaataataattcattcgggggctttttcggaggatttgctcactcaactgaacttggtcaacgaaagttttcgacaattatttcataacttaaatacttgcttttaggaaaggaaatacaatttattgtgttaatttttcaaacatgcacaaaagtggcaataaaaacaagtcgttaaatgagtttttaaagaaaaaatcgactttatatatatattttgtacgaaatccgcaattggaacattgtacgaaagtcccattgtacgaactgccatgacccccggtttgccatgtgaactcgcccacctgttcctggccaactcgcacatgtcacacgaactcaacttccatagaatacgggcattgctgtactcctccaacagaggttcctgaaaatttattaaaagaacaagttcattattcaaaatctcgttgaagcaatttttacttttgtaatgtgcaacctaagtgggtcgtccgttgacaaactgatgttcagccccttcatcagaaacttgagaaaaggcgaaagctgtttgatctgttcatggcgcataaaattgtttatggccgaacagatctgaaactatttttaatccatcagcacgctttaacatccccttttatagatttaacacaaaatacaaactgggcaaaaaattcattccctttgctgggagggtaacaaaattgtggaatcaactagataaagaactaataaaaacaaattctttaaatcaatttaaaataaaacttaatcatagataagtttattttataaaaaagtttcaatcagtaaatttttaatcgtatattgaaaaaactcagtaattcatcctaaaattttgagaatttttatatattttttaaaaaatttccaaatatttttctgtttgaattttttaagtttttcgggggagacggcgcggaaatgctcctgaaaacccacttgatcaggtggcagcatgtgcacatgcacgagtggaagcgcatccgtccgtcctagaggtacgcgctgcgcaacgcctcctcaatggaaatgcccagaagatggaaaaatcatttaaaatattgaaatttaaaaattca

SEQ ID NO: 30332 - DNA, 1234 bp, Heterodera glycines
tatcaaaaagggagatgaataaatattttaaaaatttttaattcctttttaaacatcgccaaaaagtttaggcttaactttttttatataaactgatcagaagcgcaccagattttgcaagggcatcaaaaagacaaggaaaagcaccgctatgatgctaacaccagtaactcttaatttaaaaatttttattaatttttaaaacttcactattttatttttttaatagatttttaaatgtttgcattttttttggcttaccaaaacttcatcgaacctggttctttctattctctttcaaatcgccccaaattttttttacagcttaactaggccctattaagcttatttccagaaaatctcgcatgaattctcatttttaaattttttatagatttttaaatgtttggattttttttggcttaccaaaacttcatcgaacctggttctttctattctctttcaaatcgccccaaattttttttacagcttaactaggccctattaagcttcagaaaatctcgcatgaattctcatttttaaattttttatagatttttaaatgtttggattttttttggcttaccaaaacttcatcgaacctggttctttctattctctttcaaatcgccccaaattttttttacagcttaacaaggccctattaagcttatttccagaaaatctcgcatgaattctcatttttaaattttttatagatttttaaatgtttggattttttttggcttaccaaaacttcatcgaacctggttctttctattctctttcaaatcgccccaaatttttttttacagcttaactaggccctattaagcttatttccagaaaatctcgcatgaattctcatttaaaaaattttttaattgctttttaaatatgccaaaaaatgtaggcttaacttttttagtgaaaattcgatcactcatattttttgctaattgagcagaagcgtaccaaactttgcagggatactccccggtaaaggactaacttacactgaaatgagcgccgagctagctggctcaaaaaaattttcgaaaatctgagtctttcgtttttatttattttttgcaaaattaattcttaaatattttttcagaaagggtctgaaacgcaccaaatttatttacatgttagtttaggcactctgatgctttttctatcaaaaagggagatgaataaatttttaaaaatttttaattcctttttaaac

SEQ ID NO: 30333 - DNA, 826 bp, Heterodera glycines
tgaaagaccaaaaagccaacaaagcacaaagacggagcaacaaaaatgctggaggtgcggtcaaacgaaccatcaccacgcagcttgcccgcagaaaggctacaaatgccgaaagtgctcacaaaacggacacatcgagtcgcgttgtgaagcagtgcaggaatggcgcaaaaagaacgccaaaagttggctcaagaaaattgttggcaatgtccacatagtaacagtcaacattggcaccacagcaaaaccgacaacaaagtcaacattgctaagggtcaaggtctcctttcaaggcaaagtcatcgaatttgtcctcgacagcggtgcagaagttaatgtcataaacgaaatgacatacaaattgatcggcagccctaaaatcaaagcctgtaaagaacaagcagtgctttacgatggaagcacaagaagcttcatcggaaaagggaccggcacattcgaattcaacggagtgaatgttgaacaagaattttatgtggccggcaaagattccctaaatttgctgtctattcaaacaatggacgcatttgggctgctcgacgaattgaaggaaaagatttcctcaaaaatggtgatatgtgcaaaggcggtaaaaaggacaacgctccaatccgaccaaaaggcaccgaggtcaacgaatacctcaccaagctgaaaaaagctttccccgacgtgttcaaagaataactcggattttgcacaaaggcaaaagcaaatttggtcctaaaaccggacgcacagccaattttcagaaaggctaggccggtacctcacaactcacgggaagttgtcgagaaagagctgg

SEQ ID NO: 30334 - DNA, 1986 bp, Heterodera glycines
ttccataattgttgaagcattttgaaatgagcatccatttcatctcttccgtttgttggatttgcagcggaaggggccaattccatggtattttttggcacattgccaatatgattttgattcatacgaaacaattttttgagaagaatgatcaatcgtcgcttcaataatgggtggtgcctaaataagaaagaaaattaaaaaagtaaaaatgtctaaaaatgaaatggattaaattttaaaaacagaatagggccgttagacaaaaaataagttctttttgaaatttaatagttttcaggaattatgaaaaagcttttttcactaaaaggataaaactattcgactgagaaattttggttttcaaaaaaacatcgcaaaactaattttctaaatataaaatttaaaaattacgtcataattgtgagttctgttgcggcacttaaaaatacatcagtccatatgccaaaagcaaatgtcaaacagatattatttgattcagtgacaattccaaatgttgtgacaaatacaaaaaaatttgatgataaatttgtcaaaaataggcataaaaatgttggtgagagttgcgttgctgttttcacattttcagaaaccttcattaattcatatttattaaggcacaaacatttttaatttacaataaatgtttacactttacttgatatcgctgtccgatatgataattttttggcgatgcttcttcaaattgactaatatatcttctacagttgtaattccgaattacgataattaacttaaaaataaaaattaatttaaaataaatatattaaatatttaattttaattgctgaccaaatattcaaagagacttatcactgttgacattgtttgggtgattaaatttaatgtagtaaatgtccatgactgtccattggttaccgtattcacaaatgcgatgatgaactgtaataaaatgccactggtttcatttttttaataattttatttttgattttttagttgttttaattcaagcttatttatttttttactatatactaattttaaaaaataaaaactaccgtaatgatgagccaaatgaaggtgaactgcatctttgagaaattttcatatgaatttgttgagattgttgccagaaaccgttcaatgatgagcacatggccaagtaaatgacgaaataacgcgttaaataccataatgttctacaatagaacgaattaatatcaccatgtaatttgatgaaaaaaaattatttctaatttttaatcaatttatttcggtttatttcgaaaaaagatcgtttatttttaattattacgtaatttttaaaatgaactaacgcaaaataacttagaatgtcattcctttcaaagaattttcgatttatggaaaggagttggggccaccgctatgattttccttaaagaaaaaagtttcgcaaaaaataaatttcttttattgcaattaaacataatttcaagacacaaatttcatgagaatttttgtgtttcaaatgctattaaaaaatagcttcgccttttttaagaaaacaacagtgaaatagggatacaaaacttgaatttattcaggtttgattaggaatcaaagaaatattgattattttatagtataaatcgagcttaaaaaatggccgaactttttccggttgtctaaaatataattaatacactataatttacgtttttatacattgattttaaacaaaaatacagaaaagtttagaatataccgtcaaaatcagatttggcggcgtgaatgagttgttggatatgaatttttgagtaatatctattgatcgtactaaaccccaaagcattaaagcaatactttgggtgatcagaatgcttttcaggttgacatgtaaaattttggcgggacaaatcaccaccaaattcaaaaaagcaatggccaacacaatgccataggtgaacaattcaaaggagaaaaatatatagtcaaaaa

SEQ ID NO: 30335 - DNA, 1594 bp, Heterodera glycines
tcgtgggcccagacaaaagttgtgatgcttctgcaaaagaagacttagccaactgtaaacagcaagccatccaaatgcttcaatgtaaaaaaaaattacatttggatgcaacctttatttttcctcgcctctcttttcgaaaagaaaagctattagcaagcgtgtttggaccaattctaaaacaaatcggagtaattaatttaatctgactttataagataaatgggaatttaagcgaaggattcatgcagaataataatctatagaaattctctaaaaagtagttcctcgcagattctgggaccgtttctataaagctagagacatatgcgctaaccataaaaaagatgaatcattttttgaaaaatttatatagttcgactaaatttgcaaatcgatttatggtgtacaggatgtttgtcgaaacataactcgtcaggcctttaagatagacctgccattgctattcctgcaaatatgcagtctagtcagcccaatcgattgctattcgaatggtttggggtcgttggcccaaacaaaagttgtgctgcttcttgcaaagaagacttagccaactgtaaacagcaagccatccaaatgcttcaatgtaaaaaaaaattacatttggatgcaacctttatttttcctcgcctctcttttcgaaaagaaaagctattagcaagcgtgtttggaccaattctaaaacaaatcggggtaattaatttaatctgactttataagataaatgggaatttaagcgaaggattcatgcaaaataataatctatagaaattctctaaaaagtagttcctcgcagattcggggaccgtttctataaagctagagacatatgcgctaaccataaaaaagatgaatcattttttgaaaaatttatatagttcggctaaatttgctaatcgatttatggtgtacaggatgtttgtcgaaacataactcgtcaggcctttaagatagacctgccattgctattcctgcaaatatggagtctagtcagcccaatcgattgctattcgaatggtttggggtcattggcccaaacaaaagttgtgctgcttcttgcaaataagacttagccaactgtaaacagcaagccatccaaatgcttcaatgtaaaaaaatttacatttggatgcaacctttatttttcctcacctctcttttcgaaaagaaaagctattagcaagcgtgtttggaccaattctaaaacaaatcggggtaattaatttaatctgactttataagataaatgggaatttaagcgaaggattcatgcaaaataataatctatagaaattctcaaaaaagtagttcctcgcagattcgggaaccgtttctataaagctagagacatatgcgctaaccataaaaaagatgaatcattttttgaaaaatttatatagttcgactaaatttgctaatcgatttatggtgtacaggatgtttgtcgaaacataactcgtcaggcctttaagatagacctgccattgctattcctgcaaatatggagtctagtcagcccaatcgattgctattcgaatggtttggggtcattggccaaacaaaagttgtgctg

SEQ ID NO: 30336 - DNA, 2147 bp, Heterodera glycines
  unsure (1)..(2147): unsure at all n locations
ttttaaacaattatagctantcattatgaaantgcttttcttttatggaaaataatcctaaaacaaaaatataattttttaaactaaattttatgtacaagttnntctcgcgtagngcacatgcccaacaattgntgatgagnccnacaaatctcggtcaccncatagnntnnnnnatgannnnnanttcttatttttataactntcnccgtnntgtgnntcggcccaaagaacaaatgtcaaatttagagcatttggaaccggaaaaataaaattttatttattttaatttttcgcatttccaaaactaaacaaaatttttttttaaaaaatttttaatttttaaaaaaaaattttagggttttttaaatttttaaaaaaaattaatttttatttttttttcaaatattaaaaaaaaaaaaaaaactcaaaattttttttttaattaaaaatttttttaaaaaaaaaaaaaaaaaaaataaaaaaatttttttttcgggggggggtggagaaaaaaaaaaaataaaaaaccctcccttttttacacaaatttttttttttgccccaaaattttttaaaatttttttttttttttcgccccccccccccctttataagaaaaaaaaaaaaaaaatattgaaaaaaaaaaatatttttttttttttgcgcgcccctaaattttttttttaaagaaaaaggcgggagaaaaaataaaaattttttaaaaaaaaaaaaggggggggcccccccccccccctttttttggggggttttttataaaaaaaaaaaaaaaaaaaaaaaaaaaaaaatttttttttttttattttttttttttaaaaaaaaaaaaaaccccccccttttttttttttttttttttttttttataaataaaaaaaaagggccccccccccccccccccccccccccccccccccaaaaaaaaaaaaaaaaaaaaaaaaaaaaaaaaaaaaaaaaaaaacctttttttttttaaaaaaaaaaaaaattttttttttttttttggtttgggggggggagttcgtgggcgaatttttttttttttataaaaaaaaaaattttttttttttttttttttttttgtgggggagaaaaaaaaaaaaaaaattttttgtttttttaaaaaaaaaaaaaaaaaaaaaaaacgcaaaatttttgtttttttttggagaagattttttttaaaaaaaaaattttccccccaaaaaaaaacaacaaaaattccccaaatttttttgtgaacactttttttcttattttttggggggggttttggaaaaatttattataaaaaaattttttaaaaaaaaaaaatttaaaaaaatatatttttatttttttggggaaattttttttcaatttttttttaaaaattttttcggaattttttttttttgaattaaattttcccacccgataaaaacttaaaaagggaaatttttttttaaaattctatccctaaaaaaagtttttttttaaaatattttggccatttttccaagaaatttggaaaactttataatttttttatccaaaaatcattttacattttaaggaagccgggaatccaccccaaaccaaaaatttttgtcgggcggattgccatcccatacgactgacgagacattgcatgaatattttaagcaatttggcgaaatcgaagaagtattctatcgaaaatatatattgaatttaagtaattaaatttcaaaaagtttctaattttactaagtttcaaaatctgatagaaaaattttcagttttttcttgccgtcgcttttcgacacagccgtacaaatttaaaaaaaaaatgttgttctaattaaatcagacaacaatttttattcaatttatctattttggttaaaaaaacttctgatttttaataaatttcaaaatctaaaactaaattctcattattttttttggcgtcgtttttggaacagccaaatttttatttaaaaaaaattttttgaataataaaattaaatttccaaaaggctgttgtcattacggatcgacaaacgcagaaaagtcgcggttatggctttgtgacgatgaaggatcgttgtgacgcggaaaaagcatgcaggtcagagccaaaaaatattttttttaattattaaaaa

SEQ ID NO: 30337 - DNA, 961 bp, Heterodera glycines
  unsure (1)..(961): unsure at all n locations
tatattgtataatattattcaacttttattcctgtacaatcatttttgttttaatttagcataggtctaaaatatatattacatttataaaaatttttttaaaccattatgatagaatttgtttttaattgctttaatattatcttactgtaaaaatttgtgctgaaaatttatcgtactccaacgaaaaatttatgtcagtgctcctctatcaatgaaagttacaaagaattatttgtttatttataaatttatatttttatgcgaaaatttcctttttatgaaaagcacttaaaaatttattacaattagcaaatcaaatgctctcatccgctttccaaacatcactcataatggtcgttaatttgtggtgaacctatattttttacaaaatgaaaaatttttttatagtagttttcttatagttcatacagaagttattttttatataattgctatagataatttttttatttgtattttaaagagatttttttgccaaatatacatgtatattgtataatattattcaacttttattcccgtacaatctcccatatatttttctgcgtactgttttttacatacaaatatatttttgttttaatttagcataggtctaaaatatatattacatttataaaaatttttttaaaccattatgatagaatttgtttttaattgctttaatattatcttactgtaaaaatttgtgctgaaaatttatcgtactccaacgtttaaattagcaatttgttaattaaacatcttttttcatttttaatatagaaatttataggaataaaattaaaaatgttaaatattttttctacaaataaaattaatttcaatctattagtacctggatccaggcctgtagttttcctggcttcaggtcaggcaggtaaaggctaattattggcaaccttatttttccctgtacttttgtacaganaaataa

SEQ ID NO: 30338 - DNA, 1340 bp, Heterodera glycines
ctatcacctcattatacaaaataatggcttacctttctcccccctgatttttaatcattccttttggataaagttagtgcaatgtttaaatacatctattaaaatagtgcacgaaagaaccttaaattatttcaaacgatttaacaattaaaacaaaggttaaaattgttttacttaaatttagaaaggtatttgccaaatcaaaatcgaaatagataaattgtttattcaaaatgacagcaacattttaaattatgaaatttaaatattaaaaaatatttctagttttatgaaatttaattaagcattaattacatattgcccagtaaaaagaataattatgtatccacaaatcataacttatttcagaaaaaaatagaaaaaaaagagtaaaaaaacttcaaacagcttacctctgaaaataagtcttgattcataagaagtatataagtgaaaaataactataattaaaattcattcgacaccgattagatgggcttttccgtctaaaatttgttttaaaattttttgcgattgatttttatagatttttctgaggttaatttggtcacgaccgattattaattggtaccccgggttttcgattatgccggttttggagcccccggttttaaacaaaataaataatattaattaaaagcattttagcctttcaaaaataaaataaaatttaaacagatatttaaaaacaaaataaaaacttgacaggtcatataaaaatttaaaaaaacagaatctgtgaactagggttaagccccgaaccctcggggggcaaattaacgggggtcggggaccccgatcggggaatgactaaattttattttaacctaaaaaccattttttctttttaactgttcgtaaatcttcttttttcactttaatcatctgatttcgttaacgccagtaaaagtgagtccaagctggcctttgtaccaggacttccatttattcttatttctaagaatgttctgatttggggtagcgtctaaaattattctgatttcttaaatatacttatagttttgaaattttatggcataatgtcactctttttcaagaattttaacgtctgccgcaaaatttttttgatcttttgatcccgaatttactgaaatttgcataaatttcccgggctcaaaagaaaaatttaaaaaaattccaaatttctgaaacgcaaaataaggttcatttttctatttcaatattttgggggttttatcaattttttctaaatattttggcatttttcgaatttttcatgtaaaattcagaaacttttaaacatcaatgcaataaaaatgctttttttttgacgcgat

SEQ ID NO: 30339 - DNA, 1619 bp, Heterodera glycines
atttagtgcggaaatggcttttttaattttgcaaaacaataaaaaaatttataaataaaagattttataatttgtataaaatatataatattcaaaaaattgagttttttctttttaatttaaagatttaaaatttttttttgtaattctgcaaaactttttaaatttacattaatgggctcaattaatttaattgttaagcttaatgaataaatttcattgaattatataaatttatatgctttgatgtttttgtttgtttattttactcacatttattttatctaatttattttttattttttcagctaaatgaatgggccaaaaagtggcgaaaacagcggaaaaaagaaacaaataaaaaaaggtgagcaaacggaggaccaaaagagaaaaggcaaaagagaaaaggcaaaagagaaaaggcaaaagagaaaaggcaaaagagaaaaggcaaaagagtgtcataatttgtattattatttggtaatgtttgttttattaatttttgtattattattaaatgaaagtgtttatttgttttgtatttggtcgaaagaaaaaaagggaaaaacccgagaaaacaaacaaaaaatcccgcaaatattttgttgtttttgcagtataaaattggccctaaatgtgcagtaattgatcagtcaaacatttgatcagccatttttcattgcatttaaatgggttcaaagtgcccaatgctttccctctgtgcccttttggcggtgtttttgtgctacggcaccatttcggtggagacgcaatggtaagcccaaaaaagtgatcagattaagtgatcagccctaaaaaagtgatgatgattccgaggctgatccaaccagcagctgttaaaaatgacctcattggtcacatttgtttttttttcgctattttaaatgtgccaattatgtattacaaaaatgcatcttttgatcaacaagggcataatgctgccagaacattttgaaaaatttgtggtttgatgttggggtaccatttggtaagtattacaccgtaccaaataccgagtgatttatagagagagtcaaatctaagccacctaaatcagatcactcttagctgtttgggattaggtcaattgattgataaattttctttggtttatcaaagcttaggccttaggtaaaatttcgagcgatttaactatgtttagatgctattcaaaagtgatttatctgacacaaaaaaggcaaaatcattgaaacggataaaaatatgtattttatctgctgattttgaagaaaaatcagagaaatattaaacatttcatagctaaaattcagttttaaaaggtcgggaattgttttccgcctctgtgtaactaccgtatccattgctttttgctcaggtcatggccttactacggtctctattcttggccctactacggcggctattacgccaagcgccaggcgggctttgagccggtgcagcagccggcggcggaaagcatcggaggcgccgctttgcctctcccgcggccgccgagtgagcaatttttgggcaaaaataattgaaatttgctaattatggcaatttgggcaattagacacttaaacaaaaaaatgagtttagatcggcca

SEQ ID NO: 30340 - DNA, 1389 bp, Heterodera glycines
cgcgataaagccatatgttgtggagagaatgtggcattttccgcagaaaaggatcgataacatttccttgcattcatttatttattcttcatgatgggttggccaaatacaatttcaaaatatcggaggaatggaattttaaatgcaatttattttcagatattttttgtattatttattcttttcaattaaaaaacatcttcaaaatggttctcacaaccgtaagtcattaaactccatttgttttattatttataaatttatttattttttatactattattttattttctattctttgttaggtcctttcaatgatgcgttatgtgtccgaaattgatgatcgcgattttgttgatcgtttgcatagcttttttacaacaaatttactcattgggctgtcagttttagtcagctttaaggtcattttttaaatttgcttttaatattattttataaattaatatttaattccaatattttaatatgattaatattaataaaattttaaaaattataaattaattaaaaatattaatcaatatactcaaaaaataatcgtaattttgagaaaaaaacattgtttaggataaagaaatattctgtataatttttttcaaaatttacattaataatttaaagttcattttaaataattgaaaaaattgaattatttatttaatttccatattcattaattaaatgttttttttattaaactaaagacaaaatttcagcaattcggtggcaaaccaattgaatgtttaactccggacatattttccagctcttgggaagaagtaaatgagagaattcaggatttctcaattaattaattaattacagtacgccgagaattactgttgggcccaagacacttattttgttgcaccgtcaacaaacgttgagagtttggaaaaaattgaaagaaaacagcgtcggatcagctattatcaatgggtgggcgttaacatgcatcgctaaacataatgccaatgattggccactcccatccccgaaaaataatttaaaagaaaaacgagagtaaaaattataaattctaccgataaatcatttcccggtggcatcgcccaacggcaccatcgtacaatgatttttcctgttttgcgccaacgagtgaaaaattcggaggggcgtgggaggggtgaggtagttcaggcctgtagccagaaaaaaaaattcagatcggggaacccgaagacattaaaaaattttttaccacttaattttcaaaatttttaatgccggacgaaaaagcaggaacttaaaatttggaaattttaatgaaattgataagaaatttttcaaaattacgcatgcattttttcttgaaaatttttaaaatttttcaatcggggagaggggggg

SEQ ID NO: 30341 - DNA, 1764 bp, Heterodera glycines
gatgcaaatacatatttttcctggattctctatgctctgaaatagtaggaaaatcctttcttttttgtgtttacgaacaaaagtttggacttttatttacatatgtcgtgattgttatacatatttcatacatgttttcattttttttacatattttgagaatttatagaagaaataataaaaatttatttttgaaaatgtacatcaatgaaaatggtgttttttcaaggcggaaggaatgaatggaaattttttgtgaatgaatgaataaatatattcaatcaatttcatttcccctctctgtgctttggcaatctttggcctccaaaattgaccaaagttttccattttatattatttaatttgcaataagcatatttaattcccgattttttttattttaaacaatttctcttaaatattttgaaattatcgactaatgaaaattccctttatattgtttaataagaacttaaggattttttttctattttatgcatttttaaataaataattttaaaaattttctcatgaaaatctcttcacatttttttttcttttacctttttaaatttagaagaattttttctgtaaattttatcaaattttctacaaaaaaaggcaatgcgaacatcaaattcagcttcttcagcagctgttgctgatgatgctaatggtggtcgaaattcgtcggacgattcaccgccggttgagccggaagaagaagcattggattacatggtcaccattcccgagacggacggggaggtgcaaattttggaattaaatacattaaaaaattaaaactatgaaaaaatgcaaaaatttaattaaaatattttaattaaaaaaattatcattttttttattttgttaaaataataaaattttttaacactaaaaaaaatcattttaatttcttatattttttaaataagaatttttttaatgaaaatattgttttttaatatacattttttcagtcggcgttcagttttcgcaagctatgggccttgtaagttaattttctttttcaattatttaaatgaattttttgttcagtaccgggcccggctttctgatgagcattgcctatttggacccgggcaacatcgaatccgaccttcagtccggcactgttgccaggtacagggtaagcggaccttttgcggaagaaagctaatttcaccatttttcaagttaataaatttagatttttttgaatttgtgctaaattttaaaccatttaattttcttcgttttcttagtccttcgatatgaaaattcttaaaaacataaaaaaattctcaattaaaaatatttcctcattaatggcttttcgttttttcaaatattttcttgaatgtttatcctccctgcttttttttattgcattttttgaaattttatttctttcataaacaaactttacaaattttaatattttttagtaaattttaaattttcctatttttaatttatcattaatttaatttattttcaattttccttttttatatttttcccattttcagctcctttgggtgcttttgttggcccattgcgtcggctttttcctccagcgtttgtccgctcggctcggcgtcgtcgccggccgaagcatggccgaattggcatttgagtattacccgcgggtgccgcgcctttgtctgtgggcaatggtcgaaattgccatcatttgtcagtttaatacactaataagccattacaaatagtttctgaattacggagctttttggggct

SEQ ID NO: 30342 - DNA, 1731 bp, Heterodera glycines
  unsure (1)..(1731): unsure at all n locations
aatgatggggagagaaaggaatggaaatgnacagtgcaaatggcgaaggacaaacaaagtgtgcccnaattataaagcaaatgcaaaaattattannttttccatccgaaatttgcttttaataattggaaatttttaaaatataattgtaataataaataattaattttcattttgatttttaagttgtcctaatgttgtaccacaaatttgttcttgcatttatttttttgaattgtttttacaaattcaatgctgaagaagcaggtgaaaaaagaaaaaaattattttaattttaattcatttacctatttaataattaattataataattatttaaagaaggtttaactcaataattaaaataaattcagtagaatgtgccaagagaagccgtgcaaatgttctgcaaacgattgttctgtttgatgccagcccggaaaatcaaatggacttccaacaacagaaagaccgagtgatcaaagcactaaggcaaattaattaattaattaaatgttaattacatagaattatacataaatttcagagacattgagcgattctcgacaggaagaaaacgcttttatgagctgatcgtttttcaccggacaccaatggaacgattacaatcggcaaatattgacgaagtgaaccatgaataatataatttaattatataaattatctatttttaaattaagatcacagagcaaatcagcactctttcaatggttaacagccaagaaacatcgcctgccaaagtaatttatttatagtttaatttcattttttaattgttggtttcaaaatgccaattttaaggcgttaaatgaggctcgaactgttgtcgaaaaaatgccacaggcacaaagtgtcattcttctcgcgcacgacgggcacaacaccgacttggcctcggaaacgctcacagcgaggtgaaaaatgccaaaattactataaatgcgtttcaacacttatttgattaattaagtgctcgcctgtcaaagaaagtgccaatttttgcaattgccggtggaaaaacgccgccggcgctggccaaattggacgaatacacgggaggacagcgccggagagtgttcgcctttgagcaggacggacaacagtttttggacgcgttggacgaggtaaattgaaaaaatgttgagcgatttgattttaataataataattatttaggaaattgagttttgcccctcgccttcatcggtgccggcggagaaaaatgaagcggaaccatcgccatcggttgctttggcggcggaagcggaaaagccaattcagaagagcgaagtgaagaagccgatggaaattattcggaaacaagtccgaaactcaaaggacctggtcaaactggagtgtgggacgaactcgggagaagtacggaacaattgcaaatttaataatccattagggcaaaaaattaaaaataaatgtttaggatttatgacctaaaaagtacgaaaatttcgatttaggtgttgttgataatcttaagacaattttttaggattttttaaatatttaatatttcgattttgngattttaaaatttcaaaaaatgtccattaaaataaatataaataaaaaatattttctaaaaattttttctcaaaattctgtgagaaaattgccaaaaacaaagaaaaaatatttaaaattgtttgtttttccattatttcacttttaaaaggntttttgaattttttgctt

SEQ ID NO: 30343 - DNA, 1291 bp, Heterodera glycines
attttgcttttaggggaaagatgactttttgctgctgccacctgttttgtggaaatcgcgacaagaaggccgcctttgtgcgtctcggaagcgcaatgaaacattttgacagggacattgtgccaacatcggatggggcaagaaggaggaggaaaagcgaacagaaactcagactggagacggacgaacagagaatgaggctggagatggagaggcggacgaagacgcgcaagcaaataggggagaggaaacgcagaagattgagcaccgatgataattgggaataggaaaatgtcaatttccgttttatttttattcattttaataatttcaaaaagcaaaaaaaaatgacaaaaaaattgtttatatattgtgtatgatcagtgtgaataaattagcagcgataaatgtggacacattcattttgaaaaagaaaagagagtgaccgaacgaatacaaaaaacgtatgtataggcgattttatggagggggacggggggaaaccggcaaagcccgaacacaataagaacaaattaatattttcccggggtttatggatggtttttgtgggatgagaggcgaaaataaaaaagggaataagttggaatttatatgtacatatttgtgacacacgcacttatagacaaagtgatcatttggaggaagaaaagtgcaaaaattagcaaaaaagggggaaaatggatgagagaatttcctaacaatttgcattttgaggagagcgaaaagcgaggggaggaggaaatgggcacacattttgtgagaggaacgaacgaacgaaacggaggaggaggaaaaggaggacgaaagatcccagaaaatggacaaaaaatatgtcataaaataatatatgttatatgtgtgtgaagaaaagcagcaaaacaacaacacggttgagcaaaaacaacaaaaaattaaaaataaaaacaacgaatgatttgcggggggaataaatgtaacaaaaagaggcgaaaaatgaataaaaaaaataatcgtaaaatgctcaggagctccgctgtccaagtttaattcctccaacgaataattccgtgtccttctcagaaaagttcagtttctgtcgcttttcctctacttcctggtcttcgtcatcgtcctcttccttccttcgtttttgatcacgtttcttcttacgcaccattttggaacaacatcttaacattgaaatataagctaatcaagaaaggacaaataatttttatgtaaattattttatttttttgatatttaatcttttaaaccaattaacttaaat

SEQ ID NO: 30344 - DNA, 1320 bp, Heterodera glycines
  unsure (1)..(1320): unsure at all n locations
ctgaaaaaataattatgaattaatntttgcaaaaaatacctcccctgtgaacctttaaaaattcataggaaatttaaattccttggtactactgctaaatcaacgcagagacgcctttccttgacctttttaggctcctgcaaaacctggtgcacttctgatcactactcgaaaaatgagtaaattaattttcactaaaaagttaagcctaaactttttggcctgtttaaagaggaattaaaaattttttaaaatttattcatctccctttttgatagaaaaagcatcagagtgcctaaaatagcttgtaaataaaatttggtgcgtttcagagcactttctgaaaaaataattatgaattaattttgcaaaaaataataaataattaaataaaaacgaaagactctgattttcgaaaaaatttttaaacccagctagctcggcgctcatttcagtgtaagttagtcctttaccggggagtttccctgcaaagtttggtgcgcttctgatcagtttctgaaaaaaaaagttaagcctaaactttttggcctgtttaaaaaggaattaaaaatttttaaaaatttattcatctccctttttgatagaaaaagcatcagagtgcctaaaatagcttgtaaataaaatttggtgcgtttcagagcactttctgaaaaaaataattatgaattaattttgcaaaaaattggaaaagtacgcaaaattgcaatgtctaaaatttttaaagaaacattatgggacagttaaataattatatgaataagcattattctcagctgttaccctgcaaaacctggtgcgcttctgagcactactcgaaaaatgagtaaattaattttcactaaaaagttaagcctaaactttttggcctgtttaaaaaggaattaaaaatttttaaaaatttattcatctccctttttgatagaaaaagcatcagagagccttatttaacatgtaaatagaatttggtgcgtttaagagcactttctgaaaaaataattatgaattaattttgcaaaaaataaataaattgtgaacctttaaaaattcataggaaatttaaattcataggtactactgctaaatcaacgcagagacgcctttccttgacctttttaggctcctgcaaaacctggtgcacttctgatcactactcgaaaaatgagtgacgcagagacgcctttccttgacctttttaggctcctgcaaatacctggtgcacttactgatcactacttgaaaaatgagtaaatgaaggtcactaaaaagttaagcctaaactttttggcctgtgactctaga

SEQ ID NO: 30345 - DNA, 1051 bp, Heterodera glycines
  unsure (1)..(1051): unsure at all n locations
cgggtctgggattcggagttcagtttggaccacatagaagatttttttgcttttactggtaaaaacgtgttttccaggcgtattcggtgtcgctgatcacgaatatgacattaattccgatcaattttcgaaccccggaccaaaattcgaacaaaagtcggaaaaaaattttcaccaaaactgcatccttctatttgtaccaataactcgtattcaatatggcatcacatataatatgatatatgaataatgagggcattacatcggatacatttcagtgcatgttgaatcgattattggacaaaagcggatctatgaagacattattgtcatactttcgttagatctcttgaacagtaatcttaatagtatctatattcgcgaaatatataccgggaaacttcgagtccgattgttaatccattcaaactaaaagtgagttggatgctatttatttatttgtattgatttcatattatattttattttttggcggcgatctcggttttaattgttttgcagtttcttgaggacattttttaaattgatgttttgtcctcaatgtaagcggatttttcccttttgtggactttttctttattgacaataaacaataaagaacaaacgtattggccaatgtcactcacattaactgctaatttttgttgttgttttttgctgctatacttaaaagagagagagagacaatttctcaaaaattaaaaataaaagtaatgaaataaaaataccgaaaataatgattttataatacattaatggaataaatcgcgcgcgaataaacgtaccactgcaaactaaataaaggtaaaaattaatatttttgcataatataaattttattatttttaaagatttcaaaataaatatttctataaaattatctaacaataaattttagttacaatactattatgttatggaattgactggcttagaaaacatggatgataatagcataagatcaaagaccatgagatagttctagctgcggtaaacaaaaattaattaaaaaatgtaaantttattttat

SEQ ID NO: 30346 - DNA, 2085 bp, Heterodera glycines
  unsure (1)..(2085): unsure at all n locations
tttcatncaatcatcatccaacatttctgcgaagctacaatgaaaagggaaatgcccatcganccaattcatcattggcgagtggaggtaacatnccattggaantacgaatatatgaccttccccgggtnctttctcaatgtccgccgagatttcagcgggacctacaaatgagaagggacgaccaatcatcatttgcaatagctgtgtggaaagtaaacacccattggaaatacgagtaaattgtccttctcctgaccttttcacaacatacacctaaatttgtgcaggaggaaagggttatataaataatgggtgaatggatattcaaccaatcagcgttcaatgggtcattgcagattggttaggtccattcggcagccagtggtgctagacactagacggtaccttgtgtttactttacttttcattcctttcgtttgtgagatagacctaattatacaatgaaaaaaaagagtcatttctttaaagttttattggaaaattgtgaacaaaatgttgaacatacaattcgggactatttaaatgattaaatttatttagaaattgatcaaatgtggaacctgatgataaaaagtaaacaaaacaaatgcaaaaatgagcacatgactttgatgaaatggtttgaaaggctttttggttatacaccgctccgggaaatgaattgagaaaggagctaacaattgatccgtttatcggtagcgctagactgtcaaaataaattactttcttctttaatccatatgcaaacattgcgacccagtgagaaccgggaaattgatgagcatctaaattaacaatcaatgagcaaggaaatcttaatgaatttgggtcaggtaattggtcgcatgggaagcatccaaggaacgtccggcttgttttctctgaagacatcaatattttggtaatctgattgctgtccatttgccttattgcccttttccgttaaagttagcttaagccaaagaattgaacgaagctgatagatgatgaggctgatgacggacaaggcaaaaaggatgatcatagaccaacaaaaaatatgcgcatagacatttgcctcttttggtaattctttgcagaggggtacaaaggggaaattaaagttatcatgatgctgttgttgttgttgttgttttaaggcactgcttgtttctatactttttgtagtaacttttatttttattgttgaattttgggttgtcgtttttcgggttgttgaaacatttttaactaaagtggaggcgatcgttgcttttgtagtatttttttgaatttctgaagaatttttaaaccccaaaagtcttttccactcattatattggggaatttcctcagcttttattccttcttcaacaatcaaacaaacaattggttgaaaaaacaagacaataaagaataaatgaaacattttttttgaaatcaaatggttgtatcagttgcaatcgttctgtttttatctaaaaagtagatggagtctgcttctcccataactatcagtgtaattcccccatcgggcactggctttttgaattttatgttcactgctgtacatccctttttgatcaggtcgaacaaaccgccatgatcatctccactattagtcatgttaaacacataaatacaatgagtgtgcaaaaagaaaaataatcagttccatttccttatgtagagttggcaaaaccaagcgcctcttgcgtatcattgtaggggcggacaaatttccaattttcacagtcaatgtcatacggggcctggggataggagcgaccattggccacaacactcaactcatgtacattaaagtgctgaaagttgaatggactccttttgatgttccccacataatctgagtttgccacaagacccattgttacgcggcgtggaacttggtccatgaacaagtttgcacataagactgacttttttgcagtagagtttcaatccaacaagctcaatgctatatggttgacccggaaggtatgatgtgtcaattaacaaaaaattgtcgtcatggggtcggggtgaggatgtcaatttcgcaatgattaatcaaatattggg

SEQ ID NO: 30347 - DNA, 1435 bp, Heterodera glycines
  unsure (1)..(1435): unsure at all n locations
taaggtgttgtgtcggtgaccgattattacaaataaatctttttttctcccgttntattagaggtcatttgtaatatgtcctggcataatttntaataagttggacaaatttatgaaatgacncaatattactcaattcttggcatcattctattcatgtttttttaaaccataacttcttaacttttttattagtatttgttgaaattttcttgtttatagtaaaagttattacgaattaaaatacgtatctaattaaacagaatcaatcgggttaattcccatttcctgggcaaaagcatttttcagtgtttaaattttgtttctcataggacccaacatttatacaaccattcgctttgctttacgtggcctcaattttcgcgcagttccctcttttctttacgccgtttgaatgctttttgaaatgggcgttcacactttggcattttgctctttgccaattcttggccaattttgtgtggcgcattcgattggccgaatttgcgcagtttaccgtcgttaaattggcactttttcaaatgattttggctcaattttatgccgatttttgtcatcgggtaatcgtttttttaatagaattcctttttttgtgtcttttcagctgatttttggctcaaattttgcgtttttgccgatgatggtcccttctgttgcctgtgctcttctcgtcttttttgcttattgccatttcattctcattgtttttgcggaatctgttcaaatccattttttcaaatttcgttgtcgccgcaaagaagtgatttttaaaaatttatttaaaaaggcacgagaatatttattgtcagtttattatttttgaattttttaaaagcgcatcgcaatagaaaaattgaaaatttatttgtttttaattcgattaatattttgattttttaaaaccaaaacacagacaataataaacagattaaatttaaataagcctttttcaaattattttaaaagtaaatttccaaattcattttccgaattccattctctctgctgccgctgcacaaaatgacaatttgttgcttggcatggacaaagtgaaatttgttgccggcgttgacgtttctcagtgcaaaagtcagcctcagtttgccgtcgtctctttggtggtgcaaacattccccgggcttaaggcaataatgatttgaacaaataaaaatattttcaaaaataatttaaatttcttgccgtcttttaggtgctttatgttgcggatgaggtggttttgttgggccaaccggcccattacatcaccgaatatttggctatgcgcgaagcggggcccatccgtcgggcaatttgccgccacttgaagcattgtcaaaaagtccaactgttatttgtggatggcaacggcaaatggcactccagaggtgccattgacaaaaaaataaaatgctaa

SEQ ID NO: 30348 - DNA, 1336 bp, Heterodera glycines
aattttctgaaattctgcacgataatagaggacacataggctatcgaatgatagcaagattattttaatttgttcattctaagaaagttttgataacaatttttgatgattaaaataatttatttttaattaactaattttaattagaaattatttttatttcttttttttgattattcgattgccctatgtgtcctctctattagcctgaaaaatatcaaaaaatttcgataggtttcaaaaaacttatggccaaaaatattcgaaaacctggccacatgtgtacttttggccatagctttgctcaaccttgaccaaattttttgaaatttagccgagctaattgagaattcttagggatatcgaatgataccaagtatgtctattttagttgactttgacaaaagttatggacagttttttgttgaaaattcttatttaatggttttttatgacgccctttttgatggctttttttttataacggctcagcaccctacacacaagcaaataatttaattttgaatacaaatttgagtttttttttttaatttatttttattttgttacctgtcgccatcggcggttgttcagtgtcctgcgcctttcttatcactccacccccaacgatggcacaaaaaagaacaaaaaacgttgacaacgcggagagcattaatgcattcatttttagaaaattgtaattttaggatgcaaaatctttaatctcttaattggaataattaaaaataaaatcatttttaccaacaaagcaaaaataaataaaaacagaaatatttttaaattaattttttgaaagaatttctttttaaataacaaaaatttaagaaaaagatccttggccttgacttttgagttgagaaattcttcgggtttttgggttttttaaaaagggttaaattacagggatgcacaagagtctcgggtctcgagaaatgtctagagtttttgattttggtttcaaatttattggtctcgagcaatcactacgtattataattggggatctgaaagaataggagatatcgcccaccatcttcccagaaataattatatgattttgaagataaatttaataaaagtacatttttgatcagccaatgcccacactaatggaatgaataatgtccacaaaatgtatagaaattatgggtggggacgggcgaattagcgaaagggtagtgactaatgaatgactctaatcgaaaagccatagcaaattccacaaattgttttttacataatttatgcatttttaatttgctccgatggactgggaaaatgggaaagtaatacaataattattctgctgattaat

SEQ ID NO: 30349 - DNA, 633 bp, Heterodera glycines
  unsure (1)..(633): unsure at all n locations
atgtatcaccttccattatagcttaggtcgtctgatcagttgccaatttctcacgcggcgtctgtcgaacaccgccgggggtctcctaaaaatataaatgcagagaattgcacgacttttcctcaattctttcttatttctaaaaagtcccccccccccttttccataagtccccgccgatctttgctcacttcattaactgtcaaaattggtcatttgatttgcatttttcatctccattttcccgtccgtccctctccattttgtggggttctctgctgcccttcagcagcagttcagttgttgtgttgtaacacatcgtttggttgggggagtcccccgacattttttctcccaacggtcgtcgcccgcggggggggggggggggggttaaataggtgtatcgatcgcccagatttgtcaggagtctgggcggccagtcacatttttggaacgctgagtanngaaacaaaaattgtcgctatttaactggagataatattaaataggtagcaattcgaaacagaaattgtgaaatatgatcagtttctttccatttttagatgcagagcacaagaagaatattaaatagacatattgtacataatgaatgatgactatttatcattattc

SEQ ID NO: 30350 - DNA, 1240 bp, Heterodera glycines
  unsure (1)..(1240): unsure at all n locations
caattaaaaattcattaaaaataaaaaggcctttacgccccgtccttccctctcattattgaaattatttttattataaaaatttcccaaaaaagaaatacgcctttttttgggatacagatgcaatttaaaaattcataaaaaaataaaagggccattacgcaccgtcctgcctctcatgatcgagagtatttgtattatagaaactatccaaaaaaagagatagccatttttttgggatacatatgcaattaaaaaattcattaaaaaataaaagggccattacgcaccgtcctccctctcatgatcgagagtatttgtattatagaaaattatccaaaaaagagaaagccatttttttgggatacagatgcaatttaaaaattcattaaaaaataaaagggccattacgcaccgccctccctctcatgatcgagagtatttgtattatagaaaattacccaaaaaagagaaagccatttttttgggatacagatgcaatttaaaaattcattaaaaaataaaagggccattacgcaccgccctccctctcatgatcgagagtatttgtattatagaaaattacccaaaaaagagaaagccatttttttgggatacagatgcaatttaaaaattcattaaaaaataaaagggccattacgcaccgccctccctctcatgatcgagagtatttgtattatagaaaattatccaaaaaagagatagccatttttttgggatacagatgcaatttaaaaattcattaaaaaataaaagggccattacgcaccgtcttccctctcatgatcgagagtatttatttgtattatagaaaattacccaaaaaagagaaatccatttttttgggatacagatgcaatttaaaaattcattaaaaaataaaagagccattacgcaccgccctccctctcatgatcgagagtatttgtattatagaaaattacccaaaaaagagaaagccattttttgggatacagatgcaatttaaaaattcattaaaaaataaaagggccattacgcaccgccctccctctcatgatcgagagtatttgtattatagaaaattacccanaaaagagaaagccatttttttgggatacagatgcaatttaaaaattcattaaaaaataaaaggggcattacgcaccgtcctccctctcatgatcgagagtatttgtattatagaaaaatatccaaaaagaagaaagcattttttttg

SEQ ID NO: 30351 - DNA, 1032 bp, Heterodera glycines
  unsure (1)..(1032): unsure at all n locations
ttaatttgtgcaaaaaacattttttaatgaaaatatataaaaaatttcttttattttaattttatggcnttaacccctgttaaaaccagtcagtcccattgtgctgaagtttgtntcgtaacaacagccnaattttcctatttttcaagaaaaactcatcataatctttctaaaacataaaataactttaatattatatgataatagcctctttgattgctctaattagcacttaaaatctcagaaaattgtttttaaaatttttcaaaaaaaccccggggcgctgccactgaattaattttaacaaaattcaaacaataaaaaggtttttcaagaagaccgacagaacgtcggtccatccttccatccgttcatttgcttaagtgccgtgccatttccaatttgctttttgcttttttaattttttgaatttccgcctgctttttctttggcacttcctcaaaaaaacaacaaaagtgatggcactttgccatccggaaaattggcccaaaatcgcaattccaaaaatgccactcgaaggcaccaaaaatttgccaaacaattcggaaaaaattgtattttatttcgaaatctaaagaataacaaaagtttaactttaaagaaagttattttcccaaattattttttttttgaaaattttcatttcaaaattaaattattattaacttttataaatttctacataatgcgaatagtaataaatttaattttccaaatatttttcaacttttaaaaattcaaaaaatgaaagcattgcttttgcacatgcaaaatgtttgttcctaaacattttcccgccgctgctgctcactgaaatgcgattccgcatcagttaccatttttaaaaaggcgtcaaaagagccgtgccaaaaatggaaaaaatgtttttttttggcatttcgttgcgtgccatttttcaaattttgttgttttatttatgtgtgcttttttggaacagcagcagaagcagcagcgcatttgacggcttattgttgttagcatcactcactg

SEQ ID NO: 30352 - DNA, 959 bp, Heterodera glycines
  unsure (1)..(959): unsure at all n locations
tttccgctataattantaattgttaacatttgtgaaattttgttttaatgtttattttaaagcaaattttntaatcatntcaggcggatctattgaattttttattccagctggcgctctttagtaattagttacttttattttttttaaaattttttagatcttccaatttttaacactaattaatctttttaaatcatattcattttttctcatttgtaggaaagtgaatgatttactgattttttttattaaaataaaatgcaattatatatgattctttttttttaatttatttataaattgtgacatttatgcccatttttataatagtttttcacagcaatatcgggcccataataaagtgaatttcagaaaacttcatactttttccaattgctagcaataaattatgaattgtgctttatttatttattaatattataatggccgatttttgtaatttttgtgtcagttttataaaaatttgaaaaattgttttgcaatttattaataaattttttctaaaataatagttttccgatttaaatacttaacaataaaaaaaaattattttaatgattaattaattattttttattactcacgttccaaagagttatttgttatttttctcataagacttttataaaattgtgccgagcttttatttatccattttttggtattaatagataagatcaataattatgatttgtttctggcttaataatatattagcattaaatattattaaataaagttcttactatattgattaaattttgccaattttttctgtaaaatccatatttttattgctataaatttgattattttaaataaatgtttaatgcattttatttaataaataattttatctcttgcttactacgggaaaaaaatgtgtgatgaaacagcgcacttttatgtagactgtattatttaattaattaaat

SEQ ID NO: 30353 - DNA, 1233 bp, Heterodera glycines
tagcttacaaatcatgatccgcaatttgtgtttttttgactggtggttagattcccgttcccaaatttcttattggtcaaaatgaatgtcgtattcgtcatcagataccccgaaaaccccataatgcttgttttcaggagtttttaaatcaaaaaaaaattagaaaaaatttgacccaaaactgggatacaaacccaactagtaccgattatctttgagtttgagaaaagtcccggctcaataccagaagtcccgtccggtctcgaatacaaatgttcgaaacagcttatgacttgtataaattgcatacagaataaaaaactatacaatttgggagaaacgaagaagaggagagagaaatggaaacgacaaccaatcaatcccatgtgtaaataataataggtcaattttgaatgtagcaatggcgttgtgttaatggaaaaactaataaagaaaaagaggaaagagaaatagtacaaggatttgtctgactgtgtggggcgcaaaggcgggggaaagagaaggagacgcgtgcggttgaatggtggaggaattggagtggcaaagtgcaaaatgtggaataaaatataaaatacttcaataatttaattatatattagtagggcttcgatttttaggctctaaaaactgccaaaatatgtaggctctaggctctaaaaaactccaaaaataggcactaaaaaacctcatttttaggggtgtaaatgtagcgataaagaaaggttagttgcacgcccttttggcgattctttaaattgttctcttgtagtcacataacaggaaagtaccgaattttttagaaaattttccaattttaatgtcggaatagtgaaaaaatatgtgacaagatgccaaaaatagtgggaaaaactattttgtggccaactcccgaaatagttttttttagtggcgaagttccaaaataatttatttttaatattttaatagaattaattagttctaaattgatacagtaaaatcaattgaattcctagcatgaaaaaacataagaataattaatagtttctatatccatatttttccatattttgcgatttatgtccatatttccatatttttccatattttggcatttttatccatattttatgtccatattttggcatttttcaaaaaaacctctattagaaacgcccccagcagcttaattagcctttttgagcccaaaaccgaaaattttttcaaaaatca

SEQ ID NO: 30354 - DNA, 1001 bp, Heterodera glycines
ccggctttacttattggaggtttctgcatttgcccaaccccatggcgtttaatctcctcctccccttattattgcatttctccgcttattttcagcttttattttggcggctttcgcgtcattccgcgccaaaatgtcctccgccaccgccgtttcgtccccccaggcgtcatttgcttcggcactttcccccgaggcgtcttttggtgtcgcttcgtctgcctctctcacgccctcctcgtccgccgctgtctctcccccgtccgatcactccatgcttctcgtcccctctgatcacctcctctgggctctttcccttctcttttcccttcttatggcctccctttgcattgtcggcgctgtgatgaattccatttctctgttcattttctcacgccccgcttctcgcaaacggtccattaatgtgagcgttttctttgcaatgttttggcacaattttagcatattaaacaaatggataataagtaaaaagtgattaaaaatggacagaaattgtaattatttaaaaagtgactttattaaatgataattaatcacttttggcttcgttttcccttttcaatttttaattttacttcagattttgctctgcggtctgtccgcctccgacttggccctttgccttttggccctccccgtcttttccatgtcccaattggaatattttgtaccctgtgagtaatttaattcaatttaatttaatttgctcaaatgtgaagagggattagccgagtcacaggaggaaaagggaaggaatttggccatactttgcggagggggggggggcagaagcaccgctggcattggcactttgaaaccaaagatcgattcgcattcaaatttggcagtgaataagcgccaccggaagaagtggggaagggattaagtggcattttcaacagtcggaagatagatactccacccctcactaattgcataattaattaataaattgattgcccttccgttgccagcacttc

SEQ ID NO: 30355 - DNA, 1238 bp, Heterodera glycines
aaagcgaaattttcttttttcacacaaaagaaacattcccccaccaaaattttaattcaaacaaaaagaatttttgaaggtctgttctcagtctcgagtctcaggaatcaattctcgattttcgagtgatgcgaaatgttgacgctcgagttaacccctatttttgtgtttgcaacaaattctatttacaaaaggccataatttctggagatttatcgaagattagcattttttaattttaaaaaattcaaaaatggtagaaaattgcaaccgaatatggcaaaatttcaattttctggcattttggcaggggaaatcatgaatacttaaaaacttttgagtatggccaatggcacagaatatgtgaacacttttgcaaatgaaagagaaatggatggctttttgtcaatgagaagcgatgaaatattcatataaatatgcatatattaggggggattatcttttggggcacggcataatggcacaaaatagggtaattagcaaatttttaatgggcggcttaaatgacatacaaaaaataataattcatttttagccaattaagcgaaagatttgcgcgacaaaaattttgtatgttttgaaacatacataatgacaaccccagcaggcacaatgattgttatgttatgatgatgatgtttgcggtggtggtgaccttggcatggcataggtcatccgatgagaatggcaattctcgagagtggagggggtggggagacgactctcgtccgaaactgtctcactttactcctccatgttcctctcctctctctgttctttcacagtttggctcctctctctctctctctctttttctctctctctctctctccctttctctctctctctttctctccctccctctctatccctctcagtgtcactctcctaatccttttttagctcaattttcgtctctgcccctctctctcgctctctctctctctctcgctctcacattctctctctctctctttctctctctcctatctctctctctcgccctctctcacattctcactcactctctgattaactcacactccaaattctctctctcgtctctcttatttttccatctctttctcttcctttgctctttcttcgttccctttactaatcttttcatcacactatcacattccattttttcacttaccatcacactctctcagttttgcctttttctctcattccactctttctcagttttgcct

SEQ ID NO: 30356 - DNA, 1303 bp, Heterodera glycines
tcacttccaatcactttcctctctcactttttctcctttccaatggctcgtctcttctcgcgcatggacggtttggccttgggcatgaatagggagttaatggggtcaaggcaaacgaaggtggaggtgattggaaggaggaagagaaagggcaagggaagggaggagtggatgagacagaatggaaaagggacgagagggaaaaggggagggagaaacaaaaagagagagggagaagaaaggagtaaggagagggaagagcaagggcgagagaagaggagtgaacgagatagaatggaagagaatagagagaagaaaggagtggaagagcaaggaggagaaaagcaaggtgattgagagatgaagagaaagggcaagggaagggaggagtggatgagacagaatggaagaggacgagagggaaaaggggagggagaaacaaaaagagagagggagaagaaaggagtaaggagagggaagagcaagggcaagagaagaggagtgaacgagatagaatggaagagaatagagagaagaaaggagtggaagagcaaggaggagaaaagcaaggtgattgagagatgaagagaaagggcaagggaagggaggagcggatgagacagaatggaagagggaagggagaaacgaaagagatagatagaagatgaagaggtgaggggaaagggtaaagggaaaagcatggaggaaaaaaccacacagttgctggaccaggaaaggaagccacacacataaatggggatgaagaaaagcaaaaggaagagaagaagaaggaggatgaaaagttcaaggaatggaggaagaattggtggaagagaatgaagacaacacaatgtgagagaagaaggggacgtggaaggggaagagggaaggaatgaatcagcgagagcgaatgctcccctcacaaatgaggggagaggagggggaggggataaaaggtgtttattaaaattacggtaagggaccaatacggtaatgagccagaattaagagtacggttgcacagtttctctgatcattcttttgctggtcaacattctgatcatcaaatgaatttcttttctcttttctttctcttttcgcttttgctttgtcattcttttcattccttcaattgttttttatgtctttttttgatttctttttttgcctacggtaattcttttgtttgtttattttcttctgattgaatatttgtccctcgcgtcgtccaatgggcgaaagtccaaaaatgtccagcccaacggcggcggcggagtctgtggccaatgcacggaggtgggag

SEQ ID NO: 30357 - DNA, 1021 bp, Heterodera glycines
  unsure (1)..(1021): unsure at all n locations
tttaggacaattttctatctcgtacccccgatgctaatcgtccgggagagctctttcaaaatttttcccattaccgtaagagctgcggaaatgtgaaattaattctcagaaaaatggctatctctttttaggacaattttctatctcgtaaccccgatgctaatccgttccggagagcctcttcaaaattttttccattaccgtaagagctgcggaaattgtgaattaattctcagaaaaatggctatctctttttaggacaattttctatctcgtaaccccgatgctaatccgttccggagagcctcttcaaaattttttccattaccgtaagagctgcggaaattgtgaattaattctcagaaaaatggctatctctttttaggacaattttctatctcgtaaccccgatgctaatccgttccggagagcctcttcaaaattttttccattaccctaagagctgcggaaattgtgaattaattctcagaaaaatggctatctctttttaggacaattttctatctcgtaaccccgatgctaatccgttccggagagcctcttcaaaattttttccattaccctaagagctgcggaaattgtgaattaattctcagaaaaatggctatctctttttaggacaattttctatctcgtaaccccgatgctaatccgttccggagagcctcttcaaaattttttccattaccctaagagctgcggaaattgtgaattaattctcagaaaaatggctatctctttttaggacaattttctatctcgtaaccccgatgctaatccgttccggagagcctcttcaaaattttttccattaccctaagagctgcggaaattgtgaattaattctcagaaaaatggctatctctttttaggacaattttctatctcgtaaccccgatgctaatccgttccggagagcctcttcaaaattttttccattaccctaagagctgcggaaattgtgaattaattctcagaaaaatggcnntatctcttttta

SEQ ID NO: 30358 - DNA, 881 bp, Heterodera glycines
tgatccgaccgtcataaaggagacgatttgcaaaagaaagggcttcatccaacacatcaaggcaaacgacagagcgcataagccagcaaatgaagtcgtaagaaatgaaaatggcagggggaagcgtttgcgtgtttttgggcggaagggaaattgggtttgattccatttgcacctaaagcaacacaaaaaattattcggtgtgccaatgaattcagttggcacttgccatccatgccgccagaacagtgtccgggtcgggtgccaacagttcgggcagagaaccatcggccgaaattgtggcggcggacagcgatgggttgtcacccaacaaagaggaggaggacatttggaagctgttcagcagagggcaattggacgcatctgttgcgaatttcagtggagtgtcgggccgggagccgccagagggtgccgctggggcagtgaagcaattcaccgccgtgccgccggttgggttgccgccgctgaagttgtggtgggcatgcgctgcactgttgctgcgcactcggttcacaccttccaagggaaaaccaaatgaacactggcaaaatgggaacacttcgtacattcaatgaaacgcatgaaattgctctccaattcgtcggcagaagtgagcaactcgtaaatgtcgccccgacggtggctgagcacttctttcgctattttgctggtgtccggaagagcaagccacctgaaataccataaacattactaacttttgcacgctcatcatttagcatgtgtctaatacatgctactctggagtgcaaaacgcactttctatctcactctggtgaagtaatgtgaggacaagcggaaaggcaggtttgcaactccgagtcgagccggctccagttcag

SEQ ID NO: 30359 - DNA, 1666 bp, Heterodera glycines
  unsure (1)..(1666): unsure at all n locations
atttcgcctgccattctgctgaccaattaatagcccaaaagcttcatgatccaccgcttacattactnttatttatgctttcaacaacaatcgattgtcaaaaaaagaaaaagcaatgtgtaagccccgcattaataaaagtgacgtgggacggtggtggaggtgtaatgcaaaagagcattcacgacggacggacgagcacaccaacggttttcctccttagtgcatttttgttgtgtgtgtgcagcattaatattagcctcttaatgaggccaaatcgcgctaatcgctgatgtgtgctgacaaataggccggggtgtactcactcgaccaacaagcaaacaaccaattcaaaaagggcacacaccaattaatttgcttgcttaataatgctaattagctgtggcttaaatgggcagatgaaagttgtgattggtctataatccatcaccacacgctcttttatgctgtgttgttatgtgcctgtacagcaggtactaattaggtgcaaatgtcgttttattggcacatttgtgaaaacttagtttctctcctccctattttggcatttaatgtgtgggtgtgttttttgtgtgtaaaatcgacagccggcatcagcagctcgtgttaatacatttgcggtccggacatttgcggcctgctggaaatcggacatttgcggcccgacaaatgcggtcggacttttgcggtccatttcttaagggctattttcggacatttgcgcccgacatttgcggcctacttgaaatcggacatttgcggcccgacaaatgctgtcggacttttgcggtccggacatttgcggcccgttttaagggccattttcggacatttgcggcccaagagaaattggacatttgcggccaacgaaacgccaaattgtcattcctttttcaaattaattataccaaatatttttatttaacacatttcaccaattattttgttcaatgacttataataattttcaactaatttttcgaaatatttttaactttttttcacaatttgattatttaatttaaaagagcttgctgaaggctccaaccagcacatttatttttctcaatgaataaccaaagtgcacacaaactaccaatcttcaaagccagcattttttttggccgaagattctttcaatgaagatggtgatctgtagggccgcaacttttagtgaaaaaactttttttttgctcaattgttttgaagaaaggagctcaaaaaacgcatttctgcattaaaattttttcatttggacgtcacttttcgtcactagaaatcactattttggggttttgtcactaaaatagttaaaaatcactattttggcgttttgtcactattttttcactatttcgacattttttggaaaattccttaacaaaaatgcaataagaacaaaaaatacacccctaagaatcgatctaaaaaaattttaaaaaaatacacccctaagaatcgaccaaaaaatttttttttaaataaaccactaagaattggaaaattttttcaaaaattctcccccaaaatttttttcttgacaaaatttttgatttaaaaaatgtcaatatttgctaagagaattttataaagaaaatgtagctcatttgcaaactgcaccagtgaataanaattatttttgctc

SEQ ID NO: 30360 - DNA, 1188 bp, Heterodera glycines
tgggttttctgatttgggggataagcctcttcactcatcaattttaccttttccatttttccctttccatcccttggcagttccccgtcatcatgatccctgtgcattttaatcgtcggtacaaacccccgcaatattttccatccatgcgtcgctcaatcgtgctgcgtccgttcatcacccgcgacttcatgaccggcaaagcagcactgccgggtcgcgacattcccatcgaagtgatcactcacctttgagagcctacaaaatgcccttttaatttagacaatttgggaaatggtgcaccgaattgagggtgaaatgccgtcaatttccgcagtttttgttgatttgacatcggtggagtttaattgttttattctatcactcttaacttctattttttacagaaacctcccgggacgaccgaatgggaatagtgaaatgttctgatgagacaacaaagggtcattcttaaaacgcatctccatttcgcccctttcttttaacttttctgaaaattaggtttttgttctgaggccgtgtttgttctcccattcgtttattgttttgactgcgatgaacttttgttcaaatgtctttttaataaattttatttttaattctttcattattgtttaaaaaagaaggtaaataaactaatttacttaattgagtaaataatggaattatctcatcagaattggcctaatgaatgaccaacaaaagtcgcattttctactaccaccaccccgacctcggcaatttccactacggtccgcagcatccgatgaaaccggcacggttgggtgcgttcgccccttttgacgtgccaactctgaccctttaaaatgttcagcggccactcacagtttggtgctcaactacgaactgcacaagcatttgacgtgtgtccatccgcccaaggccacccaacatgacttggcccgcttccatgcgcccgaatatgtgcagtttttgaagcggatttcgccgctgaacgcggatcagtacgagggactgttcaatcgctttaacattggcgaagattggtcggaacgcgggggggggggggagggcgggtaacaaattgtacggcattttcagtcccgtcttcgatggcattttcgacttttgttccctttacaccggcggaacgctcggtggttgctaaaaggaatgtgtccttaa

SEQ ID NO: 30361 - DNA, 923 bp, Heterodera glycines
agtcagatacattttctcaagggtcataaaacacacatttcatccaacatttcgttgtcgctatcccagtaattttgaagcaaattctgtctcacaaatcgactaaacaattttgacatcgctcaaaatttcaaaatcgctctgccatttgcaaaattggcaagatgccgtagaaatcagcatccatcagagtcccctcaccagcagaagactgctgttcaaccctccccccggtttcaagggattggcggcgacctcgttcccattagctacctaattagcggtaattcctcccccctcctctttgttcccaaccagcgcccaccaataagttagtgctttaccctccctctccctcgtacgtctcgctcatttattattattacgccccgaattttgcgatgtttggcccactgctgcagggccacagcccaactcctatgacccccccccccgccctctccgccgatgggacggacggactgtgtttattttatactcgcttcacctccgccgctcatctcatcacatcccatcgatctcggccaacacatccatccatcctcagcattctttcaattttctcgagaacaattgggaggaagtgaggtgatgcacccgctcagcccacccaacatcacatcatattgccatcgattatcctgggaaagtgaatgggtgtgagatttgaagatgaagcatgggggtaaagcatgatgggtggagatgagaaagtatagaggacatggggagggaagcctaacaataagcggcaaatcgggacaataagaagaaacagcaggagatgaagcatggggctaaggcggaagaccagcacatgagagcaaggaggagtaaagaagagggataaagcatgcgtagaagtgattgaacaatagggatatgggcaaaatgtagattaa

SEQ ID NO: 30362 - DNA, 889 bp, Heterodera glycines
ttttccttaaaatcgaacattgcagctataaaatataattcccttatgatttaagtaatataatataaaatgaactatgattagttcaaggcaattctcatgaccctttagtaaagtggacagcagataatacaaaaaattcttatcagtttccgatttgcatatggacgagaattttcatcatcggcaattaattccctcaaaatatttaccacccacccattctcctgtcgatttctgcaatgtctgaagaaggcgaaattcgtgaggattcgccggaagcaccggaggcagttccacctcaggctgatcagcaagaagttgatcagacaatttttcgtgagaagaaatcgacgcacaaaaaaacaattcttgtccacgacggttatgagtacgggttcgacaaattaagccgtgcagaccccagtaatatttttctattttctgcaatatttgcgcgcaatttcccaccgaatggcagaacctattcaggacaaaaatcaatgatttttcatttttatagtttttaaaacgtaactaagaaccttcatttttaaaattaaaaataattttttaaaatttaattttggtgtcgtattttccgggtgtcgcattttctgttttttttaaaaaaatttacggtgtcgcattttccgccggtgtcggattttcttggtgtcgcattttctgttttttaaaaaaaaatttacggtgtcgcattttccgccggtgtcggattttctggtgtcggtgcgattatgatgagcgaaaattatgttggcacttttgccatttcaatatgtatttgtctaattgtttctatatatttgacctttgcttgatcgcaaatgcgtccatttccgttgtgttttatgtgtattaagtaatt

SEQ ID NO: 30363 - DNA, 1558 bp, Heterodera glycines
tgaatgattcgacgaaacatgaagagaaagggggtatggatttgaatgatgagacaaaaacggtgttaagatgaggattttcgcaagaaaaattcgaattgaaattcaggatttcattcgtaattgtgtttccgatatagtagcctaaagcagccaaagcatttggtcccaggacgaagtcataattaaaaggtttttgagtgattaaacatgaaattgttgtttcaacgtctcccatcctaattggcacataaatcactccaataactgaaattttcccaccagtaaatgatgcgactgaaaacggtaatttggtaaggccagaatttggacagaaaccccaatctgcgagattaattcctttttccactgaagttcgatacaaaaattcagggtttactatgccagcctcagcacccgaatccattaagcctttagcctttttgtctactacactcagtgtgatatccaaacattttgacgttttaacaattgccgggttatttggtggaaatttggaagaatgttcaggatttcattcgtaattgtgtttccgatatagtagcctaaagcagccaaagcatttggtcccaggacgaagtcataattaaaaggtttttgagtgattaaacatgaaattgttgtttcaacgtctcccatcctaattggcacataaatcactccaataactgaaattttcccaccagtaaatgatgcgactgaaaacggtaatttggtaaggccagaatttggacagaaaccccaatctgcgagattaattcctttttccactgaagttcgatacaaaaattcagggtttactatgccagcctcagcacccgaatccattaagcctttagcctttttgtctactacactcagtgtgatatccaaacattttgacgttttaacaattgccgggttatttggtggaaatttggaagaatgagtggaaagagcgctaaaaaacttttcgtaatctgttggttctttttgttcaaaatgaccgacagaaatcactggtgaattgtcctcagtattttctgtaacaacaattgcgttcgaaccatacccgggacgaaaactttgtttttgggcgtttaatgggacggcatttgcattagttgcaggtattgtggaattttgagacccttggccttgaaaatttacgtcttgtctcggtttgttactctgtggcctttcgttgccaaaatttctgttttgctgattgctagggtaccggttaaaattcagattcactggaaaatttcgtcctccaaaattgtttccgtaagaatgactcggtggcccagttcttccaaaatattttggttgaggctggtaagaattttggaaatttctttgaccaaaataacgactttgttcgttttggtatgagatttggttcgcgtttggcaagtggaatggattttgtgaatttcggatttgaaccgtacgttcctcagtcatctcttcaaccaaactaagacaattagcggaccattaaaagctcctcgtatgtttgggacggttttgacttaacactccaaaaattttg

SEQ ID NO: 30364 - DNA, 1183 bp, Heterodera glycines
actaacaagggaacctcgcgagctgttagtcggaaaatgcatatgtgtgatataccactggatataggagggtcgatttctattgtgaatttttaattttacgggacgatagcgaaaaacaaaaaagttatggggcctcaaaaatcgaaaatttgcctgtgttttcacttttgtgatggtggtcaagtggtgcacgatggcgaagtggtgactgatggttcgagtccgcgtgggtttaacaattttttattatttttactaactattttaaagtgaaaataagtgggcaaaaaattaaaatgcacaaaatatttaattacaacgatgtttgacgaaaataaaatgatcaaaacagagatttttagaacaccatgcgcaccgaataaaaggaggagaagtacagttttggcaagcaatataaacatcaaaattcttaaaacaatattcgggtggagttttaaaagtcactgccgctttcagaatcaaaatccaaatattcagtgaggggatcagtggggctttcagcgagaatggtctcaagattttgcacaaagtgtgaaacctcagcattatttttgtggcggttaaaatgaaaaatgtacaaatttatttaaacaaaaggttaaatgtttacatgaatatttgcaagaaaaattacaatcgtaaacataaaaccgaattaagtattcttgatttagaaaatctatgatcagatggctaaaaaatgtttttttttgttttttgctattttctcgtgatttttttttagaatcgttcaaaaattcgtccggcgaaaattttgtccaatgcatttcaaacttcaaactttggaattttatgtatagccaggcgattcagtgctcagatggttctgtcgttgttgtggttgtgggcgatttggtcgaagtaccgtaacaccgccaatgtggctgacccggttacggttgaacagtttcatgtacagtttaaggcaatcttggcgcacagttttattcagcgtcaaataaatgaccggtggaaagcctgcgaaattctcgatgggatttatcgctttaaattttaattagaccgaaaaaagttttgttataaaaaatcataggatgcgtcttgttcttattaagggcgggattgtccatggccaaaacattggacaattgggcagtgcacaattggacattgaaca

SEQ ID NO: 30365 - DNA, 1816 bp, Heterodera glycines
  unsure (1)..(1816): unsure at all n locations
caaaagtctgacgtgaagaaacccgtgcagaaaagatgggacaagcgggaggagagacgaaccaaaaatggccaaaggcgacggaagcccggctggccaagaaaagtgagttttttcaacaatttttactcaaaatcattttttaaaatttcagccgctacacagccgaatcccaatgcctaaatgccacagcaggacgaagcagggccgtcaacatctgctgcatcggccgaagaagcgatggagccaccaccaccaacntccagcaccagtgccaacgccggagatggacgaggaaatgttggaatttggcgattcgctgccgtcgaaatcagcgacgccaatcggcgatttggtgccgttcccgtcgacacccactgcaccaatggacactggagagatgacaccgccaccagtggccatcgacgagcgatcaccgcgcatcgaacagctggaaaagcaactgaaggaccgggatgacaccattcaatttctgcgcgagcaggtccgaaaccgagaagcgctgatcagtgatctgcgtcgtcagctggagcaatgtgcggcaccaccaacggcgacaccaaccacaagcaaaagtgagtgaaatttcgatgccttctcttttcccaattaattttctcaaaaattgatcattcattttttgtcaattttagcaacgccaaacagaggaagaccaaggaaggccatcgacgaactccaacgcagctcgcgaaaatggttgacggagcagattttggacgccattgatcgggaccgatcgagatcggcaagtcggtgttcactggagcgcatccaccgagaagtccggtacaaatacggccattatacaccaaaaaaggcaccagcgaagaagggcaaagatgaaatggaggccaatgacggcttgcttttgatgacccaacttggcacacaaaaaacttatcagcggatgaaagcaacccttcgtctgatccacaaaaaattcgacattttaccgccattaaaaaaggtgcatttgggttgatcagaaagtgcaatttggtgttttggttggtcaccctcaaacgacggatttgcgcgccattgcgctacgagcaaattgaaaccaatggaggtgttggctttgtgtgtgttgatgtcagatctgcgcttgagtcccgattttgtgcggccaaagacaatatgatcagctttggcaacaatatttttgtgaaaattagcggagactacggtcaaaacttcaccaaaattactgtctcatttttccaagctgtgcggtcaaattcgccatcaaacaattttattgttgctgtttttccggccaaagacagcagagaaaatttggagcgatatggagaggcactttgggggcaaattgagcaaattgatgcgttggcggggaaaacagtgaaatggtagagacggaaggctaaactattaccattttcaatttaaaggttcattggtggcgacatcagctttatttggtcattgattggtcactgcggttcagccgttacaacttttccgtccccaatttgcacgtgccggactgatcagatgcttcaggagcaaagctgccaactcaggtctattgatcagacaattgagcttgcggaacaatggaggacgaagttgcaaaatggcgataaggcgactgctgctgttcgatcggcatcaatgggcatcacaaagccgcctctgcttcgttcaattaactttgatcggatcatccctgccccttttcacgtctttcaaggcattgggaatgccattgttcgagaacttgagaggcaggagggatgtgcaccgattg

SEQ ID NO: 30366 - DNA, 1036 bp, Heterodera glycines
caaaaaaacaaaatttttaattcaaaataaaattatccgtctatatttatttggcaaaattgcagcaataaattttcacaaaaaaatattcaattttcaaaatataaaaaaaaacattcacgtgaaaaagcatcgctttttccgcttatcaatccattaaataattaattgtttcctttgaaattacattttcggtgcatattacaaaaatttattggcattccgttatcaattaaatttactaattaactaattgcatcatttggtttagtaattactaataatcgctgctcatcatcgtcaactgaccacaatcatttctttattacttagttctttcatcaatttatcagctgctgcagaaatgaacacaaagaaaaaataacaaaaagtttgatgactattaacaaaacatatgaccatgggtacaaatattctaaatttaaattttcaattatttatttatttttttaatttcatatcacttacaatacacaaaaatcgagtttttttccaagggtatatgtatatagtaggggaggggtgtagaccggaggctccaacaaattgaggaaccagaattttttaaaattttttgtttattcatttttagagccaaagatttaacaaaatttactttcgctagattttgtgccaaattgattattgaatttatcatttcaaattaaaaaatgaaacactttcaaaatttccaaactcaaataattttcatagagcaattaattaattagaagatatttgcaattaattttgatgatgatcaatgacgcaaaaaatgatcactgatcacaggaatcagagcgcgggagggggatatttttttgaaattgaaaaaataaatttttgatcattttttggaggacgcaaaatgcggcggaggtcagcagcaaaacaacggcagaagaaataccttgaaaaaatgaacaaaaaatggggtaaacccaactcatccagacccaactcatccatagacccaacatcgatacccaactcatccatacacaactcatccata

SEQ ID NO: 30367 - DNA, 1488 bp, Heterodera glycines
aaataaaaatacgcgcagcagaaatgtaaaaggcacagacggcgatcgaacgcaaaagaattggcgatttggaagtggacttgaaactgtcgtaaaacatgtaggagccgagcaagaaggagccagtggcaaacgtcactttgcagtcaaaacaatcttcaatcggctcttttttctgcagtttattcaaattatttgcatttgacatcatttctctagcaaatttggctgaaagtgaaaatttaacctgaaaatatttaataatttaaacataattaaaagaacgttttgaaaatgagctccctcctgactcctgtaccaggggtgggacaactctcgcctctcgtctctcgcctctcgccaactctcgccatttttggtactctcgcctctcgtctctcgcctctcgttttttgggacgagaggcgagagttgaaaatacacccctaaagattgaacttttgagcagccagaaaaattttcaaatttacgcgaaaaaaaaatcttaaatcttttctttccttccttaatgttttctctatttttggatagctccaattcaaatatggtctgctggctaaaccttctgcctttcattatttttctcttgggttcaattccccaacggtacagaatttttttaataatttctttatctttaaattattttcaattgaaattttaattaataaaaaatatttcaatttaaaaattattattttttcttttttttaaacagcctaaaactgcaaatttaaccaaaactttgatcattttttgacaagttctgttaatatattacactcaaaattttagaatttttccggcgcgcctatcggcggtgccgattcggtaccgccggaccccgcacccaatgttccaaaaaatttttttttggaaaaacagcgccacaaaaaaagcgacttaaaaacaaaaaatttaaaaaacaagttttggtcattttttgaataaaatctgttaacaaatccgaagacaattttcaaaattttttcggcggcgcctaccggcaccgcccgaccccaactgtccccgaagttttaaaaaacgcaccgcaaaaaaaaggtggaaaaatggacaaataataaagtttgtttctaaaataaatatatttcatgaaaatattttttaattttcatgaaaaaattttaaagatttttgtttggattttcatgacttggactcggtttaaaaactaggactctgacccggctttctgtacccggcaataccctgacccggtatttgcccaaatacccaggcccgtacccctaatttaatatacgattttgaagttttttaaattaaaaataaggctacagaaaaaattgaaaaactctcgcctctcgtcctctcgcctctcgccaactctcgtgtttttggggactctcgcctctcgccaaactctcgctctcgtctttttggggactctcgcctctcgccaaactctcgctctcgtctttttgggga

SEQ ID NO: 30368 - DNA, 1693 bp, Heterodera glycines
cagttttcgtacgaacgttattgctttttttttaatctattccatttgtttcttcctgtttttctttttgactacttcattttaatgcaacggaaaatcattttttgattggtctatcggtagggctggcaatttcggcacatgcctccaaatcgtaaaattttacggatttttctaaatatagtagcagtaaactgccagcctttctctattcagcgctttgcattttctcttgcataaattattcaattcgagcattttaaattacaatatggttttttccaaaccaccatctttttgtggatatactttaatgcatatttggaattttttttagtgttacaacttgtaacgctaaccattaaaattcagaccatcgttatcactacagaagttacaaatccattaatccgttctttttctcctactaaataaatttaaatttttactctggctttatgtttatataattaaaaaaagtaatcattgtcagtaaaaagtttcttatatttaaattttaaaagggttcagttcactactcattttgtattctctagaactacccttaaaatacataaaaatcatgcagtttacaatacgaatccatttcacattatcagattcttcagatgcatttttgtgctagacagctgttcattccaaatgtctcggccattcccttggccaatgcctttcgttccgtccatcgaatttcattttgccttccgtcccttttcggcaaaactcccaaccgaccaacacacttcctgagtggcatgccactgtcgtctgattcgaagaatgtccggctcgttgaagagtctgcccaacccatggaatggacggcggacgaattggcactgaaagagaaagcgacagccaaaaatgcatggtttggtggcactttaagatggggccaaatgaaattaaatgactgaaaattagaatgttttacttttcaatttgttttggaagtcccatccctaattcattatcaatctttcattttgctccaggattttgggttctttccccatttccctcctttttaggaccccaatttaccgttaccgtggctttgtcggcgtttggttcattttgcgcttcaacttggtgttcctcatcttttctctggcttctcttccgctgtccatttctcagcatattcccatctccccctccattggtctcatccttttttcgtccctcgtttttgccggcatcaaaaagtgagtccattttcgttttctccaattttccatttttactcccccaccccccgtttcgtcacagatatttcacgcgaattgtcgccgtcatttccgtggacaccgcctcccggtccatctatcgcattggctacccctccgtttttgccacacggcgcagtcgcttcgcccgctttttggacgttcagccgttgtccaccaattcggacagtgtgcgaggcgttgcacgccttcgctttaccgatgggtttgtctccactcttttgggatgcttttcggctcaacattcaatagtccgctatttcgctcctgagaaatcaggcattttttccattgaataatccaatttttcaaatttagcgtgaattctattcgtttgttcctaatccgtggcacaaatgtctccatatcacgcaaaagaaaataagtcgagttttcgctagcacttgcttcggtttatccaa

SEQ ID NO: 30369 - DNA, 1511 bp, Heterodera glycines
cgcgagatttgtctggcacgatgcggacaactccaatattggtgtgcacgtcatacatcccaaacaaccaaatctcgcgcactctgtgcccccggtgatactttcgacgcgcaataagcgcctcgtcaatttggacaacatgaccagcccctcccaacctaaaccaaaaatgatctaatttaaaaaaagaacaaccgaatggggttgtcaagcaaccaacggctgcaaatccctctgtaagtttgaccaatcgatcaatgtgtgaaatgccaatctgatcatttgtttttgcgtatgcaacggcaaacctagatattggtcctacatatattatgaaaattttgtatttactaagagcccagcaatacatcaagaacatgccctttcgaagcggaaaatgcgcttcctcgaaaaatgatcccgccctgattgacactttctgccctttgtgtgttgggcaacgccattggcatccgtcaaatgtaaaggttggatttttgacttgagtcatacgccgtgcgcatctattccggccacagatgggggcaatttgccgtaagaggccaaggtttcgcatataggctattgtatgctcatttgtttgaaattgtgaacaaaaatcaaaaatgtccatggctaaaaagttaacaagctaatattaaaagtagtttaaattattctcattgtcgcctttgatctgctggtcattattattgaccgggtactatgcattcaaatgtttgcctggtttcataattttttgtttacactttcatccaccaacctactccatccttgttattcgaaatatattgacctaagtatgtaaatttagtaaatcaattcgatttcctttactcatattgtagttacagtaccaatcagtgtatcagcaacatttgcaaaaaaaaaaaaatgaaaatttgaatttttcaaaatgttcgagttcgggtcaggggttcgaaattggtcgaaatgcatgtcatattcgtgctcagcgcatcaaataacccttaaaaatgtgttttttggatttttattccttttttttgtgggaccaatgatctgcacaattgcccaacaatgtgtgtacatatttactgaaaatgcatgaggcgattatgcaggttaattcttgactacagaattgacactagcagtgattccgacataattggaaacataaatcgtggccaaataatgagctaattttccgaaagaaaactaaatttgtaattactttcttcatctccatttttgtgggttttcctcggaatagttccagaattccttgcagtgattccgacataattggaaacataaatcgtggccaaataatgagctaattttccgaaagaaaactaaatttgtaattactttcttcagctccatttttgtgggttttcctcggaatagttccagaattcccttgcagtgaattccgacataaattgaaaacataaattcgtgggccaaacaaattaatctaaattttataatccgctttcttt

SEQ ID NO: 30370 - DNA, 732 bp, Heterodera glycines
  unsure (1)..(732): unsure at all n locations
attccctaaaaatcactaaatntctgcctaaaacctaaaaattgggtacttatgcactttacagaccataaaaaaatcatataaaataatttctaaggggttagggtcgctgatcacgaacctggcatccatttcgacctaattcgaaccccgaaccgtattcgaattattttcgcaccataaaatgattttaaaatttgatttttcgaattttttttaaaattcaaaaatgaccgaatttttggcgattacgccgattttaaccacccaaaaaactcagttattaaatttcaacaattcttatgtatataaaacaaattatttacgcatttatatgacgagacgagttacatttacaatatgggtatgtataacaaacacaatagaaatagcgctacaaaacaacaacaacacacatacatacaatacaatacatattatatacatgattatttgtcctaataaatatatcacggaatacaatcaaatacatagatggatcaccacaacacaacagcacattgttcaattctattgcttctgcgcctgctgctgcttctttctttgggccagtcgagcgtttactttcgctaggtccgtcattgtgttgttgggcaatgagtccggcacgaaccatccttcgtctggcttggatgctgattgtgaagcactggaactgttggcgttgtgcccatccatcgttgagacatgtttcccaagacttttcagaac

SEQ ID NO: 30371 - DNA, 1054 bp, Heterodera glycines
agaggaaaataattattctatttagggataaaagcatgtgaatgcacttataagtgcatatgattagtctgaatatgcctaagcgcatttggttattatgaatacgcttaggtgaagtgcatatgattagtctgaatacgcctaagtgaagtacatatgtttatgatgaatacgcttaggtgaagtgcatatgcttgtgaagtgcatatgattattctgaatacgcttatgtgaagtgcatatgtttatgctgaatacgcttaaataaagtgctatgcttgtgaagtgcatatgattagtctgaatacacttaagtgcatatgaatgattagtgtcttattgacagtggtaccaatgcactgttttccttagacttctaatgaatttcagctggttattggaaaaattaaattaagcgctgaatttttagatttttctgtatatgagaggcttattttcctgctggaggcgccgcctattttttaaacattttaaaagctttttaaggtaaaaaagttttttaaagtctgattagttttaaagtttttgattggcattttctgaaatttttagaggcaattttccacgtatcgcccagtgctggggcgcgaccgcgatgcgcgatccgggattcgcggcatttttttttgcgcgatccgcgaccgcgggattttttatttatatgtgaatacagcatgtgaatgaagttaatgtgctttttttaattcggaaaaattaaaaaagtgctgaatttcacattttcttatcttttttttctttttgtaaaataccaacttttacagcaaatccagggtgaccaagttttttttttttaaataaggacaaacgaggctaaaactaagatttggaccccaaaaataagatttttttctaaaactaatagtagcgcgagggaaacgcaataaaaccatgaaaaatcgacttaaaacaatattttattagcgcaaaaacaattgaaattgattatcaaaagtatttttcccatccgccgatttcctccaacaatttgtgattggaaatgagcatttggtac

SEQ ID NO: 30372 - DNA, 1518 bp, Heterodera glycines
ctattttattgaagaatttgcatttatagaatttcacttttgtatttggagaaagcgatcggctgggataagaaagtacatttcccactacgtatttaataatattttttaaacgatgtttttcaaaataatgtttaacttaaatatggaattttgaaactaccgggctcgagcttacagaaattgaccggcccggaccccccggctcaaaaaaccagcccgggtctgatccctaatttttacctaacaaccgaccggtccggtttctgacacccatttcgactcaatcgaaccctaacccggcctcaaaaaataaaatcgaattctgccaaaatgcacgaaatacggttattggctctgtgtagattaagaattttttaaatttatttatagatggtttcattagaagcgcttcataattttacgctgttgcactaaatttgaatcgatcaaacaaattttctaaagtaacgtattgggcaagtaaatatggaagacggtcaatcacagcaaaattttgtcagcagtattacgtactttttaactgcataaaagccagggactttgtgttatcaatgaattgacgttttgccgctaatgacaatcctttatttaatggaaagaatttttgtacaaaggaaaatttaaataaaaaaaatagatagattacgagcaaagttgatcagtgatcacaaattttatccacatcaaaatgcctttattcaaaggtccaaattcaattaaaattcagttctccttcacccctccgaaaacatatccaaagtcgcttcttttgcgcccggaattttgtttttcgcttgcaagtcgtccaacaaagcgttgatgctgttctgaaaaaaccgtgacgtcttttgggaatttgcaacttggggacccgactttttgggcaattgaggattcggcatttggagacagtcagtcggtgcccaaatatccggtccctatgtcgggcgggatccccaaaagtcgggtagccgaaaaacgcagggaattcaacaaacaacgaaaggtcggcttattatgtgccaatttgtccgcttttcccacctggtccaactgataggcttccatgttgccaagtgaaatcagtgagtcggccaacgaggttagttccgcgatttgcttggtcttctcatcctcctgcacattcgcacccgactttttggccgcccaacggcgtttgcgctcctccgctgcgtttgactcttaaaaatagattttaagtctagaaaaatgcttgtgttaaattcaacagtattatccaatgctgtgaaattgtcctaaaaatccccaaccctccgatcactcacttttttcgttgttcagtctcttcagcgcagcgccaattgtctctttttcgtttagcaattcgataagtcgtcgatacacttccttcggctccacttccttctcatcgtccgcctttttgtcatcctcgtcatccaactgaatgacaaaattggtactttcctgttttgaaggcacatccatcttttt

SEQ ID NO: 30373 - DNA, 1201 bp, Heterodera glycines
cgacaacgaaattgggtgggttaattaataggacgcgggcgtgtggaaagatctgctggtcgtacttaatcttttaatttgttttcagggaattgtcttctgccgttgcatccgaactgagtaccaaatcgttgtgaggaggcaattcaagcagagaaaggcacgcgaagaagagaattgatcgatcatttcataaattgttttcccaataaaataagagaatctgtgccacttaattatgccttcgtattgtacgctattattgccatgtcgtgtcactattgtacatttcaaatgtttgttctgtgtgttttgcaaaatgcatatatttatgaaaataaattttgaaaaaactcatacgctccgtaactgtttttaagcggcagaatcttgttgaagttcttacgggttttttgaaaaacataccttatttgttcgtcctttttcgaaaatccacaataaaagagacatgtttggattgatttgaaatcataattacttaaatgaatgtttggctaaaaattagcgttagcgagcttattgaatcgaagccgacattttagtcaaccgaaccaaaactgaaagcaaaagccaatttcaaagcttaactcaaaaatcgaagctctaacttactttttcagctattttcctgatcaatcaaataggattcgattagaattgaatttttttctgtgcttttttagtttgcgcttccgtggatctgatcactttttgatccaataaaataaaagatggaatatttcgctgtttctgccccattttccctgatcagtttgcgctgtgccttttctcactgatttgggttgtccagtgccgtcattgcgtcctgcgcgaacacataaaggccaagcgcagcgcaaatggcgacggtcgtggccaaaaagcggcgctggtttcgcattttgtaccaaattgggaagcgaatggcggtgaagcgttccaaagcgatgaaaaaagtgaggggaaaagcggcgaaagagcagaaatgggcgccatttggagcagaaagcaaaggccgtagggaatgaacggacggccgaaaagagcaagcacagaaaaaggggacgaaaaagttggactgttggacgcaggagcaaacggcgtagagggcgagcagtacgttgcagttggagtgcagggacctgatcagcggaacggacagtgaaagattgatcagacc

SEQ ID NO: 30374 - DNA, 1217 bp, Heterodera glycines
ttttataaaaaagtcaagaaaacaaataatagtaattcgtcataaaatttcgaaaaacgataaaaattcttcaatttttttcttgaaatttcttataaataaattttcttagatttcacgaaaaaactacttttgtaaatttggaatgttttttaatccccgcgcgagattttgatgtaaagccgccggacaaatcctgttgctttaaaattaaaaaaagtagtccacacgaggatggtatcccctcccgaaatcccgggactgtcccttcccttcccccccccctccctttttttattcccattttccgtcattcacttccctttcgttttgccagatgaaacggctctgtccaaaggatgtcaaagtgcgcattttggcgccccaggagcggatattctccacttggattggcggttccattttggcgtctttggacacattccgcaaaatttgggtgacaaaacaacagtacgaaaacaacggaaagataatcatggcacggaaaactttttgatggatgcttcggtggaaggacagccaaattcgaataaaatgatcaaatcagcaaattccttttgtattcgtaaataaattaaatatgtattcgccctttttgacataaaaatgcttcgctttgatttcattggacttttgccattgttttgtttggtcctctcaaaaatatgcaatttcctaatttgtccatttgtaaatttgaaatttgagcttttctttgtccaaaatcattttatccgacaaaaattgcataatggataattggacgtgcgcatttgttttgtttgcctttgccatttatgtgttcaccagcagcggattttgtcattgcaatgaatgaatgatggaatgaccttgggccgaggggggggggagaaaaccgaaacgaaaatacaaaagaattgaaatgaattatgaagttatacggaagaggggaggaggacagacaaaataattgggcaatttgatttggattatgacacaaattaaaacccaaagcgaacgatggattgtcttttggcttttgctctgtgccgttttggcttccgtcctccgctcccttcccttcccttcccttggctttctcatctccgtgcttctcctcccgtggtgcccctttctttggcatttgtcccttcgccctttccttccgccgtttcttccgtcgggattgcgttgtttctcgtcgtgaaattcgg

SEQ ID NO: 30375 - DNA, 913 bp, Heterodera glycines
agtatttcttgtaaatgaaatataaaaaaacaattcatgcattatgttttcagcgcataaaataggtctaaaaatatttttttattttttaaaaatttcgggtgtaccataacgaaaaaataccactatcactttaaataagatgaaccttaatgtacttctcccagttgcgctttgtcggcccatccagattcgtccgtgtggtggtttcaaagctaaggcccttgtagttgtacaccgtcgcttcgaagttgccaattttgtcctgaagaatcaatatgttaaacgataataaattaaatttaataaattaaatacattaatttaacatattcgtattaaaatttatatttttaaacctacaaaaaaaaggtatttttcgctagttcgggatggaagggtgcggggggagatgtttgtgccgcctcggggacaatgccgcgggagagaggtccggtgccgtgtcggaagggttggtgccgtttcggggggaatgccgtgccgtttcggggggaatgctgcgtcggaagggtcgatgccgcgccaatttgtcggtgcggtccggtttccgggcgccgattgaccaaaaggtcagtctgttttgatggaaaaaaaagaaacatgctcaaaaccccgttatgaggacatttttgaaatttccaaaagctgtggggttcggtcgtcgggtgagtgggaagatgttggtgttttttcctgctcaaattttaacggggcggcggtgggggaatattctgacaaaggcatttcgtttcccacgcttggtatttatttattatcctattattaattccttaaatatttcgccaaagaaagatcattcaaattttaccgtaattggcgctcattaggaataaaaaagaattcaaaaaaccatatttttgttttttctttt

SEQ ID NO: 30376 - DNA, 1313 bp, Heterodera glycines
caaaattcttccaatgagaaaatgacaaagtgccccgtatttgcatattttccatcgttttttggtaaaattcagcgttggactttttcacttggacagagaaaaggcgcggaccaaacaaaaaaaaaaacgtggtcaagtgtcccttgtccagacatttgcgcctatgtccaaaagcggagtttttgaaattttaggccaaaaattgcaaaattgacattttttggcgtaaaagcgccacaaatccctgtttttttggcgcttaaatttttgaataacacaggagaaaaaatttttttggcccgaagagcaaaaaaaaaaatgccccctccgaaatttttttctgggctacaggcttgtgtggtaccacattttagggccaaaatggccaaaaaccctgtcattttaccattgcccatctcggccattttgtccgcacttggctttggcgatgccaactgattgttgtgaggggcactgctgccggacggcggcccatcgctggtggaaaaacgggcataggcggcgaatccagtcgctttattggaactgggaatgtcaaatcgtgaaaaattttgtaaaatttaaagtaatgctaatttaaatgccagggaatttcgggcgctactttaaagaaggcactttttgaaaaaattttcactttttttttgcctctttttttttgtttatttacatgaaatgatgaatattaagcattaacaacacaattatggtgaataaaagtatattcacgattttttatttcaaaaaattttgcgaaaaaaagggtcccccctttggtttttttgataaaattcaaaatctttcactttttttttgtcattcgtaccatctgttaaaaaaacaaattccgcgtccaaataaacaaaaaaaaaattagacaaaaaaaagtgaaaaatttttcaaaaagtaccttctttaaagtagcgccgaatttcgcattaaaaggcattgggaatatttgtggcaatttttaaatgcatcataactttttatagaagcatccaaattaaatattcttagtatcattctatagcccaaagaatcttctattagcctgcaaaattccaaagaattctgttatgcttcaaaaaagttatggctaaaaacgtttagaaaaccagtgctttaaagttttatagttataacttttcaaaaacctaatgaaattctctgaatttttgcaggctaatagaggcctcttggggctctcgaatgataccaagaatgtttaatttgcatgtttcttgaaaaagctatggagaattaaagttgtcaaaatattttatggt

SEQ ID NO: 30377 - DNA, 1344 bp, Heterodera glycines
gttcggggggactgccccgaaaacaaaaaaatcgattcttttcagtgtccgtttggggtactcaaacaattatggggagcaaaaatccaacgcagaattaaagtacaggctatagggaagctattccggaaggattcggtctccccataaatctgggcgcatcggttcggggggactgccccgaaaacaaaaaaatcgattttttcaagtgtccgtttggggtactcaaacaattatggggagcaaaaatccaacgcagaattaaagtacaggctatagggaagctattcccgaaggattcggtctcgccataaatctgggcgcatcggttcggggggactgccccgaaaacaaaaataaatcgattttttcaagtgtccgtttggggtactcaaacaattatggggagcaaaaatccaacgcagaattaaagtacaggctatagtgaagctattccggaaggattcggtctccccataaatctgggcgcatcggttcagggggactgccccgaaaacccaaaaaaaaattttttggataaaaattatttaaatgaactgactagataatatttaaaataggtttttctcttcctttcagtatccctgcaaagtttggtgcgcttctgatcagtttctgaaaaaaaagttaagcctaaactttttggcctgtttaaaaaggaattaaaaatttttaaaaattttattcatctccctttttgatagaaaaagcatcagagtgcctaaactaacatgtaaataaaatttggtgcgtttcagaaccctttctgaaaaaatatttaagaattaattttgcaaaaaataaataaaaacgaaagactcagattttcgaaaaattttttagagcaagctagctcggcgctcatttcagtgtaagttagtcctttaccggggagtatccctgcaaagtttggtacgcttctgctcaattagcaaaaaatatgagtgatcaaactttcactaaaaaagttaagcctaaattttttggcatatttaaaaagcaattaaaaaatttttaaaatttaataattttcctgcaccgaaggtactcactcggcctcttcgcggcctcgtggtgggccttcgcccccccccccctcccacgcccttcagagcacgacaaatatttcaacaaaaattttgaaaaattgactagagcaatcgaacgctaacggacgacctaatggaaaaaaatccccgaaggagagaatttaattaaatccattccttcgggggaccgtgccgggtgccgcggggtaagcagtgctggttcgtttcatcacggcaccgaaccttttggctagtcagcaatcgttgcttaact

SEQ ID NO: 30378 - DNA, 236 bp, Heterodera glycines
aaaaaaaaaaaaaaaaaaaaaaaaaaaaaaaaaaaccaacccccccccccccccccttcttttttttttttttttttttttcttttttttttttgtattaaaaaaaaaaaaaaaaaaaaaaaaaaaaaaaaacccccccccccccgtgggggggggggggggggggggaaagaaaaaaaaaaaaaaaaatttttcccccccccccccccaaaaaaaaaaaaaagcaaaaaaaaaaa

SEQ ID NO: 30379 - DNA, 1511 bp, Heterodera glycines
  unsure (1)..(1511): unsure at all n locations
aaaaggaattaaaaatttttanaaatattatcnnatctcccttntgatagaaanagcatcagagagccttattaaacttttaattaacatntggtgcgtttcagagcactttctgaaaaaatacttatgaattaattttgcaaaaaataaataagtaatgaaaaagtcagaattttgaaaaattttaaaaacaacaagcgttggcattttttcaggttaagttagtcctttacaatggagaaggcctgcaaaatttggagagattatatcgattttagtgcgctaggttcgatgaaactttttaaaatataagcctaaactttttggcctgtttaaaaaggaattaaaaatttttaaaaattttattcatctcccttttgatagaaaaagcatcagagagccttatttaacttttaattaacatttggtgcgtttcagagcagtttctgaaaaaatatttatgaattgattttgctaaaaaaataaaatagtgaagctttaaaaattaataaaaaattttaaattcagaattactggagttagcatcatagcagtgcttttccttgtctttttgatgctctcgcaaaatctggttcgcttctgaccagtttataaaaaaaaagttaagcctaaaatttttcgcatatttaaaaagcaattaaaaatttttagattttttattcatctccctttttgatagtgaaagcatctgagtgcctaaaataacttgcaaataaaatcggttcggggggaatgccccgaaaacaaaaaatcgattttttcaagtgtccgtttggggtactcaaacaattatggggagcaaaaatccaacgcagaattaaagtacaggctatagggaagctattcccgagggattcggtctccccataaatctgggcgcatcggttcggggggaatgccccgaaaacaaaaaatcgattttttcaagtgtcctttggggtactcaaacaattatggggagcaaaaatccaacgcagaattaaagtacaggctatagggaagctattcccgaaggattcggtctccccataaatctgggcgcatcggttcggggggactgccccgaaaacaaaaaaatcgattttttcaagtgtccgtttggggtactcaaacaattatggggagcaaaaatccaaagcagaattaaagtacaggctatagggaagctattcccgaaggattcggcctccccataaatctgggcgcatcggttcggggggactgccccgaaaacaaaaaaatcgattttttcaagtgtccgtttggggtactcaaacaattattaaaaatttttagatttttattcatctccctttttgatagtgaaagcatctgagtgcctaaaataacttgtaaataaaatttggtgcgtttcagagcagtttgtgaaaaaatatttatgaattaattatgcaaaaaacaaataaataatgaactctcttccttaataattttcctgcaccgaaggtactcactcggccgcttcgcgg

SEQ ID NO: 30380 - DNA, 1056 bp, Heterodera glycines
ccccgatgctaatccgttccgcagagcctcttcaaattttttccattaccgcaagagctgcggaaattgtgaattaattctcagaaaaatggctatctctttttaggacaatattctatctcgtaaccccgatgctaatccgttccgcagagcctcttcaaaattttttccattaccgcaagagctgcggaaattgtgaattaattctcagaaaaatggctatctctttttaggacaattttctatctcgtaaccccgatgctaatccgttccgcagagcctcttcaaaattttttccattaccgcaagagctgcggaaattgtgaattaattctcagaaaaatggctatctctttttaggacaattttctatctcgtaaccccgatgctaatccgttccgcagagcctcttcaaaattttttccattaccgcaagagctgcggaaattgtgaattaattctcagaaaaatggctatctctttttaggacaattttctatctcgtaaccccgatgctaatccgttccgcagagcctcttcaaaattttttccattaccgcaagagttgcggaaattgtgaattaattctcagaaaaatggctatctctttttaggacaattttctatctcgtaaccccgatgctaatccgttccgcagagcctcttcaaaattttttccattaccgcaagagttgcggaaattgtgaattaattctcagaaaaatggctatctctttttaggacaattttctatctcgtaaccccgatgctaatccgttccgcagagcctcttcaaaattttttccattaccgcaagagttgcggaaattgtgaattaattctcagaaaaatggctatctctttttaggacaattttctatctcgtaaccccgatgctaatccgttccgcagagcctcttcaaaattttttccattaccgcaagagttgcggaaattgtgaattaattctcagaaaaatggctatctctttttaggacaattttctatctcgtaaccccgatgctaatccgtttccgcaagcctcttcaaaatttt

SEQ ID NO: 30381 - DNA, 1472 bp, Heterodera glycines
aaagaaaatttttttggcaccatcccaaaattcggtgccaatttttctgctgaaagctgttttttggctcacccaatccgtgccggtgtgccggatgtgcccaggtccaggatttcagccaatgattcacgacgcatgtccacactgctgcgatgctgaaaaattcgtcttcaactctctattcttttgtcgagactcatgaatgtttttgtgtgatgctcgagagtcttgactcatgaaaattatcatgaatatagattgggttattaggcacaaaaatatagaaaatagacaggaataattggtccataaattgaaaatttaaaaaaaaaagtgagatttttaaaaaaccttcgaacacaggcccaaaaccgtatctgtgcctatccctaccggtatatgcaaaaaatgcaatttaagtgttaaaaataattaaaaaatacacttatatcaaaatttaacaaattaaaatttttaaattaaagaaaaaaaaatatttttaaattaaactactaaaaatgataaaataatttaattaattatacagtttttaaattaactaaattaaaattattaaaaaaagattaaatcatattaaaataaataatttaaatatacatctcataaattaacaaattcaaaatatttaaaaattaaaatatacattttaaaattaaactaattaaattcaattaacatggtcgaagcccaccacccgttctcgctaaattttcgtttgaccacctccccccactcccgcctcaaatttattcccacctcaaccgtcgccatgtcaagcagctgctcctcgtcgctgtcggcaaccgactggttttccaactcgttcggtgcctccacctgttcatgattttttttatacattaaaaattttggggatcaatttttagagaaaattttcaattctcagggatgcattttatgaattcgaagtaatttattagcggtgtattttcattttagtgtgtttttattaaggattttaaactcctaaaataggcacaaaaaaaaatcgccataaaaaccataaacaaaaaataggcattataaaagtcatcgtagacagcacaaagcaggcggaataccctttattttttgcagccactcacctctccagtgaagtcaattgtcggcgcagtgttatggcattccctgttaaaaataacgaaattaattcttcaaaaaataattttaaaatattataattcttataattaaatataattttttctgttaacttacatgtgtttggccgttgaattttttttatctgcggcgtaatcacagtaaaggctaaattgtcatattaacaaatgaaaaatatacatttttttactattcaaattttttgtttgaaatgtgtatagttaggtggtttgagtatttgatgaaatgttaaaaattggtaggagatttgttatagaagtatttttttaggtataattaaattaggt

SEQ ID NO: 30382 - DNA, 969 bp, Heterodera glycines
tctcagaaaaatggctatctctttttaggacaatattctatctcgtaaccccgatgctaatctgttccgcagagcctcttcaaaattttttccattaccgcaagagctgcggaaattgtgaattaattctcagaaaaatggctatctcgttttaggacaattttctatctcgtaaccccgatgctaatctgttccgcagagcctcttcaaaattttttccattaccgcaagagctgcggaaattgtgaattaattctcagaaaaatggctatctctttttaggacaatattctatctcgtaaccccgatgctaatctgttccgcagagcctcttcaaaattttttccattaccgcaagagctgcggaaattgtgaattaattctcagaaaaatggctatctcgttttaggacaattttctatctcgtaaccccgatgctaatctgttccgcagagcctcttcaaaattttttccattaccgcaagagctgcggaaattgtgaattaattctcagaaaaatggctatctctttttaggacaatattctatctcgtaaccccgatgctaatctgttccgcagagcctcttcaaaattttttccattaccgcaagagctgcggaaattgtgaattaattctcagaaaaatggctatctctttttaggacaatattctatctcgtaaccccgatgctaatctgttccgcagagcctcttcaaaattttttccattaccgcaagagctgcggaaattgtgaattaattctcagaaaaatggctatctctttttaggacaatattctatctcgtaaccccgatgctaatctgttccgcagagcctcttcaaaattttttccattaccgcaagagctgcggaaattgtgaattaattctcagaaaaatggctatctctttttaggacaatattctatctcgtaaccccgatgctaaatctgtccgcagagcctctt

SEQ ID NO: 30383 - DNA, 927 bp, Heterodera glycines
aatttgatcgtttttaaggatcagaagccccattttcactcaatttttcgaattttgaaccggttcaaaaacaatttttttgccatttccgcacctcaggagtatttttcctgagcattacaggccacgagagaagtaaaattgtacggtaggtgttattgacgggagaatttacaaaaaacagaatcaatgaagcattttatggttaagaactaaaaaacaacaatcaaataatactattttcaccttctgctgctggttataatcagcgtttgtctcaaatgttctctcaatttgtgcaccattgtccatttctgtgaaaactgatttataaaaagtttaaaaaataataaatatcgacgaaaaactttcttaaatttagataaattaatataaaaatttcatattcaaccaaaatttagcccatcataaaatttaaattttaaaaaatggtaaaatgaaaaacaaaaaatacagaaaaatatttcactccccaaatttgtaagtgaaaatagatttttatgaccaatgaaaatatatactagtgttctcaattgggaatatatattatacaaattgaaaatacacttaaattagcaagtcaattagcatgatttagggtaattagtcatgactattaccttttcgattgggttccagcttctccaattgtgcgattcgtcccaaaagtgccttctgatcattttgcaactgttcaatttggacaaccaatgcttaaacatacaaaattagtttttattttcttattttttcttcattttcttacgctttgtgttcttttcgtcctgcttttgctgctccaatttgtctattttttccagaattgctccaaattggtcaattgaaactgtaattaatttgttaggatttttcgattaaataattgatgaatcaattacatttttt

SEQ ID NO: 30384 - DNA, 958 bp, Heterodera glycines
cgcatgattccactgttccaagcaccacaccaaaagctaaacgatataaccaaaatataaggaaaaattttttaaaaaatattttctccatcttcttttatgatactaaagcatcagagtgctaaaattaagttgtaaataaaatctggtgcgctttagagcactttctgacaaaaatatttatgaaacaaaaaaatcgattttttcaagtgtccgtttggggtactcaaacatttatggggagcaaaaatccaacgcagaattaaagtacaggctatagggaagctattcccgaaggattcggtctccccataaatctgggcgcatcggttcggggggactgccccgaaaacaaaaaaatcgattttttcaagtgtccgtttggggtactcaaacaattatggggagcaaaaatccaacgcagaattaaagtacaggctatagggaagctattcccgaaggattcggtctccccataaatctgggcgcatcggttcggggggactgccccgaaaacaaaaaaatcgattttttcaagtgtccgtttggggtactcaaacaattatggggagcaaaaatccaacgcagaattaaagtacaggctatagggaagctattccggaaggattcggtctccccataaatctgggcgcatcggttcggggggactgccccgaaaacaaaaaaatcgattttttcaagtgtccgtttggggtactcaaacaattatggggagcaaaaatccaacgcagaattaaagtacaggctatagggaagctattcccgaaggattcggtctccccataaatctgggcgcatcggttcggggggactgccccgaaaacaaaaaaaatcgattttttcaagtgtccgtttggggtactcaaacaattatggggagcaaaaatccaacgcgagaattaaagtacaggctatagggaagctattcccgaaagga

SEQ ID NO: 30385 - DNA, 1567 bp, Heterodera glycines
gcaatcgccaaagagtcaacgaaagagtcgctttgcccagtcattcattcattcgcttgttgtgaatttgcgcaaataacaattaaaaaataaatgcaataatataatgcccttccaatattgtcatcatacgcaaattattcgatgtccatcgcggacatttttggggtatggaagagagaaatgggaagaatgagtccatgaattaaaaaggtggagaatgaatttgatggacggacgacgggagaaagcgtgaggaaagagtgggatggacgggcgaatggagaacaaattggaatcggaaaagcatttctgaagataatggcactatttgattgttttgaagaagtggttgtgaacaatgaaatacagtgaattagcgggtgggcaaaaaagacgcgcaacgaaagggaagagagagagagagagagagagggtggaagagagagagagaagacgccactgggcaagtttatctgtcgcgtttccaccgttaaaaatgatcaaattaaccaccgggagaaaagagcgagtgggcgagggacaaccaaaaggaccaaacagagaagggacgggcaatcaatcacaaccgaaatggaatgagcattcagaaaaatgttaatgaatcattcgggaagacgacgtgacaaatggtggaaaaggcaattggacgaattgggggagacagcgcaaataaatggaggagaatttggccggaacagacaaagaaagacgcaatcgaagaacgaggaaagcataaaaagaacccattggaggagtaaccgcatgaaagcccccccccccaaatgaacttgccctgagttcgattgcttcctcctgctccttcgtcttcttcgtcatgtattccttctcgagccgtttcattcttttcacgttcaaatgcacttttgacgcgatggcaaagagcagttcgtggtcattttcgtacctttcccggacttccctttggaaatacttaaaacggaaaaaagaatattggcaattcgaaaggaatggcgtagtcgtacacctttagcatcccttccatgtccaactgaagcaagtcgatccgcgattgttggagaatggaaatggcaatgcgaaaaacagcgtcaattccgtcgaccaaaaaccaatccatgatgcgattggcgagctccaacgagacggtggtgaggaaaacagtgagaaaccatgaggaggcgtacatggaggtgtcaaagcccatgttgttgctgaaccaatttatcagactaattgacaccggcagaacaacgtacaaatgcatgtgcaaatctggcatttgctcctgcacgatcacttccagttgaaacatgcacaagcccaactcggtcattgtcggcttgtatagctcccgaagccgatacgtctccatcagacgcatgaacacggcgaatgcctcctcctcaggcatttggagaagcaattggccgacgatgaaggcagagccttggcaatatccaacctgaaaaacaacaatataaaacggcgatccctttgaatttgccctgcctctctgtcatgcaaagagtacgccttgatcacg

SEQ ID NO: 30386 - DNA, 1720 bp, Heterodera glycines
tttcgcaccgtgaatgttatttttattgaattctgaaccggtttgagtagattagactagaaaaaattgaaaattttgaaatcatgtttcccactcccttctcccaggggtattattttgtaaagtctttttttccccaataaacttgtcaaaccccatttttcgcaccgtgaatgttatttttattgaattctgaaccgttttgagtagattagactaaaaaaatatgagtgatcaaactttcactaaaaagttaagcctaaactttttcccaaagttaaaaagcaattaaaattttattcacctccattattgatagaaaaagcatcagagtgcctaaactaacatgtaaataaaatttggtgcgtttcagaaccctttctgaaaaaatatttatgaattaattttgcaaataaataaaaacgaaagactcagattttcgaaaaatttttttgagccagctagctcggcgctcatttcagtgtaagttagtcctttaccggggagtatccctgcaaagtttggtacgcttctgctcaattagcaaaaaatatgagtgatcgaattttcactaaaaaagttaagcctacattttttggcatatttaaaaagcaattaaaaaattttaaaatttaataattttcctgcaccgaaggtactcactcggcctcttcgcggcctcgtggtgggccttcgcccccccccctcccacgcccttcagagcacgacaaatatttcaacaaaaattttgaaaaattgactagagcaatcgaacgctaacggacgacctaatggaaaaaaatccccgaaggagagaatttaattaaatccattccttcgggggaccgtgccgggtgccgcggggtaagcagtgctggttcgtttcatcacggcaccgaaccttttggctagtcagcaatcgttgcttaacttgccagatcggacgggtgcgcatgactttctgaaaaaaatatttatgaaacaaaaaaatcgattttttcaagtgtccgtttggggtactcaaacatttatggggagcaaaaatccaacgcagaattaaagtacaggctatagggaagctattcccgaaggattcggtctccccataaatctgggcgcatcggttcggggggactgccccgaaaacaaaaaaatcgattttttcaagtgtccgtttggggtactcaaacaattatggggagcaaaaatccaacgcagaattaaagtacaggctatagggaagctattccggaaggattcggtctccccataaatctgggcgcatcggttcggggggactgccccgaaaacaaaaaaatcgattttttcaagtgtccgtttggggtactcaaacaattatggggagcaaaaatccaacgcagaattaaagtacaggctatagggaagctattccggaaggattcggtctccccataaatctgggcgcatcggctcggggggactgccccgaaaacaaaaaaatcgattttttcaagtgtccgtttggggtactcaaacaattatggggagcaaaaatccaacgcagaattaaagtacaggctatagggaagctattcccgaaggattcggtctccccataaatctgggcgcatcggttcggggggactgccccgaaaacaaaaaaatcgattttttcaagtgtccgtttggggtactcaaaaaagtatggggagcaaaaatccaacgcagaattaaagta

SEQ ID NO: 30387 - DNA, 1278 bp, Heterodera glycines
aacataccagacaaaagggacagccatgtggcagctttgtagaacacgtactttctaaagtatgaaggatcaaagatcacccgatcagaaatttcgtaaaaaattgatctgatcagcattttgtgcttttgtaccgatgcaaatcgttgctacgaagcccagcagtgtttacgaatatggcaaatagtgtggcggctgctgccacaatgatcagcactgcggcagttcggacaaatactgtacaaattggagatgggggaaatttgaatttggcacatcacaaagccaaacgtgtgttccgtgccggcggctgacattggccctcgggcgccgcgtttggcaccgggttggacagtgcaccgacagaccgatcagtgcattcttggaacaagcctgttgtgattggaaattataattttgtagaataacctgttttaatttttttgtaaaaaaaatttctagggatgggattttgcagcagtcactgtctcagattttaaagtcattcccaaaaaattaaataattttttgttttgctaaaaacctccccaaatgtgggataatatggaaaaaaaataaagaatcatattagggatggttttttaagttttttaactacaaagtattacgtttttcttacattaagagaaattacagcttttggaaattgactaaacataataagtcaaaaacaaataaatttttggatttaaacccataaattggttctaatttgtaagtgatgcaattaataaaaaaaaatccgccaattaacggtgccggaaaatctttgataaaaaacatagataatgatagcaaaaattggcaaattcatatgaatatgattatcatcataatattcccctttgacaaatgagtagggtaaatttatcgctttgtcatatacataattaatcagttaattacccgtgtgaaatgagtatgtcttcagccaatatgttgtgctcagagcaatgacaagcagaaaaagggacaaacagaggcaaaccagtgaaatcacctttaaaatggaggaaaaagcatatatttggaggaatgggtaagtaatgaattaattagtcaattcattataatatttaattcttagggtgttaattgtataaaaaaaattttttaatggacaataaaatccaaaaatgagtcaatattctgaaaattaaaaacatttaaatgaaagaaattatttgtaaataaaactataaaaaaataaataaaatcagataaaagcaactcctatttttgagacataattaaaag

SEQ ID NO: 30388 - DNA, 964 bp, Heterodera glycines
ccttttgaatgtgtaaagtttccagcaagaggtgtcagaaaagttaccacagggataactggcttgtggcggccaagcgtccatagcgacgtcgctttttgatccttcgatgtcggctcttcctatcattgcgaagcagaattcgccaagcgttggattgttcacccaccaatagggaacgtgagctgggtttagaccgtcgtgagacaggttagttttaccctactaaagacctgttgctatgatagtaatcctgcttagtacgagaggaaccgcaggttcagacatttggttcatgtgcttggtcgatagaccaatggtgcgaagctaccatctgagggattatgactgaacgcctctaagtcagaatcccgcctaggcaagatagcaatattcttgctccccggtgtcgggaggtactacttatgcgccgcttgcggtgcagcacaaatgccccagcatctggcccgatgtgcgtgcttaattgctcgcacattgccaaagccgtagcactcgtgtgccatggtggaacgtcggggcgcaaaatcacttgtatacgacttgactactggtcagggggttgttagcagtagagcagcttttacactgcgatctgttgagacttagcccttgatcggatgatttgtcttctttttccccctttactttttgtgccaacaacattttaggtacaagtacatgagaagggaaggctctcttaagggagtcaaatgcctcgtcagtcaccatgaaattaggtaggataagttcttgactttgctttttttccatttattccaatcgactagtgctttaaggttttgtctttgactttgctttttttccatttattccaatcgactagtgctttaaggttttgtctttgaatttgcttttttgtccatttatttcaatcggctagtgttttaaggtttgtctttgaatttgcttttttgtccattta

SEQ ID NO: 30389 - DNA, 848 bp, Heterodera glycines
aaagaatttttgtgcgctttgtctgtccgactgtccgaacaatgagcgggctttgatcaaaagaatttgatcaaattgattttggcatttcataaaatgtttttttgttacgaaaatttctcattctcgatcagagttgttttattttttctgaataattttttttttttttgaatattaggcattttcaattatttcggtaaacaccttggcattttttaaatgttaaactctgctgattggtttcggctttgatcaaactgatttcttttggcattatcataaaatgtgttgttttttataatttttcttatttttcaatgagagtttgtattatttttcctcttttgggttaaaattatttatttaaaaatggagttattattagggcggggaaaaatatttggacataaaatcgcaaaatatggccataaaatatggcccaaaaacagcaaaatatggacataaatggcaaatattgaaataaatttttcaaaattgactatactttcccaaaatttctttaaatttgttgaatataaagtaaaaccttcaaaaatggctaaatacggtattaaaaatcattttagaagaacaaaaagacgataaagctaaaatttgaatttttagcgaaaaatcaaatcgaaaagcgaaattttagcttttttgcttatttttgagataaatttcttaattgttaagaaaataaatttattcaatattttcgagaaaattttgcgaaaaagtgatttttttgaaaaattttccggttttggggtcaaaaaggtcaagttagctgatgggggccgttctaatagaggttttttggaaaaatcccaaaatatgga

SEQ ID NO: 30390 - DNA, 936 bp, Heterodera glycines
  unsure (1)..(936): unsure at all n locations
aaatttcnaaaatttttcgagctagcccccctagaatntttcganaatttttttagnctgaanaagggtggtgaaaaatttttntctgggggtatttgagggtgctgagcacgaatttgacctttgtttttcgtttcatgatttttggaatttttaaaaattctttattttttggcaattttttggccctcgggattttggcctaatatttgaaaattcataacaaatcgaagggtggatcaattttcgtgcaattatattataaaaatagagaaaaataaggagaattttatgggatttatttgagttttttatcacaaaaaacaaaaaagttattccagaatttctggaaattttcgatttttcagaaaaaaattcgtagctgccttctgaaaagctattcgggaaaagtaaaatactacaaaaatccgcaatttttttctctataatataaattttattttacatttttatcacatttttaaaaaaagatacaaaaataaaagtgattttggggttcgggaccaaagggggtggacaggatttttgattgaaaaaattttttcacaaaaatcttccaaaaacatgtcattaggaccattttatgacgctgatcacgaatacgtgatcagattttacttttaacatcgataagacctcagaatccctgtatgattggggattctgaggcatcattttgagcggggagggggcaggttcggatccggacggtgtacattaattttctaccatttattttctgtttttcaattttttttcatttaaaatatttttaattttattaataataaataaaaatttttcatttgaattaaattattttttggtgaaaattttattaaaaataatttttaaattttgaataaaaaattaaagaatatcatgtttcaatttacattgaatttggaaaaaaaa

SEQ ID NO: 30391 - DNA, 853 bp, Heterodera glycines
ttgagtcccagtgattgaaatgcaagagaattgagtcccagtgattgaaatgctggagggttgagtcccagtgattgaaatgcaggagaattgagtcccagtgattggaatgccgaaggaccaggtgaggttaggtcccagtgattggaatgcaagagaattgagtaccagtgattgaaatgctggagggttgagtcccagtgattggaatgcaagagaattgagtcccagtgattgaaatgctggagggttgagtcccggtgattgaaatgctggagaattgagtcccggtgattgaaatgctggtgagttgagtccgacgattggagaaaaagcaaaaaaaggatgcgaggccgcgaagcggccgagccagtcgattttatcaaacataatcttacactacaatcgtactacctagcgggggatgcgccgaaggcgctgaccccgctagtgaatccaaaagtaaagccccgcataaaatgtgggaaaatgtttgctttgctgaccaataaataacattaatccagggctgccagccgtccttgaatggcaaggacgtccttgaaattggaccctctttcttgaaaataaaaaatgtccttggatgccaaggacgtccttggaaataagcatttggaaaagttataaaaaattcaaagaaatttgataaatttttgtaattttcaacaatatttaattacttatggcattatgtcaatgaaaatgtaatttttttctcatggttgagaatttttgaaattttatgacataaagtcacaattttaaattttggtcattttttgacaaatatctgtaaacaaatcgcattaaaaattacaaatttttccccggc

SEQ ID NO: 30392 - DNA, 1255 bp, Heterodera glycines
taaaaattcgatcaaattcaatcacaatcaaatcaatatatttttaatttaaatcaatgctgtggttttactttaatcaactcgcattggacttcatatcgtcggatgatcaatgcatcagcagcattattttccaggcaaatttgtgccttaatgaacacaattacagtatacccccacccatctgccatatcgtaggcattttttttgtctcaatttatacccaaactgggattgtggaattagatcccggatatttttaattgatgggaattctgaaaattttctagagccctgaaacagaaacaatatctgcgcaggatttttgcaggaaccctggatactgtaactgtatttttgggggaaaactgcaggaacacggctcttttttccgctgttttttccttttcatcaccatttcaaattctgtttcagttccggcatttttcaaaattccgggctctaaaattttctatgctctccagcagtttcggcgctgatgctgtgtccacgctcacttggtgcaagttttccgcatttgcggccgcaatgaatggcaatgccctgctgcgtgcaaattcgtccaaaaatccgaatttgctaggtggactaatgggacagttgtacgggtgccggatgcgctcctgtgagtttaacacacattatggtaattagtacggcatttttgggtgatgattcatgacggtctatttttccataattttgatattgctattttaaatcaaaaatcgacaccgtttgaagaagttttgacgattatcaaaaaaattttgcaaaaacggtccccctttatttttcgtgggttaccaactgtaagagtgccaaaaaatattcaaatattcgttttttttaaatcactcttatccacctgctgggtacatttgctgccagaagctgtcagtgaccagccactctcacagactcggcccaacacacaccatatgaatagaaaacagtgaaatttgcgattgcgtattgtaattttggtgaatgagctccgaagggttcccgaagagggattattggaaaatgtgccactaatagtacagtattttgaatttgtcaatttatttttgaaaatcctagtgcgttttccaatgacgcattccccccccccccctcacaaaaaaattgtaaattttatgaaatcgtaaatcaacattttaaattgtattgtattatgcatactggcaggaaacaatgaaatcacttgctgatgtgcatgtctgacaat

SEQ ID NO: 30393 - DNA, 956 bp, Heterodera glycines
gcccatcgtgaagtcaatgtccaagggcgctggggcccactcatgaagtcaaaggccaagggcgctggggcccatcatgaagtcaaaggccaagggcgctggggcccatcatgaagtcaaaggccaagtgcgctggggcccatcatgaagtcaaaggccaagggagctggggcccatcgtgaagtcaatggccaagggcgctggggcccatcatgaagtcaaaggccaagggcgctggggcccatcgtgaagtcaatggccaagggcgctggggcccatcatgaagtcaaaggccaagggcgctggggcccattgtgaagtcaaaggccatgggcgctggggcccatcgtgaagtcaaaggccatgggcgctggggcccatcgtgaagtcaatggccaagggcgctggggcccatcatgaagtcaaaggccatgggcgctggggcccatcgtgaagtcaaaggccatgggcgctggggcccatcgtgaagtcaatggccaagggcgctggggcccatcatgaagtcaaaggccaagggcgctggggcccattgtgaagtcaaaggccatgggcgctggggcccatcgtgaagtcaatggccaagggcgctggggcccattgtgaagtcaaaggccatgggcgctggggcccatcgtgaagtcaatggccaagggcgctggggcccattgtgaagtcaaaggccatgggcgctggggcccatcgtgaagtcaatggccaagggcgctggggcccatcatgaagtcaaaggccaagggcgctggggcccatcatgaagtcaaaggccaaggacgctggggcccatcatgaagtcaatggccatgggcgctgggcccatcgtgaagtcaaggccaagggcgctggggccatcatgaagtcatggccatgggcgctgggccatcgtgaagtcaatggccaaggcgctggggcccatcatg

SEQ ID NO: 30394 - DNA, 1702 bp, Heterodera glycines
acattaaacacgttgaaattcgagtagtaagattcccccttctaaaacacatcaaaattttccaaaacgaaaactcaaaatcgacttaagctagaaaaagcataggcgaaagaaagcatcgtttttattgtctaattaacaattttctttcgagtcgagttcctaagcattacaatacagaaatatgcatcatctatcgaacgccgatcagtgcccgctttgctcttcgtcgttctccactttgagttcatgatgatcgtcccatttaaagtgcgccattttctttgcggccttctgaaagaaaaacaccgtcaaagttcaattcaacaattggtagcaaatatttgcctttgcggacgaatgggggggatcaacctccctatttttttttgtaaggttttgtaccaatttctttgtttcgttttttacaaatgcctaatcgaaaattttaccgggtcaacgaaagaactgcggacgatgtatccggtgagactgccccgtccaatgatctctccgacgaaaaaccaacagagcacttccacgaaaacagccgaataaacgagaaattccttaatttacgggcaattgacaaatgcaagtgaatttcctgaaaaaagttaccttcaacttaaactgtctgtaggcctgcgttctcatcactgtgtccaatttggcataatccgctttgatctttatatatgaaaaaatataaatattgaagaatgtataaacctgaggccaatcctttggagttggaggagccaattctcggacacacactttcttcagaatgtccttaagtaaaacggagtcggattagtaacataaataattcaaatcattcaaactttgtaacgtggaagtcgcggttcatgatagcgataaataactccaagaatattggcaattttctcaggaaaactcaacttccgcgttgccatttctatcttaaaatatctaatcaatcaaataaaattgagagatgagcaatggcacacgaaacgggccaattgcgtctgagccaggtttaaagcgtcataacttttttctttgttgaccaaaataaaaatatacaaaaatcctgactttttgtggttttagtgtttcaatttttataaataacaaagggaggaaataacaaaaaaatggtgaaaagtacaagtgacagaatgggtcaaagggcgaactatttacctattttctcaatgccagtcttttttagagaaaatctcgtataaattaaatttggcattttgtttctgttattttttatgttttttacggtcaaaagctctcattttttcgatacaaaattttttatcttttttatcagtgctatttcagtggtgattgccttgtgatatttcggttttgttcgaaatgtcttcgcccgttcgccaaattaaatgtgttgttgttggtgatggtaagcttgagcatttctatcagtttgaaatcaaatgttttacattgtactttaaggtactgtcggaaagacgtgtatgctcatttcgtacacaaccgactcatttccaaggtagaaaaaaactcacaatcagggatttccctacttaataaattttcatcatggttaaaatcatataaacccgggttcagtttatctcttgctttcagggaatacgttcccacagtggtcgacaattattccgccccatttaccgtcgacggtcattcagtgaac

SEQ ID NO: 30395 - DNA, 1615 bp, Heterodera glycines
agtgcaggcatgagaagctgctgtccgtcataaaagcagcaaaattgataatgattgaactaactaataatgctaaaggtaaaactggatgttgacgatgcgctgctcgaccgtccgtccgtcgagtcggccaaactgaaggagcactgtgagtggatggtcgaagagttcgagcaggacattgaccgatggttcatcaacctcagacataggaaaactttagaagtgagccaaaataaaaaaagagcattagtcaacgtatcctgaatacttgaaaaaagggggggactatccgtacactaccctataaaatttttgtttgataccgaatgtgtaggcggcaattgtgaagattattggtcccacaaaaaaaaagaattaaaatccaaaaaaaaacatttttagggttatttgatgcgctgagcacgaatttgatcttcttttgactttgtttcgaacccctgacccggattggtaatattaaggctggtccctccaccacttttcgcaacatttttttgttttaaaaattgaaacatgctcccaagggtttttggggtcactggtcacaaatcctgtatccatttcaaccaattccgaatcccggacccgaactcgaacaaaaagttgaaaattcaattttcggatttcacatttttgttcaaacctttgtttaaatacatgaaaatgaactaaaagtcaacaatccttccataaaaagaacatttaaattattttagactaaaaaatgaaattccaaaaaagtggaattttcgacttttttgttcgaatccgggtcaggggttcgaaacaaagtcaaaagaagatcaaattcgtattcagcgcatcaaataacccctaaaaatgtttttttttggattttaattcttttttttgagggaccaacttcacaattgcctgcatttcgtttccccatcgttatttccacccccccccccctcccccggttgtttcctcctccgaaaaaatattgaaaatttttcaagctaattttttgatcactatgcacttgatacctcaaaatgtttggttgttgatatatgtgttaaggatgtgaaaaagttgatctccgattatgatactaacatggtgatggacaacgccataactttggatggctttcgctaccttcatcaaatgtttatacaaaaaggccgccatgacaccgtttggactgtgttaaaacgatttggctacgatttgaatttgcaattgaggcaggattacctacttccaaagttctattttattctctcgaataccagtgatttaattttttagaagtattgccaaaggctcttccgattgaccttcagaaagccttttctacgtgtgggattccagtaaccttttttccatcgttacctcaactgctttggttggagcgctagtcgggcttttcgtcttcaaagttattcaaggctaatttggcaaaagattatttggcggttgtttcctttcccatattgccgttgaattaaacggggtaaataatggggccaatcctttagcgaattggcccaacaaataaattttttttttttgtcgttggatcctttccaaatcgcctttaattgcataattaatggttttt

SEQ ID NO: 30396 - DNA, 1121 bp, Heterodera glycines
aatttaaaaagcgaatgggaaggaaaatcggagcaaattcaaatcgaaatgggcaataaaaatgccaatgatagcacaaaactccgaataaaatgccgaaaagaatggtccctttgggttattcacccccttccctttcattctgtcacatggacacccaaaggagtccccgccccatccgtcttttaattctttccgatccgattacttccaaatcgccccccccccccgccatccttcgtcattcttccgtcggtccgtccatcccttccctccattcattgttgttcttccttctataatcggcacttccgttgtcgtcggcacttttggtgtcaaatggaaaatgaaacgaatgaatgcggagaaggcgcatttgcttctctggcacaaatcctcttgtgcataaaacaacacattttattctattcgggggaaggggaaattcgcctgatttgcattttatccaaaggagctttataaacgggagagacatcgcaaagggagtgacaaaacatacctccgcaatttcgaatttgaggagttattttgggggtgagcaacggacgaatgaatgcgaattgtaagcaaagcgacgaaggcttttacaaaagtgaaaaattgcgaaaagtgagtcaaaagaggggggggggggataaagcatcagcggaaagagacggaagccgaatggtggacgacttccgaagtgtttgttggccttggtcacactgtccctgccattgtttgattttgatggtctctttgcactaatacctccgcggtgccattatcttttttctgttaaatgcctttggcatttggccaattacgttaatcccatccgcaaaacaaacgcaggagacgtcacagcgaacacgaaagagacggaggcttcttcacgcgattaattagttcattatttaatactgtacgtaaattgggaaaaataaataattaaaaccatgaaagcgaattaagggattatttattatttaatcagcactttgtcacacaaacaaataatcttgggttaattaaaattaattaactataatgctaagtaataaaattatggcaattgtgaagatctttgctcccgaaattttttacttatttttttt

SEQ ID NO: 30397 - DNA, 1794 bp, Heterodera glycines
  unsure (1)..(1794): unsure at all n locations
attaccaatcgccttcttagcgaaaaatttggatttacgaaaaatattacggaatttcgtgtcaacccggatgtggagcgccccgatgaagcgatgaaggatgcgatcgacaacatgataaaggtggctttaaagactacggaagaaaaaatgaagcgaaaagtgcggatgtttggagttgcaattacgggtgccgggcttgctttcccggtgtgggtgccgtatcgggcgtacccccagaataatgcggatgttatcatggaggagattaataagctggggcagagcggggacggggatgaaaataagaaaatgcttttattatctgaaccgattactatgaaaattacatgcgttacaatgcccagtggagaggggccgaggaatgtccacaaatttgactttggattcaaggaacattagcggatagggtaagtgttttaataaaataaaattaaaatagaaaaaaatcaataaataaatttaaaataattatttctaaaaaatttaatgaagcaaaaaaaaaattttttttaaagaaaaaaaatgaaaaaataataatttaatgaaacaaaaaaaaacagaataaaatttaaaataaagaaagtaaaaaataaatttaaaataattattttaaaaaattttaatgaaagaaaaaaaaacttaaaatatttatttttaaataatttaattaggcaaaaaaaaaaagtaaattttaggattgtgaatactgataaattttgccttttttacgcactggcgtcgtcgatgaattatttaattatggataaatattcgtttattcgttttatgaagaacttagcaagacaaaaggaagcggctgttgaacttttacggaattgtggaattgatggaaacgaaattagttatggtgtggagcaattgccgaatgttcagaaatattgggtgggttaaatgaaaaaatgcaaaattaataaatttttcaggatgagatttaccccggaaagtaccgggttgttgcgtttgagaagtctgcagatccgcgaaaatcgatctgtgttttgtggaaggcccctatgggacgagagaaggtcgtaccgatatttttggagaatggtcactgggatggtctgaagaattacgtctgtttttttaatcgtgggagaaaattttgtattgattgtgagtgcttttttgacaaggatgtcaaacatactttcgagtgccgggcaaggtgttattattgcaatagagtggggggaatgccatgtgaaaaggagagtggagtgaagattgaatgcccaaagtgtcaccgttacttttacaattgggagtgttataattatcatcagggacatcagacttgcaaattatggaggcgttgcgtgatctgtgacaagacatatttatttaacccgaagaaggaacatgaatgtggtgagacttattgccagctttgtagtgtgagccatgaccccaagcgggggtgttatattatgccgatcgaggagaaggaggaaaaagatgtctacagaattgtagtttgggtaagttctacaaataaaatcaacaaaaataagtctttaactccaggattcggagacttcgcaggattctatttacaagggggaccagaaggagcatgttattaattatatttcggagaaatttacttttacacaatactntnataacaaaaacaccacnaattncaaaatcncncncgaggagattaaagaggannccancnanncnnaannacatganccgactatggagaagtgagtgattttaactctatacgaattatga

SEQ ID NO: 30398 - DNA, 2449 bp, Heterodera glycines
gaaaaataagccattcaaataaaattcattaaacaatcttctaagtattaaatatgtttacattttaatatttttaaaatataaaattaaaaagatgaagcaaaaacatttaaaaatgaattaattattagaaaataataataatttctgaccaaaaccaaagcagaacaaaaattttttcattgaatatgttgatgatgagaacacattgaatggtatattcttgaagatttcccattacgcggacctgtgcttttattcattagcctttttaaaacatattataccaagtctttctccgaaatacggacaaaaggtttcaaattttgtcaaaacttttggtcaattttaaaagaaattatggagacgatgggttcgacagacattgtcgggaaaattcttaaaaataaattgccaaaaaaaaattttgttgaaattttatgtctgccaacactaaaaaaaggaaaatggtgcaaacaaatacccgccaaataaggacaaattttataaataagaatatatatttagcatctctgtgtgtataaatttaaaaataaataaatgattatgcacctgaaaatcgcagagcgaaacacgtgggaaaatgccactttgctcccaattggtgccattcaacaaatcaacaacggcaccaaatccatacaattggtaacgatccgtttcgagaaaactgaatcacaataaaaataaattattaaaagaagaaaaaaataatctcaaaaattgaaaatatatttaaatcatatattaaaaagggggggggggtcggtaaaaatttttgcgaaaaggggtcggccgccgatgaccttttttttgcttttcaaaaactgttttttttccaaaacattttcgggaacatgggggtcggcggtgccgataggcgccgccgggaaaattttttgatctttgggtgtgatttgttaacagattttcaccaaaaaatggccaatttttgcgattttgagccaattttttaagaaaaataggaattttggggttcggcggtgtcgccaggcgccgccggggaaaatttttaatgaatttgttaagaaaattttcaaaatttacgacaggccccctttgcaacggaaagggggctaaaaaatttttataattattttaaattttacgcaaattctgctcaccatatgcaattgacaccgctcaaattaatgctgacattgttcaaattgttgatcgaattttcgtccgtccattgtgccgtcgtcgtctccccaatttggcatcgtttaattatccatcggtcgtatcctgctttggtgaatgtcagcttttcccgggttctttcattcaccaattcaaatggcaccatggttgacgttgacggcgcatgagcagtaaactgaattttgtagctggcggcattggtggcacggcgaaattgctaaacaaatttggaaataaacaccacaaattggcaacaatctttcgaatggtaccatatttgtccacgctataagctaatcaatttaaaacaacccatataagtcaggaatgccaaaagattaccacttattgtttagaatttttacaaagaaaaaatcttagttaaatcgctaagattttctaaatatgaattactgatttttcatttttataaaaaaaaatttccaaaaaatcgctaagatttttctaaaatggcgggggggggggggtgaaccggaaaaggacgtttcggtgccagcgcccaagttttagcttgtaaaaaagttattaagaaaaaacttccaaaattttgggttttttgttatttcatgttataacttttttggtaattgtcttatcgctaacaagggaacattacgagctgtcagtcagaaaatgcctataaacgatataccattggatagagcagggtcgacttctattgtgaatttttaattttagcggtgcattttgcttccttcgagagttacagggcctcaaaaatcggatttcagttgggtgtgcaacgacattttgatggacattctcccactttttgaccatgctcaactcggcttaaaattggcactaatttcgccacgtttcaatgtgttggtcaacaaacatttcgatggcaaaagccaattgacgctttggagacaaatcagaattcaaaaaggtgctggaccagaccaaaattatctgtatggattgatcgcaaatctatgcaatttcctttcaaatctatgcaatttcctttgccagactatcagctgcccaacaaaatccgctttgaggaccttcatattgagtaaatcaaacaaatcaacgaataattaactaataaaagcatacccttaccaggtacattgaccattccgtcatcaaatttctccgtgccaatcaacaaatttttggcaaagacaccaatttggagttgtatatgccatacccctataaagccaaaaatatccagccaatt

SEQ ID NO: 30399 - DNA, 1166 bp, Heterodera glycines
  unsure (1)..(1166): unsure at all n locations
ccaatttacaattttcatgatcacttttgtgatattctcaatatttcaatttcttatatccaaatgtaatctgtataagtttacagtaggaaattgtaatttgggggttattggcgatttcaaatcgatccttccggaacactgatgctgtttatatttagagcgtaatgagctgaaaatgtcagaattcaaaaagtggggtcgcgaaaatagtaaatctgaggttattggcgcttatcaacctgatccgtctgcaacacttaaacagtattatatttaaagcctaattagcagaatgtgaaattctctcatttgttactttatgatcatttttgtctaattcgcaaaattacagctcattcttcgcgaaatataaactgaatcagtgtttgcggaatgaccgagctgataatcgccaataatcttcgattacaattttcttggtcacctttttggaattccaccatttcaactccttatcctctaaatataaactgaatcagtgtttgcggaggaccgagctgataagtcccaataatctccaatttacaattttcatgatcacttttgtgatattctcaatatttcaatttcttatatccaaatgtaatctgtataagtttacagtaggaaattgtaatttgggggttattggcgctttcgaatcgatcattccggaacactgatgctgtttatatttagagcgtaatgagctgaaaatgtcagaattcaaaaagtggggtcgcgaaaatagtaaatctgaggttattggcgcttatcaacctgatccgtctgcaacacttaaacagtttatatttaaagcctaattagcagaatgtgaaattctctcatttgttactttatgatcatttttgtctaattcgcaaaattacagctcattcttcgcgaaatataaactgaatcagtgtttgcggaatgaccgagctgataatcgccaataatcttcgattacaattttcttggtcacctttttggaattccaccatttcaactccttatcctctanatataaactgaatcagtgtttgcggaggaccgagctgataagtcccaataatctccaatttancattttcatgatcacttttgtgatatttctcatatttcaatttcttatatccaaaatgtatctgtataagtttaca

SEQ ID NO: 30400 - DNA, 1108 bp, Heterodera glycines
atagcgatgatgggtgttgagcaaaaagtgggatagcgatgatgggtgctgaccaaaaagtgggatagcgatgaggggtgttgagcaaaaagtgggatagcgaagatgaatgctgagcaaaaagtgggatagcgatgatgaatgctgagcaaaaagtgggatagcgatgatgaatgctgagcaaaaagtgggatagcgatgatgaatgctgagcaaaaagtgggatagcgatgatgaatgctgagcaaaaagtgggatagcgatgatgggtgctgagcaaaaagtgggatagcgacgatgaatgctgagcaaaaagtgggatagcgatgatgggtgctgagcaaaaagtgggatagcgatgatgaatgctgagcaaaaagtgggatagcgatgatgaatgctgagcaaaaagtgggatagcgatgatgggtgctgagcaaaaagtgggatagcgacgatgaatgcttagcaaaaagtgggatagcgatgatgaatgctgagcaaaaagtgggatagcgacgatgaatgctgagcaaaaagtgggatagcgacgatgaatgctgagcaaaaagtgggatagcgacgatgaatgctgagcaaaaagtgggatagcgatgatgaatgctgagcaaaaagtgggatagcgatgatgggtgctgagcaaaaagtgggatagcgacgatgaatgctgagcaaaaagtgggatagcgatgatgaatgctgagcaaaaagtgggatagcgatgatgaatgctgagcaaaaagtgggatagcgacgatgaatgctgagcaaaaagtgggatagcgatgatgaatgctgagcaaaaagtgggatagcgatgatgaatgctgagcaaaaagtgggatagcgacgatgaatgctgagcaaaaagtgggatagcgatgatgggtgctgagcaaaaagtgggatagcgatgatgggtgctgagcaaaaagtgggatagcgacgatgaatgctgagcaaaaagtgggatagcgacgatgaatgctgagcaaaaagtgtcatagcgatgatgaatgcgtgagccaaaaagtgggatagcgatgaatgagtgctggagcaaaagtgggatagcgatgatgaatgc

SEQ ID NO: 30401 - DNA, 958 bp, Heterodera glycines
tcgtccacttcggcattaccagcgacaccgacgagcgccacggctcgtaaggaatgggggccagccaattccggaaactcatagactaaaaataagattattatttttgaaaaggaaattcaaaaagccaaaaaatcgagcaattgcgcttttttacgatttcagggacctgacaaatgaattcatacttttttagagtcggaaaaatcatttgtatatacgcggattcgaaccgccaatttgaggaccaagtttggttggtgtggtgggcatgctcgcagccaaatgatttgttagggttcgaatccgtgtgcctgaaattgtttttttccaactaataaatcccaattcatattttgagttttgaattgaaaagtcagtgtaatcttggtttttgggtcccttaattattggagtgccgaatttgccaattttcagccactaaaaagagtgccgccactcttccgacctatgcaaacgatgcgcaagcattgctggccaacttttacgttagcattcgaatcaatcggcaacagcgacgcaactttttgtcctctctgctcaagatgttctctgaagaacacaaagaagtgagaattggcaaaattgtgtgcaactccaaattttttttaatcaaaaattccccaaattttttaaatggttaaacttttaaaaaatttctggaaatttttcttcgaaatttgccataaaatattgtttagaaaccgagctggaccggatccggtaccggattttactggattcggaaaccggtccggtgattttttgaaaaaatagggattgaccggttttctggattgatcggattttgagagaccggatcgggaaacggattgcttttgaaaatatcaatccggtccggcagatttgaaattctccgtttctaatatttttgttttttttattttggaaaaagcatccttttgaaatttttaaa

SEQ ID NO: 30402 - DNA, 988 bp, Heterodera glycines
attactgctcaaccctagtttttatttatgaatgaaattttttggagtaaaatataaggctacagaaaaattgaaaaacactcgcctctcgtcctctcgccaactctcgtgttttgagggactctcgtccctcgccaaactatcgctctagtcttttagaggactctcgccgaactctcgctttcgtcctcagtaccattttagcacccattttggatgttttttataatcagggagcaaataaacattttttgcagccttttttaattttttatgcctttaatctcctaatttttattctttttttccaattttttgtgctgattttgccttttttgtgcttttttcatgcttattttggaaaaatttggtgctgtttacagtgcttaatcggtgattttttgtgctgaaaactgagcactctagtaataaactattaaaaatattcaaagcattttaaataaatttaataaactcatttatatttcctaatcttttgtgtacattttataggatttttttctttaagattaaaataagaaatactttaaccgtgctgagtcgattcacaaaaaaactcagtgtgggcgatccaaaaaaaactcagtgtgggcgatccaaaaaaaaactcagtgattgattggtcattttccggaagcctatcgcaccactttcgggcaccaaaaatgcctgatccggaatccttaccggcccggttattaacaatttttgtacagtttttcaagggctatctcacaggccgggtccggttcttaatccattcacttggagcccgtcatgggtcgagtacatatgtcggaggaccctcagcctcgcccccgaccctgtcggtggccaaccaagctaggcgtgccggtaccagcgtcttttttgtacagctcgacgacctctacaaaaaggtatcaatcgcgtccagcggtgtctacttaccaataaggaaaaaattgacgagaagtgatgtgaaaaa

SEQ ID NO: 30403 - DNA, 1218 bp, Heterodera glycines
  unsure (1)..(1218): unsure at all n locations
ttttaagtttatttttaatgttattaattttcacaaaatctataaaaaaaaaattccgttgtgttggcaattcaccgaaattaataaataaggattttgatattttttaaagttttaaacaattgttaccattccgaatcagtcatcaagctaaatgtagttgtcttatttttaattaaaatcaactaataggctttgaaaaatgctataaatattttagaccaaccaacttattttgtgattaataggagggcttcctttttaggctcaaaaaatagcaaaatagacgttaaatatgcactaaaataggcaaataaattttttattaacgctttttaggtagcaaatggtaatatttctaattgtatgtgaaattaataaatattttaaagttttttcgaataagcacaaactttaaaccataattttttataaagaaaaataattaaattgtagaggatcaatttttctaaaaaaaatttgggtcgtttcttagaggtgtatttaagagttttccgaaaatcctgaaaataggcgccaaaaatggataaataggcacaaaattaggcattataaaagacatcgttgactccccaaaaccagtttttcgtgcttatctgagcgtatcaagcgcgcagaaattcttattcagttccaattaatttttctacaaaatgtaaaaaaagaaatgaattaaaattgtttgtattgtacgatagattaacaaaaattgaagtgctacgcatgcggcaggattcgaacctgcgaaggaaatatccctttgcgatgtaaacgcaacgccttaaccactcggccacacatgcggcaatgtcattcgatactccaatgcgttaaaaacattcaatcaggcaacgctccggttttagcgctaaacccgagtttacttgtgttaatccgggttaacctttttatatcgcggtgtgtctctaggttaaatgtttcttaacccgtgtttaataaataatctcgggttaacagcgtcagtgtcctcgtctttggattcttaaccgggttatccgttaactcgggttttgttaactcggatttaccaacttttaacccgggtttatctccgtgaacccgggtttaaaataaatttgtgtgctcgtttaaccttgtttattttcttaaggatttttaaccctgagttgaggcattgttaacacattttaaacaaantaaataatttaaatataa

SEQ ID NO: 30404 - DNA, 1328 bp, Heterodera glycines
taatttgggggcaatttgttaacttattctcaacaacaaaagaatggtttctacgattattaaactcaataggtagcattttcacttaaacaattataacataggtctcaactcaaaaaacactatgaggaaccatagattctttatatgaaaccctcgagctagacaaaaaaaaaaatccagtgctcattattcccggttcccggttgccctatcgggaccgggacctgagcttttcaaaatccgggaccgggaaccgggaccggtacctcggaggaccgggaattcccggcccggtcccgttcccgtggcaccctacaaaaaggtaacacaataaagtcaaaagaatattaagataaatatttttaaaatcaaaaattcttgttaagaaaataaacaaatagattttggagacaaatttttgggaaaatttttcatttgttaggggtgtatttttgaaaattttcggaccgattcttaggggagtttcttttttattgcatttttcttaataattttgggcaaaacgccaaaataggtcaaaagaggtttttttagattttttttaggctttttaggctctagaaaataaaaactagaaaatattgcattaaaaactcgaaaagtagcttaacgaacccccccccccaaaaaaaacttgttttttgggcatttcaggacaaataaaattatgtcaaatcccagttgggtaacagtgtattgatatcttcggggctctgtcagcctaaagattccgttttgatgctgctctcccattgttttgcttctgttttgatggttcctcctcctccttcttctttttgctcttttccgctgtcctccttcaaaatgtcgttgctccttctgtactgctccaatacagtcaaatggtgcgtcttacccccctccccctttccatgtattttaaaccagggcttccacaatgaacaccaactccgaaatataagattttaggctcaaaaataagaaaattttttaaaatcagttatttttacaatttatttgatcaaaaatgtttcaaattttatatttttagtctcccattatcaattttaagaattttggggaggaaaatgcaaaattgtaaaatttcatagcattctgaatcaaaagatcaaaaaaatttgcgtcagaccataaaatttcttgaaaaatagtgacattatgccataaaattactataagtatatttaagaaatcatcgctaccccaaaatcagaacattcatataaataagaacaaatggaaaccttggtttaaagtccagcttggactcactcttagtggcgctaacgaaatcagatgat

SEQ ID NO: 30405 - DNA, 1601 bp, Heterodera glycines
caacaaataaaattaattttgtggacggtgaatttgcaaataaatttatttaagaaaacagcaaaaattggtcggaggaaaaatgcacaataaagtcaaatgaaataaaatgacgaaaaatgccaagagaagggaattgacagggattaaataatagtcaatgaatagggaagagaaggaattgattaacaataagaagagagtgcataaagagagagaaatagagaataaaaaaatgtgcactgctaagtgagagaacaaacacggtgttctttggtcacacctaacacctcccttcttaagctgacttccttctcagagtcgaatatacccggttttgcgggatttttcgactgatcattttcaaaattcaattcgacgggaaaacggcgacggagttggttggcgtgttggtgtactgctcggccaagagatggtgcaaaaattcgataggtcggagaattctcgactctttcgatcacttttcctggcagccaaacacttttgttgtccttaaaattccaaaaatagacgggttcttccgcttggaaattcgtcgtttttgttccgtgtttggaattgaattggtgttccatttttcggatgtaaattttctttgaattttgaaaattttccaaatcaattagttttgatttttgatttggcggatgaatgagtgagagtttcgttcggagtcgtcgtccaagaaacaattcgtcgggcgaatgtccatcaagggccgcacttggcgttgtccgatatgccaaaagtgctttctctgcccactcctttccttcttttcgggactttttcatagcccttttgaagatgtcgacgaatctctccgccgctccgtttgacattgggtgatacggaggagtaaaggtgtggcgaattccgaattcctcacaaaattccttaaattcggccgatcgaaattgcgtgccattgtcggatacgatttctctcggaatggtttacgatcgatttcagcaccgaaatcgtaatttgactcgtcgtgcgattcattttccaaactttcggccattttgaataggcgtccacgaaaatcaaatatgtgtttccgtctttgcatggcccagcaaaatcaatgtggacgcgttcgaaaacttcagtggccgctttccatggctgaattggcacttttgttggatttttagctgcgctttgacagtcatcacattgtcgaacagccttttcgatgtcactatcgattttcggccaataaacgtgaaaatgaggcatccatcaatttccgtgatctgatcacgttttggatagaatggtgccaaatcatgattttcacatttttggggccaaccattcgtggtgaattgttgaatttgttgcaaaatgtgatcctttgatgtgttttcggcaacttcagatgcagtgattggcaactgatcagtttttgcctggaaaaccaaattgacaaaacattcggttttgttgcaaatgttggcgattagaatgtcctcatttggccgtgggtaattggcgatgagtctggacaaaacgtcgacatttccaaatgcggttgtgctcacatagcgaatgtcaaattcataattgaaagg

SEQ ID NO: 30406 - DNA, 1335 bp, Heterodera glycines
  unsure (1)..(1335): unsure at all n locations
cgttatttgtgatcantaaattatgtcctgctgatattaaaaaattacttaggaagccatccctaggcaattttagaacacctaattttactagggctagttcgaggtcatgttattaaccgggcaccccgattttcggctaggttggttttggaaactcattgttcaaaattttgaaaatagggacgatgtttttggaaactcgggaccgggataaccggttttaggcctggaaatcgctcaaatacgggaagaaattaggaaatccagaagaaatcctggacaccggactaatcccggtctcaaccaactctatgtagatttaaccttaattttccaataaagacttcgaattcgcgcctgtgttttcaatttggtttctatttgattgaatgaatctctttttccgtgttcaattttgtttttccattcattataagaagcctaatcaaatgaataaaatttaaaaaataaatatatacctaaataatttaggaaaaataattaatttgccttaattgtcttcgtttgcttcttcgcccactccattcgtgccgcttccaattcaaactttgtcagacttttgttgttcgaaattttctcgaattctttttttgcctcctttgtcgcatcttttagaaaaggaaatcgatccaaattcgctttgcttaaaagataattattttaattattatacaacaatcagcagaaagccaatttttaaaaatttcatgaaaccgtaatacgttcactgcgctaaacttcaaaaattctttttaaattttatgtaatatgtgaaatttcactcggctaatccaagaaattttttttttattggaacacaatgcaatttaagcatttttttatctcagctacgtaatcaaaatttgaaaattactaaaatatgatatacaaaaaaaaaattgtatagatgaattattcatttttttacctgttttcataattttccccatccacgtaaattttggtttgaatcggtccaatagttcctgaaatccgcgcaaaacttatcgaaatatttaatgtagataataaaaacacaataatatacatttttcatatcataataaaataatttttgttggatatttttttaagaaatgaaaaatgggaaaaatttagcaaatgcaaaatattattgggccaatgatattctgctgtcaatcgaaaagccacgttgcgatgatgaaaaaaaaattggcaattttataaacatatatccataaaaaattcttagatttaaaaaattatgattgaatttacaacagggcacccagtggtctgctgttttttcagagtggtcgtgattttttt

SEQ ID NO: 30407 - DNA, 1079 bp, Heterodera glycines
  unsure (1)..(1079): unsure at all n locations
atgataaagacaatgtaaataaattattatttataaatataatcttttgtttttataataaccgtgaaacattntaatatttctatttaaatctctttttaagagtaacaatcttttatcttacaaaaatgttaaaataatataaattttgagaaattttctcttgaaattgtaattaaactaatattttttattcattttctaaaatgatttaaatgaaataaaaattatttttaaaaattatttatatttatgttattcaaatattcgccattttattcattaagttttattttcagtttatttgaaataaagataataataataaattaatattctttcgtcgttgtcgctttttaatgcactttcggtttttgataggcttcttaaaatatcttcttttttaatccattttttaaatgtattcgttttactttgtgatgtttatattaagcatccaaattaattctccttataatttcaatcttgtgccctatctcatgtaagctctcacttataccattatactcattttatttaataatcaaaacttttgcttaaattatttaaaataactatgtaaataaatttttattttataagagggggctaacggcgccgataggcgctgccgggaaatttttttaaaattcagtgcaatttgttatcacatttggaaatattatagataaaaatggttttattttttatttatttttaattagcaattttaatttgtatttaaatttattaatttgattttttgttttactctttaaaaaaaataacaacgatttgggggtgtcctaatcttttaatttatccttcagtttcttatgcttttgtttcttgttagtattttatatattttaaattataaaacttggttcaaatctaactaaattaatattcaatggtacatgatcatttaaatatgcttatgtttttatattaaacttttttttaagaattgggtaaatttaaattaatttttaagtttaaaacatttaatgcaaaaattaaccgtttattctctttattgtttttataaaatatttattaataatctttttatagca

SEQ ID NO: 30408 - DNA, 1228 bp, Heterodera glycines
  unsure (1)..(1228): unsure at all n locations
aaaaaaaagttaaaccctaaaactttttgcccttttttaaaaaggaattaaaaaatttttaaaaatttattcatttcccctttttgatagaaaaagcatcagggtgccttaaattagccagttaaataaaatttggtgcgttttcagagcattttctgaaaaaaattatttatgaattaattatgcaaaaataaataaaaatttctaaaaatttgatcgtccataaataatttgtaattgatcaggggctcaccaaattttgcagggatacgtatcggaacactacaaatgcttactaattttcctagattttttaaacccggtgaaaattttttgcagacaccaccacttttgcacttaaaaaaatttcaaaaaactttaaaaattcatagaaaatttaaattcataggtactactgctaaatcaacgcagagacgcctttccttgacctttttaggcccctgcaaaatctggtgcgcttctgatcactactcgaaaaatgagtgattgaattttcactaaaaagttaagcctaaactttttggcctgtttaaaaaggaattaaaaatttttaaaaatttattcatctccctttttgatagaaaaagcatcagagtgcctaaactaacatgtaaataaaatttggtgcgtttcagaaccctttctgaaaaaaatatttatgaattaattatgcaaaaaataaataaataacgaaagactcacatcctcaaaaattttcctgaaccgaagctagtcactcggcgcgcatcgcggcctcgaggtaggccttcacccccgaccttcagagcacgacaaagattgcaacaaaaattctgctaaattagcaaaagcaatcgaacgcgaacgaacgacctactaaaaaagtccgaagcagacaatttaattcttttcctttcacttcgcggcaaagtgccgggcgctgcggataagtttctgaaaaaaaacataacggcctaaaccttttggctagtcagcaatcgttgcttaacttgccagatcggacgggtgttaaaaatttattcatctccctttttgatagaaaaagcatcagagtgcctaaactagcatgtaaataaaatttggtgcgtttcagagcattttctgaaaaaaatatttaatgaattaattatgcaaaaatanataaaaatttctaaaaatttgatcgtccatanataatttgtaattgatcaggngctcaccaaatttt

SEQ ID NO: 30409 - DNA, 1717 bp, Heterodera glycines
cgcggatcgcggtcgcgctccaaggccctgtacacacacactttgagaaagcgaaaactgagacggagacggagggagagagaaaaagagagagagaagagagagagaaagaaaagtaagagagagaaagagagagagcgcgggggatagattgagagagggagaaaaaacaattagtagaataatgtaaagaaaaaaggaaaagacaaacaaagaaaaacagaaaaaacaaaaaaaaaaaacaaaaatgagagaaggagaaagaaaaatgccatcggcaaaatatgtacattttcgcgcacaccttatgacaattacattttctactctttggcgtcaaaacctttaaaaatactaatgagaacccataaacaatggcgtagacaaataaagaaaaggtaaaatggaacgaacaaataataataataaaagaagtttcagccaaattgcgttaaagttgaagaatggcaattgaaaaaaaaacattggcattcaatggactgaaactgaaaaacattcggcactgatggatgagtgccgccctcggcaaattctcgtggaatttctgtgcttttcgcccgaggcgtaaagtccgtttctccctaattgcttgggggagcaaagaaaggcctaaaatgggctgagaaagggcaaaaatggaaggggggggggaagggaagaaaaacattgggccaaatggacagacggcgccgtctgccgggcggtccggccattttggccgccgtcggctgtacgatttccattcatttgccgtcggcggagaaaaagcggcggcaattttattgccacccctttttcttttcaacaagaaaacaaaaacgaaaaagcaaaaatgggaacaaaaatcgaaggattaacgtacattttgagaattttaaaaatggcgtaattaacgggcgaattgactaattagcggtgggacaattccaatttatttgccctttgcttggggcaaaatattattcatttccttttacaaaaattgagaagaaaatgtcctctgttgtgagtgatttggttgaaaattgcacactttagcgacaaaatgagcagaatgaacttttagaaggaaggttaaaatggtccttcggcagccaacacattaattactgcattttgtcacttaatcagcggcgcagtgaacttgggcgagtgtcgtcgatcaaaacaacctttcgccacggggctgtggaagaaggtcgaccgaggcgggtggggtaaggagaaaaaccaattaatttggtgtcgagagtctcgacaatcggcgacggcggcggagcattccatcgccgcgctccgttcgccaaaaataatggcgggaaaggaggggaaatgatgattgaagatggactagacgagaaaaggacggacggacgaccgaaccgaacagttacaaagggagggaaggcgaccggggacgtaggggggggggggcaaaaaagggggggggcgcataaagaaaaaaagggggagggggagggaattctgttccgatcggcggagaatatttaaagggaagggggggggggaaaaaggccacaccctttaattcgttcggtcattcgatggagatattacaaaacgaccggaaatacaaagagggaaatcggaatgtaatgctgaaatttcgggaaaccacaacgaaactcgaacacaacacaataaaaacattatcggcatttgacactgaaatttt

SEQ ID NO: 30410 - DNA, 1290 bp, Heterodera glycines
  unsure (1)..(1290): unsure at all n locations
aaaaaaaagcgaagacaatttgtcgggaggaaatacaaaataaaatgaaaaatgaggggaaaaagaccaggagggagggaatgacgntctatttatgggcgagtgacaacaacaaanaatggcggggaatttgaatggacagattgccataataattcaaataggctcatccgaacaattaataattaattgtacattttaaagaatttactgtcgggaggggatgtgtttggctgcgcaggattttgttggttgtcatcttaattttgacaaaaaaatttacgggtttttagaaatttaaataaatttaatgaaaatcatttgtaaacatacaatagggtgcttgtcctcccactgtttgtaatttacaaattaaatttgaaattcgttaaaataaacattgacttcctggattcatcggttgatacatgtacttttgtggattcagtgcacataatatcgacggcatatttgtaacaaccgaaccaaacaatccgacattgtccactagctggtcaattacatttaattattgcaaatcttataacatttgttgagattatcgaatcgactaattaattaattaaagttaattgcattgatttttccaatgcggattatatggtggacccgctgggtaatcgccatggtttgcctgagttgggtgcggcactggcgacggtgccggtgtataagcattcgtcataggcactgggcgtggtggctgtgttggccgtggtctcgtcgggcgtggtctcggaaaccgtggtggaggcctaagccgttttggtaaaaatccgcgctcgttttcttctttcccaacgctgtcgccattagcatttccatttgccatagccaaaaacagaccacgattttgggatattcctgtacaaaaaaaaagcattaaatttgtcattttcttaggtttgtacaatttttgcaccaaatattcttatcgaaggaattataatcatcaccaaaaaatggagggatcaaagctgagagaattatcatacatttagttttaaaattaatttatttcatttaattgttacgacttggcgaatcatatggtggttgaaactggcgatagtacggaattggaaaatgattaagctttttgccattttccggctcaaatggcagcgcagaaattgcgctcttaattgagataatcatttgtctgatcacaacgaacacaaaaagtgagaccaaaatgagcaaattggcacaggcgattatactcagaagaaaggaaagcatttcgattgagtgactttggaaattaaa

SEQ ID NO: 30411 - DNA, 1180 bp, Heterodera glycines
ccccctcggtaagggaaaaagagaggcggtaccccccccaagacccccctcggtaagggaaaaagagaggcggtaccccccccaagacccccgcggcaccccccccccccccccctcattcggtttgtatcccccttttgggtcaaatttttcaaaagcgtaaccagacagtcagacagtgcactatttccttctttattttatttttctcacttcttcccttttcccatacgtccctgcatccccccccgccctcatttaaaatttttatactgaattgaaaatttgtaaatctgattcttctgacagaattgccacgttccggcccgcccgaggcgctgatggaattgtacggcatttcggccaatgccatcgtcaaagcggtgaagaacttccaataattgtgccaaaaatgacgcagaggaatttggcagactgaataaagacacttattaattattttcaattttaattgaaaggtattttatagtttctcattttgttattttgacctattattatatttttaattatttggcccttctctgttgaccttctttattattattattattatattgccgttattcatttttatacaaaatatgaagtgcactttttgttgttgttttcataataaaaattagacaacaaaagttcgctgacccacgaaatgtccaagtctcgaatttgagtttattattcagatgggcctaaggttaggcaaggggtaatataaaggatatattcgtattcagcgaccccgaaaaccctaaaaatcctaaattagactcattttgtttttataaattttggacatttcgtggcttggacactttgtgggggtgcccaaaagtttggtttaattgaagtgtaaaataaaagattttgaaaaagcaataagttaggcaaaaaatagaaaagcatctcttatggacaattaatggctctatgcaactttatgagaccaatcacctagtcaaatactctgctagatatatcgacggatttagtagcctgatcgtacgaattctgatttcttgtaattgtctttttattgtgccggttagcgactgtcaccgggtggacccgacccacatcatcattacggccatggatggatctaacggaggaagaaagaatggatgtatagttttagtcttttattctatccgttttt

SEQ ID NO: 30412 - DNA, 1141 bp, Heterodera glycines
  unsure (1)..(1141): unsure at all n locations
cggaaaaatgngaatatcagatggggtgcgctctnttctaaaaattcctcttttcgtctaaccatccctccctattgtgcactatttcgtttcaaaattgaataattttttttggctttttgaaataaattgtgaaaaatatacgaaaattattttcggttttaattatgctgtacaatgcttttaagccccgccgtgcggcggctccccttttgtgcactattttagtttttaaaattggttccggactttttggctttttgaaataaattgtgaaaaatatacgaaaattattttagcttttaattatgcagtacaatgcttttaagccccgccgtgaggcgggacagttccaaaattttgtaccacattttactgtggaaagtccaagtaccttattggacaactacgtgtcaatgagcacagtcgcctttggccagttgtggaacggaaaaatgggaatatcagatggggtgcgctcttttctaaaaattcctcttttcgtctaaccatccctcccttttgtgcactatttcgtttcaaaattgaatcattttttttgtcttttgaaataaattgtgaaaaatatacgaaaattattttcggttttaattatgctgtacaatgcttttaagccccgccgtgcggcggctccccttttgtgcactattttagtttttaaaattggttccggactttttggctttttgaaataaattgtgaaaaatatacgaaaattattttagcttttaattatgcagtacaatgcttttaagccccgccgtgaggcgggacagttccaaaattttgtaccacattttactgtggaaagtccaagtaccttattggacaactacgtgtcaatgagcacagtcgcctttggccagttgtggaacggaaaaatgggaatatcagatgggggcgctcttttctaaaaattcctcttttcgtctaaccatccctcccttttgtgcactatttcgtttcaaaattgaatcattttttttgtcttttgaaataaattgtgaaaaatatacgaaaattattttcggttttaattatgcagtacaatgcttttaagccccgccgtgaggcgggacagttgcaaaattttgtaccaccattttactgtggaaagtcc

SEQ ID NO: 30413 - DNA, 1239 bp, Heterodera glycines
cctcaatcaccgtgttgtgaagcatggtgatctcatcttccagatgagttgggcctcacgaatccgacgggcaaagaatttctccagcggaatgcttgggagcttgtctaatgacacttctctacccagacgaaacgtggaatgggctgttttcccatatggcagcaaaatggctgcacacccagtggatgccgtggcaagcactttgtaggtgtatggggcctttcgcaagcgcctaataatttggccaaacaggaatgtctttcctgtacctccatcgccgtatatgaagaaacggcgggggacagtcggatccctagggttcgactgtattgccaacaaaacagcatcaaagaccttctgttggtcgctgttaagtggcggaggggcttttggctgtggacgaagatttggttgccctggaggcaaattcaaatcatcatcgccaaagaaaaactcttcaattgccgcgtcagtatttttggcaattgagtttggcgggtctggcaggccaaaatgcacacagcttaagttaaagcagctgtgcagccgccaatcaaggtcggctagggcttcaagctctgctgctttatgctgtgccggagtaataatgccttgcggattgtacatttggtctttgtacttgttccacaattctatggcattactcggctggccatagaccatgatgctcacaaaaagccatctcatctgatctggccagcgcgacagagctgcctccgccagagttttgtcccaaattttgccgtcttcaagaagaccatgcattattgcagcatcagtgaatgaggtacaaagcaacccattaaccatcttaagatgatctggatctccaggaaagtgacgcataagtgaatagagcgcgaacctttccgggtccgatgggggtacagcaacaattcggccgataggtggcctttttatttgctgccttttgtacaggacccatttgtcctttgcccatcggaactgctctgggactttttcaaaaagaatgtccttaaactttgggtcattcttccactcattttgccattgtttccaatatgctgaacaatgcgtttctggcagttcgccttgctggatttgttgagctttgctcaccagctggaatgccctatatacaatgggctgttggtttggcaaatgaattgcccaatttgacaacatgatgtgaaagacgggcaaatggcattgaatgaacaatggcatatgctt

SEQ ID NO: 30414 - DNA, 1168 bp, Heterodera glycines
  unsure (1)..(1168): unsure at all n locations
ttttttccccggcggcgcctatcggcaccgccgcgcccccaaaactcttattttttcttagaaaatggcccaaaatcgcaaaatttggtaatttatgaaaanctgttctcagcggcgccccaaaactcatttctcattagaaaaatgataaaaatcacaaaatttgatcattttttagtgaaaatctgtcaacaaattttaatcaaattttcccggcggcacctgccggcgccgcctgccccctcttcccaaaaagtttttttggaaaaagcgcgcctcaaaaaagcgttctattgatttttaaatttggaataaaatttaaaaaaatgatttttgctttatgcttttactattaaaaagttgtagaaaaaatttcgctttcgcatttcgcctttcgcattttcgcatattttagcttttcgcatttcgcttttttttcatttcgcatttttcagtttcgcaaatttcgctttttatttttcaatttggcccatccctggtacttacttacctacatatggtgaccgtctctgcgctggaaattgcaacgggtaatgtacatctgcttctggctgtgcccgattcttctccgccctgaaacggtcgaacacgcaggccacttcatcccccgtcagcacaccggtcgggactgaaatgacaaaaatgaacttcgtttttgaaaaatttcttctacccgtcaaaaagaaaatgatatttttacaaaaaaaaaaaaaacctgtaaaaggtcaacaaattcttcttatttgcaacctcttacagtatgtattgataatatagaatatataaattaacacatatgccaaactcggcatttttaggatgtgtaaccgaccctaaacacggagaataattggcacaaaaattattattattatttaaaaaaatcgaaattctggtccaaaatctcaccccagcctggcccgctcccaaggggggagagagagattctaccccctcaccgcccgaaattaaaaatggccaattttttgaaaattttgcacaattttgtaggaaatttttcccggctgcgcctatcggcacgccgttccccgttgtactatttattatttttggaaaattttaccccaaatggcaaaaatctgtcattttgtggtgcaaaaccgctacaaatcctgccttttttttt

SEQ ID NO: 30415 - DNA, 899 bp, Heterodera glycines
tttttctgggatagagtataaatttaaaaattccctcaaaattaaaaggtctattgcgcaccgccctccctatcatgctcgagagcatttgtatgtgtataaaatttatcaaaaaaagagatagccatttttctgggataacctctaaatataaaaatcctctgtgaaataaaatggcgattgtgcacagccctccgtctcatacgcaagcgcttttgtgaggtataaaatttctcaaaaaaagagatagacatttttctgggatagagtataaatttaaaaattccctcaaaaataaaaggtctattgcgcaccgccctccctatcatgctcgagagcatttgtatgtgtataaaatttatcaaaaaaagagatagccatttttctgggataacctctaaatataaaaatcctctgtgaaataaaatggcgattgtgcacagccctccgtctcatacgcaagcgcttttgtgaggtataaaatttctcaaaaaaagagatagccatttttctgggatagagtataaatttaaaaattccctcaaaaataaaaggtctattgcgcaccgccctccctatcatgctcgagagcatttgtatgtgtataaaatttatcaaaaaaagagatagccatttttctgggatagagtataaatttaaaaattccctcaaaaataaaaggtctattgcgcaccgccctccctatcatgctcgagagcatttgtatgtgtataaaatttatcaaaaaaagagatagccatttttctgggatagagtataaatttaaaaattccctcaaaaataaaaggtctattgcgcaccgccctccctatcatgctcgagagcatttgtatgtgtataaaatttatcaaaaaaagagatagccattttttctggga

SEQ ID NO: 30416 - DNA, 2041 bp, Heterodera glycines
  unsure (1)..(2041): unsure at all n locations
atatttttttattaatctattgtttagcaatttttcgaaaaattttgcnttaattttaatttattgaaaaatcccgaatcccagccgggatctcggccataaaatgacacccgcgatcgggaccctgacaaaatcgggatttgtatcccggtaattctatcccggcctaatgccaatcccgaactccggtccagattttttcaaaattccgtgctctagttttttttccaaattcaacagaaacggccttaaaatttgcatttgctcttgattcaaatttttacaaaaccatgccctttcaagtttcgtcttagacaaaattttccggccataacttttttagaattggtaaattttacacatttggtatttattgaaagctctatttattaaattttaaaactttatttatctataattaattattgactcaattatcaaacttaaattttgcatgggaatttaattaatcgtttgtgttaatattattaaaatcctttgaacaggacaaaaaagaaaagcggacaaaagaattcccataaactaacaaatggcaaatgaaagttctttttactcacgcactgataaaatttgtaccgtaaaaatttataaatttcaaatgaaacgcgaaacaatcgaactaaaattccatgttaaatttaatgtcgaagtttcgaccgctaattgaggagtcattatgtcttttatgaaaacagcaaatattttaaccattttctgtatatattttttttattaattgacattaatgaaccataatattaattgatatttatttcaattaatttttattttcgatctcaccaaatttggttaaaaaaagatataagccaatacttttttgagcattaattcttaattagagagttcttcaaagaattccattttgaagttgcgtgacaaatgaaaaatgaacggaaaatccctttttggataacctttccttcccatcccttcgctggtattttaagaaaaaagataatatttcaaatttgtcattttacttttctttatttcttaatattaaatgtaaatttttaaaaattgtgctcatagcgctttaaaatttttgtgccgcttattggcatcgatttttagtcccaggggttctcagattttagcggattaaaggacaaaaaagtgccgttcttaattgaaatattacttttcttcctttaaagattatttggaatatttttgggtcggaaaaatttggctttttacataaatctctttagagacgcaatttcggaagaaaatgttcattttttttgacaaggcagcagaaaaagctcgtcatttgctttaccacttaaaaccactcaacacaaaagatgtaatgaatgaatgagaatattcgttccattgtttcttttccgctttttcccattttttcggaaaacattcaaaaattgccaaaaaaaagtgaaaaattttgctgtttattttggctctcaaattggctccaatcggtgaactttaagggataggataattttatagtctttcattggtcaaatgcagcaccaattttatttgttgttcaataaaagattaagggatcaattaaattaattgtttttattggggaagcgaattcgtctcaaatatgcaaattgacctaatttagcatcaaaattaccttgagtttttattttctcatccgctaataaattcataaatttccatcataaaacggactctccttggccctaataattgcttttcatggccaacttttatttgcctatgccaattttaaaagacgctcacttttccgcacttttttccatagagcaaataaatgacataaaagcaacaattaaaatttgtttctgaagagaaattctcacaaaattaaaaagaaaatgccattggacaattcagaaagcaattagttaataaccttaattggcccacttggctaatgagcgaaatgaataactttttcgtcactttggcggagtattgtttgcttctcctcttctgcgctctgtccaccgcaattggctctgtttgcact

SEQ ID NO: 30417 - DNA, 1347 bp, Heterodera glycines
  unsure (1)..(1347): unsure at all n locations
agttggaatgggcatgcgtggcacccgtgaacagttggaacccgagggcttggcgaatgggcatgcgtggcacccgtgctcagttggaacccgagggcttggcgaataggcatgcgtggcacccgtgaacagttggaagccgagggcttggcgaatggccatgcgtggcacccgtgagcagttggaatgggcatgcgcggcacccgtgctcagttggaacccgagggcttggcgaatggcatgcgcggcacccgtgctcagttggaacccgagggcttggcgaatggcatgcgcggcacccgtgagcagttgaaacccgagggcttggcgaatgggcatgcgtagcacccgtgagcagtcggaacacgagggcttggcgaatgggaatgcgtggcacccgtgagcagttggaatggccatgcatggcacccgtgctacagttggaaattatttaatgaccagcggaagccaagaaaagaaaatagtctaatggccagtggaagccaataaaagaaactaatggccagtggatagacactttgtccctgtggtgaccaaatggtctaaaacagacagtcatgcatttgccactgccctacacgcacaaaaacacggtgtcgacactttgtcccagcaagtgtgtagacactttgtccgttttgaatgtcaacacttttccgttttgaccaaatttgcgaaaaatgtgctttttacgtctgcgcccatcctttacactaaaaaaacaccgcttcccgcgaaaatgccgactttgcattttgaaccccccagcggctaaagggggttcgacccttcagacttgtcgaatcgggtcgaacttttttttataatgctacccatggcgcggcgcaactttcgccaagcaaccgcaagacagctactctgcagcgccaggcgctaggcgccatttgcgaaaagttagcaaaaacaggttagcacaactcagcgcaaagcgcccggcgccagacggcaatttgttttcccagcctttcagggtgcgggacgcgcggggaaaaaaattctgactctccagcatcgctggcccaaaagattgctctctatggcgcaaagctggtcaacaaaaagacagcaatctcggcgccaagttgtcggatcgcgccaaattttttttttanattctccccacggcatggcacgcatttcgccaagcgacgccgagccgctatctgtgcaccgccgggcgctgcgcaacacttagcgaaaacaggttagcatatctcagcgcagaggcgaccccaaatttttgtgtaagacacaaatgtgtagcgggagctcagttgccgaatgcaaaaagaattgggtcgatag

SEQ ID NO: 30418 - DNA, 895 bp, Heterodera glycines
  unsure (1)..(895): unsure at all n locations
gggtgaaacaattaggaagattattaattaattagatgaaagataattaggctaattatacttaattaattaatcgatgaaagataattggctaattatacttaattaattaatcgatgaaagataattagccaattattcttagacggttcaaccaaaccggaagcgaccattaaaattggcaccgacagtgatttggaagtgacttctccatgggtaattaattgatcaaccaatttaatttgattgattgtttccatttttgttgtcaaaatcactgctaaacaacggcgtgcgtttggccggtggcatttacgtgttgaagttggacattgtgctgtccaaccgttgccttgtgctcagactgaatggcactcagttcaagaattgtctaaagaagggcaaaatgccatggaacaaaatcaattggatcaaggtgcaaatgataaatttaggagacctaaagagagcttaatcccacctaatccataattcccatgttatataatcccaaaagtgcataattatcatgatcttgcccagacatttacacccccagacatttgcgcctaccagggctggacgtaactgattttcaattacggaaatccgtaatccttaattacggcaattttttcagttacggccatccgtaatccgtcattacggaggtccaaaaaggccgtaatttggcgtaatccgtaatacgtaatccgtaattttcaaaaaaattttttaatttaaaaaatttttaaatttaaaaaatccaatctaaaaattgttaagattaatttatgatcagaatatctgcttgtttttttgaggtgaaaatcccaaaatagtttttttcgcggtgtgctttttccaaaactgggngatgggggggggggggggg

SEQ ID NO: 30419 - DNA, 1001 bp, Heterodera glycines
  unsure (1)..(1001): unsure at all n locations
tggtcaagcccgcttggttgcgctttatttttagtgatacttgatgaaaaatcagtgacaaaatcaatgattttacaaaaactcagcagatcataatcagcacattctttggctcaaatacagtttatgagtccaatcgactttttttgcatccagtcaattttttacttctattccaccaagatttgctagtctgttttcacaaaattttgaatattttctcagaattataagtcacatacacgtaattgttttccgtttcataattggttcattaatacaacgacctttctttattgtattttttttgttagtgttaggacaaattccgcaaaaattccaagggttcgcttttcactatccgatttattcaatgagtaagccatgccatcccacatattgagttaatctgtttgttttcatttttttttcttttttaaggttcggttaaattacgtgatgagaaatactataccatcggcaattaaaagagaagattgagaagctcagacgcttgggtaaaaactaaaccatttaatgtttttaaaacgaattttcagcaagagaatgggaagaggtggaaagagcgttggacgaattgattgagcaacgccgccagcggggcgtactgcccgaggtaaccgaatgggtaccgcccgctggcggagggaggaggagagggaggaggtggaggggaagtcgacaacttcgtggaagtgctctgttggtttgtcgtgggagattggacggggcagtctcaccggatacatcatccgcagttctttcgttgacccggtaaaattttcgattagatattctccctattttaaattttgatttcaaaatttaaaaaaatcacaggtcaacggaaagctgaccaaacatggccaccggcggataaacaaattgatcgaacgcaagaaacaatggacgcaaaattcatgatcagcgctttttcaaaccanaaattcattgtaaaannattttttaaaaataataaa

SEQ ID NO: 30420 - DNA, 1566 bp, Heterodera glycines
cgatcaaattgaaaggactgccgtggggccccgtccaattcgctgaatggcggccgccgtcttcgaccattgcctaagctttgtaagttttcatttgcaacattttttgttcatttcgtctctaccccccccattccgttcactatatttcatcaatttaaaatttattgctaatttgattttctaattgctaaatttcctaattttattcctccttccaggtctttgtcgaaaatggatgtgcaaaaaacaggcaaaaatccacagcgccgcccgaacccggatttggcctccggcgactttgtgaatgccccgccaaagcgccgaagaaacaccaactcggtgagtttacaattaggttctgccaggttaagacattccggttttcaaccgcatattggcaatggaaacctttgcagctttagttcactaaagattggcatgacctccccagttttttttagagccgtctcgaaggcaatcccccgcaagagcaaccggggcaagtccagccgtccgtcttaatggttcagcaacaacagcccgttttaccgatacagcagcaacagcagcagcgccaatttgtgaacgtaagagtgtgttcaggggtggggcgagggggaagcgggcaatgcaatgccgatgttagcatagcctggggctatttatttattatctggttttgaacccgagcattaaccaaaaaaggggggggggaatgtacattttggccaatgcaatgccaaatattatcattaccatggggctatttattgtcgaattttggaatcagagcattaaccaaaagggtgctgatccacattttataatatccaacccccccccccccccattttagcagagtccgcaaataagcttcagcccgtttgtcgaccctcagctgctacatcaaccgcaacaactgccgccgccggccactcgcatttccatttcggtaaataataatgatcaaattagttttcattgccaatcacacttctttttcagtattctaagccttttacgatgggggagcagcagcaacaacaacaacagggagaagaagatgtgatccgggagcgcattcggcgccgtcagctccaagaattggccgcaatggaattggccaagccgctccccgaagacctgcaattctgtgcccaatacaatgcctatggtctgaccgacatcggctggctgttgatgggatggcgggaccagatggtcattgggtaaggaccatttttgggcaccccctagtcgcattaggcattcaaattcatttttcccgtcccgttttaggaccctcacgggtgtggtggccgaatgtggcccaatggggaccgacaagtccaaattcaaagggaggaaattggtcttgaaatttgatttggacgcgacgcagctcctcagcgtcaaggaatgggagcggcatgaccgggccagcgagcttgcccgtgctcagccgcgcgaccgtgtccagcttcaacgcctcaacgttgtctccaacaaagcgggcaccacggtcgaaaccacgtttttgttttccacacgtacgggcaattt

SEQ ID NO: 30421 - DNA, 1879 bp, Heterodera glycines
atgacttaccccgtagggcactaaaacataaaaattcctctagtcaataaaatatgaaatgcaattacagcatctaatagtcttgattttaactacaaatgtttataataactattgtatgtgttcatttttcgccagttttggacaatggccatcatccgtttgctggcgacacttttgactcgggttttcgttactttgtccatgagaagttttccatgccgtatctgtccacggaaggcataagcgtttctccgggcatcaaagtgttctccgccatcagtccaactcatgtaaatcaaattcttaatattttcccattctttctttttacaaatttacctcagctaattattcccaatttttcagtacattttattaccccatgaaatgtggggcaattgttcggatcagtggcccgaggatttgcaggaaatcgtgaatgatggggcggctgatgaaaggcaaagcgaataactaattatactgtataattagggagcccattaaggtactcgtcgttgaaatgcaaaacgttgtgccgtgccaaatacttcaacgaattgtgcggctgcagcccgttcagttacaacatcgacgaatgtaacaacaagcatttaattgttgaattatttctccattttttcagttttctccgtttgcactccctacgaaatttacaaatgtttgggctccaccgttctgaatgacaccaaactgtcgcagaatggtacaaatgccaaaacaacgtcttaactttagcacatttcaaattcaaaaaaaagagtgccaaaatatttcagagcaaatccttccgaattgcccgcaatgtaaaatcgaatgccaaagatgggtttaccacacgtacaattcgtacaccgaagcatttgtccgcaaaccaaaggacaaatggaggcgaaaagctgaacaatggcaatgaatgtttaaaatgaaaaacaattgacagtttgaaggtcgaccatcgcttcgctgaacattttctaccgcgacatggcttataccgagtataagcaagtgcaaagcctttcgatgactgaaattctcagtatttattcagcatttgattatttagattaattaattaacatggcttttagccttttttcaaatttgcctctccaatttcaggtgacattggtggcaatatgggtctgtttttgggcatgtcattgatctctctgatcgaattcgtcacttacatttgcaaaatcagttggcttttcgtctccaaaaggcgaagggatcatatggcaagaaatgaaatgccaaaataattctgaaattaattttaattaaatatttgtaaatgtttaaagttggccaaacagcgaagagacgaacagagacaaaagcaaatggaaataacgttggaaaatgccgtgccgacctcacaatttgacacattattcggcagaatttcgagaagcattaaacggaaaactgcacgagacgaaaaatgtaaagaatttgggaagtataagagagaagtcgagaatgaaaaaaggccattttggaagagaaaatgccatttggagggactacatatgacaatttgctgaaatattttactatgcgaaaattattgtttatggagctaaactcttttagcaatttttgttttgcctatgaacaatcggaaacaaagtgatgctgaacttggcattccatcaattcaaacgctgaatttggaaggccacacaaacggcggcctgaaaaggtcccaatcaatgctttctacgttttttgaatcgaaaaaagcggtacgaaagttttaaaatgaaataaaaaagaaaatatccaatttaattgaaatattttttatgcaacttttaaatcggatgggtaaacttcccaaatg

SEQ ID NO: 30422 - DNA, 611 bp, Heterodera glycines
tattccatcatcagcatcgcattcaaccgctcgctgccccctctcgcgtcccccctcccctcccccccgcttgggcccccgttctagactcgagaatgaatgaatggaaggaaggaaaatgtcgagaattgagacacaccgaccgtcgctcaccactcgccccccccccaactactataaccatcatcaccaccaccagcagcagagcaaccaatttgccacgcctcaacgctcgcccagcgtcgattggggtgagctccctgccccctcccgacccccctcagcccactctcaacacgacaaaatctcgacacagcactgatgggacggggggaaagggggcgggggaggggacggacagtggcaagcagtaggcggacaaacggacgaccatgggaatgtgggtgggtggatgggatgatgattgtgacagtttttgtggtgggagtacgacgacgaaacgtgggggggggggactttcgtcctttctcggcatcgaccgattggaaaatgtgtcgaaggagaccgaccaagccccgtaaccccttgcacccccctccaaagtgcccagaaggaaagtgttgatgaataatgagaaattgaaatgaatt

SEQ ID NO: 30423 - DNA, 1552 bp, Heterodera glycines
  unsure (1)..(1552): unsure at all n locations
gacaaaaaaaattaaagtgtattatggaactttatccgatcacaagtgagtaaacaaaaatagcaaanatgcancagtcattaattaganaattanaattnaacanaatgaggaaaactttattaataattcatcgtgtttttgcaaataaattccaatgaaatattgcaaatatttcaataaaattcacttatttttctttttcgacttcgtttccttgtgccattgttccattcccatgccttttgatctactggcaaatgatcacacaaatgaggcccatcagaactaaaaaaggaattttgaattttgtgtcgtactgtgctttcggttttggtgtggtcaaaggactataaaactggacatttaacaacaaatttaacaacggaatttgggacagaaaatgcattttctgggttctaaattcttgcattttatacaattaaattgtcacatttgcaaaatgggcttaactcatctctaactgttttcaaaaccttttgtctcgcatttattttcaaattaattaacacggaattagtgaaacaggcgcgcctttccccagaaacggattttgatatgtagtccaaaagtcactaattaattctcaatcttgattaatgcgggtaacggtcggttaacccttacatcgtctttttctacgggtccaggaaatcaaatcgcggaaaaacttccgcccgccggggataattagagaggcgggcagtgaacgggaatccaaatgcagaagctctttaccagcttaattgttccggtccatccgctgatgatgatgactcataattattcttgtcaaattgttttttccaataaaataatgtcgctttgctggcattgaaacttttggcaatttcttttgtcggcacttttgggtcttccttttttattctgtagtattcttttacaagggcaattctttgactttctttcgtaacttttcatttaaaattttaaataatatgatttaaattccttttcccattttaccttttaagcccatttcgcttttccatttgtcaatggttctcaaattaatgcccaccctttcagcaatttccaatttgtcctttcgtcccaccgattgttgctcctttttgccaattattttgtcaaattggtgaataaatttttgcttttcttccattgaaaaagcacgcgcttcttaaaaaagggaaagaaaatggaaaataaattaggatgagtcatcagtcatcacttaaaaacaattaatttattccgccgttacttttataattaggctgaaattcctttctcagctccaataattttccagggaaanattttcagttttttggaaatttcgctgtccttcattttgccattttcgtttttcatttgttcatattttttaactatttccactttctgtttttcatccaatggtcttggttttttctgatttttttattatttattatttttatttaattttaatttacatattttttcacaaatgcctttcttactcatttgtccatctgccaaattgttttttccattcaaataaact

SEQ ID NO: 30424 - DNA, 852 bp, Heterodera glycines
  unsure (1)..(852): unsure at all n locations
tttgttgagagcattcggccgcttcgcggcctcaggacgggcgcttcgcgcccgttttttaatttttttggggacattcggccgcttcgcggcctcaggacgggcgtttcgcgcccgtttattaattttgtagggaacattcggccgctgcgcggcctcaggacggacgcttcgcgccatttttaatttttttggggaaattcggccgcttcgcggcctcaggacgggcgcttcgcgcccgttttttaaatttttgggggacattcggccgcttcgcggcctcaggacgggcgcttcgcgcccgtcttttaattttttaggggacattcggccgcttcgcggcctcaggacgggcgcttcgcgcccgttttttaataaattaaaaaataataaacacggcctgggtccgaacatgccgccccacccctcagaatccccaatcacacagggattctgaggtcttgactatgtcaaaagtaaaatctgatcacgtattcgtgatcagcggcccaaataacccctaaagacatgtttttggaagatttttggtgaaaaaattttcctctcaaaaatcatggtcacacccctgtggtcccaaattccaaaatcacttttatttctataacttttttcaaaaaagtgataaaaagctaaaataaaatttataaaatanancaaaaaattncaaattttttnantatattttttttataaaatactttttcanaannnanttannaatttttttctnaaaactctaaaggtccanaaattctggaataacttatttattttggcttgtgaaggattgcaaataaatctcataaaattatcgctaattttttgactcta

SEQ ID NO: 30425 - DNA, 1310 bp, Heterodera glycines
ctaaattttttggtggctttgcttgcgtgaaacaaattgtatagggatggtcccaggattttggcttaaatttgtttgccatttgtttaatatttcgccaagatttgattgttttgtgcatttttggaaattttgcgtttttttttcggaaatttggctataagtttttcccagcggcgccttatctgcaccatcggaccccattttaccctattatttgaaatttagaccgaaaagtttcaaaaatttgctgaaaaatttttagttttgtattcggctgaggggggggggggggttagcccactcagccctcccccctggctacgcccttacattccacccaccgtatggtaattggacgctgtcagaatggtcaaaatttggtcggtgtccgatttgggtgcctttttgaacattttgatcagtccaccgccgtgcccgccgcggttgatcgacttgtaaatgatttcagccgcctggtccaaatccaaaacttttggcatgccgttgccgtttttcgatggcaccgcatcagcagcagaagtcctttcctcttctttgagctgctgttggtgaagaacctggatttattaataaccatttaaaataattatgtttattgaattatattgctcttaaataaaaaaataagcctaaaattaaaaaaagtaattttggaaaatttatttaattttgttagaattaacccgcatttgttttttaatttaaaatatgttaaacttaattttattttatgtatttattgccaataattaaataattaatttttattacattttctccattcattgtgtgtcggccgttttccacagtttgctcttgcggcggtagcggagcctcttcaaactaaaaaataaaatacattatataaacaaaaaccattaaatttttttatctaatgagaataagcactttaatttggaatgaattaaatttaagccaaattattccgaattaaataggcttaaaaattaatttcttcgtttactttttgtttttccaatttctgagttgattgatcagcatcagctggtggcgattcttcaaactaaaattaaaatacattatataaaacaaaaacactttaattattttttgtaaagagaataagcagctttaatttggaataaattaaatttaagccaaattattccgaattaaataggcttaaaaattaatttcttcgtttacattttgtttgtcaatttctgagttaattgatcagcatctggtagtggtgattcatcaaactaaatttttgaattctgttaaatttattttaaatttgc

SEQ ID NO: 30426 - DNA, 1525 bp, Heterodera glycines
aacatttaccattgacatgcacataaaaaaattatttgtaaattaaaaataataattataatcaatttcactcaattttatgaaaaaatatgtaaatatttaacattttttatcaaaattaaatgggaatttctaaattgcatgaaaaaaaaaattatgaattaaatttaaattatcacaatagttaagcataattgaataaagataatgaattattgttagaccgaagaaatgaaaatgaaaatcacatttagtaaaaatcatttcggccaattccccactaattttttttacactttacacaaattgacataataaaatttttaaaaaatcgaaatcaattactgccaagattatccgacaccaaaaaatgaccggatacttataaaaataggttattatttagagaaacttgtggattttggattaaattaacaaatcataaaaatttatttaaattttgtgaccaaataacatgttagatagatatatgttttgaaattaaaaacaatattaaagtgaacatccttcgtttgaaaagcgaaattttcctttctttggcgaaatataccaaaaaattccgagcgccaactcttgttcaattaatttacgttttgcaataaaacagtttagcccattaattggtttgattctgcatcggtgtggtcctttaaaaaatatttaattttaaaaatataatttttttcaaattttgtcgaaattcttacccggacaatccgtcacttgtttatcatgcaaataaaaaatgttgtcataacattttgccatcatttcagcatacattctcttcgttggcaatttacgaaatgtgccgaaattgcgcttgaaaatgtcggatttaaatcgtctgttaatttgtcgtgccgttttcgtgctaagaaatgattcattcagtgccactgagcgccatatagctgaattttcctaaaaattttctatagaataataaattgaattgaataattaaataacaatgttgtaaattcccatccatttttttcttaaatgatttttaaacatttaagaaaataaaatttgccgacgaattgatcactgacggattgtccattactgactcagaatgtctttcaatgacagattgtctattgatggattattcagtgaccgattgtccgtccatagatggattgtccggaccactttcattctccagttttgggcacagagtttactttcataataattctttagtaaaatagtttgctgttaccacatttctgtgcatataattctccattgtcaaaatgccattttcgtcttccaaaaagtgccaatttcggaaatgcaacattcgcccatccgttgatggcacactgcgtgaggaagtgttcggctttatgttcaatggccaatgaatccacaatgattcagcgcgggaagtgttcaccacatatttaggatcatcgggctgataaagcgcaactttagcagatgtcaaagcatcgaataaagaaaattttcgcggatttcgggctaaattttt

SEQ ID NO: 30427 - DNA, 1167 bp, Heterodera glycines
  unsure (1)..(1167): unsure at all n locations
cacgttttgttngggccaatgtttcgctttttccaattttttttgcggccttttttaattttaccgccgtttcataccaataaaattcatgcgtggttagaaatgacattaaaagttcgaattcattcaatttttgaaagactttgatcattctttgcttttctgacggaaatgccaaaaatgaatggacaatgtttcgcaggtcatcacaaaattgtaaaacagctgaaagattattattattattattattatttgctaaaagctgctcgagcatcacggcatggatttccaattgagcaaataatttttatgcctcacttttgcattcatttgtgtcaattctgatcacttgtgcataattccacaatggctcttgtcggaacaattccagctcaaacttagcagaacttaaaacttggcattgggtgaccaaaatttttatttttctatttatttttcattttgaaaacccatttttttatataatatgtatttttttgttggatttttttttcgagtatttcgggaccatcggagacttagttttcacaaaaataaacctgcttgaaacagtttgcagggagggggggctgagtgggctaaagctcaccccgccccgaaacccaaaaaaagtaaaagattttagtaaaatttttgaaatttaagcaattttcttaacaaaattgcattaaaatactcaaaaaattttcccggcggcgcctatcggcatcgctggacccccattttaccatattcttgaaaaatggaaacctaaatggcaaaaaatagtaattttttggcgaaaattttgtaaaatacatcccgtaattcggaatttcaaaaaatacaccccctaaaaatcgactgaaaaaagaaaaacacaccctaaaaatcgaatttttgacttcagtaccccccgaagccaagggtctggtttttaattgataccatatcgtataatgaaatgtacagtagccacccctctgtcacggtgttatcctcgagaatggaagagtaatgatgggatttatgtacatctttgccttcgcataaacgacgatgtttttgaacatagtctgcatactttttgtattctaaccgcaaatgtgcatacaaccagagcgcaaaattgacgaatgcgcatcgaattttgctaagattatg

SEQ ID NO: 30428 - DNA, 1430 bp, Heterodera glycines
attttccccacttgaagcatttcgaataattagagtctttttcatgtttggtcacttcaaattttccaatgcgattaagtgccattcaaaatgagaaatgaaaaaaattctttaaatatatattttttaaatccttcgcttcttaatttaaaaatgccaaaaaattttcaaagtcagaatgctttataatgatcaacggacaattaaccgcttttataaaacttttaattataataatgataatacacgcgcgaccaccgtttttttgcggttccgtcgccgcaatgaatcagattagtggcacaacggtaattcacagcaacccccaacacatccaaaacaacggatttaacccatttcgaagacgtaagaaaaaaaaacataccgaacataaaattataaaaaattgaatttccttcctttatacatttgttaatgaaaagcgaaaaataattttcaaggtaacaatgaaacattgatgattactgaccacttatgaagtgcttacaaattaggactgatgttttaattatgattttggggctttatccggtgccgttttgacatttcacaacgcaataaccaaatggcttctcctctcggcccattaaagcttattagagacatcgattttttattattttttccttctttttgtgtaataacctcatatccgccttttttaaattgctaaaaaatcatttggaaaaaaatgaaaaattttgaaaactcaaaaaattttttgtcggttcaatggaattttttatatgcataaaaatttccatgccaacatggccggcagaaattgtaaggaggagcaagaagaaacggatgagaggtcgacggaattggcaggaattccggcttttaattaattgggcaatttgcaggcgcattacacggtcgcgaaacctctcattaccaacaagccgcattttttgagctcggcgccatgattctacaaaatatgtttggtgaatataaaaaaaaataataaaataaataaataatgttgttttattgccatttccccaggcgctctctcctttttgcgcttccaaaaggacgacgacctcgtcgatcggctgtcctacttctacacttcctccttcctcattatgatggccgtattggtcagcttcaagcaggtgcttggcccttccgttggcattctgttccaccccaaatcgttcagtttggcggtcgtcctttggagtgttgggtacccgcgcagttcacttcgtcctgggaggcgtacacggaaatgttttgttggtccgaaaacacttattttgtgcccgttgaggaggtcggaataattggattatggtaattagttaaaaaatgccaaaatcaatacaggacattccggaggaaattgcggagaggaaattccgcaaaatatcatattaccatatgggtgcctttct

SEQ ID NO: 30429 - DNA, 1213 bp, Heterodera glycines
  unsure (1)..(1213): unsure at all n locations
ggggttgaaaagtttattggggaaaaaagactttcaaaattatacccctgggagaaggagtgggaaacatgatttaaaattttcaatttttctagtctatctactcaaaacggttcagaattcaataaaaataacattcacggtgcgaaaaatggggtatgaaaagtttattggggaaaaaaagactntacaaaataatacccctgggagaagggagtgggaaacatgatttcaaaattttcaattttttctagtctaatctactcaaaccggttcagaattcaataaaaataacattcacggtgcgaaaaatggggtttgaaaagtttattttgaaaaaaagactttacaaaataatacccctgggagaagggagtgggaaacatgatttaaaaattttcaattttttctagtctaatctactcaaaacggttcagaattcgataaaaataacattcacggtgcgaaaaatggggtttgaaaagtttattggggaaaaaaagactacaaaataatacccctgggagaagggagtgggaaacatgatttcaaaattttcaattttttctagtctaatctactcaaaccggttcagaattcaataaaaataacattcacggtgcgaaaaatggggtatgaaaagtttattggggaaaaaaagactttacaaaataatacccctgggagaagggagtgggaaacatgatttcaaaattttcaattttttctagtctaatctactcaaaacggctcagaattcaataaaaataacattcacggtgcgaaaaatggggtttgacaagtttattggggaaaaaagactttacaaaataatacccctgggagaagggagtgggaaacatgatttcaaaattttcaattttttctagtctaatctactcaaaccggttcagaattcaataaaaataacattcacggtgcgaaaaatggggtttgacaagtttattggggaaaaaagactttacaaaataatacccctgggagaagggagtgggaaacatgatttcaaaattttcaattttttatagtctaatctactcaaaacggttcagaattcaataaaaataacattcacggtgcgaaaaatgggggttgacaagtttattggggaaaaaagactttacaaattatacccctgggagaagggagtgggaaacatgattcaaaattttcattttttctagtctatcta

SEQ ID NO: 30430 - DNA, 1468 bp, Heterodera glycines
  unsure (1)..(1468): unsure at all n locations
actcattattcagtatatattacaatttgaagattatctttacaagttaacaaataaaaaataataataatataatttaacctaagacaannatttataaataaaaattaataacttaggaataaatgtaaaatataaattttaatctatactatnaatgtaanaanttgaaaagagtannggtttgatntnaaaaaaantaaaaaatanttgaattatantaaaataaattagtttatttanttaaaaagnnttaaaaaataaaaanggnaaaatananaaatnagtatttttaatattgaatttaattaaatntaanggtaaaananttattaaaaanagnttaaaaanaataaataaaaaaaantggattttttaattaagttatgnaaatattaatttnttnaggtttatttanttatngnaanttatattgtaaaaaagaataaatnaggtantttgttttaataattttttatttgaananatgganaaggattttaaaannnnaaagngaaagataaanaaaataataaattaanttatatntaaaatngataaataatataatagttttaataaataaataaataaatttctgtatacaggaaaataccattttatgggttttgatggatgaaaaatacctatataaattttagatgactcaaaattcataaacacttaatcaaaaaaccggttaagcaaaaatatattagattaatgaaacatatttacgagtaaaataccataccattaaatatataccaagccatactcaatttaaatcacataatgtcattgatttacaaatattcgagcatcattataacgagtgaattaatataaaattttcaattatgaataatttttataaaaattactttaaaatttttcttatcacaaatttgaaaatttgataaatgtttaaatataaatatttattttaaaagtgtattgaaagaaattaagtaattccaccgattcggctaccatattacaatgtcaggtcatcgataacattttaaataattaattttaataaatgctttaaattaattgcaaataaaatacaaataataatttaaaaaattaatttgttatactttttttcagtttgattttgcttgacattaaaaataactttttattgttttttctactctttttttttgttaaatttatttcttttttgatttgtgttataatttgtttgttttagatatgaaaagaattagtattggttaggtaattgtaaatggaaaattgtatttggtaattatacatatattaaaaatactatttaattgcctttttataataaacaaatcaaaaaacatattaagattttttatcggatccgtttaaagtaaaattttaatcggtttcttattctggacttaaagaanagttcttacgcaattgcgtgaacacaaataaagtttaatttttatttcgtttcaaatag

SEQ ID NO: 30431 - DNA, 1579 bp, Heterodera glycines
gtccaaaagattttttcagcatcaaaagttagcttacaattagaggaatttttttctttcataaatagattttggttaatttaagaaaatttgaaaattttcttaataaatagtaaaaataaaattttccttggagtttttccaaaagctctaatttcctcaaaaaatgccaaaatcgtaacttagtcatttttggaaaagtcgccgcaaaaaaagcggtttatatgttttggtttctttaaaacattttttgtgaatttttcccgcgattaaattccgttttttaaataaatttaaataaaaaatcattagaaaatttttttttataatcacggatcacggaaatcacggggattttggggtgccgtgatcacggttcacggattttttttaaagccccgtgatcacggctcacggatttccgtgattggaaattcaatcacggccagccctggtccggacagacatttttcaaaaaaaaaaacttgaaataaatttgtataagaaaattttaaaacaaaattttttttttcaaaacgggagtcacgggatcggttctcggtccattttccaagtcccggtcccggttatttcaaattccgggcctatttaattttttataactattaattcaattcaattaggtgactggccaatactgtgaccaatgtttgcctgaacactatgggtttggcaaattttttaaattaatatttttattttatttatgtaaatatcatttaagtctgtccaatggcacaaatggttgcaaacattgtgactgtgatcttggcggctctgaagtcagtgcctttaattgaaaattaaaaaaaattattattaattaatcattaaaaatgaaaaagtttattattattattattataaaaataaattccgaattttttttttattaataacttaaaaattcaccgcattttttattttatttattaaatattttgtcaatccctttttgaagagtacccattgcactgctgaagaaggcaaatgcaagtgcaaaccgaactttgaaggacgccgctgcaatataaccaccagtggttattattgcccaaccatcgacgaattcactttcgaggcaaaaaaaagcaaaacacaaaaacaaatttccaattttatttaattaaattgatatttaaatatattttagggttgcttcccgaccgaccctccgggagagaaaaaaagtcgggaaacggggagggaaattctcacaaaaatctgtcggggatggctgtaagaacttaaaaaaagatatcggagaacgacagcaacggtgttggggaatatttttcataaaaagttgaaaaaaagagaaccagaaataatttatttaataaatttctaatattatgtatgattaaagctttggtaacaacctaccgtgatcttgagtcgagagtttcggtcttgactcgaaaaaagtctcgaattttcagtctcgattcccgagacttttccaaaccacaatatgggctgttttcagccaattaaataatttaaaaaactctggaggtttttccaattttttatttgttttcatcttcttcaaaaa

SEQ ID NO: 30432 - DNA, 1025 bp, Heterodera glycines
cctacaaaagtatagtgaatttaaataaatgcatttagcattaaccccttagttaaggaacaagcaaaagtcttgaacaaaaaagatcgaattaattacccggatcgtaatcacaaaccggtaccattaaaaatattgataaattaaatgacaaaaaaaaaaacaattttccaggaactagcttatggattgacaagatttgagcttctttgtggttttcggccatccgacgaaattgcattcaatatgaaaggtaaaaagttagatagaaaatgatatgcgcctactgatttggataaagcttacccggctttataatatatttacatgagaaaatttaataataaaatttatttataaaattaaacgaattattttaaataatattttattaagcatttcctgaactttgtcttgcaatgggcaatgaaaattgtgcgcttttcatcgcagcaaatgaatcggagaacacaggctttccagatctttcacagttgctaaaaagatggtgggttaattaaaaaataataaatattaatttgttttatttaattttagtttttcctgcatgatgaaacaagataaaatgttcgttcgggatattatagactccttgataaaccgaattaaaaatggaggtattacctacacatattttaccgaaaaagttgcttttatattgttacaccaaatttgtcaaaaatgaaagtatccttaattatataaaatttaaaaaatatggctttttaagttcatggctgtctgacgcaggaaactgtcaacgttttgctgaacctttataaggtttaccattcttaaccctgtgaacactctttcaagtgaccataacaggattagccgaaataaaaattgaagtcacaataaatattttcaaaataaggacatcacattggaaaaaaagaccaactggtgcagccggagaagaattttgaaatttttgctcgctttttgacatggatttttcagcttaaaattacatttatcgaagaaaagtggaaacaata

SEQ ID NO: 30433 - DNA, 1015 bp, Heterodera glycines
cgctgaacacatcttcctcagccacgctccctctcgcgctgcctcggcttccgcttccgtcgcccgtgccgccctcttccacccactcctccgtcctgcacatgcgacttgcactgactgtcacccatttgctgctcgtttcgcttggtcagtcagtcggcttttccctttgatccccccaatgtccaggaagtgttaatctccttgtcatctttgtcatcttaattcggccttacatgcggtccatcaccaatgtttacatggtatgaaaagaaaggcaacgaatgccaaatccctcacagatttcactttgtttggccgacttcatttacctgaccaatctgacgctggtcgccgtcactcagctcaacgacaagtcgtggcctttctcttcctttctctgcactttgtacgccaacattaacttcttttagttttccctcgtttaggtatcacgggactgaaacgacaggtaccaaccgactcggctaatgatggcacagaaattgctttaacttaacatatgccatcatttttagtactttacgccacttttgcagcttttccttaggcaaatacgccagcgtaatgttcgtcgttctgttggccgtcgaccgttactgcgccatgtgcaagtccaattggtgcgctcgctaccgcacgtaccgcggcgcggtgctcgtgtcgcttgccgcgtggctgttcgccgcgctggccgcttctccgttgtatttctttgccgaagtcgcgcttttgacgcttcgttcccccgtttcgcctgcgaatcgccgcgaattgcacaaattgtgcatcgcaaaatggcccaattctgatgtcgctcgatggtatgcccacttttctttcgttttacgagaatgggacggagtggcccctcgggagtactctcgacaagcctttgtttttcgttccctttaaggtacattaccatttcctctgtgctgatcttcgcccttccgttggctgtcatcttcttctgctactatcacattctgag

SEQ ID NO: 30434 - DNA, 1717 bp, Heterodera glycines
ccacatattggtcgatgcttcaatcgaatcgtccccatacccaaaaaattcattttgcattgatcagacctgacataaatattattacaaagggactgacagtcattaatagcggctcgcctgcgcgtgccagaaacaaataaaagcggcagagggcaacccaaccatggaaccaaaatggatttggaaaggaacacatttggcctttgccaatgaattgttgtgtgaccgaaatggacttttaagggaaaacagcacaaaagaaattcttaccctaaattctgaacgaaagaaaatggaaattgacccaacatttgtaggcgatttttctagggccatggtcaaagacaaagatttggaaaagctgaaggcattaatcgaagaattttcagatgtttttagcaaattcaggtacgatcttggacttttcacagccgctgagcatcacatcacaaccacaactgaggaaccaatcgcatctgcgccaagacgaatgccgtacaaatacaaagaggaattgaagaagcacattaatcagcttttagaagcaggagtcatggttgagtctgacaccccatgggtaactccaattgtcattgtacagaagaaggacggtggaattcgtccttgtttagactttcgcaaactcaacgaagttacggtgcccgacaggtaccctctcccacgccttgatagcatcatggaaagggtcggaaattgtcaattttacagctctctcgacttggccagtagctattttcaaattaaattgagtgaagaaacgtcaagaaaatgtggaattataactgaagacaaagtgtaccaaatgattacgatgccatttgggctgaaaaatgcaactgcagcattttcgagggccatggctatcgttttgtctggattggaggatacttcattggcctacgttgatgatgtgctcattttcacaaaaagtccgaacttttcagagcacctaacggcggtaaggaaggttttggagcgttttcggctttacaatctgaagcttagcccgaaaaagtgcatttttgcctcaaatgagatgaattttctcggatttgttttaacagcggaaggttttaagccaagcttaagtcgaatcgaaattctcaaagaaatgccagtacctttaaatgttaaagaggtaaaaagggtgctaggacaggcaggcttttacagacggcacattgagaactttgcaatggtcgtagagccattgctgaagcttacgaggcaatgcaataaattcgaatggggcagggaacaacaaaagtctttcgacaagataaaagaactacttactcaagccccgagtctaatttttccagattacgacaaagcatttcacattttcactgacgcatcatcgactggacaaggaggagttttaatgcaaaaagatgacgtgacgggcacattttctgccatttcctattgcaacagaaccttctctgctgctgagaggaaatggccggcagttcaaattgaaatgagtgccattatttatgctttaagggaattcagaccattcatcttcatgtcggacattgaacttcacacagatcacaaacctctcgcgtttttgctgaaaaaatccgaaccaatcagcaattggcacgatggctcattgaatttacaaatatcaggtcaaaattgtccacgtggcagaaaagcaaacactttggctgatgcactttct

SEQ ID NO: 30435 - DNA, 638 bp, Heterodera glycines
  unsure (1)..(638): unsure at all n locations
gtgccctaacagcgggcattttttgattcgggttttagaaaaaaagttaggggccctaaactgcaagaaaaagtgagaaatcggtcccggggactcagtcgtccgcgctaaatttttttctatagttttcccagatgctcctcaaaaagttgtaagacccttccaccactttcagggcgctcccggccttcggccgggagaaaatggttttagcaacgaaactccttgtcaatataacgtatatattaactagcgggtgcgtgaaccgtcggctatttagctgggaaaaagcgcttcgcgctttcggagcttcgctacctaggctgttacgggggaagaggtacaaccacgggtgggaaggtacaattgtgatcagaagaggtacaactacggttttttcagggatttttaggccgcttcgcggcctcgaaccggcgctttgcgcccgtttttaaaattttgtcgtcctctgacgggcgcttcgcgcccgtttttaaattttgttttgctttgacgggcgctttgcgcccgtttttaaattttgttgggccttttcgcccgcttcgcggcatagtacgggcgcttcgcgccatttttaaattttgttaggcttatncgtgcgcttcgcncctgttttt

SEQ ID NO: 30436 - DNA, 1234 bp, Heterodera glycines
tagtgttttttgcactagcggaccgcgggccgatagcgccttaaaatgttaactgcttgggttattaacattcctgacataaacggaccgctaaaacgcatcggccgatagctaaaaacacaccaaaacacttttataatatttaataggcactgaaaatgtttaaaaaacctcaaaaaaaatgttggcaaagcttatttatcaaaaatcaattataaataaaaattatccttttttgccaatctttccgtattttgaaccagttcaaaaacaagttttaaataactcctgtacaaaatatgcaaataataactaaaaaataaaatttcattagcttggttaattgaccttaattccatagatattaattaattttaatgtccaatattatttcgtcccaaattccatgggaaaaaatcaaacttatttttgttgcttcactttttttaatattattttatactatcagcaaaggcaatgatgatagttcatctatgttcagcaggtgtgtttaatttttaggatttactaacaattcgtccgggaccaaccgggaattttcccaagagtcgggatttctatttttcaaaaaccgggatcgggacctgaaaaacccgggaattcccgacccggtcccgatcccgctaaactctacattataattaaattgattagcaattttacatttttttttgcaaaatttgtgcttggaacaatagtgatgttattataattttttaaaagtaaattacactttaaattatttttttagtttttcgcactcggatagcaaagtttgtaaagaaaatctaacggatgaagaacatgaaaggtatgctgaatagaagtttttcaatttatacaaattaaaaaaatcattatttaaaatgaatttatatttagggactttttaaaaaatccgggttgaaaattcaaggagaaattgggtggcgcagttgatggagaaaaagaaaaatgtttaatattttttaaatgaagataaaaaagaagaaaaaaaaactaaaaatagtggcaatttcaaaaaaaaggcaaaaccatcgctgagtagtaatctccgacccctcggggaaggaaatggcggagattttcgagaaagatggccatcctaattaaataaatttgccacaggcttttcccgaagcattccaaatatttgttcttggcatatgaaggaaattgtggcggactgaccaatcaattggtaaatattttt

SEQ ID NO: 30437 - DNA, 989 bp, Heterodera glycines
  unsure (1)..(989): unsure at all n locations
aatatccaattgttgatttgtttttaaaaanaattcaaatgagggctcataataaatttttttnttgttttcaactttttcnccataagaattttttcgctttcacctttttcagcagctatttaacaatttttgacggcttttttaattataaataattatttatatttaataaattattttccattccaaatgattcccttttacaggcaagaccctttgggattggatcaaaaagccccgggcgcgtttctccgactcaatcgaccggctcaattgccacttcgtgcctttagtcctgctcttcttcgttgccatgatctcagcaaacatgtgagaaacctgcaaaatataaattgaaattaatttaatttataaataaaaaaatacatattttttaaattttgattgctcgattgagaacgggttttatccaaaaaaatgactaatttattttcagcgatttggaaaattttttgaaaaacttaattattggtcataaaattttgaaaaaatcattaaaaaatatttcaaaaattgtttaacggatgcaatttaaaattcatttttcttttatccaaataaacaattcaatttaaatattttattttacccatatttatttctttggtttcttttcagtttcggctttggcggcatggagcccatgcgttgccttgtaaggctatcgatcattaaaaatgattattaaatatttaaaaataatttttaatttaaaattgcccctttcccccacatttcagcgatctcccgaactgaatgaggaggagcgcgagtatgcgctggattattgtacatcaaaaaaccagtactacgtcgcgccggaggagggcatcccgtgggcaaatccggagcggcgggcacggcaactgggatattaccacgtgagaaaaattttttaattanatattattttttgcattttaatgaaatttttttttgatttgatcattgactaattcaaactg

SEQ ID NO: 30438 - DNA, 945 bp, Heterodera glycines
ccccaaacggccccttgaaaaaattgttttttttttttttggggcagtccccccaaaaggatgcccccagatttatggggagacggatccttcgggaaatagcttccctataccgtgtacttaaattctgcgtgggatttttgctccccatatttttgagagtcccccaaccggacactgaaaaaaatggttttttttgttttcggggcagtccccccgaaccgatgcgcccagatttatggggagaccgaatccttcgggaatagcttccctatagcctgtactttaattctgcgttggatttttgctccccataattgtttgagtaccccaaacggacacttgaaaaaatcgattttttttgttttcggggcagtccccccgaaccgatgcgcccagatttatggggagaccgaatccttcgggaatagcttccctatagcctgtactttaattctgcgttggatttttgctccccataattgtttgagtaccccaaacggacacttgaaaaaatcgatttttttgttttcggggcagtccccccgaaccgatgcgcccagatttatggggagaccgaatccttccggaatagcttccctatagcctgtactttaattctgcgttggatttttgctccccataattgtttgagtaccccaaacggacacttgaaaaaatcgattttttttgttttcggggcagtccccccgaaccgatgcgcccagatttatggggagaccgaatccttcgggaatagcttccctatagcctgtactttaattctgcgttggatttttgctccccataattgtttgagtaccccaaacggacacttgaaaaaatcgattttttttgttttcggggcagtccccccgaaccgatgcgcccaccctcaagggaaaccgaatccttcgggagtagcttcccgtatagatgtgacct

SEQ ID NO: 30439 - DNA, 1511 bp, Heterodera glycines
caattagattgaaaacatagttttcgtcaagccctttctacccagagccatcaagcccaatttgtacggtgattttcttattgacaagtaatgactgttgtcattatacattggacactctgctgattgatatttatttgggtgatgcgactggaattcgaccaatgtaaacggattgttggaggtaaatgcaaaaaaaataaaaaataatatgtatgggtttgccgtcttttgcgttcatcatgactcaagggcacataggatccccatttataaatgcaattttttttttgcctaattacctcattaattgggatggtggttgattgatgatgattgactttaacttttaatgagtccgcgcaccgattcgccactttgttttcgtggtttgttttgccaaaatttgctcaaaatatgggcaaatttctttccgtacataagtgtaaacaaaaaataattatggatgaatttttctcgtttaattgcaatgaaaaattaatccgttaacaactttattcatttcatttttttaatcgtaaaattaattttaaaaagtttaattatatttttgccgtttttaataaaaagtttaaaaaatttaaaaaaattgcttcaccaatttattaaatttaatgaatttaaaacggcaatattacagaatgagaatatgcatgctatcaatgacataattacacagaatactgtacaaatctggggtactgtatatttaaatttataggcaaagattaaacgtggcttccgcgcaggcgacgccgacgcgttgcttcaattggggctgcagctcgtcaccgatctgaatcagtactgatcagaaaacaaaagtatctcggtgaataagaacatattttaatcgatgaaaaataggcaaaactatgagaaaaactgaaattattggcacgattgttgaatttcatgcaaaaaaaacaggcactgaagtaaaataaaaaaatagtaaaaattattatttttttttaatttcaatatgtagcagaaaaactgtacatcatttttcaagtggttcttttttggcaattttctcatctaagctatgttcaaaaattctatttctctatctctggccgaattaacgattgagaaaacaaaaaaatttgtcgggtgccaggatcagtaagtaatagctcttctgtaaaatattatgagaccccttttttccccggatattgcccggtatcattttcgacacgcatattttttccattttccgctgatttgacgaatttctaaaatgcgcaatgaacgacgggatttataaaagcgtcagctacgaagcaagctttacctggatggtcacctcgccaatgccgtccagctttgtgtacgcctcctcaaccaccgtcaaattgcccgcttcatccctgcttatcgtcgtcagcttccaacgcttagtggcacagtcttgggcctttatctgtgcatatttttgagagcggatcagtttaatgaatgttaattatataaattaataa

SEQ ID NO: 30440 - DNA, 1394 bp, Heterodera glycines
aatggtacagtaatcaagaatccattagacggtgatcagttgatttctccattgaattttgttcagtccgtgccccccgtgcgactcggaggacgaagttgtgctgaaggtgggccccgagcagttcactgtctccaagcactttctgatgtccgtgtcgcccgtcttccacaaaatgttctccgtcgacatgttggagaaggcacagggcgaagtgagcctggaggaaaccaacggggaggagttcggcgcgtttctggacgcaatctcgcccaaaatggcatcgccaaatcgtaaaaagaaaatgcacacaaatgccaaaaatgttccgctgttcacacagctgccaatgtgatgggaatgctcaaattggccgaccgtttccaagtcgatgcgttgcgcaaccgatgcgaggcgcatctgatcaattgcgtggagatcagtctgatcgaacggcttttgtgtgcggaaatgtaccgattggaaaagctaaaggtcctttcaatggtgccgagtcgttactcaaaaaccatcaaatggaaaatttttgatagaaattataacttcgcccaaaatgaatataaatttaaaatcttgatatctttcgatagccctaagtgttttctattgtcctgcataatttcaaaaaaattcattaagtttcaaaaaaagttatgacctgagaaactcaaaaaccaagtttttttttgttgcttttttggtcataactttcttgaaacttaacaaaacgattttaaattttgtaggctattagaaaacacttagagctatcaaataatatcaaaaattaaaaattggttgcttttgagcaaagttatatcaaaaattattctcatttgatggttttgtgtaacgtcatagcaccctttcaatttgattacaatttcaattcaaaatgtattttgcttcgttagaatttcattctgaaaagtctgaacggcgtcggaatgcgcgagttttacgaggagaatcaggcggcactgaatttgctgagcaaagatttgctcatccaactgacagttcgcatctgttccaggtcattcccattagtcagtttttctctccaattacattgaatcaaataataataattatagctaataaattcaatttttgtttccatttgatcaaacggtttctgtgaattaatttcttttttcagttcgaaaatcgatcggtcggcactgtgccataattgcacgaaaaatttgaatgaatgaaacgtaaaaccgaagggatttgaagaaaataaaagctaatgtttatatttaaaaggaattttttgttttgtttttctttacaaatttaaatattttgatttgattataaaatattctttatgtgtaaaataaatttcgaaatttgagtttttt

SEQ ID NO: 30441 - DNA, 1899 bp, Heterodera glycines
gagcggtctatgacaaattgtccggctcacaatcagcatcttctgctccgccctcttcttctgttgctggcgccgggggtggtgccgattccaatgtttctgctggcgctgaagttggtgccggtgccaatgccactgacccattgtcctccgcttgttgtggtgccaactccgccgactgtccaatgtcctcagtttggtgtgccaattccgtcgtctccccctcttcctcttccccctcctcttcgtcctcatcctcgtcaattatcacagagattatttttcgttcctcgtcatctccatttctgttgttgttattgttaccgcttttgtcctcatttaatgatgatggtccacatgaagttccaaaaccaaaatcatgttccatttttatttgtttatatctagttttctaattttaaaatttgcaaaatttttaatttgttaaattcaacgattttgtttttatttattagcacaactatgttaatgcttaaatcgccggcatggcgtccggcacagctgcttagagaaaagaacaatgatgtttgtgtggaaaatgtccgtgagccaattaacgagagaacgaagaaaaagagagaaataaagaagagatgaaaagaaaattataatttggcgaaatgtttgaaatactgtattttcaaaatcattacaacattttcttccttaacagtagagttgagcgggaccgggacgagaattcccggtcctccgaggtcccggattttgaaaaaatatcttttagactttggattttgaattttatcaaaaactaaaggggggacgacccttttgttttgtaaaaaaaattttttgataaaaaaaatctagaatatatttattcgccataattgtgtttgttatgcttaatattcatcattatgtgtttaaataaacaaaaaaaaattgaccaaaaaaggtgcaaaattttcaaaacagtcctcttttagacactagcgccggatttttcatttcaggtattttagtgacaaatgaagattttttatggctgaaataaggattttcaaaattttgagatcgaaactctgccttaactttttggtggcgcacctgtttggaattaaaacgactttgacagaatttttaactctaactatgaatttcgaattaactcttaatacatatgccctcgtttaattattatgcaaagcatggtcattaattagttgggatgtttctcttaccattaccaatttctaaaagttgttcagcaaaatttttcgcttcgggatcagtccgcatgttttggtgtaaattaaaaattttaaaatgagtccacaattcgcttttttgtaaagttaaatctaatatttcacttttcgttgctttatttttaataggcaaacattgccgaaagtcaccacttaaaattaaaaattttcctccaaaaaccaatgtactattatgcaattctcgtaactttttgtctattatttcaagaacatatttaggtgccataggtgcttcgtcgaaaataaaaacatccgtatttctgatttcgtttgcttcattacacagcggcccaattttgggctccaagtacaattatgctggatttttatttagtaatcagaacgccaaaactttgcaaaacttaaaattttccggggattttcccttgtaaaaatggaagagccgatctcgagttagaaaatatactttcaaaaaacaaaatagaattcgatagagggggtcgaaatatgggcctatacaaaatttgaagaaattttaaaagctagaaaatttttttgaaagcgacgaacatttcaataattttaattcttttttagccaagtccacaatttaaggccaaaccaaataaaatttacaatattctccagaattttcccttcaaaa

SEQ ID NO: 30442 - DNA, 1413 bp, Heterodera glycines
  unsure (1)..(1413): unsure at all n locations
gggagagagagctcatttcnagcacaggattcatatacacacgcggataaaggggtttggttgggtgatcgagggggaaaaaaggcacaaattgagggaagtgcctataactgaaaagacatacgaagaaaattctcaaaaaaattccataaaatttagcttattaattgtttaacaattgaaaaagtataaaaaaataaaaagaacaaagttttaagcaatttcagcaaaattcctttcccacatggtgctcaattggaaaaactcgggatttctggcattcgttgcctgacgctattttttagataaaagacattttttaaaaccaaaattatttcccgatttggaagtaataattttaaacaaaagatttttccattattaattataggactcggcagaacgattttttactccaaaaccaagtccgagtgtttccgattggactttttcgagtgaaatggtacggtgataatcaattcaatcatttttcacttttttaaaattattcataaaataattctttaggcaaaaaagaataataaagccggaattaaaggtaaaataaatttgaaaagaaatttaaatcagcgaaacttttgagaggacactgcgcaacagcaaaggtcgatttggggtgatttgaagaaatggatgaaaggtatagtcgtaaactgtaaacatttaccgttaattacatatttaacagtttcagaaaaaaatctaatccaaattaagtgattaaataaaaagaaatgcttttccttttaattttgaaatgaaatttgattgtttttttttaatttagcggacaccgagcaagagcctgtcaatgagcagcaaagctattttgatcaattgagacagctgatttttgatacccccgaattcgctccccatggattggaaacagtgaaagacgaagaacaaacataaagcgcaatgaatacgacgatcatttttaaacattccattttaccgtaagaagtggttacgatagtttcaagagtttatttatttatttgttgagaaaattttaccctaatttggctcttttaaaataataagaaaaacaaagtaatttaattctctctaaatcagtaggacaaagacttttaagcacaaaaatgataagtaaggacttaattagcatcaatattactaaattaagcacaaaaaaacaattaaggaaaaaacgaaaaaacattcttagaaggtatatttttttgaaaatgaaaggttgatccttaagggtgaattttttgttcatttatgttaagaaacactaccaagtctgaaattgtttggacttcggaaattgttaaaaaataataataaaagtgctaaaaataatattagaatttttatcgcacctagcttanaattttcattattttgctaataataattcat

SEQ ID NO: 30443 - DNA, 1776 bp, Heterodera glycines
aaaactgggctggcgccgaaacggtcggcgccgaaacgtttgggtcccaagatataaacgtatccaaaattacaagtaattattttgttgtattcaattaggggccggaagtgccaaatgtctctttttgctaatttttgaattgttgatttttgaaaatattatcttgcaaaagaataaaaaaatttaatttatacaaaaggcaaattttttattctttaggatgaataaaataaataaaaagaattttatcattaaggtcattttttttatattttccaatttacggaatttttgcatgtaaaacattcagaaattattatattacatacaaatttcaattcattttcaaattcatagaaatggcggaccattaaaattaataaattaagaaaaaaaatatttaaaatggacaaaatgtgacaattattttgttacttaaaatttccacaaaaggatcatttttgaataaaattattttaacaaatcagaaggaaaaagatcattatgtcattagatagacaaataagttttctatattaactcttacaatttcaaaaaaaaaaaattttttttggtttttgctttgtaaaatcacccaaatgttctaaccattttttacagctaattgggtcattccgttcgcaattttgaattttgcgcaacccaaatataacatccgatggctttaacaaagcacaaattaatccgacccatttattttattttgtgtgtcaatgtcaagtcgttttggtcataattactcatccaataagaagaaattgaagtatatttaagcgaatggataagtaagcaaaaccaaaattacaataaaactttatcattattttaaaaatgaaattttattgacaatgaaaacttttttaaataataaattatttttcgatatttatattttaatctataaaataataaatataaatttttcataagtttttttttggcaattttaaaatatttccattcttctattatttttcaaatttagcacagtaaaacaatgtctctcatgcgtcaactgctgacctttttgtccatcattttgctgctgctttccctcgtcactttgtccgatgctcaattatttggcggatggggtaatttttacataaatattaagatcaaattaaaattttaaccaaaatttattgtcaggatggaactccggcatttacatgcctggcttttactgtgcacatgccaaagtgtgcggataaacaaaaataaaccgaccaatgatgacggaatgtagagaaataatttattttttaaatttattttattgtacaaatttcttttgttatatctattttaaatagcacaaattaagatattcaatttgttttggtaataaagtcaattcatatcattaaataaatcaatcacttttcctattaggaaaatactaattagtaaaagtccgtagcactttcatcacaacggacactttgacacattaattaggtctttgttttggtaaggaccatcctaaaacagtaaataaattggagaaaataaccaccacaaaaaggttgctgaataacaaacaaattaggaaaattttgcgtctctcaagaccaatcatggcccaatttgagtgaaaacacattctattgagggctcccatttgcgctatttctacgatttgtgtatttgaaaaaaaaataaattttaccggcagttttcagcacagcggaaacctcaaaaaggaggaaagcaagaagctaaaattcaaatacacaaacccgaattaaa

SEQ ID NO: 30444 - DNA, 1828 bp, Heterodera glycines
  unsure (1)..(1828): unsure at all n locations
tgagtttaatgtgcttttttgaagtcaanttaggataccctacccatgccaatcactgtttaggacccgctcaccggcgacttggtttctgttgcggtcgctcgtcaaacgcgggcatttcttccgcccgccaagttcgacccgttagcaccgcaatgcgccgagaatcccgatgccgaaatcccgtccctctacgatgtctctgtctttgagaacaaatcgcccgcatttgggccattgctggagataccgacaacggcaccgccccagggcttgtccgaacttggcacaattggactcggccgagagtttacatcggtaggcgccgcgagccgaaattgcgaacccattagaaccaattgagaacggggaattttaattaggttgacaaatggcaaaaatttataatttttaaataaatcaaaattattcaaaggttgggcgatgtgaagttgtttgttttacgcccgagaagaccggcagttttgacacgttaagcccttctcgggcacggacagtaattgaagtaataattaaaactaaatagaattcaattagcctgcctattggatttaattagcctttgccatctttgcaatttgtccttttgcaaaggcttgggccgatcgcaccgccgcactttccgccatgccaaacattcagcaggtgttcccgttcgaaaatcggggcgaggtgatcggcgtcacgcttcaccatccgcacggtcaaatctacgcttacccgtacattacgccaagaacgcaggcactcattgcttcgctagaccgatacggtaacgaaaaaacagctacagtaatttttgcttaacagaaaaaggacagaaaaggaacagctgaactgagagagagagagagagaagtgagacagatagagagagaagaagtgagagagagaaagtgagagagagtgagggacagaagaggggggagggagaaaaaattactgtcaaaatctttaagatattaaaaaactctaccaaaaggatagaacttttgaactttttgaaaataaaaaaaattatatgtagaatagtcggctacccgacttttgggaatttgcaacttggggacccgacttttgagcacccgtcttttgggaattccgacatttggggcccgatcgacatttggggattttaataaaacaaaaaaaaaacattaaaaaatttaattttatgtccaaaattagacaaatttacgtctgctttagccagagttaatttcattgaaaaaaaaattttttttgattaattatgttctccggactgagatttcctttgctttttacgcccatggaaaattcagttattaagaaatgattgtattgtctgaatctaagccaattgaacaaaaataatattaaaagagtcatgcgagataatttactctagacattgggatccaatgtcgaacagaatcaaattgaaaatcattgcgtcgaccaccactctttcacgaatattagatgcgatcggatgctcacaccattggtgttatttgctaaaactctcctgtgttgacctattcccactgaacgggcatccaactgctgatcacttaccatcgaacggcactgatcaaacggcatcctcaccatacggacgaaatgcttctatgatctgacgattcatattttgtgacaacgatttcaatcatcggccccaccgggaacgaatctcgcaaatcacaccgcgaaatcatccaacggcggaagatcacacaaatcctaacggagggcaaaatgtaacaacatgttcgactttatattgattcaccatgcacaatatcagatgaaaaatattttagaa

SEQ ID NO: 30445 - DNA, 1153 bp, Heterodera glycines
  unsure (1)..(1153): unsure at all n locations
ataatgggatgtataaaggcgatgtagatggaatggaagcgctaaattgttgagagagcttttgangcgtaattacgatttttacttacaccattttttgctaggcttagatcacatgcgattttcggcactctgataattttagcgttcataatgggatgtataaaggcgattgtagaaggaattggatgcgctaaaattgtttgagaagctttttgagcgtaattacgatttttacttacaccatttttttctaggcttagatcacatgcgattttcggcactctgataattttagcgttcataatgggatgtataaaggcgattgtagaaggaattggaagcgctaaaattgtttgagaagctttttgagcgtaattacgatttttacttagaccatttttttctaggcttagatcacatgcgattttcggcactctgataattttagcgctcataatgggatgtataaaggcgattgtagaaggaattggaagcgttaaaattgtttgagaagctttttgagcgtaattacgatttttacttagaccatttttttctaggcttagatcacatgcgattttcggcactctgataattttagcgctcataatgggatgtataaaggcgattgtagaaggaattggaagcgctaaaattgtttgagaagctttttgagcgtaattacgatttttacttagaccatttttttctaggcttagatcacatgcgattttcggcactctgataattttagcgctcataatgggatgtataaaggcgattgtagaaggaattggaagcgttaaaattgtttgagaagctttttgagcgtaattacgatttttacttacaccattttttgctaggcttagatcacatgcgattttcggcactctgataattttagcgctcataatgggatgtataaaggcgattgtagaaggaattggaagcgctaaaattgtttgagaagctttttgagcgtaattacgatttttacttgaccattttttgctaggcttagatcacatgcgattttcggcactctgataattttagcgctcataatgggatgtataaaggcgattgtagaaggatttggaagcgctaaaaatgtttgagaagctttttgagcgtattacgattttac

SEQ ID NO: 30446 - DNA, 1599 bp, Heterodera glycines
attcattacccaaaagttttttacaacccatattgccctctcatttcttgcagattgaaagccatccattgcctgccggttctcggcacagcaaagcactaatacggtgtttgacacacttcaaaaaataattcattacccaaaagttgtttacaaccacttattgccaatctaatttcttgcagattgaaagccatccattgcctgccggttctcggcacagcaaagcactaatagggtgtttgattcacttcaaaaaataattccttacacaagttttttacaaccacttattgccaatttaatttcttgcagatttaaagccatccattgcctgccggttctcggcacagcaaagcactaatagggtgtttgactcacttcaaaaaataattcattacccaaaagttttttacaaccacttattgccaatctaatttcttgcagatttaaagctatccattgcctgccggttctcggcacagcaaagcactaatacggtgtttgactcacttcaaaaaataattcattacccaaaagttttttacaaccacatattgccaatctaatttcttgcagattgaaagccatccattgcctgcggttctcggcacagcaaagcactaatacggtgtttgactcacttcaaaaaataattcattacccaaaagttttttacaaccagttattgccaatctaatttcttgcagattgaaagccatccattgcctgccggttctcggcactgcaaagcactaatagggtgtttgattcacttcaaaaaataattccttacacaagttttttacaaccacttgcttttttgtccatttattccaatcgactatgctttaaggttttgtctttgactttgcttttttgtccatttattccaatcgcctagtgctttaaggttttgtctttgactttgcttttttgtccatttattccaatcgaccacgttaattcattctctatacatttagtgtcttatttcatgaaattatatataatttaattttaaataaagaggcaaatttttacagaaaataaatagacgctgactaattagctaacatttataaagaaagtagaaatttgattaaatgcatatacaaaatattacttttttaaaatttgtataaagttcctagtcgtatgtgctttgcgttggttggttggcgtgggtgagtgtggtggttgggccgtttttgcgatattgtggctggaaaaaagatgcgatttcgctatggggagcgcggccgtctgggttcaagtgcttgcttgcgcttgtgctcggcattgaacggtgatggctgctgctggggtgccacctttgtcgtggcctcagtttctccagcgattggcagctgtcgaaatgaataaaacatgcagctcgtctgtgtgttaaagaaatttggcgagttaattgacttgtgtaaatgtggcctaaggcacaaatgctgtggggaactcagcactggggatgctgaacctaaagttggtggtggtgttggtatacgagtgagtggcgtattgccatggttgacaagccctaagagttcgtggatcggaactccttgcctggggacccagtgt

SEQ ID NO: 30447 - DNA, 1633 bp, Heterodera glycines
  unsure (1)..(1633): unsure at all n locations
gcaagnacataagagtaatatttttactttccctaaatccaaaatctaaaaaataatgatggataacagaaaaaaacaatttatggggaagaggtgaagggagcaaaaaaaattatcaagaaaaattattttttaaattgctacgaatgactttaaacaacatacattcagaattttcaattttattattttttttaaatgggatttgaattatctttgagtcattgagctggctgatgataattaattatttgcttaaattttcaaaattttgggcagcctatattttgaactcgttttttatgtgggacaaaattttttcaaaaattgaaaaagtatagaaaattggaaaatccaaaaatattttaaagaaaccctatgggatggaaaattaattataaataagttttgttctcagctttatcctgcagagtttgatgagcttctgatcatttttcggataattatttggatttaatttatctttaaattagtaattaaaaattcagaattacgggagccagagcatcatagaaatagtgcaacaacagttattaaatggaataaacaatttggaatgattaaatttataaccaagaccaataggcatgggtttttgcattaacttaatagtcgggtgtctctttacattttaatcgttttcctttgttttggtgattactctttttctctaattctcttctctctcctatggtgaatgcgcatctctctgcccagggggggcccagatttctgtccctatactactgcagtcctttccttttccgcccgctcacctgatggtccacgcccgaggcggtcgcaagcagtcccccgctgtttgccagctgaacggagggtccgtcgtaacgaatctgtcggccggacatatccgataaagtgccacctaaaagtggcaaaaaactgtttgttgtaaaaaaaacaacaatttctaaaaagtgtaccggcagccattagcaatgcctcgggcgcggcaatgtcccattttttggtgccccccgcggcgtaaacaaaagcagtggccccctccaaacagcgcaacactttaaagcccgcgcctcctgcgcgttccacttcgctgatcagctttttctcctccaacgcgtccaatgccttttgcacctaaggcggaagaaggaaaaaataccaattatattcaattaaaataaaattgaaagaacaaaaagctgttcgaccaattcggagcggctacggaaggtaatgacagcgacccgcggcggcatttgttcattagctaaaaaaaggggggggggggggtgagaatattcggcagctcccggaaaatgcgtcaattccgaattcctgacacaaataaaaagtcgaaatacaaatttaaattttacccatttttggttctaaaatgcgtaaataatctcttattgcaggattggtgcctttcagttttgtttccgtgtttttcaaccgattttgaacaaaaaacgggtaaaattgaaacttggactttcgacttttagttcgaattcggttccgggattcggaatttcaacgaagttcttacagaattttactttgtttacactacttaatgctacagaactgttttaaaaatgtactgatagattttccggtc

SEQ ID NO: 30448 - DNA, 1411 bp, Heterodera glycines
  unsure (1)..(1411): unsure at all n locations
gctactcgctcncgcaaaaagttttgaaaattttgatggttttgggtttggagaaggcacnncctnggttcgagtgcacaggtcgagttcattattctgttcaattatgtagaattttgaaaaactcttccgttcttgttgngagtattaagttcgacaattttacggaccctagttaggttagtcactgggctttttcttattttcctatgccaactttgtcggtacaaaaaataccaattccgacaatcgcggaaatagcaacagaatacgaccaacaaacatcacatgcattttaagaataaaagacaaatttatttaaaatttaaagctagaaattatattaattgtttgtgtaagttggtcttaatgaaataatttcgtaattattattttttatctttaatgatgtcatgaataaaaaattttgaatgcaaatagaaattatatgttggcaaataaatgaagaaatggccggaaatggaaaaataaaaataaatgataaaaaacattaaaaaaaatcggattctgtcgatgtcttttccactctctctctttggccaactatttactctaatatttcaaaataaatttggcatcggagcatataaaaagcaattgaaaatgccgaaaaaatatatctatcatattttcatttaaattatcctcccaaaatgcgcaccattctcttcatagccatggtttgcttgctgatggctgtcctaatggaaatgggtgggcaaaaatattttattaaaattataaaaaaatttataaatttattttttttagcaaattcaaaggctgtcaaaaaagacaacaaaaaaggtcaaaatgaatttcaatgtattttatataattaaatattcccttaaaggagcagtggcggcatcaccagcaaaaggaaaagcatcgccaaaaggaggcaaaagcccagcaaaaggaaaagcggcaaaaaaattgaaacctaaaaaggatgctaaaggcattaaaggtggggagtgaatttaattttaataattttaaattttgttgacattttgaaacagctaaaaaagcaaagccagcaaagaaaagcaaagcggcaaaagcagtaaagggagcgcctaagacaggcaattaaataattaattaattatgcaattaaatagaaaatgtagtcaaaaaactcgcatttgccaaaacagcagcgcaagtgaaagaaataaagtcaccaggtaaaaaccaattttaaatttcgaataattataattagagacacttttgcagaattttaatgtttttaaaatgtttatttagccaagccaatggttctaaaagcagtgccgccccaccaaatgcatttaatgaatgagaaaggtatgcttcaagagccaattaattcatattttaattttccaaaannatgact

SEQ ID NO: 30449 - DNA, 1366 bp, Heterodera glycines
  unsure (1)..(1366): unsure at all n locations
atcaattctcctttttatattgtttttttcaccgccctcaaaggatgngatgggagnggnggangagaagatggcctttaaatgcttcatcgtgaacatgctcagccgcttgtaccgccgacttccatccccactcatatccctcaacaatttgctggcaaaccccctcaattgcctccccaattcaacatacctccgccctccgtcccctctcatcagtttcaaatgcaacctcctccattggtgccaggccaatttcaccacggatttccatccatgggcatggctccgccttcgctactgcaacagcagcagcaacagacgccttttacacaacaaaagccgacacccatcgctcctttggcagtgcctccggcagcgaccgctccgcaacagcagcaggtggtggacaggccgactgaatgccttcctcccgccagaattggtctttacgtatcatttaggctgttagtccgcctccgcttagccaacaagcacagcaaagcaacagcgacaatttggacgaggagcagcaggcgcaaatgcttgtgagtgttcaaatgaaagatgtccttttatatagtagtgacaaattacccctcaaacaaaaaacgatcaaaaaactcagtaatttcggttatgtgtaaacggattttattaaaaaaagcaacaaaggccaaaggaattcacacaaataggggcacaacatttggcggttgcctcttttaaatttcgcgctgttttcacatataaccgaaaagtaccaaaaactcaatcgaatctcaaaaattcaagatccgcgtgctgcaactcaccgatgagcaaattcgtatgttaccacccactgaacgtgcccaagttatcgaattgcgtaaccaacttagaagtgcggatgcaaatgcgtgaccatatcaaatcgcactgacagaggtcgaaaagccaactgatctcttctttctccatcaacctatttttatataatgtttgatttttttgttgttgaaaatcaagatttaatgaaaaaatttttactaggtttccaaagttttttttatgcttgacccttttgctagactattcggtaaggaaacatttgcaaaacgtggataagaaaaatattcatttaaaacaaatggtaaaaacagcatcggtgaggttaaatatcattccgactgtatcttttctggcgcaagctccataaaattaaacaatttataggtttttggggtcgctgatcatgaatccagcatccatttcgaacttgtaatttgttgcaaattcctcgtagtaagttttggagctcatccattgattttgcaattctttagataccagcaattttggtgaaaaatgaattccgactttt

SEQ ID NO: 30450 - DNA, 1626 bp, Heterodera glycines
  unsure (1)..(1626): unsure at all n locations
ttttttaatttattccactttttttactatttccgtccatctctgggaaagcgattactttttcagattaccgttttagtggacaaattatccacaaatgggcaaaacgtaggtgaatcatcgccactcattgggcaaagcagaaaattccgatgctaatttgtgcttatgtgggcgaaacggacagaaattgtggggccatcagcagcagttggggatgggcaaaatggtgattcgccacttttggcattggaattcaaaaagccaatttctgtgttaaaaaaaggcggacagattgctgctaaattgggctggggcccccgcaggcggacagatcggtcaaactccgcccaaatgagctgcataaatagccgctgatggccaaaaaattaataatatgattttcagtccaatgcgccaaaatttgatatcatttaagatgtaaaccttgcctcaattgaacaaaacccaaaaaattctttagaacttcctaaatggtcttaagacaaagggaccctaaaccgagtccgaccgacccgataactatggatggaaccacggatttggcgacgaacggacaaagtgcatccaaaaccaactcattggcaaaacaaaactgagaagaatcttttttgatccggaaaaagcgacaggcagcagacacacgcagttaataatatgcgatagatttttcagtccctaattgcgcccaaaatttatgtcatttaggacataaacctggccaaattggaccaaaaacgaaaaacttctgtagaaatttggatttaaaatttgtcttaggaatttctggatcagttcttgagaacgggtttttcaaaagttggccgggatcgatccgggaaagacaccagaccgggaccggatgaccggtactcaaatccagtttttaattgtattttttccaaaaatataattgtcaattctgctttaattttgtataaccaaagtcagataacgccgacattttctgtctgaatggatgccgaaccggcggctgttcttctcgtgcttcatgaatttgagcccgcttgtcacaaagcaggtcaaaatttgtcttgccaggaatgccaaggcgatgattgttgcaatgcggataatcttaagctcataggatgctcctccagtgaaagtcacggtaaataaaattctattgattaagaaatatttaaatttttcaatttcttaaacaaaaaaattaaattattttattttttgaaaagtgttgccgtcgcccattcccggacatttgcaaggtggtaaatgattaatcaaattctttctatggatgtaaactaattggtctaacaattttgaaaattttcaatttttttcgaatttttgcacaaataccatttaaaatccttttaaaagctttaataaaaattagaatttataaaaaaatttctttataattttcaagaaaaaaggtaagaaaaattattgaaaaattttaagttgcgcgaatggaggagcttcttaaaaattatgaatgcaatctgaatgataatcctcgtccctatgactgcttcgattggttttgggtaaattgtttttccaattaacaganattagtatttacatagtccaatgtttagtttgctcgaa

SEQ ID NO: 30451 - DNA, 1302 bp, Heterodera glycines
  unsure (1)..(1302): unsure at all n locations
attttggggtcagcattttgcttaatcataattaaccgttgagaaagcagaaaaaagataatctaatttaaattatgtaggttatccccctccttttggagagcatgagaaagaggagaaggatgatgagaaagaaggaggcgaaaaagaagtcgaagaagctggagatgaagaaggaaaaggggagagggatggagacgaccagcagggcggtgaagagaggcggaagaagaagggcacgatgatgacgaagacgagagggttgattaagaggaagagcaacaagaagaaggagaaaaagtaacaaaaaaattttaacaattccgttgcccaaatgcgtggttttcatacaacgaatcataattcggtcaaatgattttgtaaaaattataataacataaaatcagtgccaacgtccaaacccaggaaatgttgaaaatgaggaaattggcactgggtactgcctgctggggctcaccttttggtatgtttattgctttgtttggggctagttaaagaccacaaacaacttgggttaacacttattttttgtcccgatttattttatttaactctgatttacataaatttttgaagtttgtttgcataattaggtttttggatttggcggcaccacccaatgctaatgacaccgcgacaaatgccgaacagagcaacattgcggtcaaaattaaccttgacgggttcgtcttttaactaattgtctgatctaagctataaatataatttctattttcaatttaaacagaaaagcgcttaagcaattaactgtgccggagttgaaatgtgaaaaagaattgaacgtcgtccataagtagtgaagaaattaattgatttatgagaccctttaaatgccatcctcatattgacttgttcatttttttgttataatttgaattttaaaatacaattcaaatatgcagatttttactttttaatgtaatttaatttctctcaataattgaaacaataacttttattcataattttctgaaatggggattgattcttaaatttagcgattttttgtttcaaaagtataacaaatataattgagatcaataattaaactcattttgaaaaattatttataatcaatcattaacacagaaaaatgattaaattaaagagctttttgttcttgcgcatttgactgaataataaaaattaagcgaaaaactagattttttcaacctattttttatttttaattatttttttaaatagaattgaacncatttttcaatgtccgtcangatttttggttttttcatttttact

SEQ ID NO: 30452 - DNA, 965 bp, Heterodera glycines
tgggtaattaatccgaagaaagaagtgcagtgtggaagaatgacgcccataatgaaggaaatatttgattctgtgcgaactctttgtggcccctctctgactctccaatgcagcagtagaccatttttaccactatttttctctcattcatcgtcttctcgtctctcctttattataagctgttttccaaatccaacaacacccttttctccctcttttctattattcatttctcatttttattaaccatccaacattcattctacaaatttattaaacctctcaacattttaaatcaaaatcctaataaaaatttcatttaatttcttcacctcttattactccaaaattttctaaaaattaatttactatttaaaattaaaaaattcataaccaaattcaagaatttttttatttttaaatgcattttttaccacatgaattatgattaaatttttgcgtttcgaattcattttggaattaagaaaaataaaaattgataatcatttgatcatttttagcgcactttaagcaccgccgttaggcagcgcagttccaaaatttattccatgccacagatattatgggcaggacacgccaagtacctcaaacttgggtaattaaaccgaagaaagaagtgcagtggggaagaatgacgcccaaaatgaaggaaatattcgatgctgtgcgaactctttgtgacccctctctgactctgccaatgcagcagtttacaattttaacaactatttttctctcactcatcgtctgctcgtctctcctttattataggctatttttccaaagccaacaacgcccttttctccctcttttctattagtcatttctcattggtgttgacgatccaacattcagtgtacaaatttgataaacctctcaacattttaaatcaaaatcctaatacaaaaaggttgaatttcttcgcctcttatttgtgcaaaatt

SEQ ID NO: 30453 - DNA, 1354 bp, Heterodera glycines
  unsure (1)..(1354): unsure at all n locations
tgccttctcacggttttcagcaatctgcaaataacaaaattatttgaaaaagaaacatttaaacgaccttgggcattttgttcgtgtctttggccaattcaggtgaaatgaaacagcctaaggccttttctccagtgcatttcataatggcacccaatgcagcaaaggatgagtccctcacttcggaatcggcatcaaagccatgctaaaaggccgaaaattaggctaaaaagtttgaaaaatgtgactttgctcagaattgccaccaaatccttgagcaaacccttgggaatttcgttggccggaagggtacggaaaacgcggtaaatgaacaaatccgtctgtgatttctgactcggattctgtttggaggacagagcctcgagcacggccttgcataggtggtcgaaactctataaaaaacaaattattttttaaacattcatttcgattggattatccatttttacggtatatgttgcgatgccatcgatgcactcgacgagcgcatctctgagcaactgtttcttctccttgaacttggtgaagatcaccgggacaaccaacgacacgtaaggagtgaatttggaacgcaatcccttggcgaaaaacatcacgcatttggtggcacttgcggcgacaatgatatttgcatcatttgccatagccttaaatatttaaataaatataattagattattagaatccattcattttttgatggttgaccttcgtcagatgttcgatgacctcccgataatttggcgaatcagcaagtcgcggcgattgcaacaacaattgttgcagtgcgtccaatgcctcttttctttcctgccacttttgactttcgaaattgatgttcaactttgatgagatgtctacaggctctattaggtcataaggatccatttgggatttaggcgaaaaaaatgtatatgaaaatggtagccaactatctaaatgggtcaagcccagtgtcagcggtaggggtcaactccgtctggccaactccgtctcagcaatgttcaaaaagctataacttttttctttgttggccaaacttcacaatcatggtatcattcgaaagccctagatgtttagaagatatttataagctatttctcagtgattaatcagctctcaaaaaagttgtcagtttaaaaccgcaaaaaaggcagaattttcaaagttttttatttctatctttttttatagttcgaaattttctgtaatttttagtaggctaatagagcctgtgaagagctttcgaatgatatcaagattgttttgattcggtcaataactccaagangtatattgactcnaaagtggctcagaccgagttggcccgttc

SEQ ID NO: 30454 - DNA, 893 bp, Heterodera glycines
  unsure (1)..(893): unsure at all n locations
gcagttgctactaaatttgaaatttggatttgcccttcgtttctcgagttttgttttcttgtgtattggtttgctgatactttttgaatgggtcttggacaaattaacttgttgtgatttccttcacaattataacacatttttccctacaatttctaatttcgtgcccttttttcaaacagcgatggcatctcccttgctcatccataatttttattcgagagtctctgtttaatatttgcctgcaaagagatgcccaatgtggtccttcacataagaaatatttaggatttggcaaatttgttctattgctctgtttatttcttatttcttgtgttaaaaaaccctttgattattttgaggatttctttcttctcttttaatatattctctgttattatttctgtaccgattattttgccaattgcttcttggcctattgaattgtctttgtccactatcccagttttcatgttgtccaccaattgctcttgttattttggtacatctcattgcttcttccctcatggttattatctcttctaatcccttaattaattgttcaacattccattcaattccactatctttctctgcttttaacccttctagaataattgttctcggaaatttatttttgattgtcatcattacaaagtctttatcaccggcaaatcctaaattgtttaactgccttacgactctttctatgtcttctaaacagatacgaagtgataccacagactcatttgcttgtgcaaatttaaaagttcattttgaagtgcttcttttatcactttctcatttccgaaaagtctttttaatgcatttacgactaaagcataaatttcctgctgtcgntgatagcctctcattgctcgggaggctttccc

SEQ ID NO: 30455 - DNA, 1565 bp, Heterodera glycines
ttttttttttgtcctttaaagagtaatataatacatgcataacacattccccgaatctcacattcattcgtccattttcattctttcatcagcagaagcagaaacaggcaaattgatgggtgggagaggaagcgccggggtaaaaagcgtaaaaaagtaaaacaaaaaaaattcgtcattcattttcaacattttcacattcatttgacgaaagagagagtgataaagggggaagagagaagaaaagggggagagagagagagagaaagggggaagagagaggggtggagaagagagagagagatgagagaaagggggaagagagaagaaaagggagagagagaggggggaaaagagagagagagagagagaggggtggagaagagagagagaggggggggggggaagttaaaaggagagggatggagaggagagagatggggaagagatgagagagagcaagagagagagagagagagcgcaagagagagagagacaacatgagagagagagagagagatagagagacatagggagaaagagagcaaaagcgagcgcacacaaagcgatgtgcttctcttctttcgttcattttggccgcttttcctattcactttttttttgtccaaaaaaaacctgtgtcctcttcccattcattcattccttcgttcaaccaaaggccataagccctccgtcctcccgggggatgggctcctatatgctaaagctaaaatgcacatatacgacaaagaagcaacaaacacgacacgacgggagagaaacaacatgtgttctccttttaccacctcctcttccgtcgtcccctctgagcgcggtccttttgggtacaacagtgccgttttgaaatttgggtcccacaaagctaaggaaggccatttgagtcctacgccatagggtcatttgtgtacatcaaacgccgtttgggctccaggacaccgccatctgggtacaaggcaatttttttggcaccgaggtctgggccaaagccaaggaggtattttttgggcatgtccatctgagtcccaagccagtcttttcgtaagcgccgatttttcatcgcaaagcgaaaaaatatagcaacaaaatatttagaggcattttgtgttgcctttattgcattcgccggtccatgtcacatgtgttctgctgttggttgctgctgcggttgggccctaagtgacgggactcaaatgtccggctggccttggccaaccgccggcggggagaaaaaggaaatgggcgggggagggaaacgacggatgactgacacttttagcgagaagagcgcatcacacaaaactgctgatgcgaacgaaaaccccgaacttttgtgatcaaaaatagaagtgtgattagaggcgcacgggggggggaggggcagagtacggggccagagccaacaactgttgcgaccgacacacacacaaaattgtgattgacgggcgtaccgctgggggacgaatgatggatgggagagagggagagagagggaaagaagcgaaaattagagtgatcggtgttgaactttgatcttggagagagtg

SEQ ID NO: 30456 - DNA, 1190 bp, Heterodera glycines
  unsure (1)..(1190): unsure at all n locations
attaaaatggcatttttttnattgagcattaattaaataattgaatcatgtgccagttattattattataaatttttaaaagagaaaattataatttctaaatatttattcaatttcactttcatgattttctgccaaccttttttcagttcagaatgccaaaaaagtaaaataatcgccagtttagtaaaatttagaaaaacgaaaacaatgcttgaagtttaaaaatcagacaaaaaatttttgaaacaatttaacccaaaaattatgcattattttaaatccatttcggagcattaattttgtttaattaatttttgagttttttaaacatttactgactatcaaattatcagtcagacccagtcactttctatcacttatataatgctgtttaggctatcagggattgataaaactaagtttgcacccgattttgggtatagccagcaaatctgttgtgcgccaatatcggataaccaaaattgcatctcccaattttttaaattttaatgccaaaattctgcaaaaaaaaaaaaatactaggcccaaagcaagttcaagtcgggctccacgtgctgcaccatcaccgactttcccccatgggtggtgaaaatggcacagaatcagccgcgcaaattttcgccggaaatcattcgccaaggcgaggcggtcatcccgctacagtacggcaccaacaaatgcgcatcacagaagggcatgacaccgtatgggttgaccaggcaaattcgaatggactgattgagaaagaagcgatcagaaagtgatcgaagagtgatcgatcagaatcgattgacacaatgataaagctggacagatggttgaaattgataaatgctaatgaatgaatgatattttgtctattaatccagcgttgggatcgtccaaatcctcttcccaagtacagctatgccaattgacaagtacatcacgggagaaatttgtgaaatccaagtacataatacaaaattttattaacacgttattataaaagggagaagtttattcagacgtccgaaatatatagcaaatatgtataaaaactcccaaatatgtaaacatatgtaaataaaatttccacctattttgttcacaaacacgtttttcctactaattaggctatggagaatccaggaaaaaatatgtatttacataaaaaaggaagccct

SEQ ID NO: 30457 - DNA, 1836 bp, Heterodera glycines
agctaaaggcaaaaaagataaaatattagatgaaattgtacttaccgtgtataaatagtggcaaaaaatatcatttcattaaattgtttgttcaccccaaagtctgacgccgtattccgtgccaaaaaacaacaccaaaaacacttcctgtgccaaatgaacgaaatatttgcaaaaaagtgatccatcggcggattggacagaccataaaataaagcatttcagcggcatattttgcgtaactttcaacggtggagagaacactgagaattaaacagaagaaaaccaaacagaagacactgaaagtcggcggttattatttgatggtaattaataggggtaattaattgaagagaataattagtggaattaattgaggagggaaatcagcgtaaaagggaatgaatggatttaagggattacctggaatgatagagaaagcaagcccatccggaaggcctttctgataacaaaagaggagaaaagcattagcaatgatttaatagcaattaataaatgaaaaccgacccaaaaagttgtacacctaaaaagggatttgcgtttgaattggcattgaatggaattgcccttggccttcccctccccccctttttttttgctcttttcaccttactctggcagagtcggcttcgccgctttccgttctcgaattgttcgaaatcggtcgtcgaaaatctttaacattggcataaattggattaatgcctccagcatagttgagcagaaaatgccatggcattcgcctggcggcggaaatttgtgccaaaagcgaaaattgcgccattttatccgctttttgttttgcccatttaaacacgcaaaataattttatgagcattaattttcattcttacgaatattaacaataaaaccggggctaccagatgaaaattttcaaaagccccatttgggggatatcaataaaaatgatcattgaaatcatatattttcattcttcataatgcatcgttttagctttttgtcagaaattaacatcatagctttccaaaaactataaaataaccttcaaatcatcattaaaaaagcatcaatcacatctcactaaattgagcaaaaatctttattgaaagccctgaataaaaacccatacaaagtaaaatagaggatgaattttgtttttagtattttaaattgttttttggttttgacctggtgatatgtccacatttgtcaatttttaaaaagaatttgttgatttttttaattattatttaataatattccaaaaataatttcaaatttgtaatgtctcccaaaatgccttttcattttcctctccaaaattggcccacctgctcaaataaattcccgtggatcactggcagcgggggacagctggcgaccgcggcagaagcactctctgcgctcggctgacgtttcattttaagccgatgagaaacggagagaggggaaacttctgaggaaatgccaaaaaagacaaaatgcaaaacgatcgacaaaatattttttaacggcatgaaaaaactcttttgctgcgtgagaattaaaatttaagggtagaaaatgccatgaaaaataaaattgtttgtgccgctcgaagacggggggggggggtcgaatttggagagataaaccatcaaacctttgagaaatgagtcgtaatttaatgaattcgatgtgatgtgacctccatgatttggggccgaaaaaggttcaattaaatacagtaagacacccgtttaccgggggacttccgttgtgacggccggtgcgctgctggaacgaaatttggtggccggaaggttgaaaaggttggaagcccttgaggaaatg

SEQ ID NO: 30458 - DNA, 1160 bp, Heterodera glycines
gctcatcagaaataaaattttacaaatttttaaatgatttttaaatacctcatattctcggtggtgcccattcagtgattttcccttccaatttccaattctgggtttactctttctaaatattaaatgatattattttgcatttagtaaatatgtcaaaatgaaagcatatttcgctcagaagtatagttaaccttaattgtccttgattaaactacaaaatttaaaaaaatcccagatttcaaaaatgtttataacaaacaataaaaaaattgaacttttgtttgaatttatttttttgttacaattgttaaaaaagataataaccttttatgggctggtcaataaaaaagccataatttcgtacactgagtttttttcgccaatttttcatcgtcccatttggtatgtttaaaatggtggaaatttcgcaatttggcattttcggaaacactttcttaatggcaatttgtttgcagacaaaatccaatttttgtttagcgctcattttttctaaataaagaaaattataattaaacaaaatttgctaaacaaaaactcgtaattagagaccgattttgaggcatatgccttttttctgcgcattagttccgatatattaagcataaaaaacactttttccacttgctttgaagattttattttgatttttattatgccttttttgcccctttcgggattttcatgcctttaattacttttttggcattttgccgttttgatgatgcaataaaattgggaaaatacacctctaagaaatgacccgaaaaaattacagaaaatacacccctaagaagggaaaaattttcttaaaaattgctcgcaaaaattaaatttttgttttcttgataaaaaattttaggattaaaaattttccttattcgaaaaaattataaaatatttaaatgatgaaaattaagttttttgacgaagttttacttattttgctacctaaaaatcctttaaaaaatttaaatgtcttttttcatgccttattctggcttttcgtgcctattcatgccttttttcaattttttggtgcctattatagagccttttcgcgatttttggtgccattttagtagagacctgacaagagggtcggtcggtttttttcggataaaaaccgaaaatcgaaa

SEQ ID NO: 30459 - DNA, 1515 bp, Heterodera glycines
cacagctgctttaacttaagctgtgtgcattttagcctgttctacccgccaacttcaattgccaaaaatactgacgcggcaattgaagagtttttctttggcgatgatgatttgaatttgcctccagggcaaccaaatcctcgtccacagccaaatacccctccgccacttaacagcgaccaacagaaggtctttgatgctgttttgttggcaatacagtcgaaccctagggattcgactgtcccccgccgtttcttcatatacggcgatggaggcacaggaaagacattcctgtttggccaaattattaggcgcttgcgaaaggccccatacacctacaaagtgcttgctacggcatccactgggtgtgcagccattttgctgccatatgggaaaacagcccattccacgtttcgtctgggtagagaagtgtcattagacaaactcccaagcattccgctggagagcttctttgcccgtcggattcgtgaggcccaactcatcatcattgatgagatcaccatgcttcacaacacggtgattgaggtcatcgaccgagtgtgcaaagagatggcaattcgccagcacaaggatctcctcttcggaggaaaaacggtcattttcagcggtgacttcaaacagtcgctgccggtcgtgcctcatgaaggcttaaccgctcaggtgacagcctgttttcaaacgtctccgttgtttggtcaattcaccacgatgaaattgaccatcaaccagagactgggccaaggtcagcaagcgtacttgcaaatgtgccgccaaatcgggctcggagaaaccggagagcacttctggattcctccgcagttcctcgttaagagcaaggaagagctgatagattatgtctatcctaacttccaacaactccttggcgatgacaaagagctgctcaatcgtttgattctcgctccgcacattgacacgtgtgatgaagtcaacgagatcatgatggcgaatgtgccaggtcaagtgcgggaatacttgtccacggataagccccttgacgaccgcccactggacatcgatgagatcgagtccgaagtggctgcgttgaaccggcgcacagactcgggcatgcccccgcacagtctccggcttaaagtcggatgcgtcgtcgtccttcttatcaataaaagtgataaggaaggactgatcaatggcacacgcatagttctggaagaacttggcgatgatcgcctcattggtcgtgttatcaatagcaatgctattggcggccaagtgagattctttcttgaaagaacacgaaatgtctatgaagacaaatcgcctggcggcataaaatatgagcgtttgcagttcccaataaagcctgcattcgctatgaccattcaaaaaggtcagggccaaacaatccgcactgtcggcattgatctggaaagggaagtattttcccacggtcaattgtatacggccttctctcgggcaacagacggaaacaatgtccgtgttcatgctcccaac

SEQ ID NO: 30460 - DNA, 639 bp, Heterodera glycines
ggtccgatggccacactggtaacggagaattccatcgccgcataagcagcatgcaggctgggacaacccagatccctggctttggccagctatacattttggacccagtcgaggctatggaaatgcgtcgaaacaaccccatatttactggggaaaatgttaaaaacgaagatgcgtttgtgcagggtcatgagcttaatgaagcgaccctagagcttttggtagaaatgatcaaaaagtatcaccctgctgcgcaagcatataagcaggcgcgtgagcagctccaggagctcctcaaaaaacacaacccggaagaacttcgcttcttccgtatgactttgttgaatgagcgcagaacccctgcagctctaaaagacccaaagctccacccgcatcaaataatcaccccttcaacgggtgagggaatgttcgcaattcacgcggacccgactggagtacccccgcaaaaggggatttgggtcgaaaacaggcaaggccgattgactgaaattgctcctttcaatccttggactgacagcttgacatacccattgataaagccattgggtgatgatggttatattactggcattaaatatgctaggccgccatcgcgaaagcgaaaagcgatcaagatgt

SEQ ID NO: 30461 - DNA, 1410 bp, Heterodera glycines
tttattcatgtgaattatgataatatggaaaatgtcttcatctcccttgtaggcagtcacctttcaccatacttcagtgtccctttcacgaacccttcttatttttattgtcctcgactcttctaaagcagatcaaccgttgagaccatgtccgatcatccgcgtgaagcggagcgaaatttaaaaagaatgtgtgtgtgaataaatcaatttcttaactgggtcacccgaggtcccgttcccgatcatttttaaatgctagatccagatccaggtccagtagggcaaccgggaaccgaaaaaaacaagcactggtaagaatgagggtcatggagaaaattaatgacccgggaattgtgaggaagggaaaatcttggagaaaaaaaaattttttttttgtattttcaccttagggtcatctgaaatgaaaaagcaaagaaaataataaaattttacaaaattttcatttgaaaataaaaattggcttctttttttaatctatttttgggaaaaatttctggttgctcccggtttcgtgcgagaattaaaatcccggtcctgtggcattcaacttttatatatttattaatttcaaaaattttcaaatcccagccatctttgtgacgacgtctgacgcgacgttttcgactgtttgtggcgtgctcaactcggcctgaaacttgcgactgtcaacggccgtttcgccgctttggtggcccggcatttgaggaccaaacgatggatactttgccacattggatttaggagaaataatgagcaaaagtgtgctgaactgagaaatattttgacaaggaatgtaacaagattggcagaaagaaatatacaaatcggcgaagatgtacaagtgatacggtcccctattttggatatatcaataccttataattttattggaatcagcagcatttttttgaggtattgtatatgctaaaaaattcataaaattttccatatgaaagaaaattgaaataattatccctgatctagatatccttcatttcctgtcagttacatagatcggagtgtcatagaattatctcacagtattcgccatatattagaagaaaatattactttgaaattgcggttctctggagggttatgctcggcaacctttaaagcatatatggcctttagatgttaagggaattgcatgtaacgactcgtcggaagttaaatgaattattagaatcgatgcaaaggaattgtaagtgcattattcgggagggtggcaatgttagaatcgttggaggtttcaatatcttttcgcgagagtccggtcataaagatggtcacggggcatcacaaatgccaggcatcgttcaagtggcttctcgccccgcgcgacgatgagcatcaccaaagtgcatagatactattcacatcaca

SEQ ID NO: 30462 - DNA, 1134 bp, Heterodera glycines
tttttcctggcttctccatgctctaaatagtagaaaaaacactttcttttttgtgtttcgaacaaatgttgggacttttatttacatagttttacatattcgggctttttatacatattttacctatctcgggattttttacatatttggtatattggactttttttctgacatattttcattttttttttacatattttgaggattttttatggaaatttatggaaaatcttcaaaaaaaatccaaaatttcgccaaatttttcgtacataatttcatttttttttgaatattttgagaatttaataaaactaattatttaataaaaaataaaaaatactttttagttaaagtgttcaaaaaatttattttttgactctaatcttaaaaaagtataaaaaaataaaaacaaaattctatatttctttaatatatatatattagtaagaatttttaaaaattaagcaaaaaataatttaaaaaaaaaataaaaaattcaaaaaaattattgaaaatttaagaaatttcttctgaaaaaataacaaatatttttttgaaaatgtactgctaaaaatattaaattaatttttaaaatgcaaaaagatgattataagcctaattaggttacttacattttgtgcctatcttaccctctactttacatatttgatatatattttgggttttttgtacatatttcgggattttttttacatatttatgtacatattttggccactttttgtacatatttttgacatccctaatgatcacatatttgtttgaaatttgttaaaaacgcattaaaactcaaaaaaatttctccagcaacgtttctcggtttaccgcccactgggcctcaaaatttccaaaaaaaaaacccacgaaagatggtcatttttgtctgaaaatttttttaattaaaaaatcttaattttcaaaaattccaagcggtgccaaacgataatgttcttttttgggatatatatattttttttttttgtaaaatttatctcacaattattttttttaatataaaataaataaaaaagaaattttttgagcgttttttttcgacaaaacatatgggtataacttttcttaaagcaatcaaattttatattcttggacccc

SEQ ID NO: 30463 - DNA, 1760 bp, Heterodera glycines
  unsure (1)..(1760): unsure at all n locations
cagtttttcttctaaaatgtttttcancagctccatcagtacctgtccacgggtttgttcagcatcagcnaaatggtggtggatgacatcgcccatttgctgttggttagtcggcaccgttgatcgcacagttttccacagcatttctccatgcttcggcgctcgcccatcatcatcattatatctggngggtgggtccccccattcttttttctgctcctcgctctgtttaagtcgggcaattagcgtttgaccatgcgcgattttctcatcagtaccgctaccatcatcttgttttgcattggcagaatttgacttatcgtcaactaggtgcttctgctcttgcgatattttttcttttaacgtctcaccatgtgtttttgttgctgttgggattgtttgctgaccgacagctgctttatcatcatcgtccgtgcgcttttgttgctccaatattttctcacgtaatgcctccccatgcgttgtggtagctgcttgtggaccggcatctgctgtatcatcgttgtccgtgtgtttttgctgctccagtattttctcttttaatacctccccatgtgttgttgtggtagctgtttgtggaccgacatctgctttatcacctacttcaccatccgtactggcagagatgcctgtacgtttttttaacgcctcccttccgatcaatgccgacgcagtcggtgcagtaattgtatttgctgctgctgcaacaaactgttgttgctcatcacgcttttttgcctcaaattccagcgcagcgaatctctttcgtctgtactcaatcagctgttttgctcgatctatttggttttcgaaagaggcattatcctttaaccctactgcctttgcttgcatctgaaaatgttctgtaagacccctataattgttgtgaataatttgccaataatttttgggatgtttttgaaaaaattcctcaacaaatgcactattctgctggtggctgagctcctcatattccgacaaagattgttggtggtcacgctgaagcgcagcattttcaaagatggtcaaattgtgctgcatgtgttttatttttgtgcgtattttgccaacctcggtgttaagctgacgaatttcatttatatctttttcaccaatgtacttgctcatcacctcttgcagccccgagagatgttgggtgaatataagtcttgactcgttcaattttttgttataatcttcgggatgatgttggaaaaaatcgctaatctttctttgctcattctccggactttcctgatcacgacgttcagcagcacgttccaactcttccagctcatactttttcctctgcatacgaatccgtttgagtggaagctcgctttgtagtagttttttcctctccacatccgtaatgtctgccgaaagttcactctcctcctgttttacctccttttcaaactgctcttgtttggtgcgtaattcgccaatcttttcccaataatccactggattttcatgaaaaaataggtctgtgacctgccgtttcgtccggctagctccatcatggccagaagaaaattgctgctgctgctgctgatacacctcacgtatgaggctgttcagggtgagccgtaaatgttctacactcgaaaattgcgtgcttggaacctttagttctatatgcacgaaattttttgtcgtctaggaatctatagttcgggttaacggagtttaatgctgatgatatcgatcctcgatcaattccgactgaatggaaa

SEQ ID NO: 30464 - DNA, 1358 bp, Heterodera glycines
cttctaaaaaattatttttaaaaattgctaggtatactttccttggagttcctaacccgcagcgggagtcatacttaactatgtcatcagattcgtgatcagcgaccccgaaaaccccctagaaatgtttatatataataaaaacttttattcattttttagaatacatatcaattctttcacttttttaatggatcaattatcatcatcaattcaggagaatttgccggttagtttctataaaattaatgtttttggtaatagtgtacatggtagcattgtctatggggattttcaggcacgttaaataccaatctgacacccttttcgatcaatttagaaccacggaccctaattcgaacaaaaagtcgaaaattaaaattttcgagctttgcattttcgtctaaagacggcttaaacacatggaaacaaactgaaagccagcatttcctgcaataaaaattattttaagccgtttttagacgaaaaatgcgagattcgagaatttgaactttcgacttttgttcgaattcatctgaacttttttacccatttcccgagtgtttttggatcggctcccatctttgaactgtattttctctaaaaaaaaaagttttaagtgtgtaaatttacaggttcaaaacgccagtgatacgccagcagttgccgatccgtcagtgcagcttggtcccgatggttctgcggatgccggtaaaacatgcttgggtggggtggagtcacccaaaattgtgccgggtgtttagggccatataagtcgtgcctttttttactttcaatgatttgcggtacgatttttccgaaatttttttgacagaaatgtaacgggaaaatttttgaatttttatttaatttgcttaaaaattcattatagcggggggggggggggacgtcgcctccgaaatgtcgtcgggatttaatatcgccgcaaaaaaaaaacttgaaaattcgtgaaaaaatcaaaaaaaattttttttttgaaaattcattgaaaaattgctatttttttgtctctgtaaatctaacaatttttttcagtatcaccgagtgagggggacgaattcatattgacaaactcaattttttcaaaaaatttcaattcgcaggtactgttgacccatctgacgccggtgctgtgcatgtgccagcagttgccgatccgtcagtgcagcttggtcccgatggttctgcggatgccggtaaaacatgcttgggtggggaggtttcacccaacattgttgcggatgtttagggccgtattagttcgcgccttttattacttccaatgattcgcgctacgatttctccgaaattttattcacagaaatgcaacgggaaaa

SEQ ID NO: 30465 - DNA, 1224 bp, Heterodera glycines
caatagtgtctcacactccagtaggttctttaacgtctagaaaaattttctagcctttaaagtatatattttttaaattccaatcaaaaaaatttcgactgaaaatttaaaaaaagaaagaaaccaataaaaagattaaaataaaaaaaatggttttcaaaaccacaaaataaccaaaaaaactaaaaaaatctttgcagacgaaatacaatataataaaaaataattttttagaaaagaacgaaaagaaccaataaaatttaaacctaaaaaaaataaaaaaagtaaaaaaaaaataaaactaaaaatataaaagtaaaagaaaaaagaaaaaaaagatagtgtctcacactaaagtcacagaacaaaccactaatgttttatcaaaagcatgacacacaatagtgtctcacactaaagtcacagaacaaaccaaagatatgcatttctatttcattaaaagttcaaataacattaagcataaacataattatttcacgtaaagaacacaaaaacaaaataaacaaacaaacaaacaacaaccactaaatcaaactcaaacaatatactgataaattttttcgtttacaaaaaacaaatttatataacaaataacttaataaactatgaacatacataaaaaagcaaataaataggtacaattttaagaatgtttattgcaaaacaaattgaaaaatcaaaaccaaacattttcatttttcaaatgcttttttaacgcaaaacaaaacaaaaacatttatatttttcaaatgcatttttaacgcaaaataaatacaaaacgccacacaaattcaaaaatccgtacatacaaacactcaactttattatataggatagcgagatgtgaaattgagcagtcagaaaaatttcaaatttacgcgaaagaaacaccataattctctttctctgcttcctcatatttaaaatcagagcacaatttattttatttggtattattttttggataatgacgatggttgctcccattttttaagaaatttttctttgtatttaaaagtcgtgaaaacatacttccagcagggcttaccagggtcactaatcacgaatcctgcatccattttgacctatatcgaacccggactggaactcgaacaaaaggtcgaaaatttaaaaaatttcaaaatttgcttttatgttcgaatctgtgcagaatgattattttctagtgttgcaatggtttct

SEQ ID NO: 30466 - DNA, 1214 bp, Heterodera glycines
  unsure (1)..(1214): unsure at all n locations
tccgtttgacaggtcaaattaagcccgttgagaagtcttctagaggcttaattggncatccaattacggtaattagccccaataaaattcaaattttgcaattgccacactttgccaattggccctcctcttttggactctcttcgcttttgggctcacagcgcaccacgcattcctttatgatacggtcggcgataggctcaaagtttgggcccaaaaactggatgccggtcaatccaatggcatcggaacagccccaattggccaacagttccacgtggaacacctgcaaatgagttggttttcccccaattgtagctttttcactgcttctccccccctcacttttccgacgatggcattttccgcctcttcctccctctcgtcttctccaattccaatatgggcttgacgtggaaagttttcgccaatgatttgtgaaggaacgcaaggcgacggagaagggcacggactggccgaagcggaactggccgaattgccggtggtcggacgcattgagggcgagagacggggaaggacaacggtacctaagatcctttgtcatcaatggcaagcggcttaagccagagcatctgccaattcggttggaatgatccccaaatccgtgccgggagataatgttttcttcggcagatatacggcgctttcctttgcaaatttgtgcctgatcccttccatcatggcattttctcccgttccgttcccctcccgtcccatatatcgcagtttttttctatgccatttcgtctatgttcctcccatccggcattttctccaatgccgtccccccccccccgcgtgtctcacttttgcccgtgcttttcctctcctcttcccctccatcgtacgccatcacttcgtcattctccgcaattcgcgccagaatctcctcgttggtggtgaacagaattgtctggtcaaacggaaatgcttttcacattttaaatggcttaaaacatcgccaattgacgacgaatcgacggcactttcgcctccaacggcacaacaaatttcgccacagaaaatgcactgatcgtccagccaaattcgaacatttcgaacgccacaaagtgcgaaatgaacatcggaaggacaaaaataattctgaaaattaacaaaatgggagacatacctaaattactgttacaaatagaaaagaaaatcggcaccgaaatgcgaatcattgccaatgt

SEQ ID NO: 30467 - DNA, 1155 bp, Heterodera glycines
  unsure (1)..(1155): unsure at all n locations
gtggaagagggtttggacttttgcatattggttcttcttttgcaatttctattcgttgcttttttcgtccgattcttcggtcatttttccgtccttttcgctcccccccctttttttcaattttttccgaatttctcagaagagtgaccctcgccccccccccctctgttctttttctatttttggtcaaaatgtcgtcgtttgtccttatttccgtccactctttcgtcgtccattagcctttctctctctctctttttctctctctctttctctctcttcgcatattttgcccaatattttacgatttacggacaaaaagcgaccgaccgaccgctgagaagagagtgactgacagttctttatttaaaaagcgattgaatgtccaaaaaaagacagacggacggcggacagtgtttagctaaagacacttggattagagggtcattgggcagcagcagaggccattgggggaaaatgtggagggaatatggaaatttgggggggggggaagggattaatggacacagaaataaaaaagagaattagttaataatttgaatatttgaatttttgaagaattcctaaaaatttattagtgaaagggcgcagcggagagaatccggacggattcgagccgattaaattgtttgttgtgttgtcgttgggtgcttaattcgcaatggatgagagtggtgagagggggggggggagaaatgccgccggaggggaaacggcgacggacgctccggggacatatcaaaggtcaattgtccgatcatttcaccgtttgtccgcccatcgttcttccgtcgctgattaaatgtccaaatgtcctcccattgatccgccttctctccgccctttgcttctccgattctttgagaaagcataaaatcggagaaatggcggaaaattcgggcaaaaaaagtgggcgaaagtgcggcggagagaaaggcgggggggggggggggagaaacaggccatttggtcaattagcgcacttttctcaatttttgaataataaaacaatgattaaatgtcctcaatgttggaagactatatagccaaaaggcattttcaatgatattttggcggaatttgaggtcttagaaggtttgaccanaaaggttgaaggaaatgggtcggagagag

SEQ ID NO: 30468 - DNA, 1015 bp, Heterodera glycines
agattgccaaaaaaagagatagccatttttttggaccgccccaccctcacatatactcaaacggcccgaaaatcatttttatagcataacaactgatgacagccactgtcattgtttccaaagagatttctattaccagattgccaaaaaaagagatagccatttttttggaccgtccatacctcacatatactcaaacggcccgaaaatcatttttagagcataacaactgatgacagccactgtcattgtttccaaagagatttctattaccagattgccaaaaaaagagatagccatttttttggaccgtccatacctcacatatactcaaacggcccgaaaatcatttttagagcataacaactgatgacagccactgtcattgtttccaaagagatttctattaccagattgccaaaaaaagagatagccatttttttggaccttccatacctcacatatactcaaacggcccgaaaatcatttttagagcataacaactgatgacagccactgtcattgtttccaaagagatttctattaccagattgccaaaaaaagagatagccatttttttggaccgtccatacctcacatatactcaaacggcccgaaaatcatttttagagcataacaactgatgacagccactgtcattgtttccaaagagatttctattaccagattgccaaaaaaagagatagccatttttttggaccgtccatacctcacatatactcaaacggcccgaaaatcatttttagagcataacaactgatgacagccactgtcattgtttccaaagagatttctattaccagattgccaaaaaaagagatagccatttttttggaccgtccatacctcacatatactcaaacggcccgaaaatcatttttagagcataacaactgatgacagccactgtcattgtttccaagagatttctattaccagattgccaaaaaagagatagccatttttttgggaccgtccatacctcacatatact

SEQ ID NO: 30469 - DNA, 1111 bp, Heterodera glycines
caagttgtgtatttgatgagtgccattgaaggcgcccccaaatcttgcaggtgttttaatttaaataccgagagggcggaggggggggggggttaagtatattcataatcttttttttctatccaataaacttggcatcattcaaaagctcttgacatgctcaatcggctcaagaagcacaaagatatgccgacaaataaaaaaagttataaaaaaaatttgctcaaattcttacctttttgcggttttcgtgttgcagctttttataaaaaaatttaatcgcttaaattaatttctagacatgttcagctttcgcataaggtcagaccaataaaacttggtctatcaagaaaaagagtatgatgtttttgtcttaaaaattgagggccgaaaaatttcgacaaatcaaattccaatacgtttaaatcttaatactacaaaaaaataatatttttttttccaaaatttcccccaccccctttttaggcatacagttcaaaagaacatatccaattggagccttgggcatcaattgaaattgatggagaaattgataatgaaataaatcgggagattgattggaggaatcaagcagcttcacacactgattgcctcttaaaatatggagtaattaaaaaataataattaaattgatttaaatagcagcagacaaaaattccaagataattataattgaattaattaactaataattaattaaatagcaccacatactaattgccttttaaatatggagcaattaaaaaaattaattagatttatttaaattgcagcagacaaaaacgccaaataactaacatggtttcggaactttactttaatttattattttttttaattttaaaaaaattagtttatattccagttctttttttcctttttttaaataaatggaattcaacaaacaatgcgaaatactgaaaaatgcctggggtgtaaaaaaaaaactcggacccaaagcctgaggccgaatgaaaccgtaacactttgggtcaaagcaccattaaaattgatttttagtcatcaaaaaacatataaaaaattcttaataattttttagctattttcatttacgcttattaatctggca

SEQ ID NO: 30470 - DNA, 1521 bp, Heterodera glycines
  unsure (1)..(1521): unsure at all n locations
tcgcctaaaatttctcctcttgtcattcctttttcccccacccggtttctggtttattttttagtgcttcaccatgctcctaccatctgcactactgtcttgttcatcaattttggcttttaatttatctcctaaaatttctcctcgtgtcttaccctcagttttggccttgctatcatctctttctttctgtacctgttctattaactcaaccaaagattttccatgagtttttgtctcttccccgtctgctgtggtggtagttccctcaatttttcctattcgttccttcagtgcttcaccatgagtcaaggctaaagccattggttgttgttggagtgcgtccctctttttagcttcatactctagcgctgcaaatctttttttcctataatcgacaagacgacgaagttgatcaatttcatcctgaattgactgttttttctgttcatcagtcaaaaattgttgttgttctcttaattcgcgaatttttttgtaatcgtcttgaaggccttcatattttttatgaatatgttcccagtaatctgttggatgactatcaaaaaatggctcaacgtaatccttattttgttcatagctcgtcctctcatattcttcagctgatatttgtaaatcctttttcaatacagccttgttaaaagcattcaaattttttcttctgtgtttcattgctgttctcatctttagtggtgtttcatttagttcttgaattgttctaccatctgttactccttggtattttttcatatggtcttgaatgttgaataaatctcttattaattctaatcgaacttcatttaatttctccctatagttaacaggatacatttcgaggaattcttgaccagttctctcctccttttcctccttcccgtcatctctttgccttgctgcttcttcaagcgcctctattcttgctttcttagtcaatgattgattttggagagggtcaatttcctcatcctctatttttctcttcctatgcgtgtccgtttcatcatcacgttctcttgactttgtcactatcaattttaacaattctttatatctttgcctttcttcctcaattttttcccagtaatcatctggattataatgaaaaaacaaatccactccatcttccaattgtcttttaactcttgtagccggttgttttataccattttttatcgactcatttatagcattttccaattcttgctcattttggtatgaccctgcgggaatatcaatttttattttatcaccattttttaaatgcaccttaatccattggttctctgtggtaccaatggcgggccaagaatttgtataaattatactgtgcaacccacacaaccattgacctccaaaagttagagttctaggcaaatgaaccctanatttattaggcttattgtcataaccaggagagtcactaggtaaaagaacgtaaaacaaatttgacatttattttttattaaagcataaataataaatactttaatacattcatctctc

SEQ ID NO: 30471 - DNA, 1903 bp, Heterodera glycines
  unsure (1)..(1903): unsure at all n locations
atgactcatccttttttgtgcagctcacttttggcttcaacgttcgaattgnnccatctgcttcaattcattgcccctgtcagtttggcaatttccatctgaaatattaataatttttatcattttaatttttttaatttttttaccattttcaaccatttcgcatttttcgccgccgtaacccaccgggcaaaggcattgattgcaattctttgggtttgggtatcctcccttttggcatttgttttcggtgtttttgcaattttctacaattaattatacncaatatcgtatgaattaattcgatctaccgttgcaataaattttgttgataatggcggcgtctttaaacgaaagttcatatgttgagtgaaacattgtgcgttggtaaaaacggttcagcgtaatcaagttgtaatagctgattcattgccaaattattttcttttcatttatacctttaaaataactgacccgcttgttttcacagcagcataatgcaaaattgaatgaaaatcatagggaaagccgtaattttctgttttcgccggctctttttgctaaaatattaaattatgccagatttttaatgtaaaattgccagtgttttttatgtataaaattcatgctaacatttcgtggtgttggattccgtttgatgtatttgttggcatcgtctcggtcttgctcatgccagagggctagcgcatgcaaaaactcgtgggcaacagtatcggactgcaaattgagaaatgaacttaattaaattgataacgataataaaaacaaacatcggtacagttaattgaaacacgttgccattccttaatatgtccaaccccggatcggccgcagtttccatccttcgcgtcgaaaatttcaatgccttcgtccggcccatggctcagatccgtggtgaatgttacgcaagttttgtccctagtatagtttttgtttaaatgatcaaaactataaaatgcgggcagacccgaggaaaatggtctctaaataatcctatcaattctcaatttttaaacattaataattttgagaaaagtgttttatttttcgtgtttttaacagaaagcaaggaatattggacaaaagtttatctaaagtatctatttatctcactattcatcagcttaatcattcaaaataatcacatgattaattttatcccttgttcaacagcgacaacatatcgttgcggagtcgggtcgcccactgaattccattaagaaatagttataaaacttaatgcatacattcgtcactgaaatggatcgcaattggaaatttggtccatttttttaattttgactctgcctgtcttttccttctccgtttccccttcttttttggtgggaaacacggtgcgcacacttaaattagaaccaacataattaattaattagctaattaagcaatgtttttttctcatacagtaatcaccttccataaaatagtcgtatctttgttgcgcctgctctttcgtatataaaatatcgtcccaccaatccaatgggtcgtccgattggctgttactgctgaagcgtgacttttgttgctgagacggatttgtacccggaggcaccgcaaattcactctaacagaaaatgacagtacaattagcttaaattattaatttaccaggtcgggctttggaagtttacaaatgcatgggccagcagcattagagggggagcagcactccaaaactttccgagttttccgcagaatttcgcgtgtcgcctcacaatctttgcccagcaaatcgcatctcgtcggaatcgtctagtaatatttaacctttttctattttcattcccaactcttactttgttcggatcgttttcatatgacatcaaattcgtttcgttactgattcgccttgaaaacg

SEQ ID NO: 30472 - DNA, 445 bp, Heterodera glycines
gaggttgtgatgcaaaaacaacaaaatctctgcattttccggagtcaatctttttctcaaatcattaattattaatcctgtagcgctaataggcgctcactttctgctgacgtcgccggcacggaaagaaaacgatgcgcaagacatgtcagaagggggacccactcgtttgggcgctcacgtttggatgccagcctcagtttttggactataacttttttcattgttaaccaaatccaacattcttggtatcattcgaaagctactaacatgctctattagccttacaaaaaaaaatttcagcctgtaaaataagaaaaaaactcaaaaatttcgacttttttgcaatttcatgttatgacttttttggtaattgtctaatcgcgaaacctacctagcttagaaatagcttctaaacacgttaagctttcgaatgataccaaga

SEQ ID NO: 30473 - DNA, 981 bp, Heterodera glycines
  unsure (1)..(981): unsure at all n locations
accccccaggaactgtgggcncacaacaaatgcccatcgccaaaagttgcacattctgcattaactgttgcaacaaatccttttccaacaagcgatgaatctcagcgcaagttaaaaccaccacagaatggcaatgtgcacagctcgcaaaacaaagcaatacccgagataaaattgactggatttgtcggatttgattcgctgccttaccaattggtcagaaagtgccaagaaagcgggtacatttaactagcatttttcgctattttatttgtttttgtggccccttgcctctccagattccaattcaaccttttgtgtgtcggtgagacaggaatgggcaagactacacttctcgaatccctcttcaacatgaaaatggagtttgagcaatgcaaccgcgaactaaagacagtcgaactccgcgaaaagactttcggtattcagctttaaagactaacaaacacaacattttttaaagatgtacaggaaggggctgtaaaggtaaaacttcgggtggtggagactgctggctttggcgatcagttggacaaggaaaagaggtaattcataaagtttcgctaattgatatttgatgataaccccctttcccgcctcagtttgtcgaaggacatatctgagctcgtattcattacctgaacattttatctccaggaaaatacaaatataaaaaatttttcgtgggcacttcttcaaatgatacattaataaattttgtggacaaataaactgtttgagcatttttaagtgctcaaatcattgtgaattacatcaacgaccagttcgaggcctaccttaaggaggagctaaaagtaaagcgaaatttgtccagttatgaagacagaagaattcacgcctgcatttactttatttctccgactggtcatgggtatgggaaaataagttgtttgtacgttcttttttagcattaaggcattggacttgattactttgcgcgag

SEQ ID NO: 30474 - DNA, 1150 bp, Heterodera glycines
  unsure (1)..(1150): unsure at all n locations
cgccgatgctgtttttaatgattaatttaaaaaatctcanatatataaatattcatgaaagattacaatttactcctttaattgaagctgtatagttaataattgcaataatatgnaaagaatatattgattaagttttaatttatataagatacaatttttgcatttactagaaaattcataattcatatttttgtcagctaccaattctgtcggagaggttgtaaagaagacctttggacgaatgattgttgtatgcaataataattattgatctgaattatttttgcttaaaaaacttctaattaatgaacaaaaataataataaaaaaaattattagtatcgcaaaatgatgtattttttaaaattggtgcgtaataggttcgggaggccatgtaaatattttaatataaaaattcactgaatacaaatattaagatataaattttatgttcaaaataaagcattaaatgaatttaataatgaaaatttttttagaaaaaatgaaaattgctatttactaaaaccaagtataagatttaaataagtagcaaaaggaaagaaaaaatttcttattactaataatatattttattaatattcttaaatattgcatttctatcaacaacataaaaatttttaagcttgaagtggcacttaaggaagcaaaagtacaagatgttggacgattagtaatagaataataaatctaaacaatataaaagaaaagcgatacgctcaatcggcttgcttcactttgcagccattgaacatatatcattttaaatttaaccgcgaattatcgccagtttaaatttaatcaaaattataaaatatatcaataatttagaccaaatctgttacctatatttagttaaaagacatagaaaacatttaaattacgttaaaccaattaaatctaaaatcgtttttggtgccgctatccttgtctcagcgtttttgtgggtccgaaagcgtgagtaaattaataattcttgttaataaaataatattgaaaaaatagtagcttttctgttctttttttttctaaggtgttataaaatcaacattgtgtccatttatatttttaatgtcgttagttttgaattatgcattaactttttattttgttttacttaatttattttt

SEQ ID NO: 30475 - DNA, 1114 bp, Heterodera glycines
ttttactcgtgaagctcaataaaacgccagacaacagactgcactttgttttccaaatccaaaattttggtgtggatactacgggattctaagttcaacttttttgcttcactcaatttcttaattaccttatcctctagttttgtggcttgatcgaggtctttacacagatcgacctcacgccatattgtctcaaccctttcagattcagcattaattttatcaagaatggtgtaaatttcccagatacaatctgacatctttacgaaccattctcgaacccccggggcatagggggccttctctcgggatttaattgcccgattaagcgctccatgggcggatttagcatactcatccgcttcatctgccaataccgaaacttctttccacgccctttcagcctcttttttgacagcttctatcagaattgctgtccctttttctgttctttgaatcatttttaaaaatttattatttatttttttggttctcttttatacattaatcagatataaattggtctttaaatgttggcctcggggagggtacggggagggataaatattccttcattgtttccttaactttatcggctaattctccaatcccgaggtcagattgagtataggcgttacggtacgcagtaccgacgtcctgtctatactgcttaacaatttcaaatgctcccttcgcttcgtctgccaattcacgacacattaacacatcttttctatccaaacacttatccatttcttttttgataaatcccattttctgtttttcttcgttaattttttcagaaattccttgtacttttctcaccccttccaatagcctaccgaaccatgttttcatgcccggtgcctcaggatgacgaattttaattttctctgcctcagaaattgccatatgagaagcagccgcgaaatctcgggcttcagtatttaatctgagcgtatcccgaaatgctttttcaatagtttttctagcagaatttaattgttgtttctcttcattagataggcaacaacaatcactatttatttggccgatgccaaaccaaaaagtacgaaggaaaactattttattcattttattttatttatttttt

SEQ ID NO: 30476 - DNA, 1213 bp, Heterodera glycines
aattcggccatttgaatcggatccaacaaggggcctaactcgaaacaagaaagaaaaaatatcgtggaaaatcgacagagcgatcaaaaatttgattttgcgatatgaatgatgaaaataggaacgatgaaacattattaaggcacctcagagctctacagtatcgactggtccatacaggaattcaagattggtagaattagttagaatttatagctctgtttgagtcttgagcaagcccaaattgtgaaatgaattatataggctggataaagttcggcgttaatttggagaaattaaatttgattatttttaagcatggaatttatgtaaaatttactaaatttatgcctaaataagtctaattttggttgagccgcaaatgtcgggccgcaaatgtcggaaaatggaccttaagaaatgggccgcaaatgtcggaccgcaaatgtcgtggctccaattgataacaattttagctgagaaattggaaaaattattcataataaatttaaaaatcagtataaatcagagaattcaggatacgagaaaaccttgtttatgaaaaaaaaaatttatttgtcataagatttgacctaatccacataaaattaatgcaaaataatactgatgtgaatcgcgagttggagcaatttcatacgcattcattagcattggccttattgccgaatatttgacattttggttcgataaatttttttcattttcataggattggtataatccacgtcaattaatgccaaacaatggacagatggaccactgcataaataggaggcatggcacaagcagaagccatcattttaaattattttaatatgccaactctttgagatttctaattaaaaaaaagtcaaatacattttaagcatagggctgcattttatgtaagaaaaatgacaaaatgcttcttcatttttatgtgcttcttatttttttattttttagtaatgatttccgaaaaaattttcagctctattagacctaagaaaatgaaaattgcagaaattaaatatttcagctaaatttcgaagttttatttcgttttaaattatgcaaagagcaaaaagtacgaattggaaaatgtgctgggaaatgatgataagcttacttgaaaaaaacatcggtcacttgaaataatcattgcgcccaattgacttttctcccggattttaagcccgaatgacctgccagg

SEQ ID NO: 30477 - DNA, 1655 bp, Heterodera glycines
acttgagctgcgtgaatagcgacagggaattgcctccccctgtagccgagagcgatgaaatgcgtgcgtttcttgcttttgaaatgcgtcggaaaaacgtggacgagcagaaggcgcgcgaaaaagaattcgcagtgcttttggaagactgcaacaagtgacagtttttttgggggatccatttctgaactatttcatatgggcgagaatcacttaatagttatagtatttctaacagttggtaaccgatcagcctttttcagatggcttcagacgggtctttaccttgacaaaccgcacccgcggactggggcaacagcgcttcatgttgcagcttcaaaaggctataacaaacttattggttggttggcattgtcatagggactaaatggaatttaatgatatattctagagtagagcgggaccgggaccaaaacacggacaactgagtaccgaagtcccggttttgaccgggaccgggatcagtcccggttttcccagccaaaaattcccgggttttcaacccgaaaaggtccaggtcccggtttgcccaaaattcccccggttccgcttctctaatatattccattattatttttaggcatgctaatcagggcgggggcggacgtgaacgcgcaggacttcgaggggtggacgccgctgcatgcggcggctcattggggcgagcgggacgcatgccgaattctgatggagaatggtgccaacctggacgctttgacacatacagtgcgaaagtggcaaatattaaatggatggggaggggtgggaatagaagacagcactttccatgacccactacaatttattttcagggccatacagttttttcgctagcggacaaatctatttcggattatttggtaaacttgcaggaggttggttgcccctcggattgatgcagttttgcacaattttcgcagaatttcaaccaacttcgctccgaagcgctccaacaccaacaacagcagcaacagaatggtgccactcataatcagccttcaaatggaagtgcggtgctgcaggatatggcaaatttgacacttggaaaggacaaggaatcgtcagtggacagcgaaagagcaagcaaagtaagccgttggtggcggcacacacgtacaaggggtgtcttcgcatatttctacatgaaattgagttttttgtgtattgtcagtgtaacatccttccgatgagatcgactctttgttttccttgttacaatggctcattttccacttccgtttctttccttttcgcgtcaattttcatctttccctttagcgatcgtccagcgtctacagcagcagtgagcaggacccttcgtgtgatggacaagggggtaaatgccttgccaaccaggaaaagaaagggtttattaacgaaaaacgaatgtaaaagcaatgaaaaataagtgttttttgggttttgtaaagcagaggaaaaagtcattgaagcaaggagacgaattccccagcgcccaaaaattcaccaattaacaaagggggaaatgttgggccgtaggccctgattacagattagtggtttatttgaatctcaacaaattggcccattggcaaaagttactaatccctggcccaataagttattaatgcgaaaagttattattttttgttttg

SEQ ID NO: 30478 - DNA, 1502 bp, Heterodera glycines
tttttttattattaatttgccttcgagatggcccaaaatgagtaaaaacagatgaaaattgcaatggatgagtcatccgtccctttggcgccaagtgcaccttttgaactcgccgaacctccggtgaaattgacccgtcgctggacatttccaccgtttcgtcgttcggtttttccgcttgaatgcgttgaaagcgttggcgttgttttgtgctgtggttcatctgctgctgcttttgttgtttttgctgttccatcgtaaaattcctcagaatgtttgtgaattttgacggtcctttttggcttttaactgttcgattatcgtactttctttcgactttatgggggaattattctatttggagagattattaagtgctcatcagagggaatgtgtgacattccatcgctttggggagggctttcactggcaaattgtggcggcgaatcggccaattttgtggctcaacactcgtcacaaattgccgataagaaacacacataaaacgaaatttggtgggtgagagggaatgtttgtgaatggccactttggagagatgacaaagtttatgggggagaaggggggaagacaagcaaaacaggagacggacatggtccgatgcacaaactcatcgacggacgaacggaggacggaacagacaataaaatgggagaagtgaggggaaggggggggggggggtgaactgctcgaagttgacggaacgaaatgcaaagaaagatagctggaaagacggaaaggagaagctactgacagactgacctctttctgctcaaagctcgtctccttctcctcatcttcgccctcctcccttacgggcgaaagtgacaattcgcccgaaagggacactttggcatcggaacgatggattggcacgaacaatggcatgtcaaatgctttctgccattgatgagcttttaatttctaatttacttttttatatgttcactcaccttttgctcatgctgttgttgcgttatttcttcagtttcgagcagttcgtgctcttcctcctcttcaattggtgtcgtccttctcatctcctctcgcctcctccgttctacgtcctctctcattctctgctcttccgtccttcgtttctcttcctctctgattctctgctctttccctctcccttcatcccttcccctccccttttcttcctctgtcgtccgctcttcctcttccactccttccggaatttcccttccgtctgctccaactcttcgtcttctcttgctgatctccgtgtccacctcctcctgatactgtaactccctggacagtgtctccagtaaatgtctgcccaggcctctgctcgtgtccaattcgaactccgtcggtatgtcttcatccctcttttcctcttcttctcctttccctttgtctctcactttctctcctatctcttccgccctctcttctttgccttttctctgcaccggaagagatctctcaataatcacctgacgtggtgaagacaa

SEQ ID NO: 30479 - DNA, 782 bp, Heterodera glycines
tgatcaaaataaacaatcaaaaatggcagtgatcactcgccacttgtaaattttgaattagcgcgcaaaaatttatgccacttacgctatttggtgttatgagcaattttgtctaacactgggcttgacccatagtgtatccgtatagcgacctcgaaaactcccaaaaatatgttttgcttgtaatttatcaggatgtgatctgtcctgatttgaagggctcaaatctgataaaatgaaaatgtaatgatttgcgatcaaaatttgttctgatttcttaaataaagtcataattttgaaattactggcagaatgccactattttatcaagaaaatataagatttgaggcaaaatttgggacgcctgtccatccctcaacatttttttaaaacgtggcgcaaaaaaagcgtttttaaaggcaaaaaaagtcgtcgcttggcttttaattgcaaaaattggcctttctgaaaatctgtttaaacaaatcacaacgaatcattcaaaatattataatatttttttataaatgttgaaatttatcttttctgctgtgcttacttaactaacttatttcgcagaagttactgcgaagtaaaatttttaagaagttaatatgcaataaataataactcttttaaataaaaatttcgatagcgctttcgaggaaaaagtatgaatttccaaattccttcagaatttcagcttattggttgagccttttgatgaacctaacattatctcagcttaattagtcttcgtgctgagaccttctacaaataaa

SEQ ID NO: 30480 - DNA, 1018 bp, Heterodera glycines
aactccgctcaactggtgcctgaggcgaaattctcttctccgttcagcttaggtggtggtgctttgacggcctgtgctatttgaagtaaatcgggcaaggggtgcgcgagttttgctgcgcgagtctcgggggtgcgcgagtgggcggggcgtcgagaaaacttcgctcaaaatagtgccagaggcgaaattcttttgccgttcaacttaggggcgttggaatgatggcctgtaaaatttgaagtcaattggacaagaggtgcgcgagttttagctcacagaacgtgtgctccgaacatttgtgccccccccccagttttgtactttgctaaacactttttaaaaatttttatcataataaaaatacaaaaaaaaacacagacaatgattttgatctctcccttctcattgttggttattggcgcatgatcttggcctcatgtgcgtgcactgaagaagtgctgcttcgatggcaggtgctcgacggtgtccaaaaaaaacgaatctgaaaatgtgatgaaatttaaaaaaatgctaaattgaaaaaaaacttacaattgttgggtcttcaagccaccaattcaagagcaaatcctcctccgcgtcttcaatttgtgcacgcaactcggcttcttcatcttgttcttcatgtggctgttgaacagcttgaacattgtcgggttgttgaaagggatggtcagagttttcacttggagacattttttgtgttgtaaaaatgaatgacgatgaagaatgagtcgctttgagaatgctccgtcagcatgagtcattattgattttgtcatactgaagagcagtttctctaacctctgcgtcattttgccgcaaaaaatattggtggttgtcgggggatatttttcatttcttccattactgtctcggcctcgctgcgcgagaggtgaccgtgacttttaagccatcgtattaaaacgaaccaaacaagcaaaaacacaggaaatgcaagaagataatgagaaaaaagtagtacatgaaaaag

SEQ ID NO: 30481 - DNA, 1782 bp, Heterodera glycines
tgtgtatatcgttttagatcttaaaataatttaattttattttgcctagttgataattcaaattcgatagcacttgtcaaaaaccgtaacaataatcaattatcacaatttatttacgaatggactaaaatataagaaaaggcgaacgtgcatttaattatctactacattagagcacgagaaaagtttttaaatgcccagaataacaacccaatcttcacaattggtaaaaacagtgccatcctcatggtagtgtaaagcttgtagaaaagcattgtccaagtcttcattgcatttcatggcaaacgaattcagacaacccgataaataaacatcctggcgaagtacaacataggatgaatggttggtaaagttgttgaaatttaatccgtattttttcgccaatactttaatagcagtttcaataaaggtgtagctatatagttcactgaaaacgatattttgcaagacaaatatcatttaatatatgtgggaatttttttgattttttaattcccgaaaataaaaattttgcaattttttaagtatttttttatctggggatcaattatagggcttagttattttcaccaaacaaaacaaaatagactaaaagtaataaaaatttctactctcattgaaagaaaaaagctagaagtatttacaagcaaaaaaaacaaaattctttaatatatcaagaaattactttgtttttctaaaactaacctgtccatagcggaaaaaaaaatcggccaacttgagactttgaaatttatgagcttctgaagcgactcaaagacatcatttgtgtctgttttcgttcgaattgaaatgaatcgcgcgttcaatgttgttgtgtttgtacatgaatttggtcgacatgcaaaccaaaaatcccagctgagcaaatcgaatcgtcggtctcttgttaccacatatttccggcgatagcttaaaataaataaaatgtaaattctacataattccaaaaatgctgttatgatttcctttttaaattagaaatattaacgaaaaggattagaatattttacggttttatgaaaactaaaaaattttcttataagaagcaattgaaaccagagaaaaaggtaacgagagtatgcatataatctcctaccctggatggccaataaatctcattgtttcgtaaacgacatcgacaatttgttgatatgttgcatttgtttccggaatgatcatgcctttcgagatgtcttgcatggtgtttcgaattaaaaggttctcgtaggtcggccatgtgctatccaataaagaatcaaaccattggttcacgaatttgtagacaggatcaagaatccgttcgatctccgaagtataaatatcagcattttccggatttccataaaaagtaatgttcgcgcaaagcaaggtaacgtaatctattaattaattcgattatattgcagtattattctatttaccaaggcttgctaaatgctccattaataagtcggcaaaatgctcaattgagtcacgcttgtagccatgagaaagaaaagcggctttaggtaggcataaactaaaatgtaatgttaaggttagtttatcaattcaaatttccaaaaaattgattactgactgggatcccacaatatcctgagatggtcccgtctcattttgggctctaataaaaattttttactactgatgatattttcgattaaatttatcatttttccgaagatttttggtgaaaaatgcgaagaatttactatttttatttgaatttctatttctaaa

SEQ ID NO: 30482 - DNA, 1476 bp, Heterodera glycines
ttttcaccatgtgccatgatccaaagaaattggccaagaatgatcagaaatcggctcagcggcacatagttcatatacacataaatgagtgcagcacatccatttacaatgctgatcagaatcacttggatgaaaatctgaaaaaaatatatatatacaatgtaaaaaatgtattattaaaataatatagaatatataaattagggttcctcccacatctgattcgggaaaattgtgaatttcctcgattgcactccaaagggttagagttggtgaaaatttttgctttaaaaaactttctgttattttttttctcgagtttttatgaaattttcctccccgaggaagatgttgttgctccccgacatttctttttatttgttcaatcatcctcgacaaattttgtgggaaattttcttccaattctcgtctttggttttttaagaaaagtttccgttttcggtgtttttatgaaaatgttctccccgatgaaggtgttgttgctctccgacatttttaatttgtccaatcctagacaaaaaaaatttttttttgtcaaacttgctccccaattcccgacttttctcctcccattctcggccaagaacctttattaataattatgacctttttctgtgaaacacgtgtagtgtcggttcgaattgttttgaattggcgcccttgaaagaacagaatcgcggcaaatgtcaaataagtactcgagagtacgataaccacaatgtaattgtgtactgtgtgcaaatcgttgcgatactgtaaatttttcgggtaaatttaaatctgaggcttgtaaattttttaaaatgccaatttattcgaaaaatgtaaaaaattgtaaaaggtatgaaaagtaaaaaaaaaaaaaaatttatttataattaaaaaattgtctttaccttttcctcaaaatcattgatgtactcaaagtgcgggttaaagaaccaagtgatgtacatgccgctgaaaatgatcggcttggtgaagatgaaaaagtacaagccgtacaaggtgggaaacagctgaaaaagcgaaaactttttttaaatttaaataaaatagaaatgggcaaaatttaacccatgataaaattttttaaaccatgaatttcaattaaattttgaaaaaggcataaaattttaatctatgagttcggttcacgctaagaatataaaatttcgcaactacgatatttagagttgctaatgatgccaaaattgtaaatttgcttccggggctagggtgacctattaaatttttttttaaatattgactaaccatccatagcaaaatgcgtttgccatcgaatagaaaacgtgtcagcctgggactagcgagttccaagcaacggttaatcgccaaacacatctcagccattgattcacaaccccacatagctaattaaaagtttgaaatttaattgttttaaattaattaactttttttcacaattattac

SEQ ID NO: 30483 - DNA, 1073 bp, Heterodera glycines
agtgtttaattctgaagcgaagtcgaacgaattactttcccttgcgaatcggaaattggagccaattgaattgcgtaatttgtaacctaaaaaagtgaaatggacatttgaaatgggaaaagacgcacttttatcagccaaaggcgtgtgaccaaaacgcgagaacaatctgaaaatagggagacaatgacaaaacatttaatggaagaaatggtgggacgcacctttgtacaaaatagtgaagagcaaaggagcacggacctaaaaatggttttgttttggcaatttgtaagtcgccccgtgccgtcgtcccttacttcgtcgtcaatttccctggccaatgtttgccaatttcgggcatcacttaaatttctcaatgtgtgaaccaacggatggcgttcgtaattattacttcgacaaaatgacaaaattgcgattgaagctaaattaacaaaaataaaataaaaattatttttttaaatatttacctgccacgataagcaaagaaaacagtgaaagccattggatgaaattattcggactatgggagaagacgggctgatcaatgcttaaaccaaggccaacaaaacaaactgaaaatggggggggggggggagaaaaggaatgaatgcaaaatgacgtttatttacggaaaggaattgcggaatgaatgaaagcggtgagcaaagtgcggcgcaaatggtactcgacgaactgaagtctaaagaagtcgcaaaggtatggaaaattaattaaggtaatgggagaataaaccggcgctactgtaaaagttaccgattttgaaacaaaagggggacccttttgttttgcaaaatttttttaagataaacaaccatgataatttgttatccggggttttaaaggtcgctaatcacgaatctgacatgtattttgactaatttgtaatccctaacccgaactcgaataaaaatcgaaattttgaatttttcaaattatgattttttgttcaaaattagattattaatcggaattgatcaaaataatgacccgtgaggatcggggaccccaaaaccccagagaataaattttta

SEQ ID NO: 30484 - DNA, 1466 bp, Heterodera glycines
  unsure (1)..(1466): unsure at all n locations
aaatttatatctgatagacatacttaaagctattgaatgataccaagaattattaatttgattgaatttaagccaagttatgagtttatatgtcttacattttttgttttcctaccccttggcggatttaagaataatgtaaattaaaatttttctacaaaatggaaatgatataatttaattaaaaatattatttattaaaaaatccttgttttatgcttttttaaaaacagaaaaatgactttttagagaatgaatttttatgtcttaatttttgttttgttattattcatcttcaattcaatgaacaaagctttctctgttcaatccaaaattcggccaaattttgctgaaatatttggccaagagtgggaaaatgaaaatatggaaaatcaaaatgagcaaaatgcaaattcaaaccaaaacgaataaaatgatttaaattcaattgccaattatcagaacgccaatcaattcgatgacgaacaaaagctcgaaattgaaggaattatgaaaagggggaaatattcgaaaaaaaaaccgaaacaaaattgaacaaaaaattagtaaaaaattgggaattaaccgaacaataatttacaaatggaaaaaagaatttggattaaatataaaaaaagataaaattattatgaaaagaaaaagcaggaatttattgaacgaattgcagaaattaaaagactgtcaaaacatcgaaaacagaaacaatttgcggaagagttgggcattggcaaaaaaacattcattaaatggaaaaaggaatttggcattgaaatgatcaaacgtaatttaatttaatttaattttatcattttattgtttttttagctggaattcgctatgcgaacgaagaaaaagcacaaaaattggaagcttattatcaaatgaaaaatgagaagtcttcatcagggctgggcgaagctcggcttagcactcgaagccgaaggcgaagcccaattttttttcgaagccgaagtccgaagctcgaagcccaaaaaacccgaagttttcgaagccgaagttttttcaaaattttttttttaattcaaaaatttttttcatcacataatttcggttaaatatcaaatttaatcaattgacgcagtttctagaagtagttagtccaccagatttccgttgttaagttcaaaccctcttggctgcaaatgatttattggtaattaatttcgtggggggagttttaataaatcctttgttttttagtatttcctaaggatgttggaatagtttccatttaaaataaggtgtaaaaacaatttttaaaatacgtttgaaaatctgngaanagttttttgagggtgtgagtcaattttttcaaggattgtgtattntttcatatnntctaaaaagaatcaaatagtttgaccctccctanaatgtatatcatttttatttttctgttngaaatctcaaaatttaaggtcccc

SEQ ID NO: 30485 - DNA, 1441 bp, Heterodera glycines
tccaattattttatgggagaacattcccgcaaattgccaattttatgtgttcggaaatttgcaaaatgacaactgcgatgctggagggcattcccggattggtaacttcgacttgcgggaaaattcgggaaaatttcccgacccttgaccaacaggtagaagcagtggcaaatagttggagatcattttactaattctttttcgatttaaaaccaaaattttggaatttttgttttgaaagattaacctaagtggaaaatgttaacaaaagggtcaaattccattttttcagcactttgttcgctacttcattttctatggcctttttttcttcatttccattttcaatttggtacagttttttcaaaaaaaaaaagaaattataaatttttatcttccacaggctttcgtcgtaaaattcattttgtttttgggcattcatttcatcatcgatgtctttttgtctgacgccgaacgacaaattgtaaatgtttaagaatttgtttaattatttatttttctgataataattttttttagtctcagtgaattatgaattatttaaattactaaagaccggaattttgaaagtaccaggcccgggacagggtttaaatttacgggctcaattgttttaatgaaatgaaatgaacaaatatatttaataattaagttttgaatttgttttgatatttttaatgtaatttttttaaatccggtgtttagacatcgtacttctatggtaatggttggttcgggctcacttgtgatgtcatcattttcaaacttccagcagtaaaaataattaacaattatcattttaaatttcaagactcaaaacaattaatttgaggtattaaacgctcaaaattctgctcgacttcccactgatcttctacaggtgcttacgtcttgtgattattcataaacaataataattatgcacagtttgtttttgtggcctctttcatgttcaccgcttgttcgctgttcatctttgatctgatcgtttgtcctttttgccaattttctcgctacagtatcccctcctacttgcaccgtatttcagacatttgtcttcacctatcttttgctgatttgtgctcttcaattcgccaaatatgttgtcatcgacatttacaaatgtgtccaaaatcgcacttcgcttccaaaagattgtggacaaatggtccatgtcaaaatggaagaaatttttgccgattttatcaaagaaataaaagcgacgcacgcggaaattggatcgattgaggagattcgtcagggatccaaagccattttttggcacattcacaacaaaattcaaacggacaaggtcatttggaaggtggcaaaagacggggcatttgaaaccgaaattcaccactttaacagccaggaatgggagcacagtgtttcccaattctcattttcaaaaaataaa

SEQ ID NO: 30486 - DNA, 1295 bp, Heterodera glycines
  unsure (1)..(1295): unsure at all n locations
atggattcctttaaaaaaatcaaaaaatattattgattctacctgggatttttagttatcccatattaggtcttttttaaataaatttcaaaaattnagggtacaggnttgggtncaagnctggacaaaacttgtatatttccttgacctgtttttttctcaaaatccaggtccggataaagtaccaaacccagatcgtgcgagatccattgctattcaaatattggctttacaaattttattgtttttagccaccgatgtctttattttgtacagttttggtgaacattttttatcaaaaaaatttttgtgttattttttttgatgttttattttgatgaaaaatacatagttatttttaagaaacttactgtcgcatttacacttcacaattaattcttttttattttccgaatagacaaaatatggcaaatgccaattcggaatatttatatgaaccatttcattttgtatatttattttatatttaaacaaataatcatagaatggatagtaacaaaaattaatatattatacaatatttgcacaagtattattcgattataaataaatttttaatgtttttaattttgataataattaaataccattcttctctgctcaatttaatagcgaataaataaattggcagatattgatcaattaattcattttgttcagtttgaatgagtaaacggagtgccaatgagaaaagcaaattgatcaacctcaaatttacatattccgaaattgtgactttccgtttttctgcaattaattcattttccatcgatgcaaccgtttgaattgtttttataaaatcaatgtcattagcgatttttttatgttcattaaaatttctttaaaataaaatttaaaaaaatgaatgagaattaattaataattacatttcaattaatttgccgagtcgtttaatgatgcgttcacccatttgtaatgggaatgttagcaattgcttcttttcgtcatatttcacattttcagaatgcttttccagagtttcatataatatttggccaaattttagaacttcttttccttcatcttccagatttattcggctgctcagttcgcatttgtcggcacggctgaaatccgatcggatttgatctaacattggtaaaaattccttctcaacaaaatcccttttttcaacaactgatttatataggaattcttccccaaaaaaacataatccgtattctccgtaataatacgtttgatataattcagcatttcttttcaaaattttaaattcgttcaatttgtcaaat

SEQ ID NO: 30487 - DNA, 980 bp, Heterodera glycines
  unsure (1)..(980): unsure at all n locations
cattattacctacttagtgccgngatcaaatgatcgcttatatgcagnacctttcatttatttaggcatattatatgtacaataaaaaaaaatttttttttgaaaatacgttcgaatccgggttaggggttcagaatttgtcaaaaataatgccggattcgtgctcagcaccataaaatagcgctagaaaaatttttccaggcttttcaaataaaaaaaacgggaccagtaaactagacctttgccccatttgcacataaacagaaaaatgaatttcgtaactgacggaagaaatggcattggcacggagaaattgctaaacaatttggaaaacaaaaatcagtgatttgtagagattatggccacacctccttgaaattgttgacccaatcgaagttcgcttgttcgttgtgatcttcgcaacgcaatcgcttgggttggccatcttttctcggagagtgcaaccatttggacaatgcttggccagcagaaattgttgaatttggcccatcaaaaccatcaccaatcgcagcgggcaaccgaccatataaattgattgaattcaactgattcagatcagtgagaattgtcggcgaagtgcgaagacgcaaattgtccaaattatcaccatcgtaaaagcgcaagtggcgaatgtttgccgaaaaaattggccaaatttcacgaacaaaaacatcccaaatccgctggccatccgtgttgtgtggtgatgaaagccacaaatataaattggtgcctcttttgtcgaaaatttggtgattggaacgaagaaaagcgatgacgaagtgatcgatgtacctaaaaatggaatgaatgcttttattgccataaatctctgattccgaattactcaatctgaagattcttaaaacggattttgctgggcaacggacggtcgggcaatggaaatggcacaaatttgtcatccatctgtacagacagcttcggttctggtcctttgt

SEQ ID NO: 30488 - DNA, 1444 bp, Heterodera glycines
acagttcgatgaccgatatattagctttaataatatattgtgctgaattcacatgttatgctttgatttggccgatcaattatttctgtcacggacaaacattagggtgattgttaaatttaattaatcaattaaattttaattgctttcttcatttagaatcgaaaggaacagacgtttattgatttcactgactgttattatgtcaatcggtctcatctgcttcattggagtaataatattattattttaattatgattatgtttaaaaccctaatttaataataaacttattcacaattactgtacattacagttcccgtttaagacttctgtgttctttcatggcataatgccattgctcagcttgaaccttttatcaattgaatacattgtatggcccatttgcaatggtctctttgtgatggcatattcaagctgtactccggtgctttttctgtgcaggtagataactaattaatggattaattaattttaatttaaaaaattattaatttttcattttagcactgaatatcgaaaagcattttgcaaatacgtttgcagaaaacaacatggattaactgttgttgtgccattgcagaatatgcctgcttgaaaactttgtttttacattttgcatagtaattcggactcgatgataaggcctcccacaaatcttagcattaagagcctccaatctgcaccaaaaatgttttggtgacgtacgaatttttgaaaaattggcattttttaaaatttgaataaatctcgtcaaaaaatttggcgtgaattttcataaaaaatgttgatttttctaactcgtttttaaactttcaggttgaatttctgtagaaaaatgctcgtgattcatgctaatgacttgagaaaattaaaaaatttatatttaaactgtttaaagagttttataaaaatcagctttatctgttgaaactttattgccttggtgtatgattagcgtgaaaccctaaaatgttgatttttttattaaaaaaatttaaatgagttacaaaacccacttattttaagctcttcgtaaaaaaaatagtgatcaccagatcagaatggtgcaagtgcgtttcataaaaactgccacacccccccccccccgcccacctcattcaaaagaaattcttgaaaaattttgaaaggttgaaaattttttttaaagaatactataaaaccaggaaaattaaatattgctagtaattttacaaaaaaatttctacgaaattttcaaaaaatatcgcttgcataatattcaatagtttttttgaagtgtaatttacaatttattttatgaaaatcatttattttatatggaattagcacacgtaaaaaacgataaatactacatatattaaagaaatatgataaaagtcaagcacatttaaaaaaaacttatgtatgcaatggcgaaaat

SEQ ID NO: 30489 - DNA, 1171 bp, Heterodera glycines
tatgtgttttccagcaccaataaatcctccgacactctccccgcgacggttattttgggtcccaacttggtcacttcggttcccaacttttcaaactaaattcatttaaaaaaattaaaacaagtgagcaatccgtacttggatttaaatacatatttgattgttcttgtaaaatagatggacttatttccaagaatgtatactaaagtttaaattaagttaaattgtttgtcataatctgttaatttatttaattttcaaaatttttccttgccggcatcgcctgtgcccttatataaaatttaataaaaatctttcttttggcaaggtctttaaagaaaaccaaatgaatatgaacaaagattaataatttattcatttcaataaataataaaattttacttttgaaacattaagcatcatcccataaccagctccggtggccacatctcctacaaaacttgtttgttcaggagtatatggcaatttgacatattccctcagcattgcggcttcatatgcagagaaaattaaaagaaataaaaggatgaggaaagtgatgcttttttctggcattttcccttaaaaatggataattttttcataaatataaaagtaattattattttattcaaatattttattatgtacgaatatcacgaaaactgatttatttatttatttactaaaaaattacatcactaaaaaatattgtccaattcacattccattcaaaaaggaaagagtgaatcagctaggaatgctcgttttttgaatatattaaataaatttgccaaataattttagaatttataaaaagaattataatattattaaatgtaattttcttacggaatctaagaaaagaatttttttaacccaatggaaagaaattcgataaatttcaaaaaaaattatgactaataatgttcagaaaaacttggttttttgagtttctcaggtcagaactttttaacttcatgaatttttttgaaaatttgcaggataataggaaaaagttagtgctatcgaattttaacaagattttaaaattttgttcatttgaggcgaagttatgaagaattttataaaaaaagtttaaataacatggcaaataatttgacatgtattaacatatatgataagcatttctcatttttactgatttttt

SEQ ID NO: 30490 - DNA, 876 bp, Heterodera glycines
tgcctatttaaatgactttaattgctgtcctttcgcttacgaccataccacgttgaatgcacgccatcccgtccgatccggcatgttaagcaacgtcgggccttcttagtactcggaacggagacgtcctcgggaatcgaaggtgtcgtaagcttttttacttatttcacttttaaatttatttaaattttcaattttttttggcttttttcaaaaaattttgtctattttttcggcaggcactgcctctgtcaatgttttttatttatttagaaaaataaatttattttttttctttttgattattttaattgtatttcatcctgaaattttttaataaacattttcaaactttcaccttattaatttaaggcgaattttgccttttttaataaattctcttgtgaaaaggcaaaaaaaggctcttttaaatatgcctatttaaatgactttaattgctgtcctttcgcttacgaccataccacgttgaaagcacgccatcccgtccgatctggcaagttaagcaacgttgggccttcttagtacttggaacggagacgtcctgggaatcgaaggtgttgtaagcttttttacttttttcacttttaaatttatttaaattttcaattttttttggcttttttcaaaaaattttgtctattttttcggcaggcactgcctctgacaatgttttttatttatttataaaaataaatttattttttttctttttattattttaattgtatttcatcctgaaattttttaataaacattttcaaactttcaccttattaatttaaggcgaattttgccttttttaataaattctcttgtgaaaaggcaaaaaaaggctcttttaaatatgctatttaa

SEQ ID NO: 30491 - DNA, 1510 bp, Heterodera glycines
ttttttttttttttgggggtataaatttcaaaaaaatttaataaaattctcccgattttttgctattttttatgctttaaatgagctgaattggaccattttgaggcgagttatgaattttcaaagaatcacttaaattcccaaatccaaaaaattgacgatttttcaaaatttttttacctccctccaaaaaatccaaaacgcaatataaagtgcatattcgtgttcagcacctcaaattagcccagaaaagtattttttggcaattttaggagcaaaaaaatttttcacgaaatgcaaatccatggggtcccccctttggttttgcatttaaaaattcatttttattttatatctttttttatattaaagataaaaataccggacaaagcacattagatagagctcgaaattctctacaaaaatgctctaagacaatttttcgctaaaatcaacccctgacgagttataagcccgggactgaaatgtcccggtcaggccaaaaaatttttctatttccggaaaattttgaaattttttcaaaaatgccaccaatcgatagagctcgaaaaacggttgcttgaaagtggtctccgttttcctgggaaaaatcggcaaaaaataataaaattcaaaaacaaaaaattttcgagggggcctagctcgaaaaattttgaaaattttcaaaatctgaaaacgccatcggatgcagctttaaaaactgcacaaatgctcaagcggcgccaacccgctccgcttaacccccagcgagttattcccgaaaaacggaaaatgccgaaattgggtgccaaattttgccattttctgcagcattggcatttacagatagaacccccaaaccaacggcattcagtgccaaacagtccaacttgatttcctacctccaagcattttccgctcccgcttcttcccgcaaagttacaggacaacaaagacggacaaaaaaaatttcacgccgtttcagcgccgccggcgctgaaccgtccaccggagcggaaaacccatatttatcccagatgctcctcaaaaagttgtaacacccttccaccactttcagacccctcccgacatgcgggcgactcaaatcaggagttatgactatgtgcaacttttctctatatatatataaactatcgtgaggcagcagtacattgctcggtgcagacaattggattagcacaggaaatactcggtggaaactggatgctatacacagagattgcacgaagtagacaggatatctcttctatatatcactcggttgcttacataatcgctgcgcactaatgacttcccatgcatactgcatgcacgtgtctcataatctacgctctgtaccacaacacgcccttactcctctttccatcacagaaagcgtaagacacatgcacagatgcgcaaaaaagaagagagacaatacaaatttatgagtgaagaccaagaaatgtgagatgaaaagagagaatattggacaaagaaaaagagtaaa

SEQ ID NO: 30492 - DNA, 1194 bp, Heterodera glycines
tttttcaagtgtccgtttggggtactcaacaaattatggggagcaaaaatccaacgcagaattaaagtacaggctatagggaagctattccggaaggattcggtctccccataattctgggcgcatcggctcggggggactgccccgaaaacaaaaaaatcgattttttcaagtgtccgtttggggtactcaaacaattatggggagcaaaaatccaacgcagaattaaagtacaggctatagggaagctattcccgaaggattcggtctccccataaatctgggcgcatcggttcggggggactgccccgaaaacaaaaaaatcgattttttcaagtgtccgtttggggtactcaaacaattatggggagcaaaaatccaacgcagaattaaagtacaggctatagggaagctattcccgaaggattcggtctccccataaatctgggcgcatcggttcggggggactgccccgaaaacaaaaataaatcgattttttcaagtgtccgtttggggtactcaaacaattatggggagcaaaaatccaacgcagaattaaagtacaggctatagtgaagctattccggaaggattcggtctccccataaatctgggcgcatcggttcagggggactgccccgaaaacccaaaaaaaaattttttggataaaaattatttaaatgaactgactagataatatttaaaataggttatttctcttcctttcagtatccctgcaaagtttggtgcgcttctgatcagtttctgaaaaaaaagttaagcctaaactttttggcctgtttaaaaaggaattaaaaatttttaaaaattttattcatctccctttttgatagaaaaagcatcagagtgcctaaactaacatgtaaataaaatttggtgcgtttcagagcagtttctgtaaaaatatttaagaattaattttgtaaaaaaataaataaataatgaaagactcagattttcgaaaatttttttgagccagctagctcggcgctcatttcagtgtaagttagtcctttaccggggagtatccctgcaaagtttggtacgcttctgctcaattagcaaaaaatatgagtgatcgaattttcactaaaaaagttaagcctacaatttgatgcgtttcagagcactttctgaaaaaatatttatgaattaattttgcaaaaaataaat

SEQ ID NO: 30493 - DNA, 1674 bp, Heterodera glycines
aaaattttgggcaaaaacgccaaaaataggcaaataggtttttttcaaaatttttttagggcttttaggctctaaaaatacaagcctagaaaataggcactaataactaacaactatcatgtttttcgtgtgttttaggccactgggagctcaggaaaaaaataggctaaacctaaaaattgcatctctatttataacttatattttggcaggtaaaaacccaactcgtttttggccaactcgttctttacgtgttatatgtatatgaactgtctaacttcacgctgtctgcactcctacataaatatatagacaaaaaacgagttgggccaaaaaggagttgggtgtgtcgccctttttgcatagtccgtatttatgccatttttggtgttttttagtccatatattttataaccctgattattaggtattattttttgtatattatgcatgcatataacgtattcacagtaaagcaactttatcttagcacaacaaacgaaacgattgcaatcacgataacatcatagagaagcttatgcgaatagtaatgaccaccataacgatcataaacgtccacgttgccctccttcaagtatttaatgaaataggaaaccaaagggcgggccagtgcatataatggaaagaattgttgtaattacacagccacccattgccggatcatcatcatcacgctttgttcttcggttcaaccagcgattgtttttctggtatcaaaatgggtgattttttgctgaaaaagtaaattaaaattttgtcccatgagtaaactttaaaaaagttttccgcattaattccaacaagaaaaggttatggctgcatattctgatttgtaaattttgagatgccaacccttgaattaatggcctattcccttttgtcattttgccacaatttattttcctttaatttaataatttaaatccaaattgagctttaattatggcagccgttttttcaattccaatgtttaatttgtcaaaaaattccacaaaatttgtcatgttttgattgctgagaattgaatttttcaccactttttcacgaattgcctttttgttaattgcttgctcattaatttggacttttgtgattaatttgcgtatattttcatcacatttgttaatgttccatttggcaaattgtcacagaaatatttgcgtaaattttgcaaattttcatcaatattttctcttcaagtttcccgccacaacacacggcaaaagaatgtttgttaagcgattcaattgccaacttcgcgtcaaagtttcctgactttatttcattcattaaatttggtgccgaaatcaccaattctttcgccatttcaaattgagctaaaaaaacctttaaatttcacaaaaataatattagtgtatcatttagaaggctggaaattttgcaaaaatatagggttcatccctaataattttcaatataacaaaactttgtaaaaagaacgccacaaagtttgattatgaataggactcgaaattatatggattaaaaaccccaaatatggacattaaatatggactaaaaatgcccgaaatatggactaaaaagctcaaaaatggccaatctatcttcacaatttataaccaaatacataaaaaaatttttgtaataaccgccattctgtgtcagcgaaaa

SEQ ID NO: 30494 - DNA, 1680 bp, Heterodera glycines
gagtaccccaaacggacacttgaaaaaatcgatttcccccgccttcggggcagtccccccgagccgatgcgcccagatttatggggagaccgaatccttccggaatagcttccctatagcctgtactttaattctgcgttggatttttgctccccataattgtttgagtaccccaaacggacacttgaaaaaatcgatttttttgttttcggggcagtccccccgaaccgatgcgcccagatttatggggagaccgaatccttccggaatagcttccctatagcctgtactttaattctgcgttggatttttgctccccataattgtttgagtaccccaaacggacacttgaaaaaatcgatttttttgttttcggggcagtccccccgaaccgatgcgcccagatttatggggagaccgaatccttcgggaatagcttccctatagcctgtactttaattctgcgttggatttttgctccccataaatgtttgagtaccccaaacggacacttgaaaaaatcgatttttttgtttcataaatatttttttcagaaagtcatgcgcacccgtccgatctggcaagttaagcaacgattgctgactagccaaaaggttcggtgccgtgatgaaacgaaccagcactgcttaccccgcggcacccggcacggtcccccgaaggaatggatttaattaaattctctccttcggggatttttttccattaggtcgtccgttagctgggagaagggagtgggaaacatgatttcaaaatttttgttgaaatatttgtcgtgctctgaagggcgtgggaggggggggtgaaggcccaccacgaggccgcgaagaggccgagtgagtaccttcggtgcaggaaaattattaaattttaaaattttttaattgctttttaaatatgccaaaaaatgtaggcttaacttttttagtgaaaattcgatcactcatattttttgctaattgagcagaagcgtaccaaactttgcagggatactccccggtaaaggactaacttacactgaaatgagcgccgagctagctggctcaaaaaaatttttcgaaaatctgagtctttcgtttttatttatttgcaaaattaattcataaatattttttcagaaagggttctgaacttaccaaattttatttacatgttagtttaggcactctgatgctttttctatcaataatggaggtgaataaaattttaattgctttttaactttgggaaaaagtttaggcttaactttttagtgaaagtttgatcactcatatttttttagtctaatctactcaaaacggttcagaattcaataaaaataacattcacggtgcgaaaaatggggtttgacaagtttattggggaaaaaagactttacaaaataatacccctgggagaagggagtgggaaacatgatttcaaaattttcaattttttctagtctaatctactcaaaccggttcagaattcaataaaaataacattcacggtgcgaaaaatggggtttgacaagtttattggggaaaaaagactttacaaaataatacccctgggagaagggagtgggaaacatgatttcaaaattttcaattttttatagtctaatctactcaaaacggttcagaattcaattaaaataacattcacggtgcgaaaaatggg

SEQ ID NO: 30495 - DNA, 951 bp, Heterodera glycines
tctactggcattgtcggacccctgttccaaaaagttttttggaaaaagcgcgccgcagaaaaatatttgttattttttgatctggaataaaattttttcaaaatgattttttgactctaaatgttgatttttcgctggtaaaatgattttaaaatgtttatctggcagccctgattttttccataaataaattcaaaatttgtttatattttttgctttttctcccacaaaaatgccattcttagggggtctatatttaacccctactccgagtcggggttaagggtcggggttcgtcgggtttgaagcgtcggggtcagggttaaccccgaaaagtggccaaaaatgtcggggtcggggcgggatcggggtcgcaaccctaaaatcaagtgtagactgaactacaaaattttgaagatgcgagtcgagtccaagaactctttgttttgcaagaaataaattattcgcttttttctataactttcttaatcccattggcgcttggtaactaaacaagcaccaaactggtgttggttacttatatatatatatttctttaaagttaaaaagcttctttttttgttctaatccgtatcagttggattttctagggtttgcaggatcggagatcacaaatttgactcagttttgatagattttcttcagaagcagtttgtaatgactatggttggtaattatatgcacatgcatatttttttcctgaactgcgggaggcctgaaacgcatgaaaaacatgttcttagcttgattagaagcttctaggagtatttccatatgcatatttgggcattttttcaacatcctctattaaaacggccccctctattaaagcagccatttgggctctaatgatcgaaaatttttcaaaaatatcagatttttgggtataaattctgataaaaaattaactttttaaaaattgttacaagg

SEQ ID NO: 30496 - DNA, 1144 bp, Heterodera glycines
tctcccggccgaaggccgggagcgccctgaaagtggtggaagggtcttacaactttttgaggcgcatctgggaaaactatagaaaaaaattcagcgcggacgactgagtcccagggacggatttctcattttttcgtgcatttgggggcccgtaactttttttctaaaacccaaatcaaaaaatgtctgctgtgagggggctaagttgaagtgttttctaaaaaacaaaaaaaattccaagcctctatctgcaataggaaaggctgtaggttcgtggactttttcagtaccaactttgtccaattcagtcccggttgaataactcattagggtttgatctgggcggggagttaccagcagacttattgtagagttcaatgagctggatttttccagtttttaaaatttcgaaaattttcaaaatttttcgagctaggcctaaaaaacggttttcgggtttttgaattttaggaatttttaacgaattttcccagagaaacggagaccacttccaaaacatagtttttcgagctctatcgactggtaatttttttggaaaaatttcgatttttttccggaaatagaaaaaaattttggcctaagcgggacatttgagtcccgggcccataactcgtcaggggtcggttttagccaaaaaatgccttagggcaaaattgtagaactttttaagctctatctaatggtatactatatgaagggaaattttcaaaaattttcgagctaggccccctagaaattttcaaaaattttttttgggttgaaaaagagggtgaaaaatatttttctggggtaaattatggtgctaagcacgaatctgatgtttgttttagtttcagattttttggaatattttaaaaattctttattttttggcaattttttggccctcgggattttggcctaatatttgaaaattcatatctggcctaaggtttgaccaattttgattaaataaagcattaaaaatggagaaaaatcaggagaattttatgggttttatttggggtttttatcttctaaagaaaaaaagttattccagaatttctggaaattttcgatttttcagaaaaaaatttatatctcgattgagaaaagtcattagggaagagtaaaatactacaaa

SEQ ID NO: 30497 - DNA, 1133 bp, Heterodera glycines
gaagggttttcgggctgagaaaatggtcaaggacgggtcattgttgagctttaaatttgggaacgggctaatgaaacaattaattaatgatgaaaaattgtgaaaaggctaattaattatttaattatggcatttgctggggtaaattttttgttaatcaccttaatggcgataattccgttattgaccagatatgaggaacaagtgacattcagtgacgcacatttgtaattcgttattttgtaaccgaactcgggattcaatttggcgccgttgcagtcaattccttgttcacccggctttaccgaaccggcaatgcatttgtcacaacaattgggcgcttaaaatttaaacttaaaatttaaaccaaaaaagttcatttgaattcgaacggtttttggttggcgtagttggagttgtgggagttgttggagttgtcggcgtggttggagtcgtgggagttgttggcgttgtgggagttgttggcgttgttggagtcgttggcgtggttgaagttgtgggagttgttggcgtggttggagttgttggtgtgcttggagttgttggagttgtgatagttgttggcgtggttggagtcgtgggagttgttggcgtggttggagttgtaggggtcgtgggagttgttggcgttgtgatagttgttggcgaggttggagttgttggcgtggttggcacgtagcattttcttccacagctcacctgaaatttaatcggaattaagcttttcaaatgccgttcctaccttttccacttcgaccacttggttcgggttaccgtccacaccgatttgaacgtacacctttttaccgttttcgccataaatgcatttcagagatacagtaactttggtgtacggtggcagaattgcggttacgattgtgcttttgttgttgttgaacttaacggtgacatttttgaaatgtcgtcaaataatccaattacctctatgtacaccggttgcccattgttcggtgcgtcgcatgttatgtcgacgtaatagcaatccgtacttcgggtactggtagccaatctaggggtagttaaaccacgagtaggggtcgcaaaccctgtatttgttggctacgaccaccgcactacatccataagcacga

SEQ ID NO: 30498 - DNA, 1066 bp, Heterodera glycines
  unsure (1)..(1066): unsure at all n locations
ttgtttttagatttnagcgcaaaaaataaattctctttcttcttttgaccaatttgtctaacactgaaaggaattcaaaacttttcttaggcatagtttttccaatcattttattttttgaatattatttagaaaaagtaatcctttataaaaaatgcacattccaaaaatagaattccccaaagaaattgttccaagtttggccaatttgtcgctaaatcgtcaaccaattgatgtggttttttcttcttttgactttctttttaatatattttttgagtcctcggaaagggtaaaatgatttgattttattgttagtctgattttgtgcccttagccctgggttcaaattaagtaatactttgaaataaaaaagaatttgattttaggaccgtcttttgaagttactcgaacggacgcaaaaggatgtccagcgcctgacgaccgccaaccaacagctcaccaccgccaaccaacaacttactacaacaaaccaacaacagcagaacacaatcaaccaccagcagcaaaacatccaacaactccaaaacttattgggtttgtgcaaaatttattggagatttaaatttcttttctcgagcaattgattgtaatgcctaatttttcaagccggtcagcaaccgcttgttccagcgtttgcccccggggtttttggtgaacaacagcagcatcatcatgcgccagcggactttctcggcgaccagcatgcgctcggcggccagaatccacacgcggcaccttttggccccgactttttcggtggtcagcccgaaaattttggtcagtgccttggttaagtcaggcactttctccattttctttcgtttaggtgttcagcagcagcacatgcaggagcagcagggtccccctcctccgccgccaccgcagtaagacgttgcaagtggaagtcgaatgatgagttgacgtttgaccttttaacctcttatgttttaacgttattttgtctgatgaagataaatctaatgcctccgttcagtgtaattgtttttttttgttcagaattgccaggttaaaaaagcaaaaa

SEQ ID NO: 30499 - DNA, 1608 bp, Heterodera glycines
  unsure (1)..(1608): unsure at all n locations
tcattaaatatctataatatgctgannaatgtttaatgattatnttctttctaatgtatatttgtatcagaaaattttacaaatggggttttcatatacttataaagtaatatgttgaaaaatttttttgttgttgttctgattttacctccccataggctccatagtcaaatttatttatcaaatcgtttgatttcgcacatgttagaatattatacaaaaggttttatgaaattatggtaaagtttatgattttttatttacttttcttttttacttaaatattccatttatatagagggaattaaaaaataatttgtttgatttaaaaataaaataaaatttttactttcattaagcagtatttgatcatttaaattcttaaatcactcataatcagggatggtccaagattttttgattagataaatattaaatttttacttgtccttctgctgcagtgtcacgcataaaaatatgttggctaaatatttgtggatggtttgtcctcgttttatcgaaaattttgtaaaaaatgtgatgacttattgcaaaaatataatttgaattttattcattaactgtgaattttgtttttcatgttttaattttgtcgtatttaaatatatttagctttatatattatccacttattgttctatattttttttactatttgttctactatttattcatatataatccattcgagatatctgatcttatattctcttaattgcataggtagtcatgctgatttttcaaaatcagcaatttaatggcatttcttttaggccaaatttacatccattaatatttgactattttttgttttatttgataaaaagtatttcaaatttgttttatccattttttatgttattttttagtaaaaaaacaaagagtgcctttatttgaaaaacaaaaatattttatataactcatatattaatttattttggttaaatattgcatatttattcatttcagttttttaatttatatttgcatttttccaattaatttaatttaatgtctcgcgccaatttcctatcgtgcaccgctattcaaaccaagcatttttaattttaattttaattttagaaatatctttttatttgcacttaagtaaaaaattttaatttttgtcttagttgttttttatctttcaatttgtttaggactgggagtttcagtttccttatttttatgtaatttcttttgaaacgccgtttgtcactgataattcgtttgatttttgtacattttatattatttttcctttagatttttttgtaataaattgagtacacttacttttttattagaataatcttaataaatttactttttataataatagattttttaatgatatttattttttaatttattgttttcggcaacatccatattcagatttttttttcttacttttacagtatcttaatcggagattatgtaattaggcttgatttgtttatgtaatgttcgtttattatgtatattaaagtgccacgggaccgggaattttgggcaaacccgggaccgggacctttttgggttgaaaacccgggaatttttggctgggaaaccgggaaaaaaccg

SEQ ID NO: 30500 - DNA, 1492 bp, Heterodera glycines
caaaaataattgggcacatttttttgtttggcatttagcgacaattgcaacgaagcattgaaatgccagcgcaaacgattggtggacttgaagatgctcaaccacgacatgaagttcaaattggagagtgcgcagaagaactgattgtgagacgggtcgaattcgatagcgcataatatttattgtccattgtttattgttgtaatattttgccaattactatattatatgtaattcaaagaaacatttgcctaagtccccaaacgcaccacccttttacgcgcacattatattaatttgaaaatttttcgattaaataacttagaaaatatattcaaataaaggaaccggtaatagtaccgatggtagcccccctttttcgaaaaataaaatttttggaatttttttcaagaagaacgtataagaggttctaagggtcggtgaatccgaatctgacataaattcgacccatgtcgaaccccggacccgaattcgaacaaaaagtcgaaaattcaaattttacgtatttccaggggtgccattttgccctggaaaccggcatttgcctggttttgggggtccgtgccgggtttttgggttttttgccgggtttcctgtttccactcatttatttgaattttattaaacatttcgccaaaattaagaagcaaatatagtttttgttaattgttcaggtttattttattcatttttgatcttcattttctagtccgcagaatgtcccaaaaatctttttctgatttcatttccaaagttatatttcaacatcttcaactcaaatttccagcgctgaggaagcaatttcaggttctagttttgttttttcagcaattttacgcggacgcacatgaatatttgggcaattggtcacagcaattctctgagacggatgaaattattggagattgggtcattttcgagtcagagccaacaattcgaaaggcgtataggcatttctgtggggcatcaactgacgaaatggatgctttgtttggtgagatcgctgagttgaaacaaacattgaaggagctcgagggcgaccggttcaacaggaaaaacgtggacgaaaaatgggcggctattttcaaaaatcctaattttgtcctgctcaaatcactagtctctgcaattctgtcgatattcccttctaatgcattttgtgaatcagtcttttctgttctgatgaacatcaaaacggacgagagaaacagtattggcatgcctttgttaaactcgctaatttcaatcaaattcaatgcaaatatttcatgtcccaatgctcacaattactttctttcattgccaaatttgctcaaacaggtgaaaagcggtgataaatatgttgtttaattgtttttgacgtttttttacaatgaaaaattggcttaaaaaactgccgggtttttgaaaatttttgccgggtttttcaactggtttgccgggttttcgagttttcgcgatggcacccctg

SEQ ID NO: 30501 - DNA, 1319 bp, Heterodera glycines
atgttttatgatatatttattttccgaatatttttccccaaccgccggcaataattttcgtcaaatattttgtaaaattccctcaattcattttttaatactttaaaacgcaaatggaatttggaaaattttgcaaaatgcataaaaaataatgcggattttccggtgacgcagatttggatatgagtcatttcgatttcaatattaaaaacctttttttaatttttttggaaattcagagcaaaaagaaaatggcgaggcaaccgcagaaacgacgacaaaaacagcaataaccccaacaatttctgaacaacaaacaactggttcttcttcaattgctgctgttcaatcaattttggtggtaaaaaatggttaattaattgcaaaattttctgaaaaacacacaacaaaggcaaagaaaaagagaaaaaaatgctggaggcctagagattaggctagaaaattttttggaattgttcgaaatttcatgataaattatatatatacattgaaaatttttggcttaattttcagaccgatgccccaacaattgtgccaacaagttcaagcagttcagcatcaccaccaccaccaccacaaacaacacaatcgcccgtaatttcatttatgacattgatgaacaaagaagaaaacgccaacattaaacatggggaggagaaagtgagaaaattaatttgattaaaaaggagattaaataaattttctttttaaagaatgtattaatttaaattttatttgaaatattaaattaaaataaaagaattttttgtaaatatattttttcaatatatttttcattgacgaaaacttattaaatggaaatgtttttaaatcaaatttatactatttttcaaaatttataattttttacatttcattaattttgcattttttcaataaaattattttaaaactttcaaattctttgttgtatttaataaaatcacttttcatttacactttattattaattctgctctttttttcattatttaataaaataatcgtcaaaattttagggattaaaattagaagaaaatagcggacaaattgcagctgagctaaaggcatttgaagaagcacaaagtcaacttggcaatataagtaaaaaattaaattaatttaaaattattaaaaaaaatttgttttttttcaaaaaaggtccaattggcattgggccagctcggcttcacccaaaacagctgaatgaagaggcgacgcgtcaatatggcgccaaaacaattgtctaattttctgaaatatttgttaaaaataggaaaataaatttatatcgtata

SEQ ID NO: 30502 - DNA, 1218 bp, Heterodera glycines
cggtagaacaggcacgaagctgatggatgcccacaggcacactgcccagaagcttgtgctgctcatgcacattgaatggccaggccggtgattgagttcgttgagttcggggaccatcacccgaccgttcattgtgctgcagttgtcgtcgcggcacgacccagctgatgggcaccttttcactgccacagtcgagattgtgtatgatcggagccaactctccgttttggggacacaaaccattgtgatcgaggccaacctgagtcgaaccgtccccaggagctcgtcctgctgcgttctgatcacaaacgaattgacctgatcggctggcagtaaggtgatgattgtggtggcagttccggcacattgaagtcctttggccgttcgggcacagtcctccgatcggacagtgaccgagagcggctttgaggcgaatgtggtgccaattaggagaagaagcgggaggagccccgccgcgactgttcctcggactgtcaattggttccgtttcggttgtctccatgcgtgcgcggctgctcgggcccgtcgtgacaattgaagctgttgctgtagctctcgaactctcgtgcgcgcttttctcgctcctctcttcagcttaatctcgacttgtgctgctgttggcggcgaaatttgtcttccggtcgcccaattgaagagacgaatggggtactttgctccccatgcaattgctttgccaagagctgctgctcccgaccaaaatcgtccgagaattgggcatatgcatcccattatggcgagaaggaatgccatcccgatcccgaccatcgtcatcgtccaccgggggaagcagcgtggattagcgaatgctcccagcaaattgcgcattggatcagatcacattctgattttgctgggcaccgcctcgttgtattgaaaggggcattgttcctccaccagcatttgccatggcaatgatccgccggcaattcgtagttcacatccgtcgacttgggcatggtcgcccaacatccgtcggcgcagcaaatctcgagtttatttaattcccgcccactcatgattgtgacccctcgttttgcacattccatggtacatggcatttttgggccttcttgaaatggcaggttcgggtccattcccgatgatcgaatttgacgctggcagccgaacgttccgacaatgctgatgagcatgatcagtagtgccattccctgtttt

SEQ ID NO: 30503 - DNA, 1014 bp, Heterodera glycines
  unsure (1)..(1014): unsure at all n locations
ttagggtcgacgctatcattcngaaaatgtcgtcgtattcttcagactgatgatcagaaaaagagataggcgtttttccaaaatttcgacatcaaactcgcccagaaaagaaattcggaaaaaattagggtcggcgctatcattcggaaaatgtggttggaattcttcagactgatgatcagaaaaagagataggcgtttttccaaaattttcgacatcaaactcgcccagaaagaaattcggaaaaaattagggtcggcgctatcattccgaaaatgtggttggaattcttcagactgatgatcagaaaaagagataggcgtttttccaaaattttcgacatcaaactcgcccagaaaaaaattcggaaaaaattagggtcggcgctatcattccgaaaatgtggttggaattcttcagactgatgatcagaaaaagagataggcgtttttccaaaattttcgacatcaaactcacccagaaagaaattcggaaaaaattagggtcggcgctatcattccgaaaatgtggttggaattcttcagactgatgatcagaaaaagagataggcgtttttccaaaattttcgacatcaaactcgcccagaaagaaattcggaaaaaattagggtcggcgctatcattccgaaaatgtggttggaattcttcagactgatgatcagaaaaagagataggcgtttttccaaaattttcgacatcaaactcgcccagaaagaaattcggaaaaaattaaggtcggcgctatcattcggaaaatgtggttggaattcttcagactgatgatcagaaaaagagataggcgtttttccaaaattttcgacatcaaactcgcccagaaaaaaattcggaaaaaattagggtcggcgctatcattccgaaaatgtggttggaattcttcagactgatgatcagaaaaagagataggcgtttttccaaaaattttcgacatcaaagagggcagaaagaaattcggaaaaaattagggtcggcgcta

SEQ ID NO: 30504 - DNA, 1014 bp, Heterodera glycines
atgattttataataggcgtataattaatagatatcatcccaccccgtataaaacttggtatttcatggtgacaatcaaacctttttttgaaaaaaagttaaaaaatttggcaaccaaatagtgtagtccatggaggtaagaaagcagcgcactgtgggagagagtgcactatttcctgaattttgtaaagcataggtcggtggttttttctttgttgatggattaagaaagattttggctcaaaatgaagaaacccctaagaattgaacttacaaaaaaatttcaaaagatcgcttctaattcgcacccaatcttatccccatttacaaatattcccctctcatttcttgcgaaaaaaacatttttaaagcacaacgcaaaaaagtacacatgcggtgaaatgatgaaaatgataaatagaaataaaattattgtaataaatttatccagcgaaaactacaaaccatttgaataaaatcaatcattttcattgcataattaaatgctttcgtcatatttcacttgctacgctattctcttagaacaagcgttcgggttcgtctttgaatggcaaggacgtcattgaaattgatgagcatttgaataagcattaaaattttacaatttttaaattatactacctattgtttaattttattcaaaatataccattgaatatgatagatagggatagtttttttatgtaaatacatttttttcctgtattctccatagtccaattagtaggaaaaacattttcttttttgtgtttgcgaacaaaagttgggacttttatttacatattttcggatttttctacatattacatatgtacatattaatacatagactttttcgtacatatttcgtaatttttcgtccatattttcatatttttttttacatattttgagtatttttgagaatttatagaatttttttgtgaaaaataaaaaaaatttgttttgaaatatatccataaaaattgaatttttttcaaaaaatgatatatca

SEQ ID NO: 30505 - DNA, 1621 bp, Heterodera glycines
tcacgaaatcaagggaatttctgccgatcctggtttcttcctctcaacattcacaatggaaagttggagtttgagttggacagcggtgcggacgtcacagtgattgacgagatcgactggaaacacattggaaagccaaaattggaaccatcccaaggattggttgcctatggcgggaaatccattgcgggcattttaggaaaggcaaaagtgaaactgacgcacgaaggaagaacgactgagtccaatattcatgtcataaatggtaagcacaaaaatttgtgcggccgcgatttgatcatgggactgaaaatcgatctgaaccgagctttcggaattccgacaattcgtgccgttgaaaacaaaaaggaattggaagcatgtttggcccaatatccggaggttttccaggacggagtcggacgatgcaaaaagatggcgtcattgaaattcaaggagggatgccaaccgaagcgatgcaagccgagaccggtgccattttcacttcggaatgaagttgaaaaagttttggaccaatggcaggcggagaaaatcatcgagccagtggcaaccagtgaatgggccactccgctggtcattatgccaaaggcaaatggcaagctgcggttgtgctttgactataaggtcacggtaaatccttgggttggatgtacaccaataccctcttccacgccccgaggagctgttcagtatcttgaatggtgtcgaaaaattcacgaaaatcgatttgaaagatgcatatctgcaacttttgcttgacgaaaaagccaaaagttgtctcacaatttgcacgcacaaaggacttttccacttcgctcgattgccattcggagttgcttcggcacccgcaatttttcagcaagtaatggaagaagttctgcagggcattgatggcgtggcggtttatctggctgatattctgatcacagcagccactgatcagcaacacgtcaaaagaagcgaccaggttcttaaacggttgtctgagaacggacttagagtcaagcgtgaaaaatgtgagttcctcaaaccggaaatcgaatatttgggacacattgtggacaaaaaaggtctgcatgcgtcacctggcaaaatcgaggcaattttgaaaatgccagagccgaaaaatctgaaagagttgcatttctgggaatggtgaactattatggaaaatttgtgccatccctggcaacgctttcagaaccgctcaatgaattgaggcgaaatgatgccaaatggacatggacaaagagccaacaaaaggcattcgataggatcaaaaatgttttgacatcaaccaaagttttggtccattatgacccgcaaaaaccactttttctggccgctgacgcatccgactatggagttggagcggtcatttttcacaaagatgaaaaaggaaaagttggtgtgattgcgtatgcctcccgaacgctaaattctttggagcgcaattactcgcagattgaaaaagaagcgagggcaatcattttcggagtcgacaaattcaaacaatacttgtacggtcgaaagttcgtacttcaaaccgaccacgagccactaaaaaagatttttgggccaaaaggagagctcccgattg

SEQ ID NO: 30506 - DNA, 1849 bp, Heterodera glycines
cctaagccttagtgattttcaaaaataaaataatttccgaggcgcttttcctttggtaccgtatccccccccccttttgttaatcgaatgatttccctcacatcactttttgcgcatttcttccttttccttttccttctctttcccttttttctttcttctcttttttagctccaaatatttattaatttttaattagaattttttaaatttaaatttaacatagcaattaataaacaattttgaaataattaaagcaattattgtcacacacacaaaaacaactcaaattcgtttcaattacctatttggactttgactccttctctccctccctatttgcataacatgaaattagaaacaaatattaggaaaaaataaaatctgtgtgtcaaagagtgggaggagggggagggagggaaaatgaaccaaatcggcaaaacaacaaatgatgccatgccaaacccacggccattagttcgtccgtttttttgaaataggaaggggtactcccccctcccaccgcagaagaattttcaatgggagaggacttttttgggctgggttagaggaacgacccatgcgataggcaatggtaccgcattcgatccccagcgaatcgaataagcaattgatttttgaccggtccatctctgcccgctttgctggtgaactgtcgttgtgctctggcatgccaataatgacgacacttctctgtctttccaattcctccgctgaataacaagcaatataatttattttaataaaaattatttgtttttatgtttactgtcgaaaagtccactattttttgtgtttctgtcgaaaagtcctttactgtcgaaatgtcctttgctgtcgaaaagtccttctgtcgaaaagtcctctgtcgaaaagtccactgtcgaaaagtccggggagccgccaaaattagcgaaaaaatttttttagtggcaaagatccaaaatagtgatgaatagtggcgttaaaacgaagaatttccgagctaaaaatgttttttgtgcatttcagtcgaaacaaagccgcagaaaaaataattaaaaaactaaaaatccgttccctactaatcacactgtaaggccgcgaatggaaagactgattcttgagaccgttttgttttcatgactttcgaacaaaacttttctcccaaaaaagtggggagcataggcagtatttttcgacttcagggtttgaaattggtgcaaatgaatgtcaattcgtgatcagcagctatcctgaaaacccttgagggtaatactatcgatggtgccccccccatttttggaagaattttttttttctgaaatgtcgtggaaacatatttacggggggttttcagggtcgatcgatgatcgcgaatctgacatccattttgccctatttcaaagaaaattcaaaattttgaaaattcacttttagttcaccccctaaatccgctccctagttcactaagttattgctcacgaactgtacataaatgttgaagaattttttaagtcattgaattcacagcctttcttccatctctcttttattatttcgcgaatttttgtgtgaaatggactctacaaaaccgatcgtgtttttgaaggtcagcctaaaaggaaagccggcaacagttgtagggcgagtcggtgagttgtaagctcttctctatgaatgattaaaaatggcttatcaaaaattctgggtgattgtttgtattttttcagatacgaagacgtccgttttgtcagaagcttttgcctctaaaattggtgacattgattcgaacctgcgtggccgtgaacgaccccaactgccgatgtgcccgttgtaggatggtagg

SEQ ID NO: 30507 - DNA, 1116 bp, Heterodera glycines
agcgagcaacagagccctacacaagcaaattagcctgtccttatttacaatatttttcattaagggtctcttaacaatgctggacaagcaacaaagtcttcaattaatgggcaattaattaaccctgctgggcaagttcagcaaagaatcggtcgcataaattgaaatttaaaaaattttgattgtttaatttaggatcatcaaatgattatcaaccgaataatggtcaactgattaataactctgaccaaggaaaaattaacgggcaagtgggaaccgttgttggtcacgaccaacaaggagcaggtcattaattaaattaaaattatcattttattaaattaatttaagcatctcttactaatgaccaaattaaccaactaattactcaacttcaagcaaaacaagcagcaggtaattttggtcaaatgttcttttaaattaactgaatttattttcaattttgtttaggcttacccaacactaatgaccaaccatcaatcactggtcagacaaacaaaggtttattcgcatataaatcatttcgaatattcaaatcacattttaaataaaattaaaatttccagggaagggccgtccccgcgttaaaattacaaaaactgtggccgaaattttcctggacgagcaagagacaacgaacgaagcgataatggcaaatccatcaaataaataattgtttttcattgctgtttattgaacaagcattgttgtgagaggaagcggatttgttataaaaaatatccgaaaatatgaaaacatttttattacccgaatcgcagaataaagtagactttaggccctaaaaatctcaaaattggccctaaacggaaaaatatgcataaaaacttcaaaattttggaaataatatggtagaaaaaaaaagttttttggcacatttaatttttaagaaatttgagttcttaggagccggatcgtcttaagcataatttaggatttatttcactcaattatttttagtaaatttttgttcacaaaattgctattaaaactttttaaatttatcataagctgcgatttttaattacgagacaaaatgtataaacaaataaaagttcaatttttttggtaggataa

SEQ ID NO: 30508 - DNA, 1539 bp, Heterodera glycines
atgagactttaatacttttatttctttgattgtatttacttttttttaaattactaatttattttaaacattggatgccataattttggaattagtaaattttataatattatttaatttatgatttttttcaatttatatgttttcgttttatttgttttttatttctttgagaaacatttttttctcatgataaactcatttttgatggttattaagctatttgtcgagttattagggcctattttttaattttttttaaagccgaaaaatttaaaaaatttgaaaaaacctattttactacttattcgaaaaattttaaatatttatttatttccctacaatttatgtataacgaaaacaaagtgatttaatcatttttgtctttttctgcctaaaaagcgttaataaaaatttatttgttctttttttgtgccttttaggtgcctattttacgattttctgtgcctaaacctaataaactatccctttaattttttattactgtcctaaattttcaattttttgcgccgtattttttgaaaaaaaactttgaggaccagggaggaggaaggaggccggcggtgccggtaggcgccgccgggaaaaaattgatatttgaatacaatacagtgtcagattttgtccaaaaatgaccaatttttgcaattttttgaacaaattttttaagaaaattaaggattttaaaggccctgtggtgccgataggcgccgccggaaaattttttttttgatattttggctatatatttaacagtttttcgatcaaaaattattcattttgccaaaaaaattcaattcttaccagtgtaattttactcccgttttttcggtaaaatttacgggagcgggagtttgaagttttccgggagcgggaatcccgtaaactcccgccggtctctagtgataagggaacccaaaaactaaggtggaaaaaaccagtcatttttgacaggggaccaggtcgttttggcgccgacgatttggcgccgacgttttggcgccaagccaaaaatgaaaaaaaggcaggaagaaattgtaaaaattataaaaaaatgaaatttttcgttaaatataataaatttaacaaaatgaagaaatggaaacaatttatgggttcatatgataattgcgcgaaattccacggagaaattctaaaataatatgaaaatttggatttatgtggtaattgtgatcattttcattgttcgggttcaccgggatgtaattctgcaccaaattgaagaggcgctcatcagccgcttggtatttcttagctttccgcggtggctcaagtccagcaagaaatgacgcataccttcccatcggtgcccttctgctcagctctttgatagacttcgccagaaaaattataacaatttcaatcatttcttacccccccccccctacatgggcgtcaaaaacgtggggccaaaacgttttggtttgttttaatccaatttaaaacaaaaaaaaaaattttgaaaattttttattttcaattttttattcaaatttc

SEQ ID NO: 30509 - DNA, 1495 bp, Heterodera glycines
tattagcgtacaaaatttcagaaatttttgttaagcttccccacgttatgaccaaaaatgttgaaaaaataacttgcttttttgagcttctcaggtcataacttttttaaatcttaatgaatttctctgaaatttaacagaataatagaaaacacttagagctatcgaataataccaagattataaaatttggttcattttgggcgaagttttgaataattttgtgtcaaaaaatttccatttgatggttttttgactaccgtcccagcaccaattcaaatagatcctctaccacaaacattaacaatatgtaaattttgagaaaaattaggggcaaaaaaatgtgtttatcgcaacaataagccaaaattggggcatcgcaacaaattgctttcaatggaaaaggatttcatccgaagccacggaaaggtccttcgttatgcacaatgtcataatcaccattggcatcgacggaatattgttgaccagttgactcattacggaaaaagagctggccagacccattaagaaaatagtttctaacttcatccgaaaaatccaagactgcaacgttatgcaacacctgtactgtagctccaccataaatctgataaaaatttgtatatttattaatttctgcgattattttattatcattttaaagcaaaactttcagtaaaattcctgcgaatcgctggaataaaaatttcagtttaaattttattacataaattccttcaaataaataaaaataagatggctaaatatagtgcttgccattcgagaacaaaaaatttcccgagcaattcgacaccgttacccaaaaacccgagactttttttcacaaaattttctagttcgcttaaaaatcgtttaaaagttctataaattaaaaaatcaatttttgaggcttttcctaacaaatttttgctattttttagatttgatttaaccaaaaaaattgacatttctaagtactttcgcggtttttgagtcaatttaaaaaataaagagaaaacactactaaatatgaacaaaggtataatcaaagttgtttttatattacttaccaatcctttggcatttttgaaatcgatcatcgctttgggttgattttgaaattgatcaaaatctgtcatgtcaacttccacataaaattttccattcttttgatctgccttcaattcagtgtaaattttcaattctttatcaccatgaaatgccgtggcattgaacggttcgccaaatgcgaaataaattttcttctttgggtacaaaacatttttacttttttcaaatatcgcattcgcaatttccttcactccattcgtccatcccttctccgctttattcgcttttttaggctttaaatccgcttctttctccgcttcattcgctttttttggcatcgcattcgctttttgtaaatattgtgccagaaaaagacagcaaattccgaacacagaaaaatggttgttgtccttctcatctttct

SEQ ID NO: 30510 - DNA, 938 bp, Heterodera glycines
  unsure (1)..(938): unsure at all n locations
gttgtccatttttacccactattttctctcattcatcgtctgctcgtctctcctntattataagctatttttccaaagccaacaacgcccctnttctccctcttttctgttagtcatttctcattggtgttgacgatccaacattcagtgtacaaatttgttaaacctctcaacattttaaatcaaaatcctaataaaaatttcgttgaatttcttcgcctcttatttgtgcaaaattttcgaaaaagtaattttctatttaaaattaaaaaattcagaagcaaattcaagaattttttttatttataaatgcattttttaccacatgaattatgattaaatttttgcgtttcgaattcattttgaaattaagaaaaataaaaattgataatcatttgatcatttttagcgcactttaagcaccgccgttaggcagcgcagttccaaaatttattccatgccacagatattatgggcaggacacgccaagtacctcaaacttgggtaattaaaccgaagaaagaagtgcagtggggaagaatgacgcctaaaatgaaggaaatattcgatgctgtgcgaactctgtgacccctctctgactctgccaatgcaacagttgtccatttttaccactatttttctctcactcatcgtctgctcgtctctcctttattataagctatttttccaaagccaacaacgcccttttctccctcttttctgttagtcatttctcattggtgtttacgatccaacattcagtgtacaaatttgttaaacctctcaacattttaaatcaaaatcctaataaaaatttcgctgaatttcttcgcctcttatttgtgcaaaattttcgaaaaagtaattttctatttaaaattaaaaaattcagaagcaaattcaagaattttttttatttataaatgcattttttacca

SEQ ID NO: 30511 - DNA, 1003 bp, Heterodera glycines
acgcaaatgcaaaggggcaaaaaataaataaatgttttttatttcaattttttaataattcttggcactgttttgtcttttcattttcggcgtcgtccgaacaaagcatcgtttcgaacacttcagaagccgtcaccaaaagaattttatgtgccgacaaaagctaaagtcaaaattcacattaattttgatttaaatatttgctaaatttgcctctttttcttcccctttcccaaccaaaaagtgcacatccgcgaaatatccattggtcaacagccgatccattcgctcaatgagagtgccattttttgttgtcattctatgaaatttaaaaagtaaaactttggcaggtggttgaatttttccagaatttttattaattaattatttgccgaaacgccccaaacgaaacaaaaattatgcgcaacacaaatgggaggcattcatttgatgacctactttacaatttccatattcttctgctgctgcttttcccattacctccaaactcaccaaagggcgaaaatgaccaattgtccattcgaaacaaaggcaatttgcccataggtcattcattttcggtatatttccaatatttaatcgtaaaaattattatcattaaaagaactttgccgttattaccggtcctgtttttggaggtgggataaaaattgacctggtgtcactgctaaacggggcttttcatttgaaaatcattttgacaaaacagtgcaattaaaagttttaatcagttaaataatgcaagatatttactcgcgccaaagaagccaatcatttggttttgaatgattaaaattttttcaaaagaagttataaaagaagcttaaaacaataaaaaaaattatggacagagtgtcaaatatactaattatttgggtttgaagttgctgcactaaaaaatgccaaatatgcgcattaaatatgcactaaaaatcctcaaaatatgctctaaaaacccgaaaaatgcccaaatatgtactaa

SEQ ID NO: 30512 - DNA, 1215 bp, Heterodera glycines
  unsure (1)..(1215): unsure at all n locations
tcttccgttctcttttcctcttcttgctctccgcctttcacatggtcttcttncgttnccttttcctcctcttcgtctttctcctcctcttcctcttcttccgttcccttttctacctttccctcttccactttttttctctgctcctccactcttctcctcctgctcttcatcttcttaatctcgttgattagaatctccttctcctcctcatccagctcatcttcctcttccgatgatgtgtttctcttcctctctgtccccccactctcttcgctctgtctctgtccgtcttcccttctgcgtctctgtcggtcttcccttctcttttccttcatttgtatcactctctgcctcaattcctcgatgttttcattctccagtccgaacactctcttcaactcctccctctctttttctctctcaaaatggggttcgatttgtgcctcactctctccctcggcttttccctcttctcttccgtccccgtcacttcttcgaaatgtgctcgacaattgagtctgagccggacgactgaccagcaaaagacgttccgtttggcttcgcttgcattttctttttctgcaaggcgttggaaaatgtaaagccatggagggacagtcgagaatctcgaccatcatttcaatttttgaatttatgaacatacaaattgaattccgattgcgtctgttcgctcctttctttctctgttctgctgctctcttcgcccactttctcctccttttctgcttcaccttcttcttcatcttcttcctctgttgccattcccttccttttttggccattttctttctccacactttgccaaatattttgccataaattcgcttcactgcttttgtgctgtgtccatttgtccatcatcgtcttttgctgcttttccttctcatccgactttgtccctcctttgttgtcattgtcgaattggcatgtaaaatcggcgtatttgtcggccacttttgtgtcgctctcgacctggtaattaattcattacctctaataacccatttttcctttaattactctcttttttttttacttggatggcgatgtttctcatgtatcgtattcctcccgctgttttcctcatattcctcctccttttcctcctttcttcttcctgtttttcctctctcttttttgtctcttctccaatttcttcctccgtcggtgtttttgatgccattcgaatgg

SEQ ID NO: 30513 - DNA, 1503 bp, Heterodera glycines
  unsure (1)..(1503): unsure at all n locations
ggttcacaacaagcgctgccggggtctgtagtgtggatggagggggcaaattgtcactggcgaagcagccccgaaacgctcgcccggtccgacgcgcggtgggggggcgaaggcccaccacgaggccgcgaagaggccgagtgagtaccttcggtgcaggaaaattattaaattttaaaaattttttaattgctttttaaatatgccaaaaaatgtaggcttaacttttttagtgaaaattcgatcactcatattttttgctaattgagcagaagcgtaccaaactttgcagggatactccccggtaaaggactaacttacactgaaatgagcgccgagctagctggctcaaaaaaattttcgaaaatctgagtctttcgtttttatttattttttgcaaaattaattcttaaatattttttcagaaagggttctgaaacgcaccaaattttatttacatgttagtttaggcactctgatgctttttctatcaaaaagggagatgaataaaatttttaaaaatttttaattcctttttaaacaggccaaaaagtttaggcttaacttttttttcagaaactgatcagaagcccacaaactttgcagggatactgaaaggaagagaaataacctattttaaatattatctagtcagttcatttaaataatttttatccaaaaaatttttttttgggttttcggggcagtccccctgaaccgatgcgcccagatttatggggagaccgaatccttccggaatagcttcactatagcctgtactttaattctgcgttggatttttgctccccataattgtttgagtaccccaaacggacacttgaaaaaatcgatttatttttgttttcggggcagtccccccgaaccgatgcgcccagatttatggggagaccgaatccttcgggaatagcttccctatagcctgtactttaattctgcgttggatttttgctccccataattgtttgagtaccccaaacggacacttgaaaaaatcgatttttttgttttcggggcagtccccccgaaccgatgcgcccagatttatggggagaccgaatccttcgggaatagcttccctatagcctgtactttaattctgcgttggatttttgctccccataattgtttgagtaccccaaacggacacttgaaaaaatcgatttttttgttttcggggcagtccccccgagccgatgcgcccagatttatggggagaccgaatccttccggaatagcttccctatagcctgtactttaattctgcgttggatttttgctccccataattgtttgagtaccccaaacggacacttgaaaaaatcgatttttttgttttcggggcagtccccccgaaccgatgcgcccagatttatggggagaccgaatccttccggaatagcttccctatagcctgtactttaattctgcgttggatttttgctccccataattngtttgagtacccccaaacggacacttgaa

SEQ ID NO: 30514 - DNA, 1812 bp, Heterodera glycines
tcagcccaatccagccggaccaagtgaatggaacgacacaatttcacagctcaagaagctttttgccgagacacgttcgctgtttgtccgtcgcttcgaatgttttaaaattcgacagcaacaagggcaagatgtttcatcactgattgcgcagatcaacgcatcatgtgaaaatgccgacctgagtctgacaaaggagcagctcaagtgcattattttggtaatcgcgctcaatgatgaacatcatgatttgcgacaaaaagcattgaaatgttggaggacgctcagaaaaatggcaccaacatttcgctcaagaaaattgaggaggaacttcgggcaattcagcttgtcaaggagagcgccctttcgctggtcaacccaccaattgccacaaacgccattcgcacaaggccacggcaatggaccgacccagcgcaaagacaaagcggcggctccaatcaaaggcaaactccaaatgccaattcaagcggaaagccaacgcgtggtcaacggacgcatccatgtggatcatgtggcaaaattgaccactggcgctccgattgctcattcaaggacgtcacttgcctcaagtgcaacaaaaaagggcacatttcaacaatttgccggtcaaagaagacaaaggcaccaccgaacagccaccggtcattccacactgtcaaaatcgacgcaaattgcttacatgtcggcacgactcaaggacgatggtggaaattgtgcattttgattaatggaaggcaaacttccatgaatggcgacaccggcgctcaagccacaattatttcattgcaaacatggcgagagttgggagaaccggaactgactccatccgatatcgatgccaaaaactgcaatgatcagccattctccttacttggcaaattccaatgcactgtccaatttgccgacaaaccaccgcaaattctgatcgcttatgtgagcggagaagtcggacataatttattgggattgccgtggatcgaagctttggagatcattccccgccaaattttatttccgaccaacaaatcggatcaggcgacaaaaatgatcgacaatttttcggcagtgaagccgccaaacaaatcgatcaataatgtgtcaacgcttaaagcggtactccaaaaagatttccctgaagtctttgaagaaggactgggacactgctcaaaggcaaaggcgcatctcattttgcggtctgatgcaaagcctgtattttgccgagctcgcccaattccacatggcgccatggaagctgtgaatgccgaattggatcgccttcttcaaattggcgcaattaagccaatcgatttcagtcattgggcagcgcctatcttagcagtaaaaaagaagaacggcaaaacgagagtctgcatcgacttctcaactggcctcaacaacgcactggaattgaaccgccatccattgccaaggccggacgacatttacgcctcactgaatggcgcaaaatttttctcaaatttggatttacgcgatgcgtatttgcaaatggaaatggatgaagaatccaagcaattgtgtgcgatcaacacacatcgagggcttttccaatgccaacgcctgccgttcggagtcaaatcggcaccggcaatatttcagcatctgatggaccaaatttgtgccggaatcccaggagttttcgcgtacctcgacgatggactaatcgccacgaaaaccctggagcagcacatcacggcactttacactctttttgggcgcataaaagagtacggaattcgcatccaactggacaaatgcaaattttgcagcccg

SEQ ID NO: 30515 - DNA, 1247 bp, Heterodera glycines
gaatttttttttatgaattaaatagttaaattaaaaattaaattttccatttgttaattgtaattattaacaatgtttatcgaatggaataaagacacgcgctttcctttacactaattacttttaattaattgtcaaattaattaattacccgcttctccattgacatggccaatctcaacactgtcacagtacggtgccgcatagccatcaggacataaacattccgtacatttgttcgggtttgcgtagccgttatttcgacaatccggcgaatgccatggatagtcgtcacaaacatctaataaataaaaataattaataaataatttaaatgtttatttcttgtaggtaaaatataatgtgaaatttcatatgaaattgggtcaattaaaccaaaaatattttaaaaataatttggacctagtaatatacataaaacttttgctagaaaactttgataatttttaaattttcttgtcgaagtggtaacagcaccaaaaataagacgactaaaaaatattttaaattacaaaaatatatttccctaaataatttttcatcaattaaagaattttcaatcaaaaatggtcaaactcgctacttaaaaaactaaataatttattattagtattttgtatttttgtgcacaaaactattgatatccaaattaatattattttcccattttttgtcaatttctttcatttttgaaatcaaaatggacgccttattgacaaatattaattaatttaattacgttcgcaatagcggtgattaatcgctttggcgtccaaaaatgaaaggcccaggcgccatcccattgtttgctgatagtttttgtcaatcgtttcgattgtttcaagcctaaaaaatgaaattttaataaatttaatttatttttaaattattacttgtcattttttgcgaacgcttttgaattgtagtgcatcacagaaccgaagtcgtatgggtttccagttggcgagccgggaataattgcaaatgcatcagcaatgttctattttagggatcatttaaacggatcccggacatttggacagtggacatttggacagaaccggacaattggacagtggacattacgacagagactgaattttttttactattaaaaatggctttagcagtaataaaaaatatatgttaagaatatctaggtaaattgaattttcgagaggtaggtgcgaggctattaaaataagtaagtgaaatactttctaaag

SEQ ID NO: 30516 - DNA, 1214 bp, Heterodera glycines
tttttttgagaaattttttatcaaccaacgctctcggacaagaaacgaaatgggggggggcatgggcatttttatttttcaaataatttttatatttaatagatattccagaaaaatggctatctcttttttgaggaaattttctatgcaacaaacgctctcgaacatgaaacgaagtgcggtgcgccatggccattttatttttcaaataatttttatatttaatagatattccagaaaaatggctatctctttttttgagaaattttctatgcaacaaacgctctcgaacatgaaacgaagtgcggtgcgccatggccattttatttttcaaataatttttatatttaatagatattccagaaaaatggctatctctttttttgagaaattttctatgcaacaaacgctctcgaacatgaaacgaagtgcggtgcgccatggccattttatttttcaaataatttttatatttaatagatattccagaaaaatggctatctctttttttgagaaattttctatgcaacaaacgctctcgaacatgaaacgaagtgcggtgcgccatggccattttatttttcaaataatttttatatttaatagatattccagaaaaatggctatctctttttttgagaaattttctatgcaacaaacgctctcgaacatgaaacgaagtgcggtgcgccatggccattttatttttcaaataatttttatatttaatagatattccagaaaaatggctatctctttttttgagaaattttctatgcaacaaacgctctcgaacatgaaacgaagtgcggtgcgccatggccattttatttttcaaataatttttatatttaatagatattccagaaaaatggctatctctttttttgagaaattttctatgcaacaaacgctctcgaacatgaaacgaagtgcggtgcgccatggccattttatttttcaaataatttttatatttaatagatattccagaaaaatggctatctctttttttgagaaattttctatgcaacaaacgctctcgaacatgaaacgaagtgcggtgcgccatggccattttatttttcaaataatttttatatttaatagatattccagaaaaatggctatctctttttttgagaaattttctatgcaacaaacgctctcgaacatgaaacgaagtgcggtgcgccatgggcattttatttttc

SEQ ID NO: 30517 - DNA, 1431 bp, Heterodera glycines
cttcttcttcttccccgccttcttcttcttcttcccccgctttttgttcttcttcttcttccccgccttcttattcttcttcttcttctcagcgctggaactgctgctgccgccgctggacgctccaccgcccaccccccgccccccccccccggcggcagggacgaaaatattttcgtcctcactcaccagggaggcctgggagtggcgggttgcagcgaagcggcgggcccgcgcgtggtggcgcccaacaccaccgcgggccatgatgtgggtggtcagccaaatggaggacgggatggtctcgacagtgtcctcgtcttccgtgcccgatttgtggcccttgaattgaagggaaaaccgttttcataattaatcataatgaatatttgttacgacaaaataaaaccctgggactcacttgacacgtgctggtggtgtccatgcgtgtgcgagaaatggaaggtgggcattgctgtggcgtcgatgagtccggcagctccgcccgcaatgttcaggtcgagcgcagcggtagtcgttgtgccaccgcttccgccactgcccccgccggtggtcgagccgagcatttgctgcatccgcggcacaattgtggacagaaaggcgttggcacgctgagccctaaaccaaaggaaagcgttttgtaagtccattcagcgcaaaaagtgaaacgttcccataaatgaaaaggattttgtttaaatagtataataggcgtaaaaaaacctggcgtcctgttgcacactcgacgaactctgaggctgctgatttgtgtggtggtgcggtcttcctgacgaactgaaaacagattgtaaaagcaaactccaatccaatttatacgccccaagtttatcggcatttttccctattttcatttgttcaattaaccgtacctctgtcccccgtggccatggtgtgtgttcggtgtggcggcgacgccattcccaacactttttgccgatgacgacccgccaggaccattgccaccactcccatttccacttgagccctgctgctgaacaccagacgaaccagaagcactgttgctgcttttgtcctgctgaattttgaggaaaaataagaccgaccaaaaaatgaaagaacgaaaaataaaaaacaaatctttaaaatgtacatttccttttgatgtcacacctccatattaaaaaaaaaattgccaataagctgaacatttatttgtgcgaaaaactttggcacgaaaaatggaagcggtggaaatttgggtaacccttcggtattggtgtcccgacgaaaaaaagagataaacattttcttttaactttttctatggtaaaaaaatggcgctgatcacgaatccgagcttggattttgcaaatcattgagcttatctatgatttttcatcaagcacttgattatttttgaaacttttt

SEQ ID NO: 30518 - DNA, 1620 bp, Heterodera glycines
  unsure (1)..(1620): unsure at all n locations
gtgcaaaacgacatttacaatgactggacgcatatttgtcaaaaagtgagcctctgaaaagcctttgctttatccgtcgtntaagctcaaactgaccttctacaattacaagtcgtctattgagaaatacaacagagaaacttttccnggtaattgctttttattttgttatatcaattaattaggtcattaagttctaatttcatttctatttttgacagacatacggcggtgaaaattctatttgcgaactttcaacggcaagcgatggcaactttttggaggttctcaatatttccatgaacagtttcctggcgtaccattctgaccgccgatttgaaaccaccgggcaacaggtaaccaacgaaccaatcgatttgtcgctattatacaatacaccgaccaaattttgaattatttacatgtcgaattaattttaagattattttcttgaccccgggcagcggtgtttttaacgtggacagggaaatggtgaatttgaccaaacaacggatcattgacatgggtaacactttgggttactttctttttttaaattttggttcatttccgtcggttcctttttcagggatttccctggacatcgtatgcctcggggaacagcccctccacgccgttccgttgttcgtcttcaaacacaaatcgccccaacaaagcgacgactatttcataccgtaccaattggatttacttgctttctcctttaatttatcttttttattattaatttcagtcattggatgaactattcctatttcaatatgccccgaaattcgtccatttcgtccaaattcaaaactcgcattaattttccagaagacattgttaaggtgctgtgctttacttacaattaacttgctatagcctttctgtttccaaattccttgctcttctcagaacacggaagaaggcctctttttggagaaaagcattgaaggagaggaggaccaccgcatttatgacgaaaaggcctttgcctcgttcagtcagactaactttggagctgcagcaaatgcgctgaatgaattgtacaaagagctgatggtatccgatgggcctcaaagcgttgatttcgtaagaatgaattaaacatttggcgatgcatccatcgttcgactcattctctcctcttcagtatggtaggcgttcttccatctctttgtccgcttccgagcgtcccattgtcggctcactcgaatgccatgcaaatttcggcgacagaaacaatttgggcagcgcaatggcaccgcgcggaggctcattagagtcgaagtcgctgatgagtgagtgtttgccaattcaattccattactaatcactcttttaggcaatggtcaacgtgttgcaggccaaaggtccattcccccccccccccttctcttcctggattttcaattagtttgtgtgttttagtggtccctattttgagcccatccagcgtggttttgtcaacccttttcgtcctgaacaatttattgtgcgaataacagcaaatcggcgacgttggattcatggttgatcagctccatcttcaacaattcactcttttttaaatcatttacagtgtttcccgtcgaccgtctcggcagagcaaaattg

SEQ ID NO: 30519 - DNA, 981 bp, Heterodera glycines
aaattatcaaataattatttacgatttggtagaattggcttgtggatagctgtggttgagatggcctccacaaattccatgaactgctccatgtcgatgcccaactcgtccaaagtgagcgttcgctgctgcttttccttcatctccatgctgagcattcgattgatcaccggcgaaacggacataagaaaatgggaggacagatcgatctgaaaagtttaaaaaactttttttcttttttacaagttacatttaataaaataatgtcttttatttttgaaaataataattttctttttataacatcgacaattttttgtttttttaataaagttatgttaatattattgacaaaaaaatttatcagctaaattttgtatctaagtttcatatgtaaaaccctattaataaaatctaattgttaagatttcctgatcatttaaaattaaattttacttattttttcacctttttctcaccaatttcaacattaaattggtcgtctggcaaactgctgatcggtgggcacagactaaaaacaaaaaaaaaaaacattcatattttactaataaataaaaacataaaattggcattacttctcggcacttttttcccgttttttgagaattctaatcacaatggaacacagagaatacaagccgaattcaactgtctcacccgctttgatcattttactctaaaagaacttaggtaatcatataggtggacttaattaacaaaaaatgttagaaaatacgaaaaattatccagacagtttttcacgattaatttttcaaaatacacaaaaaaccaatttttttaatacgaataagctcacttcgttgatcacttgtttcccattcctatcccattgccattgaataatttgtgccaatggcacacccggaagctcggaagcactgccaatgcatttgatttccaaagatctatcgcggttattcaaaataaactcactgaaaa

SEQ ID NO: 30520 - DNA, 1050 bp, Heterodera glycines
  unsure (1)..(1050): unsure at all n locations
aatcgtaattacgctcaaaaagcttctcaaacaattntagcgcatccaattccttctacaatcgcctttatacatcccattatgagcgctaaaattatcagagtgccgaaaatcgcatgtgatctaagcctagcaaaaaatggtgtaagtaaaaatcgtaattacgctcaaaaagctcctcaaacaattttagcgcttccaattccttctacaatcgcctttatacatcccattatgaacgctaaaattatcagagtgccgaaaatcgcatgtgatctacgcctagaaaaaaatggtgtaagtaaaaatcgtaactacgctcaaaaagcttctcaaccaattttagcgcatccaattccttctacaatcgcctttatacatcccattatgagcgctaaaattatcagagtgccgaaaatcgcatgtgatctaagcctagaaaaaatggtctaagtaaaaatcgtaattacgctcaaaaagcttctcaaacaattttagcgcttccaattccttctacaatcgcctttatacatcccattatgagcgctaaaattatcagagtgccgaaaatcgcatgtgatctaagcctagcaaaaaatggtgtaagtaaaaatcgtaattacgctcaaaaagcttctcaaacaattttagcgcttccaattccttctacaatcgcctttatacatcccattatgaacgctaaaattatcagagtgccgaaaatcgcatgtgatctaagcctagcaaaaaatggtgtaagtaaaaatcgtaattacgctcaaaaagcttctcaaacaattttagcgcatccaattccttctacaatcgcctttatacatcccattatgagcgctaaaattatcagagtgccgaaaatcgcatgtgatctaagcctagcaaaaaatggtgtaagtaaaaatcgtaattacgctcaaaaagcttctcanacaattttagcgcatccaattccttctacaatcgcctttatacatcccattatgaacgctaaaaatatcagagtgccgaaaatcgcatgtgatctaagcctag

SEQ ID NO: 30521 - DNA, 1107 bp, Heterodera glycines
catgtcgagagcgttgttgcatagaaatttctcaaaaaaagagatagccatttttctggaatatctattaatataaaaattattgaaaaaataaaatggccatggcgcaccgcacttcgttcatgttcgagagcgtttgttgcatagaaaatttctcaaaaaaagagatagccatttttctggaatatctattaaatataaaaattatttgaaaaataaaatggccatggcgcaccgcacttcgtttcatgttcgagagcgtttgttgcatagaaaatttctcaaaaaaagagatagccatttttctggaatatctattaaatataaaaattatttgaaaaataaaatggccatggcgcaccgcacttcgtttcatgttcgagagcgtttgttgcatagaaaatttctcaaaaaaagagatagccatttttctggaatatctattaaatataaaaattatttgaaaaataaaatggccatggcgcaccgcacttcgtttcatgttcgagagcgtttgttgcatagaaaatttctcaaaaaaagagatagccatttttctggaatatctattaaatataaaaattatttgaaaaataaaatggccatggcgcaccgcacttcgtttcatgttcgagagcgtttgttgcatagaaaatttctcaaaaaaagagatagccatttttctggaatatctattaaatataaaaattatttgaaaaataaaatggccatggcgcaccgcacttcgtttcatgttcgagagcgtttgttgcatagaaaatttctcaaaaaaagagatagccatttttctggaatatctattaaatataaaaattatttgaaaaataaaatggccatggcgcaccgcacttcgtttcatgttcgagagcgtttgttgcatagaaaatttctcaaaaaaagagatagccatttttctggaatatctattaaaaataaaaattatttgaaaaataaaaggccatggcgcaccgcacttcgtttcatgttcaaaagcgtttggtggataaaaaaattctcaaaaaaaaaaaatagccttttttctgggataatctattaaaaaataaaaaatttttttaaaaaataaaa

SEQ ID NO: 30522 - DNA, 1549 bp, Heterodera glycines
tcactcatcagaccaattgcatcattgaggagtgtaggagaagccggtccttcccaattcgatcactgagtacgtttttgcttcccatttctctccaggactcgccctcgcccgttccactcgcgtcgccctcgacgttctgtgggggtggcccttcgtccgctgcccctgccgcggtcgctgcctccgctgtttctgatccttcccccgccactctttgccacgtttccaattcattgtctccttcaccctcattctgccagctgaattcctcttcgaatttttcacttcgatcaccgaagtatcagctgcagaagacattgcccccggcagtgaaacctccttttgtccttccgccggcggtttctttttgtttttaattagacttaatgagttaatgaccgaccggggaatcagcccattttagaatggttgattttgatcaaaatgaataagatcaccctcttttgtgtttctttcctccctccatttgcccccccccaggcgaccaaacgctctccgccgtccccgccatgctcagtgaatgcggccgtggcacgaatattcaattcacttttgtgcatcagcaatttggaggcacatttgtgcaaattttcactggtcatcgactcaatgcttttgctcagaattctcatgcacaaattgtcctggtcggcttttcactttgtgccctttctctgctttccgctgttaattcgttgtttgccccagggacctttgtttggtgccaaaaaaacggctgctcggctccggcttggccgtcaccggtgcccccgggggtccgtcgaccgaccccagccgaagggcccattcgagctgttctttgggcagttcgttcaagtgaatagcccggaggggagagagagagctcagcattgtttgctttcagaagggatggccaaaacagtacgaagaatagcagcagcaaacactttcttcgcgttgactacggcggctcttcgcgactgtccaaaagagtgcacatccgtcgctcgaggcacgaattggctaataaaggctggcttactcactgggccgttgattgatcgctcctctgatcagtcgaacgaatgcttttcctttgtttagctcagttgaaataccgcggccgaaacgatttagcagcggcgcgaaggaattgaggaaagaacggaacagaaaaaggtacgaaagtcatcggttgggcaatggcatttcgccgcttcagactcggcactgacacgagcagtgggtcctccaagtcgaagaagaccaactcctcctccacgtccagcgtccagaaacacttgcccaaatacatcaccaatcttttccgcgggcgcatgggcaccggtaggaggagaaatacgcttttctaccaaaagcactcattaacgatccgtgcaaacgacacgcccgaggcagtcgcgagtcgagcccagaaagtccgaccagcgggtcggaggcggttttggaattcacaaagaaattacaaaatgcgccgccaacgcgtcgcgaaacaatgcgaatggcgtacaaacagtcgggc

SEQ ID NO: 30523 - DNA, 1483 bp, Heterodera glycines
tggatggctttaaatctgcaagaaattagatggcaaataagtggttgtaaaaaacttttgggtaatgaattattttttgaagtgaatcaaacaccctattagtgctttgctgtgccgagaaccggtatgcaatggatggctttcaatctgcaagaaattagattggcaatatgtggttgtaaaaaacttttgggtaatgaattattttttgaagtgagtcaaacaccgtattagtgctttgctgtgccgagaaccggcaggcaatggatggctttaaatctgcaagaaattagattggcaataagtggttgtaaaaaacttttgggtaatgaattattttttgaagtgaatcaaacaccctattagtgctttgctgtgccgagaaccggcaggcaatggatagctttaaatctgcaagaaattagcaaagttaggcaataaatgattgtaaaaaaattttattacttcaaaaatgaattattggagggccgagtctaaaaatggtctccaaaaacggcatttttcaagaccatcaaataacaaaatgttttaaaagtggttttggaaattccgaatttaattaaactaaataaattgaccacgctgagtccgaatatggctttagatttggtctctgggttctcaacaaacctgtacagctccaacttcatgcatggagttggagcagtacaagctcagggttaaaagataggtcagatttaaggccatattcggattctactggtctaatttgtacagaaaaccttcttttttgttatatcaggttacttttttgaccataaaaaatcgagaaaaattagtgggccaattttcaatttttgcatggtcgggaaaaaatactaaaaaattgaataagcaaataaaaaatgaaacaatggcatgaaatgaaagaagactttctgacgaacaaaataaaaaaagaattattaaaataactgcagaaattacggagttatgaatttttgaatttgtcaaaaaaaattgcgcggaaacttatgttacaccctaagtacaacaatttttaaaaggaacattaaatttaaaaaaaatcaaaaaaataaataaataaaattgttaattaaaaggaccattaaaaagatggtgcctggcccgagcacagaagagaacaacatcaccaattgataggcaatatacctaaaataattgcattagttaattcattttatttactattttaattggtattgattatatgccatttttgtttgtttttttgaaaatttagtcatgatcgcgtggattttgaaaaacatatgttgtttagcaacggttgagggtgggttgttgtaaaagaggcaagtttttggtaaaattaaaaacaaaatttcattaaaattccaattttataattcatactatcttttttcccccaattttttttgacgtaattctcatcagttaattttattttaaaatgtttttattttcgctataaaattgg

SEQ ID NO: 30524 - DNA, 1040 bp, Heterodera glycines
ggggatctctagagtccttcggtcgctacaaagttcgttttggcatttgctggctaataaaatcaattgagccatttgaattggtgaacgaacggaccaaagaaaagctgatattggagcaaaaagctagaaagtcttggctgatgaagcgatgttcaataattgttggggagacggaggcgacgattcaatgggaagacaacgaaaatttggacgacaaatttaacaatgtcaaatctaatttgtgtggtggcagagttcgactgggtaagcgcaaaagaaatgcacgccaaaattacgccgccaaatttcttagtgatttttttgaaaaattctagaaaaaacggtaatcgttcacatcattggtcccataaaaaaaaggaaaaaaagggtcgttttttgcgattctgagaactaccagggggttatctagggcgctgatcactagggcgtgtaattatatggatataaaatcgcgaaatatggccataaaatatggaccaaaaatcgcaaaatatggacataaaatggcaaaaatcgcgaaatatggacataaatggcaaaaatgtcaaaatatggacataaatttttcaaaattgaatgtaaaatttcttcaaatttattggttgaaattgcatatgagatacatttccaaattttttgactcggtaaggcgctttgacaaagacggctttcgttttgcaattagtcggtcaacattcggaaattggtctcgaattttttcggcaattacgtgcaatcattttaaaagaaaaaaaacataaaagctaaaatttattaatttttttagcgcaaaatcaacaacaaaagcgaaattttcgcttttttgcttatttttgacataatttattaatttttaagaaaatttaaatttattcaatattctcgagaaattttggcgaaaaaatgattttttgaaaaatttttcgggttttgggctcaaaaaggctaatttagctgctgggggccgttctaatagaggtttttttgaaaaatgccaaaatatgacataaaatatg

SEQ ID NO: 30525 - DNA, 1576 bp, Heterodera glycines
ttgtgcggggtgtgaggtacgtggaatgtgcgtgacgttaaggagcgtttcgtcggacggcgcggctgttggaaaatagggggatgggacccgggggccgaagaacgccaaatgtcgtcattgcgaatgtaaatggttttgaccggcccacccccttttcccctgtttccgatcatgaccttaatcggctggggcaactcaggagtgtcgttggatgggatctgagcaggtttatccgaactgacagtcaaaggctcggccgttggtgtttcttcctggggtgtcggtgccaattcaacatccttaggagacgggggacagggttcggtgttgtttgtgtcggacgccaaggaaacgctgtcatggtcattaatggattccaaaatggaattggggccaatttgggaattgtcgggtgtcaatttcaaatgtgaaatgatttgagaaattaaaggggcaatttttggggtggacttagggatatggctcattctgaattagagaaaaaattaaaaatttgcgtataacattaatgggaagtttggcgaggggggtcgatttgctgggtcaattcgctaatggcatttcgaatttcggctaattcaatagaggtgataggtgagacatgatcagtgtggggggtggaagcgttaagaggacaacgagggaaacaattgggacaaaaaagggaaaaaagcttaaggaaaatgagaagaatgagaagggaaaagcagccaaaaacagtgagaaaaagggcggaaagctcaggctgctcctcaaaatatgaggccaatgaatccatgccaaagtacacggcggcagtagacaaaaatgataaggctgtgcgggtaacgggcttaccaactcggcgaaaggtatttgggacgaccttaccctttcccttggggtgacctgaagcgtggtggaataggctgaccaagagcatgaccaaaattgtcacggtggtgatttgggtccgggtacgatttgggtgccgaccagcagaggaacgtgcagcagaagttttgatccgacggcaaaacaaaaaacaaatgcagaggaggaaaatgaggacgaggcaatcagaagggaaatgaagaagccccaattgttggtggggtcgggagaggggctccaccaaggaaggacgatattaaacgaaaaaatttcaagagaaaaaatgttgcccattgctaaaaaaaggtggggagtaaaatttaaaaaaattaatgaaaaaagggagttgtgtgtggttaaataggataagtggaacataaatcggctgatcactgcgatcagtccgccttcccgccacggaacattggccaaggaaaatgaataacaaaaaaaaggaaaaaagagggggggaaatggtctttgtacaattgttgtaacggaagtcccttcacgggcgggggttgatttgaggagggagcggggcccaagccttgcctgggaaaatcttggatggaatttctgtttgcggtttttgctgattggtttgctgtaatgttctgggaaagtcagcgttcgtaagtgtattgcgatcagagggaatttttgccggaagcggagg

SEQ ID NO: 30526 - DNA, 1649 bp, Heterodera glycines
agataaattaatgaaaatttttttttgcatcttataattggaaacataaaattttataaaaaaatttcgttcaaattttggctgggggatggcttaattagaatttactaattgggtaattcatattgaaattaaaataatttactaaaaaataatttatttaaaaatatgaggtgaacaaaattcatcaaatccttcataggttttatagccctgaaacaaaaatgaaaatgtgggtggtcgtttctaaaccgatacaatggcaacaacaaccttgaaaaatttgtcaaatttatttcccaattaattacaatatttgcccaaattaatgcttttggaatttgttgaaaatgcaataataaataaaataaataaattatatgaatgctgcttgcgtgttcaatcaaacaaactggctaattaaacggggagagaaaaaatggaacgttttaattgaacgaaaaatgggcatatcaatcctattttaaatttcagctagtagtttataataaccagtagctttttcctgtaattaaaaatagaaattttaaatttgtaggtctgaaattgaggctttgatattgtcgatgccaaggatgtacatatgcggaattatttattcaataagctttaaatattttcaaattttaattttaaaaggaagcattgcccaaaatgcataaatttagaatttttttaattgacgacaattaacgaattcaattaataacacaaattgtttgttttggcagaccatttcattctttttaaagccatcttactaaaattagggaaatttatcccttttatggcatcgataattttttctaacaattttattggctttttcccattttattaaattttaagaattaaaaaatttaacacttttttgtaattaaattgaattttttaaaaaaagaacataatgagtgataccgaaaaatccattgtgcctttacagggtctaattaggttaattaatatttatgaaaattaaatttaaatagcaatcataaaaatgatgtgccgcactagtcatctaccgatgattctatttgccgcttttattttaatagtttacctagcattatgactcgtttaacctgcaacgtttggaagggtcttaggttcgaaccccagcggggtgttaccttctgtttcaacaagtagcatactgtactaaatggtagtatagggtgttattttcatcaatttttggaaaacataaaaaaaatttcataaaatttttttcatcattaaaatttatttttgcgacgcattcaaaaagtaatatttggacctgaatcattaattatcacctgattttcatggcgttttgattttttaaaatattttgtgcaaattgctatggtccgagaaacagattgaataaattcgtcaaggcctggttctcggatctctatgattaaattcccgaatcccaattttatgaattatatattaaatacaacccatgcttaatgctaattaattgggtaattataattgtcataatgagcgcgaaagcttctcagtgaatcagaatttgttgaggagtttcggtagaatgacgatttaaaaacctaagctcaactgatatccaaaggtaaattacaagaaccaaattacagaattttaaaaattta

SEQ ID NO: 30527 - DNA, 943 bp, Heterodera glycines
cgctcataatgggatgtataaaggcgatgtagaaaggaatggaagcgctaaaattgttgagggagctttttgagcgtaattacgatttttacttacaccattttttgctaggcttagatgacatgcgattttcggcactctgataattttagcgctcataatgggatgtataaaggcgattgtagaaggaaatggaagcgctaaaattgtttgaggagctttttgagcgtaattacgattttacttacaccatttttttctaggcttagatcacatgcgattttcggcactctgataattttagcgctcataatgggatgtataaaggcgattgtagaaggaattggaagcgctaaaattgtttgagaagctttttgagcgtaattacgatttttacttacaccatttttttctaggcttagatcacatgcgattttcggcactctgataattttagcgctcataatgggatgtataaaggcgattgtagaaggaattggaagcgctaaaattgtttgaggagctttttgagcgtaattacgatttttacttacaccattttttgctaggcttagatcacatgcgattttcggcactctgataattttagcgttcataatgggatgtataaaggcgattgtagaaggaattggatgcgctaaaattgtttgagaagctttttgagcgtaattacgatttttacttacaccattttttgctaggcttagatcacatgcgattttcggcactctgataattctagcgctcataatgggatgtataaaggcgattgtagaaggaattggaagcgctaaaattgtttgaggagctttttgagcgtaattacgattttacttacaccattttttgctaggcttagatcacatgcgattttcggcactctgataattttagcgctcataatgggatgtataaaggcgat

SEQ ID NO: 30528 - DNA, 1219 bp, Heterodera glycines
cccccgggaccttcaccccccgcgggggtgaaaatacacccctaagaatgacatattcatggataaaaggcaaaaaatttatacaattttgatttttttaaccattttgacaaattttttatgaattaaagttaattttattattggtcgttgatgtgtagtgtggtgtagtggttagtgaatcaaccttgacattactttctaacgtgagttcgattccggttgacggtttcttttttaatttatttttttaattttaaaattcgcctggcgctgcctatcggcatcgcagggcccaaaaattcgtaaatcttattaaaaaaattctctaaaaattgcaaaacctatcattttttggacaaaatctattaacattcccggcggcgcctatcggcaccgccggacctctacgctcgcacattcaccaagtttttttttttttggaaaaatgtgcctcaagaaaatatgttacaaatctgagttccaattttgagtaaatcatgataatttaatatattaaaaaacaaaaatttatcgtaaaaatcttattttttttgtaaacatctgttagaaatcgagcttaaatttcaaaattcgccaggcggcctatcggcacctccggccccccaaaaacctattttttcttaaaaaattagccaaaaatctctaaaatttggtaattctttagacaaaatctgtgtaatttatgccaaaaggaattgaattgaggcgatacattgactaaaggaatgtggagccatcacatcattcataaaaaattaattttttgtaaaattttttggagttaattcaaatcaaacccccgcccccgcccccgcgggggcggaattatcgtgcccccgtccccgcccccgcgactctgacccccgccatcccccgcccccgcgaaaagccacccccgccccacggggctcgaaccctagttcattttttgtaaaaattgaggatgatttgagaaatccaccaaattgtaatccctgtcatgaaagaataatgcagtttctaaacccaactgatgacacagtgccatgatgtcggtactctgaagaattgcaggttggaattatgtcgagataggagaatggccctttttcgatagtcaatacgttccgaccgtttgatgcggtcacgttttattcggttgtggaagtaaactttagggactctgatgcttccagtgagctcatttcctggcact

SEQ ID NO: 30529 - DNA, 1469 bp, Heterodera glycines
cccccgactccccggccattatttggggaatgagggactccaagcgttgtaaaaatacaaaaaattaattcaacaacgaaggggagaaaggttgaaaatttatgaaaattttgacaaattttcttattattaattataaaaattcagaaaaacttttcggcgccgcctatcggcaccgccggcccccccaaaaccaaacttttttggaaaaaattgtcccaaaattgcaaaaattggtatttttaggaaaaatctgttaacaaatttcaaattttcaaaaaaaaattttcctcgcggctcctaacaccaccgccctcatcacccctttgttccccaaaagtttttctgaaaaagagcgccgcaaaaaatgatggtcaaattagatgttgagacgggttcgcaaaaatttctgtttaaccccactcctttctacgtatttttaaaacagggcttccattaaaaatttttcaaaatataaacaccaagtccaaaataagattttagtgtcaaaaatatgaacatttagcaacatttttccaatcagttatttttccaatttattcgatcaaattttatatttttagtctcctattatcaattttgataattttggggaggaaaatgcaaaattataaatttcagtaaattcgggatcaaaagatcaaaaaaattttgcgccagaccttaaaatttcttgaaaaattgtgacattatgccataaaatttcaaaattataagtatatttaagaaatcagaataattttagtcgctaccccccccccccccaaaatcagaatattcttataaataagaacaaatgtaaaccccagcaggtttaaaggccaacttggactcactcttactggcgctaacgaaatcagatgattaaagtgaaaaaaagaagatttacgagcagttaaaaagaaaaaatggtttttttgggttaaaaaaatttggccattccccgatcggggtccccgatccccgacaattgagctcctccccgccccgacccccgacatgtcgccccctgaggggtcggggagcaaccctagtaattagtaaagggacaggcaaaattaacaaattattcaataaatattaaaattaaatttagtaaaaaataataatttatcataaataaaattattattttttggttgggtattttaattattaaatataattgtccatgatcaatttgagcaattttttgttcgaaataagcattttgtgaaattctgagcatgaaaaatcaaagttgatttttttgcggcgctttttccaaaaaaactttaggggaacaaggggggccggcggtgccgataggcgccgcccggacaatttttgcttttttaatgcaatttgttaacagatttatccacaaaaaagccaaaatttgcggttttcatcaaatttttgagaaaacaaaggatttttagggtcaggcggtgccgataggcgccgcc

SEQ ID NO: 30530 - DNA, 1248 bp, Heterodera glycines
  unsure (1)..(1248): unsure at all n locations
caatacncaacacaccttttcccgcaatttgtgctcctctgttcgcacagtgatcggctggaaccacaattgttggaaggtctccaggcacagcttgcgaacgccctcctcgtcgttgatccgttgcagcagttcgacgagaatttggggccgtcgctcgtattcatgtcggctgaacacaatgtcgcgcagaatgcgaatcacgcgcttgcgcactgctaccgcggtgtcctgttttaagcaaatttaggtgaggtaagtcttggaggagttaccaacgaggaaaatcaaaaatttccagcaaaaaatgctatttcaattctggatttaaaagtgtctcaaaaaaaaaaaaattatcggcacaaaaaccctctcatgggatgcaaatgccaccgacctttgtccgattgaccaaaatggagtagtacgtgtccaacaagtcgggccgggtgaccaaacacttgccgatcagatcgaacgttgcttctcgcacggacgcgttcgcatcgatcagccgatcttgcacaattttgttgacctccgcgatcattagcacctgggaattgaaggagaaatggagcaattatctaattatacggtaattagttgagtttggtcatggattatgtattattgctgtacttggtagtctgcttccacaatttgggccaagcatttcatcgcttttgctcgaatggcgaccgggtacaggtcggggttgaagccctcgaggatcttcttcaggtacaggtcgaatgactgcctaaagcatagaaatgtttaaattgttattttacgaaattagaagcctcaataatttttttagaaacattaccaaaaattgaaaaattttgataatttgtttaatttattttcccaaatgacaatagaggaaaaagcatctatttttttttaaatcttgtaaaaaaacctttgaaaaaatataaaaaaagcgtacgaaagttccttcttggaggccaaatatttgaccacccaaagcgcgtcactgtccaccatgacattgcccgacttggccaacacttggatgcgtcgcttcagatgctgcttgtccatgagggcggtgatgaacgtcttcatgctggcccccttctccaaaatgcgggtcaacttttgctcatatctgaaggaaaggtggaacaaagtcatacacaattatttactcaaaaaggttgtataaaaaatagacacggatacagcattttttcgaaaatcctattttcttaatgt

SEQ ID NO: 30531 - DNA, 1502 bp, Heterodera glycines
cgtagtgaaaaatgaatttttgatttttgttcgattccgggtcagttgttcgaaaaattgtaatcatggagttttaaaataaaaccgatacaaaaaaaatttggcttacatttttctcattttctttaccacgcgccgtcttccaagcgattgctgctgattttcactaatggcggcaaaaattagctggcggtcggcaaatacatttttgacgggcgctgccattgcaaattttaatagcgagaaaaataaaagccgaattggttagcagcgagactaaacgaaagttaaacattttaaacataaaatagaataaattggaaagtatggggtgaaaaaattttaataaatttcttaggaaaggcgtgtgggtactcaaaacaaaaaaaaggtcgcggattcaaaattcggaaaaaagtgaagaatacaactgacaacttcgattttcttattgaattatatatctttcgattccacttgtaacagggatggaccaaatctaaaataaaacgcgaaacgcgttttgcgaaagcaaaaaatacgaaatagaaataaatgcgaaacgcgaaattccaaaaaacgcgaattgcgaaagcgaattttttagacaaaaaagtttgctaacattttagtcaggcgataatcgatttattgatctgctgctatagataaagatgcttctcttttgttgcaaattattttttatttatttatcgataaagaaaaattgccatcagaagggcggagaccacttactctgatgactgatcacataaaatagtctcagagtaagtgaataaatatcgagtgagatcacaggttaaaacaaacaataatgaaaaaataaaatggaagtcagagtcaatgagatgcctcaaaagttaataattgctttatacattggtgctttgagaatcaagagtcaattctaataattttttaaaggtgtttaaggagctagacattaacgttttatcaagggcattccaggccttgactgatctgttaacaaaagatttggaagatttttagattgtaatttaacatttaaccggaaaaataacttgtttcgagtatttaagttatcgtagttcttttaaacagagaatttggatccagatgtgtaaaaccatcgtaaaattttataagtagggatgcgatttctagtgaaaaaactttttttgctcaattgttttgaagaaaggagctctaaaaacgcatttctgcgttaaaattttttcatttgggcgtcatttttcgtcactagaaattagggttgagcggtaccggtaccgaccggtaattaccggtttttttggtaccggtaccggtaccggttttttcaaaaatcaaagtatcggtaccggtttgtctagtaccggtaccgccagtaaaaatttgcactggtaagaatgggggtctgggtgagaaaagagtagggaatggtgaaaaaggagaaattttttgagaaaaaaaaaattaaattatttatttacatttaa

SEQ ID NO: 30532 - DNA, 1172 bp, Heterodera glycines
  unsure (1)..(1172): unsure at all n locations
aactttgcagggatactccccggtaaaggactaacttacactgaaatgagcgccgagctagctggctcaaaanaattttcgaaaatctgagtctttcgttnttatttattttttgcaaaattaattcttaaatatttttcagaaagggttctgaaacgcaccaaattttatttacatgttagtttaggcactctgatgctttttctatcaaaaagggagatgaataaaatttttaaaaatttttaattcctttttaaacaggccaaaaagtttaggcttaacttttttttcagaaactgatcagaagcgcaccaaactttgcagggaatctgaaaagaaggagaaatacctttttttccccataattgttcgagtcccccaaccggacttactgcaaaaaattttttttttgttttcggggcagtccccccgaaccgatgcgcccagatttatggggagaccgaatccttcgggagtagcttccctatagcctgtactttaattctgcgttggatttttgctccccataattgtttgagtaccccaaacggacacttgaaaaaatcgatttttttgttttcggggcagtccccccgaaccgatgcgcccagatttatggggagaccgaatccttcgggagtagcttccctatagcctgtactttaattctgcgttggatttttgctccccataaatgtttgagtaccccaaacggacacttgaaaaaatcgattttttttgttttcggggcagtccccccgaaccgatgcgcccagatttatggggagaccgaatccttcgggaatagcttccctatagcctgtactttaattctgcgttggatttttgctccccataattgtttgagtaccccaaacggacacttgaaaaaatcgatttttttgttttcggggcagtccccccgaaccgatgcgcccagatttatggggagaccgaatccttccggaatagcttccctatagcctgtactttaattctgcgttggatttttgctccccataaatgtttgagtaccccaaacggacacttgaaaaaatcgatttttttgtttcataaatatttttttcagaaagtgctctaaagcgcaccaaattttatttacaacttaattttagcactctgatgctttagtatcaaaaaggaagatggag

SEQ ID NO: 30533 - DNA, 1394 bp, Heterodera glycines
ctgtcgcatggcaactttgggcttgaaaaagagaagacattaaatatttaaaatgattttcatttaatttttgttcatcggtttattttgaaatttgtcatcctcaacccaattacacgttgagactacgaaaatataccccctaatcggcaccgcatcgaaaatttcaaattttcgccgatttttcatattctttaaaaaggcatattttttcagaacgtttcccattttaggttaaaaaaattttttattgggaggaaggaatactcgagcccaattcatagccggaaaatgttataggttttgatttcgtgtcttttgtccatttttgctctgttttgtctctcttcgctgtccttactcaaccaggctgatgatctcgcgcaactgttgcggcggccgcagcatcaaatccacgttcggttttgttttggagtgaatttcaaaaaaaaatactgcgagcaaatgtagcgcagcgattttagcagcgccaagtaggtgttcgagctgatgtttgacggctggaaaacagtaataaaatataaaaatattgggtttttaagacaattagccgttccatgattaattggacaaaatttcgaaaaaactggtagcgaagtaatgtctcggtcactttgatgcacttttcccattgcttacctgaattgccaacagcttttggacattgttgaggaattcaaagttggcgcccacaacttggcggagtttgtccgggtgctggcgcatgttttcgatgatccgattgaagagtatgcagatcgattccaggctccgcttgtcgtcgacatacacgagccgttgggtgaggtcggaaaggcctgcgaaaaacgcattttaaacataaataaaaaattaaatttttgttaggaacttacaatctttgattagttaaaattcagtttgggtcacgtgaatggcgcaattcgcggcgatggcaaatgccagactttgtgaggcaaacaaaaaaagtcgacatgcgaaatggtcgacgcaatgccgccggacaacagaatgtttttggcattgcgacgcgacatcacttccaaggcgttcagcaactgttcctttattaaatgggggacggatttggcgattaaaatttaaaatgaatatttcttattaaaaaaggtaccgccacgtcaatgtattcaatgcgcttcagcttttgaaacagcagcggaatggcttctgtaatgccgggcaaagcgcgcgcggaagctgaacaaattgggcaattaaataccataaatgaaaatattggtgcttaaagtggcataataaagtaacaaaaaatactaaacgagtggctgtcagcatctgttgaaattgcatcaaataaaataagaaacaaaaaaacaattaccaattcaaaa

SEQ ID NO: 30534 - DNA, 1500 bp, Heterodera glycines
tcggcagaatcacttactgagatcttgcgtgttggcccttctttatttcttgcaacggtgtcagcgtgagttggagtccttttactacaaaaaaaaaacaaaattcataaaaatgttttggaaacgatctttgatacaccgagcaaatccgtccgaaatgatgggaacctaatgaaccaaaaaaatgttttattgccataaaacttttttccctctcaactgttaaataaaacaagcataatagctttaaatgtttggaatttacagataattaggccctcctctcaagggagaaagcaagtgcaaattttgaaaatttcaatgaaaaatggaggggtgcgtcgatcaaaatttttgaaaatttaacgacattttttcaaggtcccagaggcttacatttaataaatatttccattccaacgcctaatttgtatgaaaaaactgagttggcaaatcatacttttgacaattgtcgagtcgagcaacagccgtttccatggcacacaaacggtcagttcctccacatatccatccttcagtgaaaggattcgaacacctaaaaaagtgggttaaaaagcagttaactttagatttggagttgagttgggcccataaatgtgccatttagaaaagtcaggtcgaactggttgaaaaatttgcgatagggtcgaagaaaacgccaatttttgataccaaacccggttccaatcaactctaatgattgcattcacatattttttggggatggtttctaaaaaaaagcagggaaatgttgcaaaaatggcacaaaaaattggcaaaaatgcgtaaaaatttgtccatttttctcccccacacccacccgatgcttccaacgtctcattgatgtactccgtgttgagcatgacgccttggacactggccgtgccgtcggccaagtgcaactccaactggtccgagctcagctcggtcttcaaatattggcccatatatctaaaaatggcataaatttttggatttttagggtgtgtaaaaccaaaaaaacctttggattaggaaccggcatatctgttttgtgaacacagaaaaattcatcaaatatcaaaattagttggcgctgctgaataataatgaatggcaaaatggatgtcaaaatctgtgctaaaaagcaatgattaatggggaaattgagactgaaaattttaataagaagcactcagcgacggtcttagttggtatttaggatttttcggggcttaaggagaggcgacccgcttgaaaaaaaaaaaattttttagccatttattcggatttttcgtcgttttctcacgaattttacccccccccccgctcccctccactcccgagatcgtctctggttcgaactggacccaaccaaagcgggatttctctggtcgagattaactcaattttactatgtcctgggatttcctggacacacagttccagtggacaattcctcggctgtgttgtaagggtaataatctaattatgccgtgg

SEQ ID NO: 30535 - DNA, 1111 bp, Heterodera glycines
  unsure (1)..(1111): unsure at all n locations
ccaaattgaagttggtgttgatccgcaaactcctcttgttgacgccaccgcatttcagccgcagcaaatggagaaacggcagagcgcacgacgatcgcgagcacatgaggcgagtttggcatttctcactcaaaacccatcgtaaaattttggccaatcgtatttggggatggtattggttgtggcatttgacgctgatttttcctttgatgtttagcgcgaggaagaaaacgaggacgaggaagtgttcactcgtcggacaaagaacgttttgcagtcaatcgcgacaaaattgcgcgcggcaaatacaaacaaagtgcgtttgcttattgttaatgatttgtattctctttttaaaagcaaatgcattagcttggggattcaatgtcaagatcaaccatttaataaccctttttagattgtcttcgaagatcttttcaccaaagggtcgacgcgtcgcactgcggcacagaaattctacgcacttttggagctgaaaaaatggcaagccattgaagtggaacagcgcgatgctttcgacaccattgaaatttcggccggtgcgcgaatgaatgagacaattaaattggcaatttgattgaagattatgggagggttccttccgtactaataatgatttttcattggatctcaattcgtatcttaatggccatgaaaacaacaaaaggctctgtttgatgtatcacttcttcctcatcctttttatttttcagtttgacttttttttgttcccccttttctctgtacttattttttttatttcagttttgactacttaacattttgtattgccttgttttttattcatatttcttttacgttagccatttgaataaaaagtgcaagaaacatttttgggttcaattccatatttttatgcatacattaagtcataatacgaatacaaaataagtaaaaaatccaattaaaatcgataaattanagcaccaaatttcagtgaggaaaaacggaaaccgaanagggcgaaggaatgagaaaaaataacgataattaattagttcaccgtgtcgtataataaacaggcaaaggaaaagcggagaaagaaagcgatcaccgaacagcaaattga

SEQ ID NO: 30536 - DNA, 1048 bp, Heterodera glycines
gcgccgagaaaaaaattccagaacaatttgtataggcgagattaatctgagaatgcggttggaattccttgcactgttgagcagaaaaagagatatacatttttccaatcttttcacatacaaacgcgccgagaaaaaaattccagaacaattcgtattggcgtgattaatctgagaatgcggttggaattccttgcactgttgagcagaaaaagagatagccatttttccaatcttttcacatacaaacgcgccgagaaaaaaattccagaacaattcgtattggcgtgattaatctgagaatgcggttggaattccttgcactgttgagcagaaaaagagatagccatttttccaagcttttcacatacaaacgcgccgagaaaaaaattccagaacaattcgtattggcgtgattaatctgagaatgcggttggaattccttgcactgttgagcagaaaaagagatagccatttttccaatcttttcacatacaaacgcgccgagaaaaaaattccagaacaattcgtattggcgtgattaatctgagaatgcggttggaattccttgcactgttgagcagaaaaagagatagccatttttccaatcttttcacatacaaacgcgccgagaaaaaaattccagaacaattcgtattggcgtgattaatctgagaatgcggttggaattccttgcactgttgagcagaaaaagagatagccatttttccaatcttttcacatacaaacgcgccgagaaaaaaattccagaacaattcgtattggcgtgattaatctgagaatgcggttggaattccttgcactgttgagcagaaaaagagatagccatttttccaatcttttcacatacaaacgcgccgagaaaaaaattccagaacaattcgtataggcgtgattaatctgagaatgcggttggaattccttgcactgttgagcagaaaaagagatagccatttttccaagcttttcacatacaaacgcgccgagaaaaaaattccagaaacattcgtataggcgtgattaatct

SEQ ID NO: 30537 - DNA, 1233 bp, Heterodera glycines
aattattaaaatttggacaagctcccgaaatcaatcgaaattctttagatttaaacaaaaaaaatatttttttgaataatcttacatttagatcacttaaaacaaaatttttattagttcaaggataataaaatttcaacttaaagctaaagccaggaatagcaatttaaaaaaagcaatttaaaaaaaattcaatttatctaactctaatcaatataatgtgtttttttttcaaatttgtcttactgtaatcgtgaaagtcgggtcgatcgtgcaacaaaaggatgctgaactctttggtgtcgtgcaatttgagacggaaaagaaatgagacaccgttaatcacttggacttgcaattttttgactaatggaagatgtacgcttggcttaaaaaaaataattttttttttaattgtcatttatagagctcgacattttggaaaaaaaatattggatctggcggtctggatttcttgtggacaaaacaccaggaacatccaagtctaggaaaaatcgcaggcttggcattgcctggactctcacgccttgatgatctggatttttttttgaaatttgtactaaaatgcaaacaaattgtttaaaaaacaattaaatgcctaggcaaacattaaaaagtttctaattgacaaaaaaaaagatactatataattttaaatgtatttaatcaattttttgttagcttgaaacaagacatgttcactcgaaataacaaattgtaaaatattatccaggaaatccagctttttggtgcttaaactggaccaccaggacttttttcatatctgacctgaactgatagcctggacaaaaagccaggaaaaatccatgttgccgaaaaatggcctgggtcacccggtgttatgtcgattccaaaaagtgcaataatcaaaaatctgatttttcctattattttttaccattttttaaattaaaaatatgttaaaatttaattaaattgatgatgcttaattaaatacacattcttctaaaaagtttttttttatataactcgaataaaagaattaaaatttacctaatattaaataaaataattaggtaaaaccagattatgttaagctttttcattcaattacaaatggactaaattaaaaaataaactcaaattttaggaaaaatggaaatttttttttattaaatgtacccgcttagaatgaagctaaattgcttgggcctaggtctatgcttagga

SEQ ID NO: 30538 - DNA, 1304 bp, Heterodera glycines
gggatttttagtgcatattttatgcgcatatttgccctttttgagtgcatacaacttataaccctagtaattatgctcggaataggaaaaaaacagggttcggttcgctggacaaaaacggaaattccgagtcggacggggaatcccgagcacaatcatcagttgtaacatcattatgccttttatatcaattttgggttagtggcctccttacttccttacttatagtgcttctctcctctcctttcttttcccttctttctttctctctctctctctttttccaccattttctttaattttattttttgcttcctttttctccccgtcctctgctccttctcctcattttcttcttccttccttcctttattgcctttgctggtgggcaggcaaatcgacgctttgtttgttgatctgaaagtgtttgccgtttttacaaaaaaataaaataaataaaaataacaaaaaaaaatcaaatgaatggtaaaactaaaaaaggaaaatgatcggagggacagagaaaccatcggtcgctaaaggtcaattttaaatcattgtttgtttgtttttttggcaaagtattcgccgtcttcttccgctactccgtctgtgtgcccttctccaccatcttcccattcccccggtcaaatttggtgccaaattttgtgccatattcggaggagaaggcgagcaaaggctccgtcagtttcacctctttggcgtaatgtctcgtgtaaatgcatgaagccaaagtccactaaaacagtgagaaaattaactttctattctttgtgattgtccgtgccttcgaagtcatccaaaaccaaacggcgccgatccaaagattttcgccttggagcccttcgcgggtcaaagattggccccaaagggcggccaaaagcaaacaaatggccatgccgacaaaagtgagcacacaaaggaccaaatctgatcagcgaatgagggagcgattaatataacaattattaaatttctattgccttagggcaattttataaattattcattggatggattttgtaatttctcctgcgtaaatggcactttctttcctaattaacaattaacccactaattgtccacgccatttgaaggcgtttcggtgaccagtcgaacatccacgacttgtgatacgccaaatgggtgaagaacaaataggcagcgcaaacggagctgaaaaaggccattgcggtggccaaataattctgaggggggggggggggggaattggaaacgaaacttgggaattattaatttattgtaattaaggggatttgcct

SEQ ID NO: 30539 - DNA, 690 bp, Heterodera glycines
cgacaacgcatcaagtcggcatttacattctctttgtacacagaaaaatgagtacatttttgaaattgaaggggaaatgcactttttccgtcgaaatgcttaaatgaagtcgaactctgacgatgataccgagtaactccatcagtcgcggctgttgagacttgatgccaatgcaacgaagccatgtttgcatgacgggcaaagcgtagatggtactcccctttttgaatttttgttttgttttaaaatagggttgcaattggaaaattcggggttggaggcgtcggggttgccaaatcgttcgaggtcggggttttttaatttttgccttataccatatagttaaaaaattttatattattttagcttaactttttttattattcaccattcaaaatatatctttattgtaaataaataaataaatctttggtcaaatgtctgtcgtcgcttttacacccgaaattcgttgctcttttccgcttcccccgcttccgttcgcttttcttcgctgctgcccctccgctgcgctctctccggctccaaactcgacgcatcggcgaactttgccggcccgttgacgcgtgaaaagtcggaatgacggcactgacggaagagggtgccgtagttgttggggacaatgaaaagggaaaatggacgcacgacgggtcaaaagggcactccccgggg

SEQ ID NO: 30540 - DNA, 1326 bp, Heterodera glycines
  unsure (1)..(1326): unsure at all n locations
ctttattagtcggacggagaattgtgacgtccctcttttgtacttttattggaaaccgttgggctaattccgccgctttttttgtgggagaaaaattggaaatgaaaaattctaatttattgaattctgttaagaaatttctcaaaaaaacccaaaatgtcaaattattggccgcttaaaagtctattggacgaataagtaagtgctcttgacccgaatatttatatgtaatttatctcggcacattaaatctttgccaaaattaaagtttgataatttttttaaacccatattcagagatcactttttgcccgtttttctcaagtaatttctcatttaagaccttagattttttccgcacggttggaccgctaaatcaaatggatttttcgaaaaattttccgattttattggccgagagggcccaatttaaagaattaaatccgttttcgcaacaaaagacatttcaattcgaacaactgtaaagtcaaaagtcagagttgaattgaattaattgtctgtcataaatttaataatgtgatcgaagttcataaaatgagataaaataaagaaagaataaatgtaaacatttgtcgttaacttttgtctttcgcttctgcgtttaaatttgagtgtggaagtgcctaaacatttaaattattttaattttcattttaatttttgagaatgaaaatgcctaaacatttaaaattattttaattatttttcaattttcgttttgatttttaccattttcgcagattttctctctctgcaaattccgatttcagctgcacattgtgaaagctgcccttctcaaagtcctccttgatcttcacgtccaacttcttcctcagattgtccctcaatttgcgcttaaatgcgctgtttgccttttgttctgccgccatttgaatgcccaccagccaatgcctcaggccaattgagtttctgtccaaatttgaatttcgaatttaaattagtctttttttacccatttttctccaagtcggcagaagggcattccgttgggccgatcatttttgggcggacgtggcaaaagtccacccaaatggccaaggggttctccacaaattcaagcagttcgtagcgcagcctttttccgacaaaatcgcagaatttgtccacgttgtgacttgagcctttgcattcgatgacaataaaatgttcgtactcaaacaataaaaactaataaatatatttaaaacatttgttttattactttctcagtgaatgctatcgcttcatcttttngttccattttgctttctcattgtcacatgcttaaataacaataaatctcaa

SEQ ID NO: 30541 - DNA, 1257 bp, Heterodera glycines
acactttttgaccacctatattttgatcaattgtgaacatgtgtaaaataaatcaaataaatgtttatgtcacaaatgcaaatatggtatcattggaaagcccataaaaaatgctatccaatggtatgctacttatctgttgaaattggaaaatgacaattttatacgcaattatttttttcaaagcatgatgggacaacacttatgaccatgactgtatgtcctgaatttgaaaaaaaaacttggtcaacctgaatatacatatacttctgaacaattctaatgctaaaaaacaggtactcacgcgaaaactgaataaaaattttgtatttggaaaattttatccaaaaatttttatgttctaaaattaccggtttttaccggtaccggtaccggtaccggttgaaaaagttggtaccggtaccggtttttgcagtaccggtcagtaccggtaccggtttttttgcaattaccgattaccgctcaactctactcaaaatgcaaaaatgggaaaatatgcatttttctctaaaaccaccataatatgcattcatcttagtaattcttttcacttatttgcttttcattaaatataaatctttttccacttgaaaatttttgttcgtttaattaccaattcagtttctttttcgtccattttttcaatctcccattctttgccaaatatttcaccaaaagttggccgatgttttccattggttttacaaaaaatattaacagataaattttatcgtttaatttctcttatgaaaaagggcaaaaaaaagataatctttcatttatctacgaaattataataaataatttttaaattttattaaggaaataaaatgaaaaaacagataaatggcaaaaatcaatcatcaaaaagaaaagaaaaatattaaacagataacaattttattaaaataattatattaaaaaataattttttaccctctttgatttttgttgataagattttcatttctttgtaataggaattggctgagacatttgcctaataatttccttacaaattagcaatcaaaaacctagataataataataattttaatattataaattacaatttattttctttttgttattttttatcatttaatttctgtgtttttagtagggttgcaaccccgacgtcggggttggaaaattcggggtccggggttgtcggggttggaagcttaaaaatatttattattcataataataattttatgtgctttttttattatt

SEQ ID NO: 30542 - DNA, 1924 bp, Heterodera glycines
  unsure (1)..(1924): unsure at all n locations
taatgcccgtaaaaatttgatgagcgactcctcnttccctctcgtgagaagtgcgccaaaacattccaccattaacacccgaatggcctcaaagacgacaactactcctgacncacacttcaatcccaatgaccgtgcctttgtctctacctgcacccatcttgagttaaacgcagcattggaggccggctacaccgtccgcaaagtcttccatgtcctacaatacgaccaatggagcgacaacatcttcaaatcttacgttagcgaaatgatggccctgaaaatccatgccaccggcttcccttcatggtgcagcagcgaagaggagaagaaggaatacattgaggagaaccgtcagcgatttgggattctgttggacaaggaaaagatgaaagctgaaccagggaagcggtacatcgccaaactttgcctcaactcactctggggccgcttctccatgcggaacctcctctccaaagcaataatcaacaacgacgaaagcctgattcgccaatataccgacgacaagaaaatcgaattagtggacttggaaatgatggatgaggacaacgatgtttttatgctgacttaccgaccaaaagaagaatttgtcgacgaaaataaatactccaatgtcgtcatctccctcttcacgacatctgcagctcgcctctacctctacgaagctcttaaaaaagtagccgacacccccgactgcgaaatcctttattacgacaccgatagcgttatttacgtgcaccccgaggaaaacgacccactaccaacaggaaagggacaccttggagaactaacagacgaaaaccccgaccacgatatcctggagttcattagtgctggctgcaagaattatgggatgaagctgcaacgcaaggacaccggtgaaatagaacatgatttgaaaataagagggttcacccttgatgcacaaactgttcaaaaaattcattacgatactgttaaggaccaaatcttacgttatgggtccgatgaccccgctgaccctatcattgtaacttacccccattttattcgccctaatctaatccaaggtaaagtgtatactcattccctcacaaaacattatcaacccatattcacaaaaggtattattaatgattcattccaagtcctcgaatttggttatcgcaaatgataagtatgcattctcaattaaattttctgtatattagttttcttattgttcccttcttttctttctctctgtttatatcactcatgtgggacggaatgacccctggttgatcctctccaacactccaggccatccatctgagatgaaggtggacgagctgttcattattgtaacttataataaaggagagacgagcagacgatgagtgagagaaaaagtggtaaaaatggtcaactgctgcattggcagagtcagagaggggtcacaaagagttcgcacagcatcgaatatttccttcattttaggcgtcattcttccccactgcacttctttcttcggtttaattacccaagtttgaggtacttggcgtgtcctgcccataatatctgtggcatggaataaattttggaactgcgctgcctaacggcggtgcttaaagtgcgctaaaaatgatcaaatgattatcaattttatttttcttaattccaaaatgaattcgaaacgcaaaaatttaatcataattcatgttgtaaaaaatgcatttaaaaataaaaaaattcttgaatttgcttctgaattttttaattttaaatagaaaattactttttcgaaaattttacacaaataagaggcgaagaaattcaacgaaatttttattaggattttgatttaaaatgttgagaggtttaacaaatttgtacactgaatgttggatcctcaacaccaatgagaaatgacaaacagaaaaga

SEQ ID NO: 30543 - DNA, 1687 bp, Heterodera glycines
  unsure (1)..(1687): unsure at all n locations
taattaaatactttcttgggcattaaattccttttttcatccatatagaaaaataaatttaagtcctttaaaaccgattcctcatttctatttgcaacttgtcaaattggatacaacaaaatttcatcttttgtccaaaattttgagaaaaatgattctacaaattaatttactcgccatcatacggtaaagaagtcatgctgtctgtatcttaagagtaaaaaaaaatctgtacaaaaaagaatgtttactgtgtcttacagtattttagaggtttactgtacaaaatgtaatcacaaccaattaaacattggctggccatcccagcttcaacccaaaaaaaacagcttactgtcatttcgtccgcttcgtcgacatatcccacgtgggggttgttgaaccaactgacatacaagccggtgaacagaattggcttcgtgaaaatcagcatgtacaagccgtacaccgaggcgagcaacagccacacataagtgcgccatgtttggaacagaaaattggccaaccgattggaaatgatttgaacacatcgattgattgccaacaacacttccgctgtgactcggacacccacaaagctgagcggaattattattattttttaattttgaattaaaattttaggatattttacattttaccactcattgtcattaaaaattaatttaattttcatttattttttggatgttttctgataaaaaattctatttaaaaccattgaatttcatatttttataatttgaataaactttcatttggcaaagttgtaaaatttatcgacaaattagctattaaatgaattcaattagcgtaaaattttctgttccagtacaactgagacagaaaggaattatttcctgcttacagtataacactatctacagtgtgtatttgctagcaaaaaaaaattgatttaaaaaattttttttttatattttaccaagtccaaatgctccgctgatgtaaatgaagcgtggcgctgtgcaataaacggcgccgataattgcaaaaatgcccgtcagaatggcacagatcaacaagctcagcatgtcggttatggcgatataaaacatgaactggaaagggccaaaatatgcaaacaatttaattttcatggcattttcattattatggcatgcaaaaattgcataaaaaatcagtacaaagtttcgaaaaggttgaaaataaagggtaattcacccgttgggactcgaacccactattattccaaaccgaactatgccctaaccgactgatacgggcacaactttttggcattcctactcggttattgattaaaaaattatatttgatatttaaaaactaaaaatgaaaaatttataaaaagtatatttgatattagaattataaaaaaatagataattttttttcggttatcggatattagcaatttgggtatcattagacatatcttcttaatgagctttattcgcttaaactatgggattctattgggctaaaaaagctaatttttgtttaacagcgcctaaggtggctgcacccaaactccagcagaccaacccgataacaagtggagtccgtgtgctttcgtattgcgatcatgcatgggatgtacaanatctannattaaaaaaataattatttaattatttatttatttttaattnaatacttcacaaatgat

SEQ ID NO: 30544 - DNA, 2152 bp, Heterodera glycines
  unsure (1)..(2152): unsure at all n locations
gcagcagttggaggcttatgcccancaggggttgggtgtcggtggccttggcggcggactcggcgnccttgggggtctttgcccgcccggattggccactggcggcggttttggccttggtacatatcaatgcttttcctatgcttttaccaatgggttttcatttttacaattctttcaggtggactcggtggacttggcgggggactgagcactttgggtggacttggaactggaggacttggagctggtggacttggaactggtggacttggtgggttcggtctgcccacggggcttggccttggcggctttttgccggacggttcgtcgccagggctgttgccgggtgcactcggcaagcggcgcagacggcggaggcggaggacgcgcgaacgaagtgccaaaaatgggccatctattggcattctttgagagcaataaagacaattttctcattttttaaaatttcaatttaaatttttaattgactttttgaagaatgaacaaaataactcatcacttttcttatcatttttgggtacaacagaattatattttataattacatttatactttctgcttacgttttacgactttatccgatgaacgacaatttttaatcagccaacggcaaacactaattgaaattgcaaaaaagaaaagaattactaaatgacgttgaataatgtactgataaatagataaaatgaactgttgaaaaaatgcagcgaaaataattcatgaaagggagcaaaaacgaaattgggagatgaataatttgtcatggccaatattcggcaaaaatgcctgccaaagagttggaaatgccatttaatttgtcgtggttaaattgaccagctaattgccctttgtcggcactctttgatcaccgaatgatgagtcatcgctcttttcggcgtttgctctattctcacaattctccgctccgtggttcactgtatttgaacgattgtctttgatcatcggacacttctctttgcttcgaattggcccttcggggcattgcttcaattttcgcttatcattttgttcgcttttctcacatcgactacgtaaattggcaattcgtactcccccccccctctcctccaccatttttctacttctgtcgttcgtccatcttcctttttctttcatcgctgctggaattttgttatttaaaattttgttttttagtataagtcaaaacttgataaatcattaattaactgaaaactacaattttctttacccaagggtttttggagtcgctgaccacgaatccggcatctgtttcgaccaattctaaacccccggaccccgaattcgaacaaaaagtcgaagattcaaatttttcgaattttgcattcttggttcaaactttgtttaaatacatgaaaatgaagttaaagtcattagtgcttcaataaaagatcatttaaaccatttttagactaaaaatggaaattcgaaaaatttgaattttcggctttgttcaaatttgggtccgggattcggaattagtcgaaatggatgccgctccgtgatcagcaactccgaaaacccatggaaacatgttttcatgttttttgaaaacaaaaaaaattttcgaaaaagggtggggggataaactttactattaccgaaaattactcatgccagattatctcaattttgtttcgcgtggggggggcacaagttcgaattttccttgaaaatcctttcgagttatcccattaacaactacaagggagtaggaggaaaattaggtcataaaaatatcaaccctactgattattatacagaaaaataaggctttacaaaaattaaacggagcgattaatgccggtggtttgtaatgtactcgaaaatgatgtacagttgcttcgaaaaacccgcaagaaacgaagaatacacttctgaaacttgtccaaatgttaatccaagccaggccgaatagaaatgggataaatacccatctctagaggttttatgaacagggatagtcaagaaaagacttgcctttttaaatacggaccgattttaagggcgaattgttaatgaactgcttgcactggttgagggtgttccaaatgacctgaccgcgccaggatcgttgtcagaacgtgaaacggatattcgcagcga

SEQ ID NO: 30545 - DNA, 1448 bp, Heterodera glycines
ataccaaatggggacgatgaaaaataggcggaaaacctcaccgtacgaaattatggcttttttattgaccagcccataaaaggttattatcttttttaacaattgtaacaaaaaaataaattcaaacaaaagttcaatttttttattgtttgttataaaaattttttaaacctgggatttttttaaattttgtagtttaatcaaggacaattaaggttaactatgcttctgagcgaaatatgatttcattttgacatatttactaaatgcaaaataatatcatttaatatttagaaaacccagaattgaaaattggaagggaaaatcactgaatgggcaccaccgagaatatgaggtatttaaaaattcatttaaaaatttgtaaaaatttttatttctgatgagcgtgaggagaaatgaagttcggatatgagaaattaaagaaaagaaaaaactgaggcttttttggatgtgaacacatggatgagtaaaatgttgaggaaaaaaaattttgaaatttaaaaattttcatttttttattttcaacttaattttttccattgcgcttaaaggttgacttaattttgggcactctaaaataatatgcttttgacgctgtaaaaactcataataactcagtaaattctttgtcatccggcaatctctgtttttagaatagcattaagcctttgctaatttaagcgttaaaaaaagataaaatgtttaaatattcaatcatttttatattttttataacgtcacaattaattttgtaaaattaaatggttacaatttattttaactttaattacaatttattctaactttaataatcaatatttccattttaaataccgcttccattttaaattgaaaataattttcttggcaatttgtcattttctcgaaactttttcatggcaaaatgtccaaaaagtcttggtaacggtggcttctccgcttcttcttcatggtcacgatcagctcgcgttcctcgtccttgaacacagtctccaagttgagcacaccgatgtcaaacgttttctttggcgtcgcactgtccgtgacataggaattcggaattttgaacttcaacttgcgcgagccgggcttaaaaaaatccaattatttcttcggcatttgagatttattaagaagttaatatttaaaactaataactggcattaagtacttcaaatttttatttaacaattgcgaatattattctaaaacaaagctatgtagaatatattaaaaattttcagcaatattaaaatattatttaaataatatatttaaatttaattaaataataaaaaattaactcaaaaagcaatgttttcaccttaatcccatcgtcacagtcgtggtagaccttaaaaacaacgtcgatgttcgtcagctctgagataggccagaaagtgaaagttgccatttgggtcagaata

SEQ ID NO: 30546 - DNA, 963 bp, Heterodera glycines
  unsure (1)..(963): unsure at all n locations
aatagacacgaaaattatgtaaaatatctttatattcgggtttggggtccgaaatggatgccggattcgctgcaaaaaaatgctggacagattaagactgctgagattcgaaatttttcgggacttgagaaccgaaacttgttgggaatttacccgtgagaatcgagacctagacgccaaaaaaaaacccgacaaaatttacgacacgaaaaccaagaggagaatctcgagcagaattactggacatttgcaatgttcaattatttcagaaaatttttgttttagaatatgtacatacctatattgtaggctgcgaagtaaaagaatttttattttatttttctaaatttgttattgattttaaaaaatttgggttcaaaaatatttgagaaggaaccggcccttttagtactaagacggaactggcgagacggaactgacccgcttcgttacaggttaagtcattatctcgctcttcctctaattcactcactctcttcctctctccatttctcacccctctctcttactttttcataccttttcaccctcactctcgtatcattttaaagattgtgttgtttcgcattattttcaaatgcgaaattgtgacggaatgacaaacccaatccagaatccaacaaattcaaaagaaaatttttattaaggacatcaattgtgtaattgatattcaaagtgtcatcccaacataaaagaaaaatccattattttctaggcaaaatgccggcacacatttccttaacattttttcagaatgaccncagtgttttttgactaaaaaaatttgtaagcatggtttttattaccttaatttcgtgcgcgaaacggccattgatcttgaattgtgccctcctttggccccgaaaaattcttacccgganttggtcagntcggnctaaaaaggaaaaaagacctaaactcctcctaacactctgaccataa

SEQ ID NO: 30547 - DNA, 1306 bp, Heterodera glycines
  unsure (1)..(1306): unsure at all n locations
tagagaccggaaatttcaaattcgcggatcccgccgcgggaccggtctcaaaattttttgcgggacgggatcccgcgggattaatcccgcaaatcccgcatttaaaatttgcgggatcccgtgcggaattgcgggattttggaaaattcgaaaaaatttcaattaaattcaaaaaatttccaaaaatcaaaaaatggtcgaaaaataaatttttaaggggtggacgggatggattaaaaggggctggatgggtcgactaagatttttcgattggatccgacggtaaaaagttgatcggaaatcaaattattaacggttcataaatttgactatttttttcttttcaacccacttttttgcggtgcaatttttcaaaaaactaaggaacagggatccggcggtccttatcagggatggcattccgaggccccaaaaattttcggaagtgtcggaaatcggatttccaaccccaaaaacgtcggaaatcggaaatttttcaaaaaatatacaatataataaaaaaattttaaatattaataggcaaatttaaaattctaaaccatgtaaaaggtgatttcaaactgtttttagtgtatttctatatttatttgaaaattttttttaatgcttttcaaaataatttaatgtaattttatattattttggaattttttttgggacagttacaccctttttttgcggtgcgctttatccaaagaaaatttagtgaactttggggaggggttcgatggtgccgataggcgccgccgggaaatttttaaaaataaagttcaatttattaacagaaattgtacaaaacttactagttttttgaaaaaaaaaatttgtctaaaattgaccaaattacgcagtttttgactcaatttctacaggattattaagtaaaagcctatccggcggtgccggtaggcgccgccgggaaatttcacaaattttgaatgaaatttgcgatgaaaaatgagaactttaattaaatttactatttaatttatttaaaatatttggcaatttatttctttgccttatatttatttttatttaaatttcaattttttgcatattattttctcagtcgttattatttatttatttttaatattatatttattttttcgcttttcatttaaaattttatcttttttgatatacttaaaaacatttagtggtggcgcaagtaacgttaattatttgtatattatttgaattgaaacagtgataaagtgaaaatttaaatatttattanaaaagtactaattccaatataggcagaaatcatttaaaatca

SEQ ID NO: 30548 - DNA, 1549 bp, Heterodera glycines
  unsure (1)..(1549): unsure at all n locations
cgatggaaagaaaggtaatacgccaagaaaaatagcgaacattttaaaatgtatgacattttgcggaaatataaacaaaaattattacncctgccaaaagtcccgtcctaatctcgggcccttttgtgtccagtgcaatcgccacgttgcgtttcttggtgcatttggcagctgcttcacgcacatttttgatggtaccgccgtgatactgcaatttcgtagaaattaatttttggcctattctgaatcccggactcgaacaagaagtcgaaatttaaaaaaaaattaattttcgacttctcgctcgaatttgggattcgaaatgggcaaaaataaatgccatatttatgatcagcgacgctagactccaggaaaactattttcacgactctttaaaataaaaagttcaaattctcaaaatttagtgataaaactcacttcgtggtccccgtgactgaagttcatccgggcgacgtccatcccattttcgatcatttgaaccaacatttccaccgaacgacaaacgggccctgaacagggaaaacagttcagaggcatgccttatcgaagagattaatccattttctggctttacctatcgtgcaaatgattcccgtcttgcgcacaatgtgcggttcctccgtacacttgagcatcgcaaggtgctcgagattgttgcgggccggatatttctccataatttgcttttggctaaactttggtttagtttgacgggaatggtgtggaattgtggtcccgacggaaaaaaatcgtagagttaataaaaccaatttttctggggtaaaaaaatgcgctgatcattaatctgaactcagattttgaaaaatcattgattttatctatgatttttcatcaagtacttgatttttttcaaaattttttaattttctttgagtgttttttccaatgattttagggtaaaaaatgcgctgatcattaatctgaactcagattttgctaaatccatcattttgtctatgatttttaaccaatgtggggtggtattcctttcaaatttgcttactgagttccaatggcggcagctcggtacttatacagtttgacccacataaaaaaaattttttgtttctaatgataaaaacgtgtttctaggggttttcggggctgctgatcacgaatatgaactctattggacgaatttccgaacccctaacccgaaattcgaactttttttcgaaaaaatttttttttttaatccgtttaaaatgtgtcaaaatgcgtgctccatgattctccggtgagctgctcgttcaatcgcaagtgtaacatttggatgcatgcgaatgctgattgcctatgaagaggacgtttcctcactgatgctccgatggcgcggctccatttggaaagcggagactcaaagatctgatcggcttttacattgcttactatgagattctgaatagaaaagaatatattatcatgttcttgtggtctcttggagataaagaaggactcggaattaccgcttttttctaattatccccccgcggcttatttaaaaact

SEQ ID NO: 30549 - DNA, 1681 bp, Heterodera glycines
  unsure (1)..(1681): unsure at all n locations
aaaataatttatcaaatttgaaaatnaattaaattatattatttagagaattaaatgggtgtagaaaaataataataattaatntaattaattaaataaaataaaattatatctgttaattttntaaganaataaaataattaaatgggtgtagaaattattaattatatcaatgatatattttattattagaaaataaattttatgacatattttttgtataaaaatatatttatatatatatactaattagttaacataattaatcccaaattagactttgctaattatagaaaaaatttgttatttacaattgggagttgttgtaattatttgttcagttgtttcttcctcatcatttctgcttgttgttgttgtttttggttgttgttgttctgctggttcactttcaacattattaactcgtctccttgattcctattttagaaataatttatttatttttataaattattaaaatttgtctgccctcatagaaaaattccaaaaaatgaattttttttcttattaaaatttcataaatattttcaatagttttttcctgacggcgctgcctgtcgtccaattatttttcatctactttttaggacaaaatcttatttaaatcttcgtaattttcaagattcaaataaaaatagtattttttaatgcaatttttgcctgtttcggatgccacaaatgttccgctctttcagcgtcaaatggtgaagcatcggtctcctcatctggcaataaaccgcctacttgtccaattgctaatgatggcacttggccacgtcgtaagggaaaaacgcgacgcggtggcgcgtaatgttgctcttcaccatgttggggttgatgtgcctttgcgagtttttggcgccttctgaaattcgtgtcaaaaaataaataattttcactttttttaattcaaaatctttcaattttctttgtttaattttgtctttattagagttaataaatataacaagttttttatctaatttttttaataaaagcgatttaaaaaaaaacttataaatttttgaagaataaaaacaagctaaacatctaagaaattttaacgataaaataaaaagccttttttaatctaaaaaaaataaatatttttttataaaaaaccaaacaaacctttccataaaaaactacaatcaataaaagagtgaaaattttaatttcttttaataaaagtgccgaatatttttcagataaattttaaaataaaaaataaactgaaatttcttaaggaatagaagtatgtatagaaaattttgaaatatttgtgttgcttggcactttatgattattaatgccatttaaaattgtttaatattacctattcgaggttggcactcgtcgtccccccgacgatgatgccgaaattggtctcggcacatccgtcgtaatttctggcacttcatttgcctcttctgtgtgttcctcctcatctcctgggcttggtaatgatgttgttgctgttgtcatttttgctgatgttgttaacaaatgttttgttgtttttgccgtaaaatttttgttcgaacttttaatgagagctaaaattaaaaatanattttaatttaataattctctttagagttgccgcccaaatccccgattcccataacccgacatttgaatcgccccaaatcccgaatgc

SEQ ID NO: 30550 - DNA, 1825 bp, Heterodera glycines
cgattgacttcaattttacgggcagtcaacccaccactccctaaactgaacggcgaaagaattttgcctctagcaccattttgagcggtacattcccgacgccccgcccctcgcgcaccccaagacttgcgcagttaaactcgcgcaccccttgtccgattgacttcaaattttacgggcagtcaacccaccaccccataaactgaacggcgaaagaatttcgcctctagcaccattttgagcggtacattcccgacgccccgcccctcgcgcaccccaagacttgcgcagttaaactcgcgcaccccttgtccgattgacttcaaattttacggcagtcaacccaccaccccataaactgaacggcgaaagaattttgactctagcaccattttgagcggtacattcccgacgccccgcccctcgcgcaccccaagacttacgcagcaaaactcgcgcaccccttgtccgattgacttcaaattttacgggcagtcaacccaccaccccataaactgaacggcgaaagaattttgcctctagcaccattttgagcggtagattcccgacgccccgccccctcgcgcaccccaagacttgtgcagttaaactcgcgcaccccttgaccgatttacttcaaattttacgagccgtcagttcaccacgccctaagctgaatgaggggggtccgcgccgacggacggcggaatgatgggggggggggggggtccgtcgaagagaggggtcccgccgccctggtggggtggggtccgcgacgatggcgagagagggtctgcgccgcccgaacggcggaatggtggggaggagtccgtcgaagagagcgggtccgcgccgcccggacggcgtaatggtggggaggggtccgcggcagtggaaagagggggtccgtgaaagagagggggtccgcgccgacggagagagggggtccgcggaagagagggggtccgcgccgcccggcgaaagggcgcggccgtcgagcggggaggggtccgcgatatttaacgcaaaatatcgcgaccccgcccattccaccggtggccgactggttaacgcgtctgaccaccaccatctctagttaattcctgcgcggagaaactcccgcgcatttaacacccacggtccaaaatctcacgcaagacaccctatgctctaacatcaaaaggaatccacataaacaataaatcaattgaatcaaatcgaatcgctcaccccaaagcactgagttcgccctcggcaatgtttctcagagggcccaccaaattgccgctcatattcactccttttacgaaagagaaacggtaaaagtgaattctgtgacgaaaaaccggacaaaactccgatgaaattggcgaacaaaatgccaaaaacactgaagaaactctcctggccaagaagagtcattgcggtgttttggtgttctctgaattgagttcggctcttttcctttttcgctgtgattcgatcactcatttgccgataattccgagaacggcgtgtaattggtcgggtcgtaatgggagtgccaattcagcgacagtctttcggcactcatttcgccgatgccgacctcttaaagagtgtcaaattattttcttccgataattcgaaggtcaaaatacctgagtacaatggagtgaagagaacggctgcaagaaggaaatcgccaatggttattgccagaaagcacatcacaagcagctgaatacagatgatgaagcgaagcccagcgaaattcattgctaatgagagaaatgccgagaattaatgtatttaccgtaactacccaatcgaagagcttttaaaa

SEQ ID NO: 30551 - DNA, 1368 bp, Heterodera glycines
tgaaatattgaatttaaaaaatatatattttaaggacatggctcaaacgagccgagtgttggagttatggcagtcaactcgggtttgactgaaacttgtaattataataaaaaaaacccaaaaaataaattatcatattttttcagtcccaccaaccccactcagctctcatgggcaaaacagtgctccattgcgtcagagtgcgtttaaaacaaattaagtgagagaaatctgtttaatttaattttcagatgccgctggtgctggtcccagcacgggaattgcagatgggggcgctgaaagcggcggtaagaacatttttctttctttaagtcattataatggaaatatattttaggtcagtggttcaggcccacgattgaaaaccacatgaaccgatcacgacttcgacttgtgcgcgaggaaatggcacaccgaacgatgcagcaacaggtggaacatcagcatcagcaattgcttgaacgggcggaaagagtgcgacaggccaatgttgaacaacagatggaggaagcagacgttctacaagaacagctgcagccgcaggacgaagaaaacgacgagaaccgcgacccagaaatggagcagcgacgactagttcaggtcgctcgacaggcacaatacgagcgacttgtccgcttgcaattgcgggaagctcgccgttttcacaacggagtcgcttcttcggttgtggtccctcctcccttgttttgggaggaggaatgcgttatttgcaccaacgcccgtgcaaatttttataatcgtcagtgcgggcatgtttgcctttgcgcggagtgcgcagtcactgcggtaatccaaaaactcactgtctgtatgatgtgccgtgccccagttaacggatatacccatatgttcgttaactgagacacgaaataagtgttagtataatttttaaaaatttgaaaaaaaagtacagaacaatgagtaactatccattacactaacacactatttgcagcattttctgtctgtcactctatcccataatatgatcgattgtattacttaattattttaaaattggaaaacttttctttcatttttgtaaaacattttcaatgacaccattgatcatttatttgatcataatacttaattattttaaaattggacgactgtttcttgcacttttgtaaaacattttcattataacatcgctgaccatttatttgcttatctgattgtatacctaattattttaaaattggatttttatttttgtaaaatttttcaattttgcatttcaacaaaccctcaaacattattttttattaaataagtgtaaatggtgaaataattaacaattatggccacggtggtcacgttgct

SEQ ID NO: 30552 - DNA, 2048 bp, Heterodera glycines
  unsure (1)..(2048): unsure at all n locations
cctcagttttttggaaggatttctcagtgtttgcatccgttggaaggaattcgccggtcgaataaaaacggcgcaatatttcctctgtttttaggtattttagtgaaaaattagacaacttaaaaatgagcacccttttccgcccatttgttgttcagccattgctccaattgttcgtcttcctccggaattaatgaaattggaattttctgtaccaaaaaatgcacatgggcaggcgtaaggccaaggagaagctcaaaaagagtaatttgcgaggaaaaaagaatggtgattaccaaatcgaattccgactgaataatacggccaccgtacgccacagagacatcgtagataaagtcgacatatttttctgaatggaacgatgaattaattgtgcatatattatagtaaagcttattaaattaagcttattgttagaacaaaagtttaatccgattcagggttttatatcctattttgatgatgttttttcagttttaatccattagtatatgcaaattacctttgcgcattctcttcaaaatgtggacaaatccaacggtgcgcggatgaagcaaatatttgtatttgaccaatccgttcttttctgcaaattgctcacttcgttttgtggctattgggcatttgtcctttaattaaatcgttagtgaccaaagaagaaaaaaaatggtaaaaagtgcaacttacagttccttcagggaaaaggagcaactgaaaatggaacaaaacagttaaaagggttcaattcgatctgtcacttggtaattccgtgaggtttgagaatagtaactgatcattcggtcaatgcgagaccgatcgaaggcgaaattccggttgaggaaaagaaaagcattggtggccatagcccatccttacaatttaaaaagtaaagaaaataaataaccgaaacctgcgccggggataaacatcagcgtactctttggtgaaattttttcagtagtcaacagccaagggtctaattgtaaatatttatttatttcggtttcataacctaaaactttgactactacccattctccacaatgcattccaaaagaagagccaatccaaccgagttctgtgattcattatgatcagagatggcctgaaataatcgtaaattaaatggaaattttttaatgcaacttgttccgatctattttatcgccttgtaagtgaatccgaacgccaaacataaattcgaccagagaagacggaagaaccagccaaaatccaatcaagaaatcagtgagttgacgaaataaatttggccgaaaaactaaagaatatttaatatgagaaaatgagctcgaaaactttttatagacccattaattaacgaattacttgcaaatggcatcaacggcataaggaagaaaaaggtgccaaaaaatgacgagctcagcaacaaaagggcgaatgtcaatcctttcagacaatggaacaattcgaaaaaactgacagccggcggttccattgctgctaaattccttttaatttacattattatggctgcacataatcacataaccagacaaataatatgaatatgttatagcaagcacactatgggtcaagcccagtgttagacaaaattgctcataacgccaaatagcgcatttggcgtaaatttttgcgcgctaattcaaaatttatactggtaaatgccttttttgcactgtttattttgatcagccataactcgcttcatacccaatcaaactgaacaaatttggtatctaaaaaaagattttgaaaaggagaatctttttctaagcgaatgttaagtaatttgtcatctcagaaaaaagttgtcggaatttcaaacttttatcatgttataactcaagtcctaggcagctctttctaaccaaaatgctaaatttattcttttttctattgattctaaatgctcaaagtgattttgttcctttacaaccaaaattattagcatttacgaatttgatgttttttgtgtgttagagatngtgaaagatagtacgccaaaaagagagaaaaagaaatgc

SEQ ID NO: 30553 - DNA, 1649 bp, Heterodera glycines
atggaaaggttagcgaagaataatcatgaatttatctttttatccctttttatcatttgcatatattttatcggtgtaaccacggcacaaaaaatgaaatattttatgtaaatattttcaaaaaactttcctttccctcaaaaacggacaaatccttatcattttttgccattgcatctgttttatctgagtcatcgctgctcaaaaaataaaacatttttacgtaaaataatattaaaaattttcatatttcttaacgaaataaataaataattaattattcgataaagttttagctgggcaattgagttctctgactgtccgttttttctaagtgttgtcaagatttgtcctattttatggagcctgcgtggagtggggtgcggtaactgtgccaatgccaatttgaaaccatggatttcatttaaattttattctgacgttggagaaaaggcgtattttcggggagggactttgggatttgctggggtttgggttgagattctggggtcaaggaaagatttacttaattttcaacaccactttactgacaaggaattagagaataagggaaattgcaattaggaactcaaacaacagtaccaattaagcctttgggcgtttgttgttgctgaatgaaagtccacggggaaaagcaccaaattttgtagttttattacaataattcaaaagcacaaaatatataaaaaaaaacttgagagaacacgaagacaacaataaaaaggaaaattaaatgaagcatcaaaatattttaaattaacgcgaaaaacaatcgttgcaaaaaacaataaaataaggataaatcattatttatcctacgctttactttaacccattcaggcttcctaaacctaaatttgaacaaaaaaaagaatcataaaccgcgaaattcgaattccgacttttattcaacttcgggttagggattagaaactgatcaaaatatatcttcgttattttaaccccaaaatcacaaaaaatttttgcagagggatccctccccttggtttttaataaaatttgaaagtgaccactttttaaatagcgctaaattcaattattgttgaatgcatttttctggcaaaaaaaaaaattagtagcgatgcgataccagttttacatttcatttggaaaaatgaaaaaaggttaattactttttaatgcgccgcgacatttgcgccgctcattcaaaaaaataaggcaaattaaattttcatttttttaatctgattttggaatgaacggtgcaaatataattttctataatcatacaaatacggaaactagcaaaataaaatataataattcataattttatgaaaatcaattagcaaaaccggatatataatatatgcttcctgtttatggataatattaataatttttttcatccataaacaaatcacgtcaattgcttaattaccccaaacggcgtatttcacatataaaaagcaattaatttttgaaagtaaacattaaaaaaagttaataattactcatattttcgattcaaatgagaaacaacattatgctgatcactttttgtttggcaattttatttcaattaggtaacatttttaaattttatattttaatatttcttaatttatataaattataatttattt

SEQ ID NO: 30554 - DNA, 1425 bp, Heterodera glycines
ttatttgatttaataaaattacttaccatcacttaaaatacacgaatttgtttctgtgcaagtgaacgttcgctgactatttactatacggcgaaaaaattgtttacatccttaagcaacaaattgtttactcattaattaataattatattttagtgaaatgcttgaaagttcatttttattcttaccattgcaactttgcacattgtaatatttgaacgctgcacctcgtccacaaattaaacatttttttggtgtttttggttgctttttgtaaatccttttttgtttgattggttccgccgcgtccatttcgaaataggatttttcgggatttaaataaatttcaatttatctaagcatatattatttatctaggttctgataatttctcattcaatctgcactattaacatagagatatataaaatggaaattaataaaagaaaaataaaacgaacgtgaattacatttttttagatttttttctaaataaccaacagcattcattgtcagatgctaaattgattttttaaaaaccgaaaaatttaagcgaaataggcacaaaaatatgcatttaggcattaagcacaaaaagtccaaaataggcaaacttaggcattataaaagtcattgtagacacaccaaaccaagcggaaaatacgtttttcgtgcttatttgagcgtattaagtgcgcagaaattttggcatttgtctaaaaatcgcagccctaattattttatatacgaattcgagaaaaaaattgaatttttttttgttttgtttctatgcggtcaaaaaataataagaaattgcaccaatttttgaaaattaacaaaaaaaaattgtagtgagcttgcttttttttattgcattcttgaaaataaatatttaaaaaatggtattataaaaaattaatacaaaatcaaaattaacaaaataaaaaacgtaaatttatgtgtttttttacgaaatttcataattggggattttcttttttgaattttttttctcaccgattaaaaataatataataagaatttttataccttctattcatttatgataattataatgttttttaaatatttctaagaataaaaaacggaaattattaaataacgtttccttttaaaccgaaaacctaaagataaaaatttggcttttgaaaagaattgcgtgacataaaattctaaatttttgcgtgatgtaaaggccgtcccttatttatccccaatttaacaatacaaattcattgaattcacaatgatttctttttattggcacaaaatgccggaaattagacacctatgcaattccatttgttaattgagtcctttcataagacggtaaaagagggaaaaacatacaattatcaccatggtgggattcaaagaattgaaattaaaaagaaaatgcgaggg

SEQ ID NO: 30555 - DNA, 1688 bp, Heterodera glycines
  unsure (1)..(1688): unsure at all n locations
aaattgaaattaatttttaaaataattattgaatttcaaagcttttaaatataaataaaaaataattgagaactctctttaatgtgcagagaagaagctgaacagttggagcagagtttggcacaagtgattttaaagcattgattaataataaattgaatttaatggacaatttttcaattaattaaatgttaaattcacaattaattaaatattgaattcaaaggttgaaaatgcgcgaaacgcacttttaaacgcacggcgcgacttggagcgaaagtcggaacaggtgaccaaattgggggatcatttgaagacagagatcggatcggattggaccatctgtcctttattaaaaattattgtccttaatcggccaaatgccactccttttttgtttcctttattttgaattttatttatttaatctgataaaattcaaattggcacacttttgaccattcccatttgtttttttgctctaaaatgtgttaagcaaaattcctgagagttgccagagttacttacccccttttttattcctcttttgatttattttagcatcttttgggccttttcgctatttaaatttttctttttattttccttctctttggagatccgatccctgttaataaatatttcacacatttatcataatgatttgcttaatcttaatgttcccagttgaatgagctgagagatgcgttggtccgttctgagcaacgattgcattggcgcaataagtcagtccaaatccaaatccaacgctttcaattttaattttaattttaaatattttaccgtaatttatttaattttattttcccccaaatatgttgtcacagaaacagacaataaattttaaaaagaggctaggcacacatcattttatttgttattttgttttttttttttttgcagagcctttgccggcaaatgaatggcaaaaaacggacggacggacgtcacggagaaaagaggggacaaattggattcaaacaaaaattaattagatttaacaaattgggctaatgataagcataaaaccggaaatggaaaagcgatttattaaaagtcgataggaaaagacaaataaaaaagattccttaaattaattctctttttgcattttttgtgccgatttttcagcaatttttttggaataaatatttgaatattttaataaattgtatttatttaattaattaattttgttttaatttccgattttcttttcgcttggccaattctccacaatttttggccgcctcaatgggccaaaacaaaaatatggacacaaaaataaagaattaaagcaaaaaaaaaagaaagaagagaaaatgagtgagaattttgttttnaaatttngnttntttttgnnnntggtgattttatttttgtatgttttngttaaataaanaaagaaatggnattttggtgnnaaaattatgnnnatttttggnannnattatttttatttnnagttttnatnnananataaaattgaattttntgttgaantatnagatgggagtggaaaataaaggnatttgtggagagtatagagtttgagtttgttttttgggataggagttaatgatagaagttgagaatttttggaataaagttaaaatattatntatgaataatgttgattgagaattggatttattagggatttaatt

SEQ ID NO: 30556 - DNA, 1737 bp, Heterodera glycines
  unsure (1)..(1737): unsure at all n locations
taatttcacactttgttaaaaaagttacaacaatgacagctgagttaaaaatgactccaaatgtggtgataattgcataagtcaatgcgcaaccaattagtgaccagctgggatggacatctttgaaggccaaataaaactgcaaaaaaaataaaaaggctaaaaggctgttaattaatatatatattttattttccaaaattagtcgaaaaatttgaatttttaatattattattttccagtgcttactgtattgtttgttatgtcggtcattacggtgatggatttaattttgatttatggcaataatttcagctaagctaagatattttcgattctttattaaaaaaaattttaattttataattggaacagaaaatgagaaaaaaaaaattattctacctcaaaaaattccgaacaattaaaaatttaagcaattaacgagagaaggcaattattttagctaaagatattttcgattctttattaaaaaaagaaatttaattttatcattggaaccagggctgtgcgaagctcggcttagcactcgaagccgaaggcgaagcccaatttttattcggagccgaagtccgaagctcgaagcccaaaaaacccgaagttttcgaagccgaagccgaagttttttcaaattttttttttaattccaaatttttttcatcacataatttcggttaaatatcaaatttaatcaattgacgcagtttctagtagagaccggaaatttcaaatttgcggatcccgctgcgggactggaactcaaaattttttgcgggacgggatcccgcgggattaatcccgcaaatcccgcatttaaaatttgcgggatcccgtgcgggattgcgggattttggaaaatttgaaaaaatttcaattaaattcaaaaaatttccaaaaatcaaaaaatgctgaaaataaatttttaggggctagcgggatgcattaaaaggggctgatgggtcgactaagatttttcgattggatccgacggtattattaacggttcataaatttgactatttttttcttttcaaaaccacttttttgtggtgcaagaaatcggaaatttttcaaaaaatgcgggattgcggactgggatcccgcaaaatcccgcgccggtctctagtttctagagaccaaccaacccttttcgataaataaatataattaactttttgagcaatatattttgtaaattttatacttcttagaatattcacggtttttgagtcgatttaaaaaataaatgaaattttggagctccggcggtgccgataggcgccgccggtgaaattttgaaatttttagtgcattgttaacagatttagtccaaaaatgaaaaaattttgcgattttaattgttaaattttattaaatttctgtcgaaaaaatgaatatttttgaaaaattagaagaaaagcaactactttgatgggaagtgacccaaggaaacataatgaaaagagccgagagaactaccactcgaccaagcatgcgaaaaaacacaaataagcaaatagtttaaatatatattaattttaagtttaccaaaagtcaatcactagtggtgcattttcacattgaaaactcaatctttaggggtgtatttttcccganacttcgggtaaaatagccgaagccgaagcacgaagttcgaagctcnaanaacccgaagtttttcgagttttcgaaagcgaagccgaagttcgcccagccctg

SEQ ID NO: 30557 - DNA, 1102 bp, Heterodera glycines
  unsure (1)..(1102): unsure at all n locations
aaatattttttatggataataatagaaaaaaactgggcgttctgtcacatttacttnttatctttatttctctcacttttacgtactatctcttcattcttaataatgtaaagaacaacatttacttcatcctgtttaactgttttcctacttgttaaatccacaccaaattttacatatcgatagagaaaaaaattctgcatcgattaatgcaaaaagtatttttgtttatgcgctccgatccaaaatttacatactcaaaattagtaaattttatttttaatagattttatggctaaaagaaaattaataagtaagctgcaaaataaaaaagcggcacaaaagcggtggcaaaagcaagatctgagaaaagcgcaaacggccaaggcgagacaagcttatctggccaaaaaagtgagtttttcaactgattttaaggtcaaaaacacaatcaccacgccgcgacaacattttcatggctcttgaactcctggcaaaactccaatcatttgccgtcgctgatttgctttctgctgatcaaatcgccgatttccgcgccaccgctgaccaattccgtgtccacatgttggagcactttcgccgccactgttcaactacaaaattccatcacctggtccatcatgcacccgaatttgctgaaaaacatggattttggggccttctcagtgagcagcccgtggagaaatttcacgcgttgttcaatgacgatctcgcgcgcaaagcaaacaccaaagatctccacgatattttaatgttctgcgctagagaatctgccattcgaaacgccatttttgatgccaatgaactctgatcactcttttgtagttttttgatgtgtttattatgttttttgttcttattatatgcaattttctcaattttttatatttaatagataatttgctgtcaaattataataaatgtttaagtttgctctcaaaaactatgctttataatgagttttgacgattttaaaacatttgatcagatcaaatatactttctttttcatttgagtgtgttggcgttttgttttttacgccaattattttggcaatttttttcgttttttaccatccatg

SEQ ID NO: 30558 - DNA, 1626 bp, Heterodera glycines
  unsure (1)..(1626): unsure at all n locations
tatttaataaaattttaattatatttatgtggtattcatttaataattttaaaattaatttccatgtgaattaatatttattttattcaaaatcttaacttagaaagatcaattaataaataaataaacttcgaattaaaatttaataagaacaatttgaaacaaaaatttctttctatacttggttctaaaaaaaataattattgaattaatattacgaatttactatatttaattaatcttctgattattgcctgttcttgcacgaacgaatgaatcaatgacataaattatgtcaaatattatatcaagaaaaataaaaatcatcaggcatgcgaatgacactgattggctgtcaatgaaaacgcaacggtaaacaattaactaaatccaaacaaaacaaaaaaaattaagaaggaaaatccaattaaaaaaacgtacaagcaaattgtaacagtatgccaacgtaacaatgccaagccatcggtaatagtaatcccggctcggctccaacacaaatttgtcacgaaaaaattcccattttgataggccatcccaggcaaaaacttttgtagcattgcctgaaaaacaaaatcattaaattaattcattttactcaaaaattaaaaaatatttaaataaattaatgaaaaaaaacaaaatttttacttaaatcgcatgatttctcttgctgcacactgtcggatgtgctgatgccgaatttggtaaaaaatgccagttgttctcgttctaatgccacatctgctacacggaccttgctcattaggcttagtccctataaatttcaaatttttatttttgaataatttctttgaagtaagcgaacaaaatcttagcatttattgttaattaatagcgaccattaaagcaatttttttagtttcaaataagaaggaggaaaaaatattaataaatatatccgtaaatttttttattaagttagatttttgtccaccatattttatatccatatttcggcatatttaattattaagaaaaggattcaattatgggattataattcattctttacaaaaaattcttagggtttaagaattttttcaaaaagggctttcatatgagtattaaaagattaacaccggtttcctacttttcgagatattagaaataaaaaactttaaaaataataaaaaataaaaatttacaaaaaaaaatgaaaaaggtcgtacccaatcttataaatcatataaactttatctcaacgcttgaaatacatacacttaatttgcaactgcaaaagtaaacaattttttttccctttttattttaattaaaagagaattttcaattttttgttgctctaaatttttctcatttttggtcaatattttcttaaatgttttgcattgttgcttaaaatttcaggattttttgtaaatataaatcctcgctctatttatcactttttattagtttaaataattttttttttgtgaattgtacgatttttatgaaattcctgtatttactaatttttaatctgatgggccttaataaatagaagccatgattaaaaccaatttttcgatttccaaattggttttcacctttgcaatgggtactgaatttcantgcgcggatttt

SEQ ID NO: 30559 - DNA, 1100 bp, Heterodera glycines
ttttcatgagaccatcacaccctttagggggggacatcgattttcacctttcgacgattatactcattctttggcagggcggcaaaatgttcactttcaaagagagagataaagcatccaaatgcaaaggaacagctaacaaaactctctctctctctctctctctctttaaattcgttttttctttttctgttaaataattctaaataattaaatttttaaaagtttgttactttttaaattttaattgcttaatttatttgccttccctttgaagttccacccctttctccccctcagctgctccgtttcttcgtcacttcctccaccgttcctttgactctccggcgatgctttccgctgcctcgggagtggctgtttccgtcccatttggcaacgccataaaagtgccaacggcggattccaaagcactcgcaagccgaatcagaaattatttatcggtctttcttcatcttttcccctttttttctctcattcctctttttttctttctctctctctctcgctctcttctctccttatcacttcctcccccctcttcagaaccccgccgtttcttggcagccttccaccgatcaacggcgcttaatcggtcacatggtgctgaccaggcccagccgcttctccgtaggcccctgctcttcttcctcctcccccggaccttccaacagttcgttggatttcggcgtcaaagtcgtgggcgggcgcagtccgttgacgggtcgcttcggtgcttttgtgtcgcgggtacggcccggctcagtggccgaatcggtgggccaactgaagacgggtgacgaagtgttggagtggaacggacactcgctgcaaaacgttacgcccgaggtcggtcggccgcttctccgtccgtccgatcacttccccccccctccgcctcaggccgtttacaaaatcgtccaggcaaccaaaggcgacgttcgccttgaactgatcgtttcccgttctttgatcagcgggggcgatgattttctgaatcttggccaaattcacgagcagtatggcctcggtttgtcctgcgttttcgcttttcttttccctccgaatccatcccccccccc

SEQ ID NO: 30560 - DNA, 1076 bp, Heterodera glycines
atctacattgagagggattgacgggatggagtctgagcttttcttctgttctgtttgttctgcttggggataggaaaagggaagtgaaatgggttcgggtcagtaagggaatcaatccgggttgccatggttgccagcccagtattaagttcctcagaacgtttaaagattgcctcatttgttgcattaatcctacgattaagatagcgaaggtttctgtttgaggcatcctctaagccagagacttgacttaatacattttcgaggtcactaactttcgcttggacggatgggtttctacctgagaagaggcgacggtcaatcgcaacgatatcttcgtaaggcaaattctctaagggattgaccatgataggggaagtgggatgtatcagagagggtactggacttgcgcaccgtgaagggaaagaaataaagtaaaagttaattgtgtataatcactggatatcgcacaataaccaggatttaacttgctttgctgtatttaattgggggtgattccggggcagatataaatggttcaatgcaccaaatatattaaatgagatttgaatattagaaccaaaagaaacaaatatttaattgtcttaagtcactggatattgtacttcgtaaccaggggtttacttggtttactgatttaattggggtgggacctgagctgggaggtaattggttcaatgcgcaaaatgtgttaggtgttaaaatgtgcgtaaatgtgatcaaaaaaacgtaaatgtgatcaaaaggaatgttgtgaaatttgtgaattgttaaatgtcagttttttttgtgttattttccgccacacctttcggcttggaggggtgagttgaggctgagttggtgtgaaatggcaccacgggagaaagactgagtgtttggtgggggagagcaagttgagccaaatgaacaaagggcgggtagagatgtcgaggacaaggacgtgttctgaatttgctttgagttttaacccaaatcaaggcaaccgtactccgagaatttacaaaatttaaaagaataggggatttttgaaaattgtgcgaacctaggaaggg

SEQ ID NO: 30561 - DNA, 1185 bp, Heterodera glycines
  unsure (1)..(1185): unsure at all n locations
agcaggcgaccctcgccgctttcactgcgaatccctccgcaaatgccaacatctgcacggttcaactacatgatcaacacggaccttccatttcagcatcncaggtccacaagcnccnttattttatttataaacaaacccatnttaaaattgtacctaaaatccccgcataaatttaggagagtcaaaacgctttacccatgctcggcacagcacgacacggagctgagctttgaaaaggatcaggttgggagttaatgtaaccaattttttgaaattatattttcttagattatcacaaatgtgtatcagtccaaggaggagggatggtaagctatgggaaattgaattggacttcataaaaaaagcatttgatcaaattgtgcaaaatttactcgattttggcaattgtagttcgatttacaataaaaaaaaaatttgaagggtcaaatttatgaatttattttccggaattttcgggggtcgctgctgattacgtagttgctttttggttttttaggctcgtcggcactttgaacggcaggacagggctgatcccggccaattacgtcatttacattgattccttatgattccgatattcctacacaaatgttattattattttacttccttgccctcctcctcctcttttcctcgtcctcattttttggttgtgattcgctcttttttgcttttattttccttcctttttttctttatttcaatgcttaccaaacgaaaaaccgaacattccgcgcacatcgggtgaactgatttttgatctaaccattacaattattacattattcattttgtcatcggtcgttttttgtataattaaaaatgcaaaaaaatacgatccatttttaaataccttttgaataaatgcttcttagcagagatcagacggaacattacaacaacaatttgtttttaacttataataaaataattaattgtaatttatttttcaatttttgaaattccattttttaaatttctgtgttaaaacaataagtgtgggacagtttcaaattgccacgaatttgtaccaaatgcaatcctcgaaacggctccattttgacgagaaagtttcgatgcgcaggtgacaattaactgcattaatttgtgtatgatttccctttaggctgagaccgttgtacgacgtacgtttcgtttttt

SEQ ID NO: 30562 - DNA, 1180 bp, Heterodera glycines
  unsure (1)..(1180): unsure at all n locations
aagcaaaagcaaaactcactttgcttcagcccttcttgtatgtgctgatatggatgaaagtgatggtggagcataaaatgaggagacggagaagagaacgggcgaatggattttggaaggatcggtggcggataattgggtggacgacggatcgagaacgcgagggaagacctccactgtttcctgttcatacctggaatcaccatgatagggttcttcaggacttggggcgcacttagtaacgcccaagaagggttccatttggctttaagaatgcaatttaacagtgtgcatccgtcattatcgaagtgaaaatcgcgtttaatcagcttaatattttaattatcagagttatcactgttctgaagaaagaagagcgaatcgcagccgataagctgcggcagtatgagttggacccaactcaagggataagaattcgagaacggaagaaaacataccgtgaaaacgatttggctatcagaaatttggttgaaggctttgatgccattgagaacccaaacgaagatgagattcttgctcatctcaaatcgttgcaatacagacttatgcgcaatgattttgagaattgggacgacccaaatggtgattaattctgttttcacatcccgttggcccttgggaaaggcacgttaaataaaaattggaaaaaggtctactgtagctaaaaatgtttgtggtttgtctattgtgttgtggttagtatgggctcaaaattctgcgcctcctcgcggtgagtccggaaacagagttaatttttaaaatattaattaattttttttgcaatggaattaactctggctaaagcagacgtaattttgtctaattttgtggcttagaattaaattttttaatttttttttgttttattgaaatccccaaatgtcgggtctctaaatgtcgggatgccaaatgcgtggttttcttaagtgtcttttgctcaaatgtcgttcggtccccaaatgtcgggtccccaaatgtcgggtcccccaatgtcgggatccccaaatgtcagatccccaactgccgggtccccaaatgtcgggatccccaaatgtcgggatccctaagtccctaagtgttggatccccaaaaggcgggtccccaaatgtcgggatccccaaatgtcgggtccccanatgtcgggtccccaaatgtcggg

SEQ ID NO: 30563 - DNA, 1348 bp, Heterodera glycines
  unsure (1)..(1348): unsure at all n locations
ccaaaacggagtacagagacaattctatccaaatttccnacacaatcaaatgaaaccaaacccacggaatcaacagaacacatcttcctctccttttccatatacttctgcatttacaacgaaatcaaactcagtacgcctggcacagtttaaatcaaatccaacacaaactagaacccaaaataaaatattttgtcgcttttgcgaaagagaaaaccatgcaagtaaagaatgcaaaatttattcaactcccgagaaacgaaatgaacgtgtacgtgaactcaaactttgtctaaattgtctaaataagggacatatggccaatgaatgcaaatccacctatttatgttttaattgcaaatacaaacataatactctcctttgtacccgcaaacaaactcagtacaaaccgaaagagcaaaaaaccagagtgaatatggctaaaaattacgaaaatcatgaagagacacaaacattcatgacaatggattatgataaaaatttatctaattatgaggaagaagaattacttatgactgctgaagtaaactgcataaatcccgacaaacataaagtaaaaaaggaaataattttatttgataatgggtcacaaaaaagctatataaccgaagaatgtgctcaaactcttcaattaagcacaattgaggaaaaattattagcaatttccactttcaatcaaaataagccaaaaataattaaatcaagactagtcaaagttggcattaaaacattaaaaggtgaaatagagtacataacactacaaacagtggaaaaaattacagatgttacaaaaatggttaataaagaaactgttgatgtacttggaataaaaatctcgatcgctaatgcacgtcctcaaattctaattggaatcgactattactggcacttcatgttaccaaattcacaaattcaattacttccatcaggattttactcaataaatacaaaattaggaaaaatattatctggaaaaggaactattgaggacaccaattgtaactcagtgaccgaaaaaagaaaaaaggatgaaacaaaccaaatacttcagaaattttgggaattagaaaacattggaattatcgactcaccacatatgacggatgaagatgcagcaatgatacactttgataaaaatgttacatttaaaaataacagataccatgttcgatggccttataaaagaggaacccaaatttaccaacaaattttggattatgcatgggaagactaagaaatgttgttaaacaactaattaaaaacaagcaattggaaaattatgacagaatattgcaagaacaaatggatactgatgtaaatgaaattg

SEQ ID NO: 30564 - DNA, 1108 bp, Heterodera glycines
  unsure (1)..(1108): unsure at all n locations
gctggctctgttgccccaatttcgtcncctttcccattccgttcactgactgttgcccatctctcgcaacatttgtccctccatccgtgccccggtgatttcccactggtccaactgggcgtgcaatttcctcagccgcgtgtccaactcgtaaagatgttgttgctgctgttgctggtattgcttggccgagtcgtcgccggcggaaggcgccaaagggcgggagacatcgaactgaacaaaaggagaagctcagagacaaggagaaggcgacggcacgcgcaatggcaaaaccttgcgaagctgaacgccgcccccacggaaaagcatcggcgccagcggaggaatgtactgaaatggactgatcaccattttaaacatccgcttctccgatcgcccactgacgtcgtattggtactgattgtcctgctgttcgcatgtgctcagttttctctgctgcgttttgtttggcgttttgttttccggggtttccgttatctttggcattgtgtcatttccttcagtcgaagtatttgccgtttgttttccttcggcagacgatggtttttcctccgtttcggcgggcgaagtgccgccggcagtgacaatttggaccatcggcggcgcacgagcaggcgacggacacgcggagctttcctcgtccgcggcactgctgcacgtctgtacgcggtcctgcggattttgcacttcctccggctcctcctcctcctcattttcggcattgctgcttttcctctgctgcttcttctcttcccctgggagcaccagttcggattcgcccgatgacgaggcactgtccccgaagggattctttccatcgtcgtcgtccgcttcgtcctccgacccgaatgggtttagctcctccgggtatttgagtaccttaatgacaggcattccttcgtttgcctccccccttttttctccctttttgcctccctcgttcctccttttctcccctttcccccttttgtctctcccctcccacctcccaacagcatgccgtgtccttctccgtccccctgctgctgctcctgttcgcctcccctctctccaatggcattggctttgttttcctcggcttccgcgt

SEQ ID NO: 30565 - DNA, 2017 bp, Heterodera glycines
  unsure (1)..(2017): unsure at all n locations
aattcaacgaatccaaaaattatttcaacaatttatttctgatttaaaaatcgccgtaatgtcatattactcgaaaatgagaaattcgctttaattactaatatctggtttccgtaattaaaaatcaagctatattggaatgcatgaatgtgattaattatattggttttggttttttttattccaaaaatgatggctaatcaactaaactcttcatcatttcgtaaataattttatgaatggtctttgaatcggcgcaaaaatgtatatagctttatttataaattaatattattgcaagaataattttctgaaaattttatttttcaatatattaaatgtactcaaaatgttcaattacctctgttgcaagacctactatgggggatttaaggatcatttccttctcctaattatttttttaagatataattatcgttgtactagatatctcttctcatataatattttatcaatttatctatcattcattggttttacatttcaattattttcatgcaaaccatgagttcttcgaaattaaatgatcttttaatcaaatattttaaaaagtttttcaagtataacacaggttgtctcccagtcaatttttattttttccatttcaaatctaactcctcttcgaaaattctgctctatttcgtattttatttttgaatttatttcacatttttctattaaatcttttttatctatccttcgggcatactataatagtccgctgtatttttttgggtctcgtgcctttaaaattatgggtttaatatttcacaatataaatcaatcgaaactcacaatattcccaatcattttcttttttaagcattcattttttaattaatatttctatcattttcttgaaattttcagtgtgttctattttctttttttggggtttttaaatataatctgttcgtattttcatatatcacctaatcggttacattttttcagtcgacggcatttcgaataattgttttcattcaatttatttaggcagtggttttttgaaataattttttacatttctattttttgcttttctcagcaggaatattatatttttttctgtgacatttatctaaaatttcattttggttaattttaattaaagttaattttaatttattttaataagcttaacattctgaacgagattttatttttcttggttaaattgatggaataaagtttttaataaatttattaataacaatggcttcagttctaaattatttttttattcttgatttttacaattattgttaatttaaatcataatgattcttttacaattctcttattgtattgctatcaaagctaattttttctattttattaaatcattatcagaaatctcgggaattcctgcggtgttgtccgaatcaggttctcgtgattttttttatgaatatcatttattttatgatcgtatattattgccaattttcttaaattatttatttatttgttcttaaaaaaagccaaaagtcttgtaaatataatttataaactttgaaattctctaattatattcaatttcttgcagagatcatttttttgaattgctattatgagaatcaccaggagtaaagtggttatgcttatttttcataattatttattatttttttatttaaattttttttttttaatttttcagcaatatccttgaatttttatgtaaatttatttatttattcctattattttttttcttaatagaaaaagcaatatcctttttaaattcaaaaataacgatgatgtgttgaattatcgttttgaaaaaatgaaaattgatcaaaaaaattttaaatctaaaaatttttaaatttttgtatgtatataaatttaaaatatttctttgtataattctcatttacgtattcactttgctttcctttcttttgctgnttcatttgtttttccatttgaccaattttgcatcggttccttatatttcaacttttctttcagcaatttctanatacatttt

SEQ ID NO: 30566 - DNA, 979 bp, Heterodera glycines
gtaaacttcatctaagactaaatacggccacgagtcctatagcgaacaagtaccgtgagggaaagttgcaaagcactttgaagagagagttaaagaggacgtgaaaccgatgaggtggaaacggacagagctggcgtatctggtctgcattcacccgtttgttgctgtacgttggcctgctagcctccagactggggtttgctgtccttctgttcagtggcgaatggggcatttgcaggcggagtgcgctgagatgctcggagtagctgcgtgagctcggtcttgaggccagcctttcggggtctggtacccggatcgggggagtgctgtttactctgggtgaattgtgcaatggtttcgggtccgtgttgactcgagctgggggtcggtggcggtcgcgtgcgacacgtaccagcaaccagttcggtccagctcgggctctcagttgtgcgttctcggtgtaaaagccggtcatctgttcgacccgtcttgaaacacggaccaaggagtttagcgtatgcgcaagtcattgggtgttcaaaacccaaaggcgcaatgaaagtgaaggcttcttacggagctgatgtgtgatccctggcactgcggtgttggggcgcaacatagtcccgtctcgatcgcatgcgatggggcggagacagagcgtatgcgctgagacccgaaagatggtgaactattcctgagcaggatgaagccagaggaaactctggtggaagtccgaagcgattctgacgtgcaaatcgatcgtctgacttgggtataggggcgaaagactaatcgaaccatctagtagctggttccctccgaagtttcccccaggatagctggagctcgttaagcagttatactcggtaaagcgaatgattagaggacttgggggacgaaatgtccttaacctattctcaactctaaatgggtatgaagccagggttgcttgactctgaacccaggcgttgaatgt

SEQ ID NO: 30567 - DNA, 1023 bp, Heterodera glycines
agtcggcccctgaattatatagcagtgacccaatactttctggaaatttccagtacgggtttgtccgtgaaaattggaaaatatttccaaaatccctatttctttttctatccttgtggactgagtcggcccttgaaattatatagcagtgaacccaatactttcttggaattttccagtacgggtttgtccgtgaaaatttgaaaaatatttccaaaaatcccattttcttttttctatccttgtggactgagtcggcccttgaaattatatagcagtgaacccaatacttcattggaattttccagtacgggtttgtccgtgaaaatttgaaaaatatttccaaaatccctatttcttttttctatccttgtggactgagtcggcccttgaaattatatatcagggaacccaatacttccttggaattttccagtacgggtttgtccgtgaaaatttgaaaaatatttccaaaaatcccattttcttttttctatccttgtggactgagtcggcccttgaaattatatagcagtgaacccaatactttcttggaattttccagtacgggtttgtccgtgaaaatttgaaaaatatttccaaaaatccctatttcttttttctatccttgtggactgagtcggcccttgaaattatatagcagtgaacccaatacttccttggaattttccagtacgggtttgtccgtgaaaatttgaaaaatatttccaaaaatccctatttcttttttctatccttgtggactgagtcggcccttgaaattatatagcagtgaacccaatacttccttggaattttccagtacgggtttgtccgtgaaaatttgaaaaatatttccaaaatccctatttcttttttctatccttgtggactgagtcggcccttgaaattatatatcagggaacccaatacttccttggaattttccagtacgggtttgtccgtgaaaatttgaaaaatatctctggaggtccctatttcttttttctatccttgtggact

SEQ ID NO: 30568 - DNA, 985 bp, Heterodera glycines
ccggtgagattggataataatttttgatgcttaacttttaaaaacggctctcttgacagaatgacactgtcccacccggcagaaaggttgaggtgttcccgttggagctgttggaagtgatggaggaccaggtaaattcgcaatttacgcaaaaatttatttacgtatatttttacccagaattttttcgttggaaaacccgaattgaaattgaccttcagacatatttaggaaattggtattattagggtccaatacacgcattcatccaagataacaaatacacacatttatttaaaaaattcaatacaaatttcccattggagcgtgtccctcgtgagaaaactgacccagttttgatggaccagttgctcaaattcaactctatgaaaccggatgagcgcatgcgacgcatttgggacagtgctcgtgcgctcgaattgttcaacgaccagaaccttgtgcttaaagcatttgggatctctgtggatcaaaagtcgaacctggtcagtatggtgctttgtgcacgcaaccgttttgacactgcccaacagtttgctgcggatcgtttgggtcgcatgggcaacgaaaagggcattccgattgcggagccggagattgtggctttcaacagcccggatgtgagtaacaaattgggaacaaaactaattaaaaatagcagacagtttgccaaaacatgttttaacttttgataggataggaaactcgatcccaggagttgttttttctatttgaatcttcaaagtaaagatttcaattttttcaaacctttttgaatcatcaaatttatataaatacctaattccattacaaaactaatactatagtaattttgcttttcatcaactaccttggtgcttttgtaattctgattaggcatttcaaatgaaatatttgtctgtctggtgattgaaaaatggaaacattaatttgcatgacatgttttgatgtttgtttttttttt

SEQ ID NO: 30569 - DNA, 1079 bp, Heterodera glycines
ttttattgaggagacaaatgaattgcgaagcttccttgtcaccgaccagcaacgtttgttttgtcaccgcattctatgttttggtcaagcctttgggcaaagttcggacgaattcctccggcactcccttcaacaaatactccaaacgaagttttcgtgcctcggggattgcaaatttcataattttcggaaactaaagagctattttggcggcggttaagaatctctgagtgggagggagacctcaagaagttcgtctgtaaggccagtcagctcaggcagaatgcccttgtcgacgatccaatcggagtgtcccctcaaagtcgcattagaccctcagaatttacccaatttttatttacttgcatttttcgtgttgccgatgtttggaacaaaatctgatgacagtttctgtattaatcatttgctgctgctgtcccaccgcattatgcgccgaaggacgtgcggagggacgtccgaatttgggtcgggcgcgtaaaagcgacccgccactccgttgatcagttcgtcgacctcctttcccaagccctggacagtgttgcccaagtcgcccaacactccgtccaataagccatggccaccgtcccttccgccctgccgttgccccccttcggtggcttctccttcgccgatcagtccctccagcagtccgccatcattccctcgctttccctgccccccttcggtggcttctcctccgccgatcagtccctccagcagtccgccatcattccctcgctttccctgccccccttcggtggcttctcctccgccgatcagtccccgattgcttcttccccctgcccggtgcctattgctcgcccctcctttgtccgcttctcctttaactgaagtccctccaaagatgtcaaacaaacccttggcaattgcaaataatgggaccaaaaatgaacttatgaggataagtaaagcattagttgcaccaaatacggaccattttctggttaatttaattaattttaatggaaaaaggagaaaaaatggtggggaaaatggtcagtgagtaaccaaaacaaacaatcactacaatttctttg

SEQ ID NO: 30570 - DNA, 962 bp, Heterodera glycines
  unsure (1)..(962): unsure at all n locations
agagaaaagccttgtctcttccactctttcttcaccagccttcgccattttattattgaaagttttggtctcaaaatcatttgtgaatcgaggcgaaatttctttgaggccaaaattttttaatttatatttttacatattaattgatttactcattcctcattctcacatattcaagttctctaggcgtgcattccaccaatctctgaaccctccctaaattgtgaaaattctcaaattagtcctagtccccatcccctccctctatctcagaatgtctcaggctttgtaaatattacgcaattgcttttcccgtagcttagcttcttccagtttttgtattatagtccattagtaaataaaataacaggcaaaaatagtttgtacgcatgcaatgataagatgtcaaatgtgtgtaaattgaactaaaagcgcgccggcctttctccgacacaatttcaccacaaaaaagtaaaataaacccgagttagagatcgtttttgcagttggcctgacacaattaaaaatgacaagctttatttagcaaattaattaatccccgaaaatacttccgttttaatcgccccttttgagtgtttattccctttttgtgtctcgagaatcgcttccggccgcgtttgttttgtccgttctttcacaaataaaattgatgaaatgcgcacaaaagccctttaaaaatgacggaacttggatttcccttgacaaatttatgagaatttgtgcgcagaaattgcaatttgttggagcgaatgaatgttcgattgtcccaacagatcatcggaacaaaagatattcttctcccataccctcccactcaattttttgtatattttatttttaaattatttgtgtctcagagcgttagccaatcgtctcatttttagaccgattgtcttgatgatcatggngactntttgtcttcttaatcccacccatgacag

SEQ ID NO: 30571 - DNA, 970 bp, Heterodera glycines
ttgattgtcaatgttttcggtaaaaaaagacgcgaaacattgcttcaaccaaaagaattattacgacgctgacgctgtgaaaccctgcctctaaaaaataaattgcatatatataatatataagcaggtttaccagtacaagactagttctgctgacactccatttccgcaacgtcatcacaaaacattgatgtttcaccatcagcataatcaggttgctctgctgctgttacagtttgttcatcagcaatgttagcgttcaagaagcgacgcacaagaaatggaatgccatcatcatcgtcatcagcatcagaaatgtagatttcttcatcaccattattagtttgtcggcggttattgtgactgtttttcaacacagtcattccggtgtactgctgctgttgcccctgcccctgttgctgtcgtcgatgctgatccaacacaccattgagcaggttaaccgcatcaagagtctttttcgcttgatcatacaattcaggatgttgaacaattgtaaggcaattagcagaaatgaagcgcagcacgtcatgaaaaggtttcaaatgttggcttacaacatcttcagaagcattttcaggtggtggccacacaatcggtggaaactgaacatagaaaatataaataaaattccttagaagacaaaaataatggatttttgtgtatttaaattttcaccaatctggattttaaaattaataacataaaaaccaaaataaataaaactgtttgaaaaatccaaacctgcacattagaatgaaaaacattaaaatcgcagccgtcacacttctcaacaaacccctgcctttggttaataacttcatattttaagccatggttgttgtcattcgaaacagttttccgttccattgtaaattattgaaaatattgatcttgacaggtaaaagatatgtatgcttttttaactgtattaattgagaaaatcaaattt

SEQ ID NO: 30572 - DNA, 988 bp, Heterodera glycines
catgaaatggggaaacacttcaaatacagcgaatgagcaatataatttctctattgctggacaaaatttggtgactcaaccaacggatgtgcacaattcaaatgagacaggtctcgagcagggatgtgcctaggtttcgcttttcgcatttcgcttttggcgcgaaacgcgacttttacacccctaagaattggattaaattcccataaaattttattggctaattttcagtgaaaacctgtttataaatgatcaaatttccaatttttttccccggcggcgcctatcggcaccgccgcgcccccaaaactcctattttttcttagaaaatggccaaaatcgcaaaatttggtaatttgatgaaaaactgttctcagcggcgtgccaaaactcttatttctcattagaaaaatgataaaaatcacaaaattcgatcattttttagtgaaaatctgtcaacaaattttaaccaaattttcaaaattttcccggcgccgcctgccccctcttcccaaaaagtttttttggaaaaagcgcgcctcaaaaaagcgttttattgatttttaaatttggaataaaattttaaaaaatgatttttgctttatgattttaactattaaaaagttgtagaaaaactttcgctttcgcatattttagcttttcgcatttcgcttttttttcatttcgcgtttttcagtttcgcaaatttcgcttttcgctttttatttttcaatttggcccatccctggtctagagctcgtcacgcattcatctggtgataatgaccatcaaaatggtggaacaatcccagtttttttgaatgccgaactcccaccacaaaatcggaatttgtctccaattgtttcattattttgtttgagcagtagtataagtgatttttcatctaaaaatcaaaatttttgcaataaatagtgagtggattttgtggtaaaaagcaaaaattccaaaaataatgatttatcacata

SEQ ID NO: 30573 - DNA, 1103 bp, Heterodera glycines
ttttttttaactagtttgggaagggggttatcccggttttagtatcctgtttgaaaaacaaaaaattttaatagctgatacggtagccccaccatccattgccccaaatgtaccctttcggtttggtcaacgggagctaacaattgatgagtttgtttggtttcttttttaagcaattttccgtcattgctcaccaactgttaggcgtacagcaacggcggcacttgcatccgatgcagctgttcacgggctctctaaccctatttttattttttttctatctctctctgaaagcagttataacaatttttcacaacagttttgcatttaacagacacattctaaaatttctaattagtatagtagtccaagcctattattattttttttgactagtctctgaatggggttatcccagttttagtatcctttttgaaaaacaaaaattttaataactgatacggtagcccaacatccattgccccaatgtacccttcggtttgtcaacgggagctaacaattgatgagtttgtttggtttcttttttaagcaattttccgtcattgctcaccaactgttaggcgtacagcaacggcggcacttgcatccgatgcagctgttcacgggctctctaaccctatttttattttttttctatctcttctctgaaaggagttataacaatttttcacaacagttttgcatttaacagacacattctaaaatttctaattagtatagtagtccaagcctattattattttttttgactagtctctgaatggggttatcccagttttagtatcctttttgaaaaacaaaaattttaataactgatacggtagcccaacatccattgccccaatgtacccttcggtttgtcaacgggagctaacaattgatgagtttgtttggtttcttttttaagcaattttccgtcattgctcaccaactgttaggcgtacagcaacggcggcacttgcatccgatgcagctgttcacgggctctctaaccctatttttattttttttctatctcttctctgaaaggagttataacaatttttcacaacagttttgcatttaacagacacatttctaaa

SEQ ID NO: 30574 - DNA, 1144 bp, Heterodera glycines
  unsure (1)..(1144): unsure at all n locations
cgatttggctggggccgcaaatgtccgagccgcaaatgtccgggccgcaaatgtccgggacgcaaatggtctggacacccgtgcgccctgctcaatgctgccacaccctctctcttttttttgcgtgtctctcggcaggtcgtccgtcgatgatgatgaaaattgtcaaattgtcacccctcccaaattcacccaaaagttcctcacaattactcctccgtccctcgttaaaatttgaaaaatttttgttgcttggctttttgccgtgttcaaatgccttccgccattttacgccggcattattttttgttgtggaaagcgttgacaatgggcacaaccatcgccgcaagacaccagcaaattttgttgctgttacaccaccactaccaccaccattatcaaggtaaaaaatattattggaaaaacaaaatgatgggcctagaaaaataaaataaagatagatatgtattacgtatttttcttaaagattaaaaagtaattctctatcgaatttggtgagaaaattggcgggaccgttggagctgaaatttttcgtaaaaatcctgctgggtcaattctgaatttcattttatcattccagaaatatcaaatagcccctgctaggccagtaaaatttcaaaaaaaaatttgacaaatttttttcttattttgtaacgaatcatagcgcctcaatcgtcccccccccccgtcatttttcgctttgtggggggaacatttattatcatttatcaaaattatcagagaaaggctcagtttgctgtcaattaggattccaagatctcggattgtttgggtctctttaataatttttccattaaattggcagggaactttaaaattatccttgccaatgtacagagaagctgatttttctggtgaaaatggtagaccccacataaaaaatttttggaaaaatacacatgtatcttatttgtaaccgcaattagtgaataaaattgcttgtattaattcgaaattacttttcatgtagaaaacagcaattttaaaaattatacccctaaattggnaactttttcgcccttatttacggccttattcatcaccccataactttaaaatggatagaaataaataaataattcagaatttttttctctattac

SEQ ID NO: 30575 - DNA, 1386 bp, Heterodera glycines
caatggataaatttcataaatttttgagtgtatcggagaagggcgtttcctccccccatgaaaatttaaaaaatatcagatgaaatctttttacaaaaaatcgcaggaaatttactcaaactatgttggggacaaagtgctgatagtcccaccttcctcacattatttacatccatggaactagtccattggtggcgagtctgacactgtggcagcaatcatagactaacatctgagcaccaactgtttatcctttcgctcggtcgccaattagcagacaaaaccgggctgtgtagaaagacatttagggttttcgcggaaaaattttaaatccaaataataaaatcatagggagaaattattttatttttttaaaatggatatcgcaatcacaaagaaccaaggcacgtattatgcggatcaggatttgaatttcacagaattattttttaatgggtctccaattagaaaattcggacctggccttgacgacgaggagtacaaattatgaaagcatcacccaaatcaagcatgatcacctataaaaaaagacatggttttcctattgatgaatccgccatcagccaaatcgacgtacatcaccccaaaatcacaatcctcttggtcatccactgaaaaatttcctcctctcgcgccggcttcaaggcatattcttcttctttcaccccccccccccccctccgcctcctcgagaccgatccattctctcccctcccattccattctcgacgacctttttcttcacttggccctgccccttcccgcccccaaccaccagctccttggcccattcattcgaaatcagcgagaccgaccccgactgatgatgatgatgatgcagatggtgctgattggttgtgaggaagcaccccgggggcgggtgaccatggttcaatgagtgagtgatcagagcaattgcccttgccgccgccgccgagattattcttgggactttcggctcacttcacttccctccaagcccaacaaagggcactaacccacaaaaaagttcaatagcttttgaaaaaccgaaatttctttttgatgggtgagaaatttgaaaccgatccatcgccagagggatgaaattggactcggccatcaattggcccatccagccgcgtcataaggcaaaaatttgattggcacggataacgcaataactctcttggccgattaggatgagacagaggtgtgaaatttaggcctttgaaatttgggaaatttttcattaaaattgcattaacaattttttaaaataataagcgtgtcactcattcttttaatgtatttggaaaaaatttctaatatttggtatgggtagagatgctttttcctaaagatttcatagaaatatgcaatttt

SEQ ID NO: 30576 - DNA, 353 bp, Heterodera glycines
aatgaaagtgtcagttacgccgtaaagacagcggccgtaggggaagggcaaaatggctgcaaaggctgaccaaaattacccttttatacgagcagaaaatggcggagtcggcgcaggaggtgccacggggagggcatttatcattgttgcgcggggggggggataaaggctaaagccgggtaattgctatcatctacatgaaaggggagggtcgacccccccccccccttcgtctgaagtttttcctgcgacgcctttcggcattgccggaccctaaacagccctaaatgtaaatccggtgcaggcccgtagctggggggggggggggaggtgtgggggctacgtgtcgacct

SEQ ID NO: 30577 - DNA, 1556 bp, Heterodera glycines
tgtttccactcccttctcccaggggtattatttcgtttagtctttttttccccaataaacttgtcaaaccccatttttcgcaccgtgaatgttatttttattgaattctgagccgttttgagtagattagactagaaaaaattgaaaattttgaaatcatgtttcccactcccttctcccaggggtattatattgtaaagtctttttttccccaataaacttttcataccccatttttcgcaccgtgaatgttatttttattgaattctgaaccgttttgagtagattagactagaaaaaattgaaaattttgaaatcatgtttcccactcccttctcccaggggtattattttgtaaagtctttttttccccaataaacttttcaaaccccatttttcgcaccgtgaatgttatttttattgaattctgaaccgttttgagtagattagactagaaaaaattgaaaattttgaaatcatgtttcccactcccttctcccaggggtattattttgtaaagtctttttttcaaaataaacttttcaaaccccatttttcgcaccgtgaatgttatttttattgaattctgaaccggtttgagtagattagactagaaaaaattgaaaattttgaaatcatgtttcccactcccttctcccaggggtattattttgtaaagtctttttttccccaataaacttgtcaaaccccatttttcgcaccgtgaatgttatttttattgaattctgaaccgttttgagtagattagactaaaaaaatatgagtgatcaaactttcactaaaaagttaagcctaaactttttcccaaagttaaaaagcaattaaaattttattcacctccattattgatagaaaaagcatcagagtgcctaaactaacatgtaaataaaatttggtgcgtttcagaaccctttctgaaaaaatatttatgaattaattttgcaaataaataaaaacgaaagactcagattttcgaaaaatttttttgagccagctagctcggcgctcatttcagtgtaagttagtcctttaccggggagtatccctgcaaagtttggtacgcttctgctcaattagcaaaaaatatgagtgatcgaattttcactaaaaaagttaagcctacattttttggcatatttaaaaagcaattaaaaaattttaaaatttaataattttcctgcaccgaaggtactcactcggcctcttcgcggcctcgtggtggccttcgcccccccccctcccacgcccttcagagcacgacaaatatttcaacaaaaattttgaaaaattgactagagcaatcgaacgctaacggacgacctaatggaaaaaaatccccgaaggagagaatttaattaaatccattccttcgggggaccgtgccgggtgccgcggggtaagcagtgctggttcgtttcatcacggcaccgaaccttttggctagtcagcaatcgttgcttaacttgccagatcggacgggtgcgcatgactttctgaaaaaaatatttatgaaacaaaaaaatcgatttttttca

SEQ ID NO: 30578 - DNA, 1131 bp, Heterodera glycines
aaattttcagaatttaaaaaaatacaaaagatagagctcggcgagctgtacaataagttcgctggtgacgacccgctcagcgtaaccaccagcgagtattgccgaaaaccgaaaatccggtttttggcttttcaatttttagccacgcgtaccgggaatacggtaggtcgtagagaaaaatgtttgctggcgaacttgtagggcacacttcaacttaaaatcctcccagcaagcattttttgatcagagcaaaacccatcgtttcacaggctcttgaaaaaacgaaaaagccatttcagcgccgctggcgctcagttggccaccggaccggaatgcccctatttttcccggatgcgccgtcaaaagttacccctgcctgcaaaatttcagatccccccgattagccgttcccgagatttttgttttagcaatgagttgcactgttgttctaaggtatataaactagcgtgaccagttggctatggtgtgcatgcgtggcttggtaatatatggccctcattttaggggaaagcgcttcgcgctcagggacgcggcttcgccgcgtcgctagaaagtgacgtaatttagcaattgatcgcagcctcaggacgggcgctttgcgcctgtttttaattttgtgggaagcattcggctgcttcgcggcctcagacgggcgtgtcgcgcccgttttttaattttttgggggacattcggccgcttcgcggcctcaggacgggcgcttcgcgcccgtcttttaattttttggggggaattcggccgcttcgcggcctcaggacggtcgcttcgcgcccgttttttagtttttgggggacattcggccgcttcgcggcctcaggacgggcgcttcgcgcccgtcttttaattttttgggggaattcgggcgcttcgcgcccgttttttaattttttgggtacattcggccgcttcgcggcctcaggagggcgcttcgcgcccgtcttttaattttttggggggaattcgcccgcttcgcggcctcaggacgggcccttcgcgtccgttttttaattttttggggggaattcggccgcttcgcggcctcaggacgggcgattcgcgtccgttttttaattttttgggggaacattcggc

SEQ ID NO: 30579 - DNA, 86 bp, Heterodera glycines
tcttacgacgagggggggggtgtccgaggcctcttacgacgagggggggggggtgtccgaggcctcttacgacgactttgggcggc

SEQ ID NO: 30580 - DNA, 952 bp, Heterodera glycines
ttgtaatgccttctgaatcagccattttttccaatgcttaggcataccaaaaattaattatatttttgtatcttttcgtgaatcttgtttgattttgatttatttaattcacttaaaggtagcttaaagttagttttatttttataaaaatggaaaattaaatataaaataaaaccatttattttatttaaattcctgagtgaaatttttaatcgctttttcaaatttgtgaacaaatggtattttaggaaatctttaaagtaaattaatttacaattttatctttactgagaaattttttgtagttacggaaaataaaaatattttttaaattaaagacggatgcacaaaaataactaataaaggaaatgaatgaccgaaatttaaattttaatctggtgaataattttaaaaatctgccttctattgagaaattgtgatgaataagaatcatttattcttccctcattaattcatccgtttgtttttattaattaatcttatgttattatataaaaattttttaataaaattttttcgttatttttgtttttattgtttttttaattaattctttattttttcgcgtaatgacgacataatgtatttatatttttactatatttgaaatattaattttaaaatatgaatctgtgaaaagagaaagcaaattctttataaaatacaataatttagtcaaattcaaaaacacaaaagcaataattaacatgattaccgcttaattataattttaaaaaaaaagaaattaaaaattaatgttttcaaaaacgactacattaaaaatgaaattaagatttaattatatcaaatttaattgaagaaataaagatcaaattcgagaaatattactataatcaatttttaagaatttgatttattgtggtggatgacaaagatatttggagttatgcgcatttagttttatacttaa

SEQ ID NO: 30581 - DNA, 1560 bp, Heterodera glycines
aatatgggatcacagtgaaaagaaagtgggatattttaacaaatcagtgaaatttttcaaaatgttacagcacagaattcaaagattatgatgttagcacgaaaaaacaaaaattcacattttagcatttttttactcttaaaaaatgtatgactaattaaaccaaaaaaattaatacataaatcaatcaaaagcagttactcataagtttctcactcctcaactaggtatgctggtttttcttaccacaatatacacattcaaattcaagcgggcatgaacagtggggcattccgtcaatcatcttaagacactcatccgtgtttcgtattgggcttagctaaataaataaaaattattatatttttaatttatatttttgaaaaagcatttccataccaatgttggcttcagcactgatgggtcctaaaatgaatttatatttttatcaaaatcccgtttcaacatttagatacatattattatgttgcaaaacttatttcttattatccaatttttatttttttaatcaaattaattgttcaaaaatccctagatattcgttttgtatttgattatggtatgtcagtcaatgccagtgtaattctgatcaaacaatgaaagattcatgaacttagagcttttgagtgataccaacagttttggatttggttgacaaagaaaaaagttataaccaaaaaaccgctggggcccaaacgtgccgggggggcccaactgagccagtccgaacatgtaagagattgacatttaccttcaggcaacatttacaacttgggctgctgtcgcagcatcttccaacgaatcgtttcgggcttacaaggtacggctgccggcaggcgcaaaagattttaccgtcgcattcgggcgttttgaaaaaataagcggacagatattcgacctaaaaaatggggacaaacacaaatgtaaatagtaaatggtaaaaatagtttttcaagcacaatacagtaatacccactggcgttttttcttcccacacaatggacggctgaaaaaatggaacacaatcagagaatcacagttgggcaaatagaatgcaattgaattaaaaaaaaattttaaacttaaaaaaaaaattaaaacaccgtatttcttgagacaacattccaactggtaacggtactcaaaatggtcggcatttttttactgtatttttgcccacctccatgcatgtgaacttatggccggccccacagcacgattgcccggcagcgccaatttccggaagacaagcgtattcacgataagggcatttctgcctcgcactttcgcattcagcgagctcagtcaattggcggggcggcggctttttttgtggagttaattaattcaatttaaaaaaataaaaaaacaccgtattacaccggaatttgaaatgttgataaaaaattaccgttgtctcctaaaattaaaaaaatgtttaataggaaacaacaaatgtttaattttaattatttattatcattataaaaaactcaaaaaatttaaacaattattttttctggagaattttgaaaaata

SEQ ID NO: 30582 - DNA, 1216 bp, Heterodera glycines
gacccagaccataccgaaatccacccccccaaaattccgattgtgtcggaaaccatcttaaactgcactcgacgaggcgtcaaaatttcctctaatcccgtcgtccaaaagataacgatctgctgctccaactcgtgtttcgatcggttagccgcgtctaacatcaattaacgaactgccctcccgatcttaaggctcccgacaaaccccgccaccgagtcgtcagccgcccctttcaggctttcgaccattcatcactcctttctgccgccagccgaccctttaggctcccggcaactcaacccttcgctgtccgctgaccatcttaggcctccggcactcatcactcaactcaagtcgccagccgcccttttaggctcccgacaaaccctcaccgagtcgtcagccgcccatttcaggctttcgaccattcatcactcttctcccagccgccagccgccctttcaggctcccggctttcatcactcgactctttgtcgccagccccccctttaggcttccgacaagccctcaattgagtcgtcagccgtccttttaagccgaccctttaggctcccggctttcaccactcaactcttatcgtcagccgtccctctcgggctctcggctaatctccactcaacccaccaaccgacagccgccttctctaggctctcgaccaaccaagccgactcttgcgtcaagccgccaatcctagactttcggaaatgtcggaactcattcgtcaacgtctcaccgccgaagtccgaaccctttcggacctcgtcaagcgcctccgacaaagggtcgggaggctcactgaattcaccaggatggcgccagaggaaatcccgctcgccgaggagaccaaactcgccaagggcgtacgaactgaccgacaattactacagagaagcatcgaccgcgtcaatggcctgctacgagaatgttttgaccacattcagctgctaggcgacccgtttctgaagcaggcggaggaggacctcctggacgcactccccgaccttcgacgaccagcaagccgacccaaatgtcgaaaaatggccagtcatcactccttctctctaaagcccagctcaatcctcgacggccttcaagtcttacatccagggttcgattcgacacgacgggaggcatctccttctcgcagaagcagtcgtggttttgatcaagggggccgacgaagaaaaccgga

SEQ ID NO: 30583 - DNA, 1740 bp, Heterodera glycines
  unsure (1)..(1740): unsure at all n locations
ttcgatttttccaataatgagaaatatgtgctcgctcataacacaaaaaagacgtaaacacaaaacagaaaagaaaagaaaaaaactgaactattttccaaaaggaattcgtttcgataaattgtttacttttacatgtattagttacagcgcaaaattaatatatagaaaataaacatttttaaaataaataaattaaaatttttttaaataaaaatcacttttcagttgttgatttttgataaattattatttatttattttttttggcagcaaatgacagacattaagcaatgatcaagtaattaactttttattttattttttaataaaataagaccaaattgcaaaaagtaaaaatttaaaaaaacataatttaaaaattaaaaatgaaggtaataattaatttctaatgtcgaagaaatatctgaaattatttttacaaattttcgggttgggaagatgacatcaaagatgaatcatggacataattggaggaataggtagtacaaatcaaaaattaattattaatcataataattaattatattttggcgcctgttataacgaagtttatggcccgtaaaaaatttaaaaaaaaagtctaaatttaaaacgtctcgagttgattttttgggaaattttcgatttcgagcagcaacaattaaaaaaatccacaaattctcagtcggcttttgttttatcaaaattttgaattaatattttattgatataattattataaaataatataggaaattcattatcgttgataaaaaatttagcctaagaatgaaagcagctccacgagaagaaccgcacgcaataataagacaaaatttttgtctcgagtaagtttttaggaaattatttgattttataaagatattgacggatcaaaattccttccttatttcaacatcagtcccgtcatctcctaacccttttgccatcacttgttctttgtccaatccctttaattgtcagtgggcggtccgttcccgatcactatttaagcttttagcgctccctcacaattgttcatcccctggttcattttattccacctgtctccaattgtgcagacacgaatcgggaggtgttccacacagtcgactgttgttccccctttccccttccgaataaaggatattattcgaattaccgctacacaatgttttggggaatgcattaacaccaaactatcccaaccatatttttatttaatattcaatatctataaatgaagaattttctataagaaaagtgaaaaattaaaaatagtgactcatacttggcgttttaaaaggtcaaacccattattaaacaattgaagcgtgagtcatctctagcggtgctagatcaaaaatttcaaaatctgatttttcctatgattttttatcaattttttaattataaatatattaaaattttaataaattggtgcttaaatacacattcttctaaaaggtatgctgtatttcgaataaaagaataattaaaatttactacatattaaataaaatcattagccaggttactttgaattttttaaaatttgaagtttcaatggcgcctacaaattttagaanataaagcctaagcataggcttaagccaaagcaatcttgattgangtgaacggatacacttanatataaatatttccatttcctttttatttaagtgcattntaattgagcttccaaatatgtatttaaaaaattcaaataatctgata

SEQ ID NO: 30584 - DNA, 960 bp, Heterodera glycines
ccattttcgatgtgttcggtccgattggctctttacttcgatttgcctaaatgatttaaatgttggcaaagttattgatgaaaactgtgcgcaccgaatccgaacagtttggagcttgccgacttatgcggtgcggccaacggttttgtgggcgaagtgccaccgccgaaggacggcgcgggggaagttggagtgcccaaactaccggcactgtcctttttgccacctctgttgagaaaccatttatcatttggacaaaaaccgctaaaaactcacaaactgatcactccgatggaattggccaattggttctgataccttttcgggtcgaccaaggcattcaaaaaggtctaaagcagaggacatcatcatcgttttctcgcattaaattgggtttataaccttttgctggtctaattgtgccgacaatttggccagccattgctctttgtcgtcgacagacgccgcctgtgccacgtaagtggcctgctgatttgggtcgctgctttggagcacaaaacgcaacggttcgtcaggcactttttcgtccaacatcattttgttaacctgaaaagcgaatgaattgcaatttggtttttggaaagacgaataaagaaagtgccggttctgagggattaccatgatttggtttttgaagttgtacgtcgggttgccgtactccttcctcggcggaatgcactcggcgattatcaccgactgctcgaacagaaacacccgccgttctttgcccttaaatggctgcgcaatgccaccgtcggagatgaacaaagtgccctaaaaagcaattttccccattaaattttctaacggcacttttgccaagccatatcagcctttggcataaacccttggaaattcgtcaaatgacctggaaagtgagccgtccctgcgcgtttaggttgccctgaagttctgaagtcgtccgacttgcatcatgtc

SEQ ID NO: 30585 - DNA, 1854 bp, Heterodera glycines
agcaatcaacaaagaacaaagaggacaaagagctggaacgacatgcgcatacggcagaaaaaagacaatcgacatgcaagagaaacggcaacgaccaagagacgaatggccagaggaaaacgaaacgctgctcagctacgttcaacgcatttacggaccggagaattggacgtcagcatggcaaagaggacgtgttctccgagaactccatgaactggaagatcaagggcgatggatgattcatcacaaatccgatcgcctactactcagcgtctcgcgaatgtatagaggaaaacgaccatttgccgagttccgcttcgtggaaggcagatactactcacacatggtgccagaagatgttgatcttcctccaagcagtaccaaccaaagaacagccggagatcataacaatcgacgacacaacggcaccggcaacaaatacggaacaaacgaagcacccaacaaaaccgcaacgaccacaatcgccaaaactcgaagaataccgcatggccgactccaaaccgaacacgcacagccaattcaacctgttcgagccatgcgacaacacgcacacaacttgcgccaaaacagcgacttacggttccaccgcgggcaaccgatttcaaatggaagaattccaaaacttccgtgccaacaatttcttcgaggcattgctcttcaactggttaacacgcaacatgaacttgccagccgaagagatttgggcggcacacgaaggctacattcagtcagacacaacagtggaagaagtggcgcaaatgttctaccaacaacaagttgcagacaacggacgacaaatcgcacgagaccagcatttgaccgaggtcatcaatgtctggcgtaactcctgtgaccgatttggcgaactttacaatcaaccggcacacaagcaagtgaagtttcggccaatcacgacggaaaacgaacaacaaagcaactatggagaatggatcgaacggctcaacaatcgtacggcggaaatcttctccaaagctcggaccaaggcacaacatccaacgtacctgaactacaactgcacaacaattctgatcggagacaacgttgcagaagtattcaaaccgctcttctacgacgccaaatggttcacacatttcccggcggacgaattccgactcatccccggaccgaaggttaaacacttatcttcgcgtaccaagcgacagccgacaacatggcagcgcagatcgcaccaatgctccatcgattcatgcgatcagagatcgaaacaactttgatcctagccaaggacgacagcgctcaaaggatcagcaacaaaaaatatctgatcgacgtcacccgtgaactgaaggttggcttcttcgttttcaaccgggaaattggagaagcacgacgaatcgccaacagaatcaaacaaacgatgccggagccaatggagttggaccaagagcccgggacgtcaacatcaacaagttcagcccggcccggaacgtcaacaagtcaacaagtgatcagctcgttaatgctgatcagccttctttgccttctcttcaccagttcggcacaaggacaaccaactcgacaaaagcaatttgcggaagtcaaaacatggcacggcggctacatttccaacttcctcaacctattcacggaacgtgacaggaggacggcaacacaacacagcccatacgtccagcgatacattgacaaagtcctcgtccttaatcggagtctgagccaaacaacgactccaccggcaccaacaaatccaccacgcacaacgactacaaatccaccacgcacaacggcgaccataacccaaacacgctcaacaatttggtcaaccaaagcaac

SEQ ID NO: 30586 - DNA, 1038 bp, Heterodera glycines
  unsure (1)..(1038): unsure at all n locations
caatgttttgacgcacnagcagcatttatttgtcacttcaaaattcgaagccatcaattctcccccccttgaagcttacggtaaccaaatgttgtggaggatgaaaaagcatagtgtaaaactgaatactggtacatacggtatgattgtttgatgatattaaacatacacaaaaaaaagacaaaagacgatggttgacttgactgattgacttaacgcaaattggcgtcagcccgagtttttggattgtaacattttccctttgtctaccaaattcgataattttggcgtcagaattataccaagattgtttgatcgacaaaaacagtccaaaaactcggttggcgccagaacgaccctttcccgcgaataaaggtccgtttttaaaaggttggcaaagcatgagaaatgaagaataattggaatggtcggggcctgagattgtccaagaaatcttcatttttttaaaatttcgtactgatttattggtcaaattactctattattaaggaattacattttgccaaccaattgcattatgaaaccttttaaaagcaattattaataaactacgttttgcatgcgaaataaacacacaaagaaagcagcgtgataaaagtgttatcaaatgaaaagatcgtgtcaagcaagcggtgggtactcgtccaaatcgttcaggtcggccggtggtgcaaccacgtgcagatggtcggaccccgctgccgaggccatgtcggggtagagcaagtccgtctcaccaccgtcctccaatggggcgatcagcatgtcctccatgtcgaacggatttgcactggcttaacgattaaagggattgatgaacaacgatttggctgtcgccctctccccctatttaaataaatttcctaccataaatttttcagaccttcaaaaaattttaaagaaaattaaagaaaaaactaagaatttttcgtttgaaattcttcagatttttttctgataaatttataagaataagtttgaatattttttttaaatcattttgggaggggggggggg

SEQ ID NO: 30587 - DNA, 1015 bp, Heterodera glycines
cccgaaaccctcccccgggtccgacgatttcggccccaaaatttttgtgatttgtaagctgtccatttttcagccaaaaaattgagcagagttggtgtagtaccaggctgatgatgagcattaaatagagagcaaagagggcccagcaaacagcttgatgaaaaaagctgctttcctctggtatgtccttgcacatttgaataagcggtggaagaacaccagaaacatgctcatcaattaacttgtcgctctttggaggtgttttagctgttgttgcggttgttgttgtttttgtgctcgggaaggttgtggtacgtttgaaaaaagatagttttcttaaatattcagtgtaggaatattcaggctcgtgttgttgtcgagtcaaagtcagattttttagataagcagaataggtattttccggttgtctttgttgttgttgttctcgcagtgttgaagaaaccaagggaaggaaaattcggagaaagaacaaaataagacccaatctttttgaatacataatttatttatgagacggcaaaatgaaatgacaaacggtttaaatagtggtatctgtgcttattgatcggtttttgtccaacattacaagggaatcgcattctcccatcaccactagcattattcctccgacgggtactggttgattgaatttgatgctaaccgctgtggtcccattctttatcaaatcaaacagtgccgcttgatcatccccgctgttggtcaaattgaacacataaatgcaatgagtttttccgtattgagcaaaagtaatcccgttgctctctgttgagttggcgaacccgaccgcttcattcatgtcattgaatgggcgaacatattttccatttctgtaatccaaatcatagggcgcttgggggtacggtcgcccatttacactaatagaaatttcgcgcacattaaatggttgaaagttgaatggactgcgcaaaattgttccagcatagtcagtattagcgaccaatcccattgtgat

SEQ ID NO: 30588 - DNA, 1471 bp, Heterodera glycines
  unsure (1)..(1471): unsure at all n locations
atttatatgttaatatacntttttttaaaattaggtactcttggcaattttaatgtataatttatttaataattgtaattagcgtttttttttctcttacataaaaatctttgccctagtatttggaatttttgatgaactttgccctgcgcgtaaaaggccgaccgctccggaaataattaagcgaaaggatgatttattttctgtgctgctccccataatttaatagcaaactcaaagcgctccgggctattttttttttaaatttatattgaggaaaaggcattcagagccgcctaataagcagcatgtttctgctcgcttttggctctcatcagaataaagaatatttttgcggcctttgggccatttgtcaagttttggatgatgaaaaagtactcaattatttattttgccaactgaggtaatgaatacccagtggctattgtgaactttgcccttgcgtgcataaaattttttttcttttcattattctcaccgactgtaccggaaatgcattacacccctaaaaacgccgaagaatggaatgtgaaggcaagccacttaaagcaattttctgaaattttctcagcctttcaaattaaaatgcaaaagcaattaattacaaaaatttgtcaatataattttattgttatttttgagatttttgaggaattttatttattttagcaaaaaggctaacattctaagtctctcttacatattcagtcctgtatctttttaaatatttatttaactaaattgcggccctagggttatttgtcaagaaatggtaaaaaaattcaatatttctttatcagagaattattttgattccgattttagtctaattcttcaattttgggactatcttaaattggactagaaaatgatttgtggatgccattattttttatccgaaactattccagtcagagccttaattgcatggaaattaaattaacataaataggttattttacaagcagctcaattcattaatcgatataatttgtgaagaatttgaaatttaaaaccaaactttttttgctgaaaggctaccaaatatattaaggacaaacaaaattcaagctgagaaacttgaatctcttttagctacccaaagatggaccatttcaagcgtttaatttggtagttcaatggctttgagtgaatgaggcttcaatgcaattgaatgttattttttacaggcaataattattattttttagttcttttttgtgaggcaatttaattcatatcagcaaaagcctagacatttaaggaacgtcgctccttcgggagttctgtcatgttgaatggcgaaattgaaaatttatgtgccaaagagccttaacaatccaaactaaggcagaattgttaaacgggcgatttaaaattttgaaatttaatcgccaaaaaaaagccttataagagaaaaaaaatccgcttttgatgttttttgtttgga

SEQ ID NO: 30589 - DNA, 1178 bp, Heterodera glycines
cactctcactgttatggacaaaaaagtggtcaactttttggtgtctaccaacacttcattcagagtggtgaaccatccaaccttccaatcattgctcgcacctcaacaaattaaagtggttccttttactgtatcacaataaataacaaaaaacttattttaggaagaaacgcattatcgaacccaaattcttcctgaagtttataaacaagtcaaaaacaaaatcagagataaattgaaggagtgtgaatcgattcattcacaacagacgcatggagtgggccaacaaacaatttcctatggtcaatattagaatgtaaatcttttaatgctacttttagtctgacggctcatgggatcactcaaaattggacaatgaaaaatcatgtgttggcagtgaccgattttcagggaacacattcaggaagagaaattgccaaattattatcaaaattcatctcagattgggagatttgccaaacgaaaattcactgttttttgcgtgactccgcagccaacatgaaatcagtagtgttctatttttcatttgatatgttgtgttttatttttaggccttttcctagactattgtggaggatagcggtttgaccagccaaattttgccatatgaaaatgtcagctgtggtgcccatttactcaatcttgtggtccaaaaaagtataaaccaatcgaagaagcatcaaagatgcttataaagggaccattgtcaggtgatttaaattacatatttatttttaaagcccgaggaccagttaactcaaataccaattgcactgacccttcacggcaaactttacagtgcaaaattagttaacaaagacattgatgtggtgcgttgttcattggttaatgaactcgataaatatttttttgctctccgtgaaagacagtataacattacatacatattttttcactttaatctattatttaaaagtgttcatcgtttgtcgacctttttggatttgcgtttcaaggacaagtttttgctcgaaggacggaacatttttcttgctaaaatttcgtcctggctcaaagaggaacttggcgatttcatattgccatttgataatgcaagcgatgaaattgttttggctccgtcgcccaaaaaacagaagctttctctttttgatgacctcaatgaatattgcttcaac

SEQ ID NO: 30590 - DNA, 1003 bp, Heterodera glycines
aaaacttttttatataactttgctcaaaagcaactaaatttttaattcttaatatttttcgatagccctaagggttttctattatcatgcaaaatttcaaaaaatttctttaattttaaataaagttatgaccaaaaatgttcaagaaaacttgcttttgagtttcacaagtcataattttttccgctacttaatgattttttaatagaaaacacttaggcctatcgaaagataacaagaattaaaaatttgattaattttggggcgaagttatgaatgattttctgtcaaaaattttcattttgatggtttttgagtaacgacccggcaccatttttttgttttaagctgacctaaattcttttaatgtatttgcgcatttcagcccggggtctgtaaccattcagggactggttgccaacaaaatttgaattttttcagattcttccattataaccgagagacgccgatttgatataaaaatatttcgtccgatttttgctttggctaagtacatttctcacttgtggaatttcgctaacaaataaaaaattgtattggttaaatgaatagttctcccctttttgttagttctttcgccaatttacattattaagtgaacaatcgtgacaaaaaaaatacaataaaatatgaaattgagtaattggtcaacaaaataacaataccgaggaagaaacaagcattcgccatgataaaataatttaaaaagcattgacgaataacggcgacacttttttaaggcgagatccaattgagcatacatttgcgtctcttttttcaactcgctcatgggctttctcgagtggtctatctcagcgcgggactcttttctctacttggccatttgtctgagcatcccgtcggcgctgctttacgtggccgaaattgtcaccattctgcggcataaacaattccacaattcattctacgcactgttcatcaaaagtgccgtgccgggtgattgctttggttgtgcagtttc

SEQ ID NO: 30591 - DNA, 1668 bp, Heterodera glycines
  unsure (1)..(1668): unsure at all n locations
ggaaaatgttaagattttgcccgttatagaatccgttgtaacaggacagtctcgtacaatattttctcaggatatcctggtctggatcttgcatattttatcccggatattctcgtcctgtcctggcgggttgttttttttaattcgattcaaatcatcgcctcgattatcaataagtccatttttttagtgggtaaaatttgtttgtttcttataggaaatgtgacataaaaatattaatttttacaaaaattttcccctgtttcagtgtaaggacaaatgcattgagcagtaccaaaaggcggccgacatgtacaaaggggaggagcagcgcagttcggcggccaaatgtctgctcaaagtggcgcactacgcggccgagttggaccagtaccagaaggcgcagctcacttttgaggaggtggccatctacgaggcggacaatccgatgctgaaatacgctgccaaaacccactttttccaggtgcagttttttaataatatttttctcggcagtccaccatcaagaaaaattttgttgtttgtaaacgggtctggaaaaggaccggattttgacatttttgggccaaacttggtaatccaatccagggttgtcgaaagcgaatgcagattaatttttgttcaatttaacgaaattaacatgttacatcaattaaacaatttttatgccaaaaagttgtactagtgctaccagcagtgaaatttggaatttatattatgtttttataaacaatttttttagaccaattgattctgtcgtttgggtcctattcgggagaaatagggacggaattaattgttgttgtccaattcaggcccttctctgctccttgtgcatcgatttgctggacagtcagcgggcactgaaacgatacgaaggttggttggtcatttgatgaatgaatggtggggttcacatcaaaatcttgccaccggaatctcgccgcagaaattaaaaaaaaattttgaacatagaaacaaagtttgaaaatttttaagcattcctgcgccgagattttgtcccgcccccgtcaagtggtggttggacagggaaactcccgagggatgacggcgcgacaacatttataatttcattttcgctcataccacaaaatataaactttgaatttgtatgattttttcagaattgagcaattatttcgctgacgcgcgcgagtgccaactggggaagcagataattgaagcgatggaggtgagtgaattttatattggcacaatattcggaattttcattgtttgaagaacggggacccggacggattcaccgaggctgttcaacagttcgacaaaatcagccgtttggaccaatggcacgtcgcaatgttggtgaaggtaaggtgcaatgatcactatcgattgatcagtcagtgatcaattgattggttttttaattttccaggtaaagcgacgctgtggcgacggcggagacgtgaagaatgaggcgggggaggaggaggacgatttgcgataaaagggggacaccaaagacaaaaatattttaccaccaatatatttgacatgacacacacattcaattggacgacatgctgattgactctgtattatatgtaatgattctgngattcgaaaaagaaagtctaggcccacganaagaaaaattttttt

SEQ ID NO: 30592 - DNA, 1030 bp, Heterodera glycines
  unsure (1)..(1030): unsure at all n locations
tttatcgtttttatttcttgannccctaagaagttacaanaacatattntgaccttntttgtgtttgctcanaatntatgaataaaaatgtaataaaaacaaaaattaaacacctaagaatcgatccttaaaattttcaaaaatacatcaataagaattaaaaaattttctaaaaatcatcaccaaaaattatttatttatttttttttgttaattttgagtttaaatattatgtatctcaatactgatttggcttaattgttgatttttggaaaaaattttacgcttttacacaactaaatgtgaaatttaattactttttactgtcgaaaattcctcctctttctcccctccttcttgcttcgaatttttccttttcctctctttctcttccgtcactcctccttccccaatgctattttcatcctttccctctctctatccgtccaattgattatttgattgattgatttgtgggtggggggataaggtaaaacgcccggcaaatggtcataattttgcaaaatattctctttggtggtcctcctctcctctgttgcgttccattccaattcactgtgccattccctttttctgctcgccgtttcttcggtcggtgctatgatgttggtcaaaaaaccatcaattgtagcaatttttttcaatatctttacttaaaatcaaccaaatttttacttctttatatcattcaatagctctagttgttttctattagcatgcaaaatttcaaaaagggtgtgcgtacgtttcgcctactggacatctcgcctactgacacttcgcctactgacatttcgcctactaagccaaaatcggacgttccgcctactcacctaaaatctgacattttgcctactaagccaaatacggacgtttcgcctactcacctaaaatctgacattttgcctactggacatttcgcctattgaatatctcgcctgctaacctaaaatacctagctctttcgacagcaaatttcaacaaatatatattctaattgacatataat

SEQ ID NO: 30593 - DNA, 1325 bp, Heterodera glycines
  unsure (1)..(1325): unsure at all n locations
tcaaaagatttcgaaaataaaattgtaaattctgggaaagatacgttgcatgaattgatagacgccgaaccaattgatcaaaaaaatggaaaaatttgccatttttcaacagattgaccaaaaattactaagaagccataaaaaggatcttcggcatgcgaaatttaaatttgtaacactaaaaattatataaatcaaagccagcataaatattttataattatattagtaaaaactaaaagaattaatttaaaattgatttaaagtaaaaaaatgcatgcccttcttttttactaataaatgaacgagaaaacaaaaaataaaaataatcaattttattaattagtaaatacttgagtccataacaaaacttaaaaataaaattatgaaaaaaatactggaagtttattaagataagtttaaccctcaaaattagtctatagaataaaacgatttaacgcatttatttgaatttatattaaatcttaagtaaattttatgtaataaattaagaataattttcgaagcaaaatgcacaaaaaatagcttatcataccaagttatagaaattaatttaagtattgcgtaaaatttaaaaaagattatatgagaaataaaatagaaataatagataaaaaatgttcggaaataaactaaccatataatgatgaattcaatcgctttttctccgtttaaaaatacgaattatataaatcagcacatttaacgagaaaatatatgcatcaatcggtgttattttcaactattattattaataatcattttaatgaagaaaggccaaaatattaaggttgtacctcttccacccgtggttgtaccttccactcgttgttgtacctcttccacccgtggttgtacctcttccacccgtggttgtaccttccactcgttagctaaaatgccaacgtttcacgcacctgctagttataacttatattattaaagcattttatttataaaaaataaaatcgaagtcataaaaaatatacagttaaaagacattcatgtatttaaattgttgatcaggacagacttttttatacggtgcaattacctaggaaacccctaaaatgtaaaaacaattataacttaatcataattatgctttaaaaaaatgaataaaataacataaatttaaacagaaatttataaatgctaattttgattatgaacaaacattanaaatccaaaaaatataattgtttanagaaataaaaattttggttttgaacaaaatattaacaanaacttagcaaatanaaacattaattgttacaaaaagacacattataaaatcactaatt

SEQ ID NO: 30594 - DNA, 801 bp, Heterodera glycines
ttttctagattttattttttagaactttaaattaataaatttttcaaaaaaacttatgaatcaaaaggtaataaaaacgaaaaaagacaccccctaaaagtcgatcaaaaatttcaaaaaatacatcttaagaaatggaatattttaaaaaaatcatctccatttatttatttgtttacattcttgaaaagaatttttgaatttaaaaattatgtatctcaataattatttgacttaattttaatttgttgcttttggataaaattttaagattttacacccctaaatttgaaacttaattacattttactgtcgaaaagtccactgtcgaaaagtcccctccttaaatttaaaatatttctgtcgaaaagtcctttgctgtcgaaaagtccttctgtcgaaaagtcctctgtcgaaaagtccactgtcgaaaagtccggcgccctcacttttcaatttaatattaaagattaattatttttaactgaaagctaaactgatttacaagcgatatataaatgtatgcggcctctcaaatggcattgttttcatattgctaaatttgtgaaatttagtatgattaataggaaaattgctaatggttttgttggataaataaataataaatcaaaagtgcttgagtcgatgaaaaatttaaattaagcggcacaatgcaaataattagggcttcgtttttttaggcacaaaaagtggcaaataaaattttttattaacgctttttcggtagcaaaacacataaaaacttaatcaaaagactaattttggttatatttcaattgt

SEQ ID NO: 30595 - DNA, 1324 bp, Heterodera glycines
tatataataagtaattaaatatttaattaataaagtatattcatgtacaatacgttattctatattgatcttcaactttcagtgacgttcatggaatatgtacgcgaaatacactcctcagaagcggaagtgaaagtgtaaaaatgaatataaaaatcgatatctccttctacagtattctttttgttttggtagctgccagaggcagagaaaagatgaaaaaagaagggggagagagagggatggacagagtcggagaaaagggaaaagaaagaaacatggacatagagggagaaaaagggaaagagaaagaaatagtcaactcattcactcatttaatacctgaaaaattattaggatagtaagactaaaaaattaataaaagccactcatttaacacctgaaaatttattaaaattggttgaatgcaattaaaggagatttgttaaaattttattgactttaataaagcataaatttacaaaaacaaatgattaaatttatttgttgtcagcgtgagatttaaaaaaagaaacattaaatggcagtaacaaaaaaagacagacgcagaaacaaaagaatgaatgggaattgattgtcctgtgaaggttttgtcgttgcattaaaatgaaatgcatttttagcacattaaacacaaacaaataaacataagcgataataatcttaaaaagcgaaatgcaaaaaacaaatatcaaaaagagtcattaattaataattaattgtcgtcaaaatcgttttgagtgttcgtctccatccttccgctggctcagtcctccaagtccgtctcgcggatgggccggcagcgctcgtgttggaaaatggagagcgcctcgcgcaccagaaaggcaccgaactcggagatttgtttgcgcgaccagcgcgaggcgagcccaggaaacgagccacgcaccacgttggtcagattggcaacaccttttacggggcgacatcaataatggcaatttcagaattgtaattgatttttaaaaatacatgccatgccagggatttggtacccgacatttccgtccccgatattcggggacaatctcgtaatttggattgtctaaatgggtgtcgatttgcattttaaaacccctaaaacgcgtttgtttgattagttaattagccctcctatttttaccaccgatggcgtcgataattgcaccttcgcgcacatgcgcctcagccgagtgaatgttgcagaacaattgttgcgaaatcactccctcgccacggtcccaaagagccaaaatgcgtttcagcttctcggattgctgaaagtccgttggcatgggattag

SEQ ID NO: 30596 - DNA, 1086 bp, Heterodera glycines
gtttgttcctaattcatggcacaaatgtctccatatcactcaaaataaaatttcaagtcgagttttcgctagcacctgcttaggtttatccaattggcaggggtttgatagtagtaatcggcacatttaaaccatttgacaaagaattaaatggttagtgaaggggcatactccttcaataaagattatcagaaagttctcaaagtttaagcttcagtttgataattattgattcattgcaaatatttgtttaggtcggtatgcgaaactttcatgtgcgaaagaaccattactactctccaagcatcaatttggacaaactgtggactctgtgcacagaacggacgcgcaaacaatatgcagaagtgaaggacaaagcgccggtgatcgacgtggtccgggccggctatcacaaagtgttgggcaaagggttgttgccgaaacagccgctgattgtaaaggtaagtgcaaatatggcagcattggagaaaattttgaaaaatggacaaacaaaacatttacacatatttgagggttgacctggaaaactgtttttactgcacttagaagggcttgactaagaacgaaggagggttgggggatgcgttctatattggaaaagctgtgatttcttacgaatattctattcctccctaacttcaaggccaaatgcttctcgcactctgccgaggaaaagattcggaaagtgggcggcgcatgtgttctggtcacataaatggaagaaagggcttgagaagaatgatgatgatggcgccccttgacgaggaacacctttttatgttgttgtctttgttaaagttattcctttcgaatttcttttttttttgtgcaagtgtagtgggagccaataaaccgtgcacactggccatttcttatttgaatccgtttaatgtactgagtctaatgtgtgcatgtttatgggttctttgccgtaatattggtttttatccatatatctttctgccgttaatcaccgctttttgacttttgctttagttttcagcgcgcaaatctaaaaatggcatctacccaggaattggcggtcatttacgctattttggcact

SEQ ID NO: 30597 - DNA, 1041 bp, Heterodera glycines
ccgatgtgtaggagaatacagcgttcctaaagaagctcgcttccaccagacccgaacaaaagaagaacgaattaatcgaaaacgccacagctgaccaaattttaggaatcgttgaaatttgtgcaaatatattgagttttagttttaaactaacgaacaaacaaaaagaaagttgtcacaattcgccgatttctatagagaaattgcaaaatcacgttcagagaaaacggcaagaaaaaggatacagcagggggagtggtatagcactgggggctatcttgatcccggtactgagtgtattagcccaacatttattagaaaaactaactcatgaaatttgcaaagaaaatgttaatgattcccgaggcggaatatttggctctgaggagtgcgataaatagtggtgattctctccaaaatgaaaaagcgagtttagacgcaaaaatatctcagaatttacaaggacccggcataatcgatgacctcaaggcgaagagacacgattggctctataaagaaagacgtacagtaaaggggatacttgaaaatagaccacagaaggtggtgattgagaatcatgtacccggtccgaatgttgcaccatatctgggcatcaataaccaattcaatccacaagagaccgaagaaccacggaaaataattattcctaggaaaagacttaaagagcaaactccggattcagattcagataatgatacacttgaggagataacaccggaatcccaaactgtgggatcctcaccaacattaaaaacacccgttccgaacaaaacatctattatacacccaacccttttaaacggtctttttaggtatgtaaaagaaaacaaagatttatttaaaattactgcggctggaaaggttcagtcgaatatgaatttgccgattgaaaacagtaattatagagatgttttgttgtatctcgcggggaagaaagatgaaacgccgcgcggtgcaaaatttctcaaagatcggttactgaaggatccaacagtaaaagatatgggttaataaatcaaa

SEQ ID NO: 30598 - DNA, 1434 bp, Heterodera glycines
  unsure (1)..(1434): unsure at all n locations
attgggtcgtgaaaacatganaataaatcacgcttaaaatccttaattaagattgacgaagtggaaaagcataacaaaaanattgattttttgtgataagcttctaaaaaattggtctaaaaagcgaaaaattctcccggcggtgccaatcagcagctcggaccataaaactctntaattttcctaaaaactgtcttaaaatcgcaaatattggtcattttccggacaaaattgtcgctttatatgactgggtcccttttgtaaacttttctgttttactttattaattacttttttttgatcagcagtgtctatctgatggtaatgaacctgtgattaaatttatcgtatatataaatttgttgtcctattttttcgaatgaataaaaaagccaaaaggtaaaaaatggaatggcatttgcaattttctcatattatccctattttttcatcccaaaatgcttcttccgtccgcccatcccatcggtgttcagaagagatacgccgtgtcgtaaacgccgagtccggcgccgatgccgccctcattaagatgagacaatttgctgcggaagtggtagccccgctggacatttgccagcaccgttccgtccacctcgttgcccaacagaaagccgtacacgcccaactcgggcaccaaagtcgccttttggggctcagctaagggccgcaaagtgtaattctgagacaaaggaattgtccaattaaaatgccatttcaaaggtgagatttttgttacttcaacggtcatcggacgcaatttttgcattaaaacattgtcccctgcaacgagtaaaaaatgcattcgattttgccttccgaaatccttcccatgccatggagtgtttcccctttccatgccatggagtctttcccccttcccatgccatggagtctttcccccttcccatgccatggagtgtttcccctttccatgccatggagtctttcccccttcccatgccatggagtgtttcccctttccatgccatggatgtttcccccttaccatgccatgtgcaatgtttcgaccaaagaggcatccggttgattgtctggcgatggtgccgtgtccatgccgacctgtcgcagaatttgccggtgcaattcgctgttgcgccgcttcagactcaaaccggcgacggagccgctgttcacttcgacctgaaagggcaaattacaaaaaagaaagggataattacccaaaatgccgatatcattcacctgcttaatttcgtacttttcctcgccgctgctttgatccgtgacaacattcaacagataatcctgaattatttccagcaataattatgcaattaaattgctaattaaccgctctttggatgagcagtgttatcggctgtcgaatgccctcctncctcacttctttcacaattttccaccattttttgcgat

SEQ ID NO: 30599 - DNA, 1053 bp, Heterodera glycines
tccaagtgggttacagagttcttttaaagaattatatctctaaagtaggcacgtcaaagaaattccacctaccgtggagaggaattttcagagtagtgaacattgatggtgtaaaggtaacaataacaagctgtaatgccccgcaagcaaaccctagggttgtgcatatcaaccaattgaagaaatccttcgatggattaggtcctgcctgtactgttcccgaactcactgagaatgaaaaagatgcccttctcggtgcccaatctgaagaactccaaaatcagcctggttattctcacactcccaatcctaatcccgattttgcctcatctgaaaacccacaagtgctaaatgactccaatgttgcccctgaaacctcagaaaatgcgacaaatccccaatcttcttacggattgcgaaatcgcatgtcccttcgtcgtcctcataaatttgattaaattttattctattgctaggctcaatacttttgaaggttctaaatcatttcttattttaagctaaatcgcattaaagctattattctgtgccttcaatggagagcgtctctctcgatcctggtgaggagttccaggaggaattgacggaagaattagaagaggagttgctaggaaaagaagagaagtgggtcacggcccaaaattctgaaaatgaggtggaaggagaggaaaaggagaaggatgagggtgaagaagttgagttaaatgaggacgctgagaagaagaaaaaggagtgggctacggcccagaactctacgaacaatgaaaaggaagttgagaagagtggagagatagaggttgaaaagagtgaaaagaaaatgaagtgggttacggcccaaaatcgttctgaaggcttcggaaacggtggttttggagaacgaaccgaaaaaattgttgaagtgcttcttttggatccggagacgtcggcgcggataagagaatatgtggtctgccaactccaaagcgaaggagttgtgttcgtatacccaaatcacgtcggaaaaaaacaacattccgtacttcatctttcttccgg

SEQ ID NO: 30600 - DNA, 1932 bp, Heterodera glycines
cggcatgatttgccacataaatatggatttttcaatgcttttttcactgctttcgtcaaagaagcaaaatgacgtcacaacaaatgtagataatatgaatcaaaaaaattttctgacgccaaataggtaataataaattaaattactaattttttattcaattgaaaaaataaaataaaattaaaaaaacttccgacgatgggtctgctgctccagctgctagtactaatattatgcatgattcacacaatgagttgttacccggcatcaatgcgtaatcgttttataacggcaataaataacttaaaaatataataaaatcataaattttaatttacaaaaatgataaaattaaaatgaaactctttagtctattaataaatagaaaaattgtaaaattaaaatgttcaaaataagaaaaattaaaaatatagaagtttttatttcgattaatgcgtttatttccaagcgatcaatgtttttgttctgttttaattgtttggctgtagtttttaaatatcttgcaaatcttgcaaacctctaattagagcctctatggttcaaaataaaaaaacaaaaatatcatttataaaaatattaaatccgctaattctaactcagaatttccatgtcgttcgggcagccaacatttggtcgcactgatggaaaagtacaccaacacattcaatttggacatggccactgatcagcattcattttgctctacggcccaccaagccgtggtggaaataaaaaacgaactaatcaatccaacaatgccggattgtgaaagtccagcgggtggtggcactaaaatggtgcaacaaattgacacacatttgtatgctagtaatcgaaaaggtaaattaattaattttaaaaaattcttaaactatcaataattgggctgcgaattttatagtcaaatgacttttttttttacttttttggactacgcttttttctttttgggatttttttttgacttttgtgcatttttttttgcgttttatggatttttatggtctttttggctaatttacattacttttttgcatttatttatgccttttatcttttttttttcaatttttgtcgatttttatttacttttaaaataaggataaaaaagatttaatgaatttgggaccaaaaaataaatattaaaatcaattttgataaatttaaattcttcgctttatttgattttgaagccaatgatgaagagtgcgcgtacagtgtcggctttattagtgccatgttcgaatttgcctctgcagcttcggcccatgctgatcaatcaatatctgatttgaaggagctaactttgaaatttgatcagcaaattggcatcattggcgaactgtgcaattgccttaataccgacattggcattgtgctcttccgaatgccacgccagggcaaaacagacggtttgaaaattactaaaaaacagagggggagaaccagggctgcacgcaattacggattacgggaatcctgaggtttcccagaaatgacgggttacaaattattgggacatgtagggttcgaatcccacccccgcacccggggacaggacaggttttttggcctcacccccgcccccgtgacttagacccccgcaatcccgcccccgcgaccttcatccccgcgggggcgcggggatgaaaacgcacccctaagaatggcattttctgggaaaaatgcaaaaaatttgtacaattttgaatttttttaaccattttgacaaatttttatggaataaagtaaattttgctttcatttttaatatattatgcttcaacactaacagtcttctttgttatgagtttgatgccggttgacgttttcttttgaatttattttttttatgattaatagacaaaaacacccataaaaattgaccattcttggcataatttgtaaaca

SEQ ID NO: 30601 - DNA, 1011 bp, Heterodera glycines
  unsure (1)..(1011): unsure at all n locations
cctggcaggtcccttgactggtagaccagaaaaaaagatacgccantttttccataattttcacgatcaaatgcgctgagaaaaaaattccagaacaattagtatcaggcgtcattatgctgagagtgcggttggaattcccttgactgtagaccagaaaaagagatagccatttttccaaaattttcacgatcaaatgcgctgagaaaaaaattccagaacaattagtatcggcgtcattatgctgagagtgcggttggaattcccttgactgtagaccagaaaaagagatagccatttttccaaaattttcacgatcaaatgcgctgagaaaaaaattccagaacaattagtatcggcgtcattatgctgagagtgcggttggaattcccttgactgtagaccagaaaaagagatagccatttttccaaaattttcacgatcaaatgcgctgagaaaaaaattccagaacaattagtatcggcgtcattatgctgagagtgcggttggaattcccttgactgtagaccagaaaaagagatagccatttttccaaaattttcacgatcaaatgcgctgagaaaaaaattccagaacaattagtatcggcgtcattatgctgagagtgcggttggaattcccttgactgtagaccagaaaaagagatagccatttttccaaaattttcacgatcaaatgcgctgagaaaaaaattccagaacaattagtatcggcgtcattatgctgagagtgcggttggaattcccttgactgtagaccagaaaaagagatagccatttttccaaaattttcacgatcaaatgcgctgagaaaaaaattccagaacaattagtatcggcgtcattatgctgagagtgcggttggaattcccttgactgtagacccggaaaagagatagccatttttccaaaattttcacgatcaaatgcgctgagaaaaaaatccagaacaatagtatcggcgtcattatgctgagagtgcggttggaat

SEQ ID NO: 30602 - DNA, 1219 bp, Heterodera glycines
gataaaatacctagaacagaattttaaaaaatattacataattaaatgaatgagactgcgcgaaaatgactcgattagaaaaaaaattatatgaagccattagaaaaataattatcattgcttttaattttaatgttaaaaaaattagcgatgaaaatcaagccatttgcatcattatgttgagaacagtgcaaaataatccgccaagaataatcttattaattctaataaatgttttaaacatgagaattatacaagataatagtgaaattattaataattttaattgtatgagacatgggattattaaaataaagaaatatgctatataataataaaaacttaaaaaatgatataaccttttaataatgcaaacatttgttttactactagccaataaattgatacatattatctaaatataatgtctttcagctcgcaaataaaaattgaaaaaaattgctcgtagaatatcttctttttatatattcccggtaatcaaagaaaaatcgtaattagaaaggcaattaactcaaaattattttatattttgttaataaaacaaataaagaataataaattagaagaaaatgactcatctaagtaaaaggcaaaacatactaaaaaaatttcaaattcataaagttcataaaattttttatttcataaaattgtgcaaaataaatttcaatatacacactaaatataacaatattaacatttaatgaagcttaaactatttttaacaatcaacatcatcaacaaaataatattaaaaattaaatataaaccgattcatcaattgatttttatttagattcaatgaataaatttttgtcatataatttgttaattaaagttaaaaattaaaaaaattaagttttataaatttgaaaatgcgatttcttaacaattaatatcaaaattttttcttgaagctaactagatatggaaagaattcacacgaattttttaacaaataataatatatacaataaaaaattcatttactagcataaaccgcgctacacctaggtttctttttttaaattaattaataaaaaaatattaatttattaaataaaacaaagaaattgttgaaatcggcagatctaagaaaaatttatacttgaataattaactttcatacaacaaaagacaattcatacgacaaccttgagaaggagcaactcttggtagtaatataaaactaaaacct

SEQ ID NO: 30603 - DNA, 648 bp, Heterodera glycines
tttgggttcaacctaaatcaaaatcgtcggctccgaaaaccgacaatttgttccattccactaaatttctcattcatttaccacttcggcatttcgcatcgggaaacattcggccaatttgtgacggattttcctcgaaaacgccgggtaattgtagtcgaactcttcgccgctcctccccgggtggtccctctcaatatcgccgtacaatcgacgctttttgcagctgtgggctcatttggccacacagccgacaattgtaaatgggcaacttcaggtggtgcaaattcacatgggacttcagactcgtgctggcgttggccacgagcattccgcagtccgagcacggaatgaccgcacttcggaggggacgtctcttgcgcggattgtgagtctggcaaaagcaaagaacagattttcaccaaagctgccaaattttgcaatttttagcaaatcgacgactttttttattcttaaaaaagtatttttttttgcggcgtggtttttttaaaaaattttagacgacacgggaaaaattttgtaatttttaatgttatttgttagcagattttgattaaaaaatgaccaaattttgagtttttgggctcattttttaagaaaaaaataggtttttgggtgggggggggg

SEQ ID NO: 30604 - DNA, 1274 bp, Heterodera glycines
aaattttgggaaaaaaattttcaagaaaaaatggaaaaattttccattggcttcagaagcaaccctcaaaatttttcaacaccattaatgtaaaaaaattttacccaaggaaattatttttagatcctttttagaaattgtgcataaatttttattgtaaaagtcacaaaaaacttttttttactcccaatatctaccagttatcatacaaaaaggcaatagttaaactttgagatataaaaaaatcgtctagaataattatctcaacaatttgtcgggaaagttgaataaatttcagttgcaataggcatattggcacaatacataaatgtagagcaggctcaaaatagaggaaataccaaagattaaaaaattcgtgtttatggcccactctgctttggctggacataactcgccagagagtggagatagaccctttgttgatacatttgaaaatgtagagctcggctagcgcattcgaataacacaaaatttgttttcatttgcccccaaacaatccgcttatgacgggccgaaagaaaattcacaaaaatttggcaccggaaaaactccatttttttatgggccagcataataaagtaaacccaaaatgtaagtgaatttaaattggtcatgtgagatgtttagttttttatttgacccatccgttttctgggaaaaaacttttcgagaaaagctgaaaaattttccaattgcatcagaagcagactcaaattcttcaacaacataatgtaaaaaatattacgcaagaaattatttttacatcctttttagaaatgctgcataaatttttattgtaaatagtcacaaacaaactttttttcactcccaatatctaccagttatcatacaaaaaggcaatagttaagcactgagatataaaaaaatcgtctagaataattatctaaacaatttgtcgggaaagctgtataaattctgggaaaaaacttttcaagaaaagctgaaaaattttcaatcgcatcagaagcagcctcaaattcttcaacaacataatgtaaaaaatattacgcaagaaattatttttagatcctttttagaaatgctgcataaatttttattgtaaatagtcacaaaaaaacttttttttactcccaatatctaccagttatcatacaaaaaggcaatagttaagctttgagatataaaaaaatcgtctagaataattatctcaacaatttgtcgggaaagttgaataaatttcagtgcaataggcatattggcacatacataaa

SEQ ID NO: 30605 - DNA, 1938 bp, Heterodera glycines
  unsure (1)..(1938): unsure at all n locations
ttggaaatgccaatttgttactcaattagttgncagaaatttcctcatgagattcttgcctgtttgaagttttaacattcttacatatcacatatatacggatttgtgtcaaccataaaataatttttcattgttttgataaaaatattggttaatcgaaaattttttttttgcgaattagagttttaaaatttaacttacctatataccttttagttcaattttatattatgattttgtgtactgtagaattttaaaaaagttatgttattctgtttattgtgaatttatattaaagattttttgcattggttttccaaaaaaatcgttttagcgagtcactcatagtctggatgaaagattgggcgctatatgcaaagtggtcaatttttaattttatcaaaaagtaaagggggaacccttttgttttgtgaaatttttttgtgataaaaaaccatgaaaattgtgttatccggggttttagaggttgctgatcacgaatctgacatctgattcgaggtcatggacccaaaaaaccccagggaataaattttcataactatatattgaaaaacttgcaaaacaatagggtaccccttttgtttttactttttgataaaattcaaaattgaccaaaaccgttttgctcgactccccgtcttacaagaaacatgaacctgtaatgtttctaaaacccgtactcaggtcctcccagcttcagtcatggctttaaaaagcgctaattaccaacgtacatacatattcagtttttaatcactttagaaaatcatattaaactaaaaatgggacgtcgtcccgctcgttgctatcgctacattaagaacaagccttatcccaagtctcgcttttgtcgcggtgtccctgacccgaagattcgcatttttgacttgggtaggaaacgcgcaactgttgacgagtttccatgctgtgtgcacatgatatcgaatgaaagggaacatttgtcgtctgaggttaatgttaacatttgctgtaattttaagaaacgaatgattttctattttgcctcaaaaaggtgctacaaactaatctatcaaatcctatatacaatttgattttgacaatttgatgtttaggctctcgaagctgctcgaatttgtgcgaacaaatacatggtgaagaattgcgggaaggacggcttccacatgcgcgtccgaatccacccgtaaacatctatcggttgcattccaatatcattttgctttccaggttccatgtgattcgcatcaacaaaatgttgtcctgcgctggtgctgaccgtcttcagacgggaatgcgcggcgcctttgggaaaccccaagggttggtggcgcgtgtcggcatcggtgatatgctgatgtcggttcgtgtccgtgaccaggtaaatctcttcccttggctttcagctttattttctttttagcatcaagcccacgctcttgaagcattccgtcgagcaaagttcaaattccccggccgtcaatacatcgtcatttcgcgcaaatggggcttcaccccttttgaccgcgaagtttacgagaagcaccgcaaggaagggcgagtcattccggacggagtcaactgccgattcctcaagcaacacggaccattgacggaatggctcaaaaatccaatctgatcaattgtacgacggatatattcccttttatatgctttgttgattaaattgttggatctatacattcggattgggaatgcgtcaatatacaaaatgggcatgggactgcgtgctttctgtctacgacaacatatatgaaagggggagggtcaaccgaaattcttgcggaggtctgggggggtcagcgctttttctactcagcaaaaacttgttggaatttttagtggatttcctaagaaaatgcgggctctatgcctntntattgagtccaatcaattgac

SEQ ID NO: 30606 - DNA, 1195 bp, Heterodera glycines
aatttaacttttcattttataggttacccatttcactatttacattatgtcgattacggcaacaaaaaaattgcaaccattgctttatgaatcctacgaatgtctcagaaaacgtgccttcgacattgacaaagaattgcttgcttcgctgaaacggctcgacaattataagtttctaaatttttctgattgtgagattaatttattctttttcatttgctaggcgcttcaaatatttatcggaagccgaacgcgaaggaaggatgaaaatgcaggatggagatgaagaagatgcatacattttgtaccaccgagccatggccatttaccgtttgataagcgactcaatgactgatgcgttcaaacggagccgggtaattatatttttgttttcctaaacagaccacgaaaccttttgttgcaggatggtcgtattttctacgagacttctggtcgcctgctttcggatcttgaaaaggttgccgagagtttgaagcaacggttcggacagcgtcaaataactgggtccacacttgggagttctaaatcgttttctgatgagacgaaagttgaaggctcattgtcatctcaatcaagtccgtttcaaattttctttaaatttaagcttggaattaggattgaccaaaaaaaaccataatgttcagcatctttgataatctactggttatacagtatggaataaaactttatggtttgaataaaaattttttgtatctgtgacatacatgaaaagggggggaggggtccataaaatgacaaaatatataaaatccgaaaattttaggccacatctcttaggttgcattcttattcgaaacccacgaacttaaaacaaccacatgcaagatcattaaccaaaattaaagccgctttttcaaacctttttgggaataagtgtatcttgataaactatgtgactaataaagcatttttatagctgcccaacatgccaagaatatgtaattaaagtgaatgaaggaaaaaatattaaattgaatttttccatattgttttagtcaaaataagacccggggcacagccttattaatattttggctggggaaacaccaacatactttttttggggtgtcgaagaacggaacggcaatttggacctgtgcttttaaaaaaaatagcggataataattggggatctcaaaaacaaacttttttc

SEQ ID NO: 30607 - DNA, 804 bp, Heterodera glycines
aagaaaatcatcgccttcaaaaaggtgaggaggcgttaaaaaaataaataatcagaaatcgtatataaatgtcaatcaaataaccatataatctaaataataaaagaagaattatcgagtttcttaagctttcgtatatttaaaaatgaaaaaattatttattaaatttacacgaaattattgtttttgatttattttttatcccaaaaaaaacgaataaccacaaaaagtgccaaaattaaatgtcatcttaataaaaacaataacaaattacattataattttactttaataataatatttattcgtataaattttcttgtaaagttatgatttgaataaataaattaactaattagtccataattatgtcgcggaatggacaaaaaagagaaagggatttcgatccctttcaacgttcctctttggaacgttaattgatttgttggacaaaggaagaggctttggcctttcccttgtatgcttatgcgagaagagctttctcttcgatttttgactccctttttcaattcctttattagtcacaaataaatgtgtgaataaatggagaagggacgattaaatataaatattaaatagaagtgagaagaagtgccccaataggcgaatggtgcggcttttatagccctagagacgcgtgcgcatgcgtacgcgcatagagagagagagaaagaaagagggagagaaccagtaacacacaaaataaaaaatagagaaaaatactaaattaatgaaaggaaaaaatattaattattatcaaaatatatcatttgtcgctttccg

SEQ ID NO: 30608 - DNA, 1267 bp, Heterodera glycines
cattctcatcaattcattcatttttgctgaccaattgagcagcgaattgcgaaaggaaagctgaaaaagaaagcatttcctataaaaagttaaaaggctgttcgagagtctcgcttttggaggtggtcaattccagcaggtgttggttctcgaaactcggtcaaatttcactcactctcgaacagtttgaacaattacgactcccacaatttcactgacccttttcggcgttatcatcgttttcccaaatggtaattagatttcgtggaagaacatattgcccttcaatcgccgccgaaatccatttgacccatttcttctcgtcgcgcgcaattggagaacggacaagcaaaaattgactgaaactctttttgtgttttaacaactctgctgatttatcaacattttactgtttttaagtttcaaaactggatttaattttttgtttttgtaaatctcaaaatggccaattttatgtaaaattgctgaccaaaaactcccaaattttttcaattggctaccctggttttaatggtctaaatcttagtcgttccgccgttgaatgatttttcaaagcgaagtccgccattgagcgattgcggtaagaaaagagaggccaggatttgaaaaggacgatgaaattggcacgaggagaagtgccattcacaaatgcctaaacaaaggagcaacggtacattttttgagcctaccgtacactcgcctaaatatttaaaaagtgccaatgtggcaataaccttattgtcgatctatcataccgcctaactctaccatatccccacattactagaaaatgtttttgagtttttggctctaccgtacccatccccagaaatgttaaactacaaacagcacaaatttaaaaccaaaattgaccatcaccgttttgtattgttcaattctcgcaatccaactctcaatatcagagttatagacacggcatcgcaacactttaggcggcaaatcgttctccggacgagaggagaacaaccatttggtcaacgcttcgctttcgttcaacggcactttggcattggcattgccattgtcatgggcactttcaacggcagttggcaatttgggcaattcgcccttatcaaagtacactgattggattggtattttccgcggacttttatcgtcatcgatgcggaaaatgtgacggagaatggacggggcattctttcggagacggcgaaaatctttggatttgcaaaaaataatgccaccaaatgttttgtcggatcat

SEQ ID NO: 30609 - DNA, 976 bp, Heterodera glycines
attgcccgggagccttttttcctatgggtctcctttgccaaagcatgccaacatgcaaccacttttcttcccgctgcttccggtactgttccgtcttgatgaattttcccccgcctttcgctgattttgccattccggcaaattggccattgcaataccagccatcccaaatgttggacgtactccatgattgtagatcggcttgaccacattttcttttacggcaaccgcagcgccagcaattacaggcgcggcatttgtggcggcaggtgcggcataattattgaccatgtttttggtagcgttggcaaccgtaggaagcgcactgacaactgtctttgtacagttcactgcaccaggaatcacttggtcacttaaaaatagaatttaaaatgttaaaaaaagattattttaattattttaaatttttgttttaaaataattttagcggatgacaaattttatatttctggaaaaattcaaaaatttttatagaaaaattcaagttttttgctttatttaaagaattttcgtcataaacaaaaaaattaataaatggataaaaaaggctaatacaactagtcaagatcttttcgctttggtagtttacaaaaaaaaaagtcttaacgtctattaatctatcgtaatccataccgtacaactggggctaatgttgtcactgctctgatgcccaaatttgcagcactcgctaaaacattaatggtcgactgtccaagttgcttcaaatcattcccggcattttgatctgtcgcaaggccaaaagaaatgccaatgaataaaatgtcgaacagtaaatttagtttacttagcatctgaaaaattaaattttttattttatgattatgatgagaagataattaaatagctgctttatcaatagatttggttttttaaatttatgggtggtcatttttcgcattacaaattttaatgtcgctcttaaatattcttaaaa

SEQ ID NO: 30610 - DNA, 1037 bp, Heterodera glycines
actgacaaataaaatttcttttaattttgattattatttttcatcaaccccattattattaaaatatattgatagtgaaatatatgaacgagctggggaagcttttgagggaaaaaatatggggcgggccggattttaaccggcatctctggctttccggaccagtgttctaccagctctgaactaccgaccctgccttctccagcctctttgctcgatcatataggatcaattgttgcctcaattgatccattaatcttcctctcggggaagcttcttcttctctatctcaatggttttaattttataatcctggaccaaaaatagaactgctataaatcgaacaaatggttttgtgtggagtggagctgagttgtgagtaaaagcaccagcgaatgtgctagaagaaagcgccataaggaggacggacgatttgatcagcgtaagagaaagaaaatggagcaatgaatcaatgcattagtgagggattaattaacgagggattataattaattttttaagtttttgtttgatttttattttaatgttctttccgacgtgtttgaggcaatgttccgttatgatgccaaaaaggaaaagcggaattcggtaaaaattaaaacatagttaattcattattcgaataaacgaactgtttctggatccaggtatgtttttcttggattcagtccatgaacaggtctttttgtcggcaaactgcattttttgctgagctttgctaattgctactattgcttatacaatatttctgtcttgctcgacccttctttgccagttcctgtttcttatttttgaagagtttccgatttttaaaattattctttaatttttagttatattgcataaaaacacaaaatatgcaaataaaagtccccatttttatacgcaaatatataccaaaaagaagatgcttttccttctaatttagactacgtagaaaccaggaacaaaaaatgcatttttatttttgacagccctgataataaattttgctctgagaattcgtcctttatttt

SEQ ID NO: 30611 - DNA, 969 bp, Heterodera glycines
tccttttccttttcccttctcacaatgtgcccattgtccttccgcaaaaattcaaaatttcattttttacgaacatgcaaataaaaatgaatgaaagaaataaaagcgcagaaatacgcattacagaccaacaaattacaaattgtttttgtgatttcccacaaaataaagcattaaaagttcgtttgcttctctctttcctctgccttttcattacctggcatttttccacgccattcaaatttggccaatcggcgcctttaccttttcaattgccatgggacaaacaaacgccaccaaatgcccatttcttgtagaaaccattttgtgccaaacgaaataaagataccgttgaattttgttcaaattgtacagaatatgctccccttccccacgttcttcgatcgatcagttgggccatcgcaaatgtgcgactctcccgcccaatgtttgccccccccccattcatttgaccattccctttgacccaattttgtgctgatccgcgaccactctctctcctccccccccccctttcccctgctgctgtgtcctcccttttctttgcgtttgccttatcactgctcttcttctccccccccccccaatttcgcctccttttcctttccatttctctttcccttccattctttaccatctcttttctgtttgttttcccaaatcattcctttccttttcctttccttttccttggcttttcctttccttttccttggtttttcctttccttttccttggtttttcctttccttttccttggcctttcctttccttttccttggcttttcctttccttttccttggcttttcctttccttttccttggcctttcctttccttttccttggtttttcctttccttttccttggcttttcctttccttttccttggcctttcctttccttttcataggcttttctttccttttccttggcttttctttcctt

SEQ ID NO: 30612 - DNA, 932 bp, Heterodera glycines
caggcaatggatggctttcaatctgcaagaaattagattggcaataagtggttgtaaaaaacttttgggtaatgatttattttttgaagggagtcaaacaccctattagtgctttgctgtgccgagaaccggcaggcaatggatggctttcaatctgcaagaaattagattggcaatatgtggttgtaaaaaacttttgggtaatgaattattttttgaagtgagtcaaacaccgtattagtgctttgctgtgccgagaaccggcaggcaatggatagctttaaatctgcaagaaattagattggcaatatgtggttgtaaaaaacttttgggtaatgaattattttttgaagtgagtcaaacaccgtattagtgctttgctgtgccgagaaccggcaggcaatggatagctttaaatctgcaagaaattagattggcaataagtggttgtaaaaaacttttgggtaatgaattattttttgaagtgagtcaaacaccctattagtgctttgctgtgccgagaaccggcaggcaatggatggctttcaatctgcaagaaattagattggcaatatgtggttgtaaaaaacttttgggtatggaattattttttgaagtgagtcaaacaccctattagtgctttgctgtgccgagaccggcaggcaatggatagctttaaatctgcaagaaattatattggcaataagtggttgtaaaaaacttttgggtaatgaattattttttgaagttagtcaaacaccgtattagtgctttgctgtgccgagaaccggcaggcaatggatggctttcaatctgcaagaaattagattggcaatatgtggttgtaaaaaacttttgggtaatgaattattttttgaagtgagtcaaacaccgtattagtgctttgctgtgccgagaaccggcaggcaatg

SEQ ID NO: 30613 - DNA, 999 bp, Heterodera glycines
  unsure (1)..(999): unsure at all n locations
accagggatggcattccgaggcccaaaaaattttcggaaatcggaattccgggggtcaaaattttttcgtaaatcggaattccgaggcccaaaaaattttcggaagtcggaaatcggaattccgggggtcaaaattttttcggaaatcggaattccgaccccaaaaacgtcggaaatcggaagtcggaaatcggaaatttttgaaaaaataaaaaatataaccaaatattctaaatattttaataaggtaaattttatattattattcacaaagattaactcagggttttttggacaaaaatctgttaacaaatcgcattaaaaattacaaactttttcccggtggcgcctatcggcaccgccggacccctctcccctcgcccgttcaccaaaagttttttggaaaaagcgccgcaaaaaatttgttaaaaatctgatttttgatcccgagcgcactgaaatttacgatttaaagaaatttaggaaaattgggtgtgataaatttatttaaaatttggtgaattttattttttatttttaaaaggccatttcatatccctttcaaaaaattgttaactatgatcgtgaaaggaaatgcgtcagtagtgaaaatgcgtcggtgattaaaaacgagatacggtagtatgattgattgacgtggaaagaatgggaacaaatttaaagagttatgttggaatgataatttaaaaaaaagaaatgcaaattccaaaaatattgccaaaaagtctttcgaactaggatttcaaattcatccgaatctgatcggaattaatgccgaatttgtcagtgccgaaaaacggacgcatccaattgacccagcagcaaatgtgaatttgctggttgcggttatttgttgcaaagccaagccatcattttactctctcagcattccattatctcttaagtaccttttatttcccattgattttcaccccacggggaaattatttttatatnttttattcaggcacacaaaat

SEQ ID NO: 30614 - DNA, 2007 bp, Heterodera glycines
cgcgaagcgcccgttcgaggccgcgaagcgtccgaaaagcacaacaaaaattagaaacgggcgcaaagcgccgttcgaggacgcgaagggcgcgaagagcccatcttgagcctcgatgtggactaaaaacccataataattttttaaaaattcaaaaaaaaatctccaacgaattcgatcaatttgaatcgcttcacagtctaggtagcgaagctcccatagcgcgaagcgctttttcccagtctaatcacttttgtacctcttttaatcactgttgcacctcttctaacatttgttgtacctcttctaatcacttttgtacctcttttaatcaccgttgtacctcttttaatcacttttgtacttcttctaatcacatttgtacctttttaatcaccgttgtacctcttctaatgacttttgtacctcttctaatcagatttgtacctcttctaatcactgtcgtacctcttctaatcactgttgcacctcttcaaatcactgtcgtacctcttctaatcactgttgcacctcttctaatcactgttgcacctcttctaatcacttcacagcctaggtagcgaagctcaagaagcgcgaagcgctttatcccagctaaatagccgacggttcacgcacccgctagttatatatatgttatataggttttgagtttcgtttcaaaaactaattccggccggccgaaggccggccggaattagttttttatatatacgttatattgacaaggcaactcatctcaaaaactaatttgagaagaacggctaagcgcgcggggctgaaattttgcaccaaggggtaactcgagacggcgcatctgggaaaactataggttttttggtccgaggcccaactgagtaccagcggcttaaaaaccgactttgccgacagtctcactgttacgaaattttttgcttttgccttcagcgcttattggaccccaaaagcgaaatgccccaactatggcctacaactttgccagcaaaagttttttgatcagaccaaaggcctggtctggaaaaatggcagatcgaggcctactcattttggacacttcagtaccagctgaatgccgcgccagggtttgctcggaacgggtagtcgccagcggactttttgtagagctttcaaagggctatcgaaccatgtttaaaaatttcgaaaattttcaaaaattttcgagctaggcctaaaaaacgattttttggtttttgaattttatgattttttaacgaattttcccagaaaaacggagaccactttcaagcaaccgtttttcgagctctatcgattggtgacatttttagaaaattttcgatttttttccggaaatagaaaaaatttttggcctgagcgggacatttgagtcccgggcccataactcgtcgggggttgattttagcgaaaaattgtcttagaacttttttgtagagcattttaaatgctatcgaatggtatactatatgaagggaaattttcaaaaattttcgagctaggccccctagaaattttcaaattttttttggtgggccaaaatgggggtgaaaaatttttttctggggtattttgaggtgctgagcacgaatatgatatttgttgtttgtttcagattttttggaattttttaaaaattctttattttttgggaaatttttggccctcaggattttgtataatattggaaaattcataactcagtgatggtttcatcgatttaactataataatgctttaaaaatagagaaaattcaggagaattttataggatttatttggaatttctatctctaaaaataaaaaagatattccagaatatctggaaaaattcgaaatttcagaaaaaaattcagaactcggttctgaaaagtcactcgtgaaaagtaaaatactacaaaaatccgcaatgtttttctctataggataaattttatttcaagtttttagaaggttttttaaaaaagatacaaaaataaaagtgattttggg

SEQ ID NO: 30615 - DNA, 874 bp, Heterodera glycines
ttaaaaacgaaaaaaagagaaatttattttaactgtgctttttgcaaaaactggcaaaaaaaaaatgaaaaaaagcaaaaccaaacatttcatttttcaaattcatttttgaacgcaaaaactaaacaaaacgccacacaaattcaaacactggacacatgatacagacactcaactttattatataggatagttttttttagtggcgaagctccaaaatagtgatgaatagtggcactaaaaacgaaaaattttcgaaaaagaatgtgtttttcgtgcatttctcgtcgagttaaagccgcagaaaaaatagttaaaaaactaagaatccgatccctattgatatcatacgaaagcttaacacttttagaagcttttttaagctattgagtcgcgattagacaattgccaaaaaagttatccttttgctgattattcaatcggggattattttctgctgtgtgggaatgtcactggtctgaatgtgttgattaacaacaccacacaacagtctttgttgttctctgctgttggtcaatggttcgccaattggcgaaatcaaacaaaaattcattcgttcgttcatcgaatgcctttactgctgcctttggtgtttagtttttgcaataagaaacgtcgacggcacagattggctaatgaatgagtgaatggcaaattgtttcgtgcccaattcgccgattggagggatttgggtgggaattttgtgcgttctgttggtgcttttctttgcccttctgtccgttttccattccattgcataataatgcctttgcctttccccccccccccccccccccggggccttttcctaatcgttcgtcctttttctgctcatttacataataaattttga

SEQ ID NO: 30616 - DNA, 1717 bp, Heterodera glycines
  unsure (1)..(1717): unsure at all n locations
cgcaaccccagaggagctgcgattcagcgctggactcttcccagttcactcgccgttactacgggaatcctcgttagtttcttttcctccgcttactgatatgcttaagttcagcgggtgttcacgtctgagttcaggtcgaaaaatcaaagcaggaatgccagtaatccaggcactccgccacagcatgcgaagcattggtgcgcccgagttacggtccgtaaaacgcgaattagaaccacaagttcgcgcctgcacaccaaaacctccacagccgagccgagcaagtaacgtaagaacacgtacaagtacatgatcccacgaagcaacgcacaagcagtgcattttatggtaacgaccctgaaccaggcgtgccaatggatgtaactccaatggcgcaatgtgcattcgaatgttttgtgttcaaggtttctgcagttcgcactaattatcgcagttggctgcgttcttcatcgatccacgagccgagtgatccaccgataagactagaattcattcttcaacagaagtgtaaaaaaataatgaaaaaaagaaaaagctggcggtgcccgagctgacactcattgagtcttaagccacgtgctaggccaagcacgggccctaccgcgtcgtctcatcacggccacggacgtagcagcaagcacaaacacaccgctagttacggcacgtaagaccgggaacgaaaccaccatccccagtcagtgtgttatgtgcctgccacaacaaccgctcaacgacgcacagacgccagcacagccgttaggtcgccccacgagcgtgcatcccacattggcgcagcgaaccaaccaagcgaggcggcccgccaccgacacattgccacgcagcagccatacacaggctttcacatgtgcagcactgagcggtataccacagctccaacgtatggaagcaccccaaaagcatggctcgtgaggcagctgccccgtaatgttgggcagcgtccacaagtcatctcgaacgacctgtgcccatcagcggacgggggcatttggtggtgccaacgctagcccaacaggacagcaggtaggtggtgaataggaatcacttgggtaatgatccagcagcaggttcacctacagctaccttgttacgacttttgcccggttcaagccactgcgattaaatcggttccagtctgcataccgaccgaagccggaacactaaccgtccccgaatttctcgaaatggctcagtcccgggcagcgacgggcggtgtgtacaaagggcagggacgtattcagagcgagttgatgactcgcccctacaaggaattcctcgttcacggacaataattgcaatgtccgatcccaatcacggcaaattttcaccggtttaccaacccctttcggggaaggacaagcacgctgattttgccagtgtagcgcgcgtgcagccccggacatctaagggcatcacagacctgttattgctcaatttcgtgcggctgaacaccgaaaatccctctaagaagttgtgcccacagaagcaatgagccaactatttagtaggctagagtctcgctcgttatcggaataaaccagacaaatcgctccacgaactaagaacggccatgcaccaccatccaccgaatcatgaaaaagctatcaatctgtcaatccttacggtgtccgggccgggtgagtttccccngtgttgagtcaaattaagccgcagg

SEQ ID NO: 30617 - DNA, 1502 bp, Heterodera glycines
  unsure (1)..(1502): unsure at all n locations
ttttaccccatagttagtcacacattgttgctcttcatctgatcaatattccctctccgtaaaattcgtaggtgcaatcactgatcagccgcacttatcggtctcacttggangggtgctcgggattggctttttcttttacaaattatgtttgaattaggcaccccattatcttccaatttcacctcaatgataaacgcgtctatcagtgtgttattcggttgtcttttttggtcgagattagtgtacagttcggcctctagaacaacgtgaaaaacaagaagtcacaaccttccgcctcggcatcattttcccttgcgctcccctccgttccacactcatctgtcattcccgtcttaaaaaggcgagaaattcgggcttgttggcagaaatctcttgggaatatgtaaaagtttggtaaaattggaccataaatttggaaaatggaaattgaaggaggaagagaaaaaggttcaaattgggcgatgaagaagcgataaagtgaggggaagagggacgatgacggaacagaaatgatgcgattgaagggaaagggtcaaacggaaagtcaaacactaaacgcttttactgaaattgccaaaattgtgagaggtaattattctaagtgtaattgtacccagcagagggagagggagagacaaatgagcacaaatgggaaaaggcaatcaaatgacgtaattaacgaaaaataaacatacatacataaagttaggaggcagaccatttattagaaacaattaaatccaaattatcttacatccttagaattcgagcttctctaaacgaagcttggcttaaaactcgaagccgcagtccgaaacaaatacttatttttatgagatttgtgccgcctctaattttgaccaactgaatcaaactgacaacaaatagaaaaataaattttcgaattttgcttaaaaacaacggcctgggacttgagttatagcgtaataaaaatttgaaactcccacaagtgttttctgaaatgataaattgactagaattcgcttcgaaaaagattctcttttcaaaaactttttttagaaatcaaatttgttcggtttggatgggaatgaagcaagttatggctgatcatagatcatcaaaataaattgtgcaacaaaaaaggcaatgaccaatgtattttgaattagcacgcaaagttacgctaattatgctatttggcgaaatgattaatagtctaacactgacaccggaacgggccaactccgtctgagccaacttgagtcaatataactcttgaagttattgaccgaatcaaacaatcttgatatcattcgaaagctcttcacaggctctattagcctactaaaaattacagaaaatttcgaactataaaaaaagatagaaataaaaaatttgaaaattctgccttttttgcggttttanactgacaacttttttgagagctgattaatcactgagaaatagcttataaatatcttctanacatctaggga

SEQ ID NO: 30618 - DNA, 715 bp, Heterodera glycines
ctaattgttctggaatttgtttctctgcgagtttgattgtgaaaattttggaaaaacgcctatctctttttctgctcaacactctagacaattccaaccccatttacggaataatagcgccaaccctaatttttccggaatttctttctgggcgagtttgattgtgaaaattttggaaaaacgcctatctctttttctgctcaacactctagacaattccaaccccatttacggaataatagcgccaaccctaatttttccggaatttctttctgggcgagtttgattgtgaaaattttggaaaaacgcctatctctttttctgctcaacactctagacaattccaaccccatttacggaatgatagcgccaaccctaatttttccggaatttctttctgggcgagtttgattgtgaaaattttggaaaaacgcctatctctttttctgctcaacactctagacaattccaaccccatttacggaataatagcgccaaccctaatttttccggaacggaatttctttctgggcgagtttgattgtgaaaattttggaaaaacgcctatctctttttctgctcaacactctagacaattccaaccccatttacggaatgatagcgccaaccctaatttttccggaatttctttctgggcgagattgattgtgaaaattttggaaaaacgcctatctctttttctgctcaacactct

SEQ ID NO: 30619 - DNA, 1350 bp, Heterodera glycines
agcgctcgtccttggtgcggtagcgagaaagtggcacacggatgtttcgtgcgcccacacccggcacaaggagaagcccacggaaggtgtgttttccgagcatgtccacggaagaggtgccgtcggtggatggaggagcacttcgcgcgtcagcacatgtggattcccaactgggaaaggattcaccttctaaaatttacattgttaaaatgcaaaaaaaaaaaaaaaattagaaaccatgacgtaggggtaaaggctgacaatgtcgatgcacagcacttcctcatcgtcagcgcacacatggtggagcttgaagggctctgtgcgccctcccctcaacgcgtcagtgcgggggtccagtgggcatggcgtgaagacggcttcgtaccgttgcttcagctcatggtcacgacgaaggcgctccttccactgacagccccacatcacatggagctcacatccatgttgatgttctagctcatggaggcgccgcattgttcgttcgtacaagtcttcggctgttcgtccggctgccaacttctgttgtcgatcagggaagcactcgggacaacctttttttttttttttttggttactgtgttttttttttttaattttaaattaccgtggtagaagcaacccatccattcgatggccaacggacgaaggggtggctcccgtcgccaaagaccgtccacacggtacccagaatcctcgatgtgcgcctcccccactgaccagtcagcgcactgcacctgggctccatcgttttccaactcaaagaatcggatgtagcgacgagattcagcggaagcacgtcgtccacggaggtagccgccttctggcgaatgcaccaaacggttggcggggagaaagcatcggcggagcgttgcgagcgcgagaccagcggccgtcgaagcgcagaggaaggggtcaaggccttgggtgtgttcaccgatgagttgacgaaatcgaaggacagattcacggagaattgccacatcgttgacgcagtacagaataagctgttcgcgtagttgaaaactggcgtccgcgttgttgtcgccgtgccatcgaagaaatttggttcttttttcgaccttcatcgtgtcgggcgaatagtgttctattgccggaagaccgttgagacgctgcagcagatgttggcgctgtatgtagaggtacggaaagaacggcttcaccgttgccagatgttgaggcagatcaaagctcttaaccaaggcatccaattcacagaagaagtagtttatggagtccttgaatgtaattcgtcgttgatgtcgaccacgaagcttcattgaatatattttgagcccagtcgtacagagt

SEQ ID NO: 30620 - DNA, 1189 bp, Heterodera glycines
tttacctttaaaatttcagaaaatttcatgagattttcaaaaaagttctggacaagaatttctgacttaaggtgatgacaataatttttttttataattaattggttgaatttgagcaaagttatgaatttatatatattacccattttttgttttcaaacccattgacggaatttaagaaacgcgccagcacgataaaatttatcggcatgaaatttaaaatcgatcgatttcagtgctatagagaaaaaagcagtccgaaagaatagttcgataaatttagaaagtcgaaaagatgatgaaaaaatcacaaattgttttgcctttgtcgctgaattttcttagtcccatttaggcaaaatcaaagtgaataatttgcaaaaatttcattgagagggaagccaaatccagttgcaatggtgaccatatggcattcaatcgcacataattggttgatgtaaaatgagggcagataagaagttggataaatctttaaaaattattaaaacctctcaactttttggtgtaaaaagaattaaataggctcacataagaatgcaataaaataaatatttttatagagtttgttcaatagaaggctaaaaattttgtgcagttttttagctaaaagctttttatgcgaaaaactttcataaattacaactaattttagtaaaaacaatagtaatttttgttgggacgatagattttgtacttttctaaaatttaaagttttgaatgcctttttgctcaaaacttttgtgaatttttctaattgagttttaaaaaatccaccaggttggcttaccccttttctaagacttttcatgttggcatacaaacggtgaaacataaaaaggttttccatcattttctgcattcttttgtcattctcttcaaaagattgtacaatttgcttgagaactttttttaaatcacaaattttttttatatttcttggaaaattccattacttcggcacgaactctggccgaaactccggcaaaacattttgccaactttcgaactgcttttgaaaaattgtttcatccaatccatcaaatctttttggctattcgctgctgaggacaacacaattttttcgcaaaattcaaccggcaaaattagcaaattgtctttccatttttaaattaatcactttaaaatttgagtatttttccattaccgt

SEQ ID NO: 30621 - DNA, 1151 bp, Heterodera glycines
ccgcaaaaaaataaaataaaaaaattaggcttagaaattttttaagaaaaaatcatagaatttcttataagaaaatttcaaaaaaaaattagaaaaaattttcaggattttttttgaaatttatgataaattagtaagttttttagaaaaattttccaaaaaatcactaaaaaattttttcaaaaatttttcattggaatttccatataaaaaaattctaagaattttttcttgaaaatttccaaattttttaaaaaaaatttttggcgaaattatgtcccggcgaaatttcggcggcgaaattatgtcccggcgaaatttcggccggcgaaattccgtccggcgaaatttcggcggcgaaattttggggtgcacccgcataaatcatgcaatgacagcgtaataattgcacttaaaattattttttaaaggttagctttaatcttaaaactgcataagtatcctattactattgtaattactaacagccttgtcaaaaagcgccaaatttccagcaaaatcgaaatccgtttccatgtttgggtccaacggatctcccataattaactctgcattgcgatcattaatgtaactgcgatatccattcaaacaatcaacagcaggcattccagttggacctttaacaacaaaaaaaaatgctttaaatacaggaaaaagtagtttgaattcataaaaccaagactccattttcaatttaggagtccaatcgacttttatgagcccaatcttcagtttctttggccataattctaacttggtcaatcaatacctacttttttaatattaaattaaagctatctaagcctatagaatttttgagtataccaaaattctgggctcgaagcaacagaccaaaaataatttttgaatatactcaaaaaaataagttaaatttaagtgtttctcgttgtattttttttcttgttgtcagtgtttgctcttttcttggatttatgaattcccgggacaaataagctttcttttgataccaagaatgtaggtattgattgatcaagtaaggaaaaacaattatgattggactctcataagcaatagagcacaaaaaaatcggcgctactctaaagaagggcggttttgaattttatcaacaacaaaaggggggagggacc

SEQ ID NO: 30622 - DNA, 1621 bp, Heterodera glycines
  unsure (1)..(1621): unsure at all n locations
ctttgcctttttggacctattgaatgtgaaatgatattcaactaaaaccctttttaattgtttcgtagccggagcgtgaagtgtggcgcaatgggaggtgggaaaatggcaaacaaagtgttcaaaataactatattttaataatttaaataaattaatttaatactaagataccgtatttaattgaaaataaaataaaatccaatttattcttttaaacaattaatttaatttttgaaatagtaaaataaaaatgtttaaatttttaaaattattctattcttagttttaagggcaataaataaatttataataatattaaatatttcattttttaataaatgacccaataaatcttgaaattaaatttattgaattatttttcttttttccctttttccagtgaactctcttggcttcaacgactcctccaattgcgtgtgaagttaaaaaaacaaggcttaatctcttttacaaaaccaccatttttaaaggatgaaaaaccgtgaagctgttcgttatctgatcagattggacgagcaatggtccgccgttgcgttgcccgtcactgtgttcatcgactaccaagtgaatgaataatgaatgattgaatgattgaatggttgtggaacgataaaaaaacagttttaaatgcatttggtgaaatgtttgaggacaagggccccgagggcaattaattgatgacggggaaaactgctggccaaaagacaacaacaaccataggtcggcattgttccaaagctccaaatatttttaagctgttactaaaatttttttgtggctggatagagaaagcatcctttgattcttaagaagcgcttcccctttttttgcataaagtgagaccaaatgccgtgaaaaaatgccaaagtattattttctactacattaaaaacttggcattttctctcactttgtaaaaagggaattcttgaggaccaaaggattatatctctctatccatccattaaatttacgtaccgaagaaactccacggcggcccaagacacttttccttttttgagcagagcaatggcaactcgtacaaatggcaactcgtattttacaaataatgcctaacaaataaggtgcgtgagaatgcgtatgtgaaacacgcgcggcacttgggcaacggcactctgttggacggatggttcaccggcactttccccgtctggcggacgcccgacctccggacgcacgaactttgtgtgcgggtgcgtaccgctgcgtgactccggaggcccaaaaaaaactgtggaaaccgcggaattccagcctagcaaagcgacggaacccggcccggttccaccccttcttcggcattttgccgactcccggacaatccgtcagcaaaatttatttttaaacatcagattttatcaaaatcatatgaaaattaatttaaatcgctaaaaaagtgaattaaatgttttgtgttaatttatttaaaaaattatgaaagaaaataatttttaaaagaattanatgattatttctatagatgatcaattanattanattattaaggtaattactaattagttttatttcttaaattaaacatagttttcacaagatttttatcattgctcaaaaa

SEQ ID NO: 30623 - DNA, 950 bp, Heterodera glycines
ttttgaggggatttttaaattattcttatcccagaaaaatggctatcttttttttgagaaattttatccctccaaaagcgcttgcgtatgagacggagggctgtgcacatcgccatttatttcacagaggattttatattaagaggttatcccagaaaaatggctatctctttttttgataaattttatacacatacaaatgctctcgagcatgatagggagggcggtgcgcaatagaccttttatttttgagggaatttttaaatttatactctatcccagaaaaatgtctatctctttttttgagaaattttatacctcacaaaagcgcttgcgtagagacggagggctgtgcacaatcgccattttatttcacagaggatttttatatttagaggttatcccagaaaaatggctatctctttttttgataaattttatacacatacaaatgctctcgagtatgagagggagggcggtgcacaatagtcattttatttctgagggaatttttatatttagaggttatcccagaaaaatggctatctctttttttgataaattttatacacatacaaatgctctcgagcatgatagggagggcggtgcgcaatagaccttttatttttgagggaatttttaaatttatactctatcccagaaaaatggctatctctttttttgagaaattttatacctcacaaaagcgcttgcgtatgagacggagggctgtgcacaatcgccattttatttcacagaggatttttatatttagaggttatcccagaaaaatggctatctctttttttgataaattttatacacatacaaatgctctcgagcatgatagggagggcggtgcgcaatagaccttttatttttgagggaatttttaaatttatactctatcccagaaaaatggctatctctttttttgagaaattttatac

SEQ ID NO: 30624 - DNA, 687 bp, Heterodera glycines
gtcgataaaggaaaatgcgatggcgatcaagaatacttgaatgtacaagaaacaaattattatataattatacaaaataatcattaaataaataaattataaaaatttgtaaatttatttatttattttaacgattatattaataaaatatcaattaatattaagacaagctataaaattcctgttttttatttgacataaattaatcaattgtaagaattaaaaaatatatacataaacaaatcagttttaaattttggtaaattgtttgcctaatttagtacaaaaaataactttaatgaatataaaataatgatacaaaagcctaaataaaaaaaataataagatcaataaaaaataaactataaatattctcatccaacaaagggtctcataatttattaaataaaaagtctcaaaatgcaacacaaatgttacctactgaggtttgtctccatttttaaataaaataaaacaacaaaataactgtcatatattaaataaagtacatttaccaaaaaatgtcatgttttctgaaagcacaatgagtaagagtctcctgcacaagaatagcaatttttaaacaacgaattttacacaaccactttcctttacattgtgatgcataataaaattttttaatacataattaatcaaaatataattaataagagtggaaagggttac

SEQ ID NO: 30625 - DNA, 942 bp, Heterodera glycines
  unsure (1)..(942): unsure at all n locations
aaagtccctctgagacgtttttgagcccactacgacnaagagatgattgctcaaaaagactgtagacaattttgaggagggaaaggcttcaactatttcaaacaatagctcagggggcaggggcattgttagctaaaaaagacacggtggcattctcttacgatagcggcacagaaacacaaaaacgaataaatgactaaaatcaaagccaatccaattactttttagttatttctttctgattaatttctgtgtcgtttaacattttcctaaaatttgttgctgtcccttaaaactttaggaatcagggaatgttcaaccctttctccctcagcccggctgtgattggctccaccctcagcccgccacggacagcaaacaataatgtgaatgattgatggggggaatttgaatatgcttttgtctttctgtgccatccctcccccatcatcgccactgttgggagtgggcaaaagaaattttttttctcaatttcgttggatgattgatagggaaatttgaatatgcctttgcatttcggtgcgcttctcccctgccaggcaccactccgttattgcccactgcgatgggagggcaaaaatggactgaatgaaaatgaaatttcttcgcaagtttagttttgattgacagttcagtgtcataaaaaaaagaaaatttgaaggaccaaacggaattgtcataaaaaattcaaatgcgaaggacgaaagaattgcgattgcaaaaaaaaaaaccaaaaataggaaagactagtaaaattttttgtgcgtttgtgcacaatttatgttgggcaaaaaacgaatgagaacaaaaaaactttgagcgtttgtgcactaattatgttgggcaaaaaatgacgtttgtatatgattgagtcgtgtaagacctaaatgataggcaaaaattttgcgcttatgcccaatt

SEQ ID NO: 30626 - DNA, 799 bp, Heterodera glycines
aagcggttggccgcaccaaaaaaatggatgctggacaagctgggcggcgtttttgcgcctcgtccaatgtgcggtccgcacaaattgcgcgagtcgttgccgctcattctcttcctgcgcaaccgtctcaaatacgcccagtcgtacaacgaggcgcgcatgatttgcaaacaacggctgatcaaggtggacggcaaagtgcgcactgaaatgcgcttcccatgcggaatcatgggtatgtgtgtcaatggaatgaaatttgaaaaattgggatggatcaaattggcaataacgaaaacggatcaacattggtataattgccttgaatagcttgttcatccagtagaaaaatgcgggagtttgattcatacaaatggtttataatacaaagtctaccaagcattttcgaaaaatgagttggggtaaatcacggaagatttagaaaattggccgggatcgaaacctattttgtattgggatttacatttccggtttaacatttacaaaatttccccctctgatttacccattgcaaatgtgccgtttatattcagtaccatacatacatacattatttttcctcatgttcagatgttatctcaattgaaaagaccaacgaaacttttcgtttgttgtacgatgtgaagggacgatttgtcatccaccgaatccaaagtcgtgaaggccagtacaaactgtgcaaggtgaagaagcaggcggtcggtgacaagcaagtgccgtacattgtcacgcacgacgcacgcaccattcgctacccggacccgcacatcaaggtttt

SEQ ID NO: 30627 - DNA, 1033 bp, Heterodera glycines
aatcacaatcagagaagggcgaaaaagtttcaaaatttctaatttttattagcttcgaacttcgggcaaattacccaaagtttcggaaaatacacttccaaagattgaaaacaaagtaatgaagagctatgggcttaagaactaagaatgacacttttttctagttttattatcatgtatttgttttgcaatattattttattagggaatattttgaaaagcttcgtgcttcgagctttgaaaacttctgtgttttgttggcttctatccgagcttcgccttcgggcaaaaattgggcttctccttcggctctgagtgctaagccgagcttcgcccgtctctgatcacaccccttcttaatgcgattaaattaatttcatttttttctgatttgatttcttaattcaggtgatccccgaggccgatcgacaggaatgggccccgagcaacacttaccgcggcattttccaattttgcttttggcgctttggccgttgggtcgacgtaatcatcgacgaccttttgcccaccaaaaacggacaattgctcttcgcccgttcaaaaacgcccaacgaattttggagcgctcttttggagaaagcttttgccaagtgagcgcagagacaaaacggcacttcagaaaataaacggaaaatgaaacgatttctgctaattatccatttcgaaaatttgatctttttcaaaaggcatttcacaaatttgaaataccctcacaattagagagtttttaagcattcctcctgaaagggctgtttgtttttcttacgccttcttaagattgtacggctgttacgagacgcttgtcggtggccaattagcggacgcactcatcgaactgtcgggaggcgtggcggagacactaaacgtgcgaaagtttttgcacatccataagcaacaaatccaacaacaacagcagccgatgttttccgcgtcgttcaatgcctgcggaataccgtacttggcatgggacttttctcagtctgccagatacgtagcggagtcgaatggcgcc

SEQ ID NO: 30628 - DNA, 1078 bp, Heterodera glycines
aataccagcccttctcaggtggacacatagtagccatcaaagccacatcctccacaccaattctcatatcaattcatgtggtaattttttgattttttataatacatacctactaggctcgacattttgaaagcctggacctgggtttttgaaatttgtttaaaaaaattgttaaaaaatccgataattgcttaggagcatctaaaagtatctaattgacaaatattttttaaatctattgcattatctttttgataacttggaacaataatatggtcattcgaaaataataaattcgaaaatattgtctacattttttaccaaacctggacctggatttcatggacaaaaaaatccaggtctggaaccagctcgaaatctacatgttacataaaataattattttaacaatttgctttctgtttcagattgcgggcggcctacacaaaacacacacacgctgatatgggtaattgcttttcccgcccgcgaaaatcgtcggtcgaccgagtgggcgattcggaccattcatccgtcacttctgtcgggccccagcgctacaacaacaatcgccgtcggggtcggcgccgttcatccgccgacagtccctcgtcggagagtcgcgatttgaatgtggggggcggcgaggacgtatttgtcgctggagggggaggacagcacacaccgcagcagaaattgtctggttcacagctcggctattaccgagttgggggacaaggtgggacattgctttaagattggtaatagatgccggaatttggtgggaagagacttggttccagaccaggcaggatcaaaattttgaaatgaatcgggacaattgcatacataaatttccagaaagaaatttttttcttaaattacaaatatttttggaaaatttttttttaattttcgggcggaaagtgaggtttctacaatataatggtagaagatcccggtattttaaaattgatgggacaatgggcctgaaaacgggacacctgttaaatccggaaatcgcgcggaatagtccgaagttatgatcctgtccgggctcttacaattactgctttca

SEQ ID NO: 30629 - DNA, 1310 bp, Heterodera glycines
aggcgctttaaaaataaatgcgctccctaattaacacttattgtttaatattggactttggagaatgtactcattgtaattttcttcgactgaatttgtctttctttacccatcacttttcacttttggcacgtttcactgtcgagacttttgacagccgaaaagggaaacggacaaacgcattccatccatttgatcacaaaaacaaaattatttaatttgtgcctttctataaactcaaaaaatgaagttgagagtaagcaaatgcatttttataaattttgtagcattttccaaggcaattagcaacaatttaaagaatgtcattgcatgaacgacgttcctttgacaagtgcgtttttgatttttgaaatgaagaaataaaaaagtgggagccgaaggggggaagggaaaattaaaaatgggaaaatatgggaaagtcgtttttgcgccagcccgagttttttgattagaacatttttcattgtcgatcaattctgacaattttggtatcattcgaaagctcttctcaagctttattagccttttaaaaatcacaaaattttctagaagatagaaaagttattaggaaaaaacttaaaacatcgactttttgtaatttttgttggatttggttgacaatgaaaaaaaaacaataaagggagttcaaatgttccaaagtttgttcagaaattcgccgttgcgaagttcgctgcgaaagcattgcgcagcgaacggaaacggaggaaacggcggagggaatcgacagaaatcgccggcggggcgcaaaactgtcagtttttgctcacaaaacgcggagaataaaaaagtggtgtccaatggtaagcgacacaattaattaataaaggtccgtaaaaatatttttgagattaaattttcaaaaatgggcaaataaatgatgttgagggtactgcagtgaaaaattttggaaattttaatgaaatttattaagaaaatctattacaatttccaaaaaattgcccattttccttaaaagatccggtattaataggaatgagtgacgagaaagagcaaattcaatttattaattatccctttagtggccgattgcattgcgttgatgcaggcgggcacagaattggtgagtgatgggagggaaaggagaggacgagggagagatagagaaagaggggaaataatggggagagagatgagatgagagaggaagaaagagagagagataagagaagagaaataatgggaggagagagagagagaggaaaataatggggagagagtgagagaaagataagataagagaaataatg

SEQ ID NO: 30630 - DNA, 810 bp, Heterodera glycines
aacctatcggtttaacccagaacctattggatgggtccgggagtgaacctaaacctattgaagagtttttattgattaataaaaaataaattaaattaaaataaaataaattataaattaaaataaataaattaaaaaaatttttttataatttaaaaaataattgaataaaaaagctaacattcattctctctctatctcttctgtctctctcactatctttcttttctttctctctatcactctctctcttatctctctctctctctcactctctttcttttttctttctctctctctctttttctttctctctctcactctctctcttatctctctctctctcactctctctcttttttctttctctctcttatatctctcttttctctctctctctcttttctttctctctctctctcattctctcttatctcactctctctctcgctctctttcttttttctttctctctcttatatctctcttttctctctctctcttttctttctctctcactctctcttatctctctctcactctctcttttttttctttctctctcttatctctctctctctctcactctctctttttttctttctctctctctctcattctctcgtctctctcactctctcgcttttctcttgctctctaataccacacaaaaatataaataataataataacaaattaattcaaaacataaattttacttaaaatctaattgttaaaataataattagttaaaaattattaaatacatctcaaataaacaaataaaaatttaaaaataaatgaaaaaaa

SEQ ID NO: 30631 - DNA, 1502 bp, Heterodera glycines
ggcggtggtttcggtgttgttggtgatgattcgatctgagaagttaatttagaaatagatgttgtagatacggtagttggtacagtggacttctttgcgacatttggctcctttggtttagctgccagaggtggtggtattttagggatattctgcgccttggtcgatgaagcaggagtcggaatagttgatttagatgctggagtgggtgttggagttggcttcggcacagccgctgttttggacggagaaggcttcggggccgatggagcttgcttaatgggtggaatgggagcgggaggcggggttgttttggcagcagtaatagtagatgtcacacttggcttttggggaggtactgtagcagattttggagctgcctgttttggtgcctttggcgcttcagttggaggatgtgaaggaggagcaagtgttggagccggcggtatcggttgcttagcggcagaaggaggggttgtttctttgactttgtcatcctctttctttgtctcatcgaatctggggggagactgaggctgctgctgctgtgattgttgctcatctgtctcatcatatctcgggggagagggcagtgaagagagatcatcaattgttgatctcttgaggcgcttggcgtgtggaggcgagccgagcactaccggtttatcgaagtacccttcttcatgcgcaagcggcttaagtctaactttttcttgactcttcaatgttgcttgtaaaaaatccctgagttgctcaacttttttgtgcgacgcctgtgggacaggtactctgatgacacgctgtcggtcctcatcaacggaatggagattggtgaaatgaatgtcaatccattggtcatccaatgtaccaattgtagagtgccatgagtagggatagctgatgctatgcagcccacaaacccacgacccactaaaatgtagaggttttggaagacgtaccctatatttgttcggttgattgtcggggtaatctgatacattactcggcaaaaacacaaagaaggctaatcgttccccccccccccccccctgtttcccaaaatttttggaagaagcgcgccgcaaaaagcgttttaaaaaacaaaaaaaaaagtcgtcacttggttttaattgcaaaaatttaatttttttgtgaaaatctgttaataaatcaaaactaaattacaacattttccggcggcgcctattgcccattcaccaaaagttttttggaaaaactcgccgcaaaaaaattgttaaaatctcatttttttgatcccgaatgcactgaaatatacgctttgcttatttcctccccaaaattgttaaaatcaataatgggaggtgaaaatataatatttaatatatttttaatcgaataaattgtaaaaataactgatttgaagcaattttgcgaaatgttcttatttttaaccctaaaatctatttttttggacttgatgttctgattttgaaaaattttcgatggaagccctggtttaa

SEQ ID NO: 30632 - DNA, 1692 bp, Heterodera glycines
tgctgatctttcccctacttagggaaagattcggcaacaaatgcataagttttatctgcattcttaatgggatgtgtgagcgatcaatttctgcactcaatgacctttgtgcgaaattggacatgtttgattcgcagcggcatcactgtggcaaacaaggaagatgcaccttaatttttcacatttcaatgtttttgataaatatttgattaatgtggtttattggttgttttccccaaatattttgccgcatgtacacatcattgcttcatttttgttttcagatgccttcaaaacaagaagttaaaagaaagaaggaacaagagcggtaccaacggcagatggagaaatctgtcagccctggtcgctcacccgtcccagacgggggtgcagatgagaatggggtggcatcgccccggggcttcaacaccccaaatttaagtgctttgcaattaagcaccccggcttcttcaattggaagtaaaagaaggggaagacccccgaaagccggagcggagtcaatcacgccttcgcaaaataatgtgtcttcagttgacacacaatttacatcggccactcaaaatgttgagtcgccgcctagcaaaatatggaaggtcgacgaagttgaccgacccatgtctgctattgaagcaattgcttcaacgcctatttccacgcaaagaagccgtggagggcggccggccaaaaaaagaggcggtccaggcaggagcaaagcaaatgattccatgagcgagcgctcgttaatggaccatagctctgaagctaccacatcagtggcccttttgccaactgtgcctgaaaagataaacttcagcacagtgcaaattaatttcgctacatcgcgaaattttgcctgtaaaatttggaaatgggcagcaatcggcctttacgaacgtgatggcgaaacaccgattgccccaagatctggcccaagatacattgagacctgttggaatgatatgacccagtttctcaatgacggctttgctgccacatacttggcatacttggcaaccatatcacaacgaaaagtggtcgttgttgacccaatggtatggagcaatggcctggacagagtcatgccttacaaaaatatgacatttgggtacgaccctaatgttccggcagaagttatacttttgccagtacatttccctggacattggactctcattgtccatgatgtgcaatttggcactcattttgccgattctttgcctaccacatatggcaggttggatccgcaactgacggataaaattaaaaatatcatttcggatattttgccgtcaacagtgttgaccggtattgttaatgccataaatctgacggtccaacacgatggaaatagctgcgggtactttgtgtgcctgtatgccgaatcctggcttatgaacaatcgcacatttgttctgcctgatttatccatcaattatgaaaaaaagcgcattttatggcacattaacgagctgtatggctctgataatgtgccatatcatccaagggaaggggtgccaactccttgcccaattgtctatcggcatacggatgaagcgcagtcgacatccaaggccgctgagctaatggaagttgatgaacatgatgatataatgatcatcgaaccacagacaagtggacagggcagtgatgccattctcacccaagcccaag

SEQ ID NO: 30633 - DNA, 1024 bp, Heterodera glycines
ccggcctttaatgggcttttgctggcccattcttctcttcagctgggagcttggcattcaagtcggcacggcatgtcctccccttaactaaatgtttaaaattatgttaaatgcattcacgtaaagttaaaatggaccattaatagatttattaaaaatttaactattagcaatgcctaatttagtagtagataagattaaaaaaaagatttattatgaattattctacatgttcttaatttctttcccataccatggcatgcatgccgttgcaggtcacttggtggcagttttgtgaatggataatccgcttaatatgtgtgcttataaaaggttttatttgacggctttatctcccaaaaactaaaaaaagcctttaacaagaccgtccgctgcggcgtacacttaaataaggcgcatacgtttgcagcgctgatatttgcggcgtcaagcggcgcccagtcaaagtgatatttgtggcgccaacgcttgcggcacccctcccaattgttgcgcagaactaaatggcacttagatttaacagctttttctccaaaaataaccaaatattttatgtaaaaatggtacaattcgcttttctaaaattacatgaaatattcacaaaaaaaaatgtgttgtaacaattttcactgttcgtctcagtttttcgatatttttcaaaattttgtgaatgaggggagggggagggggggaccgttggtgccgatatgcgccgccggaaaaaattcagaagatttggctaaatttattaacagatttgccactaataatattttaggtgctatgacgccactcaaaaacaatcaaaataaaaaaaattttgctatacttttttaatacttttcgataactctaatgtaagtgttttctattatccttcaatatttcaaaaagtttcgttaagtttaaagaaagttatgaccaaaaatgttcaggaaaacttgcatttttgagtttcttcggccataacttttttttgaaagttaatgaaatttttttgaaa

SEQ ID NO: 30634 - DNA, 1190 bp, Heterodera glycines
gggaattactttacgccgaaaatgctcactgtctgcgaattcctaagaagataattaaagataaattagataagttttaaatacaagactgggataggccttcttgcacaattcctttaagtccgcgtcatcgaaaaaataaaaagaattgttttggcgaatcattattcatgtaatacattcttcggcctcttccaatgcgttttttttgatcaccataaaattgtcaatttgcttttgatcctaaaataaatttttaaaaatatttgtgattaattaaacctttaccacgtccttttggctcagattttccttgtttttgagttgagaaaattcatgtttatgcttaaactccaaatgcttccacattccttttgtcgacccatcggttcgtgccgttctttttccacatagcttacaaattgctccatcggtcaaatttttgttgaaaaacttccaaatctcagacattttctgttattgataaactaaataagaaaaatttgtcgttttcctaaataatagtaaaagacaaaattagcacaaaaaataagctaggtaaagcttaaatgcgaaatgtaaaagtaaaaaatgtatgaaacataaagaaaacttggcgaaatgttcatcagttcaaatatttaaatcttttttccctttgactccaattttcttcactaatttttcactcagaccccattcttaccagtacttgtttttcccggttcccggttgccctaccgggaccgggacctgagcttttcaaaacccgggaccgggaaccgggaccgggacctcggatgaccgggaattcccggcccggtcccggtcccgtggcactctaccaaaaacttctttagttatttaaactaccaatttgtcgaagaacacaatgtggccaaaatgcacttttaatctattaaaaaaagtgattcgcttaaataatcattaaacaaattattgccaaattaagggagcgattggagcggatgtgtttgcggtggtggttgtagggcaaaatctggatctggtatagttttaagaaaaaaaaggttctagtcggttttatggtcccatgtcatattatgcgtcccatgaatgaccatacacagtttcttaggccataacttttttcttacttggtcaataaggaattcttggtattaaacaaaagcttaaggtctatagaa

SEQ ID NO: 30635 - DNA, 1366 bp, Heterodera glycines
  unsure (1)..(1366): unsure at all n locations
aattttacgattttgcacctagaaatttttttttgatttccggctatattttgaaaagaaaaaaaatttaatttaaaagaaatgatcaatttattatttctaaaaaatgtttcattttcttccaattttccaaaaatattttcctctcaaccccctaaaatttagtgtttcgtgccaaaatccgaaactatatatttaaaaaatagaacagtaaattattcttttttatccatttatttgttttttggagcggggggcagtaaatgttttcgggttcaattctctattctaaagacgaatttaatttctcggtttatttttgaggccatggcctcagctttcggtcaagtctcggaaaatttcaacattcaagccgcatgatgcttttcaactttccgtattttaaagagaaaaatcacaaatcaaatcatatgatgaaaattataggataatgagaatagccttttgtagttttgacgctagattcttggttttcccgccgtctgcactcctgcacgaaacaacaaaataaattttgcggttttttagccaaatttcgcctattttacgagatctggatgcattcacaaggcacatttggggtaattaggcaatagctgaccgaatcagaaactctttgaatggcgcctgaaatctgtctgctaaaaacgaattttatccgggaaacaggggaaaaggcaaaatagtctaattggcatgccattcccattgatttttacaggttcagaaaaattggtatttaatttacccttactttgcctattccaaatcaaatttttcagttaaattccttatatagcggctttttattaaaaaaatttcatcattgtttatttttttgatggaaaaaaatttttaaattttaatttcactctctaatcatcccttcttaattgtttgaccaatatgttctaatttccagaattccattaatattcttaattttaatatcgaaaattggtaatttttgtacaaacatacgccaaaaattttccgttttcgtttttattttatctccaaaataaaaatttcaaaaaacaaacaaatatttttcgtttaaaactattaaatcattaatttcttgttatattcaacattttatgggagtctgagcacaagagatcgaacttccttctgtggcagctatcaaaaatacattccattttatttatagaaaccaaaatatttgtaaaaataaataattgacgagcgaacggtgccgaaaaacgccgccgagtcaaaatttgaatttcaaagtgatttgttaacaaattttggaccagaaacaaaattctagtcatttttgagtgaaaacccanaaaaaaaaaaacaccaaaatcctaat

SEQ ID NO: 30636 - DNA, 1376 bp, Heterodera glycines
  unsure (1)..(1376): unsure at all n locations
ttgagcatataaaccttacttttttttgaagacttttcttcctttttatttttctatgctttttttcaacataaaatttaaataaagtgcaaaaaaaaattttttaataattngaaaaaataatttgttttactttttgttntaaaaaaatcatggctcaaacgagaactgatcaaaatttctcctgatcagtgctcacccaccattgctcccccgcgccaacttacatgatcaattttttaactttgcttctcattcctcccatatctttgctactcttaattctgagttttcgcttttccttcagctttatccctttgtttgttgttttgtgtccattttgtgaaacatgtcttaattcagttttttcaatttaaaaatataattttaattgctgtttttcttgaaattgagccccctcaccaggggctttaaagacataatttaattgccgtttttcttgaaattgagcccccgccccaggggctttatatttcaacccctttcaaaaagtgggcttttcaggctaattcagcagggggggggggaggggggaaggtttttcaataaatgcaataacttacattttatgttgacctcccccttttccatgtcgattattttttcggttgtttctaaatcaaattataagtttttaattttaattttctttttaacaatttgttttctcactttttctgctgatgtgctgcttctggtgcttctgctactgattgatgctgatttactaaatttgaaatttaaaaaaattcaaaaaaatatattccgccatttttgccattacctccaagtgaattggtgccaatgtcaaatttgttgttaatcggatggttgttcatcgccatttgttgcatgatgcttggattttgcacaaattgtgacgacggtattccattggcggtcgaaagagcgtttgacattccgtcggaaactaaaaattgaaaatttaaattaaataggatctatactagagcccggaaatttcaaatttgcggatcctgttgcaggattagaattcaaaaatttttgcaggaccggcccggccggattaatcctgcaaatcctgcatttaaaatttgcaggatcccgcgcaggattgcggatttttggaaattttgaaaaaattttaattaaatttcaaaaaatttccaaataagaaaaaatacctgatattttgaaaaagaaatttttaggggctggcgggatgcaataaaagggcgtctaagatttttcgaatgggtcagagggtaaaaagagatcgggaatcaaatctgttaatggtccataaatttgactattttttgcttttcaaaaatgcttttttttcggcgaaattttttcataaactaggaaca

SEQ ID NO: 30637 - DNA, 983 bp, Heterodera glycines
aattgtcgtgctcgcggatcagtgtttgatgccggcaaaagcacctcaaacaaacaaattaattaattaaataaattaaatataattttaaaaataatatttaaaattaaataattcaatataaaaaataaattattatttttttgataagagtatagaagtttctttgcaattaacacattttagatgattattaagaaaaagaaaagaaacattctaaaaaatcattactaataaataaatatttactttttaaatttaaaataattaaattttactgtttattttctgaaaatatttaattttgttttggacataaaaaataaaattaggaattcttttttttaataataataatgtttcgaattttataaatttttattaaatttactggataaaaaaacgaaatttctttttaattaaatttaaaaataagaaaataaataaaatttgtttattaaatcgctttaataaaagtaaatttttatatagaaatgatagaaaatgtgtgattgtgtgatgatgacctgctcgaagatgacgagtaagtcatggtccaaaatttgttgcagacactcctcaaaaatggacaaaacgcgtgccaatccgcacgcgcggaaagcggcttccaaataggcgaaaaagcacagcgtttcactcttcaacgcctccacattgccttttaattggttaattaattaattaataattaaataaataaattttaattttatttattattagtgctaaaaattttttgtaagaaaaatcgctgaatttgtaaataaaaatacaattaaattttatggcaaaaatctaattggaaataaaaaattttaaattatgattttttggaaaaaaaatcttaaaaaagcgtcaatgagcataaaatgccatgacaaagaacctatttattcttaaaataatgttttagcttctaaaaaattgtttaatccggaaatatataaaattttcataaaatc

SEQ ID NO: 30638 - DNA, 1391 bp, Heterodera glycines
aaaaatgccaaatatggatggaaattggacataaatcgcgaaatatggaaaaatatggatatagaaatccgtcatagaagcctcaaaccaagctaaaaacatgtttttcgtgcgttcaggccctcgaggccgattcgtttttattatcccgattcgttttttttgtttaaaaacttcattttcaatgaaaatttttatgtattacacgctaccgcttaataaaacaagactcagcgctaatgaattgcagtctaaatgattctgacccaattttcatgtattttaataacaatgtaaaatttaagcatcttcaaatataaaagttaaataaaaatataaaaattcatatgaattaattcatgatatccacttctccatcctctgaattaacatcatgcgagttttcatcttgcacttcattcaaacccatttcttcaaagtattgatcaacaagcagcccattttcatccaaactttgttcaagcaaaagctttgcatcttcttcaattatcatttcttcagcttcattacggtttgacggcggattgaagccaaccaaatgtccaattcttccataataattagacatggcttcaacaaattcatcattgccgtaatccgtgttcaaagaagccaaaatgtccgccttcgctgaggcaattcctctgtccaattcaagagttaattcaagcgggcgagctggcaattgtcttccttcatcaacggccactgcggtttcttcttcagcatgacttagttcctatcatttacgatacaaaagttagagacaaacaagtacctgaaaactcgctatccaccggccgagcaagaaaccaggctggtaaaagcgttgctgtcgtccgtggtaagactcagcatggttgatggttcgatgccgaacaacgtcaaaaagtgcaaaaaagtgcagccctattctgttgttgatccatgtgttgttctgtatatttggtgttgtctaagtagttttacatttatttacgcagtaatcgagaagttcactcaatgcgccctgttgtaaagtttccaatggagagtgtgtgatgagatggcgcatgagttgaagcgaacgggctaaatagttgggaggacagaattgtagagccccaattttgcgaacaaggcgctgaaactgaagtccatttggttcttttgagctgtacatttgcataaatcccattgattgaggtcggcgatttatcgcttgcttcacatgaaacgcgcacatttttggtctgacagttggaaaacatcgcaaaatgcattccctgacgcagattcgtagtcaaaatttgcttgggaaacctgggagcaaatcaagcagtttattaaacgggaattaacattaaaaggccgggaattttgtccaattc

SEQ ID NO: 30639 - DNA, 1240 bp, Heterodera glycines
gcacaaaaacttctggaattagaaattggcgtccaaatcttcatagggaaaacaaaaactgaatctaattcagaattcggccacagtgcaatggcacaataaaacggagacattggaattggaagcggaggaggggggagagggggaggacagcgacgaggaaatgtgaggagaaaatgggcaaaaaatacaaaagcattgctttcacttaagcatcgcccagcacagcgcacttgtgcccctgcgcaagtccaagtcggcttttgccgactttctccgtccgtcccaaattggcaattccaaacaatcggccgccttcgcctgcccaataatcattaagaaattgggccccgaaaaagaggacgaacagcaacaaaaggagcatagcgaagggatcgaagaactgatcgatttggcccgtggcgatgtcctccgttttcgaatgtcccatcacttgaaaagctgcgcctcgccaagtcgaagctgctgctcctcctccgcttcttcgctgtctttggacggacgcacaatcagtcgatggtcggcacccgcggcaaactcagagaaagagacggagacggacgatgaaatgtgcgagtgggaggaaggagaagcggaagcggaggaagaaggtgcggatgaaaaggaaataatattgaaaaagggaaattcaggacgaaaaagatcgagttttgggatgtacggaaaaaggagcggtggaagttggtcagcaccaagcggactaagcaaagggagaggaggaaatggaggacaaaaaagggaaaggaggaagagagaggcggagagggaagaaggaaatgagagaaaggagaaaaaggaaaaacggagggaaaaagagaaatggaagaatgagaagaaaaaggaagaggaggaagaagcacagagaaacaggaaaagggaggaagaagagaaatggaaggaagaggagaacagagaagtgactgaggaaaagcataaagaaccaagggaagaggaagaggagaaagaagaagatgaacagggacaatccgacggagaagcggaagagaacgcaagcgaatgggacaaaattggaggacaacaccaaaacatgaagcatttggaaatcgatgcgaatggatggcatttgcatggaaaagcggacggagcggaggaaatgatgtcgacatcgacggatgaagaagaatataacgacgacgaagagaatgaaaaaaggattggtaagaagaaaggatgatca

SEQ ID NO: 30640 - DNA, 1301 bp, Heterodera glycines
ccccgctgaatttttcgtcccttttccctgcagccatctgttcttcctcaacagttccttgttctgtcggatgagtcgttcgatgctctctctgagtgtgtccacttcttcgcaatacgtccccacgtccctttgcaattctttgattcgttccttttggctttgtgtcatttttcgcagttccaccaacgcttggatttgctcgtccgccgcgctttggtggcagcccattgggtcggagcaatcgccgcaaattgcacttggcgaggtcgagatttgctcatgcattcttttgttttccgccttcaacttttgtacctaaaaaagttataaaaataatgggaaactcttttaaaacgctttttactcatggcaacaccgaactgaaatcacacccattttgattaaaggaacataaaatctcaaaaattgtcattttttgatgaatctgttaataaaatagggcaagaattttcagaatttccaaggcggcacctctggacccaaaacattgctttaaagataggctaaaaattttgtaaatttttagacaaattctatttaatttgatggcgctgaatttgggtaatattttagatttgaggggggtgaaaaaccaaaaagcgataggaagaatttatttttctgaaaatgtaaatttaattttggatttcttttatttgttcaggctttctctatataaaaaagcgaaacttacaattttgcacaattcgtcaatttcttgcttgtaattctcctccaaatccatgaaatccttaaacaaaattggaaaatgttttcccattttctccccactttctccaaattgtctttgtcccgaagtcgttgctgcttttcctgttcaaaccgttcaatggtcttctgcaggtccaccaattcggaactttccttgtcattgtatttggccagagcttccaaagtttcaagcgcagaaattacctatggaaaagagaatttttacaaaataaaaagaccaaattaatttcgaacctttctcacgaccgaatcaaacggttcgtttccaaactgttccaccagtttttcaaagtcgcggtttatcgactcggccaagtcgtacacatcgatcacagtgatttgcttggatggactgctcgcgtagtaaacggggctttccattgcttattatttatttttggaatatttttgttatggccaggaaaatagtcgatcaaattgttgccttatttcatttgaatctaaaatttccaatagcttggtatccaatttgtgatgactaattgccagtcaatgatagatga

SEQ ID NO: 30641 - DNA, 1269 bp, Heterodera glycines
cccagtgtttggaatgccagagatttgagtcccagagattgaaattctggtgagttgagtcccagcgattggaaagcctgagaattgagtctcagagattgaaatgctggtggattgagtcccagagattggaatgtcattgaaagttggtgggttgagtcccattgtttggaatgccggagattttagtcccagagattggaatgccggagaattgagtcccagtattggaatgctggtggcctgattttcagtgattggaatgtcattgaaagttgttgggctgagtcccaatgtttagaatgccgcagatttgagtcccagtgtttggaatgccggagatttgagtcccagtgtttggaatgccagagatttgagttccagtgattggaaagcctgagaattgagtcccagagattgaaatgctggtgggttgagtcccagtgtctggaatgccggagatttgagtcaccgagattgaaatgctggtgggttgagtcccagagattgaaatgctggtgggttgagtcccagagattggaatgccaatgaaagttggtgggttgagtcccattgtttggaatgccggagatttgagtcccagagattgaaatgctggtgtgttgagtcccagagattgaaatgctggtgggttgtctcagagattgaaatgctggtgggttgagtcccagagattgcaatgccatttaaagttggtgggttgagtcccagtgtctggaatgccggagatttgagtcccagacattgaaatgctggtgggttgagtcccagcgattggaaagcctaagaattgagtctcagagattgaaatgctggtgggttgagtcccagagattggaatgccattgaaagttggtgggttgagtcccagtgtctggaatgccggagatttgagtcccagacattgaaatgctggtgggttgagtcccagcgattggaaagcctaagaattgagtctcagagattgaaatgctggtgggttgagtcccagagattggaatgccattgaaagttggtgggttgagtcccagtgtctggaatgccggagatttgagtcccagagattgaaatgctggtgtgttgagtcccagagattgaaatgctggtgggttgagtcccagagattggaatgccattgaaagttggtgggttaagtcccagtgtttggaatgtcagagatttgagtcccagagattgaaatgctggtgagttgagtcccagagattggaaagcctgatgattgagtct

SEQ ID NO: 30642 - DNA, 757 bp, Heterodera glycines
agaaaatgtaacctttgccattggtgcgttttgaaacagtcccaaacgacttgaatcttcgcactttccttttttgctgttgattctggacccccaactgtttttcgagacgcaccacgccgattcgatggccgcagattcttcaaaggaggttaaaaaaaaaaaaccctggcattttctctcgcatccaacaaaagccggactagaagcaacacggtccagtacttcctttctacaagaacttcctctttctcttcttcttcagaatccccactgcaattcacttcacggtcgtacccacgcagaagtatgtttccaatttcttcgcgcaaagaagacggaattgatgaaaacaggtttttgtggcgtcgagcaaaagagtcgccaaaacaacgtagcccacgaaaaaaatgtaaggagacatttgttattttcattttacctagaaaatattatacaacaacttttactgaaaacaatataaattataagtaaacaatttttataagcaatgtgtatttattaaataaaagattaaagagaattgaataaaagtaaaaatttaaagctttcctaaagctataacaatataaatatgaaaaagataaatttcggaatgaagctataaacattatgccaaacgagcggtaaatcaaatatatttaaaaaataaaatttaaaattttacttgataaaggaaacttaaaacattacgccaaacgagcgttaaattaaatatattattttatatataatt

SEQ ID NO: 30643 - DNA, 917 bp, Heterodera glycines
atttcgcgccaaaaagcgaaatgcgaaaagcaaaatgcgaaacgccaaaaaatgcgaataatgcgaaaggcgaaatgcgaaacctcggcccatccctgttatgtacgacatattatatgattaataattacgaagttggcgaccgaaaagacggcgcacaaactcaaacaaatacgttccttggaagcccgggcttgttggtaagtatactcaggaatacccaaaacagcaattttcacttaaacaattaagctaatccctggcacacctatatgcacccaataaataaaattacggtagttcggctgtttgcatttctcgctgaacagcggacaactaaaaacttgactgttttttttttacattcattttccaagcagtttgtacaatggagtttgtacaaaaaagtagagtgccacgggaccgggaccgggccgggaattcccggtcatccgaggtcccggtcccggttcccggtcccgggttttgaaaagctcaggtcccggtcccggtcccggtagggcaaccgggaaccgggaaaaacaagcactggtaagaatgggggggtctgagtgaaaaattagtgaagaaaattggagtcaaagggaaaaataaaaaatttcggctgtttgcatttctcgctgaacagcggacaactaaaaacttgactgtttttttgtttttacattcattttccaagcagtttgtacaatggagtttgtacaaaaaagtcatgaaaacatgtttccaagagtttcggggtcaccagtgatcacgaatccggcttctattttgattagttccgaaccccgggcgtgattttgaaacaaaagtcgaaaattcaattttttctgaattttggttcaaactcttaaatacacggaaacaaaataaagtcattaatagggtgaggattt

SEQ ID NO: 30644 - DNA, 1152 bp, Heterodera glycines
  unsure (1)..(1152): unsure at all n locations
aaaaaatattacgcaagaaattatttttacatcctttttagaaatgctgcataaatttttatngtaaatagtcacaaacaaactttttttcactcncaatatctaccagttatcatacaaaaaaggcaatagttaagcactgagatataaaaaaatcgtctagaataattatctaaacaatttgtcgggaaagctgtataaattctgggaaaaaacttttcaagaaaagctgaaaaattttcaatcgcatcagaagcagcctcaaattcttcaacaacataatgtaaaaaatattacgcaagaaattatttttagatcctttttagaaatgctgcataaatttttattgtaaatagtcacaaaaaaacttttttttactcccaatatctaccagttatcatacaaaaaggcaatagttaagctttgagatataaaaaaatcgtctagaataattatctcaacaatttgtcgggaaagttgaataaatttcagttgcaataggcatattggcataatacataaatgtagagcaggctcaaaatagaggaaataccaaagattaaaaaattcgtgtttatggcccactctgctttggctggacataactcgccagagagtggagatagaccctttgttgatacatttgaaaatgtagagctcggctagcgcattcgaataacacaaaatttgttttcatttgcccccaaacaatccgcttatgacgggccgaaagaaaattcacaaaaatttggcaccggaaaaactccatttttttatgggccagcataataaagtaaacccaaaatgtaagtgaatttaaattggtcatgtgagatgtttagttttttatttgacccatccgttttctgggaaaaaacttttcgagccccccccctctggcgatgttctttctaaattgtttgttcaattcacttgtccaaacatgagatgttatcagcccaatttggaactcattatgcattcccaaaccatcacttttagcggattagccaaaccaaagtcccaaacgacgccctttctttctttctttctttctttctttctttcgcttctttatttgcaaattccgtccgtctctctacggcttattcacccccaagacattttcattgccaganttattatagtcct

SEQ ID NO: 30645 - DNA, 1826 bp, Heterodera glycines
tttttaattaataaatattcttttgattgtttactcagttattcattagacaaaaaatacacaaaaaaatataataacttaatttaatttaaattaaaaaatttaaataattgaaaaaacactcacagaatgaaaatttgaacattttaagaaaataccttatatattttgttttggttagttcaattttaacgcttctttaatacatacatagttttaccattcttttgagtttatttaaggattattttatataaaatcctaaatcaagttaaaatattattttttaataacgaaatgaaaaaagataaaaataaatataagtatttcaaaaattttgaatttcaaatacaaaaattgattacccaatgaatttagaaaatattaaaaatcacaaaaatttaaaatgttattaaaaaatctgtataatataaaaatcattcaaatcaattttcctggacctgatggcccttgctgaactcctggataaatttgacgtggtcgttgtagcggatcggcaacatttggcacggcatggagcactggcgttggcggttcctaacacaacaaattttgatatttatatataaaattatcaaattttattttgtttatatgctagggtattagaatttcttaaaaatggctggtcctaagtcacacaaaagcctcgatccaagaatttatgccaaaaatttaatgccataaatttgttggtatccttacaaatgtttcatgctgattattattattgttgttgccattgccattgccattgaattgtccattaaaattgttgttattgttctgctgttgttgttgtggttgcaagttgtattggccaaaatattgttgcggctgttggggctgaatcggtgtgccaaactgtgccgcatttggcgatgggactggcgttatgccgccattgcctccaccgtcgctgccaccgttgatgggtggcgcaaatgtgaacccattttgtgcttgttggggttgaaattgttgagcctgtagaataatgaaaaaaattattacttaaaagtggacggaacggggcccttcgggattttaacgggataatccggctcgattttatgtgggaaaaaacagggatcggtagccatggtaaaaccgtaccaggtattttcgacagggattggattcgacagtagttgatttcgacagtacttttaaattaatttctacatatatgcattattgtacatatgtatgaattaatattaatatacaacttgaataataaattccgaattaaataaaataataaataagacttgtatgattcttttgtcaaaagatttttcgattttaattcatctatacaaatattcctgctggactgtagtcaaaaaaacacaacaaatttcttagataaggttctcgaattgtgtgcgaaaatctgctaaaaatgccgcgtttgagtgccaagatgtaaatctgcatgctcctttatcagaattcgaaaatcgcaaaccattctggcaatgtataggaaccattgcttatcattttaaatttcaacatttcgatacttataccatatagaagaagttttttttaaaaaaagctttactgtcgaaatcaacactgtcgaaaactaatagcaccggtaaaacaatgtttttatccccgacatcctaaaaaaaattaagactttacccaacaattaaatatagcgtaaaatttgtcaatttctgaaggagtgacacaagcgacggtacacaaattgttggagtttttaaatagatttatacataaaaatcaggtgttttttttaatttacacactttaattggaatatgcgt

SEQ ID NO: 30646 - DNA, 1992 bp, Heterodera glycines
atgaatggtaagcaaaatatatatcaaacgatttctcacggcatgcaaaataataatacgaaaggatttttggacaaaaacggaattgaaaaacttatgagtcccctcaaaaaactccgaaaatgacttagataaaaaaaaactaggtacgctaaaagcaaaaagcctataaaatcacgaaaacaagttggataaaaactaaacctgtttgtaaaccggttaagcccgaagaaaattttcaaaactaccaacaatacaataatttaaattttagttcggcgcataaactttttccggtactgtttattttgctgcccattcatacgtttttacctattggacagttcatttcagtcccaaaggtatttcgttttttcagtccagagtgtttaattttcggggatagtttgccgcaaaaatctttcggattaaccgagtggagtcaattgatattaaatataaatagatattttcagctctaggctatatgatcgtcacctatttctataaatttgaaaaattcttaatttattcacctcccctgaaatagtttagcggaatgtcttatgccaacaaattaattaattaatttttttgtacaaatattgtttacaaatcaacattacaaataataaatcagaacaagatcaaatttttatcaatcacatctagtctaatttttgaaaaacatcaatttcttccatcctttctaatcaattttttccatcacttccttataccacttccaaatgccatacaaaaaatatagtgagtaaatgcatccaagatagcaagcaagcattactattttcggactttcggtcttcgtgccaattgcaaacagcgctaaaatcagtcctaatttgacgagttttgatggaattccacgtctgtgtcggcgctgtgccaaaacaggggcatttgtattaattaaataatcagaaagcgccaaactttctttggcattttcatgcttgatggaattttcactgttcaccaaactcaggctggtgagcagaagttggaagaaatcacttggcaacggtaaatgggttttcaatgctttcaattgtttgatgggcatttgatccggcatttctttggctaattccatcatttcggtgccaaaattatcaaggggtgccgctttttgtggaaaatttgttgaatttgttagttgctgaattttctgctctaacatggccaattgtgccaaaatttttgggccaagtgtctctgtcattcgaatcagttgggcatttgtcacttccttttgtttacaaatttgcaaaacaatttggccaaactttttcatttcctcagagtattcatcaattttgtcattttgtaaatatttgtccaaactttgaattgtttcgcattctttttccaccgcccaattggccaactcgctgaaaagtgatcgattttggttaatacagaacagatgatttatttaatcttggtgttcttttagaggatgaaagtgttattttttgtgaaaaagtggatttacaataaatttcaatgcttctaacattgaaattaactttggcatacttttttttcttgttgggaaatttaccctggactagttttaaatttatagagtaccaattgttaaaatatttactgccaaaatttttacccataaaaaatattttttaataatatgatcaagtttcttataattagcccatttaatttttgagatgataattattattgtcaagctctccttgtggtcaaacactaatttaagtaaattatcattttaaaatggttatatttttatacttgtaaaaaatatttttatatttctgacttaattttataagaaacataaattttaaaaaagtagaaatcagttggcatgcgaatgacttgaacctctaatctataaacattaatgaaggcactaccgatagaccagtgatcacagtgcctgtgggagaataattggtttatttatttatctcactaaatagtgga

SEQ ID NO: 30647 - DNA, 1299 bp, Heterodera glycines
  unsure (1)..(1299): unsure at all n locations
ttacatatantttttgaattttatatccaaattaaaaaagaaaaaggaatttgatggcaaagattgaaaagtttttccgaatttgctttttattttgttccaatttcaaaatgggccgaagaaggcgaagaagcctttgctaattacgtcaattgtctatttggaaaagaactttttgggaacaaaattggatgagagataatctttaaccattggggggaatttaaacaaaaaaattacaaaaatatttaaataaaaagaaataaaagaccaaagaaaagcataaattttctataatattctgcagaaaatatgcgaactgagcgctaatacaaattggcactgaaattgatactgcggcggggattggccaagtccaatccaatttagggccataatcctttcactgggcaagagattaatgagaaaccaaagaatggcatcagaattaatcatttaggcgcaaaaatggccaaaattggtcgaaccgtggagaaaggatgacggaagaagcgaagaagatgaaggaggaaatgtgttgacgaaatgggagtaactgaggaagagagggacaaagcaaaggggggggggtagagagagagagagagaggggaaaagaggaggggagagtatagcatatttaataatattttttgccagcttatatactaggaaaaagagtataagtcatgtatgatgcgttggcaaacaggatgtttgccatttggcagacaggaagttgccaatttgtctatttacatttgttaattttttgacgattgatttttctctgttttggtttttttgatgacttttcatttgaatgaataaaatgctatttgagatggtagaaatttaaaaaaacgtgtgtttaaaaacaattatttatttatttttatgatttttattgaaaaatagccgatcgtaaaaaaaattggccctggcgcaccccccccctgcgccgatcgtacatcgtatggggtcggccctggcgcaccccttgtacatgtatgaaatgaattaattgctcaaagggggaggggacaaaagaaaacatataccaattagcaaaaaggttttgtttgtttgtttttttgctgttgtgatgccaaaaatgagttggttgacagtgtgtaataagaaaagcctagacggaggaggggggggggggggggggaaagaaggcaattggtagaagaagccgggggcaccaaaaatgggggggggggggggagcaaagcgaaaaatggtgccgtaccccccttttgccccgggggaaatgctttggctttctctccc

SEQ ID NO: 30648 - DNA, 1700 bp, Heterodera glycines
tgggacgtggagagagaaacagagaggggggagaccgttgaaagaaacaaggcgaaaataggagagagaggagagagccacagaaagagagagaggcggtaagagagaaagaggagcaaataaagggagaaagagagatagagaacgagagggaaagaaagagggcaaaagagagagagggacggtgagagagagaaaggagtcgagagaatgaagggaaaagaaaaagaaagcgttatgcgcaaaaaccaaaagttaatgggccaaaggcaacacagcgatcgcgctccctattttaatgagttttcctaatttgagaattttatatcaatttgtcataaattataggaacccccccccgcggggtggtcgacggaaaggagaagagagagaaggacaaatgcatcaattagtgttaattaaactaaaaaaagatgtccgaccagaagagacccagtgacaaagaactaagtggcggcgcgcggtgcacacacaaagatagtcccccaccagatgtttaaccgttaaatggtttagcgactaattagttgatgacattagccattgggaaatttcgatgccacccaaaaatcggcattttgaaaaaattttattggccttaggcaatcaattctaaatattattatgctttgtgtcggtgtttgttggcacccgccaattttggcacactcccaaaacgaaagcatcattaacggcgcaagggaagaaaaagcgcattaatgatgcgcaaccccgtactaattgggctataaatttataattaggcaccaaagtgttcattttgctaacaaatggccgtgtcggcgtcgaaaataaatgttttgtgctgctcttcggcggcgggtcaccacccatatttttgtcgttgcttttgatgttttgttgttgaatgttttgtggtgcttcgtctgctgttggcgaatggaaatgaatcattcgcataatttcgtatgttttttccggaaaatcaattcgaaaatcaaaaaataaaatctgttttattgtatgtgtaaattgatggagaaaagaaaagtggaaaatttgaaaagccataattaaaggaaaatgaaatttttaataaaatttatttggcaaaataaatggcataatgttcgtaaattgttttgacacttaaaacatctaagagatgataaggactgccaaatatttgaacaatttcaaagttttgtccctattaaaggcaaagatacctaatttttaaataaagcaattttcaattccaaatctcataaatttgaaaaaaagacttggaagccctttgaatgttgggcggatttgatacagtacgcaatgtgtatggtaatgtacaatttaaaaaataacatttaataatcgagaaaagcaatgaataaaaaatgaaaaaatacccttatttgttaaggaaaaataacaatttttttggggggggagagattgaccaatcggtggaagggtgatcaatgacaataacactactgtctgatcacagaatgataggcatgaacggaaatgaataaatcacgaatcattcggatgaaaggcgacggttcgccaacgccgccgcgcaaatgcccccgggcgttgtcagccgaatggtgagaatgaagaacagtgttggcaccgggagaagcccacctgtgcaaaaaataatggggaatttctaaaatgaatagttccca

SEQ ID NO: 30649 - DNA, 1096 bp, Heterodera glycines
ccgcggcggattgagttcgcgcatcaatcacatataacacagcgaacaacagaaggcaaagttgacgtagaagaagcattttaaggctgtattttccgataaaattatttttgataatacgaaaacacagaaaaagcctcagtgatacagtatttcagcgaaaagtactgtagcattatgtaatgtcgacaaaaggccaaaattgtataagtgacctcacgctcagaactttcaagaaaattttgagaaattaccgaaaaattttgattccctgacattttttctactgacacattacattttccgattacgggaagtaagtagatttttagattattaaatccagttttaaaaaaaaaaaagatgaaaaatgtgttatacaatatttaggtaagtgagcaaaactaaaaaccaccaaaaaacttgtttttcgtgcgtttcaggtcacagggagctcaagaaaaaaataggtaataacataaaaattggagccctatttattactattatcattattattttatttaatatacagaaataataaaaaattaaaatgattaagtttttcttatcactcactcaatttttgtcccgcttttatgtgctctttccctattatttgttccgtgtgccaaacattctgtcctttgtatttatttgtagggaattcatagtttttgtttttctgttttatttttctcgttttatgatatgaagctgtgcattagtgataactgataaacaatttattacaatctgaaataaaaaataaattataaaataaaaagaaaaagaaagaaataataattattaaataaataaaattataaaataaaagaaagaaagacttttaataaagtaattaataatcagaaaaattagcgattgctaattgatcgtttaaaaacggaggagagctagtttatcgactttttttttggagtggtcgcagagcgaaaaaaccaatcaaaccggaaaaccggtgaaaccggacttttcgaaaaatcaccagttccggtttccgggccggcccggtaaaaacctgtaccgggcccggcccggtccggtctctactattttctaggtttttattttt

SEQ ID NO: 30650 - DNA, 975 bp, Heterodera glycines
  unsure (1)..(975): unsure at all n locations
tgttaatanagcgagattaaaccaataaaaggaaggctttattaggtaattaattaatcattgtgttatcagataattgttttccatttcttgtcttggcctgtgaaactctttgttgaacttttttctgtgtcatttttgcatcttaaatattttatatgttatctgattttatattttctgcacaattccacacttttttcatacattttgagagaagttacaacttttggaaatgaaacaaatcggacccttaaaaagctcatttaccacaaaaatccataaatacctaattgatttcggtgagtcacaccaaaaaattccattcaatttattaaggggtccggccatgtaaatcaaggcctttttttgctttttgaaaccgcttttttgcggcgcgcattttcaacaaaaaaaaaaagatttagctgcggtgtcgatagacgctgccgcgattttttaatttttaatgcaatttgttagtaaattttgtccaaaaatgacctgtttttgcgaatttgagccaattttttttatagaaataaggtttttaggggccggcagtataaataggcgccgcagctgaaaaaattgagtacaccctttctatttggtttattattaagcaggaattggcatgcttttggatccattttgagaatgtgtttaacacgactaaacaccacacacacctcgtggtcattgaactgtgccgcccattggtgcccatttttattgtgcccgatgttccgggctgttcctcttggtcttcttctgctgctgctgttatttgtcttggctcaaaacgaatctctccacctctgcttgtcggtggtctctgctggagaatttaaatttaaatgtgttaaaaattttcatagcctatggccgtgagattattttgcccgaatttaacnaattttnaatgaattcatgttctacaaattactnnttattttatgagtccaattaatt

SEQ ID NO: 30651 - DNA, 2027 bp, Heterodera glycines
  unsure (1)..(2027): unsure at all n locations
gaaacaatgcagcatcagccagtggacccccagcaggccagagaaaagagagcaccagcccaacttcatcgcttcctgagtcgcgtgccttgaatgcatgnagagcggaaattggcggagggcaacagcgggctgccgattttgtggtccacatcgaactgtcgctttttgtcagcgaccctttgaggacactcgtgtggacaaacgtgttgtggcggacaacccactgcaggcgtttgtggattggctcatcttccaactaccagccaaatacgacacatacgcctactcacactttggcggacggttcgacatggttctggtctttcgcgagctattccggatcgggttcaacccggaaatgctgagacgggtactcaattaagatttttttttctaaaaaatattttaaaaatgtcagggcaacaaaatgtatgagatgaaggtacgcaagcagaagaggcgcaacccgaacatcgtcttccgtgactcattcaatttgatgccgtgtgcgctggcggcactcatcccctcctacggtctggacgtcgaggacaagcccttcttcccccatttggccaaccgacccgagaactacggccgtgagattcacccgacgcccgaagactacttggctagtggaatgatgcccagcaaaagacagaaatttgacgagtgttacgccgcgcatcgccatgagccctttaaattggatgaggcgttagcgaggtactgcaaaaatattttgctgtaacaataattttgttctcgattttcagttattgcaccaacgatgtggaaatattgatggcagctctggtcgcctttcgccgggaattcttcgaaattacacggcgccaagactacgttgatggtattgataacaaggagaaccacgacgggattgatgtgctgcgtgagtgcatgaccatcgcgggggcatgcatgcggcacttccgcaccaaccacctgcccgacgagcacttggccattgtgcccgagcgcggctatgacaacgcgcagaaccaaagcctgctcgccttacgcttcttccactggtacgccaaggagcatggagtgcaagtgcagacagcccacgcggctggaggagagaaacgcattgggccctactccttggatgggtggattgaggcggaacgacgcgcaattgaagtcaatggtaattgagttaattatttttcatcattattataaaatgggcaattttaaggctgcacgtggcacgggtgcaaaaggtgttaccccaacgacaacatgctgctccccaatgggaagactgcgggacaagtgcgcgaacgggatgccaagcggatggaatttctgagagagatgtcaaccgaatggacgtctactgggaatgcgaaatccatcgatgctggagaggagcaaagaaatgcgcaaggcatttgacgactacgtcgatgatggcccgctggtgatccgcgacgcgtttatgggagggcgaactggaccactgaagctgctgcgcaaggctggaccgggagagaaaatctcctattatgacttcacatcgctctacccgtacataaagtgagcacagttaaagttgtaacaaattaacattgtttccttcacagcttcacaacccgttaccctatcggacagccaaacgtgcatgtgttgaaccaggaagtggattggcgcagtgcagcggacaacccctaccctttggcactgctcaaagtgtgggttgtgccgccccgacgcgtcgacgtccccgttctgccagtgaaagttggagagcggctttgcttccccctgtgcatcacttgcgccaaagagcacccgacaggaggagtggacaacgactaccactgcgagcacaatgacagacagcgggggtgggtgagcacgtgcacctccattgagctcaacgaggcgttggacgagggttacctcgtcacaaaggtcttccgcgtgttggagtatgagcaaagtgacgacaagatatgcgcccgtacatcgctgaatttatgcccagaaga

SEQ ID NO: 30652 - DNA, 1322 bp, Heterodera glycines
  unsure (1)..(1322): unsure at all n locations
tttccgaattcgtttggctttttccgtgcgtcgggtgccgcgactgtgaatttcacttgaccttccgttggcccatcgacgcgtacttttcgaatttgtccctctgtcagatcgaacgtttttcgcaaataatcgcgcagcgaacttagcgaaagtgcgcaattatttccccatatttttccgttttcccaattttacttttccatcgtccgaaaatggccttttgcgttgatcacaaagccaacctttgcattgtttgtttctttttcatttttactttttaagctttcacttcgattctttccgtcgcttttcccttccgccgattttccatcgtttcgcatttcttttcgcattcgcttttcaatttaaaattattcgcatttcctccacagccggcaaacagaaaggccttagggaaaatgaacaaaatcagtgccattgttttggttcgctttaattgtttaaaatttcgcacttcgcatttgtctttctgcgaatcgtaaaaatatcgaagctccgaacggttttctccgcacttttccacggcatttccctgatggacgggcaaaagacagaaaatggctaaaagaaaagcgcaaaaacattttctcatctccccccccccccctccattatcattattgcctttttctctctcattttcgtcgatttgctgttctccgatcgcattttccactgctccgttgccatcatttcccccccgtgggcagcaaatgccctcgggcgtcgtttcggccgatggagaatattccgtcgggcggatgcattgaaatgcggcggggcattgggggagagaaattggccgattgtcggaattcaattggcatttttggggcaccaaaagtgccgaatttaacaaaggctttaaaacattgccgcagggagacggttcgccttttgagagccgcaatgaatggtgagcaaaacagagacaaaaagctcattttaggccaaccctcacaaacaaaagcacaatgaggccgcaaaacttacaaattggcacaggaagacaagaagtgccaaattgggcgacagaatcgggcggaaactgttcgatttccagacaatctctcgcccgaagcagacaaatttgaccaatcggacattgaattccgtcacaggggttgcgacaacggcactcggaagagagagggcatccgtccaagtcgaattcgacgccgaaggggcaaacagtggtggaacatttgcggaaagggcacacttttggggctaaagcaaaatcgaaatggaacgacacaccccaaaaccatacgcactctcncnaaaagctttctcct

SEQ ID NO: 30653 - DNA, 1207 bp, Heterodera glycines
ggggagcaaaaatcccacccccagaattaaagtaccgggtttataggggaaggtatttccggaaaggattcggtcttccccataaaatttggggcgcattcgggttcgaggggattcccccgaaaacaaaaaaatcgatttttttcaagggtccgtttgggggtactcaaacaattatggggagcaaaaaatccaacgcagaattaaagtacaggctatagggaagctattcccgaaggattcggtctccccataaatctgggcgcatcggttcggggagactgccccgaaaacaaaaaaatcgattttttcaagtgtccgtttggggtactcaaacaattatggggagcaaaagtccaacgcagaattaaagtacagactatagggaagctattccggaaggattcggtctccccataaatctgggcgcatcggttcggggggactgccccgaaaacaaaaaaatcgattttttcaagtgtccgtttggggtactcaaacaattatggggagcaaaaatccaacgcagaattaaagtacaggctatagggaagctattcccgaaggattcggtctccccataaatctgggcgcatcggttcggggggactgccccgaaaacaaaaaaatcgattttttcaagtgtccgtttggggtactcaaacaattatggggagcaaaaatccaacgcagaattaaagtacaggctatagggaagctattcccgaaggattcggtctccccataaatctgggcgcatcggttcggggggactgccccgaaaacaaaaataaatcgattttttcaagtgtccgtttggggtactcaaacaattatggggagcaaaaatccaacgcagaattaaagtacaggctatagggaagctattccggaaggattcggtctccccataaatctgggcgcatcggttcaaggggactgccccgaaaacccaaaaaaaaattttttggataaaaattatttaaaggaactcaaacaattatggggagcaaaaatccaacgcagaattaaagtacagactatagggaagctattccggaaggattcggtctccccataaatctgggcgcatcggttcggggggactgccccgaaaacaaaaaaatcgatttttttcaagtgtccgtttggggtactccaacaattatgggggagcaaaaattccaacgcaaaattaaaagaacag

SEQ ID NO: 30654 - DNA, 1481 bp, Heterodera glycines
agaagagggggacattgtgtagtagagaaacgagaaataagaaaagagtaatcgaaaagctgagaaggtgggagagagcgaaatgagagtcgaaaatagaacagaaggaagaaagatgttatagacactaggtgaaataaagtatgggtatgctaaaaaataaaattaagtcgttctcattctcgatgtgaaacagagaaacgataataatggagagagttggtgggcatgagactgcagagaggagaagcccctggggggaaagggaggagaaaaggtctttgtccgttgttggtctcgcgttgttgtgatgttggtgagtggcacggacggaggatggattgggaatgaatgagtgaggtgatgtgggagagaaagagagaaagggacagcacagagacagagaatagggacaatgagagacagcgagagaaaatgaggagatgaagcttagatttctcgtaggcttttccccttcaaaatttaggaggggacggggggcggaggtttccctcctccctcttcctatctttgatcattttagtcattaaaatgccatacgatttgaataatttggcactcgacgatcgtgcatattaatatgaataatttttcgttccaaaattcaatggcattttgaatttaccacaaatgtcaaattcgccatggccaaattttgcggacaggccataatgaattgaaacctttcgagaaatttgattttaaacagattgccattttttgcctaattctcttccgattttacaaaaaacgagttgtactgtgtcgtccgtccattttgcaataattttcatttttttttcaattttttgtaattttcgcattccttcgcctttctttccccccgggggctgtgctgtcttttgaaggtcaaacatccacgtttttcttcgtccattcattgaacactcactactcactgttcctcttctctcccccgttcattctcttcctcttttttcaaatttgtctttgcccgcgcgcgcaaatttgcgcctttcgacaaaatgccaaacaaattgtgccaaaaacggagcggcgtgggtctaaatccctgcacacagagataaaattagcatttttaaagtataatccaacttaaataaattcaaaaaaaaaactttcttgtacaatgcccgaaaattgcttaaaaattgacttttcaatgcaacaaattattattgttttttgttacttcaaaaaagaattgaaatttattttcaaccattttaaaactatttttgttcaattttccttgaagaaaaaaagtttttatatttaaagttgttaaacaattttggtttctattttcatctttttttgccattttatcactatttgattacataatttggagtaataactaaaaatccgcggcttttttgtcacaataaagtttcaattttcaaaatcgccctttttgaatattttcttctccccaatttttcacatcataaaaa

SEQ ID NO: 30655 - DNA, 1763 bp, Heterodera glycines
ttcgcttttgccatcgaaatgcgcgtccaccagcgcacttccccgtggcgaaatcagtgccattttgaggccgagttcgctatggtcaaaatgagggaaaatgtccatccaaacatcgttgcatacccagctaaaaatgtgaaaaagacagttaaactgtctaattaccagagggctctgaggtttagaaaaatgaatattgggcctagaggtgccattcttttcctgcggatactcattaatgccattaaaatgccaaattggctcacattttcctcaaagttcgcttcattttctttcgtcccccaaatgatggcatagaggggcagggcgatttctgctgttttcctcttttttcaatttgggatgccattgaaaattcaattaaattcgcttaaaaaatttaaaatagaaaatttaaaatcggaaaccggaccagtgatgccatggaatttggttcactgtttaaattcacgatttgaaaatatcttttggcgccatgaaaacattttgccaaattaggtagtggagagagagatttagatgaattctgccgatgacaaaaaatgaataaaagtgtatcttgaaaaattgggccctcctaacccattgaaacatttttattcgtttattattaatttattaaataacgcaaaatggaaaaaaatgcatttgccacattttttccattacttctttgaaatttgcccctatttggcactcgaaatcgcatctgtatgttgccagttagagcacatcttttgtatcagtcacagattaaacataaatgcataagccatttggtggtcattaaaaagacataaaagtttcgtcggatgcaagagcagaggggcagaaaactttttcacagattttgagacgatttttctataaaaaaattacccaacttcgcctagggcaaaagaaatggacaattaattggtcagtcaaatcggcaaaaattgatgaacaaagggaagggcacaaaacgttgacatttgctacctgcaaaaaataaattaaaaaatgtttatattttaaaataaaatttcagaatctcttcaaagtttatgtaatacattgttgtaatgtaattttattattctttcttaatgaagtgattattaaaattttatgttaaagttttattgctgctaatttttgccggttttcggttctgtttcgattcggttaaaccaccgtccactaccgtagttgctagtgaagtagtagacaattttatttcctttaatttcctattttttgatttaggataaggcaaattgtgctaattgcctcaaaaatgaacaaaatgtaaagcaattataattttaataattccgaattcatttaatttatttaacaaaaaatagtttccacatttttagttggatttgcaacgacgtttggatggacattctcccatcttttgaccatgctcaactcggcctcaaaatggcactgatttctccacgttttgatgcgttggtggacaaacatttcgatggcaaaagcgaattgacaatttggagaccaatcacaatttgcaaagatgctgttgcagcagtgccgaacttagctgtgcttatcgaccaaggcattcagacaatttcgtgccatttccgttgccaaccattcgctgcccaaaaaattcgctttaacaaccttggattggagaatacaaacacaataaaaagcaattcttttgtcacttccttttcgggaacttggccctttctgtgaacgctttttcttcgggccaa

SEQ ID NO: 30656 - DNA, 1077 bp, Heterodera glycines
ttgctgccttttctcatttctgcccattttctcccaacaaaattaatttacattaaatttaatttcaaaaaaaccattaaatgccccacaagaaaatgggaaaagggcaaataaaaccattttcttggctcatcagacaatttcatttatgcttttcctcgacgtaataaaagtgtcatttggatgagagggaagcgtcgacggctttaaaaacattaaattcctataaaattgaaattctaaattttatatttcaattttcgattttttgggctcttgagacgctataataatatatttaaatttgatttcccaaatatttaaaaaaccaattatatgaaagaattcaaaaaaataaaaataaacttaaatttaaattattttatatggcaaaatttttctaaaaattactccatcaaataaaataaattaatttaaattaaaattaatttttgcatttaatatggaaaattttgctttaaaattaacccaatgttttttcatatatatatttttttttaattttgcttaaaaattaatccaatattttttcatatattatatatttattcccaaaacccatgacaacaatttgtttttttttaaattttaaattgcaattaattaaattatttttccaaaaatgtttcagagtgcttccgccacctccgccgccaactcatcagtgttctcgcgacacacagcaaacaaatccccatttggatccacacccgccggatgctcctgtcgagccggtgatcgcatttggcgtctgtgttcgatctgttggcgtgttcaaagcaagtttttcaaaaatcgggacaatagctaaattttgaaatttttgctttaaagacatagaaatatttttgaaataaataatatttttgaaatattatcgtttttcctaaaatagaaagccctgaggcttttatttttaaatccccctcaaaaagagattttatttcagggggatggctctaattagggggagggctctatttttcaacccccttcaaaggggaggctttagttcaggggggggggggggggttctaattttgggggggggggggg

SEQ ID NO: 30657 - DNA, 1442 bp, Heterodera glycines
  unsure (1)..(1442): unsure at all n locations
catttcacgttatttaataattgaaaaaaatttcaaaaaggtattattttagactttagattttgaatttttatcaaaaaccaaaggggggacccttttgttttgcaaaatttttttttgataaaaaatcgtgaatatactttttattcgccataattgtactgttaatgtttaatgttcatattatgagtaaataaaacaaattttttttcaaaaaggaaaaaaatttcaaaaacgtccttcttgtaactagcgccaaatttttgctatctatcgatgtatgaatttctccttgaaaagttgtgacaattatttttcgggattttgacgggggatttacgacatccattagcaatattagcaccggcaacattaaagtgtcgatttgctgctgttcctctctcttttctcctccttcttccgtcgaatttttccttttcctctctttctcctccgtctctcctccttcccaaatgctattttcctcctcttcctttgtttctccatttccattaaaatttgtacgaaataaaaaataatttttcaaaaaacgttcgaattcgggttaggggttcgaaactgcgcaaaaagatcaaattcgtactcagtcagcgtctcaaattacccttaaaattgctttatttttggggtttccctcttttttgtgggaccaaatgatcttggcgattgccaaagccatttaaggtataactcgtcgaacaatcaataaactcagcaatttgcacactaatcattttataaaaatttttacagaaattatcggtctacgtcagttcggccccgcacggttcggccccagccatgtttttggactataacttttttttttctttgtcaaccaaatctaacaatttttatatcattcgaaagcccttcagatcagggctggagcgcgaccgcgatgcgcgatccacggcgttttttttgcgcgatccgcggtcgcggcaatttgaatgcgcggtgcgcggccgcggttttttctgtgcgcgctccagccctggtgtaaacgtagttttatatattatttgttttaatcttttaatttagccccaaaaatggaaaacaatcaaattataacgaaacaaaacaacaaaaaactcgaacatgaaggatgcctctatgtcttccatatgttcaatgccgaccgtgacgtaaaattttggcgctgtgaacatcagcgtgatgaattcaagtgcaggggacgccttcacacagcgctcaatgatgtcgttctgaagacaattggcgaccacaattgcaaccacagtgtggcaaatgtcatcacacaaaaaatcgtcactggcataaagcggcgtgccgctgagacgatggaaccaccagcggcaaccagggcgcacacacttcagcnaattgcacgccagtaatggcgacattccacaaagatgccacaaaaagtgaaa

SEQ ID NO: 30658 - DNA, 1935 bp, Heterodera glycines
tcaaatccatatgaatgacgacaacaagattagcaacctccctaaacacatattttgtttgtagggtcgtaaattatatggattaacatattttttctgctcaaatgataggttctttcaaaattttttaggcgctaaaaataaaagccgagaaaataggcactaataactcgaaaagtagcttaacaacatccccaaaaaaacatgtttttcgaggccacggggagttcaggaaaaaataggcttttgcctaaaaatattagccctaattattagtacaaaatttgaaatgtatttggtttgcaattgtgaagctagaatttgataagatttggcatttaaaatccatttttagctgttttagtgtattttttaagtctgctttagtaaagattgaatttataaatacacatccactttttggaacttttgagagtttaaaacttataatttgtagtttttagtccatatttggcccatttttgagctttttagtccatatttcgggcttttttaatccatggcatttttggtccatataatttacacgcctattttatgcttcgaaagctatggtgatagcgcaaaatcacttttgcttgattgccgtacgcccgtagaagctggcggacgcgtacggctgcgactgatttgccgactggcccatatggcgtttccaagccgacgcaacacgctgggatagagaacgctgttgccgttcccacgccgacaatcgcctgcagggggaaatattttattgaggaaaaattaagggggcctaaaccttcaaaattttaaaaagaatttctcataataaattttattattttttaacaactcagaaatccaaatttttcagcaaaaagtaaattttttttaagttttttaagcgaaaacactaaaaaatttgtaattttttaaagtgcaatttgttaacggttttttgggtcattgtccaatgagccgtcctttttgttgaccaagaccgcttcacttggctgctcgtcatcctcttcatgctgaacaaaaaacaaaataaatggaaaaaatgaaaaagaaaaacaacagtaattttagattttaattatttattaccatgtcctttttgtatgtttcgaacaattcgcccatcagctctcttgcgacaatgggtccagaatgaccttcgatgaaccgaaaaagcaggatctgtaaaaaagaggcggagtgtggtgtcgatcgcaggattggaatttttaattttggcttttttgaaaaagacaatttcggagttttctttacctctctcctcttacgaccgacgaatttttttctcacaaatcaggattagtccatcgtagaaagtttggaattttgttaagaactaaggaaaattttttgtatacatttcacatattttcatatttacgatcgacattttcgctgacttttttcctttcactcccccccccccaccaacttcttacgatcgactaattgtaagagacccccatgcacagttatgtatttaagtgatccaatttttaaaattctcaagtgggataattgaaatgcatatgcactctgccttcataacaaacacaattcaccccgtctttgcgccgcgcgtgcttggcaaagtggttgatcagccggcgaacgcgtgtcttttttgagtatacaatttctctgtattttttctgtctgagcatattgcgcacagtattctcttgagtccagcaggggaatagcaacaggacgaaaaggtaataaacaaagttaaatgttgtcagaagtgcgactaggccaaagctccacctatgcgagatatatggtagaaaaatttcaaattttttgtatgcaattttgcgtaactttgggtttaaagcgggaattagatgaatcctttatgggcaattttacttatttataaatccaatatgtcagcttcatatc

SEQ ID NO: 30659 - DNA, 1248 bp, Heterodera glycines
taaatttggaaaaaaattaataaaaaatttcgaaaaatttcattcgacacatttaaaaatgcatatattactcgccccactcattaaaaatattcccaaaaaagtaaaagcctaaaaatctcagccaatgtcactaagagaaacataatacagacagatttacccaattattcatcgctcaatatcaatctcgaccatgttgttttgttcttttagcacgaagtcgctcatcgcgtctttaaaccacatttcccaatcagttgaactgtcaattgaccaacgaatcaacatccactcctgcttgcctttcaaaatcagttgcaaatgttctctcgtaaaaggatttgtgtccacaaattgtgtcaattcgttcggttcaatgagcgcttgtgttaatccgattatgtactcgcaaggcgatggcgatctggcacttgcaaaagcctaaagatttcttcttatatacggcatgtgaaagtttcaaaaaaatctcttaaattattaatgttcggaatccctcgggaacttcacgggattgcggtcccgaatagaagttttcagaaagagtcaaagtctgaaaacttttttcactatggctctaatttctaaagaatttacgaattaaataccgttcgaaattccaccatgctgactaaatcttcggtatggcattttaaaatttttggcgttgaaacacccgttgacggcatgtgaagccactcgtacaacgcattttcggcggaatgtgtggcatcgcccggccacggaacctcaggaaaaagattatgcgcttcaatgattcgaagatttggacaggagactaagactgtgccggatatatgttgtctgatgaaatcaatccctttttcatcggtgcacattccgtatattttgtccttgaaaatcgatgaccaaactccactgaatagaccagcaatattttgtgagacattctcaaaattgataagcattccattttgaaaaaggccatcaatttggtgaaggaatgctacaattttttcatccaggcacctgcaagaaatggcatttaatggaagcttaagcttatggtttcacattaaggtaattcttctaaagccggagatgtccccgctgattggcggaatattttcaaagtcaaagtcagtgcttttccggggtccgacattcacaacaacgggctgacttgcatttccataacgacgaattttgattgggtttgccccaattcccaggcccatgatgaat

SEQ ID NO: 30660 - DNA, 1583 bp, Heterodera glycines
gtataaaaatgccatttttctcctcctcttcctcattccattctctcattcattctccctatattttccggtcaatttgttgctgcaaatgtcttcagaaattttgtacgtttattgttcccttttttctgatttttcgcatttattttgcttaaattttggccagaatttgtgagattttattaattcattaatttccccaaatggttttcagttggtctgccgtgtttcttcagctgttggtcgattgtgccatcattctttggatcttttttggctatgtcaaaaaacgacgacgccctcacaaaaaagaaatgtaaaaaatataaacaaaaattagaaaaataataaaaatttgcaatttttcagctttatctgcggcgcctgttggcttttggtgttcgattttcttgcgccttctcagctcggccttggaattgcactgattagccatcgctttgacttctacgtggatgaacacttcaagacacgcaaaggaaattgtacaacaaattgattatccaatgggacatcgaagaaatgggacgaagaaaatgcaaattgtcaaatccgatgaaaatccattgccaatcccgcaaaatccgttgcccaacaaagtcatcggattcagacgcattcaaattttgtagaaattgattaacttggaatttttcgtctaaattttttgattttcagttacatcgatcaaaatgtcatcgcatttctccaccattttcaccgttttttcgccttttcttcaatatacttggtcatcactgaaaatgttcggattttagatttttcaataaaatttccaaaaaatcgctgaaaatttctcaaaaaattttttttcttagaattttcctatgaaaaaactttctaagattttttttcttgaaaattttccaagttagcaattttttttaaaaaaaaatttctcggtgggggggggaacgatgcggggggaaatgaagtgcaccccttcctgtgccaggacaatgggagatcctgtcctgtcctgccctcatgtcttttaatttttttttaaatttttctaatctttaacctcccccgccctctaatttttaggatctttcccgacttaaccgcgacctgtccaaagtgatttacatcgactgggacccgcaggcattccagctgaacccggagaatgtgctgcgagtgcccaaatgggagggcaacatggacgacacgacattggcacgtttctcccgcattcattcattttttgaaaaatagaaaaggcaaacaaacccacatgggtggagaaccgagcacaaatacatttgggagcggagcactccgaaaattaaaaaaaaatcaaacttagaattttttaaaaaatcctaatgatttttttataagaaattttctttaaaaaaagtttctcttggtatatattcttacaaaaaaaaaatgaagattttttctgaaaattttctaaaaatgaaaataaaaaataaaaaattttggccgtgaaacgacgggggaatgaaatgcacacacctcaggacgaggaatacatgaaactaataatgcttttcccgttgattaattatgag

SEQ ID NO: 30661 - DNA, 1721 bp, Heterodera glycines
ccctaagaatcgatttttcaaaaagcaaaattcaattcctggccataatttggcggacgagcgaaaactttttaggcttaaaaatctccaaatgtgtttgatttacaattttgcaaccgaaaaggataaagatgaggaaattttggaaaattcattcatttatttatatgtttttccaatttttaggcatctttttagcaactattttggccttttttgagtctttagcacctattttggcacttttttagcaactatttaggtacctatttcgcgatttttagcacctaaaaatccgttccctgatgatcacttactttttttattgaatgattaactttttgtttgttttcttcagttaaacaaaaaattttgaaaattttccctattgcatctatcagtacgaatggtcagggaacacgctaataagtttttttctaaatttcatttctcataggtcgcaaaatattttaaaacaaattaaattgaatttaaaaactttaattattttttaaacaaaaaattttatgctgactcgaaaagtccttcgccgtcgaaaagtccgcgggagcgctggaaactatggaagagagaaataagaagtatttgaaatttcaaaaaattggattagaaaaatattcgtaattcgcaaaaattttagttaaagccgtgatgtccaactttcagctggtggaaaaattcagcacgaatagctgcgagtgagacagtgtgaaaacagccttagcattaccaactgaaaaagacccaccacaaactcaaaaaatgagtattctttggacaaaatctgccgacgaattccaattttctcatgaaaaatgacaagtgaatcacactaattttcattttaatcattgttttggagtttggaaaatgtttattattgctcccaaactcacaattgcacaaaaacatattataatattcataggcgatgaaaatgatgaaagaaaaacaaaagaaaaaaaatctgaaattaatttactctaacatttttgtttacatgaaataaacaaattcatgaaactaaaaatattcatttaaatgtattctcggaagaaagcgtctgaaaatgtttgtctcaacattttctaaaagggcattaaataattcagaaaagcatctttttgctggctaaaacactgataagggaaattacattattcagaaaagatcttcatcaaataattttctaatgtttttatggaaaaatgccttgggaatattttgtttgaaatcttttttctgtataaaaataaaatcaaatttccacaaaagcatttttaaattaattatttcgttaaaaatcctccaaagttttatgtacatagcactgttgtttttaaaattttgttttttccagtaaaattgttttcgttttatcctatgaattttcaaaggaaagtttttagaaattctattttttctaaaaaatgagcaaattccaaatcgtcaccgtctccatgatgctttttttcacaatcattgccatgaacatgttcttggcgaccaatgcccaatgtacctatgacgctgcaaacgaaagatgtgtgaatcattggtgttctggtgtcggcggttgcattttgcagggcacagaatgctcttgcttctttaaggtttagcaaaaaatggaaacaatttttcaatgaaataaagccagggttcggattcgtacttgaatggcaaggacgtcctggaaa

SEQ ID NO: 30662 - DNA, 1188 bp, Heterodera glycines
ttatgggcagttttttgtagagaatttccatttgatggtcttttatataacgccctttttgatggtttttataccatttgacgtattttgcatgcaattttctcagtgtgaaatttcgagattcttctaacgcagccacattaatttatgctaaagcatttaagcaaaacccaagacacattgtttagttatactttgaaccgattttgttgctcaaacgtgtatttcgatgaaaaatgagtttccgtttttttcgaaatcgggtcaggggatcggaattggccaaaatggatgtaaattcgtgatcagcttccccgaagaccgccggaagggcacactgggaacaaaggaaaggaggtcatcataataacaaagaagatacttatggtaaagccgcgcacgagcaagatatccatgtcaggcctgagcacgatccttttggaaaatttcgggatcatgacccgacaatactgtttccagctcaagaaatcgtcctgtctgccgagccagcagactgctaaattcgggtcagatgtgcattggaaatgcctaaagcactgaaaatatcagtgccaattcttttttattcctttttcttccattgctttcttccgcatatttccccttcatcatctttcttgcatttacaacaaaaaaaaagcacttttatgccttttgcttagtccccccccctctcttttctctctctctttctcttttctctctctctttctcttctctctctctctctctctctctcttcgctctctctctctttctcttcgctctctctcttttctctatctctctttctcttcgctctctctctctctctctcttttctctctctctctgtctctttctctcttttttctctctctctctgtctctctctctatttgtctctccctccctctactcgcattttaccatattatggtcattagcattagcatttggctgacaccgccgtctctcatcaaagccaacgccaaaagcaaatggtaaatggtgctggggtagtggtgcattttcagtacataaatgagcgaaatttcgaggcttgaaaaggcgagataaaagcgaatggcagacagcggggaaatgagaagcaaagagcggataaatagtgtagtggaagggtgagaaagagagagggagggaaagatgaataagagagagggaaga

SEQ ID NO: 30663 - DNA, 933 bp, Heterodera glycines
cgccgagccccaaaaacttattatttcataaaaaattggctcaaattcgcaaaatctggtcattttttggacaaaatctgtgcacaattagagtctaattttcaaaattttttgcggcagcgtctatcagctcccctggaccccctttttctaaattttttttttgtaaaatcataccagaaaaaaagacggtgtaaaaagcaaaaaaattcgccgacagagaaaaaataaactcaaaaaattcacggtcacggtcatggttaccgtgaatttcacgggttttttggatcacggtcacggtcacgattcacggtcacggttcacgggttttttcagtcacggcacacctctagccctcacctcgtttgagataaagattatttcgcatttttttcttatcgatgtttccatttgtgtcatttactccgtggtttagtcgaccgacgaaaaagtgcaagaatcaagcacttgagatttatgcacttgattttaacctaattattcgatttaattcaaaaatttaaaataacctaatatatattatagtaacaaaaaagtcgttgttttactgaagggagttttatttaaggaccttttaaaaaaagttttgggtttttctttaactgtgtttttaaaccacccgattcgtacgggacagatggggagagaaggagtggacgggcacttggcccaatccccccccccccgatcagaatgaatagaacaaagagaggggaacagattaatgagaaggggggcggggcgagcggggcgagaagagtcaagagtatggacaacaaaatacaatgtgatgacaatcatctgccaccccaaaaataaattgcccacaatttaaaaaaacaaaacaaaaaatgaaaaaaatcatctttttttttggatttttgcacattttttggggttttttttgaaaaa

SEQ ID NO: 30664 - DNA, 1291 bp, Heterodera glycines
  unsure (1)..(1291): unsure at all n locations
agcattcgcttacccttccccgatttcatccntctccacccccggcgaatgtcaattctgttccactgatcaaagaatattcttccaatcgcttccttttcccattttgtccatttgctttcgtctcgcgcaattggacaacggaccaacagaaaacggcagctgaagtcagtccttttcaacgtcaattgttcccgagtcgattcattggtcagatcaaagggcacaacggaagcaaaaggcgaaggaaacgaaaggtaaacgatggaattggcgggagaagaagcattggcaaatgcctaaagcatggagaaattggttgagaaatacgaaatgataaaagagccaaataaatcaattcgaccgaactcaccgctttgaaggcttcaatctttgacgccaaatccccgtcatccttgttcaaccagcatcgcaacacttttggcacatcgtccatgcggggagtgaaaagccatttggccatcgcttgtccatccgacgccatggcattgtcatcggccggaaattcggcgaaaagatcgtcaacataggagacaatgcgaagagatggacattcgttgagaattgacggcacgaattggcgcaaacggcggtaaattgtggcggataatccaatgccatcgatgtttttgctgagcaatggccaaatgttgtgcaaaatggactccaaaattcggtcactcgtcgtatcgatgaacaaattaagcggacaggaggcgaaaagtgggcgaaaacgttggagaaaagcgatggccttgccgtcgatgaaactgaaaatggatgggaaggactgcttgaatttcttgcataatcgtcaattttacgagattgtgatgcgtttgaagccgctgacattgtgtggcaattgaatttgcggaattgccaatggtaatccaacggaattgacaattttcagtttctttgtgccattcttttcaattttgcgcccaatccccatggatttcagtgtccagcgccgcgtctcgaagtgtttgtcgacgatgttgtcaaatcggtggctgatcattgctattccctgtccaacttgagaaggtgcaagcaaattgaacaccgccagccaactgttgccggagatgaaactgaaaaattaaattgaaaaaattttaatttttgggtttttttttacattttctttttgtgaggtcctcgtggttttggtggttttttgaagatgtcccaataaatccaaagaatggcgcaacagccgacaaacattggcacaccgaacagactaaaaatgaaaaggaaa

SEQ ID NO: 30665 - DNA, 1271 bp, Heterodera glycines
ctttgaatccggatgatgagagttttgctgcacatctgtatcagtgtaaaccatattatactgaaccggaagaagcaacggaaaagggagttgggccgatcccgaagggaccaaggaaaattggggaccgaaatatagaagaatcagatgaggaaagtgagaaaaacgagaccagaattgcatttttgaataccagaggagacggggctacgaatgaagaagaggaaatatttgccgagcctttgtacttaatggaaattcaatttgaaaacaatactattctaacctacatcgatttttcggacgattttgaactttccataatccctacaaatcgagtccagggacattggcaaatattttctgaagggcaaagaccatatatttcggcctggttatttgagacaaatttacaaatatttgtggaagaagctgatagaccgtacattgggaccgaaatgagaagattactgtgggaaaagggcagagttatgatagaggatagaatggtaatattttgggaagagtttggagaaggcgaatttgcatgggaagaaatggtcttaccaaatttggaagtgacacaccaagactttggggaatacggagacgaaagcgtggaaattaattgtatttgtttggaaagtaacagaggaatttcaagaaatgcgcctacttttcataacaaatcattaaaatactacaattcacaattttctattcataatacatcattttcccaatatcattcgcctaaaaactccaaaaatttacagccagaaaaattatttttacaaaatatgtctcgtcacgaaccctttatccccaaaaatcctcgtaaagcccgaaaccaattgtctcctacgccacctccagtattggtgtccatatcatcagacgaatccgaaaatgaagacacggaagaacaacccgaacaacagtcggaaaaacaacaaactgtggacggcattcagcaacgcccttataatcccaagcttcatgaatttgagaggagcaacgttcggattcttaattctgttgagcaacgccgtgcttctgaacaacaaaaagtggtagtttcctgaaaaagcaaccgaaagccaacgggacagggaaattcgagaattgaagcagcgaattctcttactagaaagtgaaaatgctaaagaagagcaaaaagcagaagaaaaagctaagatagataaggaagaaaaagcggagaaagatgccgaagagaaggaagaaaaagcgaagaaagatgccgaagaaaa

SEQ ID NO: 30666 - DNA, 1042 bp, Heterodera glycines
tttttatttttctgtaaatcggttaagaagaataaattaatggtattttgtttaatttaatttttgtaaattatttgttaatgaaaagctatttttgaatatatgggttaattaatgagtgtcatcaaattttgtttcgaccgtcgtgttcatcctcgtccctatcattctttggcactctgtccggctaattcatcgccgccaaattcaaacgggcaaaaccatcatgccatgaacagtcagcaggccaagaagagaaagagtaacagcctgaaatatttttgttttcatattttcgggagattaagagcataatactggaaaaaaatttttaaatgggttcagtgtcattaactcattaataagtgccattgtcagcttttcacaaaaacataattcaaatttgaatttttactttttgtttagtgccattgtcagtttctcgaaaaaaacacatttaaaatttgaatttttgatcgaatgctggttactgttctgatttattcaaaacgaatttaatatttgggacaaacaaccttgccgaaaaaatcctggaactataatttttaggattaaaaaaaatgattaatgcatacatttttgacaaccaatttggtcatcaatggatttgaaaatttaattttctccgggcgggggcctatcgcatttattttcgagaatttttcactcactgatgaaaattttttttacaaacttcttgcgaaaactcaccgccagtaccaacgaaattgcgggaccgcctccggggccttcaccggtcgccgctgtttgctgcacaaaacacggaggactacaattgcatgggttgcacttggaaggcgaacagttgattggaccattgttgacggccatcgacgacggtgccggatttggcattccatgtgacggatttggcattccatatgccgggtttggcatcccatatgccggatttggcattccatgtgacggatttggcattccatgtgccggatttggcattccatatgccgggtttggcatcccatatgccggatttggc

SEQ ID NO: 30667 - DNA, 1790 bp, Heterodera glycines
atattacaccattccctcaattaatcgactacctctgtgatttttgattcaacggtgacgtggacctcgacctagacgatgatcttgacctcgatcgactccgtgaccgacttgaactttcgctgctgctctcaccagatgtggagccggaggatgatgctgaggacgaagatgagggcggacttctcgatttcgacttttttgactcactaaacagagaaagggaggttgtctaccatttctgaatcattgaagacttatgaatccagagttacacttccatttgatatgcagtttgcttttttccccttctatgtgccaatgtttttttgtgtctcatcgcccacctctttttcgttggctgtggtggcacatatttgttggtgatcgcgtcttcaaatgtcttccccttctccttcagttccgtttccaacttcactttctgctctctcttctttatgtaatgctccaacagtccgttaacttcccatccgtccgcgtcgcggacacaatccactggtggtggcggttgcaaagcgatgtaaaagcggtcaatttcgcgcatcaactgatcactgggtgcttcgggaggcgggagacggaggtctttctcgcgcaacgattcatacttagaaatggaattactcgtattgaaaaacaggagtgattgaaactgactgtgatgtcttcgattccgatcagggggaccatcatgccagcgggcagctcataatacggagccttcggaatgaggtcgaccggtggacgctgttgtggaggagcgaaatgagccattgggggaggcgccgcgccagtgggcggaagagggggaaaaggcgtacccatcgacgaaggcccattgccaaggcacggctgttgatgcacagccggactgtgtggtggagggttaatctcaagcagtgatgggattttgtgcggcgaatttgtggatggaagaggaattgtctggtcgaagcgcgttgagcgacgacgcatctgttcaacgttctcccgctcggcagccaagcgttttcgttcattttccgcttttcttcaatgatcagatttaggcactttgcacgaaataaaattctgtactcaaaacacatatatacctagatgtatatatataatttacatggaaaattggtgttttagtcccttaaatatttcttttttcgaagaatattgagtaaatttacgccttagccctcattttccaacctcggcactctctcaacgctttctcccgttctgcgactttcgtaagcacgtgctgctcatattctttgtgctgtttggtgtatgcgccgagtgtgtctgcaatttctttgtccacttccgcagccaattggtgttgttccgcgacggtggcggtctgttccgccaacattgtcgcggagggatttcgcaattgtttgtagcatccgtcgtcgaaatatttgtgcccctcccaaacaccgaccaatttctccaatttgtccacgaatgtgttattcgaggccgccattggactgctgcacgcgtaagcgtacaatttgggcacgtagcgcgaaagcatttgacgaatgctgtccaactttttacgctgactaaaaaatatggaataaaaacgaaaaaacaaaaacacgaaccaatagtgagcccaatcattgatcagataaaggacatggagtcggaaggagtcagaagagcgccgttcacgaacccttaaaaatttacaaatatttgccgagtaaaagtaattttaaaaatgggcaaaagctgggtacaacaaatcgaaggtcaat

SEQ ID NO: 30668 - DNA, 1190 bp, Heterodera glycines
aaaaatggggttttgaccaattttattggggaaaaaaaaggcctttacaaaaataattcccccggggagaaagggagtgggaaaacatgatttcaaaattttcaaattttttctagtctaatctacttcaaaacggttcagaattcaaataaaaataacattcacggtgcgaaaaatggggtttgacaagtttattggggaaaaaaagactttacaaaataatacccctgggagaagggagtgggaaacatgatttcaaaattttcaattttttctagtctaatctactcaaaacggttcagaattcaataaaaataacattcacggtgcgaaaaatggggtttgacaagtttattggggaaaaaaagactttacaaaataatacccctgggagaagggagtgggaaacatgatttcaaaattttcaattttttctagtctaatctactcaaaacggttcagaattcaataaaaataacattcacggtgcgaaaaatggggtttgacaagtttattggggaaaaaaagactttacaaaataatacccctgggagaagggagtgggaaacatgatttcaaaattttcaattttttctagtctaatctactcaaaacggttcagaattcaataaaaataacattcacggtgcgaaaaatggggtttgacaagtttattggggaaaaaaagactttacaaaataatacccctgggagaagggagtgggaaacatgatttcaaaattttcaattttttctagtctaatctactcaaaacggttcagaattcaataaaaataacattcacggtgcgaaaaatggggtttgacaagtttattggggaaaaaaagactttacaaaataatacccctgggagaagggagtgggaaacatgatttcaaaattttcaatgttttctagtctaatctactcaaaacggttcagaattcaataaaaataacattcacggtgcgaaaaatggggtttgacaagtttattggggaaaaaaagactttacaaaaaaatacacctgggagaagggagtgggaaacatgatttcaaaatttatcaattttttctagtctaatctactcaaaacgggtcaaaattcaataaaaaaaaattccccgggggaaaaaatgggtttggacaagttttattgggaaaaaaaaacttttaaaaaataatacccc

SEQ ID NO: 30669 - DNA, 1190 bp, Heterodera glycines
  unsure (1)..(1190): unsure at all n locations
cagcgttagagcaatgggaggagtcggcgttatttcttttaaagggcatnngnntnnctgngangaagaagaagcccccttttgaattggatgntntgaagaagtanaanattatttggntgatngttggnnggtntaaannaattgagtacctcacggcagagaatgtgcggggcaatgaaaatgggactatttgttgggccagctcattagttattttgtagctcccttcctcattaccgtttgtcggttttgcaacgaaattttgtggcacttgcctccgtttacaccaaactgtggcccctcgtgcaacgaaacatggacaacaagacggacttggtccatactttgttctcttatctcagtgaaaaatacaccgttttcgacagagtacgttttcattccccactatgttttgttctttctactctttgtttaggaccgaaatgttggtcttatgaaagtgttaattaacgtgtgccgcgaaaatgccattaaacgccttggcaatgtttgtccacccatcccttcgtttcctttcactcatttttcactatgcatagatttttgtttctctccaactcgacgatgtgaatcggatggcacatttgggccaatcgctaccagcaaataacgacgaaatggagaacgctgagcaaatcattatgcgtcttcgtcataaatctccctattttgtggccagaatcgacggacgcactcaaacagtgttttttgaggaggaggctaaaagcagcaagcaacaaatggcagcacagctgcaaagcaaagtggacacagcaatggccgatgtgattactcttgccagcattgtccactcttatgaagatgccgttcgacttaacaccaattagtaagccgtggaagcttcgccactgggtcggtcattcattcacacaaattttagtgtggaaaaatgcgctgcacaaaaggagaaattgcgtggcgcgggtggcaatgggggaggaagttcgtcgtcaatgactttcgacgacgagggactctttggtggtgggtcgccctgatgtgaaataatggatttccaaaatgatcggattttaagataatcgaaattgttttttttaatttgttttgtgtaatatttggaaacacaatggacaaaaaagaaattaaagaacgaaggcaaagacttttcattcgaaatagcttaa

SEQ ID NO: 30670 - DNA, 1257 bp, Heterodera glycines
atcaaatgaataattggagacagaaaattagtcataatctcgtctaaaatcgatcaaattttataatattgatatttttcgatagccctaagtgttttctattatcctgcaaattttaaaaaaaattctttaagtttaaaaaaagttatgacctgagaagctcaaaaaaccaagtttttttgaacatttttagtcataactttcttgaaacttaacgaaattttttgaaattttgtaggctaatagaaaacccttaggcctatcgaatgatatcaagaattaaaaatttagatgcttttgagcaaaattatatcaaaaaatattttcatttgatggttttttgactaacgcccattatgatggtttttgactaacgtcatagcaccgccaaaaatggctgtattacgatgcgttatatagatatgcaaaatttggtgtggatttaccaagtgaattccgtttttctctattaacagagataaagaaatagtacgccaaaatgagagatgtttttttctctacactctattgacacatgtctcgttacttaaaagggaacccacccgaactgtaagtcggaaaatgcatatgtgtgatataccattggatagagcagggtcgacttctattgtgaatttttaatattacgtccccatagaaagaaattttactgtggaaagtccaagtaccttattggacaactacgtgtcaatgagcacagtcgcctttggccagttgtggaacggaaaaatgggaatatcagatggggtgcgctcttttctaaaaattcctcttttcgtctaaccatccctcccttttgtgcactatttcgtttcaaaattgaatcattttttttgtcttttgaaataaattgtgaaaaatatacgaaaattattttagcttttaattatgctgtacaatgcttttaagccccgccgtgcggcggctcccattttgtgcactattttagtttttaaaattggttccggactttttggctttttgaaataaattgtgaaaaatatacgaaaattattttagcttttaattattcagtacaatgcttttaagccccgcagtgaggcgggacagttccaaaattttgtaccacattttactgtggaaagtccaagtaccttattggacaactacgtgtcaatgagcacagtcgcctttggccagttgtggaacggaaaaatgggaatatcagatggggagcgctcttttctaaaaattcctcttttcgtctaaccatcc

SEQ ID NO: 30671 - DNA, 1199 bp, Heterodera glycines
  unsure (1)..(1199): unsure at all n locations
atccgttttcagaaaaaatgccttgtggtgaaaacaatatttcaccattccactcccataactttgtgagttcggcacggatcgagaccgggataagaccatgngaaagagcagctcgagctctacaagaaggtatggaaagaaaaaatagttatttctgggactttttcagaaatcagaaataattctccaatgtggcccaaattttaggcccccagccacagccccttgcttctcccagttttaagtcttggatttgtcaaataaattcaagacttcaaattaataatcaaaaattctcttaaaatttttttgaacccaattcaaaaaaggaaaaaaatttgcagtcaaaaaattattcgaatttctccaattttgtttccataatttccgaaagttattcggtatcataatgccaaaacaaaacgaaatcgttttaaaatattcctttctggacttgacttggtttcttgatatcgaagctgttttctacgctatttctaaaacggttataccaaaccccagatttttgaatccggttttcagaaaaaatgccttgtggtgaaaacaatatttcacatttcactccataactttgtgagttcggcacggatcgagaccgggataagaccattggaaagagcagctcgagctctacaagaaggtatggaaagaaaaaatagttatttctgggactttttcagaaatcagaaataattctccaatgtggcccaaattttaggcccccagccacagccccttgcttctcccagttttaagtcttggatttgtcaaataaattcaagacttcaaattaataatcaaaaattctcttaaaatttttttgaacccaattcaaaaaaggaaaaaaatttgcagtcaaaaaattattcgaatttctccaattttgtttccataatttccgaaagttattcggtatcataatgccaaaacaaaacgaaatcgttttaaaatattcctttctggacttgacttggtttcttgatatcgaagctgttttctacgctatttctaaaacggttataccaaaccccagatttttgaatccggttttcagaaaaaatgccttgtggtgaaaacaatatttcacatttcactccataactttgtgagttcggcacggatcgagaccgggaggaagccattggaaagagcagctcgagctctacaagaaggta

SEQ ID NO: 30672 - DNA, 862 bp, Heterodera glycines
  unsure (1)..(862): unsure at all n locations
tgaggtgccctaataacgtttcgtcattcctattttcatcgttatcataacgcaaaatcaaatttttgagcgctctgtcattttccacatattttttcttccttgtttcagtcaggccccttgtggggtccaattcaaatggccgaattctgtttcgctgatattcctcctcctctttaattccgtttatgaatctttaaaattaaagtctcgagattagagctcttaaaattcactttgaagtaatcactctcaattccactgagccaaccgctgagtgtgctcggcccatgcacgtttntaagcggggcaaacccaaacttgggtttgcccgaccgctatcaagttttttttccgccactcatatccattctggtaaatcaaaacaactcccttcgttgtgtgatcggcatgatcaaaagtttcccattttagtatgaaaatgaagaataggaaatacagttttaagttgtgcattttcaaataatagtggagaaaaagcgaaaagcccaaaataatattcattattacgaatagtagttttaacattgctttactacggccgcattccgtcgggcaaatttgtttttgttatttgatgctttactacggccgcattccgtcgggcaaatttgtttttgttatttgatgctttactacggccgcattccgtcgggcaaatgttattactagttgaaggacggagagagatgggaggggtggggggggcatcgaggaataatgatgaatgagtttttttcacgaaatgcagaaaattttaagttgcgctaatgtttcgaccagtttcgtttaagtgaaaaattgctatataaatatgagaagaaaccctacgaattaataa

SEQ ID NO: 30673 - DNA, 876 bp, Heterodera glycines
attatacgaatttattaaaatgacaaaatgtgtatttttaatagtttttttctgttaataaatcgatgaagaatatgaaggataattgtaaattttcattgaatatggaccagggcttaaaatgaacccgaggaatttaactcgaagtcgtttaatacgaactgggaaatcgaattaaaaaatgcttccataaaataaatcaagtattttttcatttttaaatgcgcaaaagttttttcgaaatttgaatacaactgcttgataatttttttttgtcaccaaatcacaccaaaaagcttgagatggtcaattttcgaagataatttcatttcaaaatcgaaaatgggaagggcttggtgaacaattggaaaaattatactgttgatttacctaattatgctgaattgttaaacatttatgatcaaaagtcgcttgagagtcgtaggttaaaaatagacttaaaactttttcatgaaataattttaggtaaaataaatttacaaaataacgaatccttttctttttccaaaaaccctgtaaaaaacgaattcactataagaacagcttattgctcaactaatgttagatacaactcgttctttattcgaacctctcgtctctatagacttttacctaaagagacgagattactaaatcctaatgagtttgccaaacttcttgaaagatctgatcttaatttgttgatttctttgccaccccagctccaaaagtgaccaattgtttgttttatttgatattattatttctttatttttcggcgtcacgcttttgcgtataaatgattgattgattgatattggcagtttttagtgcctaaaaatgagaaccaattattattgtaaaatcacactcaaa

SEQ ID NO: 30674 - DNA, 1637 bp, Heterodera glycines
  unsure (1)..(1637): unsure at all n locations
gacatcaaataatagcgtcaacgaattgacgccgcttgctttttaaatcaacgatttgatgncattctgtttcaatttaaacttttgcctttaaatcaatttttttcgttggtatcaaaaatgtgttcaatgtatccattttttaaccgaaaatattcccaatttactaatgggtgtggaagcagagatcggcgcggttggtttttttttcgacttttcgaatattaaatattttcataaacgcgcttgcaaatctcaaaaaaattctgaaggcagtacataaaaagtctaaattattttctaggaaattgaaacagaaatctttgataatcaaacgtttcctttgattttaaattgaaacaggttgtttgatttgacgtctaatcaatgatttgacggaaattgaaataggcccctgggctaccagtggtgtgaaacgcacgaaaaacaagttttttttctggttgttaagctatttttcaagttattagagccaaattctaagtttttatttttgagcgaaaaaaacaatttttgaaaaactttttttttgccaaaatgaatgccagatttgagcttaacgaccttgaaaactccattgaacacgctttcaatattgatggaatttaaaattatgtattttctgtttctatttttgctttttttttgttaaaatgttttttagtgaataatttttttttttgatttaatacttttctttttgttattaaccttttattttctaaatttgcgtattttgacttatttttcttttaaattttttgtcgccaaaacgcgccctgggaaacgacccccccccccccccgactcggctcaaaactcaaaagcactaatacggcacggaactgtccccgtgcgaatacgcacgaattccggggatttgacaataaataataaatgattattatttattcttttttgtctttgtgccttttcgtggctcagttggtaacgctttgcgttttgaatcctttgcgaaggcaatgatgaaaaattactcgtttaggagccaattttttttgtcgaaaattttttctccacaaatcagtttttcttgactaaaatttttgattttacaaaaaaaaaataattattatatgtgcaaacaaaaaaaaatggttataggctccgtgggaatttttgaaattttagtccgttctttgttaatacataggttttgcgccataatggtcaattgtctgtgttttttaacatgactttttgatggtttgataggcgccgtcggagggaaaaattaattattttaaataaagttggtttagagatttaaaaataactgaatatttttaagaatttcaagaataagaataaataatgttaacattcccaaattattacccctctgcaagggcgtagccaggaccttcgtttcgggggggcccaactcaaaaagtcggctcttaggggtgtattttttcgtttttgtaaacctcaatatttagaggtgtattttcgtgtttttttaaaattgaattgattgcattagacgcgttcaattgtaaatgatatgttttttttcatttcataaactcgtttgttatttttacaaaaaaaattaatataatatttaaaaaataaataaattttttttcaaa

SEQ ID NO: 30675 - DNA, 1434 bp, Heterodera glycines
gaccggcggaagggagcatctgatcagattaagatattaattgagcaattggcaagaaagtacgcaataaaagtgccaagactgaacgacgtcctccctcagaaagggtcttcgaacagttcttcctggcgccggtcctttggctgcggcagtgcctccaattcgttggctttttcctgacgaaaatggtcaatgtgtgagaatgtgtgttaacttggatttgatccctggagcatttcaatttgtataatcaatcgacccaattaactaataccaattagttaattagtccattcattctcctttctcacaatgttaatgggttgccagctccgcgcgctatattcgtgcttgatgaggtaacagtaggatacaatggcagtttattatcattagagtaaaaagtaggagacaatcgcaatctattggatattatagtaaaaagtaggatacaatcgcaatttattaatattatagtaaaaagtaggatacaagcatgtgatctacgcctagaaaaaaatggtgtaagttaaaatcgtaactacgctcaaaaagcttctcaaacaattttagcgcatccaattccttctacaatcgcctttatacatcccattatgaacgctaaaattatcagagtgccgaaaatcgcatgtgatctaagcctagcaaaaaatggtgtaagtaaaaatcgtaattacgctcaaaaagcttctcaaacaattttaacgcttccaattccttctacaatcgcctttatacatcccattatgagcgctaaaattatcagagtgccgaaaatcgcatgtgatctaagcctagcaaaaaatggtctaagtaaaaatcgtaattacgctcaaaaagcttctcaaacaattttagcgcttccaattccttctacaatcgcctttatacatcccattatgagcgctaaaattatcagagtgccgaaaatcgcatgtgatctaagcctagaaaaaatggtctaagtaaaaatcgtaattacgctcaaaaagcttctcaaacaattttagcgcttccaattccttctacaatcgcctttatacatcccattatgagcgctaaaattatcagagtgccgaaaatcgcatgtgatctaagccttaaaaaaatggtctaagtaaaaatcgtaattacgctcaaaaagcttctcaaacaattttagcgcatccaattccttctacaatcgcctttatacatcccattatgaacgctaaaattatcagagtgccgaaaatcgcatgtgatctaagcctagcaaaaaatggtgtaagtaaaaatcgtaattacgctcaaaaagcttctcaaacaattttaacgcttccaattccttctacaatcgcctttatacatcccattacgagcgctaaaattattagagtgccgaaaatcgcatgtgatctaagcctagcaaaa

SEQ ID NO: 30676 - DNA, 1174 bp, Heterodera glycines
agaataactcgaattcgttacttttttcaccaatcctcccacgaaccaatcattggctttttggtcgaaccaaatcaaagatacgaaaaaatttttaaatatttttttatagtcaagtcaggcgagttcccccccccccccaacagtagaccaaccgatgccagccctgtcgtcgtcgccattgttgccatcctgcgccgttgcattgccggcagcgcatgcgccgtcggcaatggtggcgagcggttaatagcgtcaacaaagcgatgatgcggcaaaatttggtgatgaatatgctgttgttgctggggctggttgtgaagcgacggcacgggactcgcctcgtcctcctcactgatcccagccgtgtccatgaacagtttgtgcaattgggcggcatggaattgggccgaacccatcgccggactcgccaacggcgtgccgagcgcaccaggactgaatggacataaccaaaatgagtgtgccgaacgggaaattaggcatccacgatgtactcccataagtgaactaattgaattgaaacccatacattttcaaacttccttattccgattagcaaaatttaaaatttccgggattctgaaaaaatgaactaatttcccagaaaccttccgtatcccgaactggtgtcgcattcataaccgtccgccaatgctcccgacgatccaccgctcagacgacgaaactgcaaatgcaccaaaattcgttcatttcacgtaagtttttgccaatctcaaaacaccgcaaaattccgtatttctttttatttctgttttaaacaacttcaaaaagtgccagaccgtgtgttgcatgtccaaggaagtgccattgctggcgaacttatgccgctgtgtgtcgagcagatggaatggcggacgcttcgacagaaattgcatggagtacaaatggtcagagccgacacttgcagatttttgacgaaattggcctaaattgttggcattttccatttctttgttggcaatcccaacatattaatgagatgccgcccaaaagtcgaattttgaaaaccgaaaaccaataacggtgccaaacaaatatattggttaggttctaacccgaaaatctatgaataccttttacctaagctaaattttcattatggtttcaattctgtcaattcatttgccattat

SEQ ID NO: 30677 - DNA, 1507 bp, Heterodera glycines
tttaccttttaccgtaaccgtttactaaaaatttatatttaattctttttataaaaccaattaaatactaaaccaaaattagtctaaattcaatttgtatagtaaaacaaaattatttacataaaatagttttttaatttattccactttttttactatttccgttcatctcggggaaagcgaatgttttagtggacaaattatccacaaatgggcaaaacggagatgaatcaccgccacttttagcattggaaaaacagaaattccgatgctaatatgttcatatgtgagcaaaatggacagaattatggagccatcagcagtagttggaaatgggcaaaagtgattcaccacttttgtcattggtattcaaaaagccaatttctgtgtaaaaaagcagcggacaatttgctgggaaattgaggcggggccgccgcaaacggacggtcggacggacggacggccatcgacggacggtcggctttaagccgaaactccgcccaaaatgagcagcataaatagcagattatggctccagcaaaatcataaccgacttcaaatccttcaatccaaaagcgaaccaatcaaaaattccaaatggccccaagtcacaagctgttcttccaattggtcatcctgcttgtcgtggcatcgcatgacatctcgaatggtaagtgagaaaaaaattcaataggtcaagacttattgacacgaaataattttttttggaattcatattttaattgattaaaaattaatctgagttttgttgtagtcaaaaagaaatatgcacttttttaggtttaagcctaggaattcttgaattggttttatggtttgtatgtgttggttgatttggcatgaatgtctccaggccaaagctaaccccggaccagccgaacctagcatctcggaaatcaacggcaaaacgcggaaagagaatggaatcgaggccgactgatcgaaagcacggtctggcgaccaacggacaaagcgcacacaaaaccatagccaggggtgaggtctgaggcgactaatgtaccccgcctcaccgaaatcaaaaaatttcaacgaaaaaaattttttttaaataattgttttaatttgttggttttgtgcaaatttataataaataattgttagaagacgccaaatttttggggtttcaaattcctttccttttatgcctcaacctaggattaaaataagatctgtcatgatttacagtaggtttgcaaccccgacgtcggggttggaaaagtcggggttcgggctgaaaattccccgactaaatttgtcggtggtggctggagaaatttaaaatgtcgggggcagacacatttgtcgggggacgaaattttcataaaaagacggaaaaagataaaagaaaaagctcctgaacaaaaaagtcttaaaaacgaatttaaagacacttccatcttatttgaagtgcaattgacgactttcgtaaaacaccgacatttcggggtcgcaaccctaattttta

SEQ ID NO: 30678 - DNA, 1680 bp, Heterodera glycines
attagtaagcatttgtagtgctccgatacgtattctgcaaaatttggtgagccgctgatcaattacaaattatttatggacgatcaaattttttgaatttttcttaagtgcaaaagtggtgggtgtcttacagcttaacaaggcccaattaagcttatttccagaaaatctcgcatgaattctcatttttaaattttttatagatttttaaatatttggatatttttttggcttaccaaaacttcatcgaacctggctctttctattctcattcaaatcgctccaaattttttttacagcttaactaggcccaattaagcttatttccagaaaatctcgcatgaattctcatttttaaattttttatagatttttaaatatttggattttttttggcttaccaaaacttcatcgaacctggttctttctattctctttcaaatcgccccaaattttttttacagccacgaggccgcgaagcggccgagtgagtaccttgggcgcaggaaaattattaaggaggagggttcattatttatttatttttgcaaaattaattcataaatttttttcagaaactgctctgaaacgcaccaaaatttatttacaagttgaataaggcactctgactcttatattatcaaaaagggagatgaataaatattttaaaaatttctaattcctttttaaacaggccgaaaaagtttaggcttaactttttcagcgggtttaaaaaatctagaaaaattagtaagcatttgtagtgctccgatacgtatctctgcaaaatttggtgagcccctgatcaattacaaattatttatggacgatcaaattttttgaaatttttttaagtgcaaaagtggtgggtgtctgcaaaaaattttcaccgggtttaataaatctaggaaaataagtaagcttttgtagtgttccgatacgtatctctgcaaaatttggtgagcccctgatcaattacaaattatttatggacgatcaaattttttgaaatttttttaagtgcaaaagtggtgggtgtctgcaaaaaattttcaccgggtttaataaatctaggaaaattagtaagcttttgtagtgctccgatacgtatctctgcaaaatttggtgagccgctgatcaattacaaattatttatggacgatcaaattttttgaaatttttttaagtgaaaaagtggtgggtgtttgcaaaaaattttcaccgggtttaataaatctaggaaaattagtaagcttttgtagtgttccgatacgtatctctgcaaaatttggtgagcccctgatcaattacaaattatttatggacgatcaaattttttgaaattttttaagtgcaaaagtggtgggtgtctgcaaaaaattttcaccgggtttaataaatctaggaaaattagtaagcatttgtagtgttccgatacgtatccctgcaaaatttggtgagccgctgatcaattacaaattatttatggacgatcaaattttttgaaatttttttaagtgaaaaagtggtgggtgtctgcaaaaaattttcaccgggtttaataaatctaggaaaataagtaagcttttgtagtgttccgataggtatctctgcaaaatttggtgagcccctgatcacttggggagatttatggacgatcaaattttttaaattttttta

SEQ ID NO: 30679 - DNA, 1733 bp, Heterodera glycines
  unsure (1)..(1733): unsure at all n locations
atagcttccctatagtctgtactttaattctgcgttggatttttgctccccataattgtttgagtaccccaaacggacacttgaaaaaatcgatttttttatttcataaatattttttcagaaaatgctctgaaacgcaccaaattttatttacatgttagtttaggcactctgatgctttttctatcgaaaagggagatgaataaaatttttaaaaatttttaattcctttttaaacaggccaaaaagtttaggcttaacttttttttcagaaactgatcagaagcgccccaaactttgcagggatactgaaaggaaaagaattaacctgttttatcacattagcttgtcatcagtttttataaaaaattttcaaaattctgcgtctcctattattttatttttttttcaaaattttgaagggcgggggggtgtgcttagtgtatcgtatgccagtcgacattgccaacgagatttccaactatgtgtgtagacatcgcttagctataatttgggcgaccgatcggttagcgcttctaattgtccttcaggtcagagcgcaatttcagactccaaaaatgacctactacaactgaaaatgcgtgagaaagttggatttctcttctcgacatccatagaaataatcaggcaatgtattccatggagaaccatccagaagtggagattcttggtatcatgcgatacctctactagcctaggtatgacctgcaaagcaatattccttttgttgcttaaattatgaccagaaaacttcaaaaactgtttttaaagcattttgggccatatattcataaatgttttttaaacaaatttttgctatttttttaaattaaaatgttgagagaagctccgatcagagtttggaacaagttccaaacgacaaaaccgtgctaaaattatctcttctttaatctacctaattaattttactttgttgatttaaacattctcttctgcatcagttagtcagctaattatgacgctgaaaacagaataagccatgatctgccattgatccgctttgcaattgctattgtttttggtgagatttttttttttaccaatatttagcaaaacaaatactgttgttctgttcaggtgcgatcggtttcagtctgaaattcattttcaaacccgtagtaagaggcttttcctgtggcgacctgtccattaacctcccgtcaattgcgaaagagaccgtccctctcaaatatttctatttgatcgccattcctttcacatttcttatggtgtgttgtcgttaattcaaacacgaacacagattttcatcttgttcagatcacaatcggcgaaatgtgcctgcacatggacccggatgaacgcctttgcttcaaatctgcgtgtcaatggaatttcgatcggaggctctgccaaatggcacgatttatttgtgtgcttttgttgttttttcgtgtcaaatggaatgtagtttaaatgaacaactttttagcaatttggctgctcggcattgctgttgacctgttttgcgtcaacctggtgaagctgtcggtgggcggattgcgacccgacttcatcgagcagtgttacccaacggacttgaagtacaaatatcggggtggacggctgcagacaaacaacgactcgacccatttcttctacttgtacacctgcncaaaggctggacgataacaaacgcaaaatattggactccccgtcgcagtttctactca

SEQ ID NO: 30680 - DNA, 1218 bp, Heterodera glycines
  unsure (1)..(1218): unsure at all n locations
ttttcacanaattcacttcgaatgagtgacagccgaaattgggcgaaagtaaactcggccattttatttgcctcgtcgggtcgaaaaatgccaaaccgtccgaattgactgacagcgaaattttgttggacggcaaagaggggccggaaaatttggttagatggaaaaagctgtaaaaaataatgaattagagaaaattaaaacaaaaattaaattataatgaccgtgagaaaatggcaggccaatggacgcgagcgaattcaatcacttggcatttaacagaatcgacagtcggcacaatgccatccttggcaccaatcttctgaacatttgctggttcattaactttgtgccatttggcatttgctcgtcacccttcgaaatgtgtgcattatcagttggacccatcgctgccgttcaatttcgaccatttcctcgtctctttcgtcctcattttcctcctcctctttcaatgtgccaattgggagcacttcgtccaacttttcctccatcaatttggcgtcaaattcgtcttggccgtcttaattggctttaatcgttcgactgatcaattaattaggtaattaattatcactaatgtcaatgaaatgttgttgcgccgccaaagtgacgaggtcatcttcctgtgaagcgatgagaaaagttgcagcaattcacttgcccattttagcgcaccttttcgcattggtattcctttgagtgaatgccgcccaaaatttgccgaaaagccaattcaatggccaaagggtcgtcggattcacttaaacggaaagtcagtcgtaaaaggaaggcttcatttgtcaggaaatgatggcaacgcacctttggtgggctctaaacaattctttcttaaagaaaattcgccaatttttttcgcttttcgtctcaagcgatgcaattgcgtcaatctgtaaaagataaattgcttttttggatttagttttatcgaattttaccacgcattcggagccaacgcccaaagaacggataaaacggcgaccaacggcaagaaaaaggccgaagccaaacgcatctttgagacaaatttgttggcacaacatttcgcacaattcaaagggggtcgattgcgagtccgataataaaaaacggattaaatgaattttaaactgaaaaggaaaacgaacgattggcagtgaaatgacacggccatcggtcaaatgaatcggcacaaacatt

SEQ ID NO: 30681 - DNA, 2121 bp, Heterodera glycines
  unsure (1)..(2121): unsure at all n locations
aaaaaaatttcggatttccatataatttgcatccctaaccattacaaacccaatttcttaccagtgtatttttattcaagggctttaagaaataaatataatacaggttaccgtgccacaaaattttctttttttaagaattttacttgtaaaaaattttaaaaaagccatgcttttggccaccaatttctcattccgccgctgtttcctccaatttaaactcggctttccgtcccttttttgtctccgtttcacttcgctctttttgcttgccattgtctccattttgtaccttcttcaaaactccaatgataccaaaagcatttcaaaagcgagcaaatggacagtgttttcgcttgaaaatggccatcaaaatgacagcaacaaatggacagtgccgagcacagaatgccaaagagtgttcggcggtgacaaagcgttggtccagcgattggtgcggcacagacgcaaaattagggacccaccgccgaacgaattggcgatgagttgtgatgcgatttgggcacggcatggagacgaagaattgttggcacaacagcgatgggacaacgacaaacagcaacagcagaacgagaggaggaggacgacgaacaacaatggcacatccattgaaacgacagaattggaacggcaaatgccaatggcattcgcgcgggttgtttacacagtgagttgcaccggcaccggggagcagttcgtttcccaccccctcgccccgaaaaatttttcaaaatttttttgttttgttaaattttcatagttttttttctaggaaaaactaaaaaaaatttgaaagaatttctccaagaatctttttagactttttagaaataatttttttacataaaaatcaaaagtttcccttttggttttttctggaggcgctatgtttagaatgccggttttttctagtttgatgactttttaaagaatgggcggcacttggaatttcaaaatgcctgttctttgctctgttcgaagcttttatttttttcgggaacgaaacgcacgcaaatttttctacaaattttcacagtttccgatgggcccattaattgtgtaaatcatccgattgctttcctccccccccccccgaaggactatctgttcctggagactgaactgctcgtccattacgcgcccaccaattggtactgttacgtgttcgactccaagtcgtccgccgtcttccaacggcgagtgcgccaactcgcctcctgcttcccaaatgtgctcgtcgtggaccaactgtttgacatttcccagcaacggcttcaacatgaacacggcggtgatggaatgcgtgcggacgctaagtgacgagcgaaaagcggtggaagtattttggtgacgctgcaggtgaatgagccggacggaggaggaaaaggggcaacgaacgcaatgggcggggaggacgcgtcgaatacgctttcgaaaaaaaaatttttttttttgaaattattcggcggaattaaaaattgaggtttttgaaatttcgcatcaatttctntaagccaatggctgagaaatattctcaaccattaatatntaatttacatcgaacaatttctagtaaaattccaatttctaattccaactttttccatgaaattaaaaaaacatatttttcgattttttcgagtcaaattttttttatttgtttatgcaccaattgttgaacgcgtacaaacacagccactcatcacacactgttcagaaccatgacgtgcaggcgaagaccaacgcggagatggcgcagattttcacttggctgggaggggccaacgacgtcgaagtggaactgcggttgggccacacgcggaagcgcatcgaatattaccaaagcaaattcaactggacattcgaggcgctccatttgttcaaagatggtcagtttggtgaggggaggggacaaaacaaacaaagggaagggtcaaattccgcaaaagggaaactttttttatacctatgccaaaaaatcggaaaaaaaacttaaaccaaaaatttcttgaaaattataaaatgcaagaaaattcttaaaaattaacgaaattatgatattgcggctctatgttttaatattttagatttattatgtga

SEQ ID NO: 30682 - DNA, 914 bp, Heterodera glycines
aaataatttaattggttaattcattttttatttgaatatttctttatattttattacttgaatgatttgttgtgccccattttggtcccaatcccaacggacaatttgtgccaatggctcctcattcgacggattggaagaagaagcattgccaatgtccgtgattttcaatgcgggataatcggttgtcaaaaattcactaaaatatgtaagtgattaatatagaaaaaaaaactcatgtttgcttaattatatgctatcaatttggttgctttttaatgaaaaaaataattttgtaataataaatttttaaaaaatgaaattacagtgcagcaaattgggtaatttcctcaaacgaacactttccagtgaactgatcagagaatttaccgatcacttgttcataaacaataataaattcgtcaaatatttccattgaattactttaactttaaaacgaattttatgaattcaattaactttgaatatagaaaaaaaattttaaaacaaaacaaatttttcaaaacttttatggtatttaaaatgtaaaaaccttcaaaaatatggaaaacattttttagaaaatgcaaatggcggcaccattttaagagagaggaatttattgaataaaagcatttacaaacaattaaatgttttataaatccggaatgaatttgggtcaacaaaaacctcagcagcagagcattttgggtgatcagtgcggtgctgggacgtagtcaaaaaccatcaaaatggacgttagtcaaaaaccatcaaaatggacggtagtcaaaaaagcatcaaatggaaaatttttgacagaaaattattcataatttcgcataaatggatcaaattttataatctagatatttttcgatagccctaagtgttatctattatcctgcaaaatt

SEQ ID NO: 30683 - DNA, 1538 bp, Heterodera glycines
tattcagtaattaattccaatgttgaaatgaatgggtgaattatttttatattcaccgcaacatcagtgaactgtttatagaaaaaatttgtccttgaaagtctgaaagccataattcatttaagccaaaactatggacatcttttaattaagagcacacaataattgaaatgaaaacaaagcacaaattgctgtgggttgcataaattatgattcagacaaattcattcccaacgagattgagcttaagtgatttatcaataatttttataaacggtatacattctgtaattaattccatttttaaatgaattgatgaatttttttgaaaattgaccgcaacatcagtgaacaatttatagcaaaaatttgtccctgaatgtctgaaagccacatttcatttaaaacataaatatgcgcattttttaattatggatacaaaataattgagttgaaaactgatcacaaattgccattgggttcataaatacgattcatacaaacgcatttccaaaacacgattgagctccagagatttattattatttttataaaaaacagatattcagtaattaattccatgttgaaatgaatgggtgaattattttaatattcaccgcaacatcagtgaactgtttatagaaaaaatttgtccttgaaagtctgaaagccattattcatttaagccaaaactatggacatcttttaattaagagcacacaataattgaaatgaaaacaaagcacaaattgctttggattgcataaattatgattcagacaaattcattcccaacgagattgagcttaagtgatttatcaataatttttataaacggtatacattctgtaattaattccatttttaaatgaattgatgattttttttgaaaattgaccacaacatcagtgaacaatttatagcaaaaatttgtccttgaaagtctgaaagccgtaattcatttaagccaaaactatggacatcttttaattaagagcacacaataattgggcgggagggaagtggggacgaccgcaattgtcatatttccccactgttccgagactcccgggtgtagagtcagcagatgtgtgtcaacttgtccactgttcgtctccagctccacccacgccgtgatctgcatgtcccattcgaggcaagtaaactcctcaaaccgtcgttgtcggtaccgccgcccatctgtagaagaggcaagaggctgttggaagtccgcaggcgttctgccagaaactggtgctacgcatgcaaaacgagtgtcccgggcggttgttcagctcggccaattcgggaatgaccgtctcactccggattgagttgcacatgttgccgcggcatgacccagccgatgggcaccgcttgaccgccgtcgtaattgcgtccggttgcccaattgatcagcccgatggggtaacgaactccccatgccacggctttcgagagcaacttggctcctgacaaaaatcgcccaaaaattgagcagaggcaagcaatgatgccgagcaaaattgcggctccaa

SEQ ID NO: 30684 - DNA, 1808 bp, Heterodera glycines
ggagaaatttttaaaaaaaaattaaatttatttcatttagtcatggatttacacacatgcacatgtggtgtagtggtttaactttctacctttcataatttttcgcctggggtcaatttccccacttggatagaatattcctcacattttctttaccattattttaattaaaatattaattttaaaaaatattccaacttttttctttcatgttaagcatcctaaaaacccaaaacttaatcaattggtcatttttttacaaattctgttaacaaatcgcattaaaaattacaaaatttttcccggcggcgcctatcggcaccgccggccctccttgtcccccaaaagtcttgagaaaaacgtgccgcgtaaaaagcggtgttgaaagcaaaaaaaggtcattgatttacattaatttacatggccggagaccccttcgcaaaattggaaaattggccgctgatcccttgttttgcaataatctgaattttgaggtctacatctgaattttagtgttctttatcctgaatttgaaaaaaaaacttggtcaccctcaatatacatatacttctgaacaattctaatgctaaaaaacaggcactcgcgcgaaaactgaataaaaattttgtatttggaaaattttgtccaaaaatttttacgttggaaaattatggtaccggtaccggtaccggtttttgcagtaccggtcagtaccggtaccggtttttttacaattaccgattaccgctcaactctaatttcaacttaaaaaatgaacactgttgaatttgttgttctgcggacaattatttttgctcatatgggcaagtgaaaaaatttaaatttaattaaaaacaaaaatattatttttacagtttcgccaggacttagtgataaagcacaaaaaatgttatccaccgaagcggagaaatttgctgcacttttaatgagcattttgcaggtgaatagaaataaatcacatgggtattcaaaaaatgatcaagaaaaaacaaatgtttaaattgaattcattttttccaaactttcaattccaattcccatggctttcgtctctaaattcttttccgttccgttcggactaattacggtggcgagggcggtgcccgacggtacgtggaactaatggcactgatcgaattcgttttcaactcgggcgctaaacaccgcgaactgctctcttacctgtccattgtcgttgatccgaacttcgattcggtgatgcccccgtgctggccaaagtgtgtaccaaaggacccgtcgaattgcaccaattattgccctattggaattgggctgaaacatttatcaccacgcgatttgggcccatttttcattgatattgcattaaagccgctgaatatttacatacctttcggtcattgacttttttctgcgtgcaacggtaaattcaatcacacaatttgcttttaggaaattagccatttcttaagtcattacatatatccgtttggatttacattaattgccatggtgttcaaagccgaaagactgaactttgccacaagactcgaacacttggcgatttggaaaacgaaaataaaatgaaaaaattattttcttctatctaaaatagccgaaataaaattatttttaagtttaccatttatcattttaacataagatattagaaaacatattttcaaagacactttaattttctgattggcccaaatgcttgacaattgtttttagaaaaagcttctcactgagagcagtaaccttttaaatgataccaattatatgatttaaatttaaaatttgggaaa

SEQ ID NO: 30685 - DNA, 1001 bp, Heterodera glycines
tcctgggaaatataattttaaatcaatgttttcaattgtaattgtgttgtaaatttccggaaaacgcgcaaataaatctgtcgttttacaacggaaatacgcgttttaggtggtgttttacaattgcaataatatctcctgggaaatataattttaaatcaatgttttcaattgtaattgtgttgtaaatttccggaaaacgcgcaaataaaatctgtcgttttacaacggaaatacgcgttttaggtggtgttttacaatggaaataatatctcctgggaaatataattttaaatcaatgttttcaattgtaattgtgttgtaaatttccggaaaacgcgcaaataaatctgtcgttttacaatttgccggaaatacgcgttttaggtggtgttttacaatggaaataatatctcctcaatgttttcaattgtaattgtgttttaaatttccggaaaacgcgcaaataaaatctgtcgttttacaacggaaatacgcgttttaggtggtgttttacaattgcaataatatctcctcaatgttttcaattgtaattgtgttttaaatttccggaaaacgcgcaaataaaatctgtcgttttacaacggaaatacgcgttttaggtggtgttttacaatggaaataatatctcctgggaaatataattttaaatcaatgttttcaattgtaattgtgttgtaaatttccggaaaacgcgcaaataaaatctgtcgttttacaatttgccggaaatacgcgttttaggtggtgttttacaatggaaataatatctcctcaatgttttcaattgtaattgtgttttaaatttccggaaaacgcgcaaataaaatctgtcgttttacaatttgccggaaatgcggtatttcgcaaaaaatactaattataaattcataaaaatggttccttaactttttgatagaaatggatgtcagattcgtgaacagcgacctcgaacccccccccccccccaggggaggcgt

SEQ ID NO: 30686 - DNA, 1751 bp, Heterodera glycines
  unsure (1)..(1751): unsure at all n locations
gtaatttagggtctatttaagggggataattactccggaaaaataaagataattgatttattacatataaatgtaaagttgaaagccaaaataatgctggaagataatttttggagaattttgatgagataatacaatgaaaaagtttatgtaaaatttaaaaaaaaaacacagtaaaaattaattaattttttgtgggatattattgcgatttaaatcacaaactcaaaaaataaataaataaatgaaaattttgagcaaaaaaaaaaaagacgacaacaattaacgagaattgactttctttgtgtgcaaaacaagcaaaagttatgtatttgtgggcaacggttgatgagagagagagaaaggtaattattttgaattcaaacaaaaaaaacaatgatagaaatatttaaattgtttttgttagggttgggacccaattgtccgatacccattttgaccctttactttatttgttttctcctttaaaataaatattattatttcgataggaaaattggtcgaaatttcgaaatataaattgtgtgcttgttcggaattggatcacgaccaaaggacatatctaacaaactccgattccggtcccgatttattgaagtgagatccctatcctgacccagatgaaatgaaaatccagacctccaattttcaatcccgacgcggggaggggataattaattgaaattctaaaatttgccactggcaaattattagcatcattataattagtaaattgaattaaaaaataacctcgcttaaaaatgaaatcaatcattgttaatttaattacagttttaaagcaaaattgtttgtttaataaaaaggaaattttttgaaatcaaaattttatctaaaaataaaatcttaaatatcaaacacaaccaactaaaagggaagcaagcgaacaaagatggaagaacaaataacaataattaaacatgacaaaatttatgaccggcaaaattttgggtggtctttttatgctttaatttacaaaatattttattacaataattaaaataaataaaataataaatattaatacaaaaataacttaattaaatgaaattttgcctatttatccatttcccaaggtcactattttctcttttttttaaaagaaaacaatgacgggaaatattttctgtttttttatttaaaaaaatttttatttgtcaaaataatgaaataagttaaattttatttttggaaaagagaataattaaaaattcattagtcatttaacaattaggtagcataattacaatgattagatagcgtaattagaaaatagatagcataattagaataattcggtagcataattagaatatattataattagaatttatttaaaaatatatataaaaaaaagattaattccgaaatttcaacggcattttttttattggtgtaaagtttttttttatgtttgccatttgttgctgagcaaataaaccaccatcaaaaggaggggattttctcgacgaaggtcacaccaattgctgttcccgagcccgccaattgcgcaacacaaaggcactctcagcgggaccatttttcaatgattttgggcaaaagttgacattttgtgactatcggaatgctttttttttgtttcatttaaaacggtttcaaagcttgttttaaaaattgaaaacatataaaaaaaattcaatagagaaaaattanaattntctaaaatttattttcggatgaaaatcaaaaaa

SEQ ID NO: 30687 - DNA, 1557 bp, Heterodera glycines
ccaagtgcagtttgccctgggtgagcatttggcgtccgtcagccgccttcactgtctccgcacattcgacggtcaccgtgaaaatggcatgggaacgactgctctgctcgttcatgcacgtccgtccggtgtgccctaaggcgggaaaaagacaaaattatgcaaaaatgggcttaagaattagataaatcgttaataaaattattattttttattgaattagaaatataataagcaacattaattagtgacaaaaaagcttacatctaacaataaacttttatttttaatgaattttttaaattaatttcactaatgtgtcaaaagatgttatttcttaagtttttcaagctatttagattaattagaaactatatttaggacatgggcgcagatgacactttatcaaaaccttttacaaaaatacgtacctatttaaaaaataaataaaaatttgtatatgcattaaattgccaattgattcgagtgaaataacccaaaaaactaaaacatttgcccaaaaagatgtccaaaaatataattatttttgaatattctgactgttggcgttgccgagttgcatgatgcgtaggcactgctccgcgctggccaccgtcacgttcagcaaatcgcgcacataaacgccaatgtcggccctctctttgatgtccagccgttgtgcgcctgcggcgctttgcttggccaacaaatcgcgcacctcctcgttgtaaatctccatgtaggagatgcggaccaagaagctaacaaaaaatgacaagaggatttaatcaatgaaaaatctggcagacaagttttttggtgataattaaaggggggagtgattgaagataatgataaggttgttttggtcatgaatatgcaattacttttggtcatttttgtttttctcaaaaaactttcttctttgcaaaattaaagggtccttcctctctttatcaacgaaaaacttcaatttctttgaccctcaaattgactttttgtcgacccctaatctaaacaattgccaaaatatgtcttcttctgggcatttatggccaataattaatgccaatgaggcagaaaaaaataaaatagacagccaattttagtaaaataattataacaaacttaaaaactgactgaccgtttgtcctggtggcatttggcgatgtggtcaaaaatgtgcgcaaacgcattttgcgtcactccgtccgcctgcccttcgccaccggcgccactcattgtgtacgttttgccggtgcccgtctgtccgtaggcgaaaattgttcctgaaaatgggaaataaatgccaaatgtcgagaagaaacctcaagtttggcaccaatcaacagaaaaattcagcggatattaaattccagagggaaaacaaatcaaatctgacccatctattgtttttgtgatgcaaaagatatggtaatactgccgatggtcccccctttttggaatataaatttttgttctaaaagtgttaaaacatgttaataggggttttagggtcgctgatcacgaatctgacattcattttgaccaatttcg

SEQ ID NO: 30688 - DNA, 1769 bp, Heterodera glycines
attagtaagcatttgtagtgttccgatacgtattcctgtaaaatttggtgagcccctgatcaattacaaattatttatggacgatcaaatttttagaaatttttatttatttttgcataatcaattcataaatatttttttcagaaaatgctctgaaacgcaccaaattttatttacatgctagtttaggcactctgatgctttttctatcaaaaagggagatgaataaatttttaaaaatttttaattcctttttaaacaggccaaaaagtttaggcttatcttttttttcagaaacttatcagaagcgccccaaactttgcagggatactgaaagaaaaagaattaacctgttttatcacattagcttgtcatcagtttttataaaaaattttcaaaattctgagtctcctattattttatttttttttcaaaattttgaagggcggagggggggcgaaggcccaccacgaggccgcgaagcggccgagtgagtacctcggtgcatgaaaattattaaggaagagagttcattatttgtttattttttgcataattaattcataaatattttttccagaaaatgctctgaaacgcaccaaattttatttacatgttagtttaggcactctgatgctttttctatcaaaaagggagatgaataaaatttttaaaaatttttaattcctttttaaacaggccaaaaagtttaggcttaacttttttttcagaaactgatcagaagcgcaccaaactttgcagggatactgaaaggaagagaaataacctattttaaatattatctagtcagttcatttaaataatttttatccaaaaaattttttttttgggttttcggggcagtccccctgaaccgatgcgcccagatttatggggagaccgaatccttccggaatagcttcactatagcctgtactttaattctgcgttggatttttgctccccataattgtttgagtaccccaaacggacacttgaaaaaatcgatttatttttgttttcggggcagtccccccgaaccgatgcgcccagatttatggggagaccgaatccttcgggaatagcttccctatagcctgtactttaattctgcgttggatttttgctccccataattgtttgagtaccccaaacggacacttgaaaaaatcgatttttttgttttcggggcagtccccccgaaccgatgcgcccagatttatggggagaccgaatccttcgggaatagcttccctatagcctgtactttaattctgcgttggatttttgctccccataattgtttgagtaccccaaacggacacttgaaaaaatcgatttttttgttttcggggcagtccccccgagccgatgcgcccagatttatggggagaccgaatccttccggaatagcttccctatagcctgtactttaattctgcgttggatttttgctccccataattgtttgagtaccccaaacggacacttgaaaaaatcgatttttttgttttcggggcagtccccccgagccgatgcgcccagatttatggggagaccgaatccttccggaatagcttccctatagcctgtactttaattctgcgttggatttttgctccccataattgtttgagtaccccaaacggacacttgaaaaaatcgatttttttgttttcggggcagtccaggcgaaccgatgcgcccagatttatggggagaccgctgtggaggggaatagcttccctatagcctgtactttaattctg

SEQ ID NO: 30689 - DNA, 2405 bp, Heterodera glycines
  unsure (1)..(2405): unsure at all n locations
taaaaatggagaaaaatcaggagaatnntatgggttttattgggggtttttatcttctaaagaaanaaagtatttccagaatttctggaaattttcgatttttcagaaaaaaatttatatctcggttcagaaaagtcattagggaagagtaaaatactacaaaaatccgcaattttttgctctattatataaattttatttcatctttttatcacttttttgagagatgttacaaaaataaaagtgattttgggattcgggaccaaaggggggtgggtgcacatgatttttgagtgggaaaatttttccatcaaaaaccatccaaaaacatgtctttaggggttatttgggccgctgatcacgaatacgtgatcagattttacttttgacatagtcaagacctcagaatccctgtgtgatttgggattctgaggcatcatttttggggggggggcgaagttcgagtccggacggtgtaaattattttctttgtattttttgggttaattttcattacttttaataaatttaaatgtttggttttattaataataaatttttttagtttaattaaattattttttgatgaataatgattttcatttaaattatttattatatttaatcaaagaatttcagctattattttaaaatttaattgtaaaatttttttcatttcaatttaaataactattcaattattatacatttcataatttgtttttcattaataaaaagtgtattatattttaaaaaatgaaaaatataacacatcgattttttatctattttgaataaaaacaattccttaattaccgtaaatgctctatttgaatgcccactttctaatcactgttgcacctcttttaatctctgttgtacctcttataatcactgttgtacctcttctcatcattgttgtacctcttttaatcactgttgcacctcttctaataacagtttacctcttctaatctgatgtacctcttctgatcaccgttgtacctcttctgatcaccgttgtacctcttctaatcaccgttgtacctctcctaatcactgttgcacctcttctaatcatttttgtaactcttctaatctctgttgtacctcttataatcagatttgtaccccttctaataatgctgtacctcttttaatcactgttgtacctcttctaatcactgttgcacctcttttgatcactgttgcacctcttttgatcactgttgcacctcttctaatcactggtgtacctcttctaatcactgttgcacctcttctaatcactgttgcacctcttctaatcacagttgtacctcttctagggcgcgaagtgcctgcccaagcccaataaaatttgaaaacgggtgcgaagcgcccgtctgagtccaacaaaaattgaaaaacgggcgcgaagcgcccgtctggccaaaacaaatttaaaaaacgggcgcgaagcgcccgtctgagcccaacaaatttaaaaagggaaacgaagcgccctttacctctatttgatcaatcccaaattgcttcggatccaacaattactccacaacccataaataacgggcgcgaagcgcccgtccgactcaacacaatttaaagaacgggcgcgaagcgcccgttcgaggacgcgaagggcgcgaagcgcccgtcttgagcctcgatgtggacttaaagcctctaataattttttaaaaattcaaaaaaatctctccaaccaaatcgatcaatttgaatcgcttcacagtctaggtagcgaagctcccaaagcgcgaagcgctttttcccagctaaatagccgacggttcacgcacccgctagttaatatatacgttatattgacaaggagtttcgtttcaaaaaacaaaatctcccggccgaaggccgggagcgccctgaaagtagtggaaaggtcttacaactttttgaggagaatccgggaaaactatagagaaaaattctgcgcggacgactgagtcccggggaccgatttctcattttttcgtgcatttgggggcccgtaactttttttctaaaacccaaatcaaaaaatgtctgctgtgagggggctaagttgaagtgttttctaaaaaacaaaaaaaattccaagcctctatctgcaataggaaaggctgtaggttcgtggactttttcagtaccaactttgtccagttcagtcccggttgaataactcattagggtttgatctgggcggggagttaccagcagacttattgtagagttcaatgagctggatttttccagtttttaaaatttcgaaaattttcaaaatttttcgagctaggctnaaaacggnttttccgggtttttgaattttaggaatttttaacgaattttcccagagaaacggagaccacttccannacatagttttt

SEQ ID NO: 30690 - DNA, 1339 bp, Heterodera glycines
tcgtgcgagtgaaaagcaaaaaagtcatgtgtaagaattatctcccaccttttccaagcagtccatccatttctcatcctgcacgcttctctcgagatcctgtcgcatttttgtcagttttttgatttttttatagaaaggaaagcattgtttgtgttccggatttaaatggagacactcgcggatttgacccatagcattctccacgtcgccaatctacagaaattagcacatggttttttgatagccaaatacaaaatacctcgtaataaatctgactcaattccaaaaaagtctcagtagaatcaggcacaagtctagcaactgctcgaatgtccgctattgcattttgtgtgtcaccacgagccaaacgacaccgactccgtttcctgtgtaattcggcatcccattggcagtgctagacaaaagtggaagtaaaaaataaaatttatattttcgagacctcaattgcgtcgttgaacatttgctctgccgagacatagtctctgctgtcaaagtggcgtagcccatggtcgatcaatgtctgtatgtgattgattttttgcagccgttcatgagtttcagcattgtcaggctcatgtccaagcttaaagaaagttagtcaatgaaaactaaataaacagaaaaaaaggaaattcacagcaatttcaaaatccgcttgagcctcttttagatttcctttcttgaacaataaatttgctctctgaattcgacccttaataagaaaaaaagattaattattccttttttcaattaccgctacaaaatcaggcttgagttcaacaactttgtccaagtcgggcaaagccgcgttcactttcccacttgccaaaaaaacggtcgccctgcgataataaatttgataatcggttggatccaaagcaactgcttgatgataatgctagaaaaggaagtttaaaataacatatcgtctaaaaaacacctgaagtgcttcttggaattgtcccttagacagccaatgttttccttgttcaagatgtttctcaatttctttgcgttgcgaagatgctaaaaaataattctttttttggtttgttataattaattatgaaaataccaaaatgaataagagtgaacgaaataaaagacaaataggaaatcggaagtattggaagaggtagaccaagaacgccaagaggaggatttagccactcgtaattgaaatttaccatatctaaaaagaaatcattaactaaaaatgaaatttacatttaaaaaatgccattaaattgataaaggaaaagcctacatcaattgcttgataggatacgtaatcgtaagcataatcgatgctaat

SEQ ID NO: 30691 - DNA, 1595 bp, Heterodera glycines
  unsure (1)..(1595): unsure at all n locations
ccccccccccccccccctttctttgttttacccaaaacgtagcgttctttgtcctccgccgctttctctccccatttggccttctcggattcgggcaattggcgccattcatcgcctgaatttgctgggtgtgttaaacggcaaattagttttgtgtcattttatgccggcatggcactggcaanncccatcgattttcgagcatccctcgccagttctaagccagttaaaatcccatggctaaaatggtttttaattgcttgcacgacctgcgatgacggccaaatccggttgggtcatccccggcttgtagaaacggtcacggttttcgttcatcctaaaatttttgtttcatcaaataatccgttacaaattaatatttcacaaaacaattggctacagtaccaaagaaagaatgacgattgggcgggcttcggctcgtcggtcatttttgaaatttttaaagaaggaatttgttaaaagctctaaacatttataaaaaatcaggcagaagaaaatgaaaatgcataaattgatgaatttttgtttgtgcgcaatttgcccatttatacgccaatttcaactgccaaagatttttggttgcttggaaatgccgcgtaaaacaaaaacaaaaaaggaagaaatacataacaaataaacaaatgaatgatgatgatccacggattttgtaactgacaaatgaagaaaagggtttcctaagaaaacacccgccgacccttcgccggtggcgaattgtcgggggaaaggggagaaagggggggggggcatcaaccaaagatcaacacatgagacgatccaaaagtggccacaaaacatgaattgatcaacggttctgtgggggatctccgaaaattgggaaattagctaacggtcagctgccaaaatgtgcgagaggaatattaaaattcataaccaaaaaaaagtgaaattaaactctgctgctgcatgaattaaaaattttgtctaccgtaatccacaaatggcactattgtaacaccagtccctaaagccaacttcactcactttctcctccatttcccctcggggaaggttttgtagcactcccaaaagtttgaacaaaaaatgtttatgaatgatggaagacaatgacatggccatgacttcacagtacaaagagaggttgatccaaatggatcaaaaggtgatcatttgttcctcctccctcttcgtcttcattttgcaatggccttcagcggcgattgggaggattgtctacctgaaaaatcaaaatttatataataaaaaatatttttcaattttaaattcacacggaacccatggatttttttacctcatccacaactgcaccaacggcacttgccgttgcaactccggcggcaacggcgccaattgccttaaaatattggggagttaattttttggaaatgatttttgtttcgacttcagttggcgcccccaccgccgctccaatcgctgcagccgcctcaaaaatacataatttgcttagatttttggtttgttttcgaaaaaattcacctgagcgggcgcagacgcagcagtagcagctgccgccccacagccattgctgactc

SEQ ID NO: 30692 - DNA, 806 bp, Heterodera glycines
atttcgttaagtttcaaaaaagttatggttagaggaactcaaaaaaccttgggtttcgagcatttttcgagcatctttgtcgctaactcttttgaaacttgatgaaattttttgaaattttgtagactaatagagaacacatagggctatcgaatcatatcaagaaataaaaattcggttgcttttcagctaagttacaaataatttttcatcaaatcataatgatggttttttaagtaacgacatagcaccacgcaatattgttgcgccgcgaaatttgcgctgcggacatttgcgtctcgacacttgcgccgccaagcaaaaatggatatttgagccgctcactcaaaaaaattttttttacgattttttaacgaattttactcaaaatattgtgcaactacaaaaaagcaattaaaagaaatgcaaaaaaaaaaaaaactaataacaacgatagacaccagggatatgggctttcgcgtttcgctttcgcatatttcgctttttttggtactttcgagtttcgcattttgtcgcgaaacgcgaatattacaaagctaagaatgagggatgagttgcccctaaaatttttcaaaatttgataaataaatcgactaattttcagtgaaaacatgtttaaaatggtcaaaatttccaatttctccccagtggcgtcaatcggcaccgcaggacccgaaaaactcctatttttaatagtaaaatagtccaaaaatcgcaaaatttgatcattttttagtgaaaatctgttaacaaattatgttcaaattttcaaaaattttcccggc

SEQ ID NO: 30693 - DNA, 1641 bp, Heterodera glycines
  unsure (1)..(1641): unsure at all n locations
ttatggttttgtcagcggaagcggtcaaaaaattaggcacgggtttggcgggaacaaccgaaaacgnnccacacggagcaggtatggccggacagaagtccaatgccaacttcggaaccatcctcgaccagcaaatcggcgacgggccaaaccaaagccatgtgatcctcaaaatgggggggggggggttcaatgtaatggagtaacaaaacaaaaatgcgctttttggagaaaagtctgacaataaatgtgataacaaaggtacaacatacccatgaaccgctcatgagaaggcccgtgttttcgtcataaagaagtgtacagactgaaaaataaagtcaataggaaattggaaaagtaattaccattcgatttgtgtccctgcagcactttcagcggttctttgaatgcgtttgatggcgaaaaaattgcaattgagccatccttccgaccgacaaatacgagaaaacctttgacggatttggcggcaacagcgacagaatttatcgagaggcaatccttttggggaatcgtttcgcaattctcgtaaatgtcactgaattagggatgggaaacaattaaaaaaatatcgaagtcaaattaatttccggcatttacagatttaagacccccgatgcttacagttgggattcccaaaaaaaccaaagagggacctttaggctttttaattttttgtagtaatagatgaaaacttgttccctgttgttttcagaatcgctgatcagaatctgatatcaatttcgatcaatcccaaactcgtatttaaacaaaaagtcgaaattcttttttcgagttcgattttcaaatttagattagggattcaaaaagttggataagttgtaaaagtgaccaatcccaattatgaaatttgggtaaaaataattgcatattaatattaacatggcaaaattaaaaagaaccgttttctccaaattttcattagtccgtcccttccgccagtgaccaaattgccatccggcatttccgcgacacatttggcatcgtttggctgatgagcctcgataattgcgctgatagtaaatttttccagcaaatgttcgctgcttttgcttgtggatgcttgcaagtcttgctgtccattgggaagatccatcttagagcaaaagtaaaaaaaattatttgttctccttggttttatgatcatcaaatgacaaaatttggttttttaaatcatctttttcattaaggcaagactaatttagattggtattgataatttaatttggtaatgaataaaaaattcaaggattaagagaaaaacaaattaaaatttgaaaatcatcatttggaatttgagtgcattaaatttaaaattttgaataatatttaaaatgtaatgccaaaatttatttaaataaaaaattatgtttaatttaagttctgctttttttaaactcttagttaatttggctcatgtgatagtccgtgttttgggatcatctgtgggcttcattttaacaacagattctaaccgccagcgacaccaactgggtccgggtttaggttttgaattgatagtgaacataaaaaccgttattaaaaagtaaaagtcttgttttacacaccattgttttaattatttttgtttgggactctaga

SEQ ID NO: 30694 - DNA, 1073 bp, Heterodera glycines
accggcaggcaatgatagctttaatctgcaagaaattagattggcaataagtggttgtaaaaaacttttgggtaatgaattattttttgaagtgagtcaaacaccctattagtgctttgctgtgccgagaccggcaggcaatggatagctttaaatctgaaagaaattatattggcaataagtggttgtaaaaaacttttgggtaatgaattattttttgaagtgagtcaaacaccctattagtgctttgctgtgcggcaatggatggctttcaatctgcaagaaattagattggcaatatgtggttgtaaaaaacttttgggtctggaattattttttgaagtgagtcaaacaccctattagtgctttgctgtgccgagaccggcaggcaatggatagctttaaatctgaaagaaattatattggcaataagtggttgtaaaaaacttttgggtaatgaattattttttgaagtgagtcaaacaccctattagtgctttgatgtgccgagaaccggcaggcaatggatggctttcaatctgcaagaaattagattggcaatatgtggttgtaaaaaacttttgggtatggaattattttttgaagtgagtcaaacagggtacatgtcaactcgccgacgccgactcgccgatggtcgactcgccgacgccaactcgccgatggttgactcgccgacaacacgactcgccgacgtcgactcgacgataaattgtgcaaaaaatcgtggaaaatttaattttttttaatttatcgaaaaagtcaaagacggattgccaaacataataaaaaccaaaatgaagtaatttttgcattgtaaaaaaataaattgctgtatgatcagagataaaaacgcgaatgcaaacaaaatttttatactggcttgggtttttggctttcatttggctacaattttaatgtttcctcaatttttttttgcacatcattcggcgttggcgaggcgtattattggcgagaattcaattttttcaatttttgtctttttatctaaatagggcaaaattaaaatttcgttttaaaaaattaattttttt

SEQ ID NO: 30695 - DNA, 1146 bp, Heterodera glycines
  unsure (1)..(1146): unsure at all n locations
tcgctttcagtaaatgcatttaatcactgcaaaaaaacaaatattnaataggatgcgtgacagccaaaaatactgagccgcccatcgttctattaatcaaggacattcacaaagtttcggaagatctcttccgaccatttgactgcaccagacaaaatgacttcacgaattttggttattggttcaacaaacattgatgatgctgaggcgcataatatggtttttgacatgtctatttttggcaaatgtgttgaaaccaatcttcccatattctcggaacgtgttcaattagtcaggtaattggcattttgagtttggcatttattttttctacctctacaggaagtacgcattggtaaaggagatctacctcacggaaaatgatgagaaagaacttgctcacgacacaaattctctttctggattaagtaagcaatcctttttattaaaatctgcttctattattcagtttataccgcaaaaaatatattttgaactttatcgaaattaacatttataactctaaatcgtcaaaatggtttatttgttagatttttcgagtaaaattttatggatttagtagcttttttaaatcctgttttgaaacttgaaattgattctgattcgtaatgcaatattctgaatacgtgaactttatatgaaaaaatattttttgccttttactgcatatgagcattaatttgaagagctcgagactacttgtgcgcgttaatattggttccagatttccctcaaatttaggtttgcacgaggcatgccactctgcagtttcaatttgttcatcttcacaacttacatacgtttcagcgcttccttcattagggagattaggacacgtacgctataaatgtttatgtttttgttaattttattgccttcttaggtaatggcgttgccggacattgaaaagaagactgtgaggaaaattgatgtcttgaatgaaattgactatctattagcggggtatattggagaagaattgtttcttgaaaataaggaacgagtaacaaccggttgcagcaatgacctccagagggcgaataaagtaaaacaaatggaaaaataggaaactctctaaatcaatttaagttggcagaaaattatgtcactaagtggggattctcg

SEQ ID NO: 30696 - DNA, 2096 bp, Heterodera glycines
  unsure (1)..(2096): unsure at all n locations
gccgcttttgcattctttccgcaatgtgaccgttcccttccccatttttcacacgtcgagtttttgaaaccaccagtctttttgccagtgacttttgcctccgcatgaatagcagggctgatcacgttggtccacttttcctttaggtgccgttgaatttttcggcaggaaattttggcctttgtggctttgctgcggcttcgttttgggcttctgcttgtccttgatctgctgcggtttggctcggatggcactggtgctgcagggatttgagccgagggagagcgcgctttcctttagaatttggtatttgcggcactcttctcctagctcttgcagtgaggttgaccgtccgctcgttcgactgtcttccaaacgctgaaggcatttttgcctcagatcggtgaattcgtcgcgcaatgcaatgatgagaatcatgcatttgagctcctctttgctcagcgaaagatctgcgttttcgcaggacgagttgatttgtgcaatcaaacttggaacgtcctgttgcgcttcttgacgaatttggaaacaatcaaaacgacggagaaacaatgatcgggtttctccaaacaatttttttaattttgcggtcgtctcatcccaattgaagtcgttctgcgtctttggtgcgatgctgtcgcagtaccgcttgtactccgcttcgcccaatttgccaatcaatagttggacttttgactggccgctgagtgcttgtccatcctgggcgatggtctgcccatagcgcttgagccaaacgtcgtatgtatgccctaactcagggtcatactcaaatgtcgaaaggcgcgcatcgattgatgtcgccaatgcagcagaactgttgttttgttccgctgatgccttcaaaacagcctccaaaatcagtttaagctgattggggtccatcaaatttggtgattagccaaccggcttttgtcgaatttgtcaagccgactcggcttttgttgtattttgttgagagcagtcccggctttagaagaataagcagtttcttttcactgcgttatgacgaaattgacgagccacccggcttttgtcgaatttttgctgagccgacccggcttttgacgaattttgatgagccgaccggcttttgtcaaatttgatgagccgactcggctttagacgtctagcagtttctttgactgctttttgaggaatgtgtcaattaggctttaaaacaattcacagccaatcccggcttttcggtgaatttgtttgccgtctcggcttttattccttaaaacaaaatttgatgcctttttctcacccgaagatgtagagcaggtcctttgctgactgcgccaaattattgtgtatttactacaacaataaaaatgtttggtcttcgaccaaaacaaatgttgtcaaataaataaataaataatttattaatggaggacagcagggaataaataaataaaataatgaaatggtggaatgaatgggagaatgcccggagtgggggaaagggagacatatttatggggctggtcaaggggcggggcgagagacaataagagagggagtgaaagggaaaatataatcaataatcggtgtggtcccttatccaacaacaccaaaacggcaaaatgccaaaaaaggcatttaacgaaaatctcgaaaaaggcaaaaaaaaaaagaagaataataaaagtcaacgtaaaagcttcaaaccaagtggaaaatgtgttttttatgctcaatatatcggaactaatgcgcagaaattggcatatgccctcaaattcggtctctaattataactttatttttcattttttcgacctcgttactttgtgtggcagcccgactcaaatgactttgtccgagcagactttggcataatacgcagaaccgaagagggttcgctcattttttaggtctttcccttacaatctcaacaaatttagcgggtcaagatttttcctaatttgccaaattttactttttttcaaagttaatatcctaatacatatgaattnnntgaggagctttaggacaatcaaattttatagacattgatctngagtaacggacatgctaagcgttaatattct

SEQ ID NO: 30697 - DNA, 928 bp, Heterodera glycines
aattttgaagaggctctccggaacggattagcatcgcgggttacgagatagaaaattgtcctaaaaagagatagccatttttctgagaattaattcacaatttccgcagctcttacggtaatggaaaaaattttgaagaggctctccggaacggattagcatcggggttacgagatagaaaattgtcctaaaaagagatagccatttttctgagaattaattcacaatttccgcagctcttagggtaatggaaaaaattttgaagaggctctccggaacggattagcatcggggttacgagatagaaaattgtcctaaaaagagatagccatttttctgagaattaattcacaatttccgcagctcttacggtaatggaaaaaattttgaagaggctctccggaacggattagcatcggggttacgagatagaaaattgtcctaaaaagagatagccatttttctgagaattaattcacaatttccgcagctcttagggtaatggaaaaaattttgaagaggctctccggaacggattagcatcggggttacgagatagaaaattgtcctaaaaagagatagccatttttctgagaattaattcacaatttccgcagctcttacggtaatggaaaaaattttgaagaggctctccggaacggattagcatcggggttacgagatagaaaattgtcctaaaaagagatagccatttttctgagaattaattcacaatttccgcagctcttagggtaatggaaaaaattttgaagaggctctccggaacggattagcatcggggttacgagatagaaaattgtcctaaaagagatagccatttttctgagaattaattcacaatttccgcagctcttagggtaatggaaaaaattttgaagaggctctccggaacggattagcatcgggg

SEQ ID NO: 30698 - DNA, 1022 bp, Heterodera glycines
tttcggaatttccttgcctaaaatcacatcccaattgaagcatagagcaaaatgatcaaataatataaagacaattttctgaatggcctaaacacccaaacatttaaagcagcacaacacctggtcatctttggcctccttgtagccgatcacgtacagtccaagctgcactccgtagagcgcgtcgtcactgatgtgccatgtctggtccatgtagttcaggtcggggttggtgaagttgcgcgggtaccaagtgatcggcatcacctcaaaaacattgccattaaattcattcagtgcagtgaaatacggtatcagactgagagtattacataagttttatacggtattttgacaaggatttgtcaagtttatacggtaatagaatgaagttagttgttagtacggtatcagactgagtcggcggtgttaagttttattacgctattttgtctactcgatatggtattagaataagagttggttgttaaatccagtacagtatatggatgagttttgttttttatacggtatacgactgattttatcgtttcccttgaccaacagtatagcctacctggtatggcatcgggtttttgtaccagtcgtaaatgttgccgatgtccaatcgcattgggtccaacgttggaggcactgtacgaaatattgaaatttcaattaaatttaaattaaattcgcatgccgaaataaatgtatccaacgaatgctctttcgtcatttgcgccctgactttgcggttggaaatacacagttttggtgccccagtcgtaaattttcgggatgttgcaacgggccatcgccggattgagcacagtgcaagaagcggtctgaatttgctcagaaactgatgaaaacgccataagctttctgatcaccaaggctggaaaaatgaattgaaaattcttccaaaaattgagccgaaaataaatagaaaaaaaatttgaagcgaaatatgataataatctttaaatgtaatattgattgataacatggatcatgat

SEQ ID NO: 30699 - DNA, 1274 bp, Heterodera glycines
atttgtccattccaattttaatcatattgtcgctttcccaatacattcaaagatgttcattttttatttcttagattcccttagattttcataaaaatttacattttatttatgattttttgttaaatttttaacatcccccaagggttaatggaggggctaaaatgccaatccccagggttcgggaacagagttatcgggaaacagggaattatacctcaatgccaagcaatgcaaaaaatgtatacttataatttttcattcaaagggatactttttataaaataactaaaataataattgaaatttattaaatgttttgaaaaagcaccattttgctgttttcgctacttcatttttgacgtgaaaatgccacgagttcctgtattaaatgagcctatttaattttctagacaaatttaccagctcaattagaaggaaaatatgaaaaacattaaaaaaagaatcaaaactttcatattgtgcttaattttaagtaattttaaaaaatcgttgaaattttgttaacccaactttatattaaattcgcgaaaaaattcaactgatttgcgtatattgttgtatattatttgtgcattttattagtcaaaattttaataattttcatttttaagttccatttaaaatgcgattttctgtttttatttttgcattttttatgtttttgcgttgtttcgacagcaccacggcgggcgtctgctttagcagtatattttttttggatgatcaaattaatttaaagaaaaaatatttaaagtaacaattatttataatttttgtaggccaaaagatcaacaatctatgaaattatgaaaaataaaaatttttgttaatttaattaagaaattatttaggccaaaaagaagagcattcaaatccgaatcgaagacaaagtaatgaagaatattatataatttatttataaaaattaaaaaaaaataaaataatctgtatcagatcaatttttagcgatgcaaataaattttcacaagataatgatttaatcttttctacgccagtaaagaattttgaaaaatttaaaaatcccaatgccttttgttgacccggccagactaaaaaatattattttttgaaatttaacttttaaaaactgatattccctttttttcactttcatccaaaacgaattatttaggtcaacaaaatgaacaaaatccgagttcaaattcttcgagttcaagtttttggacttcaagtaatccgacgggttcaagttttgcgagttcagagta

SEQ ID NO: 30700 - DNA, 850 bp, Heterodera glycines
aactttttggcctgtttaaaaaggaattaaaaatttttaaaaattttattcatctccctttttgatagaaaaagcatcagagtgcctaaactaacatgtaaataaaatttggtgcgtttcagaaccctttctgaaaaaatatttaagaattaattttgcaaaaaataaataaaaacgaaagactcagattttcgaaaaattttttagagcaagctagctcggcgctcatttcagtgtaagttagtcctttaccggggagtatccctgcaaagtttggtatgcttctgctcaattagcaaaaaatatgagtgatcaaactttcactaaaaagttaagcctaaattttttggcatatttaaaaagcaattaaaaaatttttaaaattttattcacctccattattgatagaaaaagcatcagagagccttattaacttgtaaataaaatttggtgcgtttcagaaccctttctgaaaaaatatttatgaattaattttgcaaaaaataaataaaaacgaaagactcagattttcgaaaattttttttgagccagctagctcggcgctcatttcagtgtaagttagtcctttaccggggagtatccctgcatagtttggtacgcttctgctcaattagcaaaaaatatgagtgatcgaattttcactaaaaaagttaagcctacattttttggcatatttaaaaagcaattaaaaaattttaaaatttaataattttcctgcaccgaaggtactcactcggcctcttcgcggcctcgtggtggggccttcgcccccccccctcccacgcccttcagagcacgacaaatatttcaacaaaaattttgaaatcat

SEQ ID NO: 30701 - DNA, 1881 bp, Heterodera glycines
agaagtcctcaaattttagcctaaagaattgacaaaagcctcttagaatgaaaaatttcaaatgtttttaaatttgaatgagtttcagtgatttatattaaagccttttgaattccaaggaataaaaaatttcaaaaaattttaatctttggacatttccaaaaagaatataactcttaaaaaattggaactttatgccaaaacataaaaaaatggaaattttctatttttatgctcaattttcttcaaatttaataaatttagctttatttagtattttttttcttctaaaatgattttaaagttaattttttcattttaagcaaacaaatatttaaacaaaatcaaaatagacacctttaagctgtagggaccaatgattacccatccggcactggaaaagacaaatggtcaaattacagtataataaaattaaaactaacaaaagaaatccacagtagataattatagcacaaactaagaagcgcaaaatggacggcaacgatttgcgcaatgtcagaatgatgacctttaaaattggagcaaaagaatatttgacttccaattaaacacccgataaattcatttagaattggggtaattggtaattattgtgtaattaactaattatggaaatgcttttcaccacaacaaatacaaagaacggacattgtattgggagaagaaagtgaaatagcggagtaggccaaagaacaccaggaacacgccgagaccgagcagtacaccggtgagcgtaaacagtgccgagtcaaagtcacggaattggatggacgccttgcagacggtgccggcgatgagcaacaggtcgttctgtttgtatattcaaaagttaggcagaaatatcagcgattttctttgtctgatcaaaagcatatatataatgtgcaaaaaagggggggaaatgaaaaaatgcctatatcttaacaaattcggtaagatttttctaatggcggttcgttaattaataaattttcaaattttccaggcagcgcttgtcacattatcaccgcgccgtaccctcctctttcccaatggtttttttgaaaaaagcgcggtgaaaaatttcagggtattaagcccatgttcctttggttcataggtgaagaaggggtgcgccagggcgaggcccatacgacgaacgattggcgcagggggggggagtgtgtcaggaccaatttttcgcacgaatgttcccaattttctccggcgacgaccttttttttgctatttaaaggagttttgggtgtgccggcaccagggctgggcgcaactggcttttcaattacggaaatccgcaatccgcaattgcggagattttctgttacggaaatccgcaatccgcaattgcggagattttctgttacggaaatccgcaattacgggggtccaaaaaccccgcaatttcccgcaatccgtaatcagcaattttcaaaaatcaattttcgtcagaatttttgaatttttttaaatagtgaattaatgaaaatcaaaaaacagattttcggtatgtatcttcttattttgattcaatattacatatattttttgtgtctgaaaaaattaattctttttggatttttagggttcatttttgaaaattttttgaaagtctgatcattataattggatttatttatgtatattgttatttcaattttaacaaaacaaattaaaaataattaaatctgatttttaattgataaataaatcgaaatacgggtagccctttaaataaagaatagaaaattttttataaaaataatcttacaagaaatcgtctcgaaaagtaatccaaaagtcaaattacggatcaaaattgcctatgtaggcaaaaatccgtaacccgcaatccgtaatccg

SEQ ID NO: 30702 - DNA, 1012 bp, Heterodera glycines
taattgccgacgaatttgcgctaattagtgaaaatgccctacccagtgtggcattttgccaaacctttccatcgcttcgcttctccgattcgattggcgcttttcctcccctccaaaaatgagttctcccaattttccacccaataaaagggcatttctgtgcgcaaaattcattttcagttcgcattcgctccatttggcgttctgttccaaagtgtccgttgctcgcaccgtcaaaataaccttcaaaaattggttcttttgttaatttttgagcttctctccctctaattcacctcatttaaattagttggcacttccttggccaatttcaattcgcctgtggtgccattcaatgcgaataattgcagtccgttgccagaatgaagggaataagtcagctaaattcacattttaattagcgggcaattaaattgattagccattcagtaatgacctgcccaaattctccattttccgaattgaccgcctcaaaaatatgaagcaaaatgccaaccgaaaagttttcgtcaatttgtaaactctaaaaatattattttttattttaaaataattttgtcaatttggcactttttgttgtttttctccgtcacacgaaataaattgcggtgccttttccttttccgctttccgattcatcttcaaaatggtaaagtcggcagcatcagccgattcgaaaagactggccgaaatggtcaaagtgaaaggagaagcgagtcgctaaaaaggctaattagagaattaattaatgatggaatgtttgcctccggcaatggacgagccaaaatgacatttccgctggaagggtcgacgcggaaaacttcggcagttgccgcaatgtcatcggaagaatgaagcgaatattggaggggcgaaatgctaaaaaataattaaagaaaaaccgaaattgcaattgcattaaccgatcgttttcctcttctttgtcatcggacatttccaatttggcatttgcttggaacagccaccaaat

SEQ ID NO: 30703 - DNA, 1860 bp, Heterodera glycines
  unsure (1)..(1860): unsure at all n locations
ctcaaatatttcntnattaaataaatatntaaaattaaaaactctcaaatattacatntaaatnaaatnttaaatnaatnnanaaatttntattntattnntcncntatatncatatncntatncatatncntatnccttantcattncttaattattnatnaatatatttacatntntaaaaatnaaaattaaataattttntatattttttactncctatnanccaanncnanaaaaacncatccattcacaaatatattaanantnaaattcananaaaaaaatnatnaaatnntnccannncacacataaaattttatttnctacnttacaacanatnctctnacatttaaaataatcattccnttaatatcaaatttattgaaataagtaataaatttctaataagtttttttaattattttttttacttttattttaaaataatgattaatacaatggataaaaaagcaattatttatcagcttataatgatgaaaaaattatttttatttttgtatatctaatgaaatttttgttaattggaaattgttcagttccattgaaaatttgtttgtctcaaaataaaaagaaagaaaaaaaaagttgaatattagtgattttagaaacagttttaaaatgcatataaaattttaagttttcttttcccaaaagtaatcaacgattatcctaaacattatcatcagtgcccaattttttaggatttcatctatttttttgcggatagcttatggtgagataaacaacatttacttcgatcaattttctatttcgagcgactttttagaaattattttcaactatttttgcttatgaaacttttaaacaactattttggcttgtaaaaaaatattttttggcaactattttagcatttttcagtattttagcaactattttggcagtttttcagcaactattcaggtacttatttcgcgattttagctcctaaaaatccgggccctgaatatcataattgtattataatgaaagttgttatatttatttgaaaaatacgaaaaatttttttttaataattggtatgtctccattaatgcaggttaaataaataaatttagtggattaataaatttttccaataaaatttttatagaatagtaaaattttggcgccaatagaatttttgggaaactcggacgagattaaaaccaacaattgagtaggaattggcaaaccaaattacatcgaaataagatttttcagaatttttattttcttgaagaaattttttctcaaaatatacaaattcaggcaatggtcaatttgttttttacagtgtaaacataatattgatcgcattttcttataatttcgtcttaaatgccgcaatttgctcaagaattttttctgaaatttatttaattataattttttaagaaaaatatgaaaaaagatttttataagaataataagtgctaatttgtcattaaatttttaaatttgaggatattcaaaagtgaatttttcaaaaattgaaagcatataaatattaactcgcctttgaagtggtcaatgttgttgtccttcattaactgcttgaactcctcggtacagtacactttctgtggtgttgccaacaaattggcacttaagtaaccccggtanatgtcgaagtacgaattttgcaacgcttgctcggcacttgtccgttgtgccgggtccaacacaagcaattgaggagatcaattggcgaacattttcaactaatttaaaataagtaaagtatcaaacattacttaaattttttaaattttatttttcttttgtcaaaaatctcattaattaaattttttattaatttaaaatttaaacatat

SEQ ID NO: 30704 - DNA, 1587 bp, Heterodera glycines
gggaatttgcttcacagatttggtacaatatcattattccattttcttgcccaatttttgagtcattttttttttttttgcaaatttcgataccaagctgagccttttaaaacatttaatataataccaagaaaatttttctgaaaattttcaattcattaattcattctaaatatatgatcgaaaacattttttaaatttttttttcataaatataaaaatcccttttatgccaatcactcaccaaaaaattgactgaattgctgtccgtctcaaatccatgcaattccttttcataatcaatcaccgtgtattgctgttcgtcagccgtaaaaataattgtgtcaccaaaatacaacgaagtttcaatgtgctgatggttttgcgcatattcggtaccgtttttgtggttgggactgaatataattattgtaaatgactaggcatttgatttatatttgccaaaaactgcccaaaataattaatttttagtttctaaaaacctccaaaatagttgctaaaaatgggtaaatagttgctaaaaactttcaaatttaggggtgtaaaatcgtaaaattttacccaaaaaggaacaaaattatgccaaattaatattgagataaataatttttaaaatcacaaattcttgtcatgaaagtaaataattaaattttggaaatgaatttttgagaaaaattttgattttataggtgcattttttaaaaattttctggccgattctaaaaacaatgtttttgaagctctttattattattatttttgaaaaaaacaaaaattttcaagcgttttgcccaaaatttgttaacaaaaatgcaataaaaacgaaattaaattcctcagaatggaccctaaaatttaaaaaaatagataatctccaaaatgtatttattaattttatgaaaataatttttggtttttaaaaattatgtatcttaatactgattggcttaattttgttggtttttgaacaaaattttacgattttaaccccctaaatttggaactttttggcacctattttcccattttcgcacttatttttggctttttgcaacataaaaacaaactattttggcactttttagcatctaataatcgtatctcaaaatattatacagtatcaattcaaaaaatttcttcaccaaaaaattataatatgaaaaattaatatattgtaatttttggttacagcttctttgaaaaaccgacaaaatcataaaacaattaattaattacccgagaatgaaaagtggcgaatctttgtcccggaaaacaaattttatgcccggaaaaggacatggtacaatgatgccgttgtgaatgggcgcgccgattggaccgcaatttcctctggcggttcggaatgcaataatggcacgttggtgccgtcgttctgcacgatcactaacgaataagcgacgataaaatttttcaactgttatactcgtttgtcggggtagaggcggaattttcgagaattacggactttttaagccgagaatttatatttaagtcaggaatgatattggtcccttttggcaaagttcaaatttttcgaaggattct

SEQ ID NO: 30705 - DNA, 1054 bp, Heterodera glycines
cgatggaagggaactgcaaaatgccatggagcaagcccgaagcacgcacttcgaccacctgccaatgaatgcattaaaatcaaaacccgtgcatcgaatgaatgccattgaacgcacttggatgttatgttttggcacaaataggtcatactttccggcaccgttgttcctctcaagccatgtcggcattttgtgcagcagcgcctttttggggcccagcaattcggtcagtcgtttaaagtccaatgctttgagccgtgaagttatgccggcaacaattttcaagtggaaatttgtggatgggccgggcagacgagcggcgaccaaaaacgatttgatatgactgaacacgttgttctcatagcgaattccgacaagggccaagtcgagggccgactgaacgccgtagtcgggttttattttgaaccatcctttaaaaatgcaaaataataaaccgaatactcacttcccccaccccttcccttccaaccgtttcgttctgctcggcttcccgggcgatagagcgaattgaacgctttgaccacaattccctcttccccatttcgcattgactgcttgtaaaagtcgacaaatgttttgctggcaaaacatttatttaaaaacaaaataaaatatgaaaacttacgccgtttggacagtgtttttctgggagatgaacaccgtccccttgtcttggtctttgaacaacttttcgagcattttcaaccgttccgttaagggcagctctattaaagacacaccatccaagtataaaatgtcgaaaacagctgaaaattaacgcaataatcagaggaaaatgctaattgtaagtaattgccaaggcttctttggaggtatgagtgatttttgatataatcgtcgtcgatgtgttttatgtcgtacactttgccgtccgatgctcgttttccttttcccactaaattttgccgcgtaatttattattaaaaatgtttccatgaaattctatcccaccaaaactttgctgtcgttggtcccacacaaaacttcacagtccaacacaaattcgcgtacc

SEQ ID NO: 30706 - DNA, 1971 bp, Heterodera glycines
tcagcttttgttgattcctcgtgagataacacaaatcttctcggcgcttcatccgatccataaattccccgacgataggtatcgcccccactttggcgccggccaggcattttatgtaaaaaaatttgacgcacttaacaaatcgatattttatcggggatacatagagttagcaaagttcaatcaaaacaaaaatatatggcaacaattgtgtcagaagagggcactgttttgctgttcctctttcgccctgccaccgcattttagcccctttttcagaaaaaaaagttgaccaaatcaatgaaaatataaataaaacaatgtttttcaaaaaactgaaaaatcgatgtgtattttaaataaattttattttttgagcccggtgtttctgagtttgaaaaattttcgatcgaagcccttacggccccggtaaattggacacaaatggaaatttggagaccggaaaattggaccttattggatataaaataaattaaaaataaataaacaaaaattttggttttgctaaaagattttattttagtctgcacatccctgtgtttttataagcgtaataaaatggcaataaataaggtttttattattgtaacatcaggagaagaaagccaccataacattaataagtagggatcggatttttagtgataaaaaatcccaaaataattaactaaatagtgagaaaaaaattccaaaatagtggcgaaaaagttccaaatttaggggtgtaattttttaaatagctgttttttaatttgaaaataatttaaaattaaggaaaaagattttattcactgattgcagttacaaaatattttcttagaaaatattgaacaagaaaaaaaaatttgggggaagaatttttatgaaatttttccaattcttagggatgtatttttgaaaatttttaggtcgattcttaggggtgtatttttgaaaaaatttttaggtcgattcttgggggtatttttcgtttttattgcattttttgggaaattttccaaaaaatgccaaaatagtggcaaaaataatgacgaaacgccaaaatagtggcaaaaaattattttagtggctaacttccgaaatagttttttttagtggcgaagctccaaaatagtgattcctagtgatgaatagtggcactaaaaatgaaaaattttcgaaaaagaatgtgtttttcgtgcatttctcgtcgaattaaagccgcagaaaaaatagttaaaaaactaagaatccgatccctatttatatataaaatatttttgttcatttttttagtttcttcctatttcgttgaaaaatcttctgatgttcatcaattatttccatttgttaccttagtgaaagctggtgatgaaattgagactaactttggacccaatttcaattttacaatgccaatccgcgaattcttaattcaaacttgcgaaaactttttgcacgacggagaaattacaaaacaggttcaaaaataccgttaccaatgaaattagttccgatttctctatcctttcgggattgcaaaaacgggatttagacttcgattttgaaaatcgagagatccgaaaggccgggattgatttcggcaaacagtgccttaatgggtctgaattacgtgatcttaatttaggacaaaattgacttgattgccaaagaattcattaaatttaattgaagtgttagtactattagataaagttacaataaatgaattatttaaggaaaatctttgggaagccattcatggaggcctcaaaatcactggtgacaaaagtttgactgtacaaaatgagaaggaaagttatggtaatttttatgaaataattttaaaatatctttatttaaaaggttagcagtttgtcttcgctaaacattcaatttcacagaagaataattcatccaaccttttttattttgaaattacagtcaacgaattagaaaggaacgggtaag

SEQ ID NO: 30707 - DNA, 839 bp, Heterodera glycines
atattttacgtgtcaaagggtgtgcatttaagcgactctctgtgcttgcccactgcatttcaaatagctggtaatttttatttctccggcctaatccagaaaaaatcactatctctttttttggaaaattttacgtgtcaaagggtgtgcatttaagcgactcgctgtgcttgcccactgcatttcaaatagctggtaatttttatttctccggcctaatccagaaaaaatcactatctctttttttggaatattttacgtgtcaaagggtgtgcatttaagcgactcgctgtgcttgcccactgcatttcaaatagctggtaatttttatttctccggcctaatccagaaaaaatcactatctctttttttggaatattttacgtgtcaaagggtgtgcatttaagcgactcgctgtgcttgcccactgcatttcaaatagctggtaatttttatttctccggcctaatccagaaaaaatcactatctctttttttggaatattttacgtgtcaaagggtgtgcatttaagcgactcgctgtgcttgcccactgcatttcaaatagctggtaatttttatttgtccggcctaatccagaaaaaatcactatctctttttttggaatattttacgtgtcaaagggtgtgcatttaagcgactcgctgtgcttgcccactgcatttcaaatagctggtaatttttatttctcccccctaatccaaaaaaaatcactatctctttttttttggaatattttacgtctcaaagggtgtgcatttaagcgactcgctgtgcttgcccactgcatttcaaatagctggtaatttttatttctcc

SEQ ID NO: 30708 - DNA, 918 bp, Heterodera glycines
tcatttcacttttttcatgctaatttaatggccttgcccaccggttctcatccccctggacaaatttgaactttttttctcaatttcaaattcccgcccttcgccagtgccaattttcttaattaagccaccctaatcaaaaaatcctttgttccagttccattaccattgccattgccaccctcctccctcccaccctttgtgccgttcaattcaatgctttcagtttatcgcccaattccccattcccccccccccgaacttttcttttcctaataatcccccataaaagtgccgaacaaagcctttcttccgcccctcctcattttttagcaaaaaaaagtcatttgaaggaataaacaaagcgtaaagcatagaaaatggttaaatttgggctcgtcattttacgttcattggcaccccaaagcattgccccgggggaatattggtaatgggacttttacagtaaaagttcaaaatccaatcttttaaattcgtataattgccccccccccccatttttcccattttcaaattccttttttcccattacttttctttgtccatttttcatctctttgttttttctttaattttatgctgtcactttttgaaacctgcccaaaatggcacttttcctcttcttccgttccatgataaatgagaaggaacggaaaggccaaaggaacgctttgcttttctttttctttttccatttccatttccattttcattttccaatttccaactttatttgttttatattcaaatgaattcttcgggaggggggggggcgtcccgtgggaaagttggcacaaaaataagtaaatgccgaaagaacatcggatttgttggattagaaatattctgtccaaaaagaaatgtcaagcccaaaaataaatggacaaataattgtaa

SEQ ID NO: 30709 - DNA, 756 bp, Heterodera glycines
atgcacataaatgttggtcgtcggtgcaaaaaagttactgtattccctactgtaatagagtttcctcactgtaattataattagtgatcagcaaaatttaaaaagacccaagggcataggataagtgaaccaaaagcggtgaccttgatcatgcctgaaatcttgatctttgtgtgatcaagaatgttttggtgtttcaagtaagtgatcaggagagaaaagaacttagcagggcttttccatggcggaataatttgttcctgatcggaaattatcgattaggacaaatcaatagaaatcagagtttggaggaaaatttaatgaataaaatggaccttcacaccagaaattagaattaaatttggagaatttaattgaataattttaaattgcccgcaggggaaagttttatggattaaataacggagcatcaaaaagttttgcagtttaataaaatgcttatatgtgtaccacaaatgtgtacaacagagcacagggggtacattcatcacaaagaaagcataggtatgaaaggtgacggggaaaaagtggggaaaaaagaacgccaaaatttgcccgacaaaattgtcgcgcgcaactgcgcggggagacgacggcgccgcgggggggggggggaatcgatgcttcggaacacagacggacgaagacggcggcggcgagacgagcagtcacagagaaggccaaggacggggacaaggacaccgcgcctaatttttttttttgggggggggggcg

SEQ ID NO: 30710 - DNA, 771 bp, Heterodera glycines
catttccttataaatccgtttttgcgagtttcccaatacttactctcttcctctccccccgcgttcagtccgctggagccctactcattcccgttcatggtgctcggcaacaaaattgaccgcgacccggagcgggctgtgtccagtcgcaaggcgcagaattggtgcgaacggcacggcggcaccagcacgaaaaacattagctacatggaggtgggtggcgggtgattctaacaattctcaaaaagtgacgctttctggcttcgtgccatgtaaattccaacttaaaaaccgaataaccattgttaatttcttttcttgggtcctaaattttcatagcatttcaaatttttcatcaaattttgaggcttctgcgaagagtgccgcaaacgttgaggaggcatttgaggcgattgtgcgcgacgcattggcacgcgctgcgcaagacgaacagcaaagagaacccgtcggtgggtggtgccaatgttttttggattcataattttgggtggaggatttatggtctccttattttaatgagtacattcactagtcttactttcttaagtctcggtcgagtagattagtaaaaagtgaaggaacaccgttggtgtggtggagggggagggcagcacggagctttacaaaaagtcgtggcaaaaaattttttaaaatttatgataaaagttcaataaaaaaattttaatttttcattatagaaaaattgttccggtgcacttcgtttcaatataagtcatttcaatatatatc

SEQ ID NO: 30711 - DNA, 807 bp, Heterodera glycines
ctaagattacccctaaaaataattttctcaaattttactataaaaaaattttgcgggaccaataatctataccattgccaaaaattcaagttttatttttcaaagctgactagaatgacttatttttgatgttgcaatgatctatgagttttatttttgctaattttaagcaattttaaaattgaagttttgacttaatgtccgaattcgttccaggggtacgaaattgctcgaattgggtgtcatattcgcgatcagtgaccccaaaaaccaagtaaataaaaaactgcggctcatcccgaaaaaacccgttattgcgagccgtggtcgcgttccaaacacaccatgtctgttggaattgtctggccatgttggtcccatttccataccgtcgttccatacgaccgtttccattccaacagtttccataccgtccatttccatactaccgtttccatacaacgtgtaagtgttcggaattggcgctgttgcgtttgtttgacgtcgtacgcgcctggttgcctaagcacgaaatttcttggaaatcttttttccaaaaaaaaaacttgtttggtgccgttcttggatggcgacagttgcgcaagcactggcttagcctcgttttgcagtgccaatgatcgaatcgtcgtcgatggtgattgtttcatgggtttttccgcgccccgctggcgtttgtttccagcggtgatcaccacgcgttgtgcacctcttcgagctgtattcggttcaccagtgatcaccacccgttgcgcgcccactcgtgcaacacgtggtttcggttcacat

SEQ ID NO: 30712 - DNA, 1488 bp, Heterodera glycines
aaaatgtattttttattggttcggcgacagttaaggcgatcctcaagagcattttttgctttatcggtaaaattttacattatgaattgttgtctttgtaaaataaattttgtttttagctcatctttttcgttttttgtcttttgtacatgtcactttccccaacattggaaaaccaacaagtccaaatgggaagcaacaataaaaatgaggcaaaaactgaggaaaaagcagcaaaagttgaagacataaatcaaaggcgtggatttctgaaatatgccaaatggaatgttcactctgtgcgcgggatttacggcaaaaagaacaattcttttttggtttcattgggcgactccgaatcggcaatgcattccattgaggtcggcgcattatggattaaaaattggcattacattttgttaaagtttttggcgattgtggaatttgcccctctccccacccccttctttccccaccattttcaaaaaaaatgttacttttaaacagggctgccagattaaaattttcaaaagcctcatttggcatgcaaaaaaacctcattttgggtcaaaaagcggctctaatgcactttatgagtccaatcgacttttatgagtccaatcgacctttatgagtccaatcaattgacaatcccgggtttttatacaataactttgttcatgatcgaacaaaccctatctttgtggtatcattcaaaagagcaaagtctgataaagaaataatacgacaaaacaagagaattctaacatttcaagaaagtgaccaacagaaattatcaaaaattactgactcaacaatctgtggtgagactgatacaaaaaaacttcccctaaaaatcgtagcttttccaacggaatcagctgcatttccaacagtacaacagaataaataaatactaggcaaatgaaaaagttttttccttcctctttagaaagagactaaaaatttttgttgttaatagactgaaaacgtgtttttttagtgacaattttttttcaagagaaggggatatgaaaaatcacttataaagctcatgcttggagataaaggaatcggaaaaaaaaattatctcaacaatcagtcgagaaacagttcaataattcggaagcagtgccatattgggaaaagatgcacaagtagagtaggctcgaaataaaggcaactgccgaatattaacaaaaattcaaatttatttggcccgttctgcttgacaggccatatctcgccagggagtggcgggagaccctttgttgatacatttgaaaatgaagagcgcgtctagctcattcgaatagcatcaaactggtttggttttgccacgaaacaaaccccctgatggccacgccaaaaaaaggcccaaaattttacatccttaaaactccattttttcataaggccagcgtgtttaaaggaaaccccaaaactgaaaggaaatttaaattgaacccctataaaagtttaattttt

SEQ ID NO: 30713 - DNA, 1049 bp, Heterodera glycines
gaacgatgaaacattattagggcacctcagagctctacagtatcgactggccgatacaggaattcaagattggtagaattagttagaatttctagctctgttggggtcttgagcaagcccaaattgtgaaatgaattatataggctggataaagttcggcgttaatttggagagaaattaaatttgataaaaaatgaatttgtttggttgattatttttaagcatgtaatttatgtaaaatttactaaatttatgcctaaataagtctaattttggttgagccgcaaatgtcgggccgcaaatgtcggaaaatggcccttaagaaaagggccgcaaatgtcgggccgcaattgtcgtttttggctgggggacgcaaatgtcgggccgcaaatgtcgtggctccggtacccgcacgcccggttttttaatacccgagcccggtacccgggcccggttttttggaaatccaatacccggtacccgacccggtaggtccgggtacccgggtaccaaaaaatacactggtaagaatgggggtttgattgaaaattagtgaagaaaattgttgttaaaatcaaaaatttttaaaaaaataattaatatttatataaaagtgacactgccaattgggcaatagtctagtggctagtctcctttactttcccttctctttacaattgttcaatccctctacagaaattaaagtgcttttagttgttttttttttgtatactcatgtgtttcctatcgacaaaaatatgattaatttacacatttttatcattttttaaatgaaatccgtacaattgagcctactaatcccaaaacccaaccttttttgttgaaaatctgttaacaaattacactcaaattttcaaaattttccccgggcggcgcctatcggcaccgcccctgcccccaaaagtttttaaaaaaagcacaccgcaaaaaagcggtttaaatagcataaaaaaaattttggaaaaaataaagcgtttatttgtaaaacattatatttttcatggtttttaaaatataagtttttattt

SEQ ID NO: 30714 - DNA, 1084 bp, Heterodera glycines
  unsure (1)..(1084): unsure at all n locations
cagaaaacagtaaaacgctcnntattcatgcactagcngctgagatatatgcactgacttttctgcatatattgccattctcgcaagcaaacttcgcgttctcaagcgtgaatagttaatttttttgtgctgaactgtgttagggttctccttgcagtgcgctcaactaagtctcttggagttagagcatttttcatggtattttcaagaaaattgtgcaatgtgggcgacccggaacattttagacagtttccaaaccaaacactcatagtaaaaaattatttcgttagaatacgagaaataatttgaaacgaaacactggttactaatttgcatatatctctgcgaaaattccagatccaaaaaaatcagctataccattcgaaagctgctttcaggcgctctcagaaaacagtaaaaacgctcctattcatgcactaggcgctgagatatatgcacttgactttctgcatataattgccattctccgcagcaaacttcgcgttctcaagcgtgaatagttaatttttttgtgctgaactgtgttagggttctccttgcagtgcgctcaactaagtctcttggagttagagcatttttcatggtattttcaagaaaattgtgcaatgtgggcgacccggaacattttagacagtttccaaaccaaacactcatagtaaaaaattatttcgttagaatacgagaaataatttgaaacgaaacactggttactaatttgcatatatctctgcgaaaattccagatccaaaaaaatcagctataccattcgaaagctgctttcaggcgctctcagaaaacagtaaaaacgctcctattcatgcactaggcgctgagatatatgcacttgactttctgcatataattgccattctccgcagcaaacttcgcgttctcaagcgtgaatagttaatttttttgtgctgaactgtgttagggttctccttgcagtgcgctcaactaagtctcttggaagtagagcatntttcatggtatttttcagaaatttgtgcatgtgggcgacccgaacatttagacagttccnaaccaacactcatagtaaaaa

SEQ ID NO: 30715 - DNA, 1625 bp, Heterodera glycines
  unsure (1)..(1625): unsure at all n locations
tgatgcagttgcgagggaatgcaaagtgttttcggtacctacttcggtgcgccgagtgcttctgatataatttttaaagattaattgttattatcattttctacctaaattcaattattttatttaaatattgttttttattcaaacgagaatataaataaagttagcatttcatttaaattaatttttttatttcttttttttaaaattataagatattgaaaaaaaaattctattaatagcttttcaaataatattcatattttttgttttggcctttttgtagtttcaatatttttcttcgttaaataataacaatcctttcattaattcttgataatgacaattaattttgaatttatttgtaataattatcataatataattttaagaatgaaacttgattatttatctcaaagcaaaaaaaggatggtgcttaattttttgttttccttgaccgggttattgtttcaattgtctagagtttttaaggtattcctgcaattaagagttttttttatttaaaatgcatatcattatgtatttattaacttttattttttctctgttttatatcaatccaacttcatttattatattagttttattttatggcaaccaatccaatgtaatttgtatactttggcaggctatggaataatttcttatttagcgttttcaaatattaaactataagtcaattgctctgatgtccgtgcactcgacaaatgcttaataacttttatggaattgaattaattgattgatttttcatttttggtttcatttttatttttatagtttaaaatatttaattaattatatagaatgttttattgctttaatatcaaggctaaaattgtttaacttatttgtatattctcatacgttggtttaaaattccaaattccgagcttaacaaaattgttttaataatttatcaatttatattagagaccggacgactggggtcggagggatccgagtcgggatcccgactgaatccaaattaaatttttgtttttatgcgattttaggttaacatcacagtattaaatcaaattgaatgaagtatgttaatagtcttaaatagaatagtaaattataaaccaattactaaaataaaggtttatttaaataaacctaaattcttaaaacaactgacgaaaccaaaacaaatttttacaaatattcttataaatttaaccctaaaattttaaaattaaataattattactctaaataaaaatagtaaaatctattttaaaacaatcttatataataatattttgtaaaaattgttttgtgtttgacttattattattaaaaaaaatacnacaaaaaataacatattataataatttatctttttntaataaacaataaacatataacaaaactattacactaaatctcatattattctattaatatatttttttaatacttattccatattaaaatcaananaactcatcntaaattaccatcacttaaanaaataaatatacaaattttaaacatctttaaagggnannatcanaaacaaataaacataataaaacctttgatggaaattttaaatgttttaaaaagcattgcccatgaggactctagaggtcccc

SEQ ID NO: 30716 - DNA, 1541 bp, Heterodera glycines
cccattcattatattattttaaataaaagcaatgttatttgtgcgatttcgctctgttttcggaccttatcgtgcgttttctgaattcctttctgcaaagtaagttttaatctctgagctgccgtttccaaccatatttggagtacatatttaaatttgaggttattttttttattgtagtcggacttgtctttatgacttccatgtgaaaaatggtgccaaaatggttgagttcgcagggttttcgatgcccattcagtacgatctttcggtcagtgcttcgggtgagttggcgacctccccatttcatttccccgtactccccattcagtgcttcacacgcgatcgaatgtgagccttttcggttggtttactgtttctttagttgcttgtttctaatgaatttctttagatgtctctcatatgttacaggttggttggtttttgttgttattttttgatcttatttcccaatttttaagactgaaatcaccggtgcccataggtgattttgctttctttgaatgttttgatcacaaaaaaaatagggtgcaattcattgaatcactgacgccaactgatgtgacgaatttgccggagaacagtggagctttgagtgtttttacaaattcagagggagggataattgacgacctggtaatagaaattaattcaaagacaaagaaagtaactttcagataatttcaaaaacggcccacgaatcactttatttggtgacgaacgccggaaggattggaattgatttgccatatttggaagtgaaattcgccgccttttgctaattgaagtgttattaattaagcaaaaagcctccgaatggcgtggcaatgggaaggaaatccaagtgaatgtgttacaaaaaaaagcattggtcgcaattcaaggttattgcccgttctaacactaaaccccctcaaaactcaaaaggtcctgagacgattaaactgttggggccagtgaccaatgtccctctcgattcgctcttcttcatgcattcgtcggttggcaaagtttgtggggttgagaattgcagagtgacaagatgcggttacaccggagaggacggagtggaggtgaaatgacaggaaaatgaacgcatcgaactgggaacaatttacacagatttccgtcccagtcgaagccgcagaaaaactcgtaacgagacttctctcctcgaaagtcgcccgtccgaaattggccggccttggcgcgagggatgtgttgcgaactgaagcaggactttgtttattcggcaatgaaatcgatgagcggacgacaccagtggaagcggggattgcctttgtgatcggtgggggaaggaaagggagggagccaaaagaattttaaatcaactcataagggaacacatcgagctatcagtcagaatacacaaatttgtattgggtattttaattttagcggtggcggtgtcccacgccaagttcaaaagtcggaacctcaaaatcggaaattttgctgttctcaacagagggagagagcagttagttggccgctaaaat

SEQ ID NO: 30717 - DNA, 997 bp, Heterodera glycines
ttctaattttagaaaaaaatctagaaaaattgtcatacttttaatagctagcttaataagaaaaaaattcaaaaaaaaactttctatcaagaaaattcaaggaaatttttaaaaaaatttcaagttttttggttttttccggaaattcagcaaatttagtttttattaacacttagattttcaaaaagctaaaatacttttaagttttcttgaaatctagaaaatttttaattatttttttttttgcggcgacgttatgtcccggcgacgtttcggtgcgacgttttggggtgtaccctttagggacaccgattttttttttgagttaaatgcctccatttgggatcaattcctttcactttcccccaaaaattagaaatgggaaatttttaattcgatatttctattaagaaaaataaatctaattgtaagatatttttccaaaaagcatttcgcccaaaactttttgcaattttcaaaaaaaaattttttttttttaaagtccaactttcaaaagtcaccaagggttgttttttttttgactatgtttgtcgaactcctcagaaaacggcatgtttcaggacgacgaattcccaactctgtgcggtgcgcgcattgtccgcgtcgctgtccacccaaacttccaaggcatgggctacgggtcgcaagcagttcgcctcctgctcaacttttacggacggaggccgcggcatgtttcaacgacaacggcggcggcacaatgccaaaatggggaggacaaaaatggtggaaatgataaggaggaggatgaagagatgtcgagggtccaacttgtggatgtaaggccatccattcaagtttcatggttttttttgtagcattttggcaaaaaaaaaaaaaattttttttaattaggcgtttgtccggtggctcctctaaaaacgaggaaatttaatggatttgttaagaatattgagtaattttcaaaaaacttgttcattttttcttgaaatttttg

SEQ ID NO: 30718 - DNA, 1424 bp, Heterodera glycines
ttttgtaaattatattcttatagagaacaattaaactccaccagtgataccatgaaatattaatttggttgaatttgccctaagttatgaatttttatgtgttacatattttttgtttcgaacccattggcggatttacgaaacgcgcatgggtggcattttttacgaaacgcgtcagcacgttaatggggaaggcggcagagggcagaatgggaggcttataaagatgattgctcatccctctagggcaaatatgcatattaaaaacctggacaaaatctcctggggcgagacatatagaaaagatcacttctggccttttttaaattttttgcaggtaaaattatttttttaattatctataaatctttaaggtacaatcatgtttgagtgaggctcaatgcgtccttttagctttaaaatttcaaaaattgaactaaaaacttaagtttgtaacaaaaaaaattcgaaaatcaattcaaaaattttgatccttatttttttcgggccatttcttaggggtgtatttatccgattctttcggaaaaacgacaaagatggcatgaaaacacaaaaatgccaaaaaagcattaaaggcataaaaatcgtgaaaaaggcataataaaagtcaaccaagaagccccaaaccaagtgcaaaatctattttgtttaaattgaaataagtctgggctaaaaggaacaaaaaaagctattctcttgtttagatgttggactgataaaacattactgttcaatgcggcatttaattggttctctaattgcctggcatgccatttactccttcaaaaattcattaaaaaataacgatagtttttcccaacaatagtgaaatgatagatttgaaaaaagaatgatattgcttcttgcaatcaacagtgataatcaggatttccattttaaattcataaatattgaggcacaaaaattaaccacaaaggcggaggcaaatgtcaccataaacgtcattgctgacaatgggcaacaactgagcacgatttgctttaaaaaaggcccgcaatttgttaacattcaaatgcaaaaagtaattctgaatgggaaaaacaattaaaaataaattaaaaaatcgatttaaaaaaatttttaaaaaatcactttcaaaatggtgagcccgtattgtttggtcagaaggaaacggtcgatcagcggaatttccacgcaattgatcaaatgcttctcacagcgcaaattttaccaaatcattttaatagtaatcgttaattaatagtcataattccaattgcaatcaatttacatgtgtaacatcaagaaggatcattagcagacaacaattgtgttttacatgtttaacatcagttaaggataaatttttgcatgtctaccaacaattaaggatcattagcatacaataattatatttttat

SEQ ID NO: 30719 - DNA, 978 bp, Heterodera glycines
  unsure (1)..(978): unsure at all n locations
atttattgaatataacacacaatctgtttttaagtcctccatgtgcaacgaagcagagtgtgccgtgcccgacgcagcgtggggaggtctgtcgctgctgaaaaatccacggnatgaagcaaatccanaaatttataggctttcggttcgatttggatgcaagctcagacctattatcagaaaaaccagaaaaaaaattttcggggcgagtaattcgaagattttttttcaaaattatgcgcctcaaatgaaaagtataatatttttttgcttgatttttttttatctatgatagcctacgattttttgatcaattttgaaaaaaaaagaattttaaaaattttaaaattttttaaaattgataaacttctctcctccgccccccccccccccaaaaaaaaatgattcaaaattaattttttcaattttaaacagtattagttatgtaggtgtttgttgaaaaaattacgcttttatgatttcagttttattaagaattttttcaggaatttcaatcgtttgttttatattttcaaaaatatatttgtttctcggaggccaagccggtccattacttttgtacttttgtggccagtttaggttcttcatttcttaattacccagtcattttggcactttttggatttttcctagtttttttttttgcttttgctttttgatgccctttggcattttcaggctggggttactggtcgccctgctccgagccgtgcggagccgtcggaatgcgtcggcgcgtccgcaaatgttacggcagcggaaaatgcccgggcgacgacgtgcagcgcgagcaatgcgtggccacagccggggacggcggtggagaacggcacaaatgcccatgaacgattcattgattttgattttggcgcccgcaaattagggttaattaattaattagttcattaattgccctttttcaacattccccacttcatcctcattttgcgggttccc

SEQ ID NO: 30720 - DNA, 1419 bp, Heterodera glycines
atcggaataagagagttttggagattctccaaaaaagttgaaccattcagagaaggacttgttaaagtacaaacagtttttggaacagtaatttgtggggaaatgatctccgcgggacaaaatttatgcccgctcacagcaatgatcatagaaaacgaagaaaaagaaccagaaaaatattgggatttggaaatgattggggttaaagataatcccgtagaaaaagatgatgatgtgacactaaaaatgttccaagactcagtataccgaaaagatggacggtatgtggtaagttggccttggaaaggcccaaaagacgaattaccgactaattttgcattagcctatcgaagaatgatcggcataatcgaaaaattaaaaaagaccaacgaatttttaaaacattatgatgaaatatttaaagaacagataaaagaagcatagtcgaagaaaccgaaataaaaggatatgacgaacatttcttaccacatcactgtgtgctagttgcaggaaaaaagccacgagttgtatatgatgcgtcagcaagaataaaaggtcaaaaatcacttaatgacatgttattcagaggaccaatctatatgccagaattgcctggtaaaaaccaatttcaaagacaaatctttgcgcattcagatttaaacgagtaccatttggggtaatttcttccccgtttttactgggggcaacagttcgatatcatttagaaaatgaacaatcagagttggcaagagaagttaaacgaaacacatttgtggacaatatatttgtaggttgtcatgattttgatgaatcaatcgaaaaatataaaaatctaaaagtgttatttgaaaaggcacgaatgaacattagagaattcatctcaaattctgaaagagtaaataatgagatcccagaaaaggatcgtttagtaaaggaaaacccaaaagtacttggtataaattgggacattaaaaccgacacttaccaaattaaatttccaaatgttcatgaaacagaaaggataagcaggagaagtgttttaaaagagttaaactctgtttttgatccatgtggatggctatcaccttgtttattaccagctaaattattcttccaaagtctatgggaagaagacaggaaatgggatgataaaataggagaagaaaaacagaaagaatggaaatacattacaagtttatgggaaaataaatcaattaaatgcatacggagaatagtccctgacaaatttaacagagcagaattacatgtttttgtagacgcatcaaaagatgcatatgctgcttgtgtatatctaagaatcgaatcagaaaaaacacaaatcaatttattatatgcaagaagcaggttgagaccaagaaaaatcaaaataactataccaagaatggaattgttgggagt

SEQ ID NO: 30721 - DNA, 944 bp, Heterodera glycines
ttttacttaaattgcatttcaaatttacagataaaaaggattccaaaaaatctgaaacaggttttaatttaattttctttaataaaggcatgcttttcagcaaatgctttgtcgtttcataatttcgctaatttcacatttttaataaagaattttcatagaatgacattaatttaacaaaatttaagtcatttagtggcatcattcgtttcggatatactattgtcaatccactataaaaaatcgcataaattatatatataccaatcgatagtctcgcggagttaggcatgaaaaaaatttttctccagctgcggaaatgtgtctgaccctattttggaaccggctcaaaacttgaaaaatggagagcatttggcacttccagcttttttaaatgatcaaatccaaagacaaattaggtatctttcaaaagcccttgacgagctaagtcaaaaaatctggagatgaactcaaactgacgtcatctggcaatgagagtttttgaaaccggttcaaaaaaatttgatgcaactaatgccaaatttttaaatcactttccagcccttttttgtgttggcctgtaaaatttcaaaaaatttttgtcctggttccgacaaagctatgccaaacaaaaccaaaatctatggtccatttaatcatttcattaacattgatttaacgaatttttttaagcccattcttagttaataaaaaatctaagtgtttgcgatagtctccaaagtttggcactttgccaaatagggtcatttaatgatgttgccaaattttagaatccaaaacacctgtaattgaagaagaatttgaatttccgactcccagcaatgccgaaacagaaaagaacaaattagcacaaaaattccaaaattttaaaagatcaaaaagaggaagatttcctcctcttggtcgacaaaaaggtttccttt

SEQ ID NO: 30722 - DNA, 829 bp, Heterodera glycines
tgttggccccacctgtgacttcggctgctcctctcgttcattagtgtctcggcggtcgttctcgccccattgcccgcgttgattaacctaaataacttttttggtcctattttggaatgctcctttcattcggtgtttgttcacctctcaatttggtcgtaattggtcactttgtacaccgacagtccctccaccatcggacccaacagcgaatgttcgcgcactttcagcgacggaatacgtttcggtgtcgaaacgcaactcttagcggaggacggcctaattttggggagagaattcgaattattaaaaaagggaaaccgacccaagcaaatccctaatacgttcgttgtacacctcgaaaaaggacacttccaacttgaacttctttatcccatcttcactcgtttcgcgggccaaccgttcgaacaattcggtgcataaacgggggacaatcccttggggagggggggaggggaattagtccaattacgattgatgtgctgccataaattatcccaattaatccctcataattatccaattaatccctcattattatccggtttagcctaattaatctttcattattgcccgatttatcacaattatccctcattattatccgctttatcctaattaatccctcattattacccggttcctccgaagtgcccatcattgtgtacgacttgccagaacctattcgcaaattcaatatagcatatgcgattagccaatctcaacatgactgacccgtctgtccataagcaaaaacgcaagagtttaggccgagaaaggcattgtccaccacttcggcaccgacgga

SEQ ID NO: 30723 - DNA, 1215 bp, Heterodera glycines
ttaagataatcctttgtaatcattagagagtgttcctattcagtttaaacttgctgtttgcgcacgcattgatcggacggcgcgaaaagactcaatttgacgctatgggcgagaggaaatgcttacgctggagaaaaatgtgaggggggggggggggggaatgatagaatgtttaagaaaacaaaaaaaaccaatgaatggtttcacaaaaataagaaattctgaaattcaggcaccgtcagatttcaaattggacagtgacttttctgagatttgtcgcgtgaacgatgtgtgacaaatgacaaacaaatcggaataatacaaattttacctttatattgaattatttttgattctgttgtaaaataatccatgcaaggtttattgaaataaatgcataaatggatctgctgataaaatcaccattctttaccgagtttcgttaaataatacaacagcttgcaaatattgaattggcgaaatgtttttcttttcacaaagtggacttcgctcaaatcacattaaagcgctgacccacaaaatgtccaagtctcgaatttgagttttttattattcagatgggcctaaggttaggcaaggggtaatataaagggtatattcgtattcagcgaccccgaaaaccctaaaaatcctaaattagactcattttgtttttataaattttggacatttcgtggcttggacactttgtgggggtgcccattaaagaattcacattttttcattgtgttattaatggccacttcaattggccttaatgaccgcgtctccattcaggacgtattttacagtgttcaggtataagaatattaagtcgaagtttttttatatattaaattctgatctaaaaaagccatttccatttataaggcactggaagagctgcaaattggcgatgatttgccatccatcggcgccaattcgcagtccctccaataccgcatttccttcgacaccaatttcgaggaccgaagtgcatttataacgggatgctcaaagtgcgagaatgaaaatattgacgaaattgcaaaaaattggctttaaggtcatccaagaaggcaccaaacatggcgaatttggaagaattggtggtggtttcatggggttattcatttggcaaataattacccaaatttgactccttaatgacccattggtttttttaaattttttatcattgaaaaacacactttt

SEQ ID NO: 30724 - DNA, 1177 bp, Heterodera glycines
gtagagctgtgccgtgactgaaaaagcccgtgaaattcacggttttcgtgaccgtgaccctgcatttttttgagtttaatttttctctatcggcgaattttttgcaattcataattaatatttatagttaagattatccaaaataaattttgttaaattcagttatttatttacaattttaagttaagaagatttcttgaaactttatctttatttaatcattatttattttgatttatttttgtttaattaattaacttaactttcataatttatttatttttgcattctttttattctaaatttattgttatagttgatttatttataattcttgtccgcatttcagctgtagtactaatttctgtcgaaatgctgcttaattataatttttatcaaccaattcttttcacaattatttagaattttcttcatctttaatattcatttgaacagtaatattaataaaaatttttattttttattaaaatattattttaaatcaatttgtaattttttttgtgttgaaaaacaactaaattctttaatcttaagataaatttttatgaaattaaaaaaagcacaaatattttattgaattttaagaaaattagattataataggcgttaaattatcgaaaatttctaatggaaatggatccaattccatgtgacatgagattttttaaaataaacgtacctcgataaagcagtaggcaccaatccccgtcggattaattagagcagtgttgaaacaattgatattaaggaataataatataattttatcatgtctttagttcaaataaatattttaattaaaattattaaatgattctttattaatcacttttaaagattaggtctcttctgagatttgatttgtttaaagcttttttagataattattttcttttaaataactattcaattagattaaaattctatattatttcctctaaatattatattttaattaaaaaatttaaattccaaaattcatttatcatgatttatgttttatctatgatttttcttgtttcattatttttaaatttgctatgaacttgataatatgcattcttccgggcgcagccatttaaatagtaatttaaaaaataatattttttttcattgttatttaatttttcttatttcatatttaatatattcataa

SEQ ID NO: 30725 - DNA, 1321 bp, Heterodera glycines
  unsure (1)..(1321): unsure at all n locations
ttttttctccccctaatttttggagtcccccaacgggccactgaaaaaattgtttttttttttttgggggcattccccccgaacccgatgcccccaaatttatggggagccggaatccttcgggaaaagcttccctatagcctgtactttaattttgcgtgggatttttgctcccccataattgtttgagtaccccaaacggacacttgaaaaaatcgattttttgtttccggggcagtccccccgaaccgatgcgcccagatttatggggagaccgaatccttcgggaatagcttccctatagcctgtactttaattctgcgttggatttttgctccccataattgtttgagtaccccaaacggacacttgaaaaaatcgatttttttgttttcggggcagtccccccgaaccgatgcgcccagatttatggggaggccgaatccttcgggaatagcttccctatagcctgtactttaattctgcgttggatttttgctccccataattgtttgagtaccccaaacggacacttgaaaaaatcgatttttttgttttcggggcagtccccccgaaccgatgcgcccagatttatggggagaccgaatccttcgggaatagcttccctatagcctgtactttaattctgcgttggatttttgctccccataattgtttgagtaccccaaacggacacttgaaaaaatcgatttttttgttttcggggcagtccccccgaaccgatgcgcccagatttatggggagaccgaatccttcgggaatagcttccctatagcctgtactttaattctgcgttggatttttgctccccataattgtttgagtaccccaaacggacacttgaaaaaatcgatttttttgttttcggggcagtccccccgaaccgatgcgcccagatttatggggagaccgaatccttcgggaatagcttccctatagcctgtactttaattctgcgttggatttttgctccccataattgtttgagtaccccaaacggacacttgaaaaaatcgatttttttgttttcggggcagtccccccgaaccgatgcgcccagatttatggggagaccgaatccttcgggaatagcttccctatagcctgtactttaattctgcgttggattnttgctccccataattgtttgagtaccccaaacggacacttgaaaaaatcgatttttttgttttcggggcagtccccccgaaccgatgcgcccagatttatggggaggaccgaatccttcggnaatagcttccctatagcctgtacttttattctgctttggatttttgct

SEQ ID NO: 30726 - DNA, 1060 bp, Heterodera glycines
  unsure (1)..(1060): unsure at all n locations
atgccagttttcgagaattctgaaattccagcactacatgcngaaaatattgctccnaatgacatttctcgcccttttaagcgcaaatggggacttattttgtaattctccataccgttttcaattctcacaaagatgccagttttcgagaattctgaaattccagcactacatgccgaaaatattgctccaattgacatttctcgcccttttaagcgcaaatggggacttattttgtaattctcccgtaccgttttcaattctcacaaagatgccagttttcgagaattctgaaattccagcactacatgccgaaaatattgctccaattgacatttctcgcccttttaagcgcaaatggggacttattttgtaattctcccgtaccgttttcaattctcacaaagatgccagttttcgagaattctgaaattccagcactacatgccgaaaatattgctccaattgacatttctcgcccttttaagcgcaaatggggacttattttgtaattctcccgtaccgttttcagttctcacaaagatgccagttttcgagaattctgaaattccagcactacatgccgaaaatattgctccaattgacatttctcgcccttttaagcgcaaatggggacttattttgtaattctcccgtaccgttttcagttctcacaaagatgccagttttcgagaattctgaaattccagcactacatgccgaaaatattgctccaattgacatttctcgcccttttaagcgcaaatggggacttattttgtaattctcccgtaccgttttcagttctcacaaagatgccagttttcgagaattctgaaattccagcactacatgccgaaaatattgctccaattgacatttctcgcccttttaagcgcaaatggggacttattttgtaattctcccgtaccgttttcagttctcacaaagatgccagttttcgagaattctgaaattccagcactacatgccgaaaatattgctccaattgacatttctcgcccttttaagcgcaaatggggacttattttgtaattct

SEQ ID NO: 30727 - DNA, 850 bp, Heterodera glycines
aaaacccgggaccgggacttaccgggatttttcccaagtgaaatattttgggaaaaaaatttgaaaatttgagtgcactttgttgcgaaaattgcctatattcaaaaatgtacccataaaatttttaaatttttgtttgggggggggggagaaattcgaagaatttttccattattcgttggaaaatttttaaaaattttcatggggaggaatgttggaattttctgagtcccaaaattctggattttttaaattaattaacaatctcttaaattttttaactttttgtggcgctgttttttcaaaagactttggctacattgggggcggggggccggcggtgccgataggcggcaccggaaaaaaattaaaattttgtggaatttttaacagaatttgtcaaaaaatgaccaaatatttggttaatttgcggttttaggctgtttaaaaaaagaaaaaataataatttttaagttgaaatattttttattaattaaatttcaattgaaataatgtaaagaaaatattaaaaaatttctgttccgttgggggattgaacccaagagacaaaaaatgaaggtcagaaggtatagccagtaaaccacaaaaggatatacacaaatgcgttaaataaaataaaaattgatttttttctccaataatttctccatctccaccaattcccttctcttttctcacccagaccccattcttaccagtgcttatttagtcccgccgggaccgagactggtaaaaccgggaccgggatttctgtttttccaaaaatcgggaccgggacctgaaaaacccgggatttcccgaaccggtcccggtcccgtgcaactctact

SEQ ID NO: 30728 - DNA, 1457 bp, Heterodera glycines
gcgctccgctctggggagattggagctttggtgcatgtattagctctagaattaccacagttatccaagtaagaagtcaaggtcaagtaaattatagctggtgtaatgagccgtacgcagtttccctgtctggcaggttaaacttacacatgcatggcttaatctttgaaatgaacacatcagttcaggcaggatcaaccagatagctgctagcgagcgttgccaagcgccgctattacagccgtcttgtaaagacggatagtttcagcagaaacaactccgttcagcgcaagcgtgcgcatgggcagcgaaggagacagagcaagtggtaatgacacagcgctggccaggcatccgagcttcccggacttgggaagaaccatctcgccgctggacacagctccgagggcagtgcacaggcactcacacgagcactccggatttcccggttaggacacttcctcaggccaaaggccttcgggcgcttatgtctcgtgttttttcgaatgcaagcacactggtccccaggcaaggagttccgatccacgaactcatagggcttgtcaaccatggcaatacgccactcactcgtataccaacaccaccaccaactttaggttcagcatccccagtgctgagttccccacagcatttgtgccttaggccacatttacacaagtcaattaactcgccaaatttctttaacacacagacgagctgcatgtttattcatttcgacagctgccaatcgctggagaaactgaggccacgacaaaggtggcaccccagcagcagccatcaccgttcaatgccgagcacaagcgcaagcaagcacttgaacccagacggccgcgctccccatagcgaaatcgcatcttttttccagccataatatcgcaaaaacggcccaaccaccacagtcacccacgccaaccaaccaacgcaaagcacatacgactaggaactttatacaaattttaaaaaagtaatattttgtatatgcatttaatcaaatttctactttctttataaatgttagctaattagtcagcgtctatttattttctgtaaaaatttgcctctttatttaaaattaaattatatataatttcatgaaataagacactaaatgtatagagaatgaattaacgtggtcgattggaataaatggacaaaaaagcaaagtcaaagacaaaaccttaaagcaataggcgattggaataaatggacaaaaaagcaaagtcaagaacttatcctacctaatttcatggtggcaacgaggcatttgactcccttaagagagccttccttctcatgtacttgtacctaaaatgttgttggcacaaaaagtaaagggggaaaaagaagacaaatcatcccgatcagggctaagtctcaacagatcgcagtgtaaaagctgctctactgctaacaacccccctgacagtagtcaagtc

SEQ ID NO: 30729 - DNA, 886 bp, Heterodera glycines
aaaggatttaaaatcaaatagattggcatgtatgtacgaaaatcaattggaatttgattctctgattatttttaattagaactaaagacatttcgccataataattatttaaattttcaatcttggggcagtttcgctggcgaatttaagcccgttttagcccggccaaaatgaccgggctcgggcttagacaattggccgggcccgggcggcccgtccaaaaaaagcccgttttaccgggcggcccgggcccggtttttttgaaaatttaccgggcccgggcggcccggcaaaagcccggcgggcccccgggcccgtccggtctctaaaaatatccacagtgaatcggttcccggttgaaaagcttttgcctgtttgtcttgatcaactcatctcattgtctttttaaagcgattgaaacctaagaaatgttatatcttaattttgtcgcgtcccccacttttaatggaatggttcgtacatatttcgatcaaatggaaaatttcgtcgattgattaacacgattaattctatgctccatcaaaatccccggattttcctctatttcccttcgaacggtttctcgtgcctttccttcgtccgccacacccaaaaggccttttctcccatttacccatccgtcgatgaagcgaaggatctccgctctgattgattgactttattcattcgttgtgctgcttctgctcgctctgcccctccctttctttctcaattttcctatttccttcgttttcccctcaaatttcaaatggcaatttgttcaattgttagaaagcaaaacattttatggttggcggattcatcaataagctcggccgactgcgatcgttgcaaattgcttttcgtcgccaattgttcacgcaat

SEQ ID NO: 30730 - DNA, 1189 bp, Heterodera glycines
  unsure (1)..(1189): unsure at all n locations
ccattaattgggtttaattgtttctcctctttccgtctaaacatgggttttctggggcagcggtcttgaactgttccattgatctttggcggtctatgggacccactcggcattttgtttggcaaatgtgccattattggacgccaagtttttttttttacattttttaatttttctagagcctccaaaggtttcgtttaattaaaatttccattttcattgatttaatggcgatgatttttcaggaattgttggagcaacgggaaaagttggaacgggccgaacagaatttggacaccattcaccacaccactcagcacacacagcgcagtgagagtttttttaggccaaattttaaatttattttgtatattcaccatcattgacaatttatttgcccaggcctgaacagcttgaaatcgtggtttggtgggctggtcagaaacaaactttcacgagcgccaaaagggttgggcacggcaaatgccaatgccaacaatcagcagcaacaacaggaacagaccgtgcagcagcaacatcagcaggtgatcaaaaatggatagaaaagagtcacatatttcggggtgtgggaggcctaacaaatccgattaaaatatatacattttttaaaaatttcaagaaaattaaaaaaaaaaatttttttggcgacgtttcgtcccgaggcgtttcggtggtgaccttttgccctgctccctttgtccaggcatagaatttcttagaattttttgaatcaaacaaaggtttaaaaaaggacccgctgcggctaattgcgttataaaatgtttggagactgccggaaaatttaaatttgtcaaggaaattggaaagttttgcatttcggggctggggagagtgtattctgtgacaattaagtaattagcgttatttgacttctgaattaagcgtccgctgcatgcccatttggtgcagtcgtctgctgacgaatttgccggggccatcggtggcggaggcggcggtgttcagcccccgcaacagcactcgctgaactcctcgtcacgcgcgtacattcagggcactcgttgggaggcgatggacgacgaaattgacaacaatttgggtaatttgtcttgacaaattctttgtaaaaatgtgccgtgcctctcttttncacaaaaaaggaacttggaacgccaaaaagcttaatatt

SEQ ID NO: 30731 - DNA, 677 bp, Heterodera glycines
ttttcaaaactgtcacttttcatatagcgcccaataagtgtttaccatttctttttctgccaacaatgggtccaatggactgcccacgaatacgacaatgcgctgccgatggttgcgattcttcctgtgtttgagtgccaagtatgcggttttgattccatcgaaaactttcgaaacgccctaaaattgggaaaaagatgtgcaaatatgaaaatatatatatatatgaagaaattacaagaatttcaagactatgaagacggaccaacaacttgcgatcttcagtggtcagtgaattgagcacatcaatacgactaaaaacaaaaaacaaattttgataaaataggtacataatgacgaatttctttttctaccaaatgaaaggggcaattaaaatttttggcgctagttaaaaagtgaccttttttgaaaattttttcacttttttggtcacatttttttttgtttgtttgttttgatatagaatgatgaacacattaagcattgagcataatttggcgaatataagtatattcacgattttttatttcaaaaaattttgcaaaacaaaagggtcctcccccctttggttttttaataaaattcaaaatctttcactttttttgttgatttttcgtcattcgtaccatctgttaaaaagaaagaaattctgtatc

SEQ ID NO: 30732 - DNA, 567 bp, Heterodera glycines
cttgcatggcctgggcaggtcttacaaataaataaaatttaatcgttagaagtgcaaagcttatttattattcaaattttattataagagatggcctaaatgcaaaaaagagatagcaaatagagtaccaacccattataaaattataaaaaccaaaataataacatgaaatttattttattacatttttggctgataaattctttgaaaagcatgaaattgatagagcacaaaataaatcatcattataccttagcatcaatttgttccatctttttagagttgctgatgagatttttaaaaatccagcaatttctttatcacagaacgacggatttgctttcttcaatttataataatcaatcattttgctcattttttgttctttcgaatgaacatcttaaaaggataaaataaaatatttaatttaaatttaaaagttactttttttaaattttagatttctgtgtgggcacaaacccccccccccacccccccccagaccaagcttcaccattttccaaaaaatttcgcttaatatttcaaaaaaagcaacaattttttgat

SEQ ID NO: 30733 - DNA, 973 bp, Heterodera glycines
tataattaattttttttaatattttctatgccaaacaaatatgcagtttttctaatcaaatagataaatttgtccgacagttattgtttaaaaatcttatgttgcgcaatacagatttttaatttcatattttatataatccttattgattgattataaaaaaactaatcataagtggaaagtaataaaaatttctgttaccgagatgccaatttttattttaaaatcttttttggcaagttttgaaagtttcatttcttatgaacttttttagcatttattggaaattaaatcaattaatacaaataccaacgaagaaaaaattaatgtgaaacgaaaatgaaattagtcgaagagagggggcatctggtggagaaatgccaatgatgtgatgaagacaatgccaatgatgttaaaagggaagaacgcgtcgttttgtgtcgattgactaagattgcagcgagagagtgagagagactcagagagaccaatgagcgaagagaatagaagagatagaaacaaaggttgagagagagagcagatagagagagagagagaggaagagagagagagacaatgaaagaaaaaatctgatgacatacataaaatgaattgggtgaatagaatagagacagagaaaaagagagaaacaaaacagaaaatagaaagtatataataaaaagacgagaaaagtattttaacttcttcaataaatttcctcttcatttataaacttcaaaattttcaaaaagaaatttaaaaattttttaaataagttaaattaaaaaattcgtttttttgataatttatttacatgtattaattattaacattatttgaatattttgtgtaaatgtaatttttttaagttacatcaataattaagttgatagttctcgtcaattagtaataattttttcattttaactttatattaatttttatcttaatttcttgcagaaatttaatgttt

SEQ ID NO: 30734 - DNA, 1709 bp, Heterodera glycines
  unsure (1)..(1709): unsure at all n locations
tgcaggtcatnnctccttggaaaaagcgcatttcctaaacgctgttccccctttcttcgaacaaatacccgtcgcgcaagtgaccgactcactcttcgctaagcgccgacgaaaacgcgtgccaccacggggaggaggcgtcggtgggggtcagcgatttgcacattcccttttggacgaactcaaaagtgacgtccgggcccgcctctttgcaccaattggcgatcattgcttccatttgctgaaccaatgacagaaagtccaaaaaacagaaagaacatttccccattgactcacctgaaagtcgtcggttggcgtcacgcgcatgtcaaaatctaatggaataattaagaacataattaatttcatgaaacaatccaaaaaagccccgacgacaatgaacagtagttagaatgacttgaaatttggtagacagacaaataccaaaattaaatgccaacagtcgaaaacattttcgattacgttatataaaaggtctcaaacaaaattcaaagtcattctaacaactaccagcatttacaaacttcgtgaatttcatagactaaatccacacggtcagtgatcatacaaatagaactgtttgtgcggaaaaacgtacatgccacgaattgggcagggatcacattggtctgcactccaccctcgatttttgtcagatttacgcttgtgacatcgccgagacgcaaattcgggtcggcgagaagcaaatgacgctgacgttcacgaaaagcattgaaattggccaaaatggaagtctaaaaaattaaattagaaaataattgaatggggaaatttattcgcaaagaaaaaccacaaataaaaccaatattttgccacccatcccacacataccaactttggaccagctgtgttttcaacgaatcgcgaaccatgcccaggggctaaaaagacaaataacgaaaatgataatcaaaatgttttatattttccaacaataaaaatttgaggatggcgtagtgcacgcaaaaacaatacaaaaataccaaccgccaggacaagtgatttgcagccctgaataggaatagaattgtaaaattgtccaattgtcataactcacaccacgcgcatcgttccccataaaaaactgagtgagtgtccgtttcgctggccaacccttcgtcaagcgcaaaaccgatgttcagagaacgaaatttgtccgtatgaataaacttttccattccgtcgtggctgccaatttcttcatctaaaaacccaataaacattcgaaagatttttgctcgtcgttagtcaaaatctttcgtttgaaaaatatagcaaaattgcccatttttggttgtcaattccaaattttaactaccgtcaatgttcttcttgaaaccaacctggaccccagagaatgtgaaccgtccttaaaaatggtttttggccattttcaaataaaatttctctcaacgcctccatgtattggatgccaacacatttcatgtcctaaaagcaaaattcaagtgccatgtttaacaaaaggaaatggggtcgacttgtgctcctcgcccaaaaatattcccatcgatgtctttaaacgcttcataaggcgggtaagtccaatgttcctagattaaaaaaaagtgttattataatgttcaaatcaggcaccggaaaagtcggcaccacatcggtaaagggtaaaggagaagggatggcaatgt

SEQ ID NO: 30735 - DNA, 1423 bp, Heterodera glycines
cgagtgccagaacaagtgccgtgacttgattttccaatttttccatcggcttttcaagcgctgataggatcttttctggaatggacccacgcccactggcaaaagcctctcaagcaaattttcgagtcgtgacattcgtggtcaaagaatggaaaggtcgggattattggcagaaagaagttcgtcagtttcactgcgaagtcgtttgctcattatagttaattgaggaggataattattgtgggaattatcgatttgaatttttttgatggaaaaagaggggaatggaaaaagaggggaatggaaaaagaggggaatggaaaaagaggggaatggaaaaagaggggaatggaaaaagaggggaatggaaaaagaggggaatggaaaaagaggggaatggaaaaagaggggaatggaaaaagaggggaatggaaaaagaggggaatggaaaaagaggggaatggaaaaagaggggaatggaaaaagaggggaatggaaaaagaggggaatggaaaaaaatatttcaattctttggggtgtattttcagaaatttttctgttcatttcttaggggtgtgtataacatttaataaattttacgttgtcaacgcactcataacaatgtcagttattgtttaatacatctgctaaatgggaatgtagaagtaaacacacaatactttatcttcagctgctttaataagcattgggcaattaattatctggtcaaaattttgacaaagaaaacaacacaatcgaacataatttgtaaaagtttccatttggcagttggttggcattttatcactttgccaaaatcaaattcccacccaaaaaaaatatttaaataaatccacattaattaaggaatacataagttaaattttcacaaattgtcgttaataatcccatggaattgttgctgtttcgtcagggcgaatttgacaaattgtatggatgtgagggatttaatgcgggcaaaatcccaattgaagaaagaacaaacattatgaacggatgcattttgatgatactttttttcatttttgaggtcttttttcgctgggtgatggaattatagggctcttgatttgaatttttctactcttgaccgagacgcaaaaattcaaagaaaatcccaaaagtttaaaaataaatcgatataatttaagctactgtatattccgtgtatggtatcaatttacaaaaacatgaaaaacaatgcctgctacaaattgatgttcttcattggcatattggacatggtcatcttttaacagaataaattcttcaagaatatttatttatttttaaattaaatttccatagttggccttgttcattagtgggttggaaactggaattcttggcatcattggtgccgtttattgtgactatccattgctgatttattcaagcggaa

SEQ ID NO: 30736 - DNA, 929 bp, Heterodera glycines
gcttagatcacatgcgatttcggcactctgataatttagcgcacataatgggatgataaaggcgattgtagaagagatggaagcgctaaaattgtttgaggagctttttgagcgtaattacgatttttacttacaccattttttgctaggcttagatcacatgcgattttcggcactctgataattttagcgttcataatgggatgtataaaggcgattgtagaaggaagtggaagcgctaaaattgtttgaggagctttttgagcgtaattcacgatttttacttacaccattttttgctaggcttagatcacatgcgattttcggcactctgataattttagcgctcataatgggatgtataaaggcgattgtagaaggaattggatgcgctaaaattggttgagaagctttttgagcgtaattacgatttttacttacaccattttttgctaggcttagatcacatgcgattttcggcactctgataattttagcgctcataatgggatgtataaaggcgattgtagaaggaattggaagcgctaaaattgtttgagaagctttttgagcgtaattacgatttttacttagaccatttttttctaggcttagatcacatgcgattttcggcactctgataattttagcgctcataatgggatgtataaaggcgattgtagaaggaattggaagcgctaaaattgtttgagaagctttttgagcgtaattacgatttttacttagaccatttttttctaggcttagatcacatgcgattttcggcactctgataattttagcgctcataatgggatgtataaaggcgattgtagaaggaattggaagcgctaaaattgtttgagaagctttttgagcgtaattacgattgttacttataccattttttgctaggcttagatcacatg

SEQ ID NO: 30737 - DNA, 1135 bp, Heterodera glycines
tccctccccccgggggacttttttattgacccgcccccctcccccattcattcattatgatccctctcccccccccctcctcttccaatggcggggtggcccacagatggcgcaaatcgttccgccgtatctgtcggcattccctgcaattaacccttcggccccctcttttccctctgggcgcgccatttccaatcacaagtaattcgccggcggcgggcggcagcatttccctccccccaaaatggcattttcgcattcattcgcccccccccccccgacaattgctcaatctgtcgtcgtcgtccctgatcatctcaaagggaatgaatgaatgaagcatttcgtcgacctaatgcataaaattaatgggcaaataaataaaaaataaaataaataataaatcggatgatcaaagaacgaacgacggacccatggctttctgataccgcaaaaattacctttttggcccaattgccccgtctgctggtcactttatggccaagtgagcagttttttcaaaaaatgggacagaacttttacgacggcgagttgtatcattttttgggattaaataattatcatctgttccttcctttcccactgactgattattcacagagtcattttttccaaaaaattgctataaaaatgtctgaggattttaaaaaaatcggctgaatgtgaattcatccgtgatcatgtggagttgtataacgatatgattctcctacagagacctcatttatggcaggcgtaaaagcaatttttggttttgctgaagcccataaaattacgattttcgcattttttgagaccatttttatttgtacagaagtaattaatttattttattaataaatgaattattctttcaacttttttttgtgtccttgaatatgtcaagatcaagtcgcttctcctttttcctttcctcgaccgatggtcgagagtgccgacgagagtctggattaagaattctcttggtgctctgaccgctcattctttttgatcaagagtgaaaaatgttgaatgaaccgatcgcatacaaaaaacaatactctgaccactgccgatcatactgatcgagagggtcgcgagggatcgaggactgagtactgactgactgattgct

SEQ ID NO: 30738 - DNA, 692 bp, Heterodera glycines
aattttccaaaattaaaaaacaattttttaatatttctttgtttccaaatgatccgcctttaagttccgaataaataacttcaatggcacttccaacaatcacaatgcaatcaaaacgattaaatctgacaaaatacaaacaaataaaataaagaaaaaatcaataaatttaaaagtatcaatacagtacttcgatgtaaaataagtacggtaacccattgcaaaaattttgataagcatttcactgatgaaaatggcaagaaatgtgaactcggcatattctacaaaaagtttcggatttgtaataaaatttaaataaataacaaataaaaaattacttaaaaattccgtgaaccattcgggctaaaaaaaattattatttaaaaaattttaaactaaatttcacctgtccatgatgctcactggccacacaaacagtattcaggaacaccaaggttatcacgctccagtaaaaaatctaaaaatattttaggggttgggaaaactgtgcccggaaaatggcccatagaaaatgcgtcagtgaataagaattttttgaaaacaaaatgcgttcttaagcattacttgatagggaaaaacaaacttacaataacacaattacactatatttttaatgcgttttcggttaatttttaaaagtttatttattatttttaattttcaaaaaattg

SEQ ID NO: 30739 - DNA, 1189 bp, Heterodera glycines
  unsure (1)..(1189): unsure at all n locations
aaaaaaaagaatgaaacttatttcaaaccctaatatcccaccaggccacaactccttaattggagtctttggttcttctttagagaattntnanaagtntttnnangngnaggnaaanngantaaggnaatnanattgggnantngaatttggtntngggttgaatntgaatntttnatttgnttatgattatntaatatgaatttggaattanattggtggantngggaatgcatttgattattagtgattagtgcagaaaggaaaaattatccaaaagtgggaaacaggaagttattttatttatttttgaacaagtaaaagtaaaaaacaaaacaaatctttttaagaaaaaaaaatccatttttatttttcttcgtaacgccaaattttctctttttagtgccaaaaaaccagagtgtaatatgataaatttatgaagaaactcacctcccaaaccattgcatttcacttcatggaaagtctaaatcactaagatttttcatcgtgggcacaatttatttttcgttcacatttttggtttttcggggagctttagccctctttggctacgccgttggttccctaagtcccaaaaataaccattttccgctgtgtcaccagcgcaactctgccgaccattttaaagatggcaacttgttatcaaaaatatacgaatttcttaaattcttcattgttttaaatagaatggttcccatttattgaaataaaaactgatttattcgtagcctatgttttaattgtccatacattcgtcaattattagaggggatggcacttttagagggaatcagtgatcgattgacgggaaatatttctttaacctaattgcctggatattcgtttgtcctttcatactcattaattaatcaatttggagggctgcttattgacaattggagtgatcggtaacaacaaatgttgggaataagtcgcaaggatcgctgcacttgaaaagacccgagacccacttagcaaatgaaagaattaaagggtcaaagtacgctttttaatttttataagcaaaattcgtaaagtaacataatcagcaatggtaaaagaactggattcccgtaggaaaaatattgaagcaaaaattcgaaggttcacataagttttctctgaattcctctggcttcctcctacattngtcatgcctgaattatga

SEQ ID NO: 30740 - DNA, 1061 bp, Heterodera glycines
ccaattttgcggtaaaaaaaatgaaaaaaaaaagatagccaatttttggtcaaagaattttttttgtttgcgtttcaaatatcgtaagatggttgatagggccagacaagagaaggcatctgttgtaccaagtttgcggtaaaaaaatgagaaaaaagagataaccatttttggtcaagaattttttttgtttgcgtttcagatatattgtttgatagggccagacaagagaaggcaactgttggtaccaagtttgcggtaaaaaaatgagaaaaaagagatagccattttttggtcaagaattttttttgtttgcgtttcaaatatcgtaagattgtttgatagggccagacaagagaaggcaactgttggtaccaattttgcggtaaaaaatgagaaaaaagagataaccatttttggtcaagaattttttttgtttgcgtttcaaatatcgtaagattgtttgatagggccagacaagagaaggcaactgttggtaccaagtttgcggtaaaaaaatgcgaaaaaagagatagccattttttggtcaagaattttttttgtttgcgtttcaaatatcgtaagattgtttgatagggccagacaagagaaggcaactgttggtaccaattttgcggtaaaaaaatgagaaaaaagagatagccattttttggtcaagaattttttttgtttgcgtttcaaatatcgtaagattgtttgatagggccagacaagagaaggcaactgttggtaccaattttgcggtaaaaaaatgagaaaaaagagataaccatttttggtcaagaattttttttgtttgcgtttcaaatatcgtaagattgtttgatagggccagacaagagaaggcaactgttggtaccaagtttgcggtaaaaaaatgcgaaaaaagagatagccattttttggtcaagaattttttttgtttgcgtttcaaatatcgtaagattgtttgatagggccagacaagagaaggcaactgttggtaccaattttgcgttaaaaaaatgagaaaaaagagatagccattttttggtcaagaa

SEQ ID NO: 30741 - DNA, 2212 bp, Heterodera glycines
ttctcagatgcagctgaacggctcttccatcctttccatcgttctcggacgattatctcaaaagaatgcctccgccgttcattgcgcggccccgccccccgccacagccgccgctctcagccggcaccgccattccagcgccggctcaattcagtcggacacgcggcgcaatttgattgctttgaccgcgagtgtaggcaacgctttgcaacggacgaaacgcgagttgcaacggacgcgcctttggcacgcattttacgccttcgctttgccaatttatacggtggcaggagcacttcttttccaggtgattcattaattgcgactacatttgccaattagtcacctaattacggtttttaaatgaatgttttgtttaggcgttggacggtgcccacgatgaccaacaattggcccaatatgagcagcgatgtttggacggacgtacaacgaaattggctgaattggagaaattctgcgacgcgcagaacagcgcggactgtttccgacaaatgaacacatttttgggagaggtggaaaattgttatcggagatggcacgaagtgagtggcataatgggaaggactgatcagacaaagaaccaacaaaaagatcaaccggacgataacccatccgatgtccgacttcacaaatgccatcatttacgccttcaggcaattcttatgccagccgattaattaatttatttattgattgactgatagttgaccccgggagtaacactttccgcggccctttcagcgtgtacaccacaattggctacggcacaatctctgccagcacaacctccgcccgtattgccacggtgatttacggcgtgtttggcattccgttgttcttcgccttcatcaaagaggaggggaacatgttccgcaacgtgctcatttggctgtacaatcgtgccaagtattacggcactcgtcgcttggctttcgcctcggcaaaccttccgcagacattgcgaagtaaaggcaaattgtaagagaaagacattggccaactccttcagaattctcttcgtctcggctgttgcgttcggtgagggacggacgacggccgagggacggccatttgagtacagaaggcgaggaaaaggaaagggcactgctggcgaagggcacgggaagcagccaaaccgaactgaccacggcggaaaacggaggagcggagagcggcacatttatatttaatggtgggaaattgggtgggagaggggaaaagaaaagataaaagggaaatgtgcaaaggggggcaaagaagggcatgagatttgcatgtaaatacaatactttgacaggcacaagtcgtcagaagaatgcccgtttcagcaaaaacccgccctttgtgcgtcgctctagtgacctgtcccttccaaccggtactccctttcccttcccctttccctctctccctttctctctctctttcactgtcttttttctttgtctgtgtgttgatgattcgcttttgtccctccactccattttcagcatggaaaggctcttccgcctcctcttccgtcgcttccggtggttgccgtaagcaactcgtcgcggtcgctgccgcgcgcaatcgctccgccgcgtccgattcgaccgccgcgttggaacagcggcgcgtctttctgtgcggagtgttccttttctgtctctatttgttggccgtgtccgcgctgttctccctgatgaccaactgggattacttcacctccttttacttcttattcaactccgtcgctctgatcggatttggcgacgtttttccctctcagtcgcgcatcattttggccaatatgtcattaattgctctctttgtcggtccatttgctaatagggtgttaattagttcaggttcttcatcgtcttgggcgtcgttctcttctctatgtgttatttcattcttcaggaagagattcgtgccaaagccttcgaagcttcgcggaaggtgccaatcccttccttatcagtgcttaacagttttgacctcaggcgaggatgagcatcaccaaatactcgcagtctctgatgcttcacacgcggccgtggagccgtcgaaattcgccggcttttgacaaaacttcgtcggcggaaacgccaatcaattcgacagactgcgcaaacggcgacagtcggcgccagtcattgcggtgcagcggagcagcgacaacggcggaggcaaggggagggcgagc

SEQ ID NO: 30742 - DNA, 1014 bp, Heterodera glycines
  unsure (1)..(1014): unsure at all n locations
agtgatcactcaatcaatgctcggctttcctcctttcttttgctgcttttcctttntattgaaaactgacncccttaggcattttgttgctaaccaaattaattaatatttattggctttttttaattttcaaaagttcgtttaaaacagacactttacgcaaatgccattggaatgcgattccgccgaaatttaccaccaatttgacacccaaagccaacaacagctgaagagaggacaaatgccagtggacgacggtgccgtagcaacggaagcacacgcacaaaacggcaccgccacccgaatcacttttgagaactttttgggccaagtaaagtgccaattgtcggtattgctttcacaaaaagggcattttgaggggcgagtgaatcaattgggcggagtgtttatcaatggacggccattgccacacgaaaagcgcgttcaaattgtggagatggcacgcaggggcataaagttggccaattgacggaatccattcttaattttgtgccttacagaccctgcaaaatcagtcgcgaactcaaagtttcccatggagcagtgtcgaaaattctcaatcggtgccaaaaaaacaacaattagtgattgtgaatgaatttctttttttaggtttcatgagacgggctcaatttctccaggacaggtaaaaggggagacaaagctatgagaacgagagacttaagactttgctattatttggaaaaagtgacagttattttttgaatatatacagtattcctttttgacacacacttacagtaccaccatgcgatgtcttctctctctctctctctctctctctctctttctctctctctctctctgtgttctctcgtctgtctgcttctctctctgttctctgtgagtgtccaatttaattgccatttcgacacgaccaacgaatattttatgtttatgngtgggacgggggagaagaccttgancaatttgaaatggccttttaaaggatggatttgtgcgaaattttgg

SEQ ID NO: 30743 - DNA, 753 bp, Heterodera glycines
gaaaatttttatttcttagggttatatttttgaaaatgttagggtcgattcttaggggtataattttctaaaatttttggggtcggttcttaggagtatattttccgtttttattgcatttttgttaataaattttgggcaaaatgccaaaatagtgatttttagtgacgaaaattgatgttcaaacaaaaatttcaatgcagaaatacgtttcttaagctttttcttcaaaacaattgagcaaaaaaatagttaaaaactagaaatcgcatcttaatttgttttgtcactttctaattgacttgcgtgaggtttgtttcatattttcactgcttccattgctaaatttgtttgttgccgttgaaaaagaagcttctgtcggaaaagtttcagcagctgttgtaacattatcatctttcaaaaaaaaattagtaaataatttgagtttttgaatattttgtggcttttaaacttaattaattatttaaaagaaatgcaattaaaaatgcggtgttaatttatggacgtcctttttgggtcagattattttaaagtgtgcttgtttctgcactaaaagatgatactgaaaagagacgctaaaaggataagaacctaaatgaaattaattaaaaataaatattattttaataagattaactcatttcgacgctgtccaattcgttgggcattgttccatcatttggcatttctgaaggaggaaattccgaggataaattattatttgaaaaattt

SEQ ID NO: 30744 - DNA, 1521 bp, Heterodera glycines
  unsure (1)..(1521): unsure at all n locations
catcgacgtcatggcccaatacgaagcagagaaccggcagagagcaacaaatgctcctctgcccgggtctgatgatgctcctccacccgtggctgaagaccaaagaggcccctggtggtttgaccaggattgggggccccagctcccaatggtccctgaaaacaggggccaaaatagccaaattggcgaacaacgaggcgattggggagcccatgctcctccccgacgggaaccatcgccccgtgaacacatggagcgactcaactcgtgggttgagcgacaccacagccaacaatggtacgagacggctgtcattcgccgtgacgcggaggaacacctccgccgagaactgcgcaccggtgccacgctttttgcggcacacctcggtccattcgcgaatgtccatttcgacgggttttcgcgttttggacaggctaacacgcaaatgtttccgggacggactgtccgggaacatttccgacggcgcgggttccaggtggaccagaatttgccatgcctccaagagtatggaggcttcagcaatagccaacaaggaatccatgtcgattacttcccaatcgacatggtcaatgtccgattccaaatcggagctgatcggagggaggccgagccccctcgtcctccccgaataagagcgtatttggcattggagtaggctccaaatgaccaagaggggcccaacaggggacccccgtcttcggcgtctcttcgaggccattggcttccgaagagacaatccgaacattggcgatagggcggaaaacaatgcccgccaagcgcctattcaacgcggagagcgagccattgacaatggccgcccaatttcaccggacggaagctttgagaaccgcccacgaagggcggttcccaaccgtccaacacaccgttggcaaaacggcctattcattgtggctttagctttgtgcctcggcaatttggcagagggaaaggaattcccttcgccaaggactgaccatcagtcgcttaaagcggcggacatggcacgtgaaaatcaagggggattttcacgaatacttttcccatcgccattttcccacgatcagaaagcaaatctgatccaaggaccccgccccttcaatggtagcggaacctatataaggggaaggataaggcatatcccaccaccacttgcccttcccaaaatgccgaaacccatcaaaatgccctcctcgtcatcgtccgcctattcatcatcatcatcatcattatcatcatcgccggatcgccagtcgccgccaccgccccgcaaaaaggcggtggaactgttcaacattgccgcagcaacgcctgagcgggacgcgaaaagcggacggaaattttccgtccgcgacttcatcgacgcggaggcaaaggaggagccttcctcaaaacgcctgccgacgtgttcggcgtgccaactctccnggcatcgcctcggngcaaaggcctgccccctctatgtagctccacannagggagcgggtcggcggcagccagccg

SEQ ID NO: 30745 - DNA, 1550 bp, Heterodera glycines
  unsure (1)..(1550): unsure at all n locations
aaaatggggtatgaaaagtttattggggaaaaaaagacttttacaaaataatacccctgggagaagggagtgggaaacatgatttcaaaattttcaattttttctagtctaatctactcaaaacggctcagaatcnaataaaaataacattcacggtgcgaaaaatggggtttgacaagtttattggggaaaaaagactttacaaaataatacccctgggagaagggagtgggaaacatgatttcaaaattttcaattttttctagtctaatctactcaaaccggttcagaattcaataaaaataacattcacggtgcgaaaaatggggtttgacaagtttattggggaaaaaagactttacaaaataatacccctgggagaagggagtgggaaacatgatttcaaaattttcaattttttctagtctaatctactcaaaccggttcagaattcaataaaaataacattcacggtgcgaaaaatggggtttgaaaagtttattttgaaaaaaagactacaaaataatacccctgggagaagggagtgggaaacatgatttcaaaattttcaattttttctagtctaatctactcaaaacggctcagaattcaataaaaataacattcacggtgcgaaaaatggagtttgacaagtttattggggaaaaaagactttacaaaataatacccctgggagaagggagtgggaaacatgatttcaaaattttcaattttttctagtttaatctactcaaaccggttcagaattcaataaaaataacattcacggtgcgaaaaatggggtttgaaaagtttattttgaaaaaaagactacaaaataatacccctgggagaagggagtgggaaacatgatttcaaaattttcaattttttctagtctaatttactcaaaacggttcagaattcaataaaaataacattcccggtgcgaaaaatggggtcagaagagtttgtgaagggaacaccacgagtccgcgaagaggccgagtgagtaccttcggtgcaggaaaattattaaattttaaaaattttttaattgctttttaaatatgccaaaaaatgtaggcttaacttttttagtgaaaattcgatcactcatattttttgataattgagcagaagcgtaccaaactttgcagggatactccccggtaaaggactaacttacactgaaatgagcgccgagctagctggctcaaaaaaattttcgaaaatctgagtctttcgtttttatttattttttgcaaaattaattcttaaatattttttcagaaagggttatgaaacgcaccaaattttatttacatgttagtttaggcactctgatgctttttctatcaaaaagggagatgaataaaatttttaaaaatttttaattcctttttaaacaggccaaaaagtttaggcttaacttttttttcagaaactgatcagaagcgcaccaaactttgcagggatactgaaaggaagagaaataacctattttaaatattatctagtcagttcatttaaataatttttatcctaaa

SEQ ID NO: 30746 - DNA, 963 bp, Heterodera glycines
aaaaatcccagataatcttttaaaaattccaaatctcttcactatggataggtcccatccccctaaacactcttatggggatggatgccatccccctaaacactcttatggggattcacatcataggtagcgaagctcccaaagcgcgaagcgcttttttccagcccagagccgacggttcatttattttattatgaagatttctattattctagtcgtttgtcatatacagtaattgaagtcgctgtggtggacggacggttacttgaattttttgtttgattgttttttgttattatttaatttaaattctgaaagcattaattattaggtttagtatttatttattttttcttcatttgtttgaacactgtattttttcatcttatggaatattttttaatttctattttggatgatttttattactttatttttttttgtataaaataacatttttaaatgcaaaattacatttttcatttttcctttcttggtgttctttctcgttgtcttatggtgtggtatgcctgacattgttctatgtttctttttatattttttcaatttttatcttgtatattaataattgtggcaactttaaatacttgaacttttttattgaactgcttacttaaatattttttaaatttttcatctttaaatgtagtcatatcatatcagtttttgaatacaattatatcgcttttttcatatttatttattaatacaacaattgatttatatattaatcttgttttataaatactttaacaaaatttcctatacaaattatataaagaatttgttaaaaataaaatttttaacataaatttattatctaattattatttttttctttttgtcttcatattcaaagttttgctcttttatttattattatttattttatttattttacaatttcaatttttgacaatttaattttgtttgtacaaaatt

SEQ ID NO: 30747 - DNA, 1073 bp, Heterodera glycines
  unsure (1)..(1073): unsure at all n locations
atctctaagtacatgcacactttggcattgtgttcttccaagccctcttttgtngttggtatnngtgcagttaatccatcctttaattacccctgcctcgctaaaaaaagagtgctaatgtgaaaaaggagtgcgaaaataagaaaaaattcaatttatcctcaagaatggcacaattcgctccgctggtttattggcaaatggccaatgccaacttccttcgtcgccttttagtttcttttatgccattttttgccaaaagacaatttacttcttttttcctccaacccttcaacaagtcatttcaccctcagctttcccccaatgtccttaaaatccgctttgaatgagtcgagtcgcttagcgcgatattggtttgaagtaaagcgaacaatggcagagaaaaaggaaaagccgaaaatacgctcggggaaaatgttgtaaggaaaagaggggaaaaaggggggtgaagggtttaagcggctgtcaagcaattggaaaggttggaaaaagggagggcacagcagagagagagaggggcgggaagatttgtggcacgaacaaaacccaataaatgtggcgggtggagggccgaggcgcaatgttgccttccatttttgccacaaaattcgaaaaagggcgtaaaaatgcaaaaattcatacaagcggctctttccaccctccccccacgagttcgccctgtaataagcgacacattttcattaaattttatttcccactggagggcaatttctacccattctatgccctccggtgccattcgtcctctccatctcccctttttttccttttttttgttgctcgtttacccttttccgaaaccattttactcctccagcagcagtgccttaagcactaaataaacacccacattttttcatctcctcctctcccctccggtcgcttctctttgcttttcgccgactgtctctgtctctgtcaatttcagtacattttgtgccctcctccatctcctgcccttcctcctccattttgtgccctcctcctcccgctctcccccggccttccccctccccttccaatcctcttca

SEQ ID NO: 30748 - DNA, 1161 bp, Heterodera glycines
aattcagatcaaaatgagttttagacaaaagtggtccttcctataagtctatcagtcacacatttcgtttggaattcgaatgttagccgcccaaatttggagataaactgaaattcagagtgtgcccttccttctgtttcaatttctgagataacactggtgtcatttgttggaagagattcttgagaagttgtaacaaacaaacaacgcaataaaaagaccaattttaagttaaaaagaacattccacattgagtaatctatttttttaaattaacattaatttcttaaacaaataaatatatttaaacatataaacatcagtaaaaaattttgagttgttgctagcgggtatactctgttttaaaaccagtatgagtgcatttatgtgcacttttattcgctgggcgtcggggttttcgttcgagttcaatttagtgatacagcgttttgaataggagactaatcttttgtcaagagtcaatcgggaattttttattctagttactctaatgatctcgttagaaaatttttattttattaattaacaaaaaaacactgctttaaaactataatgtaattattttttcattttaatgcaaagttcttttggaaattaagtatttaaaattgttttgaatgtttttttatagcttttgcatttattttttataattaaatttatttttaattaaccgataaacattctcttgacgaatgttttcttttctgtatcccgtatttctgagataataatgatcatttaagtttttgttaaaaaaatgtaacaaacttagctatttggtactaaaagaaagttttgtttattttttaccaacatttttcacatagaagtgttactttttggtataatacaaatcattttttgtcgcagaatctcatcttccacaattaaagaataaataaacatttttactttactttcttcctttattctagatgttaaataaaaatttaataaaataccattttacctaatcactttgattttgttttcattttaaaaatattttcgaacctaatataaattttcattttttagcggacacaacattattaagctcatattttttggttttattagatttacgtgaaaatataattttaattctatcgaaattttttgatttttgatgtcacg

SEQ ID NO: 30749 - DNA, 884 bp, Heterodera glycines
ggagaccgaatccttccggaatagcttcactatatcctatactttaattctgcgttggatttttgctccccataattgtttgagtaccccaaacggacacttgaaaaaatcgatttatttttgttttcggggcagtccccccgaaccgatgcgcccagatttatggggagaccgaatccttcgggaatagcttccctatagcctgtactttaattctgcgttggatttttgctccccataattgtttgagtaccccaaacggacacttgaaaaaatcgatttttttgttttcggggcagtccccccgaaccgatgcgcccagatttatggggagaccgaatccttcgggaatagcttccctatagcctgtactttaattctgcgttggatttttgctccccataattgtttgagtaccccaaacggacacttgaaaaaatcgatttttttgtttcataaatattttttcccagaaaatgctctaaagcgcaccaaattttatttacaacttaatttagcactctgatgctttagtatcaaaaaggaagatggagaaaaaattttttaaaaaatttttccttatattttggttatatcgttttgcttttggtggggtgcttggaacagtggaatcatgcgcacccgtccgatctggcaagttaagcaacgattgctgactagccaaaaggttcggtgccgtgatgaaacgaaccagcactgcttaccccgcggcacccggcacggtcccccgaaggaatggatttaattaaattctctccttcggggatttttttccattaggtcgtccgttagcgttcgattgctctagtcaatttttaaaaatttttgttgaaatatttgtcgtgctctgaagggcggggggg

SEQ ID NO: 30750 - DNA, 903 bp, Heterodera glycines
ggctcaagtccagtttatgcgtcccatcgacttttatgcgtccaatcaaattttatgcgtcccatcagtttttatgcgtccaatcaatttttatgcgtcccatcagtttttatgcgtccaatcaaatttttcattaaaataaatccattaaaacaaaaaatgcactataatagccaagtaacagccgtctctacgttcgtctgggacaaaaagcattgaaacaaaaaaatgcactatagcaaagtgacagccggcctttctctctccatttgtcggcaaaaaccaatactagccgctttttctctccgttcttcaaactcaggttgctatgtttcgactagctatattactgctgacccgccctttaattttgtgtatggaatggcaaggctttatcattgacaaattcggatatcgaagagcgcacccttggcattgttgcggaatttgtcctgacaataacaacatctatgacaaaggtcgttgtgttaacgaatctagctacgaaacggaaaccgatcgttatattcgcaacacaacttatgtatttatgactggtatttctgataagccttatgtaaccgtaaaaaacccgtatagggatagaaggctgttgaaattagacaaaaaattgattggacgcataaactggacttgagccgaaagtaaatccattcagaaagggtagggaatgaccaaaacgaatgtttatgcagcgacccattaaatgaactctttccaattcaaaacttaacctcgcatattttgccgctctctcattaagttcgattgctctcttttcgtaattgttttgccgctgagaggaaccggcagaaataatttccgtataaattgcggccaaagaattttggagatgtgccatccgaccatttgaaatctccg

SEQ ID NO: 30751 - DNA, 1105 bp, Heterodera glycines
gcgcgcgtgttgaaatggtacggctcaggcaagggagccgagcgaggtggtctggcagcggacggcgatgggagctatcggcgcaggcaagggagccgacagcggccggctcaggcaagggagccgagcgaggtggactggcagcgcccggcgcaggtaagggagccgagcgaggtggactggcagcggccggcgcaggcaagggagccgagcgaggtggactggcagcggccggcgcaggcaagggagccgagcgaggtggactggcagcggccggcgaaggcagcgatggctcccttgggctgagtgctggcagcggacggctcaggcaagggagccgagcgaggtggactggcagcggccggcgcaggcaagggagccgagcgaggtggactgacagcggccggcgcaggtaagggagccgagcgaggtggactggcagcggcccgcgaaggcagcgatggctcccttgtgttgagtgctggcagcggccggcgcaggcaagggagccgagcgagcagcggccggcgaaggcaagggagccgagcgaggtggactggcagcggccggcgcaggcaacggagccgagcgaggtggactggcagcggccggcgaaggcagcgatggctcccttgggctgagtgctggcagcggacggctcaggcaagggagccgagcgaggtggactggcagcggacggcgatgggagctatcggcgcaggcaagggagccgacagcggccggctcaggcaagggagccgagcgaggtggactggcagcggccggcgcaggcaagggagccgagcgaggtggactggcagcggccggcgcaggcaagggagccgagcgaggtggactggcagcggccggcgcaggcaagggagccgagcgaggtggactggcagcggccggcgaaggcagcgatggctcccttgggctgagtgctggcagcggacggctcaggcaagggagccgagcgaggtggactggcagcggccggcgcaggcaagggagccgagcgaggtggactggcagcggccggcgaaggcagcgatggctcccttgtgttgagtgctggcagcggccggcgcaggcaagggagccg

SEQ ID NO: 30752 - DNA, 710 bp, Heterodera glycines
cagcagcaggcggtagggggtcagttccgtcccagacttgtttaaaacatcataacttttttttcagttggccaaattttatatatttggcatcattcgaaagctctacctacacctttggaagcttttgataaggtatttctctgcgattgaacaacttataaaaaagttgcaacatgaatactagcaaaaagtcagaatttttgcatattttaatttatgacttttttatatgtatgtatatctttatgatttttgggaaaccgatagagcgtgttaagagctttcgaatgatgccaagtttattgaatttggtcaaaaaagaaaaaagttatgatgctctaaacttggctgggacggaactggactgttccgccagcaggctgtcgggattagagttgagcgggcgggaccgggaattttgggcaaaaggtggaccgggaattgtcgggacctaagaagccgggaccgggaccaaccggaatttttaaaaattaaaaaaaaatcaaattttaatttatttcaagtgaaaataatgagagaccgacgggatcgggactcccgcgagtttttacgggagtcacgctcccgactcccgtactttttgccctgccggattttaacgggattcccgttcgggactcccgtcccggaaaatttttttaccggactccaaaaataatacaaaattaatttttatttattttgat

SEQ ID NO: 30753 - DNA, 1693 bp, Heterodera glycines
aaaatttgagtgtaatatattaacagaacttgtcaaaaaatgatcaaagttttggttaaatttgcagttttaggctgtttaaaaaaagaaaaaataataatttttaaattgaaatattttttattaattaaaatttcaattgaaaaataatttaaagaaattatttaaaaaattctgtaccgttggggaattgaacccacgagaaaaataatgaaaggcagaaggtttagccagcagaccatatttgaattggagctatccaaaaatagagaaaacattaaggaaggaaagaaagagatttaagatttttttttcgcgtaaatttgaaaatttttctggctgctcaaaagttcaatccttaggggtgtattatcaactctcgcctctcgtcccaaaaaacgagaggcgagagacgagaggcgagagtaccaaaaatggcgagagttggcgagaggcgagagacgagaggcgagagttgtcccacccctggtgcgcagctgcattacttgccaattgcgtcattccccaacacctgcatattgagctgaaatgaaattgccaaaggtgaacacacttttcgcgaaggttggtttagacttggctggcccgattcccaatcacgaagaagggcgaccggcacgattctttgtattatttgctggttcacaaggtttgtgattgccgtgcctgttcctgatgccaaggcagttactttggtaaaggcatttttatctaactgttatttaaagttcggcggatgcacagaactcatcactgacaatgctacggcattcacttccgaattctttcgagaattctgctccatgctctacataagcaaacgatatgcgacgccacactggtcgcagggtaatgctacgactgagagaagcttccggactttccacaacatcatgtcaaaatatgtgtcttcggaccagcccgactttgatgaacacctcgacatgacaaccttttgctataacaccgcgattcattaatcaaccggtgaatcacctttctttttaatgtatgggcgtgatccgatcttctgcattgatcagattttagacccaaaatcttctcgctcgtctttagtgagtgatttgtctgaattcaagcaaaagcttgtcaattccttgagaacagcttgggaggctgctgccggtgaatctaaacaggcacagcagcgggctaaggcccaatatgacaaactcattcggtgtctggaaatcaaagttggagacagggttttactccgaaattacgctggaaaagttggcacgtcaaagaagttccaccttccatggaagggtgtgtttcgagtaattaagattgaagaggtgatggtaacgattgtcagttgtaatgccccgcaggctaaccctaaagttgtgcatattaatcagcttaaaaagtgcgtagaaatcttaggacccgcttgcaccgcaccaaatgtctccgatgaggagaaactttctttggaaaaagcagatgctgttgaagtatttgacatgcccggttttaatcatctgaactcagacaatccaaacaaatccgaaacagaccctaacactgagtccacataaacttttgcattattttgctatcttcccatgtaccacaatactctttgaattctgttccctccccatttgatttcagattcaaaactcataatcctccaaattcc

SEQ ID NO: 30754 - DNA, 1427 bp, Heterodera glycines
tcaattgggaaaaacaaaacaaatcactttaaattggggccattgaataattattagaagcgaatgtccaaaaaatgtgaagcgatgaatgaatcgaatgatttgagcagtgaatttattatgtattagcaaatgacggaccaatcgaacgcatttcccaatgattcattttttgtcggctaatttatgaaaaagcgaaagagaaaagtgcgaaaaataaattaatcttgttgaatagctagaaatttggattggataatcattaaatcacatttcactatctctcgctttcctcactttctctctcctctctctctctatctctctctctattcagctctctatgtttcccctttttctctcacactcattctctctttccctctctcaccactctctttctctcctcttttccctgccccctctctttctctctatatttctcccttttctcacacactctccctttctctttctctctcttctcactctctctctcccccctctgtatctttccctctatatttctcctttttctttcacactctccctttctcttttttctctcacactctctcttcccctctatcaccacccttctctttctctctatatttatcctttttctcacacactctccctttctgtttctctctcttctcccttctcactctccctctcccctctctttctttctctctccctctcttccgctctctcttttccccctttccttccgtccgtctttctctctgccgtttctcatcgcatcacaatgtctttgaagtgaatgcgaaatttattccctggaaattttattcgctgttcttctgtgcccattccgaattgctgcttcatcagtgccaacaattggtcaatgttcggccgtttttcggggcatcgctcgaggcatttcttttggggtatttattgtattataaaattaatttttaatgaatttattaatttacttttataactactgtaacctcggattactgtacagactaaatccctataattcgatgacctttttccatcacaccttaagtatgttaagcatcgcttcgtcttcgtactgtccgaaatgaatgggctcagtgccgtgcaaaatcgctggacggagtgccgcgtccgcgcgttccatccgttccgtttcgtcctccacagcatcgaattggtgcaaaagggcggagtacggtgaatgaccgtacaccatttggtacagaatgacacccaacgaccaaacgtctgacttttccgacatctgtggggattagggctcaatgtgttcttccggttgggtttacttggtgctctctccgcttttccttaaactcgtcaccgtgctgtgccccgcaccatgccatttgctccggactcatatacatcactgtgcctataaccaatttgttcgttttcgtccc

SEQ ID NO: 30755 - DNA, 1581 bp, Heterodera glycines
  unsure (1)..(1581): unsure at all n locations
cgttttcaaataagggagatttctggtcgttttcacatccgtagtgaaaaattcagtcacgattttcccaatcggaatctcccggcaaggttttacggaaaagaattctggacactcctgaccattttcagaaaaggaattcctgtcgcaaaggaaaaacagaattcttccggtcacggtttccaataattctggaggtttctggccgttttcagaataagtagcataaaacccggttacgattttccaaaattggaactctggtcaaggtttccggaaaagaattctggacactcctgaccattttcagaaaaggattccggtcgcaaagaaaagcagaattcttcttggcacggttttttattacgggtcccttattattcaattaacaataaaaactaagtaattatcctataaaagtttcctttatccattgaatcactttttgccacatttcacgagcagttgaagggctggaaatgtgaatgaactgaccaacatgcatatgctataggtgacgaactgaaaaaacaaatcaaattaaaatgaacatttaaactgtgataaagaaatgcatttttaattatctttaaaattaatttattaattttattttattttaatttaaattatataaatgtttctagttcttatggataatttaattattaattaaaaatgattgaaataatgtatttatagtattaattaattatttgccccacttgtgcttcaagtgacaatgcaaaagcaccatttacatcgacaataagcagtgtgacgactgattggagcagaagtgcaacaaaactgttaatgccaaacacgaggccataggcgccatttggtgacaaatgagtggcaatcaaattgctgagcaaattaatgaggcaattaaacatttttaattgttgaaactcaatctcccggcttaattcttttagaatttggtaataatccacctaagatttttttaattttgttcaaaataacctaaaatatagtcaataaaagatgcgggttttttatttataggattgcccggcatttttgggggtagaatttccgaaattttttgaatcatcgaatttcaaattgccgaaaatttttggcgccatagtgacctggaaatggcattgagcgtattgtaaaacatataaagcacaatgtaaagaatgtaatcggcaaagagcgagtcaaagtgcaccattgcatacagtaaccaggccatggacattgtggaaacgcaacacaccacgacactacggtactcggcccatttgagcggaacgaactgggccaaaaatacaacaagcgtgtcttaaaacgaatttaatcatattgataacataaacaaatactgttatagtaagaatttgcaaatatttcgcataaccattaaaaatttccatttcaagggcatgaaagcaaatatcaaaatattgtattagcaaaacaacaccacatataaaatttgttttgncattttancatataaaaaaggaatanaaaaacaattttttatattgnctggatcatgggagataatataacacttatttttaattaaaaaataagtct

SEQ ID NO: 30756 - DNA, 276 bp, Heterodera glycines
gcggacatctacatttttgaattgaaaaaaaaattgcctttactctttctttttctccatattgaccatcatactcatactccccccacccttttcttcttccgccacccacctcccccgctacgcgccgctcccctccccctcgtgctcctctcttgatagtttaaactgaaggcgggaaacgacaatctggtccccatcaagctagcttctgcaggtcctgctcgagcggccgcccggggatcgatccccgagctagtaacatagatgacaccg

SEQ ID NO: 30757 - DNA, 1346 bp, Heterodera glycines
  unsure (1)..(1346): unsure at all n locations
aaaattgggcagtcgcatcaaaaaaaagaaaaagccgaccctatcgaagaaggcaacaaaaaaacaacaaaagtgaccggcagggaacagcagaagcaaacgaacaaattgaaacccgtaaaacataaaaagtaaacgccctccagtgagactcgaacacacgactcttcaaaccggcggggacattccgttgtgaactggcatcacaaacggaattatgctgttacattaattcaaaaataaaacaatatttcgaattaaaaatggtgaatatcaatacccattatatacaaaaattcaaaataaataaatataaaaatcaaatgtcaattgagtgtctttaagcgattaagtgttgcaagtggaaatccatcggtgttcgagacattcgcggcattccatctggcagcaacacgcgaatttgcactcgcctttgtggggcaccacctcatgtgttgcatattttatggggacattcgatcgtttgtcggcctcatgtcgggcgcttcgcgccccgttttttaatttttttgggggatattcggccgcttcgcggcctcaggacgggcgcttcgcgcccgttttcaaactttgtagggaaattaggacgctttgcggcctcaggacgggcgcttcgcgcccgttttttaattttgtgggagggatccggccgcttcgcggcctcaggacgggcgcttcgcgcccgttttttaattttttgggagacgtttggccgcttcgcggcctcaggacgggcgcttcgcgcccgttttttaattttttttggggatattcggccgcttcgcggcctcaggacgggcgcttcgcgcccgttttcaaattttttgggggacattcggccgcttcgcggcctcaggacgggcgctcccacccctcagaatccccaataacacggggattctgaggtcttaaccatgtctaaagtaaaatctgattacatattcgtgatcagcggcgcaaataacctctaaagacatatttttggaagatttttggtgaaaaaaattttccactcaaaaatcatggtcacacccctgtggtcccgaaggccaaaatcacttttatttctataactttttttaaaaaagtgataaaaagctaaattaaaatttataaaatagagcaaaaaattgcggattttttcagtatttaaaatttcaaaaacacctttacggaaccgagttctgaatttttttctgaaaaatcgaaaatttccagaatttttggaataacttttttattttggaagatagaaattccaaacaaatctcataaaattctccttattttttgctattttttcaaccttattccactanatttga

SEQ ID NO: 30758 - DNA, 966 bp, Heterodera glycines
aaaaaagtttttttcttttttttgttatgagatttttgggcttaggtaatcaaagcgtgtacgtcatgaaataaacgcaccaccgccaatcccaaacacgctcacagacttaatcatcgcagacgcatacaaaatgtatgggcgcaccgaagaacaaactgaacacgatttggcatttcattgaccttctgcgaaggatcaatagttatcggatgatgacttcgcgaagtgttcaactggacaagacccaccgcaaaaggcaaagaaatatcgcgaagcagaccgccgaattctcacgatggttcaaaattatttaccactcaacaatggagaccccaatgtttttccacttgagcagcgctttaatcatctatttatcattacctttttgatcggaatttctcgaaattatgaaatgagaccgtgatttgaaacagataaaatgttatttaattttcttgcttgttttaatagtactgtttattaatattcatactttggtagggaaatggcccaaatgccttagtagggaaatgcctggtagggaacccaaaatttagggatttttgggtaattttttttaagaaaaaaaatttttttttgggggggggcgtgccgataggggcgaattttaaatttatttctaacagatattcaccaaaaaaattaagactttttcgataaattttcgttttttaactatattaaattatcgtgatttactcaaaattggaactcagattttttaaattttttttcttgcggcacatttttcaaaaaaaaaaacttgatgaatgtgcgaggggagagttccggcggtgccgataggcgccgccgggaaaattttttgaaaatttgaatgcaatttgttaacaaattttgtacaaaaaatgagcaaaattcgcaagcttgggataatttttaagaaaaaatataggaattttgggggccggcggtgccgatagg

SEQ ID NO: 30759 - DNA, 1200 bp, Heterodera glycines
ttttttttggcttccaaaacttcatcgaccctggttcttttattttctttcaaatcgccccaatttttttttacagctaaactagcccctattaagcttatttccagaaaatctcgcatgaattctcatttttaaattttttatagatttttaaatgttggattttttttgcttaccaaaacttcatcgaacctgttctttctattctctttcaaatcgccccaaattttttttacagcttaactaggcccaattaagcttatttccagaaaatctcgcatgaattccatttttatttttttaatagatttttaaatgtttggatttttttttggcttaacaaaacttcatcgaacctggttctttctattctctttcaaatcgccccaaattttttttacagcttaactaggccctattaagcttatttccagaaaatcccgcatgaattctcatttttaaattttttatagatttttaaatatttggattttttttggcttaccaaaacttcatcgaacctggttctttctattctctttcaaatcgccccaaattttttttacagcttaactaggccctattaagcttatttccagaaaatctcgcatgaattctcatttttaaattttttatagatttttaaatgtttgcattttttttggcttaccaaaacttcatcgaacctggttctttctattctctttcaaatcgccccaaattttttttacagccacgaggccgcgaagcggccgagtgagtaccttgggcgcaggaaaattattaaggaggagggttcattatttatttatttttgcaaaattaattcataaattttttttcagaaactgctctgaaacgcaccaaaatttatttacaagttgaataaggcactctgactcttatattatcaaaaagggagatgaataaatattttaaaaatttctaattcctttttaaacaggccgaaaaagtttaggcttaactttttcagcgggtttaaaaaatctagaaaaattagtaagcatttgtagtgctccgatacgtatctctgcaaaatttggtgagcccctgatcaattacaaattatttatggacgatcaaattttttgaaatttttttaagtgcaaaagtggtgggtgtctgcaaaaaattttcaccgggtttaataaatctaggaaaataagtaagcttttgtag

SEQ ID NO: 30760 - DNA, 1857 bp, Heterodera glycines
  unsure (1)..(1857): unsure at all n locations
cagtagtaattggtcgggtgatgaaaaaacagtgatcaaccggtcaaatgattgaccagacattacgatcacttgacaatggcctctttagtactgctcagagttcccgaggcttgagatcgaaattggttcgggaattgaggaggagcaaaaaaaaaagcgaaaaatttcccgagttttgagtccgagaatctcgaacagctctcgcatggtgtaatgacaacttgtacaaaagataactcgcacaattgcttaggttaggctaaagcctaagctttaggcttgtcctaggcctaggcttaagctaggctttattttctgaaatacgagttgccattgaccccatcggtattttgagtgccaattcgtcaagtttttatatgtattggacaaaagagcaccaccgaccgaccatataataaggtccaccgcccgaaacgacgccattggtggcaatggcggatagcgaaatggaggtgagaaaagtctgaaaaaggagaaaaattttatttgaaagaagcaaatcggacacataaaaaaggatgcaaactatttaaaaaagcgatcgatcattttttgatcgaattgatcattttgatcaatgataatttcaattgggaaaaaacagctggatgatcaggagggatttattggaaaaggcattgatttggtcccagcaaatgatcatgtaatcgccgcttaccacgctgcagcacagcaacacaaccatgaacgcctccaaaatgccggcggtgccgacaatccacggcaaacggatgaagaagagaacgccgaaaatgttttgcaggcatggaatgtagctgaacagcagggaggacaatatttagattatcctccacagagaataccaccaaatgaatttggctgatcagagtgcccaatgattaatcccgctgccagcatttatacttacactcccataattgtgcccaatttggcggtttgtcgcttgggcgccccttttgtgccgccgttgcgctccttttctccgtttttgacgcctccgtttgtcgcccctttggctgtcgactctttgtcctcctcgtccaccgctgtcggcagaatggcgttgtaaagggacagcgaacgcaacatttggccaatgttttgtccgcccttggagcagtcgtccttaaaagggccacaaattgattcgctactgcttctgctagattgatctgccgcggtaagtttcggtgaattaaacgactctgatcagtgtcgagaggtgatttgatcagcaattcactgactctgatcagtgtcaagataaaaactattgactttgatcagtgtccagggtaaattattggctttgatcagtctcacccattgactctaatcgagagtttcgtactgatcagtctcacaatcagtggaaatgatgccgtgaatgggttccaaagtcgaatcccgaggcattaatggtttagtcggagtgatcagcaggtaattttgttatcactcgataactccacgtcccgatactcaactgacctcgtacaatgccatgttgtgctgctgttgttgctgcttggcgcacaacggctccttctccgtcgtctccgtggcgagtcgcgtcgccgtcggcggcggtgccgtcggcgtcttagccgagcttccgttgtgctggtgccgatggttgctgctgttgtttttgtgcttgttgttgtacgngcatttcgttgttggcacccgtcgccgtgccggcgaagtcatcgtcttcgtcgtcgtggagttgtggctgttgttgctggtgcggcaaaagcaccgcgacgggccgtcccccggcggcactgccctcatgtnggtgcatcatcaccgtggctgaatcat

SEQ ID NO: 30761 - DNA, 859 bp, Heterodera glycines
gctcaagccattttccaaccgaccatttgtagggctcccccgcatatagtaatgcgttttcggggaaaaccttctcgttggaggctgtagaaaaaagagttagccatttttctgagaatatctttcggggaaaaccctctcgttggaggctgtagaaaaaagagttagccatttttctgagactatctattcttagtaatggagccattttccaaccgaccatttgtagggctcaaccgcatatagtaatgcgttttcggggaaaaccctctcgtttgaggctgtagaaaaaagagttagccatttttctgagactatctattcttagtaatggagccattttccaaccgaccatttgtagggctcaaccgcatatagtaatgcgttttcggggaaaaccctctcgttggaggctgtagaaaaaagagttagccatttttctgagactatctattcttagtaatggagccattttccaaccgaccatttgtagggctcaaccgcacatagtaatgcgttttcggggaaaaccctctcgttggaggctgtagaagagtttaaaaaagagttagccatttttctgagactatctattcttagtaatggagccattttccaaccgaccatttgtagggctcaaccgcacatagtaatgcgttttcggggaaaaccctctcgttggaggctgtagaaaaaagagttagccatttttctgagaatatctattcttagtaatggagccattttccaaccgaccatttgtagggctcaaccgcatataagtaatgcgatttcgggggaaaccctctcgttggaggctgtagaaaaaaagttaaccattttctgagaatatctattc

SEQ ID NO: 30762 - DNA, 1229 bp, Heterodera glycines
tagtaggtaattatgtaattttttttaacccaccccgtttgttttgttttctaaactctgattttcaaaacttttttgaaaacctggcgttgggattctgatcttcggtctaatttttgattttaaaattatttaattaattaaaaactttttttttaaattttcatcattttagcaaatttattacaaaatatcaccaaaatgtttgccattttccacttggcttttctgctctttgcttatccttaatgtgccgaaggatcagacaaatgaatttgaagcagcgcagtcaccgtgttgaagttcgaatgtgttacgccatcatttttgtataaaattgcaaatcttctcttcgcaatttatctaatcacttgataattttaaactcttattgaatagcaaacaatttaaaatgattaatcaaattttgccttaaaaaagtcaaattgttgacccattttggaaacttaaacaaatcaaggaaaaacaactgcctgtttttatttttccttccttttccaagccttttaattatatttttgaggtttaatttaaagagctcaaaaaattttgaatgtatctttttggcattttgtcatcttttagtagaacgagaaatacacacctaggaatcgctttacaaaaaaaatttccattaaagtttatgcctattatatggctgatttgtgagcgggacctggtcaaggagggtgaattttgatttaaaaaaaataaaaaaattttattttttattattttagaatatgaatgatctcaagcgaaattaattttttttaaacattatttcgatttttgaattgaaaacttaaaacgcttttaaattcaatcaattctcgatacgtgaataatttgttaaattaattgttatcaaaattttcattggaaaatctcaataacatccggtcgcgtaatgaatcgggatttgggaccaattagctatatattcttggctttatttttatggcacattaaaaatttctatgcttatctaacaagtcatcattttatcaatagccaatatgtatatgtgtgtttgtttggatcatacattctttgtaaaattaataaaatttttagaattttttatattttatgcaataaaaaaaaattgtcataaaaatgcttagccctacaaaaatgccgtttattatttttggtttctccattatttgtgctcatttttgccaaattttgtcaaatcctgatga

SEQ ID NO: 30763 - DNA, 2239 bp, Heterodera glycines
  unsure (1)..(2239): unsure at all n locations
gggcaagcagtccatgcacagagagagttacacgtgcatccgcaatgcacccaaatcattcaaatatataatccccagctgtaattgatgacgaaaaaaaacacaaatttaattggggtgggcggggaatgaatggtgttccttccccttcccncagaaagctatttaaatgccaatttttcacagcagaaccataaagaacggcaaaaaataaatttttaggtattttagcaataagaaatttatttaaatcaatgcattttaaaaaacaattaaatcattattctatttttaattattttcagttttcctaatattaacaattaataattattagcacaaatggcgctggaagcaatgggcttggactcgtcaactgacggcaacgacagcgagccatcactggccggtgattttgattttaaaaaattaacaaaaaaagtttgaaatgggacagaagaaagacacacatcagccaatcattggccatcctgacaatgagtggcgaaataaatagatttgctcataaattgtcataaataaatatttttttaagatttaaaacggcctgaaaatatggacatttctttaaaaatcctctattagaacggccccatttcaaagagaaaattgaaaattttagctttatttagtatttttttagcatcaattaagtcattttgacagtattttgcggtttgtaaacatagttattataattatgttttagctcgtttgttcaaaggtgttgacaccaaagctacacaacaggtcccagcgacaactattgtttagtgcaagcaacacagtacggcatctaacgaacgtaaatacattcgaatttaaatcatttcaataaaaaatttaataaaaaaaatttcattttttcaaatttatttttattattatatttaggaccctcttaacaatttgtcgctagcggcagccgacctgccgcaggaagtaaaaataattaaattataaatcaaaaacaataaaaaaaatttttacagtatcaatataactttatgttttttgactaatttgtaaggtcctttaaatctttattaattaaaaaaaaagaaaattcggtaagtgaaaacgaagcgaaaatgtaatttgaaatatgatgccaaaaaatcaaatcatttttatgtttagcattgaaatttcaggaaaagcttgtccaaatggagaagaacctacagcaaatgaagaagggccaaaagaagatcattggaagtaaattaaaaattatttatttcaattactaaacttactcanaaatgggtactgtaaattacagtgccatttaatatcctttcaaatttttgtgtaaaaaagtccttccgtatttaaggttttgccgttcaaattgaagacctgcagaacggacaaaaggcacttgtggaaaaaccaccacctgaagtggagactgaatagcacctgaaaatggagaatttagagatgtgccgttttattaattatttatcatcttaatttaattaataagcattaattatttcaaaacagagtgtgcatccagtgaaatattttcaaaataaggacataattgaccaaaaaaacaacatgataaacatttaagaacaaattaggacaagctttaatgactacgaatgtacacactgttttttaagcatatttattttaatttttttgtttatataattaatttattcggggacgaaattgaggcgaactttgcgcacaatttcgatccttttaaagtgcattaatttttttttttgaaatatttccgagtcaaattgattaaatgggttgcttatcgagagtgccatgcaattagtcaagaatgggctgaaaactcgggaacgacaatgagaaccgaaacttcctcatttcaaaaaagagtctcccccaattttaaaattggcacccctaataacattaaataatctcttaccaaatccataattccaaaaaacgaatggaattttgtgattttcagatttaaaacccgttatatatttattaagaatggatatattttttaaataatgatatttcttataattcgatcatttttacctaaattaattatcgatcggagaatggtcgaaaaaattgtaaaatgttgcaaaaaaaataatattgagcagggagagacttaaattggccgataaaaattgatttacgtcattttacgagttatgggagtggtggcgccagaaattggaccnntgcaggcccatgcaag

SEQ ID NO: 30764 - DNA, 1487 bp, Heterodera glycines
catcgctgtttctcctcgaaattatcccccccccggcgggtgggagattttatgccttttaagcattcgaatagcaccctctccccgattaagcaggttttccgcactttgaggcggcggccggggggaggggtgcaaatgcgtaaaatctcctttcaaaagtgccgcctcatccccctctggcggcactatggcaccccggcggtacatttcttttgaagcggattatgccttacacccctccacttcatccccccttgtgcttgctgttcatccaaagtttggcagcacccgtttggtgacagccgcttcatcgcattgcgtcatttcccccgcccccaaaacttggggccaaatgttcatcccccatcccctccgggcccgtgccaatttaagggatggtcactttaccgaaactcccctgtgccatatttccctcattttaaaacccgttttgccgtgccaattaactccccggctgccatgcctggctggggcaatcaaatggcaaaacacaaactagccaaaacgggaataacagtcattccgaaagacctcgtttttttcttggaatatccgcgcgacggggattatctcctctccccgcacccaaaactgagtgtgccatttaggcaccccttttttggcacaaagtttaagcgaataataaatggcgagaaaatttgagtgccacaaaccagcgacgagcatcatttctttttccggttgtgcccttctgatgcccccgactgctgcagtggatttgcgtcatccgttttgaaggatacgatcaaaaatgagtcccccgcgtttgccatccatttagcgcttccaggcaaaaaattttggcattggcacccctggacggggagaatttttttttattatttatggtgttatggtcgccaaatataagtaaagcggcacagaccgtatgccaaccgctgacgaataaccttttagacataaagcaaaagcatcctcccccccccgccccacattggcataattttcagcttcgtggcaagggcgtagccggagggcggctaaacccccctctcccgccgaaatccaacaaattttttgaattttatgcaattttcttaataaattgcattaaaatttcccaaaaatttacccggcggcgcttaactgcaccgccggacccccattttactattttttttttgaaaaatggagaccaaaatggcaaaaaacattcttcaacaatcttgatatcattcgagagctcttcagatgctctaatagcctgcaaaattccaaaaaattttgttaattttaaaccaatttatggccaaaaaagttggaaaatttggttttttgaattcttctggccataacttttttgaacctaaagtaaattttttaaaattttgcaggctaatagaggacacttagatctttccaatgattttaacaatgttggatttggatgacaaagactaaagtgatagctaataacatgc

SEQ ID NO: 30765 - DNA, 970 bp, Heterodera glycines
gtgttcccctgtccctccggttttctgatcccccattccccccacccctccgctttccccccattattggtccccactcccctctctcccccttcctcagttgcgtcatcagtgaagagttctgcatggaattgcctcgctcttccgttttccattctcttcaactttcgctcttcgaactcactgaaggtgcgcgaattcagcgatgcatcggacggatgaaactgacacggcacgagttggtcgcttacggcaataccattcagtcagtgtccactctctgctgaccaaatgcaatctttgcagagaacgctggctgccaattgctcgcattagacccagcgaattgaccgagactctcggcgcaatttgtgcggaattgagttggaatgggcagcgcaaaatgctcactttacggtgctttagtttatattggcactttttcaaacgactttgcacttttgtgactgtctcttccatttattcgtattttccgctttttcctcctccgattgccttttccttccccctctctttcgaatttgaactctcttcgtcttcccttctcatgtttcaccacatcccatcctcagagttttcgacttcaccatttggtcacttccgtccaacaatggccgtgtgaattccctccaaaggcattgcaacgacggcgggcgtctctttttgaagtgccgccttgggtttggccattcggcgtttagcgcaatgcaaaagatgcgattggtggagaggagaagtgttgagccggtaattgtgcttgttattcgtcatttgcttttggctttgtaaagtaaaaagtgtttgaggttcgtttcgactgttcgcatttccttgccgataaattgggacagcgtccgcccccccagcgcgaggggacgagccccccggggaacagccccccgctcgtcggacgaatgtactttctgcaggtcgccctgcgtcacgccca

SEQ ID NO: 30766 - DNA, 1003 bp, Heterodera glycines
aaaaagtagatacccatttttatgtgataacctctaaatataaaaattccctcaaaaataaaaggtctattgcgcacagccatatctctcatgctcgagagcatttgtatgtgtataaaatttatcaaaaaaagagatagccatttttctgggataacctctaaatataaaaatcctctgtgaaataaaatggcggttgtgcacagccctccgtctcatacgcaagcgcttttgtgaggtataaaatttctcaaaaaaagagatagccatttttctgggatagagtataaatttaaaaattccctcaaaaataaaaggtctattgcgcaccgccctccctatcatgctcgagagcatttgtatgtgtataaaatttatcaaaaaaagagatagccatttttctgggataacctctaaatataaaaatcctctgtgaaataaaatggcgattgtgcacagccctccgtctcatacgcaagcgcttttgtgaggtataaaatttctcaaaaaaagagatagacatttttctgggatagagtataaatttaaaaattccctcaaaaataaaaggtctattgcgcaccgccctccctatcatgctcgagagcatttgtatgtgtataaaatttctcaaaaaaagagatagacatttttctgggatagagtataaatttaaaaattccctcaaaaataaaaggtctattgcgcaccgccctccctatcatgctcgagagcatttgtatgtgtataaaatttatcaaaaaaagagatatccatttttctgggataacctctaaatataaaaatcctctgtgaaataaaatggcgattgtgcacagccctccgtctcatacgcaagcgcttttgtgaggtataaaatttctcaaaaaaagagatagccatttttctgggatagagtataaatttaaaaattccctcaaaaataaaaggtctattgcgcacgggcctccctatcatgctcgagagcatttgtatgtgtata

SEQ ID NO: 30767 - DNA, 1732 bp, Heterodera glycines
caaacggggcttttgcgaaaaatggggaggggaggccattccaaggaaaccaatgagaaatgaattgataaagccaacgtgaatgctgggactgacttcgatgtcctcttggcccggcatgaaaatcaaaatgtcgccctccatgccgcccaagtgaattttgaccgcctgtttgaccgccgcgtcgacgtggtcttccacgggaacacgggcgtggtaaatctcgacgggaaatgttcggccaggaatttggaaaattggcgtatgtccgccgaagaaattggcgaatttatccgcatccattgtcgcagaagtgacaatcagtttcaagtcggaactaaaaaggaaacgtaagagaaaatttggaaaggaaaacgacagggaatgattaaccgaaaaaaatgaacagcgaaagtggaaagcactcaaataatgttgaaaattagatgtccctacttaattccgccgcagatccgtaaccagggggtgtgtggggaattgccaaacgcccgaaatgaaaaactatccgaaaaatgggaattttaaattaactgaatttcttaaaagatgaccaaattttcgtttcctcggcagcatctaggttttttttctacggcgctggaagctcttcggttgcctccccccaccgaatttttttctggttatgagcctgtttatctatgcaattttaatttcatttcttttaccgtcttgccaccacatctctcagcagtccaaacagaacgtcggtgttcagtgaacgctcgtgcgcctcgtccataatgatggcggcgtaggagtccaagtcggggtcactgaaaatgaattataaaatctaaaaaaagaatgcgtttgggatggcacctcaaacattctctcagcagaataccatccgtcatatactgaaaaaaattaaagtgaaatgcaaaaatgggaaatcgaagttactttaattatcgttttctcggatgtgcagtcctcaaaccgaatggcataaccgcactcctgaaaaccgaacatataaaggcaacaatcatctgccacattttctagagaatgaccaaggagtgtgtttttgttagattttttatccgtctgaaacaacaatataatcagcattccaacaaaatgtcgtcagcgacgaaacacacactttctatggcttcgcttttctgtccaattttggcactacgatttggattcaaccaaacaacccgtaattggttggtggtcttgccaatgccatacccttggcccacccgtcccccgtgccaacctggccaagttcgatgcccatctcttccgacacgcgcttggccacactcatcgccgccactcgtctcggctgagtgcagccgacgatggcacccggccgtcccaagccgtcctccaccaaatattgcgtcaattgcgtcgtctttccactgcccgtctcgccgaccacaacgaccaccgaattctcgcgcacaatttgcaacagtttctgacgcacagcgaagacgggcaaatactcgcgctgctggcgaatggttttttccatggcaaacgttgagacggcctccgactctttcaaatgggtggcaaactgttgagactcactgaagaaaaaatggcataacttttaagattttctaatttttatatttggatggattggtaaatgtataaactagaaacagaaatagtatcggatcatgaacaggatttaaggatttacagaacaagtcgtaaa

SEQ ID NO: 30768 - DNA, 958 bp, Heterodera glycines
gactcaaaacacctcaaaccctagagaagtgtcgttcaacctccgccatttttgctgtggtgcactcttttgccgaaaacgtacgatcctaacgagctttttgaaaagcgaaacttctgactcaaaacacctcaaaccctagagaagtgtcgttcaaactccgccatttttgctgtggtgcactcttttgccgaaaacgtacgatcccaaagatttttttgaaaagcgaaacttctgactcaaaacactcaaaccctagagaagtgtcgttcaaactacgccatttttgctatggtgcgctcttttgccgaaaacgtacgatcccaatgatttttttgaaaagcgaaacttctgactcaaaacacctcaaaccctagagaagtgtcgttcaaactccgccatttttgctgtggtgcactcttttgccgaaaaaggacgatcccaacgagctttttgaaaagcgaaacttctgactcaaaacacctcaaaccctagagaagtgtcgttcaacctccgccctttttgctgtggtgcactattttgccgaaaacgtacgatcctaacgagctttttgaaaagcgaaacttctgactcaaaacacctcaaaccctagagaagtgtcgttcaaactccgccatttttgctgtggtgcactcttttgccgaaaacgtacgatcccaaagatttttttgaaaagcgaaacttctgactcaaaacacctcaaaccctagagaagtgtcgttcaaactccgccatttttgctgtggtgcactcttttgccgaaaacgtacgatcccaaagatttttttgaaaagcgaaacttctgactcaaaacactcaaaccctagagaagtgtcgttcaaactccgccatttttgctatggtgcgctcttttgccgaaaacgtacgatcctaacgagctttttgaaaagcgaaacttctgactcaaaacacctca

SEQ ID NO: 30769 - DNA, 1564 bp, Heterodera glycines
  unsure (1)..(1564): unsure at all n locations
ttttttttcagccatcgaaataccgatttccgaaatttttgaggccattgacacacattatacactattgtattaggtgtcgtagtttacagtccccaaactcctccaatcaagcacccgtccgctctctccacactcccaactcctttccgcccatccctctcttctctcgtgcttttcccttcactctttcttcgttccctctctctttgcgcatcgcttttttcttcatcaattcctttcttaaaaaacgctgtccaattgtgccgttgttgtcttttgttcttctgctgaacaccaaatcatccctgggcttttctcgtgcgaatatgtaatccttctccgccccaatgtcctccctctctcctccattttttaaatcctcttttggtaacggaggcatatgaatctgatggccatcgaagggatcatccacccttttctcagtggaatccgcttggaagtgacgcaattttacgttgtttttctgaagacaaaaataattttatggacatttcgaatcgaatgcatctcaattctttccatcgttataaattgctttttattgtcaatttgacttttgcaaaaaaaaaaaacgaaaagctgctgcaataaatgttaggctttattgttttattttgcaataaaagtaccgataaccgggctattggaattttctcgttgatggaagtattttgttcaatggtcactttctgatcaattgcagaccgattcatttgctgttaaattgtaggtaatttgcttttccctttcaaattaaaattaccaattccgaccattctctgttaatttttgaaagccgttcattttcctcttcgagattcaaaattcgttcttgctggccttaaaatcagaataaaaattgagattcttttttgaaaaacaatacctttgctttgcctgtcaaaacggtctctttcctccgccaacaaatgctcaattttctctctgtgctgagtaatcacattaatttgcgtgtgcaatgagtccaattggatcagtgaaaaactgagctgttgttcaagccgagcgacttcaaccgacgactgattctgttgtgaagtgaaccaaatgaggaagagaaagacgggcgaaaggagcagcaaacatttgcaaaggcgccgaatgaacgcagcactcaacggcaccattccatggcaataagcgaaaaaggaggagaattgaaaaaaaacaaaacaaattaatttcaatcaaaggggatgctaaacaaaaagttaatatcatcggtaaatattaacttcgaattgggcgttaagtatttcaacgtaacaagaaaatgttaattttatgaatttcatttttgagtatttgcttcttcgatatgcatacaaatgataataaagatgtgacaaagaaataaaaaacctctggaanaacgctanatgaacattcatcaaaaaattgttcaaaagtgttcattgttcatccctcttttgtcttcctccgttccaaacatttcttttttgatgctttcttcgtaaaacttgtcgagacgagctttctccaactgcagcgtcctctg

SEQ ID NO: 30770 - DNA, 997 bp, Heterodera glycines
gtaaatattcaaaaaaagagatagtgattttttggatagccggagaaataaaaattaccagctattgaaatgcagtggcaagcacagcgagtcgcttaaatgcacaccctttgacacgtaaaatattccaaaaaaagagatagtgattttttctggattaggccggagaaataaaaattaccagctatttgaaatgcagtgggcaagcacagcgagtcgcttaaatgcacaccctttgacacgtaaaatattccaaaaaaagagatagtgattttttctggattaggccggagaaataaaaattaccagctatttgaaatgcagtgggcaagcacagcgagtcgcttaaatgcacaccctttgacacgtaaaatattccaaaaaaagagatagtgattttttctggattaggccggagaaataaaaattaccagctatttgaaatgcagtgggcaagcacagcgagtcgcttaaatgcacaccctttgacacgtaaaatattccaaaaaaagagatagtgattttttctggattaggccggagaaataaaaattaccagctatttgaaatgcagtgggcaagcacagcgagtcgcttaaatgcacaccctttgacacgtaaaatattccaaaaaaagagatagtgattttttctggattaggccggagaaataaaaattaccagctatttgaaatgcagtgggcaagcacagcgagtcgcttaaatgcacaccctttgacacgtaaaatattccaaaaaaagagatagtgattttttctggattaggccggagaaataaaaattaccagctatttgaaatgcagtgggcaagcacagcgagtcgcttaaatgcacaccctttgacacgtaaaatattccaaaaaaagagatagtgattttttctggattaggccggagaaataaaaattaccagctatttgaaatgcagtgggcaagcacagcgagtcgcttaaatgcacaccctttgacacgtaaa

SEQ ID NO: 30771 - DNA, 914 bp, Heterodera glycines
ctcattatttgacccttttgtgttttttcagaatggtccaaatggaaagccaacagaacgccaaattcgacttgctcatttgctgcggggatttcaggtcgaaatacaaattattattgttaatccgaaacaattgtgaattggactgactttattcatctttttaggccataattcattcattttttgccattttagtccttaagaaatcacggcgatttgcaccatttccacgcgccgtttcaccaccgaaaattgggcactttttacaaatattacagcggtgaaaaagtcatcatctttaaatttttttttggtttatttaataattttctgtctttaaaaggtcgctccgctgctgacactttttgtgggcggaaaccacgagagcagcggatttatggcggaattgccgaacggcggatgggtggcgccgaacattttttacatgggatacgcatcggtggggagggacattccacccgaaggggaggggcggaaacactaataaaatacccaccgcgcacgatccatataaatgttttggtttgaatttaggaaaaactgtttttttaaatatcatatatttatttttttccctttaaatcttttgattttttttgtaatatcaagaattggaagccaaaaacatcaattccaaaggaaagtcgctttgcatttgaaatttgagttaataattttcccattgaattcgttttctgtttttggttcaaaatccaatggcgaagagagagggagtcgcacttttcccattgtcaatgcatttttttccccaatatttcctcctccattttcgggtcgtccgttttgctggccttcgaattggcggactctctggcatttttaagcctggcgatttcaacagaggtaagcaattcacgatgcttgtcggg

SEQ ID NO: 30772 - DNA, 1260 bp, Heterodera glycines
cattgccgaataattgtgccgtttgccccgctcgtccctcattgcgccctactgaaaaattttcatcgttttttttgtacgttttgaaacagcaaaataaaatcataaatttgcatttaaaaaaaagaagcatttttagcaattttgggcagagagttaacagagtagcacagtaccccagaaaaaggatgagatagttttccaaactttttgaaaaatttcaggcgaccgaccgacacagctagctatctggcagtgccaataaattttcaaatttttctgtcaaaagaaacatttattttgattcgggtagggttaggtgttgattttaaaaatgttaaaattcagggggtttggtgtttgaaaaatcctctagaagaattcgcttttctcgaccctttaattatcaatataaaattttaaaaaaaaaactaacgaattgcccggaaaactcattgttgagcagctgatcgaagtgcacacttcagacaaagtggcactgatacaattgacatgttcgaacaaagccaaaactaaaaatataggaaaaaattaagttataggattttgaaaattttttttacgcattccatttaccccctcccctaaaatttgcatttttttgtatgccgggttgggaaataacaaattttgggtaaaaaatagaaaattttcaaaatgctttgaccatgcgatgccagccattcgtgtcggtccaaccccttaggtaatgtgcacaatttgtccaacatttggtcgtcaacagagtcggccacgcaattgtccaccgattgaacaacttttcgtgccgattgagcagagccggactgaaaaatggatttttttaaaatttaactgaaaatttgcaaaaattttcctcggctgcgccatttggcaccattttggacgactaagttctctggattttttaagaatttgacacaaaaatgccatttttctccgcggtgtttaaatttggaaaattataatggcaaaaaaaatagactaaataagagcaaccaaaaaaaaaaaaaaaattttttttcgggtacccacgtcgaaaaattgtgcgaaaattttgtattttttcatacttgcgaaaacgatgggatatgcaccgcctttttctgtccagacgatgtgcacgcggacggtccgttggtgtccggcacgggacacacgccattggcacgggactcgccccgctggggtgccaagtagcgcccaccggtggccaaatcggcgcccttgcgacgggaa

SEQ ID NO: 30773 - DNA, 1109 bp, Heterodera glycines
tcttcaattgttttttccccaattaaatgcatgcaattttccaacaaatattcactggtaaatgcttcttccgattccttcagggcatatgaaaatcgcattttgtcatttttccatctttttattagtccgtttaattgtttaacacttttttcaaaaaattctttcattattttatactccgactcaaataattgtcccatcttgaacccactgattatattgaataatttttcaaaaaagaggtaaagcagccgataaagatttgcgaatgtaaaaattttataaatttgctgcccattatattcgttgttgtgctttttgcgcatatcatttaataattgtacaaaaaatactgaagctccgtagctgtaaaaacttaaattttggagattttgttattcaaaattatttaaaaatgttgttttgatttttagcgaatagatcgaagagaataaaaatagaaaaattaatcaaaaaggtttaaaattgaagaaaaatcgcaaaataataattaattaaattcacaaaggcccgaaaaaattaaatttcaagaatatttgcggtcgttttagcttctttttcactttaaaataattagcttaactgcttatattactactatatatttttaattttaagcaataattgttattaaattttattttttgtgaactaagcagcagaatttttatattttttaaattcaaaaatgaaaactttttgatttgtgagtcaatttttttaaggattttgatttttgtggatgtggataagaccgccgggtaaaatattttatttaactatttgttaaaaaatattcattttaaatggctttttttaaatcctttcccttactcgtttttcaaaatggaaatgttcttgacaatttgctgtaaatccagcgattctttatgtttcagcagtaaacatgccaaatcattttttgtcgtttcattcatcaaatcaaccaaactgtgcttttgcatgcttagaatattttctcgccgctgttcataaatcagtgccaatgtttgtcggacgcccaaatatgccagtacaaaaatttcttttatcgtttcaatttattcagtttatttgcggcaaaa

SEQ ID NO: 30774 - DNA, 1320 bp, Heterodera glycines
  unsure (1)..(1320): unsure at all n locations
gatgcttttctatcaaagggangatgaataaatattttaaaattttaaattcctttttaaacaggccaaaaagtttaggcttatattttaaaaagtttcatcgaacctagcgcactaaaatcgatataagctaaccagattttgcgagagcatcaacattgtaaaggaaaagcactgaaaaaatgctaactcctgtaatttttaaaattttttattaatttttactgcttcattaattatttatttttttagcaaaattaaatcataaatattttttcagaaactgctctgaaacgcaccaaatgttaattaaaagttaaataaggcactcagatgctttcactatcaaaaagggagatgaataaaaatctaaaaatttttaattgctttttaaatatgcgaaaaattttaggcttaactttttttttataaactgatcagaagcgaaccagattttgcgagggcatcaaaaagacaaggaaaagcactgctatgatgctaactccagtaattctgaatttaaaattttttattaatttttaaagcttcactattttatttttttagcaaaattaattcataaatattttttcacaaactgctctgaaacgcaccaaattttatttacaagttattttaggcactcagatgctttcactatcaaaaagggagatgaataaaaaatctaaaaatttttaattgctttttaaatatgcgaaaaattttaggcttaacttttatttttataaactgatcagaagcgaaccagattttgcgagagcatcaaaaagacaaggaaaagcactgctatgatgctaactccagtaattctgaatttaaaattttttattaatttttaaagcttcactattttatttttttagcaaaattaattcataaatattttttcagaaactgctctgaaacgcaccaaatgttaattaaaagttaaataaggctctctgatgctttttctatcaaaagggagatgaataaaatttttaaaaatttttaattcctttttaaacaggccaaaaagtttaggcttatattttaaaaagtttcatcgaacctagcgcactaaaatcgatataatctctccaaattttgcaggccttctccattgtaaaggactaacttaacctgaaaaaatgccaacgcttgttgtttttaaaatttttcgaaattctgactttttcattaattatttattttttgcaaaataattcataagtattttttcagaaagtgctctgaaacacacaaaactttatttacaggntagtttaggcactctgatgctttttctatcaaaaaggg

SEQ ID NO: 30775 - DNA, 806 bp, Heterodera glycines
tttttcgaatagggacaatttttaaaccaaaaatttttaacaagaaaaaaaatgtaatttaggaagaaatttttgggaaattttttcaattcttaggggtgtattttctgaaactttttcgggtcatttcttagggtgtgtttttctttttgttccatttgcgttttcatgcttatctgtagggttgcaaccccgacgtcggggttcggggttgtcggggttggaagcgtcgggggtcggggttaaccccgaaaatggccaaaaatgtcgtggttcggggtcggggttgcaaccctaaattgagtgtgtgggaattgaccgtaaattccgatccttttatactgccaaatttaccctggaaacacggagagagtctggggtcattttgacgctgaacattttggcgccgccaattttgaactttactaatttttttttattttgcaaccaaataaaatattcttaatatcgaacgataagcctaagtgttctttataagcttccaaaatttcaaaaaattatattagattaaaaaaaaggcacgaaacccaactcgtactgtttttccacaaaaaaaattgtcataacttttgttaaaacccatcaaattaaaaaattcttgttagagtgaagcgtgaccgggaattttgggcaagaccgagaccttttcctggcttaaaacccgggaatttttggctgggacaaacgagaaaaaaccgggactaatcccggtcccggtcaaaaccggaaccttggcactccttagtacgctcttcatttccgctttccctccctttatttaattc

SEQ ID NO: 30776 - DNA, 1398 bp, Heterodera glycines
cgccggccaaagcgacttcctcgcccacagcgatctcgcgccgccttacccccgcccccgaggggtatttgccccacggggcattccgtccgaccgccgaaacaccggctggaggttaagcaattacagacacattgtagcaattgcctattcatttggtcggttcagctccgcagtacggcggtgtcagtgggatgataatcgcacaagaaattccaaaagtgggggaaatgaaagcgaaggggcgaagggccattttatatagggggaacgaattcgctatttggacgcacgagagcgaagtcaaaaggcattggtcggaacgatcgaagcgacaattcgagcggtggaagaagcggaggaggaaatccaaaagccaccgcaaatcgaattgccacagtttggcgaaacgcaacggcactggcgagtggaggtggagaaggaggcggtcagcgaccgactcgccgcgatgggagccgcgacggcggaggtaggccgaccaattaggcagtgaatgaggggaaaagggaagggaaggcttaatccgaattagccaaggggcaaaaaaggcatgactaattggcatacctaattgggctaaaaacgtctcaacaattaagcaaataaagcacaagaaaaacgaaattggcctttttattctttgccatttgtttaggttgttcaattgaccgcaattcccgaagaaactttggacacgcgcgttgggcacgcaattgcaacaattggctcgaatattccggaaatgggccgcggggtgcgccaattggccgccattatgccggacgaaagccgtgccggcgatttgatggacgcggcgcgaaaattgtgcaacgcttttggagactttttggagaaggtgaattccattggggagaagcaattcagagcgaaatggcattactaattgtcaggtgcacccggagaagcaggagaaacgcgcgacgattttgtcggctgcgagcagagttggcgaactttcgcacgacatgatcagcacaatgcacgaacagacggaggaggagcgtactttccacgaggaactcaaccgcagggcacgcgcagttgccacgagcacggcacagctggtgcttcagtaagtggggaccgggaggatttgggctgaaggatttgagatggaatttcgaatttgaaatccatctatgaaaagagccaaaacggtgtccgccgaatgtgaggagccggcactgaaggaccaagtgattcacagtgccatgaaggtgggtcgggtgggcaggcaccgttcgcctcattttaccggcattcccccccccccgctcagacggcatttgccacttccgaattggtcgcgtgcactcgcgtcacggcccgaccatgaacatgcgcctgcaaggagca

SEQ ID NO: 30777 - DNA, 1035 bp, Heterodera glycines
tttttaaattttttatagattttttaaaatgttggatttttttggcttaccaaaacttcatcgaaccttggttcttctatttctctttcaaatcgccccaaatttttttttacagcttaactagtccctattaagcttatttccagaaaatctcgcatgaattctcatttttaaattttttatagatttttaaatgtttgcattttttttggcttaccaaaacttcatcgaacctggttctttctattctctttcaaatcgccccaaattttttttacagcttaactaggccctattaagcttatttccagaaaatctcgcatgaattctcatttttaaattttttatagatttttaaatgtttggattttttttggcttaccaaaacttcatcgaacctggttctttctattctctttcaaatcgccccaaattttttttacagcttaactaggccctattaagcttatttccagaaaatctcgcatgaattctcatttttaaattttttatagatttttaaatgtttggattttttttggcttaccaaaacttcatcgaacctggttctttctattctctttcaaatcgccccaaattttttttacagcttaactaggccctattaagcttatttccagaaaatctcgcatgaattctcatttttaaattttttatagatttttaaatgtttggattttttttggcttaccaaaacttcatcgaacctggttctttctattctctttcaaatcgccccaaattttttttacagcttaactaggccctattaagcttatttccagaaaatctcgcatgaattctcatttttaaattttttatagatttttaaatgtttggattttttttggcttaccaaaacttcatcgaacctggttctttctattctctttcaaatcgccccaaattttttttacagcttaactaggcgatattaagcttatttccagaaaatatcgcatgaattctcatttttaaattttttatagatttttaaatggttggatttttttt

SEQ ID NO: 30778 - DNA, 1588 bp, Heterodera glycines
agagagagacaataggcaaaatgtggaaaaatttgcaattagggaggaccagtttgagacaattagagcttttgtgggacaaagcatggcttattaaattggatgacgaagagcgagaaaaactgctgacgacggcattttttagaaacgaatttgaattggagaaatttaatgagtttttcagccactttttgctaatgaccaaacaaattgagcagggtaaatgccaaaataaaaatgaattgaacttcctatttagatcaaaaattgtacaacgaaatgtcaaattttacgaaaacagaagaccaaattttaggaaattttggaatatctttgcatttgcaagaaattaaattatttactgggcgaacaaatttggttgaaaatcataacgcaacaataaacatggttgatgataaatagttttttgtttctaaatttaattaaatttaaatttagttgacagaatttttttcaaaaaatggttttggaatggttgaaaatgaaagaaaattgaaaattgacctggcaattgaaagaattgaacgagtggtgaaagaatgggtaaattaattaaaaaataataatttatcaaatatggcaaaactattaaaaataataatttatcaaatatagcaaaactattaaaaaataataatttatcaaatatggcaaaactattaaaaataataatttatcaaatatggcaaaactattaaaaataataatttggtaaattatgccaaaattattaaaaataataattttgtaaattatgccataaaaataataatttagcaaattatgccaaaattattaaaaataataattttgtaaattatgccataaaaataataatttagcaaattatgccaaaattattaaaaataataatttggtaaattatgccaaaattttaaaaataataactttgtaaataaggcaaataaaaataataatttagcaaattatgccaaaattattaaaaataataatttggtaaattatgccaaaattttaaaaataataactttgtaaataaggcaaataaaaataataatttagcaaattatgccaaaattattattattattatttttggttttagaaccctcaagcgaaattgctggtggccggctcttttcagttgggcgtactcactgaacattcggacatcgatgccatttgtgtgggacccgcttttttggaatttcacttttttgggagtgaaaagtgtgaaattcaccggagcagaaggagttgcccggactggtcactttattgccggctttgtctggtcggcacttttaataatggcgacattaattatcattcttcgaagcaaaaattaaaatttagcatttatcaaaaatatttatttatttttggtaattcttagagctcgacattttgaaaaaagcctagacctagactccatgttggacctggatttcctggccgaaacccaggaaaacccaagtccagaaaaaatccaggtccttcaaactgaatccaggcctggacctgcattttttgaaaatctttttaaaaatcctaaaattcttcaaaaaaatcaatattgcttggg

SEQ ID NO: 30779 - DNA, 1278 bp, Heterodera glycines
  unsure (1)..(1278): unsure at all n locations
tcataancgaaagcaacatattaattttaaattccaacgcccttctcagagaaacattttctctgtcttcaatttcttcattccttttcttttcaattccaaaaatttatcgtttcaaatacacccctattttcccagcgtcgctggtatgagcaaaaaaaaaggtcgttcgggcgaaagtttttcaaaaataccacccctaagaatcgggcgaaaaattttcaaaaatacacccctaagaatcgggcgaaaaatttttaaaaatacacccctaagaatcgggcgaaaaaattttaaaaatacacccctaagaatcgggcgaagaattttcaaaaatacacccctaagaatcgggcgaagaattttcaaaaatacacccctaagaatcgggcgaaaattttttaaaaatacacccctaagaatcgggcgaagaattttcaaaaatacacccctaagaatcgggcgaaaattttttaaaaatacacccctaagaatcgggcgaaaaatttaaaaaaatacacccctaagaattgacttttcggatcggtacccccccccccccccaagcccaaatcctggatacgtccctggggtctgggtgagaaaagagtagggaatggtgaagaaggagaaattttttgagaaaaaaaatattaaattatttattttcatttaaagcatttgttcatatgcataagtggtcaagtggccaaaccttctgattttattatttctcgctcgggttcaattccccactgggatagaatattcttcatattttctttaccattattttaattgaaattttaattaaaaaaatattccaactttttttctttcattttaagcatcctaaaaacccaaaaattaatcaattggtctttttttacaaattctgttaacaaatcgcattaaaaaatacaaaatttttcccggcggcgcctatcggcaccgccggccctccttgttccccaaaagtcttgagaaaaacgtgccgcgaaaaaagcggtgttgaaagcaaaaaaggtcattgatttacattaatttacatggccggagacccttcgcaaaattggaaaattggccgctgatcccttgttttgcaataatctgaattttgaggtctacatctgaattttagtgttctttatcctgaatttgaaaaaaaaacttggtcaccctcaatatacatatacttctgaacaattctaatgctaaaaaacaggcactcgcgcgaaaactgaataaaaattttgtatttgaaaaatttgtctaaaa

SEQ ID NO: 30780 - DNA, 903 bp, Heterodera glycines
tagcgattcaggcgcacattggggcctgaattaagccattttccctttgatcggtacaaaattggccgaaaaagagatagccattttctgaggcccgaaggaaaatttgagagggctaatttatatgtaatattcgaaagtgccaagctaattagcgattcaggcgcacattggggcctgaattaagccattttccctttgatcggtacaaaattggccgaaaaagagatagccattttctgaggcccgaaggaaaatttgagagggctaatttatatgtaatattcgaaagtgccaagctaattagcgattcaggcgcacattggggcctgaattaagccattttccctttgatcggtacaaaattggccgaaaaagagatagccattttctgaggcccgaaggaaaatttgagagggctaatttatatgtaatattcgaaagtgccaagctaattagcgattcaggcgcacattggggcctgaattaagccattttccctttgatcggtacaaaattggccgaaaaagagatagccattttctgaggcccgaaggaaaatttgagagggctaatttatatgtaatattcgaaagtgccaagctaattagcgattcaggcgcacattggggcctgaattaagccattttccctttgatcggtactaaattggccgaaaaagagatagccattttctgaggcccgaaggaaaatttgagagggctaatttatatgtaatattcgaaagtgccaagctaattagcgattcaggcgcacattggggcctgaattaagccattttccctttgatcggtacaaaattggccgaaaaagagatagccattttctgaggcccgaaggaaaatttgagagggctaatttatatgtaatattcgaaagtgc

SEQ ID NO: 30781 - DNA, 1075 bp, Heterodera glycines
tgaaaaattaatacaactaacccaatttcaatttaaaaagagaccattttggataccaatagtttaaaagcaaaatgatgctaaacccttgcaatttgaatttttttaagataaaattaaaatattaaattttgataaaattccttaagctgtgctcagtgaataaaaattaaatttgattttcataaatgtaatttttggatgggcaaaaacggagggttttggtgaacagccaagacaacgcatgaacagttagtcggaagtgatcagcgccctcaactgggggtacacctcggacagaatgagcagcagcgcaacgccaaccatcgcggcacgcttttggacgtccctttgggaggaccttttggggcaatttgagcagaacaatcttcggttgttgttgttgcttgctttcttacatgaacttgagcaccaaaatgttgctggaaagggcgaatttcgtacggacgtggccaaaaacggtttttcggtcgggggactttagccaaaaaacgcagtcactgccgagaaaacccatggcctttccgagagattggagcgacacgaacacctgcggaaaacacttcattcgtccgttgggaaggacagttaatttactcgctccactcggattatcaccgtctcatctgagctggctttgaccagagaaaagtccgacccgcacggatcgcgcattaactgcgaaagattaaatgattggcatggcacaacatggaggtgctattgattgtatcagtggtgctgtggaaacaattttggggaggaaccctggaatttgcaaggttttccgcttcggggccggtcttcgggttttgacaatttcgccccctgctggcgatcttccgctatttgtttaataggtgcactgcttgccaatgttaccatgcccaccttgaagagcgtcgcttgcgacgggtgcatcagtttgccgagtgagtcggccgtgtgagtggaaagtctgacgagcatcaccgctttgccagcctcattcttcaacagcagcccgtgccccttttggacttctgccgtcatgaccaacttcttcttttgctct

SEQ ID NO: 30782 - DNA, 1029 bp, Heterodera glycines
tctagcactaattaacaaaaaaaaaactatttttttgttttaaataatttttgcagctttacaattgcttaacctcgttctgatgatgtccattgtttcttatcattttcaattagcgcattaattggcgtattttctttcggacattccaataaaacattattattattaacctgttaataaattcgggtgaaaaattgaaggaaaagtcacaaaacttttctttttggtccaatttacacagattttaattgtcccaattaaagtacaaaagataattttaaaaagattattgaataaaatttgatttaattataaaatattaataatttcatctttttaaaatattaaaatgtacgttttcttctccgttcgcttccgttttattctgcggggcgtcggcagcgaagaaaataattaatttgaagcatatcaaagtaaaaatgtacattgtatttatttttgttttaacctgctgaatataatccttatgttaaatagaatttattaaaataaatgctaaaatataaaaataatatgcaaaaatcattgccattaagcataattaaattttgtaaaatggcaataaaatcaattaaattgattaattaattgctcggtgctcaggatgataatttgtaagcatctttctcctcgttaatgtctgcctgcattaatttgtaagtgaaaattcccttttcgaaacatttttcatttaattgctttttaactgtataattaattaatttgtggtctttctcgggaagaattgctaataattcactttttcaaaattgataaaatttattcctaatcaattttaaattatcattcatttgcttctgcaaggaaatgtttgttccactattaatttgcgtttcattgcgatttttttttaatgtgtacagttcaattattgcaccaattcacaatttagcgaagaggaaatggaagtgaacatttaattaattaattaattaacgtaaaaaagcaaggcattttgttctcgcggctgttaataaaactagg

SEQ ID NO: 30783 - DNA, 1012 bp, Heterodera glycines
  unsure (1)..(1012): unsure at all n locations
ttatatttttgtggtttagtggttgttgcttcaactcttttagcacttttgagaccggntgactgtttcctttttaatttatttttatatgattaataagattttttaaaccaaaaatacccattaaaatcaatcatcttggcataatttatagacgtattgaacccagttttattttctttgaataaaaattcaattttttgactaaatcaagaaaatttacaaaaaaaataaaaatttaccagaaattcataaatttttggtgaaaatatgttacaaaatagaccttaaatttcaaaattcacccggcgctgcctatcggcatcgccggcgccacaaaaaacctattttttcttaaaaaaatttggcccaaaatcgaaaaaatctatcattttttggacaaaatctgttaacaggctcatccaaattttcaaaatttttcacggcggcgcctatcggcaccgcggacccatttctcctaaacgtctttagaaaaagagcgccgcaaaaaaaagaccaaaaaaaaaagatttatacagattttcgctgaaaattggccattttaaatgccttatgtgtttttaaataattctatacaaaatatttatgataaaaaaataataaaaagcacataaaattattattacgaaatttaaatatttttaagcaaaaattttataaagttttttgactatatggtataaggcaaaaattgaaaaaccccgaccccgaacgatttgtcaaccccgacaccgaaccccgacgcttccaaccccgacaaccccgaaccccgaattttccaaccccgacgtcggggtcgcaaccctaatttaaattagtaaattcttttcgttttttttataaatgaagatagtagttttgctatatttgtgatttatactataatgtgattaatttaaatttttttattatttatacattctttttcatgtgtatattttttatttaatttaatatggtgctcgaaaataattattataaatattgaaca

SEQ ID NO: 30784 - DNA, 1311 bp, Heterodera glycines
cggaagaatgggagaactgcaggactttgaggtgagaaattagaatcggaagtgagacaattgaatttcaaaaggaggtctgtatcgacgacctgtcgagacggaaaacgcaaaacatttcggccgattttatcgggctctgtgggaaaaatggggagggaagaggaaagacaacgccacgagcagcagcacatcaattgaaagtgttgctgctgttgttgtgggtgaggccgaaaaatcgatcgtagagagagagacattgcgagagacagagaaaagggacagacggagagagaaggaccagcagaagagggagaggaagcggagtcaactcggataaagagtaggcttttagtgagagaccggaagggataatctcagcgtcatatagaaagggagggggggggggggggtaattagagactgggggattatgatagagggattatctttcaaaacacctcgtagactgggggataattggagactgcgggattaatagagactgggctataattagagcatatacggtattggtacttccgtgttttgctacccccccccccctcgaaaaatttaaaaaaaaatcatatcttggagttttcaaggtcactctgactatgaaaatggtgttcgtttttatatctatgacatctagtcatcgatttaataaaatatctgattttttgaaattttaaaaattttcgagggggaggggcagcaaaaacacggaagtaccgaatatttatttgctcagaggttgctcaagaagcagtgaaataataaaacattcttcaataaaactgcttttatgggtgtattttattttattgcctttttcttaaaaattctcttcccatgaaacatcaaaaatctgattcataaattatgttgagcaaatccgaaaatggcattttaataagcaaatttttcgtggaccaattcacgggcgaatgtgcaaattctgctgatggacttcgccaagtgtttcttcctcagatctccgccctcctcagcgatggttgtgaaagccggatttgcttatttggatccgtccctcgtcatcgtacatcacaagtggtatgcaaaaaattagccttaggtaactttttcagaactaatcgtaaccatgtgaaattgcagagtctgctatatccaaagacagcatatataaaaatatttgattagaattgttccaccataacttggaattaaataattataaacaaaacgtctctaattatatcaaatcacagcctgatcaaacaatggtaacaacaacaaaaatgcttcaatcattcagtattcctc

SEQ ID NO: 30785 - DNA, 959 bp, Heterodera glycines
tacttgtgctttttcgaaagggcagaaaatttataaaaattttttgagaaagaaaaggatttaaaaagattgcgtgcaagcgggagtgacccctcaagaatgagtgtgggtggcgcactttaaccactgcgctatttgcacgtcagcggaacagcttctttggaaatatttattctcttctttttctacccaactatgagtgttaattaaataataattcaataaaaatacaaagacagttagtaccattcgggagctatattttaatttaaaaagatatgaatttccaaaaatttaaagtaatattttttatctaaaagtatgggagcagccgagagtgactcaaaaaagggaaaccaaaaaatgacaaactgagaaaaagattactaagcatttggagcaaaattggatcaacaaaatatacgattcggttttgtttactttaaaaaataatctatcaaatgtgcaaaatttcattttcccaagtaaaaatccggatttcccatgtaaaaagcccaagttgattgatccctggtcgcgttttttatagaaccggctggccacgatccacggtttgtccaaaattcctggtaccctgctactctaccttatattttgatattttcatttctaaattataaaatattttacatatatagagaaaaatttaaaaaagcctggacctgaagatgggaatccaggtggagcggacctggattttcttgataaaaaccaggaaaatccagatccatgataaacccaggctgccaaagagtggcctaataagtgattgataaaatccgtaaaacctaaaactccgggccattatttgatcacttctttccaacaaaaagcaacagaaaatcgaattcggcataatttttggcgaataaaatttcttaaaaagtcttcgcaagcgaatctcaagccgattatctcagttttattggggggggggg

SEQ ID NO: 30786 - DNA, 1478 bp, Heterodera glycines
  unsure (1)..(1478): unsure at all n locations
ttatgtgctcagtgcgtggcaagcctttgggtgccattttttacattttattgcttttttaaaatggaaaattttaagacaaatttccctatttttacaaaggcaaatggtatctgaacaaatgggtttataacaacgaaggtaagcagaaaacgagaaggngagagagagattgagagagattaagagagacgagatagaagagaaagagagggagagaggtgaaatttattaatgagcaattaagcaacatattagggctaattgccaaatgattccgtcgatttttcatttttccccaaatgcttcttcttccccccccctctcccaaggcaatgcttacattcgctgcttttatttcaccgccgctgttgcgtgcgttttttgttctttgacttttttcacccattcaatttttagcacttcgactggtaacaatccaatgccgacaaatgtgagttccccgaacaatttttatctttggaatgcccaaaatatatgtgaacatatccacccccccccgtttttcatctctttttcctcctcagttttttcgagagtctcggtcttttttttcttgttctaaagtttgctctcgagtagtattcgccctctcttcacccaaatcctctactataaaatctctcctctctttgttaggtggttgagtatttgtacatgactttttcttggatgatgggcgtttttgtgttcgcccttctgttgggacaaatccgtgacattgtgtcaaatgcgaacaaaaacaacgaggaatttcgcaccacaatggacaaagctttatccgagtgcaagcgactcgacttgcccgagcatttgacggcacgggtgaggtcgtggtaagggacaaatgcgccaaggagaggggggggggcattgacggcacggcatggacaggtgggctaatcggaaatgtttgtgttaggtttctttacacgtgggagagacaacggacattggaggagaagaagctggtggagaagctgccattgaaattgcagacggacttggcactgtccgtccattacagcactttgggcaaagtgaagctgttccaagtgagaggggaaggggggagggaggggcgctgactctctgcgattactctccaatcgccccccccccctcactaggacgctgatcgggcatttctgcgcgatttggtgcttcgtctacgtcctgccattttcttaccaggggatatgatttgcagaaaagtgagggggagggggacaaaaaagccgggaataaaaggcgctgaatttagggggacgtgggcaaagagatgtacatgtgagtgagtgggaagtcaaatatcgaaactattctaatcccatccctcagtgttaacaacggcattttggaggtggtcggcggtgagcacaacgaattggtattcgccacccttgcggaggggtcggtgtttggcgaaatcaggcaattgtgggggatgattcttg

SEQ ID NO: 30787 - DNA, 734 bp, Heterodera glycines
ttattgattaattttaatattataataaaggccaaactctgacacgaaaaaggaccgaatccgacacttttgcagggtctttcttccgagtgtacgcctggttttatatccaatacaaacgcattaagttaaattagtcaattaattgatattaattgttttgacccggacgattgtgacgtcacagttgagactttttcccgccattcttctgcagttacaggaagcgcttgaaaatttctatgcaaatatttctagggttataagttgtgtgcattaaaaaatgccaaatatgcacataaaatatgtacgaaaaatccatcaaatattcccaaaaaacacgtaaatgcccaaaaatgcattaaaagctgccaaaaatggaccattgcagatgatcagaaaaaagaatgattaaataattaattcacaatttattacagaataaagttaattaatgtgaaatgtatttcaaataaaagccaaataaaaaatagaatgcttacctttttaattaattatttgtaattaatttattccccattcgttgttcgtgtttattttttgcaattagataattaaatgctgaaaaagtataaaaccctttttatgagtaaataatccttcaccatttgcgtgtgatcaatttttgtgcctaataaattaaaaaaaaattatccctctcttttaaatgagtgcttttctttctacaaaatcataattaaaattctaataaa

SEQ ID NO: 30788 - DNA, 2070 bp, Heterodera glycines
acatggtgtgaaaagcataacattctcaaccaaagtgccattcctcggcggacagatcacgcctgtcccggctcagtgcctacctgttcggcacctgcatttgggccgaaaaggcgcacgattggcatcagccaccctaccagcggataaggtggtgccgtaataaatgtttcagcgccaaggactgtccctaggggaggggtaaagtaaagaggtacacgcggggtactttgccccctcccccccccctccccccttggtgaaattttaaagaaaaagcccgaaaatgcgctaaaagacattttttctcagtggatatccccaaaccccaaaaaaaggccaaaccctgggactaaataattgtttcagccaaggactgtcccaagggagcaggggagagtgggtaccccccgggtacatacccccgtccccgcctggataaaatttttaataaaaaaccaagaaaatgcgctgaaagacatattttataaatggatgctgccaagccccaaaaagtgatgggacactttccctaatttcagcaattctccgtttcaaagttcatgacgaaatttaacaagtgtgtaaaaactcttaaagcggagtttggaaaaattttttatttcactatgtctcacttctctttttttttttttactattttttatattttttttgctaatgttttacgcattctttttttccaaatgtttttgtgtcttggaaacaattagcagttcgttcagtataatgggcattaagccctgcttataatggggcccatttgtccctgtttttgtcattgccaaggcaatgaatgaatgaaaatgtgaaaatgcgcaaaacaaaacattttcagcccgccggcgcggaggttttctgtattcataaaaacacactcactgactgtgctgacattccaatttttcaaaaaaaaaggaaaatttacctccctccgtgccatttgcatatgttttagcccttaaatgccatatttgtggcctccatttcccatccccaaagccgccccccccatttttcatccaatccttgccccctcccccccccctgtggatagggtaaaaccatgaactgaatcatcggggcgtttggcttaaaaattgaaactccgaaaggtgatgatgaataaatgttcaacattggaaactgtaatggttttttaatgtatatacattttgaaaaatattatattaaaagtgaaaatacgaaattaaataaaaaaaaattataataattgaaagttaaaataaacatttttgtcactattaaaaggagtgggttttgaaaattaaaaaaaaaccaaagatggaaccttttggtttcaagagagttttttaatgatgttcagtcatgaaaacaatgtttccgggtttttggtcttagaatcttaaaatattttatagaaaagtaaaaataataaacgacaataaattcagcaaatcgttaatcgttttgttgctgtctttttttcaaaaatcaattttgaggcgaggggaaggggaattatgaagtaatattgaaaaaacatgaaaaattttacgtttacattatttcttttttttggcaattttccatttaattacataattcttctctgtcacttttatttaattttaattttcgaaaaattggtcaaataattattccatttttctcttttcattttccatttttgtcttaactaattgacgcctttcctcctaatggaggcattctttctgtgacaattccttaaaaagagggaaccatcaaatttttttaaatgatggatggactctgaaatctcccaaatcccttgggattttactttttcttggttggtggtgggaaatctttccaaatctttttttttctgacagatgaataaacaaataatgggtttcatttatatcatgaaatatacacaacgttttgccgctttcgaaatttatttttgggctttcccatttaacaacctgctgcttttagaaattttttttcataattttccagacgatttttttttaattatgatttgaaaaacctatcatgaatttaatcaactaaaat

SEQ ID NO: 30789 - DNA, 895 bp, Heterodera glycines
aaccccgatgttaatccgtccgggagaaccttttcaaatttttttccctttccctaaggagcgcgggaaattggaattaattttcggaaaaatggctatctttttttaggccaattttttttctcgttacccccgatgctaatccgttccggggagcctcttcaaattttttccaataccttaaagagctgcggaaattgggaattaattctcagaaaaatggttatctctttttaggacaattttctatctcgtaaccccgatgctaatccgttccggagagcctcttcaaaattttttccattaccgcaagagctgcggaaattgtgaattaattctcagaaaaatggctatctctttttaggacaattttctatctcgtaaccccgatgctaatccgttccggagagcctcttcaaaattttttccattaccgtaagagctgcggaaattgtgaattaattctcagaaaaatggctatctctttttaggacaattttctatctcgtaaccccgatgctaatccgttccggagagcctcttcaaaattttttccattaccctaagagctgcggaaattgtgaattaattctcagaaaaatggctatctctttttaggacaattttctatctcgtaaccccgatgctaatccgttccggagagcctcttcaaaattttttccattaccctaagagctgcggaaattgtgaattaattctcagaaaaatggttatctctttttaggacaattttctatctcgtaaccccgatgctaatccgttccggagagcctcttcaaaattttttccattaccctaagagctgcagaaattgtgaattaattctcagaaaaatggctatctctttttaggacaattttctatctcgtaaccc

SEQ ID NO: 30790 - DNA, 1273 bp, Heterodera glycines
  unsure (1)..(1273): unsure at all n locations
ttctcgagactcactctcgataccncaaagtgccaaagtcctggacttctcgagctcctctcgatgctccaggctgtttctcgagactttcggtgccgtttcgggtgtgccctccccccncctttcttttggcattgtttctcttcgtcgtttttgtcgttttgtcccgcattattccgtctgtcctgtcgtttatgccttttccttttccttccgctcgtcctcttcttccgcgcccaatttccgtccttctccgttccgtcgtttgccctttctttgccgaaaacaatcgtccaaaattcgcttcaccaattgcgcccatcccccggcgtcaattcgtgccgtccccgcggcgcttttgctcaacattttgtccgcgtctgcggcattttgtacttcgacggcgccggcgccccttccgccgttggcactgttcagcacatcgatggacaggcgactgaaagtgccaatggataaatgaagtgatcggaaggaatagaattaagtgatcagccgattggacagatcagaaaaaaagagggaaaacgaaacgaaaattaaaaaacaactcaaaaattaaataagcgaaaagcgtaaaattctaaaatagtaatcattattttgaaatgcgttttaatttttttttttttttaatgaatttctcccaatgttattaattgatcaaaaatttcatggaattctaaaacactggagagaaaaagcaatgccaaattacaaaatgaatccggtcaaaagcattgcgatgatcagattattgcacagtttttgctcaccttccacgacgccatgcgcgaaactgaaaagaaattactgtgctaatttgtaagatcagcgaatcggtcagatgactacggtatcgcacttatccagtaccatatctcggccatgtcattcgaccgtatgttcccccgttccgtgcgcttaccgttgcgtaatccatggcacaaagtgagtcatcttcgcaaatgtttgtgacagtgtttatccgccgacgaaagtcagccaccgaattaggagcaacggtggcggagacggacaacgaggacggcgagcagcacgggtccaattttcgtgccaaaattggctttacgggggtcgtcgacggggagggcaaaggaacgacggaatgtgccgaaggagggggagagggacggcactaaaacggaaaaagggaggaggggggaattagcaggagaagggaatgtcgaaattaaaacgcaatgatttcaagcagcctaaaagtgcacctctt

SEQ ID NO: 30791 - DNA, 1876 bp, Heterodera glycines
  unsure (1)..(1876): unsure at all n locations
caacaaagacataacagatgctccatctgttgacagtttcaaaaaaacgtataaataaatggattgagttaaccaaaaatttagtctgtaaaagagctccttggactcgacattaatttactaaaatctaacgtgtaagtggtcaccccttcgttggatattttatttcttctgaataaataaataaatttttctgcttccacagtgagcgtgctctgcgcactgcgaccgccgcgttcatcgaaaatgccagcgcctcgacgtccgcttccgactcgccttgtccgaccaattcgtccggaacaccgctgccatccgaggccggcgaaggtgagagaaccgttggcctactcccaccccccccccccctctcgaatttggacaaaagtcgacaacttttcgagacagacattcgactttttcttcgaactcgtcaccgtaattggacgaaattgacacattcacttttatttgctttctttttctacccattttgcccgattgagatgacaaattggatgcccaagaactgtttgatcggagctttgctgttgaggacgaggaggaagatgaagaggaggaagaagaagaccatgaagaaggggaagaatgggcggatggaggaggagaaatggaatatttggagagagaagaagaggaggagtgtgaaaataacgaacagcgaaaaagagtgtggattaattaatactaatgaatgatggttgaaaaggcaagggtacgagagaggggtactttcctttttatggccaagttttggattttaacaaattgaattgtaagattctttaaaaaatcattgccacatttggaccaaaaatttttatacggcttttctacaagatttaaactcttctgcctaatcaactcgtacaaacggactcgcctcccagtctcggtcgattttgtgctggtactcatccgcattatcttcacctcaaagcatatgaattcaacagtctttgcattcttccctatttttcattttattttaaaaatatttttgattaattttaaataattttgacacataaaactttctaaattatccaattcactttccaagtacaagattgcaattacccaagttcgtaacggggaaaatttgtgaaatccaagtgaacatgaaaacttaatcaaaaccgtaagccgaatgcaaaaaattttaaacttttaccataaaatggacattttttatattcagatgcaaaaccatttccaagtacaatcttggaaattcttcgccgtttttttaaatttcttacgttggatataaaaaatttcaaaatttatccaagttctctctttaaaatttattttaaaataatgcgacaagaaaaacaataactttttcccaatttattattatttcatttacctactatttcatcatttaatgagtttggcttttcgttggattactccaaaatttactcattttaataaaataaatatcattacgttattattaactgctgatttgcttttccctattttcgagtgacgttgttttctgctgtttgtcagcagcaaacattcgctgccaagtgaatagcgaatcaacccaaattataaaaaattaatctgaagtctgaataaataaaataattttcgaacgggttattatataaaaaaacttcctgaatggcttttgccattagccgttaatttcaattcccatctaanttttgagttttcttttttttaaattatagtaacaaaataaaaaaatattcaaaaaaaaatgttttgaggttttttatttgtcataatttcctttttaagacgggaggaattattggctttcaagacaagtaaacaaagtcgacacatgggatcgagcctaatctctctaaaa

SEQ ID NO: 30792 - DNA, 1432 bp, Heterodera glycines
gggggcgggggaaatggacgaggaaacaaagcaaagcaaatcttaatcgctcggcattacgtgttgtcgggagatggaagcgccgttacgcccctgacattttcgtttttcccccggggcgggggaggtgatcacccctccgaatggtcccctaaaacgtgtttcattttgcggtataaataggggggattgggggagaaaatggtgggatttctcccctcggtggatcactctcttttttttgttccgtttgtgtgtgtgggcccacagcttttgccggggattggaaagttttaggtgccatcgggtgacgaaagtgcggcggcggcgtctccgccgcatgggacgcacccgccggcgcaaaaattggccacaatttgaacagtcggagaataaatgatggaatgaatgggatgcgttggtgcaaaagcgtgggacggatcgtatcacaaaacgcatgataccaaggatcagatcctgcacagtcgtaaaatatggagacacctggttgacccaccatttgtaagtgaacactcattcaaaatctcgacttttgagcccctgtaactcttgagttaggcggaatgcatccgtaagattaaaaatccacactagaagtcgaccctgctctatcgaatggtatataacacatatgcattttccgacttacagttcgggtggttcccttgttagtcccttctgggtttttaacttaaattctgaaaaaaacattttccccaccaaattaacaaaaatagcgaaaaaaatcttgttttcaaaaatcatgaaaaatgtttgttttttctgtttcgcgctgatcacgaatagggagcacatccatcgaccaaactcgaaacccggacatgaattcgaacaaaaagtttgaaaacttcaaatttttccagtttcgcaaaatggaatgctgtcgcggctgaacgacagccgcgaatgtccgttgagcggacaaatgaggaggacggggaggagtgaatgaagttgcgaacaaggagtgatgaatggatggaaagatgggaaaaatggggcaaacgggaaatgatgaagggaagggaggacaaaaagggggcgaagggagggacggcagcaggcgagcacgtgaattgggggaaggaaagcgataaaaagcggatgtggcgccttctccgcgtgaaggacgcccgaagtagtgcaaaaacgccgatcggaccatcgcggtgcgacggacgaaacgacacatcacccaggcggacagccgatgaaatcggcgatcatttgatggaaaattacgaatttgcgggagagcaaattcgcaccggacccttcccctcgcgactaatctccggcatatgagtgaatgcaaatattttaagtgctgccaagattacatccgcgcaccgtcggctagtcattgccaggtgaaggaattgccatcctc

SEQ ID NO: 30793 - DNA, 215 bp, Heterodera glycines
atcaccgaaacgcgcccctcgaaagggccacgagacacgccgagccggacaggccaaaggcaggacaagaacggggccgcagacgacaggaggcacccgacggggaaacgagcgcggaaccccaagacgggaaaacccccaaagacacgcaaagaagcagccgcacaagagacaagaacccggagaaacgcgccaacaaaaaagaaaaaggaaga

SEQ ID NO: 30794 - DNA, 1504 bp, Heterodera glycines
  unsure (1)..(1504): unsure at all n locations
aatttatataatatttttgattttcataaacaaaattgctgtcaatttctacattttncaatcaatgaattaactntaagcctctaagcacttagaaccccncaanaatgccgaaattggcaaatggttacagaacaaatgttgggcctccaattattgtggtctgtctggcaaatgtttatttgtttgctcatgcacctgatataattaattcattggccctcctcgagagtgacgagaaaacaacgccaaaaaatgtcaatttagtgccataaattttgattttcccatattttctccaaaggtagtggtttaattattattttttcatccaaattttggcattttttgtgatttttaattgcgaaataccgtctttttattatttgaaagacaattaagagagccaatatttttgggacaaatttctttttttttaccgactcatcgccattttgagtttgtttaactcataacaattcggtattttggactgattccatttctcatttcgttaaccgtcctcaattttgaaacattttcgccaaattccccaaatatttttggataatttaagcgattaaatcactaaatgatttcatttagttattgaaacattttttttatttgcttaatgattcaactaatgacgattatcaaagaacaaatttcataggtaaattaaattttaattttttcatttgtttaatgagtcaaccgaaggcaattaaaattaaatccaatggtaaatatgtaaattcctataaaaactgaaattgaatttatatttttaaacaaataaaatattttttcaaaccgtttttatgccaaatttgctaatagtaaatttgcattttaaaacaattaaattatttttttgtactggtcaaattacatattattattagattaagtttatggtatgtagttcaattgattattttctcccttaatttatgtttaccaaattacccaaaaaacagaaaaattgaaaattactttatcacccccatcagactataaatatacgatttttctaattttttcatcttaaaaataaatttttaaaaatattttcgttattttttgctaaatttatattacaaacagcctccaattgtaaatttttgattttttttttacccccgtcccgatgaaatttctttttcttaataatgaagggtcctccaatttggaatttttcactcattagccacttgtgtcttataactcaagaatcttttgtctccaaatcctggaaacttttaatggttttaaaatttaccaaattttttaccattctccctttttaaattttctcaaaaattcccttatttcccccttttttttcctaaaaaatcccctaaaccacttataaaaaacccaaattttaaaaaaaaaaaaatattaacctcttcttttttttaaaaaccccccctttattttttttattttttttttttttttaaacccccccccccccccccccccccacccccccccc

SEQ ID NO: 30795 - DNA, 1135 bp, Heterodera glycines
  unsure (1)..(1135): unsure at all n locations
ttatgaacaaaaaaatcgattttttcaagtgtccgtttgggtactcaaacattnatgggagcaaaaatccacngcagaatanaagtacagnctatagggaagctattcccgaaggattcggtctccccataaatctgggcgcatcgttcgggaagactgccccgaaaacaaaaaaatcgattttttcaagtgtccgtttggggtactcaaacaattatggggagcaaaaatccaacgcagaattaaagtacaggctatagggaagctattccggaaggattcggtctccccataaatctgggcgcatcggttcggggggactgccccgaaaacaaaaaaatcgattttttcaagtgtccgtttggggtactcaaacaattatggggagcaaaaatccaacgcagaattaaagtacaggctatagggaagctattcccgaaggattcggtctccccataaatctgggcgcatcggttcggggggactgccccgaaaacaaaaaaatcgattttttcaagtgtccgtttggggtactcaaacaattatggggagcaaaaatccaacgcagaattaaagtacaggctatagggaagctattcccgaaggattcggtctccccataaatctgggcgcatcggttcggggggactgccccgaaaacaaaaaaatcgattttttcaagtgtccgtttggggtactcaaacaattatggggagcaaaaatccaacgcagaattaaagtacaggctatagggaagctattccggaaggattcggtctccccataaatctgggcgcatcggttcggggggactgccccgaaaacaaaaaaatcgattttttcaagtgtccgtttggggtactcaaacaattattaaaaatttttagatttttattcaggctccctttttgatagtgaaagcatctgagtgcctaaaataacttgtaaataaaatttggtgcgtttcagagcagtttgtgaaaaaatatttatgaattaattttgctaaaaaaataaaatagtgaagctttaaaaattaataaaaaattttaaattcagaattactggagttagcatcatagcagtgcttttccttatgtttttgatgccctcgcaaaatctggttcgcttctga

SEQ ID NO: 30796 - DNA, 1196 bp, Heterodera glycines
atattttttctgcgcatatgctatgaagaaaggggctcaaaaatagcatttctgcgttaaaattttttgatttggtgaaggtttttagtgcatataaaagcatattttggggattttcgagaataaatgcatattttgccatttttgcgtttttagaacatatttcggtcatttttggcaaattttcataagaaaaatgcaataaaaatgaaaaatacacccctaaggatcgaccttttgggaatttaaaaaatatacccttaaaaatcgaaaaattttaaattttttgtaagaacttttagaaaaaaaattgttgatataagaaaatgtaattttgttttagcatatgataaaacactctttaaaaaattcgaaattgcatatataaatttagaaaatcaaaatttttttgctattatctaaaaacgctccttagccattgttttggtgttttaaagtcaattctgtatttaacacaattttggcatttttttgagggatagaagccattttgcgtaatttttaaggcatattttagtgcatatttggcatttttcgggttttagggcatttggctgttttttagtgcatattttatgcgcatatttggcattttttagtgcatacaatttataaccctatttataacataaagcttggttctaaaaaaattgaatattacaaaattaattaattcaaaattaaaaatattatataaaattatttaattttgtcactattgctgcagctactgtgaaaatttaaattacaattttatccattttttattctctaaattttattgccatttgtctgccgccactatttccattaattcgaatcgaccattcaaatggccccataaaccaaagattcggcataattgcacgccttctctcttatgatcagtgcgcccgccccaaaatctaaataaattttccagccaaatacaaaaaatccattcgcccccattttatcccccgcccaattgccccatttacgcctctcaaaattataattttattttatattcattttcatttcattttatttgcttgcttctcctcttctgcctcctcttcatcttctcactatcattcattcacggtaataattccacgtaattttacaacaaaacattagcaaaggcgagcatttttggttttgggcccgggaactttcgaaatgactctaga

SEQ ID NO: 30797 - DNA, 1656 bp, Heterodera glycines
  unsure (1)..(1656): unsure at all n locations
tttattttaaattaaattaaattataatttttattaaaaaattgtcagcaatggaattttgtttattattcttttcaatttgtatttttaattgctcaaaattgaaatggaggcgaaaaagaaaaaattggaacaaaaaacattggaagaaatatttggagaaaaatgggaagaaaaagaaaatgaacagaaaaagagagaaattgttcaaaaattcaacaaaattaaagagaaaattaagcaaaaagagagaaaatattcaacaaaagaatggcataaaattgaattgaaaatagcgaaaaaattgggaacaaatcgaacaaaaatttatcaatggatcaaagaattaggaatatacaaaggccacaacaaatcaaaaacggatgtacaaaaaattgaaattgttcaaaaatttattacaatgaaaaatgaatataaacaaaaaggaagaaaatattcgagaaaagaatggaagagaaattatgccgtaattgggaaaaaaattggagtctgccatgatgcaattaaaaaatggaagaaacaatttggaatgaatggaagaagaataactgaaaaagaaaaaatggaaaaaatgaaaatgtattggcaaatgaaaggagaaaatccaaaaatgagtgacgagaaaatttcaaaaatgttgaaatttaatcgacggaccattttcaattggaggaaacaatttgagaagaattaaatgaggattaaaatattattgagataaaattgcattttccatttcttagagcctatttttggggatttttaagacataaagcctaaagctacctttcgagttattagtgtctatcctaagcttttattattagacctaaaagcctaaagaatttgtgaaagaacctatttttgcctattggcgttttgtcgaaatttgttaacaaaaatgcaataaaaaccaaaaataccttccctaagaatcggcccgaaaatttctgaaaatacaccccttaataaatgaaaattttctcaaaaaatcatctccaatatttattttattttcattacaagtttggttttttaaattattttctcaataatgatttgaatacattttgttacttttcgaatagcttttcattttaggccactaaatttcaaacgttttgctttgcttttttatgtctggcattttgtaatatattttttaaaaatctttcggcagttaaagctggaacataaaataaaagccaaatattttttcccctttttatgttccattatttatttctagggctgccaaaaaatatgtacaaaaagtggtcaaaatcgtgctgagccgagcctaaaaagtatcaatgattgaaatatttaaattagattattatttaaatttatttgctaaagaatgactcataacttagcttaaacttatcaaattaatcaatcttggtgttggtcgatagctctatgtattctcttcaatcttatgtaattaaaaaatctagcaaaaatttttacaaaaagttgtaactaaaaattttgtaaaaatttagactcaataattttgttcctaattttttanaactcattanaaaaattttaatttaacaggattatatagaatctttgggctatctagtcatattanagttatatgaatgaattgcagtttgaaca

SEQ ID NO: 30798 - DNA, 942 bp, Heterodera glycines
aaaatggaatgcaatttattataaatttaaaaaaataaattaattattccttttattaattaaaaagagaattttgaaatgtacaataattgaatatttaaattaatatgaaattatttttataaacaattaaaaaaaatatgaaattctttattaaaagataattattattttttacataaattcttttattattaatttacagacaaatctttaaatataaattgatacaacagtgattagtaaattcattaaattaaaatgaaaatatttttaacaaatttaattaaaaaaatacatgaaattctatcaattaaaaaaataattaatttaaacttataaaatttatttatcaaaaaaaaattaaattaaatataattttttatttattaactcaacaaaatattttattaattaaaatcattgaaaataacgtaaaaatgcacaaaaaaataatgttacaccgtccggattcgaacctgcccccccccctcaaaatgatgcctcagaatccccaatcacacagggattcttaggtcttaacgatgtcaaaagtaaaatctgattacgtattcgtgatcagtggcccaattaacccataaagacatgtttttggaagatttttattgaaaaaaatttttcactcaaaaatcctgtccaccccctttggtcccgaatcacaaaatcacttttatttttatatctttttttaaaaatgtgataaaaatgtaaaataaaatttatattatagagaaaaaaattgcggatttttgtagtattttacttttctcaaatagcttttcagaaggcagttacgaatttttttctgaaaaatcgaatttttccagaaattctggaataatttttttattttggaagatagaaattccaaataaatctcataaaattctcccaatttttctctatttttaaagctttatt

SEQ ID NO: 30799 - DNA, 1330 bp, Heterodera glycines
  unsure (1)..(1330): unsure at all n locations
cgtattcgtactgaaatcagatcaagtaagcattgccttttgctctacgagaggtttcgtccctctctgagctcgccttaggacacctgcgttacgcttgacagatgtacccgcnccagtcaaactcnccgcctgacactgtcatcggtgcgggtcgccgggccaccgggtggcccgacttaacaccaaaatggacacccttgcgggcgcactcccgtttacgannttaagtaaggaatcgatgaaagtagtggtatttcactggcgccttgcggctcccacttatgctacacctctcatgattcttcacanagtcagactagagtcaagctcaacagggtcttctttccccgctaaatttgccaagcccgttcccttggctgtggtttcgctagatagtagatagggacagtgggaatctcgttgatccattcgtgcgcgtcggtagttagccgacgaggcatttggctaccttaagagagtcatagttactcccgccgtttacccgcgcttaatcaagtttccttggcttaacattcagagcactgggcagaaatcagacacggtcaacgtccacaaggaccatccgtctcctctgttttaattagacagtcggattccccgagttcgtgccagttctaaactggtcgttcagcgccaaccgaagtgcataccctgacgagcatacacgcagctgaagcgctccacaagcagctctcaccactagtccacgcaccatccccgaaggaacagcaagcagccacgggcaaaagccgcctgtttcacgcaacagcccggctgacccgacctttagagccaattcttttcccgaagttacgaatctaatttgccgacttcccttacctacattattctatcgactagaggctgttcaccttggagacctgctgcggatatcggtacgatcaggcaggagattcaaatagcttccctcgcattttcaagggccgtgtggagcgcacgagacaccacaggaaccgcggtgctttacgggcgcaacatccctatctcaggctgagccacttccaggcacgcacaccctaaaccagaaaagagaactctggctcggactccacacgacgtctgcgagttcatttgcgttaccgcgcaaaacagctcttgcgaaccgtcatttccctagcctggcgtgggaatgttaacccacttccctttcggcaaccggatggaccaactgcgcaagcacagaaaagtcgtcatccgtagtgtgatacggcgttagccggtgccttaggatcggctgacccacaaacggctgctgttcacgtggaacccttctccacttcagtct

SEQ ID NO: 30800 - DNA, 1142 bp, Heterodera glycines
  unsure (1)..(1142): unsure at all n locations
atatttatgaattaatttntgctaaaaaaataaaatagtgaagctttaaaaagtaataaaaaaaatttaaactatgaattactggagttagcatcatagcggtgcttttcaactttttagattttttagtaatctctctttttgatagttaaagcatctgtatgcctaaaataacttgtaaatataatttggtgcatttcagaacagtttctgaaaaaatatctatgaattaattttgctaaaaaaattaaatagtgaagctttaaaaagtaataaaaaaatttaaactacgaattactggagttagcatcatagcggtgcttttcaactttttagattttttagtaatctctctttttgatagttaaagcatctgagtgcctaaaataacttgtaaatataatttggttcgtttcaaagcagtttctgaaaaatatttatgaattaattttgctaaaaaaataaaatagtgaagctttaaaaattagtaaaaattttaaattcagaattactggagttagcatcatagcggtgcttttccttgtctttttgatgccctcgataaatctggtgcgcttctgctcagtttataaaaaaaagttaagcctaaaatttttcgcatatttaaaaagcaattaaaaatttttagatttttattcatctccctttttgatagtgaaagcatctgagtgcctaaactaacctgtaaataaagttttgtgtgtttcagagcacgttctaaaaaatatttatgaattaattttgcaaaataataaataattaatgaaaaagtcagaatttcgaaaaattttaaaaacaacaagcgttggcattttttcaggttaagttagtcctttacaatggagaaggcctgcaaaatttggagagattatatcgattttagtgcgctaggttcgatgaaactttttaaaatataagcctaaactttttcgcctgtttaaaaaggaattaaaaatttttaaaaattttattcatctcccttttgatagaaaaagcatcagagagccttatttaacttttaattaacatttggtgcgtttcagagcagtttctgaaaaaatatttatgaattaattttgctaaaaaaataaaatagtgaagctttaaaaattaataaaaaa

SEQ ID NO: 30801 - DNA, 968 bp, Heterodera glycines
  unsure (1)..(968): unsure at all n locations
ccctcctcagtttacgcgagactattcaccctcccccccccccatggtttcccctttttttagattanttttgagaagttttttcccttttcttgtttatggatcgatgcgtttgacggttaagcgaaaatgggaagagcaaaagggccactcagttgataagaacggagagagcacggacttcagtcagtgctttggtcttttaccagcagccaaataatggtcgacgctctttcagtgccgaaatggaattggcatttgtcgctttcgcttcccaattagctaaaaaccctttgcactccctcccgcccccattaactcatcgcataactttccatttcatttttgtcctccccttttttcctccgtttcccttaaatttgcctttttaggtccttgtgccttccactcgaattcttcttattcaaatggtttcgattatgcgttcggaacaaacactgcgtcttatccaactttatcacgccaattacccggaaattgcacggaataaccaagacgcggacgggcgcaatttgaagttgcaaatgtgggcacagataacggaggaactgaacagaacatttgagacggcattcaccgtggagcagttcaaaaagaaggtgcaaaatgtgcagtgcacgtcgagacagaaactgttcagcgggaaaaggtcatttgaacgggaaatgcaaaaaagaattgggagaggggggggggggtaaatggcattgggaaaatgggaacgagtgccattggagataatgggaggaaatgccattggagagaaattaggactaaaatgaatttactaattcagaaacttgggcgaggcagaagttgaatatttgcgattgttcgaatcggacaaaatttctgaagaaacattgggccaccgagcaaagaatcgtcgaatgtccgcaaataaggcagcaacagactttctgatgctaagagaaagacaataccaa

SEQ ID NO: 30802 - DNA, 1323 bp, Heterodera glycines
  unsure (1)..(1323): unsure at all n locations
aaaaaaagcatttggataatgggattcaccaggaaacggaaaaatttagcactttttggaaaattttttacttacagatttgaaggtttcagacgcggtgtagaatcttaaaaaaattaatattattttaaatcttttataagattaacgcgatacaaattaaggaaatagtaaagttcatgtgatcttgatagaaaatggataaagaaaaggtggtttattgaaaaaaatggtgttaattcgcgtgcagaatctataaataaattaatattattttaatcatttaaaatattttagttatataaatgataaatcgaaatgtattaatgctctgataaaaaaagcatttgataatggattcaacagaaacggaaaaattagcactttttggaaaatattttacttacagatttgaaggtttcagacgcggtgtagaatcttaaaaaattaatattatttaaatcttttataagatttacgcgataaaaattaaggaaatagtgaagttcatgtgatcttaatagaaaatggataatgaaaatgtgttttattgaaaaaaatggtgttaattcgcgtgcagaatctataaataaattaatattattttaatcattaaaaatattttagttatataaatgataaatcgaaatttattaatgctctgataaaaaaagcatttgataatggattcaacagaaacggaaaaattagcactttttggaaaatattttacttacagatttgaaggtttcagacgcggtgtagaatcttaaaaaattaatattatttaaatcttttataagatttacgcgataaaaattaaggaaatagtgaagttcatgtgatcttaatagaaaatggataatgaaaaggtggtttattgaaaaaaatggtgttaattcgcgtgcaggatctataaataaattaatattattttaatcattaaaaatattttagttatataaatgataaatcgaaatttattaatgctctgataaaaaaaagcatctgataatgaatttaccaaaccggaaaaattatctcttttcgcaaaatattttttttacacattcgaagttttcatatcgcgatgtagtatattagaacactgaatatccaggcactctttatataaggtgttgaatcaatacaaagcatacttgcggaatatttgataacagtaatcgatgaatggactgaccaacagcgcctgcgtgctttgcaatcaaaaattgaggaaaaggcagagagagcctttaactcagcgctntgcatcactgtgaggtaagtgcgcgcttggttcttcgggaaccaaaataccaa

SEQ ID NO: 30803 - DNA, 1600 bp, Heterodera glycines
  unsure (1)..(1600): unsure at all n locations
gggggggggggggttttnttgccnnnttttgtttgnnnnnttngcgtcntgtttgttggtccggccttttgggtgccgtgtncgtggtgctttgcggggtntgtccgcctnggncttttcttngggnttgtncntngcgctcgnttnntttgnttttctttcttctttggtcctgctttgngggtgnnnttgggttttcgttgcgctctttnttttnggntnntctctttttatttttgttttctgtcaatcagaagtagaagttgcgttaatagcctcttaatcacaaaaaggaactcatttaacgctgaaaggagctgataagaatttgagatgaaacttttttttgttcgttcgtcgtttatcacttacaaattagggaaaacgagacgacaacaacatggatggcaaatcactgattgtcaattggtaggggtggaattattaataataatacaaaatcattccgtaattattattaatattattcataataattctattcttaactcacaatcatccagcaaaatgtgtttttattctcttcataattttgtcaatgttttgttttgagatgcttaggaaaaacagcaactttggtaacaatttaaaaagagaattattattattattattattattattattattattattattattattattattattattattattattattattattattattattattattattattattattattattattattattattattattattattattattattattattattattattattattattattattattattattattattattattattattattattattattattattattattattattattattattattattattattattattattattattattattattattattattattattattattattattattattattatcaaaattattaaaattattattattattatcaaaattattattttttcgattttcaaaaagaagattttgttcaaacaacgaatgagaagacgaggaagaaggagggggaggaggaggaagaagagaagtaacgagaacgtcgagttgactttgcaattgcgctatttcgatgttctttctcgccacgatcgtttgctgtgagcgcaacatcgtttttaatgctgacgtcatctcattttctgcttcattctcatctgatttctttttttcgattgttggcttggatatctcgctctttcgttttctgattttgttcatgtttgggtggtgtgtggtgggagtcgtcgttgttgtctctgtgaaagattggagctcttgcttgagcgagtcgagagattggtgcaaaatggtgttttcatcggctaattttgtgatttttttgcgtttttttttgtttttttttgtgagcttttttatttgctcttcgtaggtgtctgtttgagattttaatgcgaaaagaagcttttcaatttcgagattttttaataataattcatcattcttttgatcgatttcgaaatttatcattgaaagcaaattttccgcttcgttttcgatattttcaatgcttttttcatcgaattggtgaaataacttcccttctatc

SEQ ID NO: 30804 - DNA, 1342 bp, Heterodera glycines
taataagatttatcataaaatttcaattaaaaatccatcctcgattattggtatgaacgatactttccaaacatgcttgcgttttgcgctcgagctatttatcatcgggcttgtcaatccaaagcgaaacaacaaagatgctgttttgaacgaataaagggcataggttattttgaagaagtgtcaaagaacatgcagcaataagcctgcaaaatctaataagtggaaaatacatgagtatagaatttattttcagaaagtgtccacagacttttggaaaaatatatttgcaatttatcaacaattttgagaagtgagttagaaatgataaacttcacgattcaaaccaattttcgttgctctaattaaccgcgatacaaacattcgaatcaattaaatagcttctgagataataaggtttatcataaaatttcatttaaaaataaaccctcaattattggtatgaacgatactttccaaacatgcacgcgttttgcgctcgagctatttatcatcgggcttgtcaatccaaagcgaaacaacaaagatgctgttttgaacgaataaagggcataggttattttgaagaagtgtcaaagaacatgcagcaataagcctgcaaaatctaataagtggaaaatacatgagtatagaatttattttcagaaagtgtcaacagacttttggaaaaatatatttgcaatttatcaacaattttgagaagtgagttagaaatgataaacttcacgattcaaaccaattttcgttgctctaattaaccgcgataaaaacatccgaatcaattaaatagcttctgagataataaggtttatcataaaatttcatttaaaaataaacactcaattattggtatgaacgatactttccaaacatgcacgcgttttgcgctcgagctatttatcatcgggcttgtcaatccaaagcgaaacaacaaagatgctgttttgaacgaataaagggcataggttattttgaagaagtgtcaaagaacatgcagcaataagcctgcaaaatctaataagtggaaaatacatgagtatagaatttattttcagaaagtgtctacagacttttggaaaaatttatttgcaatttatcaacaattttgagaagtgagttagaaatgataaacttcacgattcaaaccagttttcggtgctctaattaaccgcgataaaaacattcgaatcaattaaatagcttctgagataataaggtttatcataaaatttcatttaaaaataaacactcaattattggtatgaacgatactttccaaacatgcacgcgttttgcgctcgagctatttatcatcgggctt

SEQ ID NO: 30805 - DNA, 1315 bp, Heterodera glycines
  unsure (1)..(1315): unsure at all n locations
ttccataatgcgtattcattcatactgggaaaaaaattatctttaggaagagcaaaaattgatcccgatctcgacttcgacagatttgttccactacgacgccggccgtgctgaccccgacaaagccggtcattttcttttcacaccccgcggaagggtcggattactaccctaacatattcaattatttattttttatcatttgctattcaaataattttatttacacattgcataattaacataatattttgtgcacaggaaagaaataagccagtccgatccggcgtgtgcgatatgattcattaatccattccatcggtggtccaattccatcccacttttccatcccaacacattcacaattagtgttaaagctaatgggcgaaatgtaggaaactaataaagtgcatataaatatataaaataaatgtttaaaaatattcagaaatgccttacggacatttgcggataatttcgggaaaagataaaaaaatttcttgaaaaaaattaacaaaaattcagaaaatgaaatggaagttttggcttcatttttaaattttttcccgaaattgtccgcaagtgtccatccacaaatgtcccactgcggcagccgacatccctcaaaatggtcaaaccgatgatgccgctgaaagtggcccagccgatgccattgaaaacggaaccgaatattctggtaaaattagttggcatttatgattattacaaaaatataatttcttgcaaaacattttttgtcgtaaatctgcgcacggcgcattcctgccccaaactctaaagctaatctaatttatcaacagatgaacttgacccagctgacatccttggcaatggttcaacaatcaattcttcgcaccgacaattcaaagcggtacggtcacttttacatgagacatttggcgtttccaattttaaaatgtcttcacaagagctcgcattttgaggcatatgccttttttttctgcgcactagttccgatatattaagcatttgaggcttctacgttgacttatcttatgcctttttcgggattttcgtgcattataatctttaaatatttaaggaaggcatcgtcccgataactgcttgaacttgggtgaagcagcaaaaaatgcaactgtccatccctcattttatggaacgaatgctgtgaacggctaaatgcacaaatcgcaaattttgtaaaaaaaaagttagggcaatttagcgtaatttttaaatttttttagcaatgcctaacacacaaattgaatttgcccaaacttngtttggccccatttgtgttgctatgttt

SEQ ID NO: 30806 - DNA, 913 bp, Heterodera glycines
ggtttcccaatcgggaaatgtgatgagtgtggtctcacttgttacacgaaaggaatcgtcgtaacagtgccacccgaaatccaaaagttcgaaatatgctgtgcagaaagctgcatagtttggcaaggcatcaaagccttgaacttcgaactaccaatcgaagtcctactcaacaatcataactgtgaggccagattttggactgactcacagcacaccttcacatcaaacacgacctgcccggcagtcgatgaatgtgatctcatcgactgctactttttcacacaacttgtgaatccaacatgccagcccgtcattgcggcaatgctggcaggaggcctgtccttaagcttcctgtgcttcatcttcaccatgtgttccatggtggatacgccatggcaggactgagaatccttttttggattttctcagtcttgttcgcgcgcttattcaagccgcgaaaagagacatgggtattgagtgaggaggagaaaaacctcctctatcctcaccgacgaatacgccggcccaggccagcaacaagaaactggccagtggccgagttagccaaatggcaatgcttgtcatggcatctctcccgtttgtacatgggggaattgaaacagtggctataatggccaaatcagagagctgcctcaacaacggcacaacgaaaatgtgccaagtcaagggaagcgtaacccttgcgcttctcccggcaggacaaccgaatgtcctgtcaatgaagaccgatgatggtctcattttgggaacccttcaagcgatcttgaggggacactctctcttgtatgcccagcatacaccaaggcttggaaacgatcatccaagatcgcttccggggccagcaaaagatgtccgccggctggctcatgtgtcggtgacttttgcccaa

SEQ ID NO: 30807 - DNA, 1720 bp, Heterodera glycines
ggggggaatcgatttgaaggggaaacgaattttggcaaagtgtcacaaaaaaggaaccacccgagggggtgggggggggagagaaaaagaaaccggtttaaaggcaaaagaaaagaagaaagaaagaacagatggacaaacttaaaatggacgaaattagcgaaatacacacataattaattattaattaagcaaaacattttctgttttacataaattaaccgatcttcaactaaaacccaaatttatatattcttaaaataatttatattcatcgagaaaatttaaggactaatttaattgacaaaatctgttgacgaaacctgccaaaccttcaaagtttcctctgaaggcgattatcgttgtgatttttcgggattactcccgtgtcaaacggaacaaagaaaaaaggcttttcaaattggaagaaatgagtaaaaaaacaaacaaagggaaaaacaatgataaaaaagtaatcgaaaaggcaatgagagaataaataataaaacttttaagttccctttggcaattcttcaaacaacaaaaataatcaaatgtttcaatggtcccaaattgtccaccatccgaagcgcacaaatgccatttgataatggaggacggcacggaagagatggaacagcgaatattcgggccaaagcacgtcggtgtcgaattttagcacacagcggggggagcattggagctgaagcagaaattatgaaaaattaaatttaaaaagggacgaaaatttgaattttctgtttttttgattgcctgccaaattagaaaatcgctgagccgacattcgctggtccgtatgaacaggtcgagcggacgacaaaagcgcgtgtccatgcgggcggacagcaaatcgacgtcaatggcactgagaaaaacaaacaaattaaatggcaaaacaataaatgcagcaatttcacagggaagaagttcgtcccccactgaattttgttttaattttttcaaacctagaaaaattatttattttcttttttcaaaaatttgtctatttctaaaaactcactttctgtccaattttcccgatcgaacttctcggcgaatggtctcaaaagtgcgcacaatttcattttgtgaggtgtaagagaggcaaatgttcaggaaagtcctgcaaacaaaaaagggatttctaggccatttttcgaacgctttcataccccaagttggggtaaatcatacaccagacgaatagcattttggtgagaaaaaaattttttgaattaagttaagagttaattttggtttgcctggaagagtttcgcgaaagaactgtgactcagaaaatgcgtactattaaatatcaatgaatatgaaaaattgtaaaatatgtaaataaatttttaaaaatatttttaagtgaaaacataatttaactttaatggagaaattatttaaaaatattaactttcaaaaaatgttcattttttgcaaataattttattgagcgtaattttgcaaattgttctgtgggccgttgttgtcacctcattttcgtagcactttcgccctctgtgctcgtcgtcccactgatctcctcaatttcctccaccaatttgcaaattttgtcgggcaacagcgaccgatcgccgaagaagcgaatgccaacgcgacgctcaatgagttcggatctgtgcattgaaaaaaaacaaaattaaaaatttattagggggtaaaatatcaaaaa

SEQ ID NO: 30808 - DNA, 1480 bp, Heterodera glycines
gtaaagggagcgagcgtaggtacggaaagggagcggcgagcaaggagcggaaggatgaaagggagtgagcggggaaggggtgtttgtccgccctcacccctttgcctttctttctctacacctcaaaacaccaaacccttgctaaaattgcactcttatcccccaccctttcgacctcactttgtttttgtcttcccccccccccccccctctttctctctttcttcgtctgtgtttgtctgtctgtctgtcgagactctcgacgcgggggatgactatgactatcgcttgtttacgctccccgtcgccaaagtgacgtccaccaaatccaccaccactccttccatccatccttttcacacaaacattttcatccagggaagctcacgagaaatggccgagtgggcatatgcaatttgcccccgggggtgtttttcagccgtgggatgaatctcggcttaaaacatcgggcagacgagactcttgagggttgctcatcggatcagtgcactctcacgcccctttcctttgatcggccgttctcttcagcacaatttccatcctatttatttcctttttattatcgtacttcttctgcacgccgacatttttttttttgatggacggatctttcgaccgaaaacattgcctaaggcgcaacgaatcggcggcagaaaatgcaaatgcgacgcaacggaaaagccccggggggaggaagggaagccgagcattggacggtgggcaaattaagggaaatgattaaatgtgttgttttcgtataaatctcacaaaattggggagggaaaggaatttggggattattatttatctgctgtttactgagggggccgtgaatccacgcactctccggcggacaacgcacacacaaacaaaaacacccccccccctgcgcacgccccaatttgaaattggagcaatcgccgggggcatcgaaaggcgacaacgccccgggcaatttgcaaaagcattacagaaagcgaattccgcgctgcgatcaaacacattctcgagacgggtgacagagaaggggaggacgcgaaaggaacgaaggaatacgaacagagacagcagcggaaggaggaggaggagggggagacggactcctccgcatcgtccatgtccagtcacaccgaaacgatgaaaagcagcaggtccaaaactgactgatcgctgctatttgttggcactttccccaccgttggtgccatcctttagcattgattctggcactaataatttgccatgttaaaactgacaccaatgaatccgattttcgctgattacccatttgctttgcagaaacagctcccattggcctttctgctcccatcggatgaaaaagatgcagaagacggcccaactgaaactgaacgaagcgggccccccccctcccaacccgcgctcatgaaaaaaaccgcttggagggggatcaacggaagaaactttgcaaaaactgagg

SEQ ID NO: 30809 - DNA, 1382 bp, Heterodera glycines
  unsure (1)..(1382): unsure at all n locations
ttcaacaagaaaattctgacgaacgaaatttgattccttacaggggnnatncngagngccnnggnngcgnnggggcttcgaacanngccnggcaaaaggnccgaannnnccgcaannanaacaagnngggcggnnnngnngcgggncgccggcnggnggaaaannnncnnggcgaaaaggcngcngcannggccgnnggnngnanngaggcgnnnggaaanngcngnnaaancnagcaaaanngnngggcccnngcattgcgagctttgatgccttttgggttgcttcagctctcgccgctaacgccacaaattcgtcgaaaatcatggatggtcgacgggctaactcgagagttaatgctaactccgggttttggagagcccttatgaagtgccgaattgaataatcgtcgtaaagatgctcgagtagcccagggtaggcttttctgaccagcgaagaaatacggtccgccaaatcgtcaattctctcattgtctcggcgataggcaccagacatcagttcgtcaaatgccgacatttgcctagcatctgtctcctccagcagatttatcatcgctctctttacgctgtcataacggaatgggttatttgcaaccgcaacattgaacgcacgttccgcacgccccaaacattttgatcgaagtgcgcttaaacgcttcgcttcaggccattcttcggttgcgacatcaaaatgccggaaaaacgatcggacgccatctgcgccggaattccctttcagttcaggcagagaatttaacgtcattgagtatgaaaagttgtctaggcttttaattgcctgtgccagaatcatgtcatgcatttcactccttcgaatttcctgtatgtgatcaacataagggtaattccgatttgcaacatgaatttgttcgttatttgggagtgggcttgtgttcagttctgcgtttgcgtttcgcccatcacaaacataattgcgatttccgggttcaaaattttcaactctacgaaatatttgccgtccaaaattctgctgaaaattctccatttgttgctgcgggttgttgtggcaaagaatattctccgttcgagcgttcagagcaaggtgttcggccgaatttgttgctataccagatcggtggttagccgattgacgcagagctgtcagttgggagtgaacagccatttgacgcacaaaaactgggtgggcgccgtccaatctcgactgcgtatactgcacatcatttctcgccgacccaatagcatttccatgtccttgatttcccattgaattgccaactcttcggccaataccatgcaataaactcactggatttgattcatgggcgggggaataggtaggcactaatcccgcagtgttcaaat

SEQ ID NO: 30810 - DNA, 728 bp, Heterodera glycines
caaattttaaaaaaatttctcggggggggggggggaaacgagctgctccctttggaatgatccattgtttctttaacaaaacctttattcagtctttttaggggttaaaaaataaatatataaaatttgatgtcagaatgggaagtccttatgccattttgtcttgcaaaagccactgactcgtgagacaaaaaaccgaaacgctgtgttgcatttgtcaattggcactcaccgctccgttctccacattttggtaaattatgctgtgcttccgccaatgctcctccaatttcttcttcgattgtccttctgttggcttcgtgtaatcgaactcatcgacccgaacctaagcaaaaatgaaatggtaaaacatttaaattctgcaaaatgaaaagcaccggaaagtcttcccgggcgtgagcaccgcgcgactctcttctgttctcagcagcgacgattgtttggagggcattaatgagcagattttgcagttccaacgtttcaattaggtcggaattccaaatcaatccgcggtccgaaacgcgaaggcgtttttgttgtgcgaagagacttcgaactttctcaattccttccttaaaatggtaaaattcgtaagttccttctggacagtgccgtaacttgaagcaatggtccggttctgaacaccgccgcattttttgcattgtccgctgtaattcgagccgaaggtccgcggttgacacgtcacc

SEQ ID NO: 30811 - DNA, 1063 bp, Heterodera glycines
cgtcgctggcgaaagcgtgtttataaattaaaaataattttcatataattattttaatgaattgttttcatacccggcacatttcctgcggccattttgctcaaaatgccaagcaaataaaattggtgtggcgatattggcattgcgctggtcgcaattgtgactggaattcgtaaaaaatggaaaattgtcattgaatattccgtcatcataaatgcctccgcaattccaacatcaaactgttcagcacacaaatcgtccataagtgatgaattgttggctattgctgtagggaatttttttttaccagatttcaaatatttttgttgaaaattttataatttacattattttaaaaaattgcagaagaattaatgatataattaaggattgagtgtgttgtggtttaaatatttttcagcattttacaccgttaattttatactataattattttttaccaaaataagtcgtgtcatttggcggtgtcccaatttttctgctcctttctatgggcgttgttttattgtaatcgtttttctctataaaatatcgaacattaaggagcttttcatcatttcgatccggcaatttgtcattttcatctctaattggtaccagcagatgcttaatcatttaaatttattatttatttttaatgtttttaaacatacaatttcatgtccatgatttttgaccaacaattttgccaaatttaatccaaatgtgaagtgactctggatcatcgcataactcggttgaatcattaaaattttcaatgtctttacatgaggccaaataaacaattccaatccgcttataaataataatgccaatgaaattggcatttttgctgaaaatttaaattgtctttcctttcagcaaatttgccgatttaaatattcattcaaatacgtaaaatattcttacttattttataccttttattaaaaaaattcaaaaaaatcttaatcattttaattatatatttacttgttggtaaacgaagttttatttaagaagcacttgctgagaactaaattttaagcacttaagcaattaa

SEQ ID NO: 30812 - DNA, 1222 bp, Heterodera glycines
cagaaatgcccgtccttgtcagtctgacacaaaagaaatggcgaaaatcaaagggaatggcattggcagcgcatgcaaatgccaaccgaacacatcgacggcagaaacagcagcggaagtgaccgccgcaaagtcagggcaaagccaatcaactaattagtcaattaacgataattgactaattaattaacgaataattatgccaacgtaatgatattttgcaattgtccccggactgttcagaaggccctcccccgctgttcatccgccgttcccaatttcttttgatgccaaaagtgaggacggcgccgcctttttccccgttttgctcagtgactttcgctccgatttgtgccaattgcaagactcagtgcgaagggtaaaaaagcaattaaatgaacaaataaaaattggcgaatttggcaaggatttggaagaattggagacacttcggctacaaaatgccattctgagggaacaattgacggaaagggaccgaatcatcgcatcacttcagcagcaattgagaggacaaagctgacaaaacggaacaaaccaaatgatcagacccaacagactgatcagaacagcacactgatcacttggcaaaaggcggacaaagcgacggatcgaacgaaacattcctttggcactttcattcattttgcattttggaggcaaataaacactttaaagatttacgaaaaaggaagtcaatctttgttttttaaggtaaaactaaacgattgtggttaaaaatggggaggacttttacgagggaataactaatgaaaaaaacaaagtgccggtacgggtcggcagtcagcaaagtgaccgtgccgtcgtccaacacgttggtggtgaacgcgaggcgaaagtggcggccaaggccgtacgccgcaaccacattgtccaacgcacagaacacgtattccccccccccccccggacgggcacgactgggcgccgccgactgggcgctaccaactgggcggctcaactgggcgccgccgactgggcgaagacccactttcaaattccctttctttaggcacaaaaatcgcaaaataggtttaaatagacacaaaaattttcgaagaggcaataaaatttttgagaatttttattttcaattctgaagggtgtattttttaaagaaattttcttttggttttattttcaaaagtcatgaaagcatgatttcaaggggattttggggcgc

SEQ ID NO: 30813 - DNA, 1609 bp, Heterodera glycines
  unsure (1)..(1609): unsure at all n locations
tttgctataaatgcaccaatccattgctgaaaagtgtcaacttatagtattttagttatgcacgttttttgaattggaattcacatttcgccaaaaacactgaccagcatcagcgccgcccgcaccaccgcggaggccgcgtcgcgtctgccgacaatgtgctgctgcttctgttcgcctccgtcaacggtggccgccccgtcaatgagctgcttgaacagcttggcaagacgcttgggtgtcatggtgttctcctggcagagaaaatgaattggtcattggtatgtgacaccaaaggagtttcgcccacctttttgcgctgtaaaagcgggtccaccaacttaatgcccaactttttgtggttggaatttgtgcgccaaacgacggaagagaaaatgtgcacggagagagactgaaagaagcaaaaaatctaaaatatgtttaaactattcccaactagggtaaaattttgttgaataagatttttgatttttacgaaaaattttgaaattgagcgactgacaataagtacccagttgcaaatgccaattaatgagtgaaaactaaataaattaaaaaacatgccatcgcttcgctgaacggtgccgttgacagataggcgcacaccaactcaatgagtcgcagacggaaaacgttggcctgtcgcgacagctcattgcgttgggaggcatgtcgacggaatgcacgggccaagtcgtggtcaagacggaacatctgctcgtcattcagttcctggcacaatgggaaacgaaatttaaaacggagacaaaaaaaggggggggaataagaaatatttccatgaatcctttccctcagattacccagttgtcctcatcggatggcacctccgtggcgttcttcggagtcgccgctttgcccatcgctcggcgcacatcggccaccaatttggggtccacgtcgggcgtctcctcctcttccactccttcgtcctcttcctctttgtcgtcctcactttcgtcttcttcctcattctcatcatcttcttcctcctcctccccctcttctttcaacagttcggcatctttatcaacaaaggcctaaacgcggaggaaaatgcataattaatagtcaaaattcaaaatctttaccaagaaatttaataaattttttgaaattgcaggctgatgactgtatttgaccaccgaccttcaaaattggttcaaaatgtccgtagttaagccatttggcgaaacgacacaacacaaaggcgcccaacgcgcgatggacccacgccgtgcgggaggcccaagcgatgaccatgtcgacaatgacgggcgccatgtcggcgaccaacgcgtccaattgcttcttctgcttttgtgcggcgtcgcccatcaaattcttaaaatggcatttttataatgcaatattcaccaatgaatgtttgccttggccattttgcgcagttccgtcgactcgttcagatattcctcacgtcgttggggcggtggtcctcgtcgtcgggcaacgcattgcccagcaaacacagcgcagcggagagcacacaaagggcactgtgacaatgaacatgcaanttttagaaaatggcaatggtacactaattatc

SEQ ID NO: 30814 - DNA, 1197 bp, Heterodera glycines
ctgtcgcttcttctctttcattctccagaactcccgtttccgcccggttcacttctttttcttccgctgatgtgttttttcgttggcgtttcctgaaaggaaaaacattaaggcgaattaaaggagtgataaaaccattacggttttatcaaaagcatcatggctttttcagccgcttttctttttggacgatcagttgtgctgaaatgcaaaacagcttttataattttcaatgaaaattttaccccccccccattcttaccaggtaaaagttgtctcgttgctgctggtgtccgaataattcaccagattaattgagtgtgatatatctgcaaaaatttttctttttttctaataataaatttgaagtttcatactttcgacgtcgacgacaaatgtgtcctccgcattggccccgggcaaacagcgggccatcatcgttggtagcggtggtgcgggcacttctccatttggcgaattggtgtcaatgcgcagacacccttctgagaaaacaaatataccattgaaaatgtaaagaaaacattaccatcaattgctgacaaattttcgtccgccatcaataaaaaaattgtgaacgagctggaagcttttgagctaaaaaaaaaaaaagaatatttaaaacaaaaattattatgctttttattgtgaacaatttatgtaaaaatgagagcaataggaatgcgacgccgtcgcgttcctattgcacactgtgatgaccccctcccccactgctatgccatcgattaactgacccacttagaccaaaagggaattgacaatttatttttaattattgatgattttaaatattcgtcaactccattgttgaccaatgaaaaatttttatgcccccatctgtcacatttacaatcaatcaaaaactgtcactttttaaatccatcaaaaattcccctccccctcggctgtcactttttaaatcaatcaaaaaatttcaccccctcccccctcgtctgtcaatttttaaatcaagcaaattttctgtcaaaaaagtacaagacaatttgaaaccgttcaataggtttgggtccccccaattaattaattaattgctaccccacaccctacggctgaccaattagtgccctcttgaccgctgaccaattagtaccccggtcagtcaattagtgactaattgacacccctccccgccagctg

SEQ ID NO: 30815 - DNA, 1373 bp, Heterodera glycines
cagtaggggtcagttccgtctggccagttccgtctcgccagttccgtctggggcggttccgttttgggccagttccgtctggccggttccgtctcgccagttccgtcttagtactcaaagggccggttccgtctcaaatatttttggactcaaattttttaaaattagagtgccacgggaccgggaatttttgccataccgggaccgggacttgccgggacctgagaaaccgggaccgggacctcgattttttttcgggaccgggaccgggaccgcaagaaaaaccagggaaccagggaccaaccagggaaattttaaaaattcaaaaaaattttaaaaatttaaaaaaaaattcaaattttaatttatatcaagtgaaaataatacaaaattatttggttttttatttaataaattaaattaatgaaaattttcaaacaaattttcttcaattatttcaaacaattaatcatttttggactaaatcatcgaatattaatagaaattcagatttgattttcacatcactttttttcggagcgctttttcaaaaaacttttgggaaagaaggggtcccggcggtgccgataggcgccgccggggaaaattttaaaaatttgggtgcaatttgttaacagattttcaacaaaaaaaggttggtttttgcgattattaagctcaattggtaggattttcatttaaaaaatgataaaatatgtatcaatttaaaaaacaaatacagtcatggtcatatgtttaggaacacctcttttttttgaataaattctttgaaaatattgcttctctggattgaaagaaaaataatcaataatctttttaatgcattttgtagcattttttctgggctatccattggtaccacacatttctcgtttgctttattcctttttgtaaaaatttgtgttttcttccatatagtcaaatttcggggtggtcatatgtttaggaacactttctttttttgataacatcaatatttggtcggtccgccgcgggctttgattacagcttccattcgattgggcattgaattcattaatttgatcaatgtaacatatggaattgaattccaagcctcggaaattgcatgccaaagttgaggctttgagcgaaagtgcttgccggcaattttctgcttcacaattttccacaaattttcaattggggacaaatccgggcttaatggaggcgtacgaaggagggggactccgttaagtcgaaaccatcccggaagacgcaaacgccgaccgccaggaagccgtcgaacgcggccaatcaatagtttcccagtgtggatggccgctccgtcctgctgaaaaatcatcccggggcaagccgctcacgtgcaaatg

SEQ ID NO: 30816 - DNA, 1121 bp, Heterodera glycines
  unsure (1)..(1121): unsure at all n locations
cgatcctgtaaattacgccaatggagacaattatggaatttaatgaaatatttaaatgtcttgtaattttggggtttgcgacccattcacaatttcaattgattcattttcataattcncagggagccaaacgaagtggacgaactttgggattacgacatgcgtttggtgtactttgtggccaaaaaacgtgtgctaaaggaccaaattgaacaggcgaaaaagggcggccacggaacagttgatttggaaaccgatctcatcaacattgaggcaagcaggggcacagaaaatgccagataaattttttgattctaaaaattttccgccggcacccatattccccaaaaaaatttttggaaaaagatacgccgcaaaaaaaggtgtgaaaagcaacaacaacaaaagggcggcaatttacatggctttggacccttcacaaaattgactgctgacccccctcgactccccctccccacacagaccatttcgcggatattctatagtaatcccacggaaaaatggcataaatgatatatcaatcgagacccggtttaaaactcgaaaattagagtgaaaagggggctcctgaccttttaaaacggccaaactcggataaatttggtatctttcaacagttcctgtgagccaagtcataaaaaacaatgtataaattcgaaccgatgccatctaggcactgggacatctgagtcccagtgaaaaaggatacttcagtaccaaaaaatgacgtaagaaaaaaattaaaagcaagaaaaaaacgcaaaaaggagatgcaaagacgtaacaaataggcctaaacttaagcctacgctgaagcctaagcttaagcctaacaagggaccattcccaacttaagacggaaaacctatataaatttggtatcattggatgggtgcaccccaaaatctcgccgccgaaatctcgccgccggaatctcgccggctggaatctcgccggccgaaatctcgccgagacaaaatatcgccgccgaaatctcgccggccgaaatctcgccgcagaaatttcaaaaaaaaaatttcaaacttagaaatttttcaaggaaaaaattcttagaaaaatttttttataagaaaatttaa

SEQ ID NO: 30817 - DNA, 988 bp, Heterodera glycines
ctcaaaaagcttctcaacaattttagcgcttccaattccttctacaatcgcctttatacatcccattatgagcgctaaaattatcagagtgccgaaaatcgcatgtgatctaagcctagaaaaaaatggtctaagtaaaaatcgtaattacgctcaaaaagcttctcaaacaattttagcgcttccaattccttctacaatcgcctttatacatcccattatgagcgctaaaattatcagagtgccgaaaatcgcatgtgatctaagcctagaaaaaaatggtctaagtaaaaatcgtaattacgctcaaaaagcttctcaaacaattttagcgcttccaattccttctacaatcgcctttatacatcccattatgagcgctaaaattatcagagtgccgaaaatcgcatgtgatctaagcctagaaaaaaatggtctaagtaaaaatcgtaattacgctcaaaaagcttctcaaacaattttagcgcttccaattccttctacaatcgcctttatacatcccattatgagcgctaaaattatcagagtgccgaaaatcgcatgtgatctaagcctagaaaaaaatggtctaagtaaaaatcgtaattacgctcaaaaagcttctcaaacaattttagcgcttccaattccttctacaatcgcctttatacatcccattatgagcgctaaaattatcagagtgccgaaaatcgcatgtgatctaagcctagaaaaaaatggtctaagtaaaaatcgtaattacgctcaaaaagcttctcaaacaattttagcgcttccaattccttctacaatcgcctttatacatcccattatgagcgctaaaattatcagagtgccgaaaatcgcatgtgatctaagcctagaaaaaaaatggtctaagtaaaatcgtaattacgctcaaaaagcttctcaaacaattttagcgcttccaatcctttctacatcgcctttatacatcccattatga

SEQ ID NO: 30818 - DNA, 779 bp, Heterodera glycines
ctttccacttcagtcactgtgcgcctgcagcccggcattctctgcccgtgttcagctgctcctccgccgggccctcccccgcaaatggcgccgccgccccctccgcctccgatgtcgcagccaatttgcatttgcacaccgcgtaccaactaaaaagtacattcgtccattgtatcattgcttcagttcaacaggacccgtgctgttttccgccgcccccgcaaatggcgccgccgccccctccgcctccgatgtctcaaccaatttgcatttgcacaccgcgtaagtgccggggagagggctttttgagggggtaagacgctatcttctattcaacaatgcagggcagcaggaccagtgctgtgccgggacgggccaagcgccgccccctccgccgcaaatggcgccgcccgtccctccccctccggcgccgatgtgttgcactccgatgtgctgctcgcccctgtgttgccctcctccgccccaaatggaaccgccgctccctttggcccctccgccgatggcaatccaagtcagtcagtggtgatgggcacaaattcgagagtggagttgaatgaatgctaagagtgtgaccatccaatgcgcccccatctgcgccaatgccccccaaatggcgcctcctccgccgatgtgttgcgcttccgtctatgtaaaaccacctccgccccaaatggcgccgccgcctccccccgccgcaccccaatcgctgctttgctgcactccgaaaagaatgctgcccgctgccgccgcctcctcct

SEQ ID NO: 30819 - DNA, 1405 bp, Heterodera glycines
  unsure (1)..(1405): unsure at all n locations
atgaatatgaatcataataattanaaataaggtgctaagtgagggcacccacctggaagtagtcagccaattggagcagcgccagcacatttgttgctacaaattgggaatccgttaaccaaaaattaaaatttcatatttttgaaaatttatcccctattaatccataaaaagaggataattattttttagaggattacggttgggcagaaaaggtccgatctttgtcatataaaagatggactctaaaaaggcaatgaattggtccatgtccacgcccaattcgtccaaagtgatcattcgctgctgcttctccttcatctccacgctgagcatgcgactgatcaccggggaaacggtcatcagccaatgggcggacacagcgacctgatcaaaatcattttatcaattatctgaccaggacttaccaaatttttgttggacaatatacaaagaaatcaaaatttcaaaaaaattttcccgacgacgcttattgacatcgcgggacccccttttcctcaaaaaatttttggaaaaagcgcatcgtaaacatttttttgaaaagcaaagaaaatcgaaacaataaaaaaaaaattttttttttgaagaaaaggttgtcatagaaatttggggcattttttcaatttcataatatttttgctctgatagagcgggttgaggggtatttcatttcataaaggcaaatttctgaccctccccttgcccatttatgcctgcttctaaagtcaagcccccccccccacagttagcttcttaacctgtttttcaccaattttcacggtcaaatcgtcgtcgggtgagctgtcggaaggcgccgggaacgcacttaaaaatggaaaagtaatttaaaaaaaaatggtacattaattaattaatagtcgggaggacggggacttaactcggctcccgaaaatgctttggttaagtatttctattggtaaaatcggaattttagtattattatattaccgtttctcctccgactttttctcccgctttttgagaattcgaattacaattgatggatcattagcaatgttgttgtaattaacttcactgcccttgttcaatgtttttgtctaaattttttcaatttattttttgtccaaaactttcgtattcgtttttacaagccgagaggaatgattcatatgtaattttctgacaatttatgcgcttttaccatttggaaggttaagtgccaaagccattttagtccggagtcttcaactcttcagggagtgatttccgcacaaaaaaaaatgcttacttcactgatttgttgcgtcccattttggtcccaattccaacggacaatttgtgccaatggctccaaatccgacggattggaagaagcattgccaatgtccgcgattttcaatgc

SEQ ID NO: 30820 - DNA, 1176 bp, Heterodera glycines
  unsure (1)..(1176): unsure at all n locations
agttcaaaacgcggcgttgggtgctgagctccatggaaattgggcgccaattttggaagtttttcacgaaagaaatgggaatcgtcgatttctatggaaaacattgccaattccgcaagtccaattgccacggcaacgtcatcggattcaaacgcatcaccatctcgtaaaattgagcgattatgctaaaaattttaggctaacatttccccatccattttcacagtttcatcgaccaaaatgtcatcgcttttctccaccattttcgtccacttttcgccgcctgtccaatttatttgtccatccaaacgtttcgtggtaattatcgcatttggaagttgattttgcgcaacatttggccactgctcggaaacaacattcatagcatgggattgtccgtcggaacattccaccgtttgcgcaaattcgagccgtcatttctcgacgattgtgcatcgcttcgcgttgtctccttggacaatttcttcatcgaattcccggccgatgacagtgccacggcatcggatggacaattcgtggccaaatggttgttcactccgcttcaaaacaatgtgccgaaggtgttcgaatgctcgttgtacatggatgatgaaatgttgttgtcgatgattgacgccatcaaaggggtgattactagggcgtcaaattatatggaaatccatattttttttcctggactgtggggggcctgaaacgtacgaaaaacatgtttttagctttgtttgaagcttctaggatgggtttctatatccatatttttccatatttcgcgatttatgtccatattttggcatttaagtccatattttatgtccatattttgatatttttccaaaaaacctctattagaacggccccaatcagctaaattagccttttggcccccctaaggatcgaaaaattttcagaaaaaatgatttttagaaaaatcttatttacatttcaaattttcttaaaaaatggcaacattatgtcaaaaataagcaaagcgaaaattttgcttttcgggccgattttcgctaagactgagtaactaactttatcgttattttttcttctaaaatgatttttaatgccatgtttanccatttttgaacgttttactttacccggaaggatttgaggaaattttgagaaagcatacccttaattctg

SEQ ID NO: 30821 - DNA, 1515 bp, Heterodera glycines
gtacaagcggcgtccttgcagcaaacagttaatagggaaaatcatttggaaaccaaatggaaaaggccggacggaccccaaacagctcttctcgcaaagtcccgcggctttccttttgcagtaaaagagaaaatcgccgtcctaaaaaagaaaggcaaagtgcgcaccaattgaatgatcccaaaatgagtttccctattaaagcatttttcggcaatttaaaacatttgaaaatgccttccccatttgtccgttgggaattctctgccaatgtttttctcattgaattttgtatcataatcgtccttttaaaagagtttcaaaatctcatcactaataattaattatcgttccctttctcatttccactgtttttttcgctcctccgttacactcattgccccccttttgccccgctcccccgcgatgagtttgctcgagggtaattgttgttttttcatttccttcttccccccccccccattctttcgtgtccaattcaatttttggatttacagcgacgaattttccttttctaattcaaagattaaataaacataaaaagcgatagatcacattaattggattttatttgaatgaaattgtcatttaacttcctaattttttgatttaaatttccttttttactcttttcgctttaattccccataaaatgtcattgttttgctgggcccacctgccattggtggccaattcgtcgatgctctccgccgttcgtcacacagccaaccgcgaccatttcagccgcatcggcccccttggattggcattcgaaactgaacatttgttgctttgttggcaaagtgtgtgtcgttggcacattacgtggtgtgtcctcggtcgacgctttcgccgatgcgaagtcggctccgactcggctcgtccacacatccgccaagccgtgctctgacggtcgttccctccgccgcgcattcccaccacgtctgactctgttcttcggccaattaccctcggcttcccccaatttgccgcacctctttctctgtccatttctctcctaccaaaatggtttcgttcgcttttcccttcggcacacagccaatgattttcaattgcaaatcggtcgcccaacgcgaaagtgagcatcgcatcagaaggcccttcgccacggtcgtctcattaagtcgaatttgttggctaataataagcatttttggtttgcaaatagatggtaaatttatgatttaatttgccctccccgccccgtcccacccaaattcgtccaaacatccgattggcaccattttcgccccacggcactcgtaaacaatggaaccagcctcaatctgatagatgagtggcgaggggatggttcgttctgtgttcctctgtttctgttcaccttttccccctcgtcgtgccatttcgacttttgctccccgaggctcatcaaacatttcggtggcatttgcccaattttgccatcctcgaccaattgttgcgcatctttggcagcgaacgaaggaggaaaaa

SEQ ID NO: 30822 - DNA, 1812 bp, Heterodera glycines
ctagagtcacttaaaaattgggcatccaaattctttttttccccaaattttgaccgtctctgccccatgttcccgaaaagtttttaaaaagcgcgccacaaaacgggttaaccgaaaaactatcgatgattttggccggaccccactcgcaaaattggaaaattttccgaaaattttcaccttttttggaggggaatttttcaaaaaacttagtaatttatcataaaattttgagaaaatcgttagaaaattttcaatttttttttttgttttgagatttgtttaggtatgtaaaaaaatttcggggttaacgaaactggggggggggtgaacttatcccgatctacatccgcacaaacaattgcgccccatcttaaaaaaaaatgttcctcatccatcttccagggatggtgatgtgcctgctctcctacggtgccggccttgacgagcaggcggacagtggcaaaatgacggcactgcattttgcggtgtccaagcgcaacctgcagatcacacgcttgctgctctgcctgggcgccgacccgaacgtggccaatgcgcacggggacacgccacggcatttggccgccaaattgaacgagtaattattatttttttttggagttatttattcattttggggctacaatgttcattatttttcacccataattggggacgcgacttttgagcttgccctttcgccccgttgaaaaattaaacagttctataaattattcaaatggcaccaattaaaaatttcacctaatcaatgtcataactctctttttatccgcttaaacttgtcaatttttttagggttgatttgctgaaaagtctgatcatatgcgatgctcggcgttgtccactcaccaaggtacaaaaactataaattttgtaccatttaattttaaaaaaaaatacaaaaattcgtttttttccccgtattttaggttggctgtgtgtccggttgtgtcaacgagaagcagttgaacaagctgaagaggccgtccaccagttccatgccatcatccgccaccggcaacaccacttcaacatcgacgagtgcatcgtcaacggcgtcgttgtcgtcaagcagtagttcaacaacattggcagcgtcggccgcagctgctgctgctacggcaccgccaacccaaccagcaaactcctcacaaccaacggctggagcatcaacaacggcaccaaagccggccagctacacgtcggtgatggtggaggattttgagaaccgggcatttgacaaggaacagttccgcttcaacaaactgttggacattcagcacaatgtaaaaatcagtgtcattattttgcatgttattattattttttgctttcctatatgccgggagcagtttaaccttgtgatttttttttcaattttttaggaaattttcaaaaaacttattgttcgaaagtttttataagaaagtttaaagaaaaaagtagaaagaattttcaagcgttttttttaattatcataaattacttaaaaaaatttatccccgtttgaaaaatttttcatgaagttttttttaataaaaaatttccaataataagattttttgaaaaatctagcttaactattaagaaattatgaattggagccaattaagtggcctgaaataatttgaaaattcaatttttgacaatatcttatttgtgtgttcaggacatctatgacgaggtgttggacaagttgcccgaagtgccctcggatgagggcagtccgtccgaccacaatttcatcaatgtcctttcgttggatggcggtggcatccgtgggctggt

SEQ ID NO: 30823 - DNA, 1141 bp, Heterodera glycines
tagggttgcgtccccgacgtcggagttggaaaattcggggttcggggttgtcggggttggaagcgtcggggttcggggtcggggttgccaaatcgttcggggtcggggttcggggtttttcaatttttaccttatgcctaatagtcaaaatttttttaatattttttcggaaataatatttattaatttccataataatatttgtattgtttttatatttttttatttcttttttatcagaaattttgtatagaattaatttttttttcttgaaattttaaaattttttattacttttttgttttacaaaacatcttttttcacggcgctcttttcgaaagacttttagggagaaagggtgcggcgtccggcggtgccgataggcgccagtagataatattcccaatcaaattatcgattgattttcgatcgataatttgatcggtcatttttccctctaccccccccccccccccccccaaaaaaaaaagcccaaacctattggatggtgtcgagagagcaaaatagtgagtgaggtagaggtggaagagagagagagaaagtgagagagtgtgagaaaaagtgagagagataaagagaattgtgaaagatatagaagagagagaagggaaaacaagtgtgagagagagttatagagagagagaagtggaatatagagataatatgaaagaatttgtgaaagatatagaagagagatagagagagaagggaaaacaaatgtgagagagagttatagagaaagagagagaaaagtagaatatagaaataatatgaaaggaattgtgttagagaaacagagaaaaattggtagccgttaaaaataaattaattatgttatttattcccaacaaaaaatatcaatcctatgattgataaattttaaagatttttttacttttcatgtcctttttataccatgttataaattatgtttaattaattaaaattttcagggtattaaccataatttttggaaatctaagcgcataaaaaagcgcaattttgcccaaggcgtttatggcgcaggggcgccgtgtttgctgaggcattggttcatacggtttgctataattatcgttaatttataactacgaagttattgcgattgaaaaataaattt

SEQ ID NO: 30824 - DNA, 1572 bp, Heterodera glycines
  unsure (1)..(1572): unsure at all n locations
ccgaacaaaaattcaattgggctatattttttatattctctaattttatttattaatttctttgaaatgaaaaataataattgaaaaaaaaattgtttgaaacagaattattataaaaatatatttacatatatctaaacatgaaaatccctcagctacgcatttattcatttcttccaaatgtatttatgattctttgaagaattaaaaaaatgaattcaaatttgtattaatgtactgtataaaaaatagtatttttttgttgcaaaaaataactgtgcgtgaaggtcatttgtgttcgatgaagcaaaaagggaaaaactttccaattcgattcaaataattggtagaaaattataaattaaatgtaattaaaaaaatcaagataatttaaatgtgattttaatagttaatttaattttaataaaattgtattatttaattaattacaatataaataaaattaatgtaattaaaaattaatcaatataatttaaattgaaattttttttgtatgaaaagataaatatgattttaatagtaaatttaattttaataaaattgaaaattttataattgatatttatttcatttctatttattgcgcagtttaaaaaaaactataaacttgaaaagtatacaaattggagactcatttcaatttttgttttttcgtactcaaaccaaatcatgtgtccaaaaatgagacacctgacaccatttttataactaaaattgtttatttttgaatcatatgtatactattagataattataatatcgggacgatacttacaagatttaaaaaaaaaattaaaatttccttctaagcttactaaaattttggttaaatttattttataattattaattaatgaaaaattgaataatttttacaaaatttaattaaagggttttaaaagaggttcaattttctataaataaaaatttattttttcatagaaaatagttcctaaaagtttcaaatttcgggggtgtaaaatgacaaaatttgaagttcctgacacaggtcccgggtaactatttttagtcaatttatttatatgtaattatggcctaataaatattaattgatgacagcttgacaagtggaagcagtaaaaatttgcatatgaaatgacagggagagaaaatgtgataaaaaataaaaatgtaaacataaatggaaatgccatgagaatacttttattgagaagagaaatgaaagaaaaatgcatttccccgcgttttgtcgcggttaatttttatgattcggtagaaatttcgcgagaattttttaaaaacccgcaaagagttggtgtaaatttagattttgttttttaggtttctatttaatttaaatttcatatagttttcatcattttgtcgaatctaaacccaataaattccaaaaaatatcaaagaaatggatatataaaagccattcatgattaatttcataaaaggacataaaaatattataaaaaaatatttaatttttaattaaacaantactanaaanannatttaatgaatannatgaattcattttattttaattcttatttgcct

SEQ ID NO: 30825 - DNA, 2097 bp, Heterodera glycines
  unsure (1)..(2097): unsure at all n locations
ccatcaacgncgggaaaatttttatcgaatgcttttggtcttacaatatggcgatagctttttgaaaggttccaaaaaatttaaaatatttttttttgatttaattttaatttttcgaatttcatttaaagtatttactgaataggtcccacccttgaattagaagtgcactctcaaaggacctacggacagatgactcacaaagacaaaagacacacggacaaaggaccgacaaaattaatcaaataattaataaaaaaaataaataaaatatttaattttgtcactttttgggtgtaaaaaccatttaaaactgtacaannttaaaattttccnngnnttaactctngtcgggtttgagtttggctatatgtagaaaccctgttaatttatgaatagtcattcaaataaacactaatcaaaataagatggtcacgtcgtttaccgaactgaacgaaagtctttttaatttgatcaatttatcaggtataatatgataaaaatttgggtatatatttatatttgtgggaccttctccgggacttttgctttggggccccctgccgggggctttgggtggggggggcccccctgcaggggtcctttgaaggggaatttgtttttgggccccttcccggggctttttgggggggggggccctttcgggggccttttcccgggttttttttttgggcccctcccggaaactttttttgggggggttttttcccgcccaaaaaaaccccccccccgtttttttttaaaaaaaagaaaaaatttccccggggggaaaaaaaaaaaaaaaacaagaaaaggaatttttttttcaaaaaaaaaaaaaaaaagggtttttttttttttttttaataaaaaagggggttaaaaaccgggggccgaaaaaaaataattttttttttttttattttaaaaaaaaaacttttttttttttttttaaaaaaaaatttttttttttttttaaaaaaagtttttaaaaaaaaaaaaaatttttttttttttttttttttccccccccccccccccccctttttttttttttttttttttttttttttttttttttttttttttttttttttttttttttaaaaaaaacaaaaaatatttttttttttttttttaaaaaaaaagagtttttcttctttttgtttttccccccccttttttttttttttttttacccccccttctcaaaagcccccccccccttttttatccaaaaccgggggaaaaaatccccctttccggggttgtttttttgtgggttttgggttttgggcctaaaaaaaaaaaaaaaaacaaaaggggggcccccccccccccaatttttattttttttttttccctttttcccctttccaaattcgccctttccctttagggttttgtttctttttttttttggggaggcaaatttttgcttccccattttgaccattttccttcctttcacccaaacaaattattaatctgttttctttttcaaccatttgcatattcgtaatttggatttgttcatttcttagatctaaattttagtgcataatgcttaatgcacttccgcgtttttttaaatttttttacttatttagttaaaaattttgaattttaaaatgagttatcagcaaagggaacagggaggttatgatcgccgaagaggaggcggtggcggtgattatggcaacagaaggggtaaatttatattattatttttatattatttatttgaaatgtaaacataagatgatcgcaatggaggtggtagctacgggcgaaattctggagggtatggccgagacggaggagggggacagggaagggatggcggaggaggatatggacgggaaggtggaggagggtatggccgtgatggtggaggaggctatggacggggcggtggcggtggttatggccgtgatggtggaggaggtggcggaggatacggacgagacaggggaggcggcggcggtggaggtttttgaagggtggaggtggaggaagntttaatgnaccgagaccttggtagaaganagttacgatgatggcaattcgaggaggtatatgactctagaggtcccc

SEQ ID NO: 30826 - DNA, 1821 bp, Heterodera glycines
aaataaaatatatataatcaacaaagaaaacataatttaatcttaaactcattagcaaaaatttgaaatcttttgagttttattaatttataaataaaccaacgaattccataaaacgatttcatgttctattaaagttcatatgcgcaatttccatcggcacgcgcctccgcagagaaatgctcagaattgaggagaagcaaaatctgatggaacatccaattttgtttgatggacgagtaaatggcaacactccactaatggtacaaaaaaagccattttgaaaatgtttatttttaatttccctctaatcttaaaaggttgcttgtgccaatggttccactgaaattgtcaggtattttcagtttattaattaattccctttctgtttatttttaaaatatttgcttgacaaattcaattaaattcccaatttttcatctacatgaggccaaattggatcagaattggtcagaggaacgtttcattgccaaactggctagtgactcagaccacagatcatatagcccataatggattcataacagtttaccattatccattaattactagacctttgacatgtgcaatcactaaatcgtgtcagaactctatatcttctgtgtgggaccgatttcgaactgaatgtatggagaagtcaagtttttaattttttgcgattttttgaaatttaattattcatacctttaagggtcatatgagatggggtgtgggttcgagcccgcttggctgcgatttatttttttatgctaattgctggaaaatcatagacaaaatgatggattttgcaaatctgacttcagattcgtgatcagcacattttttaccctaaactcattggaaagaaaatacttaaagaagattaaaaattttcaaaaaatctagtacttgatggaaaaatcatagacaaaatcaatgcttttcaaaatctgagttcaggtttgtgatcagcgcactttagccccagaaaaaatgctttttgaaattttagtatttttttccgtcgggaccacaatttcacaccattgccaaatttgcaaatagtggcggcagagaattattaaataaacatatgtatacaagaaaaacatgtaattcaaagaaatcatttaaaataccacaaatattaaggaaacaaaataaactaaaacttttttcctattaataattcaaaggatcaatcacttctcaacaatacatttgcgctgatgatcactttggtcggaagtgccatcgattagactaaaacgaaagaatggaaatttataaatcataattaattgtgttaatttactgactcgtctccgattccttcctcattaattgcaatgtgaattgtgttcaaatggtccctaaacttcaactcaatcgcttccttctcccaatttatccatttttctcatctcgggaaattggacaacgaatcagcaaaaaagcaccatcgttattggcacttttcaacgtcaattgctccccagtcaattcattgaccaaatcgaacggcacaacggagtcactcaaacgaaaaatgacaatgatgaaattgacacgagatgaagcactggaaaatgcctaaaaggagaaaaaacattttgaattataaaagaattaattgtgatcacttttttcagtccttcgatttttgatgacctttcctcctcatcaagatcgatacagcacttgagaacttttggcacaccgtccaaacgaggcaagaaagcggggaaaaataattttaaatggaaccccccccttttttttaaaaaattttttttcaaacttttaaaaaaatcataaaaa

SEQ ID NO: 30827 - DNA, 1286 bp, Heterodera glycines
agttacatcgatcactccgtcatcgcttttcttcccttaatcaccaaattcactaaaaaacctcatttttacgggtataaaatgacaaaattttagtcaaaaagcaacaaattaagcaaaatcagtattgagtctacacaatttctaatatctttaattttggaggatgaatttttcatttcttagctgagtcgctctcagttggaatatgtcgaaaaaaagttgccgaaattttggatttttttttcgaggatttccaaaaattcccgtaaaaatcctcaatattgtaaaaaatgaaaatatcaagaaaaaagtccaaaaaatgtaccaaatatgtaagaaaatcccgaaatcttttgttttttataagatgttttcttgtcctgtaagcttgttatggatcgccgctgatcacgattcgcgttcggattagggattcgggattggtcaaaatgaatgtcatattcgtgataagcgatccttaaaatcccggagaatttcattattttttattcagtatattaattttagtcaaaacaaaaaaaataaaataattacattaaattaaaatgcatttaataatatcgctttgacaaattgccgcttgtggtaaatgaataggaagaaagaaagaagaggatgctttttggcaagaaaagaaaaaataataaaataacacatttgatgtgaatttaagaatgaaaatgcataaataaataaaaaataagaaaaaacagcgtaaggcaacgaatgaagcgcaaaaagagaattaaaaagtgggaaaaaagaacagaattaaatattcaactgtacatccgcatcaaataatcagacagcaaagagaaaatcagtggaaaaacgacaattaataattaatgaatgaatgattggccttttttacacaaaattgggcaagagattttgcaatgccattgaaaaataataaatttacaaaaaatgaaataaaaaacaactgcattcaattaagtgaagtgattgtccctgtcgtacaatgtttgttttgcaaatgccctgctgctttctgtcgcccgttcttctgccccccttttctgcttcccatttgtctcattaattaattaattagtgcacgtaaaagttcagcgcccctccggcgccgctttcttcgccattgtccgcttccgccgcttcgtcccccgcggcgccttttcccagcatttcctccggcagttggggcagcttcagctgctccgcctgggctttaaagggcaaactctccacgcgatttagaggctagattggctgaa

SEQ ID NO: 30828 - DNA, 639 bp, Heterodera glycines
ctgagttgaaaagggacttgtacgagcggatggtcatggtaacgctaaaaggatggttgtattctgtggaacatcaaaaacggttaaaactaataaaatttaaaccataaaataatattctttttagcggaatgccacatgtccacatctgcctaattctggactgggaggcaatgcgcgtcggaggaaagactcgaacaccagaggactacatcgacgagtacatctgtgctgagattccaccaaaacctgatgaaagttcaagggacgagcatcaacaacggaatctttacacaaccgtgacaacaaaaaacatccacacttgtgctcaaaatcgttgcctggtagatggaaaatgcatcaaacattttcctgtaaatttctttattgaaaaacaaataaaaaaaagcaattaaaatatagaagccgtatgagtatgacaatgtctactcggagaatgcttatccgcgctatcgtcgacgtcctcctcctccaagtgccgaagaagctcaacaaaatccagagcaatttggccgagtgttcgagtataaagaccgctatggaaaactgattaagaaggacaatgcacatgtcgtcgcattcaacccatttttgtccgccaaatacaaatctcagtat

SEQ ID NO: 30829 - DNA, 1362 bp, Heterodera glycines
tttgtttttcaaagcgtaaaaatgcctaattatttccgagaaatttcggcatttaatgggcacggcacatgcttatacaaaatgttattatgtataccataaaagaaatgtttcccattttttgatattccttaatttattttttcctattttcacaccgttttttatgcggacaaatgccgcgatcacacactttgcttgatcaatcaatgcttgattattattattcattcattttgtgaaggcaacaatgaggtgtcagctgaacaagcaattgggcgccccaattttgaagacttttttcactcaattttcttaaggactctaactgtccttgaaattaaggacaacataaaaacaaaaatttttttatacaaaaagccacccaattctttggcgcgtgcccaattagcctcaattctggcaaaaacgtgcaccccctcactcgctatgtaacattttttaaaatgccaaatttactaattgattgacatttgtaacagaaaaaattttatcttcctctgatcaccactgatcaattgtggccaaatgtatggatggtattattcagaaaaatcatctgttgttgttgtttttggccaaaagtcgcttgtcatcatcgtttattgatatgttgagcataaaatgggagtttgttcacactttggcttgacatttattggaccggcaaattatttggttgtcttaagccgggaggttaggcggttttttaattgtaccaaattcgtgcaaaaatttcattaaaatttacgaattttcccggccaagccttctctgttatgaatttgggctgacaaatgcccaaaatccgttttttcgacctgattgatacccgggttataatttcttatcaaaacgttcagccattttttcgtttacgacaaattccaacgaaaaatataagtttaaattagaaaaatggtagctgttttttttttgataaatttaattaaaccattcaaaacactaatcacttctgacagcacacatttttgcccaacaaaaaaatgtgaccaaccgaccgactaatcattggattttgacagtaaatgcaatggaaccaattttgttgttgtttttatttatcaatttttactatttatttttaaataaaataatgttattttgtcaacacattgttataaaaaacccaaaaattccaaatttagtcgggcaaacaattgatattttcatatttaactcaattaaggaattgataatacggaatcgctaatattccttactaaataatttctgtgtgataagaaagaaaaatacaaaaataactaaaattcttttttaatttgaaaaaaaatatttttttttgatttaatttatgcc

SEQ ID NO: 30830 - DNA, 1664 bp, Heterodera glycines
tgtatgaacctgtaagcctttttctcaatatctatcaagccaaataaattttggacttctttgtatatggttaattgtttagattaatacacatcatttttcaagcgcagttttttttgctgttatagtgttttcagcaccttagaaaatctatgaacctaaaatatgcaaaaaaatgtgaaaaaggtataagaatgcaaaaaacagcaaaaaggcaaaaaaatatgaaaaaaagtagtaaaaattataattttagaacaatttttttaaatttaacgaaaactctcacttttgcgtgacaacttagaaataatttttgtttctcatttgagttttattatttattacttatagatttgaaattttacaaatttattgtatttaattttttatttacctaaatctgtttatacatatattactaatgatgatttaattattttagtttattacttatttgtaaatatgtgcataattaacattaattattttctcatttatctcctttctctgttaaaactcatgtcgtcatgtttgttcatttttttacattttcgaaatttaattcttataaacattgtgtttaaaaatagaattttgaacttgtaaaaatattatatttaataaaaatgttcatttaattccaaaatgtcaccaacccaaaacgtcaccaaatttagaccaatgattaaatttaagcaaaaaggatcagtcccagattaatcattaactaacattattttaaatcgaaaaaattattataatataaaattgacagtaatttattcaaaataaaactttacctttgaccagggatccctcgcgccagaagtcttaaaccgaaaatattatgccaaatattaaaaaaatattctgtttccggacaagaacctagtgattttcaattacaaaattccgttgggcttttccctggtgtttttttatagattttatttaaaaagttgtaattacgcgtggcttttgtacatacatagtcttaccaaatttcgtcttttatgtgtattgaatatggtctgtgcatgtgattaatacgtttgcgtggattttttttgaattgatttggctaatgatatttgcgccagaaatgtctgtgctatttttctaccttgaataaaattctcattttcgattaagcttgatttggtcgacagccttggcttggaccaaaaggccaccgaagagacgtttcgattcatttctgagcttgtcagacaacagcagcaacagaagccgcaacagcagcaaaataacagcaataatattccaacttcgcaacaaatgtcgtctacaatgccggaattggagccagcaattgagttgaaaagggatgaaccggcaacaacgcccatggaaagggtgggcagccccaaaactttatatgatagactgatcactgatttatggagttttagctgatccaaccaccaattggcattaacaagaggaatgaattggcttcacagtttggcaacaggaacgatgacggaatgacgacgccgcccgcttttttcaatgccatttccgatgagagcagcaaaaaaggcggagcgaagcgcaagaacaaattcgctgagcttcccccgactccgccgccttctcaactgtccaatttctccgctcaaaatgcttcctcttctctgtcg

SEQ ID NO: 30831 - DNA, 765 bp, Heterodera glycines
cccaaaataaattaaagaaaaggaatgaatttaatttcaaacggaaaagcaaattaaatttttaaaaagtaataaactaaaattgaaaaaggaataaatcaaatttatatttcaaatttttaaatgattgataattagggacaaatttgataaaaaaatgaaatgccaactcactggccaaaaggcaaaaaaaaaaaaaaaacgcgggaaaaatgaattgctatcgcttgtaaattcgggtggaaattttgcacaattggaacgatgaaaaattgggggggggggaggggagggacacagagaacacaggtggccaaagaagcgggaaaatgagatgaggaggaggcggaaaaagatgatggccaagtggggggtggggggagacaggcacaagatgggacgaaaaagagtgggaaaaagggggagagagggagggaaggaggggaggcggaaaacagaatgccaagaaaacgaaaacaaaaaaaaagaatgcgcatcgagcgaatttgtttgatggaaggttatacccaggaaaagctaaataaaaagagaattaaatttagaaatatttaagaattcgtcctaacaaattttattttttctaaaatttatatgtcattaaaaagtataattgtcagttaatgcaaagaaatggtaatatttttaaaactaaaaaatgaaataaaaattattgttacaattattttattaatgacatttaaataaaatttaatttgttagttaatggaaagagatgatgatgat

SEQ ID NO: 30832 - DNA, 1532 bp, Heterodera glycines
attctttaagttctttttgttcagatttgtgttcttctttaggcgttttttgtccttctccaatcccttcagattttgtttttccttttcaacgtttgcttaatttttcaaaatttttatgatttatccatcaaaatacaaaaataaataccctttttgtcctccgacttcaaatactccaattcgtaacgtagtcgttccaactcgtgattaaattggttgagacgttgctcatgctcttcatgaattcgcatctctcgctgttcatactcactttaaattcacaactaaaaaataaaatttccattttaaactaccgaatgtgtttgatgcctatttttgcacagaattctgtaaagatttcgtcggcaattgcattcttgttttgttccaagcgttcgatttcgattttacgctcctcaatttcaattcgacggctttcaattcgcgtctaaatttttaatgttaaatatttataataaatgaatgtttattgatgctgcttttcccttaaattgtaaaatttggctttaattacttcgattgtctccggctccgcactttcgacctccgcgtcctgctccaaccggcgcagcgtttcattttcgctcttcttcaattcttgctgtgtgaagcgtagacgtgcctccagtgaagtgatctgttcccgtttcatctcaacatccaactcccttttcccggttcggtgcagtttttgcaattcttcctgcaacgccgttcgacggtctttcaactttctgattgcattttcatcccattttttcgcttttgcctttaagtcggcacctccgccgcttataacaccatttggctaaaatacaaaataaaagaaattttgaaaaagtcagcacctgaaattgagtcccgtccaaagcaactgctcgaaatcgttctgaacgaccatcggttccgtaagcaagctgacgagcgtggtctggcgtttcacagacaagtgaatttccgcaaacaaactaaagccaaatcacaacattaatctttcattaagatatttcattatgtaatattgttggattaaaagaatgaaactcacttgcaatgcctttcgcacgtgttgcgcgttgccaaggacattaatgacgtcaaacaccaatttgacacccggggggtcgcgaatgtcgcgcaaatgctctttgatctgttccatgcgaagctcagaaagcggaaggaatgtctcgggcggatagtgctgttcgcgcagataagcaatgcattctctgcccgtctccgcattatcacacacaattgaaatcatatgtttgccaagaacctttgcaaagagaaaaaacccaaaacattaaaccgaaagaaaaagcaaataaaaacaccgcctaccttagtcaccgctacttggtaacgtttttgcgacggttgacacaaatcgacgattcttccgtacactttttcgggaaacactctcttcaggttctccactgcttcgtgttggcgctggttgcgctccgtgtcgaaatagtcgcccatgagcgtccgat

SEQ ID NO: 30833 - DNA, 872 bp, Heterodera glycines
tctcgcgcaaattccgacattttttcaatttccaacgcaagtgtccctcttttgttgccctttgccttgttccaatcagaaattcgtccatggcttgggaatttcaacgagtacagcccgggaactccacgaaaaaacagatacggatgtgaagtgaactgataaaggccaagcacttcttccattgttaatacaccggatggaactataaaaatttcaaaaaattcaaaatcatttattttaaatattttctgattttttaaatatgaataatttcaaaaatttaatttttatactgactcaaagaataattcaataaaaatttccgattttaaaatttaccgacgaatagtgaaaaattctcctcaagtatatttggaaaacgaattttgaacagtgccggaccaagcgcggcacgacgattttttgaggaacattcaatgccattctgacgacatttttcatcagcccaacagagtgcctaagtagaaaaaaaaataacgaaaattaaaaaatgctaaataaaaaataaaaaaatgcaaaattaaaaattactgctttccaaatttcaaattcatcgctgagtaacaaatgatcactatcgagaagattgcacaacattttctggtcaatttgcaaaaagtgctctaatccaaataattgggccgcattttgccaaatgaaacgcaaacatttgatggcaaaatcctttaaaatttattaattttttcaaaaaaaaaatgatacaaaataggggttaagcctaagcctattaagataaatttgtcttctcacctccaattcgaaaaggagagcctgggcatatgcaaagaaaacattgcgcaattcggggatggaaatttgcaaagatg

SEQ ID NO: 30834 - DNA, 1069 bp, Heterodera glycines
  unsure (1)..(1069): unsure at all n locations
ttgtagggctcaaccgtatatagtaatgcgttttcgggggaaaacctcatgtggaaggctgtaggaaaaagagatagccatttttctgagaatatctattcttagttatggagccattttccaaccgaccatttgtagggctcaaccgtatatagtaatgcgttttcggggaaaacctcatgttgaaggctgtagaaaaaagagatagccatttttctgagaatatctattcttagttatggagccattttccaaccgaccatttgtagggctcaaccgtatatagtaatgcgttttcggggaaaacctcatgttgaaggctgtagaaaaaagagatagccatttttctgagaatatctattcttagttatggagccattttccaaccgaccatttgtagggctcaaccgtatatagtaatgcgttttcggggaaaacctcatgttgaaggctgtaggaaaaagagatagccatttttctgagaatatctattcttagttatggagccattttccaaccgaccatttgtagggctcaaccgtatatagtaatgcgttttcggggaaaacctcatgttgaaggtgtaggaaaaagagatagccatttttctgagaatatctattcttagttatggagccattttccaaccgaccatttgtagggctcaaccgtatatagtaatgcgttttcggggaaaacctcatgttgaaggttgtagaaaaaagagatagccatttttctgagaatatctattcttagttatggagccattttccaaccgaccatttgtagggctcaaccgtatatagtaatgcgttttcggggaaaacctcatgttgaaggctgtaggaaaaagagatagccatttttctgagaatatctattcttagttatggagccattttccaaccgaccatttgtagggctcaaccgtatatagtaatgcgttttcggngaaaacctcatgttgaaggctgtaggaaaaagagatagccatttttctgagaatatctattcttagttatggagccattttccaaccgaccatntgtagggctcaccgtatata

SEQ ID NO: 30835 - DNA, 1285 bp, Heterodera glycines
ttcttcgattgttttttgatgctttttcttgactgtttttgtattatctttgtgctaattttgtttgttttttggctcattaattcattcattttttgctctcttaaaattattattttttaataataataatttttcttcattttttacctcgcttccttttctttcaaaatggcattttgcagttgttcccaagtgtccaattgttggtttttcagcttttcgtgcatcagtttaatgcaattatccttataaagattcactagtggaaagaataacttctgcattatctaaaaaagaattaaatttcacaataagtgattgtaataggtgagaaaagtactcaaagtcaaaaattatctaaatttgctaatttataaaaatgaacaaagatttttctggtaaaattctgttagtttagaaagtggcattgaaattgaaattagatgcaaaaatttataaattatattattaaaaaaatgttaattataataaatcattttttcaaaataatgattttattggaaaaaatttttcgtttttctaaaacaaattttttagtgccaataaattgtataaaatgatcaataagatagtgggtttagccaatttattgatttttagctactcatttattagctaagcaacgaatatacacatgaaaattgattttcattatttttccatctactaaacagtttttaaagcaataaaaattaaaaatgtaaccctaagaaacgctttttttattttttaagaaaaagcagcatctgatagagcatgaaaagagctatagaaaaaagtaaattaaagagaatttattttatccttcagctagaaaacttaatattccaaattttgcctctttgaattaagacttttttggagcacttactatgtatatatttttgtttaccctttctttgtgagggttcggcctcaatattttctgctcggtgccatattcaatatcatcatccatgccattgtctataaataattttttaagatatttaattgtcatccgctaagtgctcaccgttgtcagtctcttccgtcagaaaagtttggcatttttgtccatcttttgccaaagtaagtattggaacttgaacaccttcaaacgattcgcttcctttttccaaatttgtctccaattgtttcttcgaatggtttttgatgctttttctcgtcaatttattcactatctttgtgctacttttgtttctttgtggctcattaattcttccattttttgctctcttaaaattattatttttatttt

SEQ ID NO: 30836 - DNA, 1002 bp, Heterodera glycines
cagacttttggaaaatatatttgcaatttatcctcctttttgagaagtgagttagaaatgataaacttcacgattcaaaccagttttcggtgctctaattaaccgcgataaaaacattcgaatcaattaaatagcttctgagataataaggtttatcataaaatttcaattaaaaataaaccctcaattattggtatgaacgatactttccaaacatgcacacgttttgcgctcgagctatttatcatcgggcttgtcaatccaaagcgaaacaaaaaagatgctgttttgaacgaataaagggcataggttattttgaagaagtgtcaaagaacatgcagcaataagcctgcaaaatctaataagtggaaaatacatgagtatagaatttattttcagaaagtgtcaacagacttttggaaaaatatatttgcaatttatcaacaattttgagaagtgagttagaaatgataaacttcacgattcaaaccaattttcggtgctctaattaaccgcgataaaaacatccgaatcaattaaatagcttctgagataataaggtttatcataaaatttcatttaaaaataaaccctcaattattggtatgaacgatactttccaaacatgcacgcgttttgcgctcgagctatttatcatcgggcttgtcaatccaaagcgaaacaacaaagatgctgttttgaacgaataaagggcataggttattttgaagaagtgtcaaaaaacatgcagcaataagcctgcaaaatctaataagtggaaaatacatgagtatagaatttattttcagaaagtgtcaacagacttttggaaaaatatatttgcaatttatcaacaattttgagaagtgagttagaaatgataaacttcacgattcaaaccaatttttggtgctctaattaaccgcgataaaacattcgaatcattaaatagcttctgagataataaggtttatcataaaatttcttttaaaaataaaccct

SEQ ID NO: 30837 - DNA, 972 bp, Heterodera glycines
gaccgaccaatcaatcagtcgttgtatgtttgatcaccaccatctcttgtaattattggcttgtacacacaatacaaacaacaaataaataacttggtaatgctgtttaagtaatactcataccgtatttatgcccattttttaatcattgggttaattgcccccccccctcactccatatcggtcatttatcctaattagtctgcgtttcataagcttcattaatttatattttgaatattctttttattgcgctgaacagtactttcccatttcgtgcaaacatccaaagattaaacaacaaatggcaaaaatattcgaagattgtccaatattaattattgctttatgcccccaaatttgctcgttacagttcttttatcaaccgcccgcctttttttaaatatttttttcaatttgatagatttaactttttaattatgtcaatttgctctgttttgtactgttaatggcattttgcttaaaatttctcttgttgctggtgtcacgcacatttaatggccaatgcttcacaattataccttcaaaaaatattttaattgctcttgaaattttattgaaaaatggctgaagggcattcaaatttggaacaaattgtgcatcaattataaaattgcctccgcttatattttcacatatcaaaaacggaaaaaatgagaagcgacaaacgccgatgggtaagccttagaattttttggaatactaaaaaattaattaatttaaggctttgtcattggctcatttcctgctatttctaatcttgcaaaatattctgataatagcaagccgaggcgatgagaaccaaaatgccaaaatggggggacaaagcggacatcagaatatgatcattatgccgccagatgtttctccggtgccaattttggccacaatttctgctctcccacatgatgctgcttctttctccatgccgattaccctcaaatcggccca

SEQ ID NO: 30838 - DNA, 1589 bp, Heterodera glycines
ctagaaaaaattgaaaattttgaaatcatgtttcccccttccttctcccaggggtattattttgtaaagtctttttttcttaataaacttttcaaaccccatttttcgcaccgtgaatgttatttttattgaattctgaaccggttaaaatatttatgaattaattttgcaaataaataaaaacgaaagactcagattttcgaaaaatttttttgagccagctagctcggcgctcatttcagtgtaagttagtcctttaccggggagtatccctgcaaagtttggtacgcttctgctcaattagcaaaaaatatgagtgatcgaattttcactaaaaaagttaagcctacattttttggcatatttaaaaagcaattaaaaaattttaaaatttaataattttcctgcaccgaaggtactcactcggcctcttcgcggcctcgtggtgggccttcgcccccccccccctcccacgcccttcagagcacgacaaatatttcaacaaaaattttgaaaaattgactagagcaatcgaacgctaacggacgacctaatggaaaaaaatccccgaaggagagaatttaattaaatccattccttcgggggaccgtgccgggtgccgcggggtaagcagtgctggttcgtttcatcacggcaccgaaccttttggctagtcagcaatcgttgcttaacttgccagatcggacgggtgcgcatgactttctgaaaaaaatatttatgaaacaaaaaaatcgattttttcaagtgtccgtttggggtactcaaacatttatggggagcaaaaatccaacgcagaattaaagtacaggctatagggaagctattccccgaaggattcggtctccccataaatctgggcgcatcggttcgggggggactgccccgaaaacaaaaaaaacgatttttttcaagtgtccgtttgggggactcaaacaaattatggggagcaaaaaatccaacgcaaaaattaaagtacaggctatagggaagctactcccgaaggattcggtctccccataaatctgggcgcatcggttcggggggactgccccgaaaacaaaaaaatctattttttcaagtgtccgtttggggtactcaaacatttatggggagcaaaaatccaacgcagaattaaagtacagactatagggaagctattcccgaaggattcggtctccccataaatctgggcgcatcggttcggggggactgccccgaaaacaaaaataaatcgattttttcaagtgtccgtttggggtactcaaacaattatggggagcaaaaatccaacgcagaattaaagtacaggctatagggaagctactcccgaaggattcggtctccccataaatctgggcgcatcggttcggggggactgccccgaaaacaaaaaaatcgattttttcaagtgtccgtttggggtactcaaacaattatggggagcaaaaatccaacgcagaattaaagtacaggctatagggaagctactcccgaaggattcggtctccccataaatatgggcgcatcggttcggggggactgccccgaaaacaaaaaaatctattttt

SEQ ID NO: 30839 - DNA, 805 bp, Heterodera glycines
aaaaacaatcccttgctgataggccgggtggtcaaaatttaagcccccaatcccggacaaattggcccacctttttttgctgctgttgttctgcgatcagcgcctgttgctgctgaaagggtccattcgcttgtcctctcatgccaaggtgtcgactatttggcgtcacaattaaacagacggaaagcaaaaggacagccaggcaagtgcctgtctgggcattgcgctttgacgattgtccaatggaagcctttgaaaagaaaggacaaacgaatgttttgctaattagtgttaatgagttaggtaatttacactgaatcgcccccgcccactaaaccatgggtaagtgtggctaattgcaagtccttgtccagcacctgcatgttgcgcagttgtgccgcaagctgtctgttttccgccgccatcacttcgatttgctttttcaattctctgttttcgctgtcgctcatgaaaatgcgttcctgcagggcctcaatgtaatcctaaaaacatcaaaacaattcaactgattcccttcttcagatttcgcctgtttttttcttctgctcgtctgtgccgacattttatttcggattttgcgccgaattcgcttcaattcgcgctcttcggattttgtcaatgggtaaaaatccggcaaagttacgccctcctaaaatgggtgcattattagaagttaaacgaattggtcagattcttttcataaaaaactcacaagcgaacattccgagctgtaactcggaaaaagggtatgtattatataccattcgatagagccgggtcgact

SEQ ID NO: 30840 - DNA, 1368 bp, Heterodera glycines
aaaaatattgccaattgaaaaaattgtacaaaaagttacttcttttttgttgttcaaatctctttcccaggcggggtttaacaaaatttgataaggaaaaatgatggcacttgaaaagaaaaaaaagaataataaaatggatatttacggaaaagcaaaaaatgaccaaaaaaacacagccctaagaatgaaaaaatttcttaaaatacactataataaaattgaaaaaaattttattagaaattcatcccctaaaaatctttttttcttgaccaagatttggttaacttaaaacatccatattacaaaaatttttaaatatttgaattaatttcgtttattttgcgttttttgatatccccccgtaatagagccaccctccccctcgaagggaagtcctcggggctctgtctgttttactaaatttaaatcgttttatgagagttccattgaaataaactttaaaaatttggttagtgctaacgccatccctttttttcccaaaatttctcaaaaaatacttggttaatgccaatgccatccatcactttctttttcccaaatttcaccgggactcatttgagcatcagtaaaatgattcccacgaggagtggggggggctatgtttgttgagattgagggtcaaataaataataataaaacgcatccaagcagtcagaggtcacattttcagcacagaacacagcaaagcacgaccaccaccactcaaccggagagcaaagaacgcggaggcgaagggataactgaccgcccgggaatggccaagtgagttccgccaactacgtcccagtttagtttaagaagccgtaacttcttttttcaatgagttggattttttataagtttggcactattaaatgctctattagatcaggagataacgactggaattaaaattgccttcaatttaaaaaaaaaatacaaaaattttttttataatttcctatctttggtctcatttttaattgaaaaagtcagcaaaagcgcaaacaacaaaatttaattcactaaaataaaaaaatgaaatatttttattatcccaaaaaatactgtttaaaaatgtattaatctcgcggctttttgttgtttttttaaatttgaaaatgaggccaaaaaacaggaaattaccaatttttgtaagtttttcaattaatttcatcgccggacaatacctaaacatttgaatattaatactaatttatttttcgagcggttccaaaaacatataaaatttgataaattaataaaactgattgtttcttaaacttggctgggcctctgttggcgggactgagttcggcggccaccgcttgggcgccggtggtgaacagactagggttcgagccc

SEQ ID NO: 30841 - DNA, 1001 bp, Heterodera glycines
attttttctgttaaaaatagttccataagaacccacccataaaaaggggcttttgcgcaacaatctcccctctggtgtccttcattttagaaaggcactgaaccgtatacaaaaactctcacattctaaaataactcagttaaaacagcttttaattttaattgttctgaagccaataattttgtctgtaaaaaatagtcccatatgaaccaagacataaaaagtgcctttgcgcaacaatctcccctctggtgtccttcattttagaaaggccctgaaccgtatacaaaaactctcacattctaaaataactcagttaaaacagcttttaattttaattgttctgaaaccaataattttgtctgtaaaaaatagtcccatatgaaccaacacataaaaagtgcctttgcgcaacaatctcccctctggtgtccttcattttagaaaggccctgaaccgtatacaaaaactctcacattctaaaataactcagttaaaacagcttttaattttaattgttctgaaaccaataattttatctgtataaaatagtcccatatgaaccaagacataaaaagtgcctttgcgcaacaatctcccctctggtgtccttcattttagaaaggcactgaaccgtatacaaaaactctcacattctaaaataactcagttaaaacagcttttaattttaattgttctgaaaccaataattttgtctgtaaaaaatagtcccatatgaaccaacacataaaaagtgcctttgcgcaacaatctcccctctggtgtccttcattttagaaaggccctgaaccgtatacaaaaactctcacattctaaaataactcagttaaaacagcttttaattttaattgttctgaaaccaataattttatctgtataaaatagtcccatatgaaccaagacataaaaagtgcttttgcgcaacatctcccctctggtgtcctcattttaggaggcactgaaccgtatacaaaaactct

SEQ ID NO: 30842 - DNA, 1240 bp, Heterodera glycines
  unsure (1)..(1240): unsure at all n locations
cgatgtggtgcagccgacagaacgccagcccatcgaaaattaaaagtttnaacttgacgaaaaaagtgccacatattttaaaggtttattttatgcaaaaacggaaaaatcccaaatattttcaaaagaataaaaaatatatattattcaatatttataaatccattcacattttttaatacaaaaaaaaaatcattaaaattcattaaagaaagaatttttgtgcaaattaaaaaagttgcaggtcttaaatttcgtttctataattttgaacaaatatttaggccatttttagtaaaaaaaaaaaaaaaatcaaaaaattattttttttcttaaaattattctgtagataaaatttaatttgataaagaaatcacttacgggcaaatgaattaaattaaatatttttaaatatattacccaaaatcttctggcgatttgagtaaagttgccgggaacaacaaaatgccaattgcaatgatcaacagacaaaaactgatgttcacaccggtgaacactttgacaaattgttggatattttttgaggataaaagcaggaaaacgacagcaatgctgaactgattgagcagcacaaaaaagttggcaattcgtctaaaataaaaaaatattaatagataaataatataaacaaataaaattaaattttgaacaaaattattaaaggaaaaaaaaattcatcaaaaatgctatttatagttattaaataatagctgaaattacctattaatataatcactcaagaaaaaaaaaacatattaaattttataaaatttatcaattattatttgttttaacttttaattaaacaataaaaaatttaaaaaaatgataatattattttattttccctcttattaattcaatatttttatttttgataccaaaaacatattatttttcttattgttattatttgttctattcaattggaatggttgtccattctattgaaaaagggtgtgtgtaagagtatataaacgaaacaattttggacaaaaatattatttcaataaaaaggattattatttaaattttttcaattattgtacaaaaaaattttttttagaaaaaatgctttttatattggttcttctattaattgaaaaattgttattagcaaatggagctcctctttcgacaaaaaatgatggcatcgaagcaaaacaaaataaattcaaagaaatgacaggtatattttaataatatagaaatttaatga

SEQ ID NO: 30843 - DNA, 2010 bp, Heterodera glycines
  unsure (1)..(2010): unsure at all n locations
ttatgttcataatcactttaatncatctgatgcacaaccgttcaccgtttgaaccgttttgcacagttccaggcaatttttaaacattttatttaaattaattaattattatttttaggtcgtatgagtttgttgagcagcacaacaaagtacaaagtgagcattggtgagattcaacgtcgtatcaacccgcctgaatgtttgaatgcatcattaattggcggtattttgagaaagtcagtaattttgggggtgacaaattttgtgaatataataccaccttctaaatttagtgtaagacaaatttagtaaataattgtatttttagagaaaatttaattaattttgtaaaaatttattaaaaatttttatattatcaagaaatgaaaatatttttgtgctaaataataaaatcccacatcataaaaaagaaaattatagaatgtgagtaaatattttggaatttcgttttactcaaataaaagcccccccccacccctcaattagaagctccccccctatatgccaaccttcgaggggggttgaaaaatagaaaatactctgaggcttagtttcagtaaattttgttgttcatctttttttttttggtttaatgagataaaacctttaaaaaaaactaaataattgatcattattttattcattttaattaattgccattaaattttttccctaaaattagggctaaatccaaggacggcggcaaagcattgagggaatcgttgaagcgaattggcctttcattgccggccggacgccgaaagtcggcttgtgtaaccgcattcactgcattagttgaggaagaagccctccatatggtcggcattaattaaaatttgtgccattaaaaaacaagcatttttaattttcaaatttatttgtccaaatcaattttaaaaaatgccaaattttatatgatttattaaaatgacaataaaatttttaatttaagcttttttaattttatagacattaaaaggagaatatttttttacgccatttaaattaatttctttagcagtttattaatttcaattattttttaaataattttattattttatttaaaatttgaatttactaatttttgattacatagtatttttgacactttaaatttttaacatttaaggccaatgattttaatgctgttctccaacacgatttcccggccaaggacatcggttttttcctcaatgcgcaattcctcagatatgttggccaatcgccgatggattccgaattggtggccagacgtcgtacaattttaaattgttcaaggtttttattgcaaaatccgaaccttatgattagtggatttagctgtccttggctttcataaatacatacatctcccgtatttaaaaaggctaatttgtaaggaatattatcagaggttttgaaattgagtttttattatttgtactaatttcttcatctcttattaatgcgttacccatattttcgtaaaaaaaataaataaagaaattacaaaaattgcattttttaggatttttatcaaggagatcaccagccttttggctgcggaccgaagcccaatttgcgatcgtcgacctgaattgatgttggacccgagcatacaaaagcaactcacgcatttttcaatggcaatttttatgggttttttgtaaaatttttgaatcaaaatcttattaaatgctttaaattttttaaaatcccatcgataagctctgcgttttctgccgctaccgtttcccaaaaaattaaaaaatacataaattttttaaacaaaataattgttctaacttttattanaatgcgattatttattttagattactcatggctntggaggaattgcaatggtatttttcattatatgtttttttttgaatataattaataaatcttataaatatttatttataaaaataaaaattttttgcagatttcattgttggaagcatttggccacctgcttggatgaatcattaataaatttggaaa

SEQ ID NO: 30844 - DNA, 1853 bp, Heterodera glycines
  unsure (1)..(1853): unsure at all n locations
atgttttgcatttttttctccttattttgatacntaaaagtaaggatcatttccctttatccttcgtttcaatgcctctacattttgccgtgattactnttcgagtttcttgacgttaaattccattatgtttattcgttttgttttctctccgtgttaaaattgatcacatctgatcaaaatcctctttctcgtcttattaacaccgatttatttctgcaagttttcgataattttttattcgttttgcggcgcatttattttgacttcgaatttcaccgctttgtaagacaatttcccccgcgccgtttctctcgtctctttctctctttgatcgaatgcttactcttgcatttctgcttattattcccttaattgggtttccgaccatttcaaatacccccaaatctccaaaattacaattcgattggatttcccctgccacactccaaaatcaaaattttgcttttcctcctccccatggcaaaaccacgtaattagagagtgatttcccaggtatttggtgagaggggacagaagaaagtcattcattcattggcaagaaaatgggtaaaaagcttctgcaaaagcaaatgccgataaaaatattaataaagcatgtgatttattggtgattcttattaatgactcaaagtctttttatgattaagcaactgttattttaatttgatttgaagcttcaaagatgcgtttttatttaaatttcggcattttcaaaagaaaattcgaaaaataaactaattaagaccaaaaattttcaggaaatgaatttttaaagagcgaaaaattttgaaaaaagtcgaaaattgtcaaaactttttcatgttgaaaatttcctatttttttgctcaatttaagaatttaagaaataaaatgatattgaatattgaatttttcataaattttttgtttttcgtgaattaatgttttttcccttttattctcaaaattaaaattagaagttgattcttgtccatattttaacttttttttgtccttttacgcatttcccctttttttgcaattgaattttaaaatttttcgttgatttagccataagcaaaaacaattcgaaatgaaatgttttattttctttctttttgctgcttttttattgttgaaaagctgtgaaaatatgcgatttggcgacgtcgaagcggcgaatccctttttatcaaaagaaaaagcaaaaggaaaagcggaagaaggagcaattgtaagcagcaaaagcaaaggcaaaggctcatactttaattaattaaaattgaattaaaaacgaataagccgatcaataatataaattatctattatttggatgggtttattttgtttatcattataattaaggaaatgccagcgcttcaattgtaaaaaactcaaaaaatggcatggaaaacccaaaaactccggcgaaaaataaggaggaaaagcatctgaaaattcacccattacaatttgttgacgcaatgatcggaaattgaatcaaacaaagtcaacagcagaagattattttagaatttttctgtttttggtgattttcggcttttttgtgttagcatttcgtagcgaatgacactttttgcataaagtttctttctttttaaaattgcaatacggattttgtttaaaatatatgtaaaaaaaaataaatcagttaaaattttagcaatgaatatttaaattttcccaaatttattttatttttaaaaatattttcttttgctgggatacgacgacaccgaagcgacatctgttcccaaaaatataagcatttgttttgggattaattaaggccgatggattgacactaatgcaattaattgtttttgtc

SEQ ID NO: 30845 - DNA, 828 bp, Heterodera glycines
acctaaaaatcccagccctggtgattatggcgttgaacagatatgactcaaaaatgaataaaacaatttaaaaaaataaaggaattgcagaaaaattttttggcatattgtcaaaaacaaatgaaatagtacaattttagacagcagtccgtccattcattcattgtgacaaaatgattatgaaattatcagcaaattccacccaagaaatcacctattatattcgagaatttagaggaagaaaaaaaaacgaaaatttaccaaaataggcacccctatcagtctcatctcatcaaacacagccaaaggaaaggccgggcagaagccgataaaggcgaagaaagaaggaccgaccgaccgacggccgcccattaaatttcctttctaaaaggaaatgcgtatgttttggggactgactgtgtgcgggccccgacttttggtatcaaaaaatgttgagtaactgtataattggtagtggttaaaaattgtatgtaacggtgatggggccgactcaatgccggtatttttggggagggaaagaccgattaaaaatgcccggcattttttaagggtaggtcggcatttcgagttataattcctagatttatttgtggttggcggtgtcatagcaatttctgaatcccggcattttggggggtcggggaaaggcttgctccgattcctgaccccggcatttttggggccgaaaggtcagttagattttttgaggggcacgaggtggcattacaaattattgcggtacgcaaatttccgaatcccggcattttggggggggtcggggaaaaggcttgctccgattcctgaccc

SEQ ID NO: 30846 - DNA, 830 bp, Heterodera glycines
ctattttatctttagaaattgaataaaataaaaaaggccgttatttggaatgacagattactttttatttaattattaattttttaggttggcatttcaaccaacggttggaccttggttctttccgtttctcatttctcctattatttgtcacttccgactcagtttggaaaactgctgatcaacagctggctaatggttcaattctttttagtgtttgggttatgtgttcaattcatttatcgttttttggtgctgaacaggtaaaagcgcataagtctttcttttgacctacgggagccatttaccattaattaatgtcattgcgtttttttatatttgctaagattcatctttatattaatataaatatttaatttttctcttaaatgagattttttaataattttatgatgcttaattattttatttaggggcttaaaaataacaatgaaaaaatatgttgcaatgctttcatttgcattttccatcgctattttgacttggacatatgattttattgtttcaaatgaccatataaatctttccttgcttaaagccgaagaaatatttcaaattgaacaacttttgggtggcaatctcaacgactttgtgacatattgtcaacgaaatgtgagctgattcaaaaatttaaatattttaggttttacttaattttaggattattttcccgtgaaaatttcaatgtgggcttcttttgtcgaaaatatcatttgttatacgataattatcattgtggatataaaatggccagatttgttcatcaaaatttggacaaaaattcgacacgaaggcaacaaattaaccga

SEQ ID NO: 30847 - DNA, 1946 bp, Heterodera glycines
tcccgaaaaagcgataaattgaccagttttgtaagaaatttttcaaatctaactgggagctacagactttttttaatactgattttaattccttttattcagaaatgatgcacagcaacaacacattggcaaatggctgttctacgccctgttgatgctgttgttgctcttttccggctacacattgtacggcgatcgacgccttcgtttggccggcaacaaaacgcaacagcaacaatcggtggaggaaattgtgccacaaatccatggaaaaccggaccgggagcagttgttgaaactgaaacgtaaggcaaaaaattaagggtatagaaaatgtttttaactgctatccttaaaagttgcctatttccctaaaatttacctaatttatcccccccccctctctcctcacctcccggtttaatggcaaaacgtataaaaacgcatagcatgtttgtttaaccagttactaccaagccacaaaaatttgaaaatgaaatttctgggactttcaccccctcctccctattccatccccggcaaaaaaacaatcaaaggggcaaacaagaaattttgtagaaaatcagcggttctttccatttatcccatatttgtcctttagcatccgatgaacttcatcagacgcatttggcccagcccggcacaccaaaaaaggacattgtgatggaccaaccggagctccatttgacgcaatcgcttcatccttcaccgccgccgccgccgcgtggcgaagtgccaattgtcgacgaaatatcggcacaaccgcaattcatctacaacacgacaacaccgtacagcttctacgaacatttgaccagagctggccaatccgtctgggaattgatcggtataacattttaatgttttcccaaaaaaaaaattttttttaataattttttctcgacttataatatttttcttttttcagttgacacatttattggcacatacgaattgttgaagcgcatttttttcgtcatcggtatcggtatttgtcattgtttattaggtcaaacaacaaaaacaaaaaaaattggtgtgtctcaaatttgtgactaaaattttacaatttttctttgggattgttcaatactcataaagggatttaatttaatttcatcatttccagtcagtatgccgatcaaatttgcaaaaatgttcgcccattttatgagggcggtggtttcttctgtttggctttcgctcaaatggttggcggaacaaattggtgaattttcttgataaaactttttgcaatgcaatatttttttttgtttagttggatttccattcactttcttggctccacttaaagaggcagtgcaatttcgcatgcaaaacattgcaaattctgtcaccgaatttggacaaactgtgtaccgaaaaggtaaggaagttaagaaaatggggggagggagtggtatcatgacaaaaaatgttttttttcctatgtttcccgtatttttctcgaaattttattatttttcaaagttttcttatttaagtcgcggaatggtttacaatgttaccaaatgcaatccatgagcatcttttgtccatgtggtatgcagtccgttggatggtgttccagctcagtcacacgttgttccttgtcttcgatggcattggttatgcggggcaaaaaggtgtcaaaaaccaattttttttttaaattaaaagcattaattttagtgcttgatggttgcatttacgcatacaatgcgtttgtttcttcaatgcattggctctttactaagcgtacgtttataaaaatggctaattttgcaatagaatttattttattcatattttcatatatttattttagttacaaacactgttttctttgtgtgggaaagtgttgtcaatctctgctgctctgttgttgaccaaagtcagtttcattagtatttttaaattaattt

SEQ ID NO: 30848 - DNA, 1737 bp, Heterodera glycines
aaaatcgtcccccgtgaaatttgcccctcgccacttatagatagcattttactttttggtttttgttttttcaaaaaaaggcaaatttaatcccaaggaaaccaaaaatattgaagatttaataagccacattaatatatgtagatatagtttaaaaatcttttggattattttaaaatttgaacaatgccaagaatgtttaatttggttttgcctaggaaaaaaattttgataataggttgggctagtcaattaaaataagattttgaggaatttggaagcttttggcaagaacaattaccaactcatttgtcagacaaaaaatttctcgaaatcgtcaattgggttgttagagatttcataaacccgtcaaaatgaaagtttattagagaaaacaaaagtttcatacatttctaaatttttcattcttgatggtacacaattggcacaccaaaagttttaaatttaaaatattagtccgaattttgcagaaaatcttacttttttcatgataaggcctaccagtatgcaaaattttagttttcaatttttaaaattaaaaattcaaattctattcatcatctattcccttatggactcccttctgttttctcttttaccatttttgcattagcgtcaaaattattgtgcaaaaatataattattttattatatttataagacaccaaaaaacagaggtaacaaaattaattaaataatcaattgaagcaattttttttttgcaaaatttgcaagagtaagcttttttgtttgagtaaattcatctcatacatatgtaaataaacgaatctgaattaaaataattttttttttgttatttaaaacgcaccaatttgaattggtttaaaaattaaatttcataaaatgtttaaaacattccagcaatacactcaaaaacgcttttaagataccattggatttattaaagaaaaccaacaaaagcattcaacaccaaaaaaaccagttacaataacaaagcccaaaatggaacctgttacggtatccaaatccaatgctgaacctgtcactgtatcgaaatccaaagctgaacctgttacggtatcgaaatccaaagctgaacctgttacggtatcgaaatccaaagctgaacaagaacggtatcgaaatccaaagctgaacctgttacggtatcgaaatccaaagctgaacctgttacggtatcgaaatccaaagctgagcaagaaactgtatcgaaatccaaagcggaacgatagtggaggcggtcgaacaattgaatccaccttctccaatgaaaaatgaggagccaaagcagaaagtcatagaaaagcagcagaagaagagcagaaaaagcgcaaaaattcgcactgatagtatctatgttggcactgttatagaaaatgccatgggcactgataaacaaaacgaaaagaaagccatcgatgtgcaaaatgacaaagctagtactgataaacagattcacaaagttggcacagatagacaaaatgacaaaatttctgatggaaaagatgccaaggttgacactgatacacaaagtgccaaatcgggaattaatggactaaatgccaaggtgggaactgatggacgaagtgacaaagctgtcattgttgcaaaaaatgccaaagttggcactaatggagaaagtgacaaattgggaattggtggactaaatgccaaagagggagctgatggacaaaactacaaaatggcactgat

SEQ ID NO: 30849 - DNA, 1644 bp, Heterodera glycines
tgtgaagagcggagggtcaaagaccgcgtgaacatgacgctttctacgcaatcgacgacgacccttccgccccctctacttcctcttacttaatacgggtgggcgtttcttttacacagattggacttggttgttaaaaaacattttcactaaaatgtttaatacattcttctccagattgttgttgacaaattgctcaaagacacaaataccaaacacacaatcagtcttcgaaacaatttactgcaaaaggccgaagaagaatgttcaattatgtgaagcagaacaaattttatttttcatcttaaattcatttttacttctttctatttactgttttcttctattcccggtttcgcatatactatgtagtataaaaatgtaatattatttttacttttattttacatcgcgataatcgatttaaaatacatattgattcattccccttacttagtgactgtgaaactgaaatgttttaatggctcagattgtttagtttttagtcgaattcgagaaaagcaataattttctccatttatccataagcagcatagaacgcgatgagcagcagtggtggggcattgagttggaattcgccctgctcgtcgacagtcggccaacccaagcagcagccaatttcttcgtcgtcattttctggcaaacaacgccattcaccaatctttcagcagcagcgagtgctttcccggcaccatgggatgccattccaacagctagcagacgaattgttggcattgatcacttacaattgcaaagatgcggcggcgaatggagcagcctttgagaaaattctaaccattttaaagcaattaaaacagcaattttatttggcggaagaatcccaaggcaaaaagtatgtcaaaacttcgcgtcaggatcagtcagccgaggacaactcagctttacgagaatttacaaaaggcaactcgtacaatggcttaggcctaagctttaggcgaggcttaggcttgcttgggcctaggcttaagcgtaggctttttaagttttattgtacggctgatgtgagttgtcctcagctgactagtccagaagcccaaaactttaattccttaaatatcatctccatttaaggcaaaatggccttcagattttgcaaaatgcctacgaaattctgaaccatttgttttttctgaggagtggcgctgtctttggccacaattcgttggcgctgcacgtcgaccgaactttgaaagcgctcaaacagacgacgtcactttcccacgaccaatacgtcggcccggtcaaggcccttgagaatcgtaaattgcaagtgatgttctgtgagtttacagcaccttcccaggtttccgaattggacccttttttttgcaggttttgtagagtcaatcaccgaattgctcgtccacgacatcgacacttttgggttggacgtcgacgcctacgagaagtgcgggaaaatgcgcagggaaatcgccaatgctctgatgaacgtcgtcttccagcaaagggaggccaagctcaggctgtgttcgaacctcgcctttctccgccgggtggcggacattgtggccaatgttccgtccctcgaccaggtgaagcggcattcggttgacgcattcttttgcaattactccgtccact

SEQ ID NO: 30850 - DNA, 1131 bp, Heterodera glycines
agcccctgaatttagctttgtatcagttttttttcctttattaaggaggaaaagggtatataaactcaaagtcaacaattggatttggcctttctttttaggaaaattggttaattatcgtaattaagtaattgagattttctttaaaacaacattcagatttaccctgattagtcatctgctcttgttcgacttgtgaaaggaggggagaatgttgaaatatgatgactcaaattgtaaccagagggtgggataattaattttttagaataaaatgtccagcccattcggataaatctcaatataatggattttctttcaaattagggtcaggaatgcgaatgcagtacgtttttagcattttttatacaaccccccccgctataatgaatttttaagcaaattaaataaaaattcaaaaattttcccgttacatttctgtcaaaaaaatttcggaaaaatcgtaccgcaaatcattgaaagtaaaaaaaggcacgacttatatggccctaaacacccggcacaattttgggtgactccaccccacccaagcatgttttaccggcatccgcagaaccatcgggaccaagctgcactgacggatcggcaactgctggcacatgcacagcaccggcgtcagatgggtcaacagtacctgcgaattgaaattttttgaaaaaattgagtttgtcaatatgaattcgtccccctcactcggtgataccgaaaaaaattgttaggtttacagagacaaaaaaatagcaatttttcaatgaattttcaaaaaaaaatttttttttgattttttcacgaattttcaagtttttttttgcggcgatattaaatcccgacgacatttcggaggcgacgtccccccccccccgctataatgaatttttaagcaaattaaatataaattctaaaattttctcgctacatttctgtcaaaaaaatttctgaaaaatcgtaccgcgaatcattgtaagtaaaaaaaggcacgacttatatgggcctaaacacccggcacaattttgtgtgagtccaccccaccccagcatgtgttaccgcgatccgcagaaccatcgggaccaagctgtactgacggatcggcaactgctgtggcatgcacag

SEQ ID NO: 30851 - DNA, 1096 bp, Heterodera glycines
tctgcatttacaccactaagaaaatgctaaattttaattttaaaataacaacactgaaaattttaaaaaaatcgttttttagcattttcatgtcaacaaggtcacatcaaaccatcttaaatttgctactgatttgccgccaaatattcgtccacatagccctcaaagatattggcaagcgtttggatgacttaattatccacattatcgctcattaattggcatttttttacattgttgtgcccaggaaatgtcctggagattgttgcggtcaatagtcgcaaaaatggcgtcaaattgaatttcgaaaatctccggagtaagttccccgcgaaattggacttctgtcaagccaaaagagttgtcgagacggaagtaagaggcgatgtctgaaaatatggaaaattatttctttgtcataatagtaatggcaaattacagtcgaatgatactgtaagcagtaaataaccaaaaatacggtaaaagtgtactgtaaaaaagaaaaagcactggaaaacttacgatccctcatgttgcgcaagcggttttcaaacagacggaacgacattaatttaatccgacgttttgcctgtccaagccgttgcctctaaatccaaaaaaattgtttaaataaattaaaaattaattgaaaaaacattttcttccacaattttttgtctgatcaattcatttctgatccattgggcttgttttttgtacaaaaaatggtcaaatgcaaaagaaattcgcacattggcccagcgaatatcaaagggaagtgccgccacaatttcgacatttaattcggtcggcatttttctttttggcatttttaattgattttttggcataaattttgtaattttgggaggaatttggcgaagaatttgtcgctgttttgggtggagggcgaaatggaagggcaaatgaatgagtgaatgattatgacgcccacttttgcgcactttgccctccgagcagagactaaaaccaccgctgagaggagggtggagggggtcaaatgtttaccaaaacgaaaccatcttaaggtgccgtttaaaaagttagaaagtgatttgcagaatggcacccgtta

SEQ ID NO: 30852 - DNA, 1012 bp, Heterodera glycines
ctgtgttttgtccaatttgacccttcttttgctcaatttgttttttcatcccccataaacttttccctaaaatatccttcaaatgtttttcagtttcgtctcatccatgtcaaaaattttgtcataaatttcttccccttcttttttgatccgatcaaaaagtgcgttctttttccgctcaacaatgatcttatggccatcccatcgcataaacaccgccgaatcggcgccgattttgtgacttactaccaacgttagatcttattcctcaatcgcacacagaacattctcataatggtcccgaagaaggtcttcatttatgagtcctaaacatgtgagatagagaagagaagctttccaacccgggaggaagattaggggactaattgaggtgataatgaccgtaatgcccgagctaattcgattattagggagtgccggtaattcagccggcggtggcaccacgtccataaggctagagagaccgattctctcgtactcaccccgtttttcctcaataactccttgcttgtctgctaattacatatttcatcaatccactataataatccgttgcctgctcaagtagttaaggatgatatccctatttgccactatccgtaaattcttctcccgtcggtcctagcttttcccaatgcttttcatactgttccccccccccccccgaaatgaaaaaccaaaaaattttcaagcaaaaaagggcaaaatttctgaaaattttacacattttcttatcatattgcatttaattttccaaaaattcttcccggcggcgcctattggcaccgccgggccccaatcggatcattattttttgaaaatggaaaattgtgattttttcggcgcaagcccgataataattcctgttttttggctccgcgctgaagaatttgaacataacactgtgcaaaaaatgttttttggcccgaagagcaaaaaaaaaaagctcttcgggtgccctccccgaaattttttcctggatacgggcctg

SEQ ID NO: 30853 - DNA, 1067 bp, Heterodera glycines
cctcattttaaagcctacctcgaaactaaaaaattatcccccgctcctatgacaatcgcgggatcaaattcgggttcagcgcagccaatttccccattcagcagattctcagttggatacgatcaataacagtataaaaaactgattggtaaaaataccaccgctttcttctgtaaaaagtcaactggacgaacggctgggccctgcttccgtctggctacagtctcgagagctaatttggcaaaagcctaattttaaagcctacctcgaaacaggtacaataaaattcctaaaaaattatttgggctcgtatgacaacggcggaatcaaattcgggttcagcgcagccaaaaaccccattcagcagattctcagttggatacgatcaataacagtataaaaaactgatggtaaaaataccaccccaaacttctgtaaaaagtcaactggacgaacggctgggccctgcttccgtctggctacagtctcgagagctaatttggcaaaagcctaattttaaagcctacctcgaaacaggtacaataaaattcctaaaaaattatttgggctcgtatgacaacggcggcatcaaattcgggttcagcgcagccaaaaaccccattcagcagattctcagttggatacgatcaataacagtataaaaaactgatggtaaaaatacaaccccaaaattctgtaaaaagtcaactggacgaacggctgggccctgcttccgtctggctacagtctcgagagctaatttggcaaaagtctcattttaaagcctacctcgaaacaggataaaaaactgattggtaaaaataccaccccaaatttctgtaaaaagtcaactggacgaacggctgggctctgcttccgtctggctacagtctcgagagctaatttggcaaaaagcttattttaaagcctacctcgaaactaaaaaattatttgggctcctatgacaatggcgggatcaaattcgggttcagcgcagccaaaaaccccattcagcagtggatacgatcaataacagtataaaaactgattggtaaaaataccacccc

SEQ ID NO: 30854 - DNA, 872 bp, Heterodera glycines
ttttcaaaattgagtgactaagtagttttatttgtgattttttccaagttgaacatcgcccttcaagagtaatcgatcaactttttgcaatcaagaacccattttttaaagaagtttagtttccatagataaatatagtatgtagttgctcatttttaattttggacccatagttttaataacagcaaattacggacaatttttgagaaaaagataaactattttagtttttgtttgttaatttaattggtttgacatgccggaaaaaattaagctctcggttaactaaagcgtggaagtgaaacaagataaaaaattttcttggtataaaattcttgaactgacttttatatttaatttagctaattttttcgccaatttcacagtttaattataagttagaaattctataaaaaagaaagaaaaaagttatgtcaaataagacttctctccaattgagacagatcgctttgcatcagcttagcttcactaatttcaatttgggaatattgaatttattaaaatttcttattatttttttctttatttagacagttctatcgagaaatagtggtccgcaaaagtcggtccgcaaaagtcggtccgcaaatgtcggtccgcaaatgtcggtccgcaaaagtcggtccgcaaatgtcggtccgcaaatgtcggtccgcaaatgtcggtccgcaaatgtcggtccgcaaaagtcggtccgcaaatgtcggtccgcaaaagtcggtccgcaaatgtcggtccgcaaatgtcggtccgcaaatgtcggctaaccaaataaaatacccaataattgtcgtattttagagaaataatcccggagtactcatttttatcaatttggaggtccatattca

SEQ ID NO: 30855 - DNA, 1330 bp, Heterodera glycines
  unsure (1)..(1330): unsure at all n locations
acacatcttcttaatttataaaanagttggcaagaaacctgtaaataaattcaaattaccagtccatgaagaaatgagtccttactcgagtatctggacacgaaataaaataataatcgttgattacaaattactcatttcatgttaatttatataaattttaaaaaataagaagaaattaaatgaaataaataaaacaataataatttatgaattatttaagagtttatttaaataataaattcttataaaacttttaaaacattaagtataaaaaatacatgcgatgataattgaagaagcagcaaaagaccaaaaaaaaattgacaaaaaaatcaaaattttatttgccaagggtttcagttacggcatattcctatctgaaagcgcatatcgttggagaaaggcgtatattcggggagggactttgggatttgctggggttcgggttgagattttggggtcaaggaaagatttacttaattttcaacaccactttactgacaaggaattagagaataaggcaaattgcaattaggaactcaaataacagtaccaattaagcctttgggcgtttgttgttgttgaatgaaagtccacggggaaaagcaccaaattttgtagttttattacaataattcaaaagcacaaaatataaaaaacttgagagaacacgaagaacaataaaaaggaaaaattaaatgaaggatcaaaatattttaaattaacgcgaaaaacaatcgttgcaaaaaacaataaaataaggataaatcattatttatcctacgtcccccgccgtttgaagaccagtgtcctcacggtctgatcgccgcgcacctcccccggatcagcgaaagacgagcgcctgcgagttttgacgtcggcgctcaaacagcggatttgatgaagcgaagaggcgagagctgaaatgaaataaaggggaaggggtgataggagggactactctttttggacgaatgttttaagcgataaaatttattaaatgagaaaaaaaacaaataaataaacaacaaaatgaaacaataatgaggtcatttataagtaggtctgaggcagggaaatacaatcaaaaataaaatttgtccggcacaattaaggtaatgacgatccgttcagaaccttccacgtttagggggaggggggataatccccatgattttgccaacggtaattgcggtaagccccccgattttggaaattttggccgcttcctcgaccacgattgaagcgcctgtaagcattttgctcttgacgggggtgaggaatgattggcgatggaattgtacattgagcaaactcggagcacgcg

SEQ ID NO: 30856 - DNA, 1789 bp, Heterodera glycines
  unsure (1)..(1789): unsure at all n locations
tatagaaaaaaaaattaattttcttaaagaaatttttttaactttttctttcgaatggcccccaaaaataggacttcaaaaacaccaattagaaataaaacattggcataagaaaatttttggtttcatcgctattaaaaaagtaataatttattaataaatgaaagaaaaataatttataaacataaaaagaaaatttatataaaatntattaatatacattgattgatatagtcgcgtttatgagggatatagaaatgccagaattttccattgaattgatgaaaaaaaagctcatttcctaacaaaaatttattatataatttaatatataacgtaaaggtcgtccgtcatctgattaaaatttaaaaatgacttttttgcataaccatttacctccttctcttctctgctggtttatagtgtaatggggacgtaatttgttaagtttgaacaaagttatgtctagggaacggatttatatgtgctaaaaaacgccaaatatgtagtgaaaaaagtcatgaaaagggtcaaaaaatgcaaaaaagaaaaaattgaaaatttttgtgggcattttgccaagaatttgattgccaaaaaagtaacttttgcaaaaaaaaaatcaaaatttctcaaaaaatcgctaaaatatgtgccaaaaaatgatcaaaaaaatttttttttttaatttactgccacatacgaaaagacaatgatgaatgaagtttcttgttcttataagcgttccaagaaattaataaatttaagagcactgaacgcgaatctgagcgtatttgaagattttcatgtatttaaattttaaatttaaaaattgaaatctttatcatttgctcattgattgatttccaatggcttatttatgcttaaataaaaaagacatacacaaaaagctcttatttgggcatgatataaatggcattcaaatgttgtaattttgagacgcttctcccgtcgatgggtaatttcctaaaaaccatcaaaaagggcgttcttcaaaaaaccatctaacggaaaatgattgacaaaaaattattcataaacttgctcaatgctaaacacaaattttcaattattaatatcattcggtaaagtctaagtgttctctattcacctgcaaaatttcattaactttcaaaaagttatgagtagggccgcaacttttagtgactaaaaatctcgaaatagttaactaaaatagtgagtaaaaatgccaaaatagtgaaaaaatagtgtcaaaaagtccaaaatagtgacgaatagtgacataattttcagccaaaaattgagcaaaaataatttttatcaactagttgcagttgaaaatgagtaggacagagattttgaagggcaaaaaacccaaaattagtaccgaaaaaataattttttaaattaaaattcttgccaggaaaatgaaaattttttcatttcttaggagtgtattttcaaaaattttcgaccgtttcttaggggtgtatttttttgaaaattttggggtcgattcttagggatgtattttccgtttttattgcatttttgttgagaaattttcccaaaaaatgtcgaaatagtgataaaatagtgacaaaacgccaaaatagtgatttttaactattttagtgacgagacgccaaaatagtgatttctagtgacgaaaagtgacgtccaaatgaaaaaattttaacgcagaaatgcgttttttgagctcctttcttcaaaacaatagagcaaaaaaaaaagttttttcactaaaagttgcggccctaattat

SEQ ID NO: 30857 - DNA, 1191 bp, Heterodera glycines
  unsure (1)..(1191): unsure at all n locations
ggacccaaaaatttttcggctaacgcactacctctacacttacacacttaggaaatcgtgcgaaacaattatttattttctttgattataaaaaactaaaaactttggcacgtcataactcggcactcagactcatttcgcagaaaataaaaaaatttttcttaagaaccatgggtgctctatccacccaccaaatttcatttggaaatcccacggacacctggggaccttcctttgtcagaaaccatgtggtcccccctttggtcccaaatcaattttatttttataatcttttccaaaaaaatagtagaaatatgaaataaatacaattctatagagcaaacaattgcgggttttcccgggcattcaaatagcggatttacggtaatctaatttaaattgaaataatatgcataaagaaaaataaacttaattggaataaataatttacctaatttttttcttaaaaatttctccttctccaccaatttccttctctaatttttcacgcagaactccattcttacaaatgtattttttatttttttggtagtgaagcgctcgcaaaggaaatgaattttgattttttaagaaatagtaattatctcactacttaggtatatatacctaatacaaccccacacattttgcaacgacttaattcattcatttttctgttccaaatgaacgattggctgctctcctcagctgcccttcatgaaaacgttgttcaaaacggcgacaccgctgaaaatggaacggtttgtgtgaactttttttgttgaaaaatcgcttttgggcggtcccggggggggcggnggaaggacccctccacacccgaattttttagaaaaatagtattcttactgaaaatttacggtttccttgttggtactccctccaaggcctacctcacccaaattttccaaaaaatgtcgcttaatttttccgaaaaattagcaatttttcgatgaaaatccttaattctcttttaaaaattggctaaaaatcgcaaaatttgtcatttcttggacaaaatatgttaacaagccgataaatactacaaaaaaatttcgatcatggttctacctggcgccgtcggaccacactatcgcagaaaaaaaatttaaaaaaaaacgccgcaacaaaaaaaggaatcctcaagcggtaaaagtgccaataaaatcatag

SEQ ID NO: 30858 - DNA, 1101 bp, Heterodera glycines
  unsure (1)..(1101): unsure at all n locations
ttaaacacaaaaatatgcactaaaatgctaaattcagcacaaaaaatacaagctcagcattaagcatgaaaataccaatttaagtaaaaatcagcatgaaaaagttgaacctagaagcttcaaaccaagttagaaatctttttcatgcttattagcacgtcccaagttagcaaatcagcaaatacaacaaaatttgctttaatttccttcggattaagtaattcaaaacttaaaaaataagtctccgtattcaagccctgggatcccatcccactctgatggacacacttaatgggaaagtggctttattctcgggacgactaacaactgaattgataatagcgtaaatggtgaacatattaaatacatgtgaaagcgaaatatgatcgatcaatgattggtcggggaaagggcggtagaataaacggcaaatgaaatgcttagaaaaatggaatgtgagtgaaaatcctagggcttcggcaatcaaacaggaaaacccggatctaccttacaatgtaaattttaagtaatatttatgtgtctgagataaagaagaagaagcatccccgagaggaagattaatggatcactggagagggcagggttgtctggtttttgcttattaaattcaatttttgaaggtcaagaacaaaataaaattttgaaacttatacctaaagctataaaaggtgaatatttggaatacacttcagggttttcgcgggttaagaaaaatgtcgggtttcgggattttgttttcatgttggatctttttacgaacaacattttaatatttcattaattaaattattctaaatatttaaatcaatatgtaaatcaaaataaaatttttgctcgattataaacctatattttggcaagtcacttaaatatcgttaaaataatttctatctgtgccccgtctttgctacttttattttggttatttttcggctttttaaggcatatttcagtgctgttagtgcatattttatgcgggtgcaccccaaaacgtcgtcggccgaacgtcgtcggaagacttttgccccatactttgntcattgtcaatcaattaagcattctttgtgttgtcgatagctc

SEQ ID NO: 30859 - DNA, 897 bp, Heterodera glycines
atgccgccatccgatggaagaagttagccaagacgtgatttacaatgcctttggcaatttgattaaatgtcacaaaaattagtgccaatttaaaccctttctaatagctaagggatcgagaaacccattgaaaaataatgccaaccgcagggattgtctctcgtaattaccaattaattacggtcattagtccgaggatttcacttagtgccaataccgccaatagatgaatgacattaaatcgtaaaatacttccgtcacccctcccccctccacagcacttccctggtgggttctgttactgctcgcaattgccctgctacagaccgttgcttttgtgtggctgtgttgccgactgcgcgcccgacgcactcgtcggcgctcacctggcgccagtggcaaaaagccatttgagagcggcggtgtcggctcagcgccgccgaatggttgcggtgacaatgcgccgatcagtgcctattcggccgcctccattctgatcagtgcggcaggtggcaccaaaatgcaacagcagcaaaaacaactgcacaaagctaccgtagtgcctaccgtatccgccgcggttggcgagcagttccagcagcacaacaacatcggcgggaacggtaaaaaccggaacaacaattcgtccactaccacaagcggtcaatggacattaacgagcgggagcgattcggcggtgttcggctcagtctcatccggaagcaatcggtcgtcggccgcctcgtcgccggtcggtggtggccaactcagcgccggaattggtaggcggggctcagttggtactgtgcttttcctggtcagaagtgatcagttctgtcctgttctgtgaccaggacagtaaggtttaagcctgacaacacccaaggggcaaataca

SEQ ID NO: 30860 - DNA, 2366 bp, Heterodera glycines
tttattataattatcgtgcgttaatgttaatttagtgcaaataactaggaaatattattttcctcctctactctcgctcgctctcaatttttcttatctctctttctctttcactctttttttctcattactttcaacaatttttctctctttctctgactccgcttttctttatgtgttcgatggcgtcgcttggaaagtgcaataaaccgatgagaattgctgaacatttggttggttgagtgttggtgagcatcgctgaaccggtgcactctaaaacgttgtcggccgaaacgtcgtcggaagactttttgaaccataactttgttcattatcaatcaaattaagcatttttggttatcattgctggtggcactgaaatatatttgatctcttcagacttgaccagtgtcccaatgtcgtatgctttttggctttcagcgttgacctggtttactggcttcccttgctttttggccaattgggccctgctttgtcttacaaatcgcagcccagtgtccaacattgccgcactttcggcattttgagtccttatttgggcactcattgtttcggtggccattcctcccacatcggtggcattgcatttgctgcgtcggtgcgctgctctttcttcctcgctttttgtttcgctcgtcttcgtttgctgactgcgccaataacggttgtgtcgtcaacagtcaatgaaataaatattgatttatttcaacacaaataaatataataataaagcgaggagagggagcgggtcacaatataattggaataaaacaaatgaatgtggggaatgcacggaatgggtgaaaaggggggtttaaatggacaacacgaagcggtcaaaacgatgatcgataaactagcatctgttggcgttaattaaaataattaacgaacacaacagttgtgtatattaatcatgatactaaaaatttttaaatatcaataaaacacaaacaaaataaaagaagactttaggtttttctaaattgataaaatcataaaataaaatgataatacaattcatcttgttttcaaataaatttagctattgagctcagatttttaaatattaatttacagaagcgaaggaagagagcgcgtatcaaaatatgaatgaagacatagcttggcaagaagaaaaataaagttcaagcaaattattttataattgtaattttattttataaaaataataataatttaatggctgtaaaaggaattattatacctacagaaaatttaaaaaaataaggctaaaaaataaataaaagaaagatgaaattaaagtcgaaaaaaaatattattttctatacaaaatgaaaaaaagtatacaaaattattattttttaattcccacattaacgtaaaaattttgacaaagcaatatgataattgttgtataatattccgaatggtaaaatgtaacaacatgatcaagtacagcgagtttaagttagaaaggataaatcacattgcgtaagccaatttataaatttaattggattaaaataaattataaatttatttgaaatttatatttgaaagcgattagacaaataaaaattaaaacatatttacatggcaacattaaatgaagttagtaattatttaaaaatggaaatactcttaaactatatgaaagtttacataattacttcaagggtttgtgatttttatgaataaaggataagaaattatgaaaaagtataatttattacatagaacccgcacttaaaaaggaagttaatttaaccaattcaaattggattaaaattatttggaaaaatattggaaaatgctaggataaaaaaaataattaattaatatcaaaatattttttttgttgtacatattttgataaaaaccattaaattcaaaagaatgaaaatagaaaataaataaattcacaattgggaaaatttttttatgaaagattatataaataattcataaaattctattttggataattaaaaacaaaaaatgatatcttaaaattcgactggatagctgaacaaagtttaaaatgacctcgacaacttgttgtatatggattacaattcttattcacattagaaatttgctaatatataacataaaaacttatttttataatgagaagaatgaaaacttagaatgcaaattaaatataaaactattttaaagaaaggacaaaacaaaatgaaaaaaaatataataataaaaaagaacaaagttttaaataaatttcttccgaatttacattcaagaaagtcactttatttttcatgctcaaaaattttcttattgaatttttcttcaattcctattgagttgagagcctggccgtttgaggagttggatga

SEQ ID NO: 30861 - DNA, 1056 bp, Heterodera glycines
tttttcagctaacatccccccccccgcagcggaaaatcaaaaattctttccttttttgtaacaatgtggccgaccgatggtcaatgcgtttgttgtctcgttatgatggtggtgcgggtgaaaattttgtacaacataatgccaaaaaaagggaaaatgggcttgaaatttttttacgaattttccaattcattcccttaaatttacttttttaaaaatatttttaaattgacattaacttttttttattgtcaatggaagagttttcacattttttggggcgggaaattaatttttgagttctaagcctttttcgactgaattttaagcaatatttaaatttaccaattttttaggtttatcaagctttaaccctggtttttaaggtgcttttagaatggggcctatgcttatcttaaatttatttttaattactttttaattttttctataaattttttaaaattattttttaaattgagtactttttaatgctaatgaaagaattttcacagtttttgagattttttgggactgtaaataaatttttgagttttttcaactgaattttatttttatctttaacaaggcatttaccccggttttaagatgcttttagaattggtcatatgcctattttaaattcatttttaattactttttccatttttctttttttgattccccctaattgtacgcgtgtaaaatcgagttgttagtaaataatgcccaaattatgtgattaaattgattgagtggcagaatctttctgctgctggtaattaccgaatttttcacaaccaacacaaaaaaaaaatttttaattttccattttttttatttttcacattttttcggcgccaaataacgcaacataaacataaacatgcacattgtgcttggcttggcttgaaccacgctcaacagcagaattacgcctggggcagcaactgcctgagtgggtggcggcggcgctttacgcccggatggcccccgggggcacaaattggcggcgcgcgccaaccatttttggcccccgcggccccggggctataa

SEQ ID NO: 30862 - DNA, 890 bp, Heterodera glycines
agcccgttcatgattgagaggatgccttcaaaaagttacaataatatgatggttaacgagatgggaaagcatttttgagggaaaaaccggaccaggttcaaagttcgaacctctagaccttcgttaaaccgatttgatatggagcccgaatataatggaactaaaactgtgatagtaatattaatattaggcaaaaaagttggtaataattaactttgtaaaaaacaagctaaaacactaataaaataatataaaatttttattattaatcataaaagaatttttataaaaaagtaagcctaaaaatgaggataattaagcctaaaaatgaggatattaacatttaattaagcattgaatattggtcaccttctgtttaatcccttcctttttagccaaatttttttgtgtgtgacgtacttaacgattaagtaaattattaaaaataggataaacaatgaaataaagaacaaagaattttttagcactatgactggtcccaattaatttaattctaattagggatattccatacagagtcgcatatccgtgaccgtattcttgctttcgcgttttccatcacaaaaatgcgttaccgtagttcttgcaaaaaattaaaaattcaattaatcactggtctattagccgttaattacggccagctgattttgcaacccttcaccacaccttgaggaaattcggtgcagaagaacacactcagaaggaccaacagaatttttgtggtccgatcagattgggctgaatgccgtcggtatgccaatgttgtgccggaacacattagcttccgttttcggcgattcttctccagctcgtacagcaatgccaatgtgaacaacagtagcagaacacatgggatcaccttgaaaaat

SEQ ID NO: 30863 - DNA, 1737 bp, Heterodera glycines
attactagggctgggatttttatgttttaacatattttttttgcggcttagttatggcgagagaagcccaaaaatagcattttctccgaacaattttcgaattagagcgacttataaaaacataaaaacacatatgttggcattttggcatataaataaatatcgcacatatttcggggtttggcacatattttgcacatattttggcatttttgaaaaaatatctaagaaaaacacaaaaaattcaaaaatgcacccctaaaaatcaactttcttcccatttttataggctctttcaaaatttctttatttatttcgtgtaccgaaaatcgaattcttcattaattcgttactggatatcgaagtttcttgctggcacttactcaactgatggaaaaattatctttaaaaacaatttatcaaaaaaggactaattttatccccaaacacctccaaatgttttttatttgcaattgtgcgggcaaaaatgataaagaatgagttttttggaatttttatgcaaaaataccattggtttttccaatttttagcacatattttgcattttttaacacatatttaggcctttttttagcacatattttattacatatttcaggatttttagcacataaaaatcccagccctactaatcgcataaaaaatggttttaaaaacagaaaaaagagaagaaataatacgattgcatttcggttttattattgttgttaataatgcaagaccaaaagttaacgggggaacgttttattgaccgttttttgttggattatttttcacaatttttgcgttatttaaaggccaattctttctcattttaaacaaaacttaaattatcaaataaaatattgaaattgtcatttttcttcttcaattttgccgcattgttctttttcaatgttttttggtgcgatttgaaattttaaacttaagcttaaaaacttctaatgatttaatttcaatttacgttatttggagttaaacttagctttaaactcagggtatttcaataaaaaacaaatgtttggtggctttatcccccaattttatagtgcttttctgaagcgggcgtctcctgcggcctcgacggagtgtgccgcgatttcgctaagaatggcgaggacaacgtatgcaaaaactgcaaaagctgcacactgttgtaacaaagtgttcacgagtccgtacgttcagtgtcaaattccgggatggcgtgccaaagggtacaaaggcaatgtgccggtcattatcggagtgccaaagaagcgtgacgttggtatgccaatttcaaaaagcaggatgtaaaaatgtcattttaaatgcctatgaattcttttttttcattcttcctctccacttttgtaacattaaatgggattctcattaaagggccatttccttttttagctcaatttgtattttccagcacatgcttaaattacctttcaaaacgggattctggttcacaatttaaaacaaatttatttgttttcgttgcaaagatatggaaatattggaaaaacatttagtaaaattaactaaaaattctaaaatatttattaatttaattttaaggctgttccaatagcaatccgtgcgcaggaaatggctacaaatgtgtggcctataagaagggggacgacaaacttctgctggagggtccgtatcgttttggcgccgacgttttggcgccagcacgagttttcggactataactttttt

SEQ ID NO: 30864 - DNA, 1115 bp, Heterodera glycines
  unsure (1)..(1115): unsure at all n locations
agtaaatgaagtgtttgtttcgtgtctaaagtatanaattttgaatagctcttttctcgtttttgtnggnaatattcggcttttcctctcccctacttaaaaaagattcacactttccgaccatttgtccaaaattcgtgtaaagtccaaaagtgtcatttaattttggtttgcctctattgcagtttacatgtccaaccgttgaccacacactaatctttttcttgataaagacctacattcttggtacttttctaaagtttaaagtctacaaagtttttgtaaccaatttgtgtcaaagataataaacaaaaaattatcgccgaatatactcgaaaagctgactttggatattctcattgtgtttttcttgtatttaagattccctaaactttaatctttcagatgtttgtggcctaagaaaataaggatggtcactgattaaacgcgtaaaaatcgtttggcgagtaaagcctttgggttttcacgccgtaaagccattaaattcaaaatcccccccccctctaaaaaaactcacgtgacgtaagagccgaagttccgtccgacgatgcaatgccatgtcgggttgaacttcttgtcaaactcctttttgatgtacgcagcgatgtccttctcaatgttatacctgacaaagggaggacaaattgcgcatcgaaaagaaagaaaagaaaaaaggcggaaacacttaaaacactccaatttttgttttccaagggaatcgttggggaaaagtttaagcatttccgaagagcaaacgaattgctaaaataagtaaacgcacttctccaaagcctgcgtagcgcactcaatggcctaaaagggaaatggaaatgaataaaatttaaatttagtaacggataaattcaaatccaatgaaaaattgagcttttggttaaactgaaaatgattatttttgggggcctttgttttatttttgttacaaaatgcgatactcttttggaaaatcctccatttttcattattctcaatttgcttggtccgacctcctgctgcatctcttcggtcatatccgcgtttttaatcaccgcctttctgtcgcccataattacggaagaacaaaatgcaagcgaacg

SEQ ID NO: 30865 - DNA, 933 bp, Heterodera glycines
tcataattcatgcccggtttgtttttgtgcgctccccacagcttggacacctttttgttgtgggaaataacagtgaaaatttctgatcagaaaattttctttaatcatcgatgagtgagaatgttcgctaattagtcaattagtgtacaaattattcgaaagcaatttttttgccagtcgtccaaactaacgtttttcgaaatcttatgatgaatgctgttttttcaaatttttcctaaaaatcgctgaaaatataccaaaaatttatttcaagaaatctaaaatggttttgcatatgtgtatcctccatacactcactattttggagtcgatcagcttgaaaatgcctgaaatttttggggaaaaaatatttttctgccatttttcgtcaggtccggtccccaacgaaacagacgaacgcttttcctcgtcaagccatttgatgtagcggggacagtgttccttgctcgacaaaagatacagtaaactaaagcatggggcaaaaggcattcgtttcaaaaaatatacaaatttaaaaagagatttaattattttaacagcacttacaattcccacaaataagtgacgtgacctgaaaatgagtacattcatttcatgggtgattctggcagttcaagaaatctacggcaaattcagaggcccaaggaattcagaggccaaaaaaacaattcacaaatccggcattttgcgtcaaaaaatcacgggatttgggactccaaaaattctctatttaaaaaaaacgtaaaaattttatagcaaattttgttgtacccgtttttttacatttggacagttttgaaatcaaaaaactcgaatttcgtcggattttgtaatcggaaaccttcactgattcaaataaattaattcatttttaggtcaaaatttaattaccctctctgccgccgtactttt

SEQ ID NO: 30866 - DNA, 1953 bp, Heterodera glycines
aagtaatgggcgagtcaaccatggccaccgtcgcattacgcatgcttgcatttcgtatttgaagcacacgtccatcaattcccggcgcatttgcactgcgagcatcggattctttcttgagactgtttgcagttgttgaacaatgcatcgacctgttgagacggtaagttcattatacgtcatactgtgacaataatatttctaacaatgaattcgaatgtaattacttcctgttacttatttacgacataatgcttctcggtatgttttgaattcggttttggggatggtggcaaatatcgagacccaacgtaacaaacccaccaaatgattcggctatgtccgagccaatttctccgtccggctcactgctatccctccgtgcgtctgatgaaattctccatccgttggagaagtcaacggatgccgaagactgatgcggttggtcagttttgcattgcgaaatgatggaattggccaattgagagggcgaataaacggggaattcgttgtcccgcttgaggtgttccatgtcagaatttacttaacgaaattcctcaaattccttcttgttttttcattatcctcacatttgtccgttccgatattgctgctgttgttctgcgctttgattgtcccaagtgcggtgaccaaatcggcagttgacatcgctgtcccaactccgcccgtcattggtcccatttcgctgttcttctcccgctccgtgtcataatcaatggatctttgacgctgaatagcggtcgatgcgtgacaattattcaacatctgttgttgttgttggaattggccgagcaaattctgtgaagttttcagtgcagcaaaattggccattaaaaagtcttgagtggtaaacggttggggcggtgtttttgcacgggtagcagtggtgggaccgttcgtttgaactcttcaaaaataacttacaaataaacaatgacacaaagtctcactcctgtctctcagccattgctacgctattcttccggacactgcgcttcctacggactttcggcaacgccgtgacggacacattcgattcttttcctggtgaactgtgattcaaatgttcttacggtacattgccattttgtgcttttcggtcttacccctgctcttgattgccacattcactctccgtcgatgtcggttggtgcgcgagttgtgcccgaacgccgggcagcaaaaactccattcgcttccaataaggccatgaaatggtgttcagctgcccctcgtcgaccgttctcccgcctccttcctccaacaatttcttcataatgcgcgtgaaacagtagcgcaatttgccccattcctcttggatttgtatccctaaaaaatgtttttttcttttacccaaattcaattatccctactcgaaaatgtttcaatgtcatccgaaagaagtacggcgacctcattgaaggcggactgacgcgactgattgctgcggaatccctcaacattgcagtcccaaatttgtggcctttcgtggatgtaatctttatataactcaactatagaggcattatcacaatcagtgaaggattgaaaaaaatggtgaatgtcaaaggcaaaacagtaaaatggaatacagtaaaatcaatcggttgaaaatttaaacaaaatttattgactcaccgatcagtcgcattttctgctccatattcaatgcaatactcgcccgacaactggtcttgcgttttctctgttgtgcaccgaattccccatcatcttcctgttgcatttgctgttgttgttgaagttgtaaatgtttttgatgttcaattgcaagtgtttgtaaaattgtattagccattaaaaattatgatgaacgacaaacctagacgcaaaatgtaataaatttttaaaaataaaaatccgcagggaagaatgataatacataccataaagagtcaaaacaaaagaaataag

SEQ ID NO: 30867 - DNA, 1597 bp, Heterodera glycines
  unsure (1)..(1597): unsure at all n locations
ttcttattacattgtattttttataaatttatattttatatgggaaaatggcaacaaatcaggaatttgtgccaacgcgctcaaaaaatttcggaaactggaattgagaggctaaaaaatttttggcaatcggaacaccggcggccccaaaaaatttcgcagtctgcggtaatcagcgtgccgacatattcccggacaatacccaacaggtagttgcataagctactatagagtttgaaattttaaattcaatcaaacaagaaaaaataaaattaaattaacaaattgtttttttcgtcttttgtctctatacgattatttaattttttgtatgttctaattatggtaaattataagatgatcattaattattacagtaaacaaatatggtaaaagtttaacgttagtttatgggctgccagacattgtgtgttttctatgggtataatatattttgtctctattcatttcttcctatgcatgaacggtaaataccgaaagcactgataaccaaaagagccgtacaaaaaatcagtccgcaaatgataaggacatcgatgattggaattctgtagttatgcaaattgatcaaaatttaaaaatcaatgtcacagccttaagtttcggaattttcggactcatgcgcaaaataataaattattaaaatcaattaaaaagcaatttaaattactcattttgacagcaataacatttttacattattttttttttggaagcatattgttaaatatattatgccgtatttcctttcaaccccctcaaaaggggggctttatttccagtgcggctctaatttagggagcagggatatattttaggaaatacgctaaattggattggaacaaaaatttttaatttctcatttcagggtcaatgaatacccacccacttttcttcataaaatcaaatctattcccgactttttatgatgtgccaaagtgagcgaagtccagccataaaatggtccatcaatttggccatttgttctctgttttcatcgttaaaagcttgaaaatcggcaattcttctgaggcttccaattaaatttgggtcaaaaatgttcaaattttgcaattcttttatgattggctgcaccaaattctgtgaaatttcctcaaaacttttaccattttccaattggtggcaaaaaattgccttaaaattttccattttcacgacaaatttgccatatgttttgttatcactttccaatttttgtaaattcttttcaatttttgtattgcacaaaaattcaatggcactcttttgaagccatttgttggcagaatttccttcaaaggcaccagcagtgaaagtcaaattttgcaattgcttaaccattgaaaagggatctaaaatattaattaattttcaaattataaataaatctcaatatttaaatttttcatttaaatctttagttaaaaaattaatttcacaatttttttttttgaataatacttntaantgataatnnatattctttttttctacctaantgatgagagaatatttctttnattgctaatgcgataaaaaattagaaaaatcgaaaaatgaaaagccatttaaatat

SEQ ID NO: 30868 - DNA, 921 bp, Heterodera glycines
tgggaggggaagagtcaaaaatttgaatcgattattccttaagaatggagggcggcgcgggcaagtggtcggatggcccttgatgttcataaggtgatgcgacatttgcggcgctgacacttgcggcgccgacacttgcggcgctcagtcaaagcgacacttgcggcgcagacatttgcggcgtgacacttgcggcgccgacacttgcggcgacgacacttgcggcgccgacacttgcggcgcccagtcaaaaggacacttgcggcgccgacacttgcggcgcccagtcaaaaggacatttgcggcggcgcaaaattcaacgaccccaaaaatatttcaacaatttatttccattaaaaacattgataatgactctctcagtcccattcttcaaagcctttcatccctaggcgatattgcaacgcatgaatgtgattaattatatcagcttggtttttgttttccttatggtcaaaatatatgcggcggggatcgcaacatgctccactaatgtattcaccgtgtataattgaaggaaattgggaggcgtcacttaaaaattaaattcccaaattgaaacaggttttttgtggcccggatttatgtttccaaaatgattgaagtgcattaatgagcaataaaccaaaagaaataataataaatgttgtaaaccaaattggagtccaagggtgaatgggtctttttatatattttcattttttattttctgaattgattacttttttcaaaaaataacttatttatttttggtttttttggagtcttaaatttgttaatctttatttgactaaagcttatcttattcatttttattaataattaatttcttaggtggcataacagagttataaaacgtttcactaccccccacccagcatttttcaaagtataaatgagtac

SEQ ID NO: 30869 - DNA, 1215 bp, Heterodera glycines
ccgccccccccgcccttcagagcacgacaaatatttcaacaaaaatttttaaaaattgactagagcaatcgaacgctaacggacgacctaatggaaaaaaatccccgaaggagagaatttaattaaatccattccttcgggggaccgtgccgggtgccgcggggtaagcagtgctggttcgtttcatcacggcaccgaaccttttggctagtcagcaatcgttgcttaacttgccagatcggacgggtgcgcatgattccactgttccaagcaccccaccaaaagcaaaacgatataaccaaaatataaggaaaaattttttctccatcttcctttttgatactaaagcatcagagtgctaaaattaagttgtaaataaaattttggtgcactttagagcactttctgaaaaaaatatttatgaaacaaaaaaatcgattttttcaagtgtccgtttggggtactcaaacatttatggggagcaaaaatccaacgcagaattaaagtacaggctatagggaagctattcccgagggattcggtctccccataaatctgggcgcatcggttcggggggaatgccccgaaaacaaaaaatcgattttttcaagtgtcctttggggtactcaaacaattatggggagcaaaaatccaacgcagaattaaagtacaggctatagggaagctattcccgaaggattcggtctccccataaatctgggcgcatcggttcggggggactgccccgaaaacaaaaaaatcgattttttcaagtgtccgtttggggtactcaaacaattatggggagcaaaaatccaaagcagaattaaagtacaggctatagggaagctattcccgaaggattcggcctccccataaatctgggcgcatcggttcggggggactgccccgaaaacaaaaaaatcgattttttcaagtgtccgtttggggtactcaaacaattatggggagcaaaaatccaacgcagaattaaagtacaggctatagggaagctattcccgaaggattcggtctccccataaatctgggcgcatcggttcggggggactgccccgaaaacaaaaaaatcgattttttcaagtgtccgtttggggtactcaaacaattatggggagcaaaaatccaacgcagaattaaagtactcgaaagattcggtctccccataaatctgggcgcatcggttcggggggactg

SEQ ID NO: 30870 - DNA, 1628 bp, Heterodera glycines
cgccctcggattgaaggaaactggtgttggtgcgggccgggtggtcgccgcgcgcgtacaaagtacccggagtcggtgtcgcagtacagcatgcggccgccccgccaaacccgccccctccctcaccccgcccgtgcagatgaaggcgggcgtgcgcggtgacgaagcaggcgaccgccaaagtttgtggtgtccggcgcgcgcacaaagggccaccggcgccgcaccacgcaccggtccagctgctcgttgaggtggacaaagtcgaccacatcttggcgcgggtcgcccaacagctcgtggaactcgcgcgcgctgcccgtgtagcacacgtcgtcccgctccgcgcgctgggccagcttgccccacagggagttcagcaatgccttggcgaccgcgcgcagccccgggttcggctgcacgcggcccgcctcgagtcggatgccctcccggtccgcgtagcgcgcaacgtagcgcgcgcgctgctccaccgtctggcagtcggccggccacccgctcgcctccaccttcagccggagcattgtgtcgacgtagccggcgaacaggcttttgcccgcctccaggctcgcccagcggtcgtagtgccacacttcgtacagcgccagcaccctgtagccgagctgtagcgccgcgttcagctccacatcggtgtaggcgtgcgtccaggcacgttgcgccgcccggtgtcgacagcggggcaccgtccgatggtggcgctgcaccttcttgtccgcgttggcccactcggcgcacgcggcgcacagcggaaaagtcagccgccccgtgcgcgtccggtagggcaacagggcgtggcggtcgcccagctcggcgggcaagggcggcagcacgcggcagtggaggaaaccgcggaaggggttctgctccgcgctcgtccacggcaaccgcacccccgcgtcgcggtcaagctgctctgcgctgagcacccgcggcagacccacagggaaggcgcggtacttcatcacgaacgggtacagcgacacctttacaagcgggggagagttgtgagagttagcacagccacaccccccccccccgccccatcacttacaatgtccaatgcgtctatttcctctcgctctgtggacgtgtagtggagcgcgaacggatccactcggtcgccgaacagcgcgtgccggggcagggccgtcgggccggggaccggccggtgcatattggagtaccggaggcgctgtcaggtggcatggcgggggatgcactggtgagaggggcactcccacaccgtgttaccagtaatgaagaggagctgctctatatcatcagtgcatagtggagtccagtactattacttttcttggatttcgatgcttactgtacatagaggaatatgggaaatagtatttaacatttgatgaaatgttattttatgaaaatggctttttcttgcacgttactcacaccaaaagtgtcttatttcaactgtacataaaacgagttggagattaaataaagaatatttggcgagtaatttgatagctcaggctctgctctttttaatgaatctatattttgtcggatgggtttagatttcgggactatttgggttttttgtgggggactcatttagg

SEQ ID NO: 30871 - DNA, 1195 bp, Heterodera glycines
aaggggggcaaagaaaatcttttaaaaaaagaggttgccctaacttgggcccaggcctgaagttccctggttttccttggcctggcgctttattcagaaaaccaaagtccaagcttttttcaaagttcgactcttcaaaaaaaaacaattccatttggtaattatgcggagaaaagaaaaaagaaaagaagaacaaatatttatttggcggaataaaagaaatttgtttgaactgtgtgcccttttcggtgtcctccgccgcgtgcatacagtaggagcaaaatcgaaaaaccctatgtctttgtctctcttcccttttctctcttgcgctgcctgttccttcctctctgtctctctcgcactgtctctccccttaactttttctcttactgcctgttcatttatttttctctcactgcctctccctacacactctctctccctcactgtctgtctttttactttctctctctctcactgcctcccctttgctttctctctctctctcccgcactgtctctaccttcgttttctctctcttgcactgtctgttcctttctctctgtctctctctcactgcctccctctccctttgctctttctccctctcccactctgtcccattttctctctctctctaagttcaactaaaaaagagacaatgcaaacataaaacaaaaacagtgattggaatggtgtgccaaaattctttaaattttcccaataatttatttttccactccctgcagcacaccttcagcatttgaccgtttgaacgcactccgacaaaatcctgcaaaatgtacacactcatttaagaggacaacatttaaaattttgaaaaaaggaaaaacttacaattagcccatgactacagtatgcccctcaaatgccatccaaataccccccccccctcccctctggaccgcctcgactgctgacgcccactgttaagcgactgagtgcacttatttatgggggtaattagcgcgctaattgatgagactgaccaatttcgcctcgccacacccattgcagcgggcgtttgcacttcgcttccggcacgttgtgaatgcatgccatgcacacctcctcgataaggttagtctgaatgatgttcggaaacattgcgccgacgtccgacaagtggcaaatgtgcgggagttcggtgcgcaacggtcgctcaatgagtgtc

SEQ ID NO: 30872 - DNA, 1492 bp, Heterodera glycines
  unsure (1)..(1492): unsure at all n locations
atttatttgatatctttcaaatattttatgggattttcttttaatttcgtataaaggtttatttggaaatgattacattgaaataagaaataattgcataacaaatatttgaataaattgtgatataatcaaaaattaatgaatgaataaatgaatattttagtggtttaaaaattatacaaatttgcttctttttccgtgaaccaaaaatgtaggaaaagaatcccactgaatatggggaagaagcaaaattaaaaattgaacaaaaaataattggcaaaaacattggaaattttgtcaaaaaagagacgaaaagtgaaaatattcaggaaaataacaggaaaaagataaaaatggaagaaaaagatgaagaaatgtcgcaaaaatttggtcagccacaaataaaatgggaggaaaaattttttaaataaactgaaatgcaaattaattattattaaataaaatttgaatttttcgttttaaaattaaaatttagagaaagattttggaggcgaaacaaataaaataagaagaataaccaatcgaaatgatggccaaaaaaagcaattagttgagcaatttgaggaaatgagaatgccttttcagcgcgcgggtgcccattcaacgagggaatggatgaaaattgagagagaaattgccgaaaagattggcacttcccttacatcaatttacagatggaaagcccaattgggcttgaccagtaagaaaatttgtatttaaaaaatgtaattaattaaactaaagaaagataaaacgctaattaatttattttaaaccagaaaaaaaacactgatgaaaacagacgcaaaattgtaaacaaatatatgaaactaaaaaaagtcatcgctggtaaacggagaagcaaatagtgcgcaaaaggggggaaaaatttcaaaagaattggcaattcataagagaccgattaaaaaatggaaagcaaaatttggactaaatgataatgattaaaaatacataaaaataataaattaattaatcaattgaaaagaaaaaacattttgcagagaaccgtcgttacaatgtacacaccagggatgggccaaattgaaaaataaaaagcgaaatgcgaaaagcgaaatttgcgaaactgaaaaatgcgaaatgaaaaaaaaagcgaaatgcgaaaagccaaaatatgcgaaaatgcgaaaagcgaaatgcgaaaagcgaaattttttctacaaatttttaatagttaaaatcataaagcaaaaatcatttttttaaattttattccaaatttaaaaatcaataaaacgctttattgaggcgcgctttttccaaaaaaactttttgggaagagggngcaaggccgcggccggcaggcgccgcccgggaattttttgaaaaattgattaaaaatttgattttgtgacagattttcaccaaaaaatcatcaaattttgtgatttttgtatcatttttctaatgagaaataagagttttggcgcgc

SEQ ID NO: 30873 - DNA, 767 bp, Heterodera glycines
  unsure (1)..(767): unsure at all n locations
tgcccctcgaggtgcgcgagcgaggagcggagcgaagcggagcgacgagcgagtgtaccgagtcaatacgaacctgatcaattcttttgcatgacgcgtagggtggggtgggggtgaacggctaggctaggctgttaccggtagctgctactgcacgaacatccagacacgcatctgcgcctgagctgctactgcactaacaacctgacgcatctaccccgttactggctacaactcgacgggatagcctcggctttctataaagcgcagccatctaccgggacgcctagttatctatatataaaaataacgggggggctaactgctttcgggtttgttggcaagcgaatatcgagagttgagtaacgagaccggtaccattcgaaagctctatcttttctgcacattttgagccgcggattgtaaaatgtcacaacacttttttttcgagaaaatcgcgtttgaacaaaaaaaacccggctttttacaattggccaaaaatgggttgtaaaatgtgtgttttcaccttatttctcaggaatcgtaagagctacgcttttgcggtaagcgaacaatttgtagagctcgtcgagctgaagggtgagaaaaaaattttgtagctctacgacaaattcgaacaaagttataccccggcaaaggtcgaaaaaagccgattttttttgtgagttcctcttccggtttccaatccgtttncaattgccttaaaggcggaatgtccggaatttcgaccgaccggatggattttg

SEQ ID NO: 30874 - DNA, 1346 bp, Heterodera glycines
tgatccgcctcaaattgacttgctcaaatgtccgtttccggcgcggtcgagaaatttttaattatccctaatccccccccccccccccttccatcaccccgccccagttcaaatttacaggaggggggagatgtgagggcaaaattttgcccgatgatggaatgtctgaaatgttttgtaaacccattcatcattaaacaatatttgtgatttttttcaattttcttgcctacgcaattttacgaaagacgctccaagcattttgcctgtgccgaagtacgtgttgcataaaatgtaaacaaatttaaattagtggtggtgggctatataataatttataaaaatgaataaattttctcgaaaaattgtttgttttttttctttatgatttaaaaaaacattacaaaaacctcaaaatttcaagaccgggcggcgtctttggatcatatttttcaaaaaaggctcagcaaataatgaaaaagtaaaaattttttaatcagtttaaaaaaaacaaggaaactgcatagaattttaaataattgaaatgaagttgaaattaattttgtaaaattctctaccaagatttttgtgttgaatttgcgtttttattatatttaatttgattcaaataattaaaatataaatcaaaaattacattattatctgcaaaaccctatctcgatcatttggtcccggtagcgatattgttagttatttattaagagagcaatttctccattttgccacttttgacgacatatttggataaaataccaattccaagcccagcaaattcattcaatgaaaagctatgggtgaatcggatagatcattaaattaaattttgaaataaattttaaattttctttcttttattttggcttaagaaggagacaggttcttatttttctataataaaaattttttgaaaaattgtttatttacttttttttttaaagttgttgatagggtgcaaagtagggcccggattcttagttttttaactgttttttctgcgcctttaactcgacgagaaatgcacgaaaaacacatttttagctcggaaattcttcgttttaacgccactattcatcactaggaatcactattttggagcttcgccactaaaaaaaactattttggaagttggccactaaaataattttttgccactattttggcgtttcgtcattatttttgccactattttggcatttttggaaactttaccaaaaaatgcaataaagaagaaaaattctccccaagaatcgacataaaaatttccaaaaatacacccttaagaattggaaaattttcacaaagaattcttccccacaatttttttt

SEQ ID NO: 30875 - DNA, 1120 bp, Heterodera glycines
  unsure (1)..(1120): unsure at all n locations
ggtaatgaaaaaaattttgaagaggctctcgggacggattagcatcggggtacgagatagaaatgtcnntaaaaagagatagccattnttctgagaattaattcacaatttccgcagctcttagggtaatggaaaaaattttgaagaggctctccggaacggattagcatcggggttacgagatagaaaattgtcctaaaaagagatagccatttttctgagaattaattcacaatttccgcagctcttagggtaaggaaaaaattttgaagaggctctccggaacggattagcatcggggttacgagatagaaaattgtcctaaaaagagatagccatttttctgagaattaattcacaatttccgcagctcttacggtaatggaaaaaattttgaagaggctctccggaacggattagcatcggggttacgagatagaaaattgtcctaaaaagagatagccatttttctgagaattaattcacaatttccgcagctcttacggtaatggaaaaaattttgaagaggctctccggaacggattagcatcggggttacgagatagaaaattgtcctaaaaagagatagccatttttctgagaattaattcacaatttccgcagctcttacggtaatggaaaaaattttgaagaggctctccggaacggattagcatcggggttacgagatagaaaattgtcctaaaaagagatagccatttttctgagaattaattcacaatttccgcagctcttacggtaatggaaaaaattttgaagaggctctccggaacggattagcatcggggttacgagatagaaaattgtcctaaaaagagatagccatttttctgagaattaattcacaatttccgcagctcttagggtaatggaaaaaattttgaagaggctctccggaacggattagcatcggggttacgagatagaaaattgtcctaaaaagagatagccatttttctgagaattaattcacaatttccgcagctcttagggtaatggaaaaaattttgaagaggctctccggaacggattagcatcggtgttacgagatagaatattgtcctaaaagagatagccatttttctgagaataattcaca

SEQ ID NO: 30876 - DNA, 1288 bp, Heterodera glycines
  unsure (1)..(1288): unsure at all n locations
tgtttgccgctgtccgtctttgtcccgctgctttctcttgacgccgggagcggnaaaaacggcacccaaagcccgagtttatgaacgngccgaagcagaagcggaactgaacgganaancccacgagaagcaacaaccagacaaaancaacggctcaaacccaccacggaaaccgggcgaagaaagaaagcgcggcggaagacggcacaaaaacaaacgaggnaacagagaaacaaaanccagaaaaaggnacaaacaaaaaaaaaagaaaaaaaaaaccaaaaaaaacaaaacatatcaaaaaaagccaaaaaaaggggcaaaaaacaaacacaaaaagaaaaagcacagaacaaaaccccccgcagaaaanagaccanaaaagannncaaaaaaaggtcaaaaagagtgcaaaaaaaagaagaagcatcaaatgctttctttataaacacagctcccataaagtgccatcacttttttttgtttccaaatggttaaaggcgctgaaaagttgttggaattggtcggcccggtcggtcggtgtccatccaaccgacccatccgtccccgttaaattgacaccccggggcatgcaaaagcggcacaactgacaaatcccctgtggcatttgcccccggcgggcgtcaaaaacactcggcgccgccaaaagtggacggacaagcacacaaaaagctcatccattttttgtttgaaaccggtcagaagaagcgatattaacacagctaaacacagccgagaaaagaggggggaaagtgtaataagagtaatttaaaaatggaaaagatacatttaaattggatttcaggactaggaaaagtggataaccgaaagggataccggagataacaaaaactaatttttgatcgaaaaaccggcaaatccggcctaattgaaagctgaaaaccacgtcctaaaacaaaagacttaagtaaaaatgtcaaattgagaaaaatgccaaaaacattgaaagaaggcggaaagtcggaaaagaataattattaatggattttcattgaaaaagtcacgagcagcagaaaatggcggcactatcaaaagttggggaggaaagaaaatgaatggcaatgaataaaaaaggagggggaatagggaaaatggggaaagaaaagcaaaatggaaaaaagaaaaacaatgcaattttaatgtgaattaaagcattaaacagctagttgaatttaagaccatttaaattttattttcattttcatgccatttttctaaataattcaaagagaattttaattaattt

SEQ ID NO: 30877 - DNA, 1013 bp, Heterodera glycines
  unsure (1)..(1013): unsure at all n locations
tggcgtgncagcgggagaagatgggtgttgttcaccatttggcggcgccggaggcgatggtggcggtgccacccgaacgcgngatggcatgcactgcaaaatttgtgatcgataatntaattcagttttttttttggaatttttaatagattactaagaaaatgtttcaatattttcattcagtttcctctttccccttttcgcgggtacgccagcgtacccggtacccattatggcatgcatgcacataatcaaggatctttcatttttcagggtttaaggggggagggcggtttttcagggagggtttgaaaaggcaatttttggcgttttatgtcacaatttttttttaaatatacaatcaagcggtttttttttgttgaaattttgcccggaacagggcccgggtaccctcgcttcaaaagcagcaaccatttaggcattcttatgtcattcttttttttgcccaccattttcggcagtggcgcaccccatttggtccggcgtcaatgttatactcagctcgtcggactgcagttcgcacaacaatttgtgcgcgtcgaccacccgttggagacgttcaagcgctgtccgaatgctgaccggaatgtacacaaacttcaacaacgctgggggcggctgctgctttaattgcaataaagactaacaatatgtatattattaattagctgccgattaggaatttggcgggtgagtaaatctttcagcgatttctttggaaaaattcttgaaaaaacttagtaatttatcgtaaattttgaaaaaatcgctccaaaaatccaggaagaactcactcctgttgaatcgtcaatgttagctgctgtatgaataccagacggggtggtgctgaacccgcacactgtggcgggccgttgctgtggcaatgactggctcaagttgttgttgctgttgtagttgttgatgctcgtgttctacactacctttacaagaattttaatcaatttttacccatttgacctgcagnngcatgc

SEQ ID NO: 30878 - DNA, 1204 bp, Heterodera glycines
  unsure (1)..(1204): unsure at all n locations
aaatgaggagaagccatgtgcctgcccctgttcatgtcttcgtgccaaaaaattctaccgagtaattaaatcaaaaaacaaaatgaaaacaaataaagtggagaatttaattttgttaaagattgagtgtgacatgatgaaccgcactaccaaaaggtgggcaaatgccggccgtgttacgcttgggctgctctctgctccgctactgtttgttcccgggctaaatactctagttgttgagccacaactgcagttagtgggacaaggtactgtaacgatttgtgaggtgtttattattgcaattttaaaatatgttaggtttgctccatttgctgacattttggcatttttcggggataagttccccttccccgagtggtgccatccccgtccccgagtggtgccatccccttcccctagtggtgtcatccccttccccgagtggtgccatccccgaatccccccattcctccatcccatcaattgcatttttctgcacatggattctaagtaagtgccaagggtctggctacgcccttggcctcctcctcttcgtccctgttgttcttcaataccgtagtcatagaagtccatgaactcgagaagcacatcgtcctgctgaaatgttttattgaaaatatacgtggaaaacggaaattgccttatgtagtctgataaaggagtgacttttgctacgctaagcttaataccttatgtgtctgacaaaccaccaaacgattatttttaatctttcgccccctatcccaccgttccacccgcccccggatgtcccccacccatatcatttgaaattttcaaaaaaatttcagcagttttttgggaatatttttcgaaaaaacttgcaattcatcataaaattttgaaatcgtgagaaattatgtataattattttcttgaaattataagtttccttattttttgaaaaattcctaaaattttaaaaaaagttcgagagtttataaaatatttaattaagctttcgattccatccccgtgcgcaagcaaatttggagcagttcgtttcccccctgttttaattcagaaattggttaatcgactcttggcccgggttattgtgaaatttctacgcctattaaagttgcactttcaaaagcagaggataggagcacagaaaacatcgaaaatttaatgaattccacccaactttccaaaaaanntatat

SEQ ID NO: 30879 - DNA, 1528 bp, Heterodera glycines
aaattctgtttacacaatgttcagtagtttgaataaaagcatcttcatcatttatttgtggaagagttccctgtaaaaattatcatattatcggtttattattaactcacttcatagtcgtttcatgcttttagcagttgttcatctaacattcataattagtagttaaggaattttcggccaatctgtactctatcggcttgttcggctttaacgttttctaacctttatggtttacattttttattaactcatactttgttagttcgtccacactcatactttttaagcttcgcccacactcatacttttttagcttcgtcatagcaccgaaaaataagggtgagagtgagagtaaagtgaatgagtcaaatgaacagaaagacaaaggaagggagagagagaagagagaaggaggaaaaaagagagagaatgaggtgaggagaggagagaagggtaaaaagatagagagagagagagtgcgcgagagagaaagaaagatggggaaagagagagagagcaagaaagatggggagaagagagagagagagagacggagagtgagagagagatggggggagagagaaagagagagagatacagtgaggtgagaagagagaaaaggaggaaaagaaagagagagtgaggtgaggagaggagagaagaggaaaaaatagagagagtgcgcgtaggagcgagagagaatgaggtaagaagagaagagaaaaagaggaaaaaggagagagagacggagagagagaaagatggggaaagatagagagcaagagagatggggagaagagaaagagagagaaaatggagagtgagagaatgaggtgagaaaagagagagaaagtgtgtggttaggagagaagagagaaaaggaggaaaaaaggagagagagagaaacagttagttgaggagagaaaaaagggggaaaagagagagagagacggagagtgagagagatggggagaagagaaagatagagagaaaatggagagagagagaatgaggtgagaaaagagagagagcgttaggtgaagagagaaaaggaggaaaagagagagtgtgagagagagagagatacagtgagtgaggtgaggagagagaaaagtgggaaaagagagagagagacggagagtgagagagatggggagaagagaaagatagagagaaaatggagagagagagaatgaggtgagaaaatagagagagcgttaggtgaagagagaaaaggaggaaaagagagagtgtgagagagagagagatacagtgagtgaggtgaggagagagaaaaaaagtgggaaaagagagagagagagacggagattgagagagagatgggaagagagagacatacagtgaggtgaggagacagacggagagagtgtaaggtgaggagagaagagagaaacggaggaaaagagagagagtgagagagagagaaagagagatacagtgaggtgaggagagaaggaggaatcgagaaagatcgagagacggagagagagaaagatggggaaag

SEQ ID NO: 30880 - DNA, 1640 bp, Heterodera glycines
ctcgccttttagcgggggcggaaaatgcttcttcttctgttgctgcttctgctgttgttgttcgtgctgttgttggagtgtgtgtgtgttacatggcaataagccttggacagacaacggcggacggggacgcgacgacgcaaaagaaaaagcatccattcattcattccgaaattccaatcacccgggggcatctctatctatctcatccacccgccacattcacccactgtccatgattgaagaaatggaagggatatatcgatatcgatgttcattcgtcctccggctgatcggatggggggggaatacggacacaactcagcagtctttcccggctcgaccctactgtctgcgttcccatccaaggaattttcaattttatgcttttacattattatatcggagattgagattcattaatcaggcattgattttgattttttagaacctaaaaattgcaaaaaacggcgtgtaatagaattacactccaaaaaatccaaaattttgtttattctgtattattgttgcacaacaattcacaattggaatatttgtagaattctgactttttcggaaatataaatttcgacaattgtcgattgtttcattttaaaaaaaagttaatttttaatggatatatttttcaaaaatttggtcgtttattgtggaggatatattttatttttatttgagtaaatcagtaaaaaaaaatctaatcccaagtcatgaaaggatcatctttttagtctttatactgtatcacaaaatatcctattaaagttcacaaacccacaataactactgtataccgtacatattgtcgttgttcattgttttcctatctctagaaaagggttagtgaatggatttgtttgcaatttggagacaattaaatagaaattgataagcaatgttaaagtaatccatgtgctttttcctgggatgaattgtcctatggccaattccgatcaatcgatttaaacacattttcgtttctcttctgtcatttgtttggccaatgttatgtgtatttatctatttgtttatctatctatattcatccattaagccaatcacttttccctccagcagcagcagcagaggcaagggaaaagctgccgtccttaaaccacacaatttcaaagccaaaaaacaaaaacaacaaagtagcaaattgacaaactgagacaagcaacaaagcaatttaaaaaattaattcataaatggcccagcaacagcaacaacaacaacaaccggcggcacaacaaccggcggcagagcaacaagaacaaggattttggtcagaaactaaaaaaaacaaaattttttttttgaaacgattaaatccgtgctgagccgaaccttaaaaaagcatcaatgacattaatatttatatttaattaaaattttatttgaactctgttttcaaataaatttgattaattttgagcacttttaattattcttctgcaaataaaataaaattaaatattactatcattagagcccggatttttaggtttttacctattttttgcggctttgttatgatgagagaagcccaaaaatagcattttctccgaacaattttcgattcagagcgactttttaacacctataaattacctaaaactgga

SEQ ID NO: 30881 - DNA, 1593 bp, Heterodera glycines
  unsure (1)..(1593): unsure at all n locations
gatgaagtcgtcgtgccgcaaccacncggcaattcgccctcacggtacaaaaatcctctttaaaggctcgtcatcagtctctataatgaattttctaccgtacaaatactgtttgaacttctccacgccaaagattactgcgcgtttttcttttttgatctgcgcataatttctttcggctggactcaatgttcttgaagcgtaagcgatcacgccaaactttccagtgtttccatcttgtgcaaaagaatcgctcaaacttcgtcgtcaaatgcatccgttgccaaataaagtgactttttgggattaaaatgggccaacagttcgttcgacgacaacatcattttgtctgctcgaatgctttttgctattgttgtccccaatgccattttctctctgatcgacgtaactcgttcaatggcttcgaaattgttgccattgacggaatgaatttgccataatacccaaccattcccaaaaaggatggcaactccttaaaattttgggggactggcattttctgaatggcttccaccttttccggcgacgtttgaatccgttctttgtcgatgatgtgccccaaataagctatttggttttgcataaaggaacatttttcctttttgacacgcaatccaaatttttggatgcgttcacatcttccatcacttgttggaatattgctgccgctgacgcaacaccataaggcatacgcataaattggtataggcctttatgcgtgcaaatggtcagacattcattggctttattgtccaacattagttaaagatacgcctccttcaaatccagctttgaaaacttttcgcctccattcaatacgctgaacaattcttccgggcgcggcaacgggtattgatggatgtcaagccattggttcacagtgactttgtagtcgcaacacaagcgaattttgttcccggcttttggtataatcacaacgatgttgcccaatcggaagttgtcacctgctccaacactccatctttgacccacttgtcgatgactttctccacttcgggtctcaatgcaaaaggcacgggacgcggtttgcacttcttcgattgcacttccggcttaaatttcagcgaaatttgccttgtgcatcggccgagtccgtcattgaagacctcaccgtactttagaagcaccgcttccagctctcgatccactgccttgcacttgacttcattgatcgatcggattccgaacgctttgttgagatcgatttgcaattcaccaatcaaatctctcccacacaaattttttccttcgccgtcaacgacataaatttcggcattcacttctttgccgttgtacaccacatccgttttgaacgatccaaggactttgatcggcttttttccatatgccatcaatcctgaagtttgtccaagtttcggccttccgatggacatccaatcattcttggtgatgagtgtgacatctgcgccacagtccaattcgaaatctgtcgcctttttactcagctgaagttttatcatcgctggtggcaccgaaatcgatttgacttcttcagacttggccagtgttccaatgtcgtgtgccttttgg

SEQ ID NO: 30882 - DNA, 2437 bp, Heterodera glycines
  unsure (1)..(2437): unsure at all n locations
gctggctgattgtgagctgaagccttcccgaaaactcgataaccaatgccgacaatgcaactcaattcgaaaattttcgaaacttaaagtgatcagaaaatggatcagtgaaaaatgtgtcagtgaatcagaaattctcaaaaaaatgagacacggttaaaatgatgatttgaaatttaggcgttaagtgatttgggaacaagcatacaataatccaattacatacagtatgtttgtcttaggagtttggtcaaatttttttttaaattttttgaatggtttgaaaaaatgaattgacgaattcagaccgagattcttatataattttgacctttgtactacaatacttatgcgacagaacgtgatattttaaaaataattaccctgacgcattgagtcaaatcataatgcggtagaattaaacagaaatatcactccccacccaccagtgcgggcgaaaactttgtttttttcctctttgcaaaggtttttcaaaaatttttgagttggaaaatattacgttaatgcttgtgatggggtgctgccaaaaaatagtcaaaattttgattgttttatttgtttataaaaaatgctaaaattttcagaaatttcctttttttcccatacaaattttcggagggttgtcccatcaaatcactttatccctgcctatatgccctttttaaatgcctgtgaatttcagttggcttcgcttgaaagttggcttcattcggttgctggccatgtgctgtcaaagcccatcactttgaatccaaccgctgctgaaacaaatgaatttttaatgcatttgcgccgcttttcaaacgaaataacagtaaataaatgttacaagaatttatccaggaaatttgaaatttttttaaatcctacgcaattttcattactaattgaccaaaaaattactaaattttccccggttgaacttaacggcaccgcccaacccaattttttccaaaattttatcccaaaacggccaaaatttgtcgaaactggctaaaattttctatttttttcacacggcaccaacaaatctgaaaaattacaatggatgaaaattttttgaaatctcttcgggtacctctaccgaattttttttttctggtcagggcctggttacagcaatggtattccaatttcgatcacaattcactaattaacgactaattatcccactaattggtgtcaatatacagtacaaagagcaacaattgcgctcgctggtttcaagccaacaaaaatcgcaacattttgtgccagcggaggagcaacggttggacgccctgcacgcgggcataagtcgaattcggcaaattgttgaacaaagattgcaaattgggcaaacaatggaacaggtgaaaaagtcaataaattgattttaaattttaattaaaatttatttttatgataaaaattatatttaaatgtgatattcattttttataattnaaatttttctttaatatnnaattaattatttttaatanttgatactcgtgaaattttgttattatgtattttttttatttatttcntatttnaatatatttaattnttcctaattttgtaaaacaaaaaataatctttcaaatttacataaactttttttttatttgtcatttttgcaatattaaataaaactgttttggttataataataatttattttattttttaatataaattatttcttggacatttatttgaagaaatttcttatatttatttaggttcgattttgacatttttacaattaaaaataaaaataatagcaaagttttatttgaagttgcaaaaattgagccgcgaattggacacttcacttcactttctcagcactttgtttaaaagtgaaagtgccaaaattgaatcagaggaacaatgccaaaagcaatttgaacaaatgcgcaatttgttgcagcaagccaacgaacacatttatcgggaaagacaccaaagtgatgatgataattaacatcaaataactcgagaatcctgaatgcctagcaataccaaattttgaggaagtttataagtgtccaaaaaatatttaccgaattaaaaaaaaacggtgccataacacccaaacgatacaatcctcaattttttaggccatgctttttttcttacttgatcaatccacatattcttaggtaatatgaaagcttgaagcctacacaaattttttcctttattttattttattttagaaaatattttctattttcgactcatattcccaacatattccagggtagccaaattcttatggaaatgccaattcaattcatgttaaatttaaaccctataaccatctgagctttgtgaaaaataaaattcaaattctccaataaattttttcttttcagccgataaactgatttcgctggcaaattcggctaatggcacggatgcttgt

SEQ ID NO: 30883 - DNA, 1106 bp, Heterodera glycines
  unsure (1)..(1106): unsure at all n locations
tgttaattgctttttgacccttattcatattttaataataaattagaacttaattttacctaattcatcagacctaaggttctaaaataaacgaaattaattttatattgtcgaaaggacattaatttcagcgaattatttcatagttgttgcacaagtctataacaaactattttgcatgctttctaaaggataaaatattactagtttttgctccaagtttatatagggctaattgtatcgcgagcgaatagcctaatggcgaaacctgcataattaaacgaagcaagtagtaacagaaaagcttcgttgattctgagaggcgaatctcgccaaggattatcgtcctcttttttgcccttggaccattcggggttgtagtgcagaaagaaacaattgcgatttaccacctgttaattgctttttgacccttattaataattttaataataaattagaacttaattttacctaattcatcagaacctaaggttctaaaataaacgaaattaattttatattgtcgaaaggacattaatttcagcgaattatttcatagttgttgcacaagtctataacaaactattttgcatgctttctaaaggataaaatattactagtttttgctccaagattctatagggctaattgtatcgcgagcgaatagcctaatggcgaaacctgcataactaaacgaagcaagtagtaacagaaaagcttcgttgattctgagaggcgaatttcgccaaggattatcgtcctcttttttgcccttgcaccattcggggttgtagtgcagaaagaaacaattgcgatttaccacctgttaattgctttttgacccttattcataattttaataataaattagaacttaattttacctaattcatcagaacctaaggttctaaaataaacgaaattaattttatattgtcgaaaggacattaatttcagcgaattatttcatagttgttgcacaagtctataacaaactattttgcatgctttctanaggataaaatattactagtttttgctccnagtttatatagggctaattgtatcgcgagcgaatagcctaatggcgaaacctgcataattaa

SEQ ID NO: 30884 - DNA, 1323 bp, Heterodera glycines
cctcttctaatctctgttgtacctcttctaatcgctgttgtacctcttctaatcaccgttgtacctcttctaatcacagttgtacctcttctaatcaccgttgtacctcttttaatcactgttatacctcttttaatgacttttgtacgtcttttaatcactgttgcacctcttctaatcagatttgtaccccttctaataatgctgtacctcttttaattgctgttgtacctcttctaatcactgttgtacctcttctaatcaccgttgtacctcttttaatgacttttgtacctcttttaatcactgttgtacctcttttaatgacttttgtacgtcttttaatcactgttgcacctcttctaatcagatttgtaccccttctaataatgctgtacctcttttaattgctgttgtacctcttttaattgctgttgtacctcttctaatcactgttgtacctcttctaatgacttttgtatctcttctaatcactgttgtaccacttctaatcactgttgaacctcttctaatcactcttctaatagctgttgtacctcttctaatctctgttgtacctcttctaatcgctgttgtacctcttctaatcaccgttgtacctcttctaatcacagttgtacctcttctaatcaccgttgtacctcttttaatcactgttgtacctctttaattgaatcaaatgggcaatttgacataccccaaaataaaatcccaatctgtaatgcagtatctaaaagaatatttttcagataatagaaatcgtctatgatacaataaaataaaaataatgctttgaattcataatttttgttcttttgaaaagttttgttaaaataaaagtcgcttttaccgagaagtctgagtaaacagtaactgattcattcttattctcatggtgggctcaaatagaattggattggggcaaagacgtctttttgtgtaggctggttcgctagttcagcaaaaatattcaaagcccaggatatcgctacaaattatatatactctaaagcagcgaataaacaaggagagtcatcctgtcttcgaatgggacatacattaagcataatcgaaatcagaaaggccattgtcgccaaaacagaaataccagactcataagacgactccacctcttcaactcttccgatcgccgtattcccgtcaatttgaactcaaatttgaaatttggcagacaattttcccattttcgacttttccaatcgattgatccactctaactgctttttcggcaggcactggacatcttagcacgtcctggccattccatttttcatcgacctc

SEQ ID NO: 30885 - DNA, 1986 bp, Heterodera glycines
  unsure (1)..(1986): unsure at all n locations
gcaattntaaaatttactaattcctccnctaatgcggcatttatttcccacattaaggattttacttccattattttcccacccaaggccngtagtaaccaggggcgcaggccatggggggcaattgcctcgtgaaatgaaaaattattatttttttttttttgcagaaaaaagggtttttttttaaatttatacttaacgattttcccgttttcccacggcgccaaaaatttagaaaaatatcattgaacaaaaaattattgggcccgaaacgcaaaaaaaaaaaaaggatcttcgggtgccgctcgcaaattattttctcattacgggcatggtcccaactcattgcttaattaatttattaagcactcttaggcatttattccccacattaatgatgttccaaaaatacatatagataagaatgaaaagctgtaatatattaattagtaaactaaaaaaatattcatttaaaatgatttaattatatttttgcttttttttgttaatatgcaaatttaaaattattaaatgtgcattttttgggtgggcaaaatctttaacaaattcgggaaaaattcccaatcatttgttaggaaatttaaaaagtaaatttaaaaagtgcttttaatttttgttttttttattagtttttgcaaaattcaatttaagaaaacatttagaaaaaaatctcgattgattagagtcccggtctcggggttcaaagtttgggtctcgggaaatttctgtctcgaacaacatgctttcgaaggtaattgagaccaaatcgaaattagaaaatgtgaataggaaagaccattaacaattagccttatttaacgtaattacttacatttattagcatatccctctgaagcccccgcccccttttggtgtcattacaattcgtaaaacttgccctttgtgcagctcagcacgaaacaatggtgctcattttcttggcactttttgtcctcataatcttcgtaaatgtgctttacagggtgcgactcaaaccgtgcctttttgcatctgagaaattcgtcatgagttgtcgtggttgtcgtcgtggttgtggtgtcgttaggtgtcgttgatgctttcttggtctacactatatcatgctatgtgctttagagcccaaacgaaaatcaagtgtatgcaaatgtgcttcttattgctgtggttaagatatcatttatgtcgtaaaatactaatagtcttatgaaacttataaaaactattcttcgacggtcgacttctatgtgaatttttattttaggggggattttgctccttcaaaagtaacggggctcaaaatggcaatttctttgccccgggccctttcccaaaaggaaaagatcaaaaagaatgcccggtggttaaaaagggtttttttaaaaatttttccagggaaaaaacttttttatttttaaacccggggaaaaaaagccccccccccccactttttttttcccccttttttgtccccccttttttggcaaaaggaatttaaaagctcccccggggggggggggagggtttttcccaaaacccttttaccccacaggggaaaaaaatttttttttaggggggggggaagtgggggggggggcaaaaacccgcgggcccttttttttttaaaaaaaaaaccccccccccgccttgttttcccccctcgggggaaaattttttttttttttattctccacaaaaaaaaaaaaaaaaaaaaaagggggggggcccccctccccccccccccccccacttaatttttttttaaaaaaaaaaaaaaaaacaatctttcctctttctaataaaaaaaaaaaaaaaaaaaaaaaaaaaaaaaatagaaaataatattttttttttttttttttttttttttgggggggggggggggggcgggcttttttttttttttttttttttttttttttttttttttttttaaaaaaaaaaaaaaaaaaaaaaaaaaaaaaaaaa

SEQ ID NO: 30886 - DNA, 1107 bp, Heterodera glycines
  unsure (1)..(1107): unsure at all n locations
tttttgagagaaattttgcatcganacaaatgctttgcagcatgagtagaggggcgggagagcaatggccattttattgttccgagaatttttaattttcaaagattaggccagaaaagtggctcctcttttttgagagaaattttgcatcgaacaaatgctctgcagcatgagcagaggggcggagagcaatggccattttattgttccgagaatttttaaatttcaagattaggccagaaaagtggctcctcttttttgagagaaattttgcatcgaacaaatgctctgcagcatgagcagaggggcggagagcaatggccattttattgttccgagaatttttaaatttcacgattaggccagaaaagtggctcctcttttttgagagaaattttgcatcgaacaaatgctctgcagcatgagtagaggggcggagagcaatggccattttattgttccgagaatttttaaatttcaagattaggccagaaaagtggctcctcttttttgagagaaattttgcatcgaacaaatgctctgcagcatgagtagaggggcggagagcaatggccattttattgttccgagaatttttaaatttcaagattaggccagaaaagtggctcctcttttttgagagaaattttgcatcgaacaaatgctctgcagcatgagtagaggggcggagagcaatggccattttattgttccgagaatttttaaatttcaagattaggccagaaaagtggctcctcttttttgagagaaattttgcatcgaacaaatgctctgcagcatgagtagaggggcggagagcaatggccattttattgttccgagaatttttaaatttcaagattaggccagaaaagtggctcctcttttttgagagaaattttgcatcgaacaaatgctctgcagcatgagtagaggggcggagagcaatggccattttattgttcagagaatttttaaatttcaagattaggccagaaaagtggctcctctttttgagagaaatttgcatcgaacaaatgctctgcagcatgagcagaggggcggagagcaatggccattttattgttccgagaatttttaaatttc

SEQ ID NO: 30887 - DNA, 1220 bp, Heterodera glycines
tgcaggtcgaaaaaagaaaaatatataaaatattataaacctaattaaaaaaaattaactttaattaaatatatttatcaataaaaataaataagtattattaaattcatcaaagcacacctaaaacgacactacaacaagattggagttcaaatattaatcaatctaataaaaatgcaattgatataataattatttaaagaaatttaagtattaaacagcgcctatcggagtgaaccaaaattcaactttaatagactttgttaccgagaggatttcggggacgctgaccatagtttcaccaattgaatttctaaattaaatttatcaaaattattaaatgtcaaaatttgaatttcgttttttttgtttgtttgatacaacttttaaattaataaataatttaaattatatattattttaaaaagttgaattaagcaaattccaatcttaaaaaataaaaattccattaaataaaacaaaatgacaagaaaaaaaattgactgacaagtgagtagcacatattattttaaagtgaatcaaaaaataaaatagattaatacataatattattctttagaattaaaattagaaattttttagaataccaaagcattttgcattagaaaggcaatatttttgtaaataaaacttcaataaaaatgatggtaattgtaaaaatatatgattcattaaacattgatttgtacaaaatttaagtataaagatttaaaattttaaggaaatagcacaagaaaattttcttttgaaaataaaatgcatccgaaaattcattgatgaaggtaaaaactcttagaacaaataaataagctgcttaaatctcaataaaaaatgaaaataaataatgagacaaaattctaatcaattaaagaaatgaaaaacattcccaaaactctcttacccaccaaattgaatgtggtgcaaaaaatacaagtaaaaaatgggatacaattctatgaattaaagaaatgaaaactatcatttgaatgcattttcttgttaaaaagaatatggaaaacataaaagtaaaatttgataaaaattttaagaaaaaaatagttttgaagcatgggtgagatcacgaaaaataatttttagttttttttaatattttcaaaagataataaattaacagaaaaaataaaaattaatggaattgaaaaaaagagaaaattattcatacggacaaaacctaaata

SEQ ID NO: 30888 - DNA, 1030 bp, Heterodera glycines
tttctcctcattcattttgttcatttgacaatgacttgctttggcaaagagattcatttcggcgtgcaaatagtaattggtgtcctcataagaaggccgcggctgcacttggttaagcattgaccaattcatcacccaaccggagaagagaccgcccatgacggccatcagaaaagtcagtgccaacccggcaagttggaagaatgctgcagaggggaggggtgccaattgacggggattgtgccggatccgcttgcccccctcccctcctctcccattttctcaccctgcgtgcgcaaatcgcgggtggcaccgggagccgcagctcccttcctaaattgtgagatattggcctcaatgcattggcatttccttgccatttggggtaaatggcactgtactgctccacaaagttctctccgtactcttccggttcatagagaagtacaaaaagtgcactaaggaactgagaatgggaagaaggaaaaatggtcaagaaaagcgagtggagtaaaaaattggccatttgggacgccggtggcatgacaattcgtacatatcgtaactcgtataagatttttaattaaaaaacatttaaaaatgttatacgaattgccattaactcttaccccggcgagaagcgaaggaaggccatggagagagtgggcgccgcaagtgtcgttgatggagaggcgcttttccaggatttttggctgaatgttgtttgttctatgtggtcattttgcttcattgtcttgccattattaatgacaaaatgaccaccctgacagtaatataccgtaccgtaccgtcacataaacatggccaagcacagaagttaaagcggcagctgcaccaacgataatggcatggtgcgggtaaaggatcacattggcaacggcaccaattgctattcccccggccaaagaagagctttggatgtgtgccatattggagcggccgaggtggtcggccagggaggagagcagaaaaagggagtggtgcaagcagcctgaagaaagtcgggcaa

SEQ ID NO: 30889 - DNA, 1031 bp, Heterodera glycines
  unsure (1)..(1031): unsure at all n locations
aagctgcttcaggcgctctcagaaaacagtaaaacgctcctatttcagcactagcgctgagatatatcactgactttctgcatataatgcattctccgcagcaaacttcgcgttctcaagcgtgaatagttaattttttgtgctgaactgtgttagggttctccttgcagtgcgctcaactaagtcntcttggagttagagcatttttcatggtattttcaagaaaattgtgcaatgtgggcgacccggaacattttagacagtttccaaaccaaaccactcatagtaaaaaattatttcgttagaatacgagaaataatttgaaacgaaacactggttactaatttgcatatatctctgcgaaaattccagatccaaaaaaatcagctataccattcgaaagctgctttcaggcgctctcagaaaacagtaaaaacgctcctattcatgcactaggcgctgagatatatgcacttgactttctgcatataattgccattctccgcagcaaacttcgcgttctcaagcgtgaatagttaatttttttgtgctgaactgtgttagggttctccttgcagtgcgctcaactaagtctcttggagttagagcatttttcatggtattttcaagaaaattgtgcaatgtgggcgacccggaacattttagacagtttccaaaccaaacactcatagtaaaaaattatttcgttagaatacgagaaataatttgaaacgaaacactggttactaatttgcatatatctctgcgaaaattccagatccaaaaaaatcagctataccattcgaaagctgctttcaggcgctctcagaaaacagtaaaaacgctcctattcatgcactaggcgctgagatatatgcacttgactttctgcatataattgccattctccgcagcaaacttcgcgttctcaagcgtgaatagttaatttttttgtgctgaactgtgttagggttctccttgcagtgcgctcaactaagtctcttggagttagagcatttttcatggtattt

SEQ ID NO: 30890 - DNA, 1016 bp, Heterodera glycines
agcaacaaagcactttgatctgtgccggtttgcctctgttcaaaagttcggacgacgcgagcgatttgcgcattcaaatggcactcatccaattcattctttcgctgggttcaatttacagggattgaacggccaccaaacaatacgaagggattgggagttccctcccaagcacatttttaataaattggatgaattattcaatcgtttcttcaatagatattatttattgtagtatttgaggagccacacttttgtttaaattgacgtgataaatatttcgatgccaatccttcatgagaattgcgcagtttcttcccaacaaaacgagaagaaaaactaaaataaaatgccggctttgtttcaactcctctgcctctctgagttcagtttatttgtcagtttttgctctttctcagacggttcctcagcaaatgggaaaacaaaatgaaccaaagataattcgaattattcttattttattattttccattttttcacatctcaaacttaattttggcatctccgatctgcttcctttaattagttttgtgctttgaattcacagtacagttggtcgtgtcttctgattttgaagcggtgcatttgcatattatccgattatttacctgaattataaaaccctttaaaatgggtttgttggcactctctccccgcgtttttgcaaatgcttcgcattttccgttaattgcccatcaattaaattcaaattccttttgccccttacttcgtccctttttgtctgtcacttattcgttttttgcttttctcttatgcccattggttttgtaaagtgttaattttctccctctgctgctgatgcgttgggtttggtctattaaatatttattttgtttaattacctttgccccccccccctaattgccccttaaatgtttggccacccccttaatttccttgccattttctcttcttaatcaaaaatgtctttgctgatccgcgctcgtcctttctctccattaattgtcctctct

SEQ ID NO: 30891 - DNA, 1135 bp, Heterodera glycines
agtgcttagtgatggactagcgagtgatgtccgtagaataaaagccaaggcgtggctgcgtcctgtccactatttccctagtgcttagtgatggactagcgagtggtgtccgtaagaataaaagccaaggcgtggctgcgtcctgtccaacaatttcctagtgcttagtgatggactagcgagtgatgtccgtaggaataaaagccaaagcgtggctgcgtcccgtccaacaatttcctaatgcttagtgatggactagcgagtggtgtccgtaggaataaaagccaaagcgtggctgcgtcctgtccaacaattccctagtgcttagtgatggactagcgagtggtgtccgtaagaataaaagccaaggcgtggctgcgtcctgtccaactattccctagtgcttagtgatggactagcgagtggtgtccgtaggaataaaagccaaggcgtggctgcgtcctgtccaactattccctagtgcttagtgatggactagcgagtgatgtccgtaggaataaaagccaaggcgtggctgcgtcctgtccaactattccctagtgcttagtgatggactagcgagtggtgtccgtaggaataaaagccaaggcgtggctgcgtcctgtccaactattccctagtgcttagtgatggactagcgagtggtgtccgtaggaataaaagccaaggcgtggctgcgtcctgtccaactattccctagtgcttagtgatggactagcgagtggtgtccgtaggaataaaagccaaggcgtggctgcgtcctgtccaactattccctagtgcttagtgatggactagcgagtggtgtccgtaggaataaaagccaaggcgtggctgcgtcctgtccaactattccctagtgcttagtgatggactagcgagtggtgtccgtaagaataaaagccaaagcgtggctgcgtcctgtccaactattccctaatgcttagtgatggactagcgagtggtgtccgtaggaataaaagccaaggcgtggctgcgtcccgtccaactattccctagtgcttagtgatggactagcgagtggtgtccgtaggaataaaagccaaggcgtggctgcgtcctgtccacctattccctagtgcttagtgatgga

SEQ ID NO: 30892 - DNA, 1329 bp, Heterodera glycines
cgtgcaaaacagctaatttttatttatttttatttgatttgatttaattaaatttattttattttattttaatttattttattttattttggtttattttattttaatttaatttattttatcttattttattttattttaatttattttattttaatttattttattttattttattttattttggtttatttcattttaatttaatttaatttaatttaatttaatttaatttatttaattttattttattttattttattttatcttattttattttatcttattttattttattttaatttaatttaatttaatttaatttattttattttaatttaatttaatttaatttattttattttattttattttattttattttatcttattttatcttattttatttatttatttatttttttatattttcagaacaattctgacgttttccagaattttcagaactgttctggtgtgtttcagaattagcagaactattcggacgcttaccagaattttcagaactgttctggtctgtaacagaattatcagaattattctgaagcattccggaacaatcagaaaaattctggtgtttaaattgtaaaaattgaatgcaaaaacacaaagcaaaacacaaggcaaaaattgtaaaattattcgaaaacacatggtaacatgttgaaacacacgttaatgtattgaaaacacacgtgaaatgtcgaaaacgcaagcaaacgtgtcgaaaatacacgtaaatgtgaagaaaacacgtgaaaaaccggaaccggtttaaagaacgcacgtcgaaaacacatgtaaaccggttgaaaacacatgcaaaaacacaaaatccatccggtcggtcggaattccggacattccggatgaatttacaattgtaaacggattgtaaaccggaaggcgaaaacacaaaaaaatttggcttttttcgacctttgccggggtataactttgttcgaatttgtcgtagagctacgaaattttttttctcacccttcctctcgacgagctctacaaattgttcgcttaccgcaaaagcgtagctctgacgggtcccgagaagtaaggggaaaacacacattttacaacccatttttggccagttgtaaaaagccgggttttttttctttaacctcgatttaaaaaaaacttttgctggtgcgaattttttccacacggttagaattgtagagaaaaccgagctctttcgaatggtaccggtctcggtgctcaactctcgatattcgcttgcggccaggtcgttttgtggctagcccccccgttattgttatatatagataa

SEQ ID NO: 30893 - DNA, 1826 bp, Heterodera glycines
agtcaaaaaaataattaatttaaacttataaaatttatttatcaaaaaaaaaattaaattaaatataattttttatttattaactcaacaaaatattttaaattaattaaaatcattgaaaataacgtaaaaatgcacaaaaaaataatgttacaccgtccggatccgaacctgcccccccccctcagaacatgtcccagaatccccaatcacacagggattctgaggtctaacgatgtcaaaagtaaaatctgatcacgtattcgtgatcagcggcccaaataacccctaaagacatatttttggaagatttttgtgagaaaaatttttccactcaaaaatcctatgctcacccctttgtgattagaagaggtacaacagtaaatagaagaggtacaacagcgattagaagagtgattagaagaggttcaacagtgattagaagagtgattagaagaggtacaacagtgattaaaagatgtacaacagtaaatagaagaggtacaacagttattagaagaggttcaacagcgattagaagagtgtttagaacaggttcagccgtgattagaagaggtacaacagtaaatagaagaggtacaacagcgattagaagagtgattagaagaggttcaacagtgattataagaggtacaacagtgattataagaggtacaacagtgattataagaggtgcaacagtgattagaagaggtacaacagtgattaaaagagagaagtaggtacaacaaatggcagaagaggtacaaaaatgcattaataattttttaaaattgtaaaataaatgcctctttttattattaaaaaaactttgaagtttataataattgaaatgaaattaatttctgaaaaactcaaataaaaaaaaatatataaaattatttaattaaaaaaataattaattttaataaaatttttcataaaaaaaataatttaatttaaattaaaaaatttattttttattataaagcaaacactcttttaaatgaattaaaaacattaaaaataaccataaatataacgaaaataatttacaccgtccggatccgaacctgccccccccccctcaaaatgatgcctcagaatccccaatcacacagggattctgaggtcttgactatgtcaaaagtaaaatctgatcacgtattcgtgatcagcggcccaaataacccctaaagacatatttttggaagaattttgtgaaaaaaaaattttccactcaaaaatcctgtcacccccctttggtcccgaatcccaaaatcacttttatttttgtatctttttttaaaaatgtgataaaaatgtaaaataaaatttatattatagagaaaaaaattgcggatttttgtagtattttacttttcccgaatagcttttcagaaggcagctacaaatttttttctgaaaaatcgaaaatttccagaaattctggaataacttttttcttttttgtgataaaaaactcaaataaatcccataaaattctccttatttttctctatttttaaagctttattatagttaaatcgatgaaaccatcaccgagttatgaattttccaatattcgcccaaattccagagggtcaaaaaattgccaaaaaataaaaaatttttaaaaaattccaaaaattgctaaacttaaaacgaacatcagattcgtgctcagcaccttaaaaatacccagaaaaaaatttttcacccccattttcgtccgaaaaaaaatttaggaaaatttctagggggcctggctcgaaaatttttgaaaaatgcacgacctatcctacaccattcgatagagcttcaaa

SEQ ID NO: 30894 - DNA, 1031 bp, Heterodera glycines
agcacgggtgacacgcatgcacattccaactgagcacgggtgccacgcatgcacattctccaagccctcgctttccgactgctcacgggtgcacgcatgcccattccaactgagcacgggtgccacgcatcgccaagccctcgggttccaactgttcacgggtgccacgcatgcccattcgccaagcctcgggttccaactgttcacgggtgccacgcatgcccattccaactgttcacgggtgccacgcatgcccattcgccaagccctcgggttccaactgttcacgggtgccacgcatgcccattcgccaagcctcgggttccaactgagcacgggtgccacgcatgcccattccaactgagcacgggtgccacgcatgcccattccaactgctcacgggtgccacgcatgcccataaaccaagccctcgggttccaactgctcacgggtgccacgcatgcccattccaactgctcacgggtgccacgcatgcccattcgccaagccctcgggttccaactgagcacgggtgccacgcatgcccattccaactgagcacgggtgccacgcatgcccattcgccaagccctcgctttccgactgctcacgggtgccacgcatacccattccaactgttcacgggtgccacgcatgcccattcgccaagcctcgggttccaactgttcacgggtgcacgcatgcccattccaactgctcacgggtgccacgcatgcccattcgccaagcctcgggttccaactgttcacgggtgccacgcatgcccattcgccaagccctcgggttccaactgttcacgggtgcacgcatgcccattccaactgagcacgggtgccacgcatgcccattccaactgctcacgggtgccacgcatgcccataaaccaagccctcgggttccaactgctcacgggtgccacgcatgcccattccaactgctcacgggtgccacgcatgcccattcgccaagccctcgggttcccactgctcacgggcgccacgcatgcccat

SEQ ID NO: 30895 - DNA, 1250 bp, Heterodera glycines
ccccccccccctctgcctacgccctttattttgggcaaaacttgtctaatattgaaaaaataaaaaaataaattgacagtcttctattaaccaaaaatagatattaataattgaattaaaaaagattgcgtaaacccaaaaaagagtaaattttcaaaaaagaaacacggccattattaaaagttttaccagtccgtcacctttttttttattttattttttatttaaatgttttaacattacttttatgccttttgttgaccatattctaaacaatatttaattattgaattgtttattcaatttttttttcttgcctaaatttcaggtcaatgctcgaaggtcccatgcaatgaattggatcagaaattagcattcgaaattcgtttggctttgtgtctgcatccagcaaattattgcgcgaaactgtattttaattacaatagaatgaattataattttaatagattaaaaaaagaattaaattgtttagtaaaaagcaattaattctaaactccaaaaactttttcattaaaatcttgaattaaaagttgatttacattgactttaaaaaactcacttaatcctgagccttcctcaatatacagaaaggcactaaattgaggaaaaaagaaataaaattttgattggatttgtacgacctgggcaaatctggctcaatgtttgttcctgtctcatttaatagcattactgctggcggcggagtgccagtggctcgcttccatatctgtagtttaattatttattaatagggctacaaattgtttatatgagaagtctcaaaatatgtatataaaatatgtaaaaaaaaaaatctcgaactatgtacaaatataagttatacttttttgaataaaattcttagcaaagcgtaaacagcaaaaaattccataaagacgtcacttacaataatttaaataaaggttcacaattaaacaaaattctaaattgtttatcccaatgaaaattaaatatttgataaagactatttaggaaatagtcaaatttaaatagccaaaatttattttttgttataaaattcatttttactgatttgcctgtcccactctgtcgccaacgacaagtcaccccgaattggtcgcagttcaattcggccatatcattaacaaattcgcctctggccccggtcagcaaatgttcagaaatcattggcccaaaatcaacttaaaaaattgttgaaatttgaaaaattttaaatataattaata

SEQ ID NO: 30896 - DNA, 1541 bp, Heterodera glycines
tcggtgtaccaaaaaaaaaaaaatttaaaagcggctctccaatgttcggttaaaaacaatttttcttttttttttttattgatttagcctttttaaccctaattcaagaaattccgattttttttttcgtcccggatttcggaacttaaccataagctatttttgaccatcactttaaaaaacaaaaatatttgtaagaaaccacggcttttttaagtaccatttacttttttccagctaataattcgcatctttggctaatatttccatggttaatgaaccctaccgctatagaacacttcgactggagaagccatgacctctcctcctttcgctaatcaccttttactcttttttttttttatcattttccggctaaatctttcccatcatttttatcttccgtctccccccccccccccctcaacattcttcttccccccccccccccctcgaaatgtccatcgggccgagttggaaatgaatggaaaatggggaaattaggcgaggggatgcgctgcaaagacggcggagatagcgtcaaaataaacacaacagatattagcaagcaaaaacatcacagagcacaatccccgcgggggatgaattgattggcgggggcgggggatgaaagacagaaaaaattattacttttgaacataatttcgtttttcttttattgattttgttttaaaaataaacaaattaattcttttttttgctaaggcacccacagaaaaaccattttaattctcgtttgccataacttgccataaccatttctgaacaggctttaatagagggggtcggtgttgtttgatgatttgaatgtttattgtttagcgtcggctcacaggccaccgactacggcgaacagttgcaaaagcatgacccggccgacctctgatcagtggccgatcattctaatcactcttttcattaaaaaatgccttatgctgttaattgtcgttattccctctgcttcattttaattattattacgaaaaacttttatttttacaaaacataagccatgcccattgtaaggacatcttttttgaaacatttaaaataaaaagccaccaggcttccatagtacatttacatatgtgcaaaaatatttcaaaaattctcttgaaaaaatatttcacaaaatttatttgctgatagaaattgttctgataccaaaataaaaccgatacccatccttttcagattggtcaaattcttatcaaaattaaagatgtcgcatgaagaagcaataatctacggcaaaattgatcgctacctaagaatcggactctacgacaacgcctgccgtgatttgccaacggtatttaatgttatataaattataaaaatgcattataagtagggttgggaattatatgcatagagcccggcgggatcgggacttaaaaaagttaaatttttaattaatattttcgaaaaaccaaaaattcaattttttgaaatatttttcagtccttagaggtcaaaaaggccgttttaaagggggggccgttttaataggggatttc

SEQ ID NO: 30897 - DNA, 1045 bp, Heterodera glycines
ttttaaataaattgatcaacttaaacgatgatgtgcgatcaatgaagaacaaatggtttttattttttatgaagtccaattagttacggcacaaacaccaaaaaatcatagcaccgaacaacagaacagattaacaaggccattcgtgagtggaccgatattagggaggcattaatagcacaacccgtggctggtcgattcctaaaaagtagggctggtcgggaccgggaattttgacaaaaaccgggaccgggacttgccgggaccagaaaagtcgggatcgggaccgggaccaagtttttcgaccgggaccgggaccgcgagaaaagccgggaccgggaccaagtttttcgaccgggaccgggaccgcaagaaaagccggggccgggaccaagtttttcgaccgggaccgcgagaaaagccgggaccgggaccaagtttttcgaccgggaccgcgaccgcgagaaaagccgggaccgggaccaaccgggaattttcccaagagaaaattttttggaaaaattttgaaaatagcattataagatggaaaaaacagttttgagaagaaacttcgtcgaaaaaagaatgatccaggctatttaacgcgataaagaaataaaaattccgatcaaatttgttttcccatataaatccaacaagaaattgttttattaattttggttttttgaggcaatatgtccggcggtgtatgttcggtacataattttatgagatttattataagattatacaacaatatttggtcatattttcccaatgtggcattttttcattttgtaatttttgacggtgtcgtaaatggcaacgattgacttgaatttgtaaatacctaacaccacttttcatgttcttatgagcaaatgtgatagcaaaatctagtctaattcgaactgaagctgaataatctccaaactgtacaataattctggttgatcagataaagtgccacagagtcaacaggtctgagtcctcctaagtcgccttgatactgtgattgggttattgtaagtttgtttgtttttca

SEQ ID NO: 30898 - DNA, 1535 bp, Heterodera glycines
gtggaacggaataaattttgttgtccacttttcttttttttaaaaactattaaattcgtttttgagagaccaaatttgaaatttttttaaatttcggggtgcaaaccaagaaaaaacacctaataccaaaaaggatggaccaccattaatgcattttgacgtcctgcgctccccctttctccctcttccaatttttccttcttacccttctttttggcggctcggttctcgcccaccaccacctcgtggtcccgatccttcgcctcgagtgttaccttaaagagtggagggggattttcattcacaagatgtgccgaattgctttattgtgcgtcctaatggctggacaattttacaagcacgcaatccattccaatgcagcatgcaatcctccaacttatcccccccccccccccccccgctcaactgccgttcaccgtccatttaaatatttaaggatttgtcagcaatttttcccatccattttcatcgatttatttgttaatcactcaaagtgaatttaaggagcagcacatctatttcacatttctttgattatttaccttttcagctctacaaattgcaaaagcaatttgaaattagttaaatttttgtaattaattagtttttgccaacctcaattaaaactagaaattcggttaaagttatgacaactagagaccggaaatttcaaatttgcgaatcccgctgcgggattggaactcaaaattctttgcgggacgggatcccgcgggattaatcccgcatttaaaatttgcgggatcccgcgcgggattgcgggattttggaaaattcgaaaaaaattaattaaatttgaaaaaaatctccaaaaattaaaaaatacacgaaatttcgaaaaaataaatttttaggggctggtgggataggggctgatgggtcgactaagatttttcgaatggatcggattgaaaaatttgatcgggaatcaaattattaacggtccataaatttgactattttgttgcttttcaaaaccgtttgtttgcggcgcaattttccaaaaaactaggaacagggttcggcggtgccgataggcgacgccggagaaatttttagaaaatttagtgctatttgttattgattttgtctaaaattgaccaaatgtcacagtttttgactaaatttttacaggattattaagaaatgccgatccggcggtgtcgataggcgccgccgggaaaatttcagaaattttgaatgaaatttgcaatgaaaaatgagttaactttaattaaacttattatttaatttattcaaaaatatttggcattctgtctttaaaaattgttcaaaaaaccaataaaatcccgcataatcccgcacaaaaaatcaaatttgcggatcccgctgcgggattggaactcaaaattctttgcgggacgggatcccgcgggattaatcccgcaaatcccgcattttccaaaaaatgtgggattgcggactgggatcccgcaaaatcccgcgcgggataccgtcacgcgccggtctctaat

SEQ ID NO: 30899 - DNA, 991 bp, Heterodera glycines
aaaatttaataacgggcgcgaagcgcccgtccgactccacacaatttaaaaaacggccgcgaagcggccgaaaagcacaacaaaaattagaaacgggcgcgaagcgcccgtctgaggccgcgaagcagcctaaaaatcgctgatagtttttaaaaattcccaaatatctccacaaccagagcttatctaggtagcgaagctccgaaagcgcgaagcgctttttcccagctaaatagccgacggttcacgcacccgctagttatatatatgttatattgacaaggcaactcatcctcaaaaaggatatctcaagaccgggaatagctagggggctgaaattttgcaccaaggggtaactcgagacggcgcatctgggaaaactataagttttttggtccgaggcccaactgagtaccaggggccgatttcccgtttttgctcgcagttcaaggcccgtaactttttttctgaaactctaatcgaaaaatgtccgctggtaggaaactaagttgaagtgttgactaaaaaacaaaaaaaaatccaggcctctacctataataggaagggctgcagaaaaatggagaaattcagtaccaactttgaccagttcagtcccgggtgaataacacgtcagggtttgaattgatcaagggggtgccagcgggactattgtagagctttaaaagcccgatttttccagtttttaaaatttcgaaaattttcaaaatttttcgagctaggcctaaaaaacggttttcgggtttttgaattttaggaatttttagcgaattttcccagaaaaacggagaccactttcaagcaaccgtttttcgagctctatcgattgctgatatttttgaaaaaaattcgattttttcccggaaatagaaaaaaatttttgcctcagcgggacatttgagtcccgggcccataactcgttaggggttggttttagcgaaaaattgccttaaaaaaaaattgtaaagctttt

SEQ ID NO: 30900 - DNA, 992 bp, Heterodera glycines
  unsure (1)..(992): unsure at all n locations
gctttcaatctgcaagaaattagattggcaatatgtggttgtaaaaaacttttgggtatggaattattttttgaagtgagcaaacaccctattagtgctttgctgtgccgagaaccggcaggcaatggatagctttaaatctgcaagaaattagattggcaataagtggttgtaaaaaacttttgggtatggaattattttttgaagtgagtcaaacaccctattagtgctttgctgtgccgagaaccggcaggcaatggatggctttcaatctgcaagaaattagattggcaatatgtggttgtaaaaaacttttgggtaatgaattattttttgaagtgagtcaaacaccgtattagtgctttgctgtgccgagaaccggcaggcaatggatagctttaaatctgcaagaaattagattggcaataagtggttgtaaaaaacttttgggtaatgaattattttttgaagtgagtcaaacaccctattagtgctttgctgtgccgagaaccggcaggcaatggatggctttcaatctgcaagaaattagattggcaatatgtggttgtaaaaaacttttgggtatggaattattttttgaagtgagtcaaacaccctattagtgctttgctgtgccgagaaccggcaggcaatggatagctttaaatctgcaagaaattagattggcaataagtggttgtaaaaaacttttgggtaatgaattattttttgaagtgagtcaaacaccctattagtgctttgctgtgccgagaaccggcaggcaatggatggctttcaatctgcaagaaattaaattggcaataagtggttgtaaaaaacttgtgtaaggaattattttttgaagtgaatcaaacaccctattagtgctttgctgtgccgagaaccggcanggcatggatggctttcatctgncagaaatagattggcaatatgtgggtgtaaaaacttttgngtatggaattattttttga

SEQ ID NO: 30901 - DNA, 1098 bp, Heterodera glycines
  unsure (1)..(1098): unsure at all n locations
atgaggtcaaacgaatgattcatctaaggaactgatcatgaattagnctagnataacattaacctttaaaaaaangnaatatanannatattataattgttttctttgtatntnagtaatggataaaantttatattatcttcaaagattttataattccctcttacgaagtgtattataaaaaggttaatttgcattaagaaacattaaatgcggaaacattatcagaataattttgaatttgctttaaaatggtgattttacatgcataatttaaaatatggtgtcatttgataaataattaaacgtttcaaacttttgcatttttacaagtttggaaaagtaccggttaaccctggcatcggttgaaaatccaggtccctgtacggtcaccgcggtaccggtcagtaccggtcccagttaattctaaaaattaccggtcccaactactctagtacaattgcttcagatgataaaaaggacctattatatttctacatttttcattagctcggttggtgagaaaaataaaatgaatgaaaaatggtgtgtttggtcatttcgtaaaaatggcaatttacaggttttgcgtgaaaaagtcatcatgactttgttaaaagaatccaaattatataatattctatcataatttcttggattgggcatttattgctatactatatggaaattttaaaaaatttaagttagtttcaaaaaattgtgtccaaaaatgttgaaaaaattgtcgtaactttttgaaaactgaatgaaattttcatcttctaaagtaatacaaaaatcgaataatataaaatattattaatttgctggcatttaatcctctcttctcgggcccacatttatagttagacatgccaatttaaatttatattatccaactcaagggcccgattatgatgtttgtctttatggcacggatcttttaggatggaaagttatataaaaatgcagtccccactggttatatcaattatatcaatcgaattgaggaacgaattcccgttctcggctcatcaggccgaagttagttttatttatttcttattttctcgatgaggtttcctctattaattctga

SEQ ID NO: 30902 - DNA, 1066 bp, Heterodera glycines
  unsure (1)..(1066): unsure at all n locations
aaagaatcaatcactacgggctncagccaaagaagttcagtgcatgngcagcataatcaaatcaatacgggtcactgaccaagcagttcagttgcacgtacggccttaattaccaacgtttacccactcactcccaaaattaaattaggcccctattgtaaccgaccgtgagaaacggtacttggctacgattatgatgaaatgctgttgctcaaagtcgattctgacgccgtaagccagcaaaaaatccaaaccaatgcttaatttcatttttgtgacatcttttagaattaaataaaagctacaaacgttgcgtgattttgcggaccgtcacggccattgccgcccaatacgtcaaacgtgtgagtgcccaaaaaatttccgattcgaatgcgcgcgtttcgtaagcttaaaaaatttaaataattataaaaattgtttgatcagagaccgtcctgaggtcggctgacccgtcccatttactccgactatattgcgtgtgtcgtgttggtcaaatactgcaccaagtacagcattttgcccactccagaattgtaatgaaatgagtgagacatggcttgcttaaaataaattattttgataaaactagaattgcaacactcttgtcgataattagtgataatattcccaaaattaccactattttgcttaagatatatattaaagtacttaaacttgtattttttaattaaaataataaataataatattatttttgtattaaaagctggatatgagctgtagtgtttcgtgctctcctcctatacccattaacattttggtgtgcgagcctcctaaagctttcgtacccatatcgactaaaatgaagcatcttcgattatttattgcgcccgctaagtacacaaatcgatcataaaggagctggtggatttgggccgcgtgaggagacggtgatcgcagacgagaaactaattttaataaaagtgaatttaaattatttcgcaaattatgtaagcacctttcacttggtttcgcacgtcccgtcgcgcaacattggcctgcatgcgaggctgttgcacctata

SEQ ID NO: 30903 - DNA, 1352 bp, Heterodera glycines
  unsure (1)..(1352): unsure at all n locations
aagggccagtcaatcagtgatcagaaaggctattaggccgataattaggagagnagnnnnnncagnnatnccaaaagngaccttgagcacactnngnnangncgncnnnngnanngaaaccaaaangaannggaannnngnnngngaaacaaaggncgacannnngangaaccnnngggccncggcgnaanncaannaaaagcaaaaacaggaannnnanngggncggcgcaaaaggggcccccacaaaaagggnaanngnngncaaaanaaanaaanaaanannngngnaaaanngnnngacnanannncnacnngancaancancagagaaaaaggccccccngcccnncngnganggcaannnnncnnnancanaaacaaaanaaanaaanaaanaaaaanaaaannngaaaaatggaaatggcgttttgtgacggcacaaaaaggcaaaacaaaaagcaattattaaatttatttataataaaatgaagagaattttaatattttgaacagccgcgtagtcaaattttattccgaacaaacagcagttaattagtcaaaacctttatttaaattttaaaatggatcacggcgatatgtgacgacaaaaaagggcaaaaaaaaaaagtataataaaatgaataaaatttatttgatttttgaattgccgcaaagtcaaatttattcgttaatttttattaatttttaattttaatttttgtagcaataataaatatatttagcaatttctccccttgcttttaaacattcgtcgcatttgctttttgtcatttacttttatgctgtaacataagttttgtcgcccaaaattttttcgttttaaaattcgtaacaattttctctttatgcaatgaattcacatttgtgctctttattaatttaactaaattagggccttagaatcggaacgagccgaactgatagatgtataataatttaatttaattattaatttaattatatttgctaaataataaatcaaaacttagcccaaacttaaactaatttcaatcttgctattaagcgattgttctattatataatttaaaaaattcagcaaaatttacaaaaacatgtagccaaaaaattcgaaaaatttagtgactcaaaaattttttccctaactttttttgaaactcaataaacttttttgaaatttcaaagaataatagagaaaactttagtctatctaatgatatcaagggtggtaagaattaagtggagtttgaacaatttttatgcatttaaataactttaaatttttgtatgaccataaaaaaaggacacatttcttagtaactttttgtagaaacacaaatttgactctag

SEQ ID NO: 30904 - DNA, 1293 bp, Heterodera glycines
ttgaggagcaaaggggacgccgacttcgaggagtgccttttctccacttccatcgaacggattgaaaggctatcgcgcgaagaggtgcgccaaaaccaaggggaaaaggattaattcaggggggggggagataaattgacaacgatgacatttgtcggcaataatctaattgttcaggttaatcgggagttgctgctcgcagaccgtgacaaccgaatgctgaagcaacgagttacgctgctaagagacagctaccagcaagtccaagaagaaaatcgaaaattgaagagccttttgaacgacaacggaatgaattctctatgagaaatggacaaaaattgaatgattgattgatcttttttttttgcattgaacaaaatacttaaacaaaacaataaaattgaaaatcaccaataaaattcaaatttaatccatcaatctcgctgggtcggcttggtgcacgctttgttcatttccttgctcaattccctcgcatatctcaaagtcaattcacaacatttttgaacctgtgttgaagaacaaaaacattgcaaataaaaatagagaatttgaaaggacacttttctgacccgtgttgagtttatcctcagatttccacgctgatgcatcaggcaaatttcgtcccggtgattcgcccctatggtcaacgagccctcaataagtgaagattcctccagcgttgggtccaccattggctcatcaattccactgatgaacccaaatgtgacggtcgcgggtttgtagtacagagtgagcgggacgagagccttatcataggcggaatgctaaatgacaaacgcttatacatagccgggcgaaatttttgagaatatagcaaaaaatggacaattattttgcactgaccgatttgagttttttggtgacagcattgtacgttacgtcatttcgtttgaaacccatcagagcagtggaaacagccaaagtgcaagcgtcgaacagacctccgtcatagtcgagcacttttattgtgcatcggatgtcaaaaacgtatctaaaagggcaagctatgtgaaatacgaaagccatacagataggtatttgacaaacttgtcaatttcaatgcacagcgtttcgaagtcaatgcagtaagtgtcccggtaaagggactccaacatgctcagacactgctccacttcgctgtccgaggaggcggacgcgtcgaccgccgaagggtgtgccatcggcagaaagtcgagcgaaaatgaaatgaaaagcgagcccggcttcttccgtggcgcagtgatttctgct

SEQ ID NO: 30905 - DNA, 1510 bp, Heterodera glycines
tcttataatcacttttgtacctcctttaatcagttttgtacgttttttaatcactgatgtacctctttgaatcacttttgtaccacttttaatcacagttatacctcttctaatcaaatttgtacctcttctaatcaaatttgtacctcttctaatcatttttgtacctcttttaatcacttttgtacctcctttaatcacttttgtacctcctttaatcacagttgtacctcttctaatcacttttgcacctcttctaatcacttttgtacgcacttccggtttccattgcattatgcgatgtgtcaactccaattattggaggaaaccaagtgcatgtcggctgacgcaaagaccctaacagactaaaacgcgcctaggtagcgaagctcacaaagcgcgaagcgctttttcccagcccagatccgacggttcacgcacccgctagttatatatatgttatataggtaaggggtttcgttgctaaaaccgatttctcgggatcgggaataggtaggaggctgaaattttgcatacatatgcaccctgggacggggcatccgggaaaaataagcagaaaaaatctcggtggccaactgagtcccagcgggtcgaaaactgactttgccgacagtctcagtgttacgaaattttttgcttttggtttcagggcttagtggaccccaaaagcgaaatgccacaactgtgctctacaactttgccagcaaattttttttgatcagatcaaaggcctgacctgtaggttaggcaacgtacgaatcactttttttggacacttcagtaccaggcgaatagcacgcccgggtttgatctgagccagggggcgccagcagacttattgtagagctcgatgagctcgatttttgcaaattttaaaattttgaaaaatttcaaaaattttcgagttaggccccctaaacggtttttcagtttttgaattttaggattttttaacgaattttcccgggaaaacgaagaccacttccaaaacatcgtttttcgagctctatcgattggtaaaatttttagaaaattttcgattttttcccggaaatagaaaaaatttttggcctcagcgggacatttgagtcccgggcccataactcgtcggggggttggttctagccaaaaattgccttagggcaaaattgtagagcttttaaagttctatcgaatggtgtactataagtctggaaaatttcaaaaatttccgagctaggccccctagaaattttcgaaaatttttttttgggccacaatgcgggtgaaaaatattttctgaggaaattttgaggtgctgagcacgaatatgatattcgtttttcgtttcattatttttggaattttttaaaaattctctattttttggcaattttttggcccttggaaatttggggtaaattttgaaaatcattgctcagtgaaggtttggtcaatttaagtgatttaaagctctacaaatagagaaaaatcaggaagattttatggg

SEQ ID NO: 30906 - DNA, 1258 bp, Heterodera glycines
ccagtgattgaaatgctggagggttgagtcccagtgattgaaatgcaggagaatgagtcacggtgattggaatgcataaaaactgagtccgggtgattgaaacgcaggagaatagagtcccagtgattgaagtcctggagatttgagtccctgtgattgaaatgcaagagaattgattcccagtgattggaatgcaggagaattgagtctcggtggttacgataccgaagaatcaggtgaggttcggtcccagcgattggaatgatggtgggattgagtcccgggaattggaatgatggagaattgagtcccagtgattggaatgtcgcagaattgagttccggtgattggaatttcgcagaattgagtctcgatgattgcgatgccgaaggaccaggtgaggttaggtcccagtgattggaatgcaagagaattgaccagtgattgaaatgcaggagaatgagtcccggtgattggaatgcataaaaactgagtccgggtgattgaaacgcaggagaatagagtccccgtgattgaagtcctggagaattgagtcccggtgattgaaatgctggtgtgttgagtccctgtgattgaaatgcataaaaactgagtccccgtgattgaagtcctggagaattgagtcccggtgattgaaatgctggagggttgagtcccagtgattgaaatgcaggagaattgagtcccagtgattggaatgccgaaggaccggtgaggttaggtcccagtgattggaatgcaagagaattgagtcccagtgattgaaatgctggagggttgagtcccagtgattgaaatgcaagagaattgagtcccagtgattgaaatgctggagggttgagtcccagtgattgaaatgcaggagaatgagtcccggtgattggaatgcataaaaactgagtccgggtgattgaaacgcaggagaatagagtcccagtgattgaagtcctggagaattgagtcccggtgattgaaatgctggtgtgttgagtcccagtgactggaatgctggagggttgagtcccagtgattgaaatgctggagggttgagtcccagtgattgaaacgcaggagaataaagtcccagtgattgaactcctggagaattgagtcccggtgattgaaatgctggtgagttgagtccgacgattggagaaaaagcaaaaaaggatgcgaggccgcgaagcggccgagccagtcgattttatcaaacataatcttacactacaatcgtact

SEQ ID NO: 30907 - DNA, 1096 bp, Heterodera glycines
  unsure (1)..(1096): unsure at all n locations
aggcccaacgttgcttaacttgccagatcggacgggatggcgtgctttcaacgtggtatggtcgtaagcgatagggctccatttgaaaacaattaaatagtcaattttataatgcattttcttctctttggttaacttaatcaaaacaaggattgataaagaattgagaattcatttaaataaggtaaaaataaaaagaaaactccgatagttttttttcaaaatgaaagagcaaaattcggaattttgaattatttttaactaatttcccagcaaatcggctaattgaaaatgagttatataaattttgcgattcatcacaaattctctttaaaaagcacagcacatataaagccttttcctaggcacaatttaatttttttaatttgaaaaaacctcgaaaatcaaaattctatagaaaattggttttggtggtgattttaagaaagtcatccatccatcatttttagtggttaaagtcatcttttgaggtgccaattttacattttttttgtattccgttaagaaatttaaaaaaccatttcggcacaaagtgccaaaaaaggcaaaatggggacataagggtcaaactaatggttctaaatagagtgccacgggaccgggaatttttgccaaaaccgggaccgggacttgccgggacctgagaagccgggaccgggaccgggactcgattttttttcgggaccgggaccgcaagaaaaaccgggaaccgggaccaaccgggaaattttaaaaattcaaaaaaattttaaaaatttaaaaaaaaattcaaattttaatttatatcaagtgaaaataatacaaaatgatttggttttttatttaataaattaaattaatgaaaattttcaaacaaattttcttcaattatttcaaacaattaatcatttttggactaaatcatcgaatattaatagaaattcagatttgattttcacatcactttttttcggagcgctttttcaaaaatttgtcaaaaaaaggttggttnttgcgattattaagctncattggtaggattntcatttaaaaatgataaaatatgtatcaatttaaaaaaaactatgaggaatca

SEQ ID NO: 30908 - DNA, 1522 bp, Heterodera glycines
gtgagaaccacttactttgacgactattcaggtaaataatgtgtcgtagagtaagttacaaaatatatggatgatcacaggaattaaaaaaagacaaaaatgtgaaaataattaaattaataaattgaggtcaaagtcaaatgaggtcgaaatataaaaataccaaatcacttaggaatttgttataattttagcttttccggtcttacatatttaattcttactcctgatggcaaagcatcaggaagatcgttaatatagatcaaaaataataaagggcccaggacagagccctggggaacgccaaagatgtttttgttcgccatttcaaggagaattttgagtgggaccatgactaatggcattttctatttacaattcgtaatcattctttaattactgagaaattaaaaccttaaagattggcatttcaaataaacgcaattcggcaacgctgtctcaatataatttgaaattcattaaattggcaaatgcatttgtcatttcgaatgctttttgtgtagcaattagagtttaattaaagttgaaaaccgttcttacttggtgtttcatttaaatataataatatttttaattaaagaaattctttaaaaattcaacaagtactatcgcaacgcattccgcacaaagtttccatttcattatatttagtaatttccattttaattattatgttattacatacactctgactaaacttgccataagctaaatagcaaatcagccaaaaaaaaaagtcaaaatggggttttgtgaatcaaaatgtggcaaaaagatacatgcattcaagtaatgaaatcttcagatattgtatttttcagttcgttttaaagatggaacaaatccgagtctggaagcacgaactctcagcatctgaatcagctaaactagaaaatcaccttttatagaaaaaaatacagcattttcaaaaacacatgctaatgaggctttggcggcagcgccgactgaaaattatattccgatttgtaataaattagtcaattctttcaaaaaatttttgataattatagtaaaacctttgaaatctaagaaaaagcatcgggagaaaatattaattatttaaaaaaaaatatcaatttggaagtttaaaaaggggtaaattccccaaaaaggtgaaaaattgcaattctgtccaaaaaacatatgtttctgtgaagtgataaaaagttaaattattaattataccatttgtgtgtgacacatgatggtcgttaattagataattagtcaatgcaaagaattctcataacattttcttacttttggtctccaatcttgttttcttgagaattgctctctccgtcagcagctgaagttacaaccatttttgacaataagttttgcgagtgaaacaaaatgacaactgaattttaaataaaatttaaaaatcatttttatttcacataattgacaaaggttttaaggcctttttataaagaaaatatcttaaatttattatttttttgaaatcgaaaaattt

SEQ ID NO: 30909 - DNA, 1151 bp, Heterodera glycines
  unsure (1)..(1151): unsure at all n locations
aaatatcaaatttctatcatatataatgaaaggcgctccccgttgacgctgtgcgattgctcgtcggcgccgtttcccgcttctcgcggttggccctcgtggcttgctgcgtttgtgttcgctgttcgctcgcctggcgagcagcgacacttgcgacgcacttccccccggntggggnggcggagccaaattttggcgaagcgtctgataagacgttgagccgaaatagtcgctgtcgctaataagcgccagtggcaaatttgtccttgtggcgattgccgcaagggcaaaatgtgggaccatgtccttaataaaggtcatgggcccagaaatgggcttggcctggcaatggccttgccctcatgtgcgatcgcttagcgatcgccatgctccccgccggcggttgtattcggttggagtcggcttgagcgctaaatcgccacttttttttcagttagctgttaaaaaaaattaattgtttttcaaaatactttcgaattttttccattttttctccaattttatccgaaaaagcctttcaaaaagaacattaaatttatgtatgacaaaaatcttttaaaatcggaccaaagtttcaaaaaaaaattttgctggcgctgcctgctccttaatttgttcttaaacccgattctttttatgttttgcttttaattttgatgaaaatctcgaaattttccacggcatctatcggagaccattggcccaattcaattcttggcaaccacgaccaaggccgccttcctcacccaaatttccaaaaaaaaaaaaaaatttagctaaactttatgaaaaaattgtattccatcgcatctcaccacaaccttttgctagcgtacaactgagtaccggagtcccgattttaacgagaaaggcaccaaaacggcgctggagaccacgcgtacattttccacacttttcgccgacatggacattcgccagctcaaatttgtgtttttaaatttaatttgaattatttctaatttatttttttcttatctcgatattagacggatctgcaataacaaatcgaccaattggtcgagtattccaaattataagtttagaaaattataaattaatggaaaaataaaagcaacgaaaataatttcaaattcagatgaatataagga

SEQ ID NO: 30910 - DNA, 1694 bp, Heterodera glycines
attacagacttaagtttccatttatttcataaaatcaccaattggttcaagttcgacaaaagaccagggatcggatccattcgtcaataaatttattaaaagggatgcttaaagttttcaggataggtaatattcgttgctgattatgaaatgcgccagaaaaaaaggcattagagggaaaagtcttgttcggtctctctctgttgaccaagagaacaatttgcgtcaaatttttgctcaattatgcagaaagcagtagcagaaatccccatctaaatctcagagcaatatcatttaagacaaccgtcaaattcctgatcagagggacctttaaaaccttataaactcatttttttgactttttaaaacctgaaaaaaaaatttcgaaaaagggcttccaccggtggtattcttacccaggaataatttttagagaattttaaaccaaataaaactttcataagataattttattgaaattagccaatatttttaaaaaattatgtctcagtgacgaactaaacagtgacgaaacgataggtaaccagtagggctaactatttcaagaatgaatggaatcaaagcacgtagttagaacccatgtgtagaaaaaaagtgttgggatgtaggaaatggtgggagggattcggggatggcaccactcgaggggacagagaacgatcaccgaaaaatgccaaaatgtccgtcgagtgtacatttttcaaaattgcaataataaacgcctcacacattcgtcaccacattaccttgtcccacagagtccagttgtggcttagcaactagcatatttacaccaggaataaagcgtaacacggccgacatttgcccatctttttgtagtgcggttcataaagtcacattcaacctttaacaaaattaaaatctcaacttttcagttattaaatttgtttttttctaattaaattactcggtagaaatttttggcacgcacgcagatacgaacaatggcacgcacatggcttctcctcattttgccaatttccgtagatgtccggatcataaccacgtttcttgtccttgcccattgccaacaattatcaaaaaatcaaaaacaaaatctaaaaaaaggtaaaaagggagaggcgaggccgtaagtcccattggcaaacggatcattaagaaataaaaaaataataattgaaaatgttttcaaaaactttgggtgtaaaatagcatattccaaacaattaattaatttggatattgtaaaactgtccgaatttgcacgagagaaagttgggagcagtcgatacagcgaaaaagtgtacataatggactttcatggagaatatgggcacaaatagtaacgaaaacgggaaatttttctacctattacctaggttctattttatacctaacgaatgccactgaatttgcctagaaattcggcagaacacaaaaaaataattgaaaaatcttttcaaatactttgggtgtaaaatagcatattccaaacaattaattaattgcctttaatttgatcactgcaattttatcggcttggttagagaggcagaccgcgtgcactgtctgctccacaaaatgctcgctctcgcttctcttcactgtctaaccataaccatccaattgtctcttttcttcgctgtctggcattcctcgcaagcgcacgcgtctcccgaactgcaatttca

SEQ ID NO: 30911 - DNA, 1762 bp, Heterodera glycines
  unsure (1)..(1762): unsure at all n locations
tattagagatcggtattttgaaaaaagcctggactgggacctggacctggattccatgttggacctggacctggatttcctggacaaaaatccaggaaaatccaagtccaggaaaaatccaggctcctcgagacctggatccaggcctggacctggattttttgaaatttgttcaaacaaatgcttgaaaaaatcatttatcaaattctactgctattattattaaataaattatatttttggcatgtgaatggaagtacattataagttacaggtaaaagaaaagtgtgttaatgacttgcgatattcatatagacaaaagttttataatatttttaatctcttagattttttgtgttcaaaaaagaaatttttataatattcattagaaaatttcaacaatatataatatttggtttaaatttacctgatttataattttttttacaataaattttcttaaaaaatttttaaattaaaaaatacagtcccaattcttcattttatgttttaaatttgtttttattttctgttatttcccgtcagtcagttactcctgtgaagttcaccgtaaacgtgcagtctgcccccagcgaaacgtaaatactatgttctttatcattgccaattactggaaagtataaaattttcttgtttgtaatatgctacgatcttcattaataagggtttataggtttttttttattaagggttttacctattttttactttttttataaataatatgtttaattattaatttataaatttttatttataagctttaacgttcgctaaagataaatatatttaaaaatttaatctacaccaaaataagcatcttctcaataatattatttatttaaaaaaatttcggtcgacaaattgcattattttgtgtataactgttgcattcgtttgttttttttacctgagttttgcaccggaatgtttaaatattattgccctcaccttggtaaattaactttaaaactttttattaaatatatttatattcgttatgaaacgaaatgttttttccataacttttatttatcatttctttttcaacactgaacgtttcctttttccgtcattttattattgctacttttagtcaatgttttatttcgaagtttggtgttttttagtccacataatttataatactaattatgattatcaaaaaattatagaaatgtaaaattaaataccgctaacaaactaaagaataacgttggtcaataaacaagttgagtaacgattttggaattttatattgatatggttttacatttttgtttttgaaatcttttctttttgcagctggattatgaaaaagtagaaatcaaataaacttttcttattaaggcgaaaataaattgaaattattttaatgtaattattttaatcatagcgcgattggattaaattattttgaattattttgtactttttcgaatcctccaaatctagccggtcatttaaaaaaatatcgctctgtaattttattcaaatacaaattaatttgaaatttttttaaattttattattccgtaatatttttaataagatatgaaagaaatttcacatgattccgctgatgtattccgtaaattataatgtttcattanaaaattttccaaattctacaagttttttttttgttgtaaaattgccgnggttttttaggtttttgcttcatttttttgatttttcattttataaaatagttcatgactttttcagcaattgcgcaacg

SEQ ID NO: 30912 - DNA, 1294 bp, Heterodera glycines
  unsure (1)..(1294): unsure at all n locations
cccgttcccgattcgtacaattgagtatcgtataatttccttcgaggtcaatcaagacttanaanaagnncnaaaaaanactttaatagtttctactaattttttcacgtttctttgaaatttttcccatatttttatgaaaaaatctgtcttaaatgagaatttaaaaaaaattttgaaatcaagtcattctacgaatttccatttgctctcgaggtgtcggagctcaaccctgaaccaaacaaataagtagaaatgataattatatatagaatggctaaaaaggatcaaaattaaaaccattagtaatacgtacaaaaaattttgctttctaccaacttctgaccctagcagatggtggccagctgcaagccgtggtgtggggatgtgccgaaagtgacaatgccaacatttgcaccgaatttgaacagcaattaaatgctaagcggatcaaacatgtgtcctgtgaatgcctttttggcgcccggggtgtcgatttttcaaatcaaaagatgatggtcgaccatttgtttctgccaccgtcatcatcattgaccacacttctataaatgccggttaatatatggacaagctggggaagcctttgagggaaaaactattggactggtcgaatttgacgtggcatctcgggcttcaggaccaatgttatttcatcagaacaactgacccggccctcaattatataagaccaattatctccttaattgaccttaattggtccattaatttaccgcacgggggaatcttcttcttaacttttgttataactattgttattacacagcaactcgtactaccgctaccacaatggcaccagagacaagcacgaaaacaatggaagtggttaccacggctaagatggaaaatgattcaattggtgagtgtaggacaaatagtacagaatagggagcttccgcaagtcaaaacaatttgctggaaatgcataattccggtgccaaaaagtgccgtaatctgtccctcctcattgaggaagctcgggaacttcggccccttttcaccgagaaatttcatgggttttttgcgttcttggcattcctttaaaaatagtcaattttgctaattttcgttcagatgacgatgaaatcagtanattaattatttttaattgtttttatattacattattaaatgaaaatcttacaaacattctgtgtgaagctctcaaaaatatttcgcaaattaagaaaatggtattgtgcgcccagccatctcgaacttatccattgttgtcatgctgagttttggtaagctc

SEQ ID NO: 30913 - DNA, 555 bp, Heterodera glycines
cgccgacccgacactccctatgccataaacatcagtcaaattctcgtcaaaaacattgtcgtataagatctttaattcttccctttgtttgtgccaatattcgcaaatatattgcccctttggctcggcatcaaaccagcgcacaaacacaatgatatcggctgccaatttggcactcattcgttcgatttcgggaaaactgttggcatttaaaattgcatttgtataaaaagaggtcaaaattttgtcgtcctcaaaaactaaaaaggtatgagcaattttttattgtctaatataaaaacaatttcgcacattatataaattatacaaatttaaaaaattccgtgctcggccattactgccaaatgggcgtttctctaattgcctccccccgcccctcactcatttcaacttcccaaaattcaaaaaagacgagatttagagaaaatcaaagtttaacttttaaaagaaaactaaaaacaatttctaagaaatttttttttagaattttccaaatcttttattatattcattttttcttaaaaacataattaa

SEQ ID NO: 30914 - DNA, 1913 bp, Heterodera glycines
  unsure (1)..(1913): unsure at all n locations
gattcaatcatttttagcactttgctgcctagcgataaggacaagagaatagaaaaatatcccttttaagaaaaataacagaaattgtcgaaaatctggaaaaaacaaaaaaaaacgcaccaattgaagtcgttcccgctcttttttctgtagcttcaactgttcctccaagtcttttcgaagcattttgatcaggttttcggacggcattgctggtgtttttgtactttcgggtgggaccatcgaattttttgtgtcggatgccaaagaacgccaataaaaatgtgtcgcattgcgagttgcaattcgcaatgcgaaccgtgcaaaaaggacgttatgaacagggtggcgaactactctcatagtgataaatccatacatatgacagaaacttaacaaaaaggacaaaaattaaataagacatgtaaaaaaatatgcaaaatttcacctctaccaaaaaggggggtaatagtaaagtttatcccccccctttttcaaaaaaaaaattaaaatttttaaaagtgcttaaaaacaggttttagggggttttcggggtcgctgatcacgaatccgacatccatttcaaccaattccgaaccccggacccgaattcgaacaaaaaatcaaaatttcatttttcaccaaaatgcatatttattgcacaaaatcgatccaaacaaagaagaaaatgttctataaattgacaatactgcgcatgtttggaaataaaaataaaattaaaagcgattgaaagcctgtttttacaacggaatttcttgattaaagattaaactgcaaaaaaatgagacctatgtaggaaaaataaaacaaaagttttttttgtttatttggcgaattgttgtttgatgcaaatttcaaatatattactatttactttttatatggtcatctcccaattttggaggaaccgcttttcttatggtaaggtttacaggggggaaaattatggtaagactcggacgggttcgggtaccactcgggcatttaccgggccggtcgagcacgggctaggcaaattttaatttaaaaaaatgctaattgtaagatttttccatgttttttttaacaattttccagaaaattgctgtccttgttgcactgttttggagaattgcaagcatctttttgttctgcaaactcttcgcaacggcccaagtccaagcaacacttcctaaattttcctcccataaaagcgaatttgcaggtgtttattacttgaagaggggggggggggggggttacatattagtaatctgactttaatggcaaaaaacctcaaatttgtcttggggcaaataattccgttttatgccaccaaaaaactccgtgatcttttttatacgtttttgtggggtgtatgcataaaaccaaaaaatacctaaatttttttttacagaaaaatacagctatatcgaaccagaagatgttgaaatggcgcgtgaccaggcacgggaaatgtttttcttcggatacaataactatatgaagtttttgtcgaatttatacaaaaaaaaatttaaaaaaattttttttacttaggcatgcttttccaatggacgagttggacccaattcattgcataggacgggggcctgattatgagaatccggcaaattggaacatcaacgatgtgctgggtgactattcactaactttagtgagttattttacttttttggaagtatttgaaaaaaaaatttttgtctcaaaaatttccgaatattgtgccttggaaaaaaatttcgaaattttaacaaaaaatttttttttgtgtaattccacatatttttttttagattgattcactaaacactttggtggtgatgcgtaacaagagacaatgtttcacagatgctgnntcnaatttgatccccattgaccactgacctgca

SEQ ID NO: 30915 - DNA, 1214 bp, Heterodera glycines
acactaaaaattaaaaaaaaaaattttagctctttttttaattgtgtaaaacaaagttgtcattagaagttattcgatgtcaatttttcattgttgtctccgcatactcaaaaatatctgtccttaaatgttgggtagcgcctgccgcattggaacttcaggtgaaatgagaactgaggttatgccgtacgcaagttaatctcacggaaatgagatgtttttaataatggaaccatcataaatgaaggtttcctaccatgaccgcaagtgtaaggcatacaaaaatcaaataatttggtatttaatgaaaaaataaaactaagtttaggaaccctggagaacaaaacaacattttgcgtcacgtttgacggaagaccgaacgaagaaccgatggaatactaataaaataaaatgaaaaatttctcattaggggtcaaccaacgacccattcccaaaatttttggcttagttgacttgcaaatttgggttcgtctgtcagtaatggtgtctttggttagtcccctgcgtataatcaataataaccctaaaaattacgtaaaaattttgctaaatgattttgaattgcgcaaactacgctgttatctcatcagttgcattatgtgaacaggagtaattaactcaacatttcatgtgaccttgtacaccataaggcccaaaatatttggttttattgattcgaaatgggacaacctgtgaagttttataattttttcttacaaaaattgttccgcaataactgaaactcacgaagctagaaaacataaaaacattagcacttctaatagttcatcaaacttttggtttttcttggcgccaaaatgcccaaaaatttgatggggaaaccagcaaaaaattgcaaatgatcaaattaagagtaaatttatgaatcgaaattcgtaccaaacctctcatgcagatcccttcattctttttgcttcgtttgagtacgctttcgtcaatttgtgcagaccgccaggaattgacctgtgcactcgtcgctcacccgaaatagtcgcttttgctgccgccggccttgtgcgtacatatactgtagcgatgggtctaggtgatgcttgccacgggtatttagggatggatgcaaccagtagctgttgtcttttcaacctaattggtgcctaggccacggctattagcagccattagccaattgaagaagcggtgaaagctgaggt

SEQ ID NO: 30916 - DNA, 1053 bp, Heterodera glycines
  unsure (1)..(1053): unsure at all n locations
ataaaaaaacagtaaaatataatttttaaaaaatgtaaccctttaaagaaangcnaaannatnnnnnnaannaccnaanaaactttaaaaaattgttatatttgaaatctttcaaaaaatatttttaaagacagaataaaatttataatgacaaaaataatatttaaaataataaaaattagtatatttgattttttttaaatgtaaaaaaaaaattaatgtgatttttcaatgaaattattttattttattttatttacgaattgaacgatctctttttctcattcagattaaaaaaagtgatgagaagtgtgcttgaagcaaatttttggcgaaataataattttaaaaattggtgagccatacaaatgagccaatgccgttatatttttgctctcaagcaaactttagttgcctaattactccttaaaagatatggaatgtttgttaaataatggggaatgccaaaattaatctttaataattgttaaaacaaataaagagcaatccaaaggtgctgtataatttctcaaaaaccatcaaaattgtggtcactcaaaaaaccatcaaatggaaaatgttgacgaaaattattattaactttgctcaagattaaccaaatttttaattcttgatatcatccgttaactctaatttttctatattaacctgaaaatctcaaaacatttcttaaaaactttaaaaaaattttctggcgaaagttcgttcataactttttgaaacttcagaaattttttaaaatttggcaggataatagagaaaggctatcaataaaattaagaattaaaaatttaattgcttttaagcaaagtgatatgaaaaaatggttttgagagtaacgttataacacaatctaattgtatagtttttggttattgtttttcaataatcttttttaataagcggttatgaaaatgtttttcttcaatattttttgtccttaatttttttgctgaaaaattttataccaagaaattttttttgaacaatatataactttttgaaaaaaaataaatgctttttttgaaaagg

SEQ ID NO: 30917 - DNA, 657 bp, Heterodera glycines
agtgagggtggtcactcattggacgcgtaaacattgactgtacgcctaaactggaatagagcccacttttctagggtagttttgggagctgatcaacagggctgcaaaaaatatgcacgaaaagtgaccaaaatatgcacataaatatgcaataaaattgccaaatatgcacaaaaatcgcaaaatatgcacaaaaaaacttgaaaattaggggtgcaaaataattcaaaaattttatttctcataaattatgtatataggttgtttttgtaattgtaaatcaaaaatttctcaaggtttttggcagtgaaactcactgttgacccactcgcgcatcaattcagatttggatttaattttaggcattttcaaaatttttcctaagagatattcaaatcggaaaatatttgacgaaaaatggcaaaatatgcaaaaaaatctaaaaatatttcaaaaaatggcaaaatatgcaaagaaatctaaaaatatttcaaaaaatggcaaaatatgcattaaatattcagaaaatatgcaaataaaaatccctatttttatacgcaaacacaaaaaagaaagtgtttttcctactatttaaagcagggagaagtcaggaaaaaaaaaatgcatttgcatgttttttgcagccctgctgatcaa

SEQ ID NO: 30918 - DNA, 1194 bp, Heterodera glycines
gatttcagattcgtgatcagcgtcctaaataacctctaaagacatattctggaagttttgggcgaaaaaatgtccccactcgaaaaccatgtgcacccccctttggtcccgaattcaaaaatcacttttatttttataactttttactaaaaaatgataaaaacatgaaataaaatttatcaaatacagcaaaaaattgcggatttttgggctatttttattttacaaaatatcttttcagaaccgagtagtgaatttttttctgaaaattcgaaaatttccagaatttctggaataactttttttatattcttgatagaaataccaaataaagggcaaaaatttctccgatttttactccattttttaagcctctatacattaaaatagacctgatctaaactgagttatgaattttcaaactttaacccaaaatcccgagggcaaaaaaagtgaccgattttcaaaaaaatttaaaaaattcaaaaatttcccaaacaaaaaacaaacatcatattcgtgctcagcaccttattttaccccagaaaaatatttttcaccccacttctcgccctaaaaaaattttttgaaaatttctagggggcctagctcgaaaatttttgaaaattttccgacaaatggcacaccattcgatagagcttaaaatgctctacaaaaatgttctaaggcaatttttggctaaaaccgatccctgacgagttataggcccgggactcaaatgtcccgcttaggccataaattttttctatttccggaaaaaaaccgaaatttttccaaaaatcccaccaatcgatagagctcgaaaaacggttgcttgaaagtggtctccgttttccccggaaaaatcggcaaaaaatcataaaattcaaaaaccccaaaacctcttagggggcctagctcgggaaattttgaaaattttcgaatttttaaaatttagaaaaatcgagctttcaatgctctacaataagttcgctggtcaccccccgctcagttcaaacgcaaatgagttattcgactggtactgaactggacaaagttggtactgaaaagttgccaatttctgcagcccttcctattataggtagaggcctggaattttttttgaaaattagacaacacttcaacttaggttcctaccagcggaaactttttgatttatgtttcggaagaaaa

SEQ ID NO: 30919 - DNA, 588 bp, Heterodera glycines
tttacttgaggataaagaatccccaattgtaactcgagcagtcctattactcaataagccctttatccacattaagagtctgtcctttataccaagtttttccgatttggataagagtgaattatggggcactgagtgcaaaagctttttgaaaatcaatataaatacggtcaacattttttccatttataattgcctcgcaccaatcttccacaactgatattacctgacttgtcccatacctatttctaacaaaaccaaattggaattccgaaattttaaatttttgcttttaaattaaggatttttacggaccggcgctgccgataggcgccgtcgctgcaaaaattaagaattttgaccatattttttgcgtattttcatataaaaaattctttaaattgccaaacattatgccaatttatcaaaatttataatattctgaggattttccccaaaagcctcgaaaatcctcacaatttctctaaaaaccacaagaagactcattgtgagaatttaccctcattgacctatcaaaaaaccacaaaatgaggctaaagcctcagatctgggagccctggcttaaac

SEQ ID NO: 30920 - DNA, 1104 bp, Heterodera glycines
  unsure (1)..(1104): unsure at all n locations
atgatccaaaatgactgacgcgcatttgctcgtgtcgcattcggaaactgccttcgtaagcactcttccgcacttgtacaataacacnncgctcgttgtcaaacatatccagttcgcggtgctgttcttcattcgtacacatcggaaagactatgtccgaatgctcaatgtcaaattcgatacgcacaggactgatgtcctaaaataaacgaaaacgatatattgttaatactctttttttatctcgctattttagaaccccatacgaaattgacccccccttttttgtccacatatttcaccgccacacctgaatcattcgaacagctcgaataacagagtcggcagatccgcttaacaaatacgtggagtacgccaacgaggagcagtcggaagacgaggagggaaaatgaatggtcgctttggtttcggaggaaatggcactgatcagcactccttctggcgaaccgaccaccatacgccgttgagacacggggatctctaaggcggcaaagaactgttcacggcaattctgaagacagagaaattgtcactcggaaacttatcgaaaacctcaggaaaaagcaatttcatcagcgtctcacaggcatttatcattagtttatggtctttccgagacccccgaacaaccaaagagagacaattagcctaaatcaaagttatattctgtgaaaaaaaagctgaacggggaaactgtccacaaaatcagtcgactcacttcctccctcggcgcgatgacaaaaggattaggcggaaacaaaatgctgaattgaacccgtgaaaattgacggagttcgtcggtcaaacaccattgccgtatcagttgagccaaatcctcgcgtctgaactggtccttgacatttcgcagcgatatagcaacagtaattggtgcaaactcctaaacggagattggataaatgaaaaagattattgcggtcaggggcgtatctagaaacatttttcgggggggggggacccgacatgaagacctttttttgctatttaaccaataactttttttccactgctgggtaccaactggactttttcactaaaaatgaccaaattttggccgtttaaggc

SEQ ID NO: 30921 - DNA, 618 bp, Heterodera glycines
agcaattaatcatttgggccaatggtcgaatattactttaaatttacatttacttatcacaccacttttttcggcgcgcttttccagaaaacttttggggaaaaaggtggtccggcggtgccaataggcgccgccgggagaaattttgaaaatttgagtgagatttgttaacagattttcaacaaaaattgcttcttttttgggattattaggctcaatttgtatggattttcatttaaaaaataataaaatatatatatcaattaaaatatatgaggaatgatattttcttgataggaaaaccaatgagtatacaaaaaaaatttagaatattttaattactgtagagggattgaaccaggggaaagaagaagggaaagtcaaggagactaagtaacactttaaagaatatattaatatattttttaaatttttccctttaactcctattttcatctctaatttttcactcagaccccattcttaccagtgcttgtttttcccggttcccggttgccctaccgggaccgggaccgggacctgagcttttcaaaatccgggaccgggacctcggatgaccgggaattcccggcccggtcccggtcccgctctactcta

SEQ ID NO: 30922 - DNA, 1899 bp, Heterodera glycines
atgctaatacgtaccgcagatcctcttcaaaattttttccattaccgcaagagctgcggaaattgtgaattaattctcagaaaaatggccatctctttttaggacaattttctatctcgtaaccccgatgctaatacgttccgcagagcctcttcaaaattttttccattaccgcaagagctgcggaaattgtgaattaattctcagaaaaatggctatctctttttaggacaatattctatctcgtaaccccgatgctaatccgttccgcagagcctcttcaaaattttttccattaccgtaagagctgcggaaattgtgaattaattctcagaaaaatggccatctctttttaggacaattttctatctcgtaaccccgatgctaatccgttccgcagagcctcttcaaaattttttccattaccgcaagagctgcggaaattgtgaattaattctcagaaaaatggctatctctttttaggacaatattctatctcgtaaccccgatgctaatccgttccgcagagcgtggggggagctcaattgtcgggggtcggggaccccgatcgggtagtaatcaacgaaattttttaacgaaaaactcaatttttatttttaaatgctcgtaaatcttccttttttccactttaatcatctgatttcgttagcgccagcaagagtgagtccaagctagcctttaaaccaggggcttccatttgttcttatttataagaatgttctgattttggggtagcgactaaaattattctgatttcttaaatatacttatagttttgaaattttatggcatttcaagaaattttaaggtctgccgcaaaatttttttgatcttttggtcccgaatttactgaaatttataattttgcattttcctccccaaaatatcaaaattgataatagaagactaaacatataaatttgatcgaataaattggaaaaataactgatagaaaaatgttgcaaaatgttcatatttttgatactaaaatcttattttgggcttggtgtttatattttgaaaatttttcgatggaagccctggtttaaaaataagtggaaaggggtggggtttaacccaaatttttgcgaacccgtctcaacatcgaatttgaccaccattttttgcggcgctctttttcaaaaaaacttttggtgaacaaagggggggatgagcggcggtggtgttaggagccgtggggaaatttttttcttgaaaatttaattgataaaaaaaacatttcaaaatactttataaatctaaaatttcatatttaaagaaaatcaagtacaaaaacaaaattccgttttaggcgcttaattttgacacaaattaaccaattttcaaagacttaaatttttaaataaataaaaatgattgcaatgattttcaaatatatctttcaataaataaagtaataattattattttattcaggcttaataaaataaggaaatttcgtgaaaagttgtgatgagcaataccaaaaaatcaatgaataaattgtttggaataaacaagaattaattacgtataatattaatgattaacttttttaattaaattattaaatgaagcaatataaaataaatcattataaaataatattaaaaaaaaataataataattttgaagaaaatttaattgaagattcaatttctaaaacggtggcacttatcggtaccgccggtacccattttaccattttttgttgaaaaattgacccccaaatttaaaagaagtttaaaaatgttacttttattgtcctagaatttataagttattaacgggaattttggaaaaaaccgttaattttattttaaaagcaaaaaatacaaaaattacttttaattcaaaattcaatttcatcttcaatta

SEQ ID NO: 30923 - DNA, 1153 bp, Heterodera glycines
  unsure (1)..(1153): unsure at all n locations
tttccccccagtgatttgggagtaataagaaaataaaagaaaatcaagggattaattcgggaggaatttccaaggccccacgtgcatcattgctccagcggtgccttaagggcttttttaatgtcaaaatgcccgacgctagtgcatttctttagacaaggaaaattaattccgaaggaattttcccacacccatgcgaagcttttgttagaccgatcccgaaatggcaatataattggaaaaggacagccaacaatgcttttctttatatcagctgatggtttacaaaaatcgaaatacttcctgagtactttccaagaaccatgagaataaatatcgcactagcgccaaaatcgaacaaaaacgctaatcatcagaatcatcttaattttcccccagtgatttgtgagtgataagaaaatagaagaaattcagggattaattcctgaggaatttccaaggaccacgtgcatcattgctacaacggtgccttaatggcattttaatgtcaaaatgcccgacactagcgcatttctttagacaacgaaaattaattcctgaggaatttcccaaatccatgcgcagctttgttagaccgatgccgaaatggcaatataattggaaaaggacagacaacaatgcttttctttatatcagctgatggtttacaaaaatcgaaatacttcctgagtactttccaagaaccatgagaataaatatcgcactagcgccaaaatcgaacaagaacgctaatcatcagtatcatcttaattttcccccagtgatttgtgagtgataagaaaatagaagaaattcagggattaattccagaggaatttccaaggaccacgtgcatcattgctacaacggtgccttaatggctttttaatgtcaaaatgcccgacactagcgcatttctttagacaacgaaaattaattcttgaggaatttcccaaagccatgcgcagctttgttagaccgatgccgaaatggcaatataattggaaaaggacagacaacaatgcttttctttatatcagctgatgctttatttacaaaaatcgaaatacttcctgattactttcncagaaacatgagaatagatatcgcactagcgccaaaatcgaacaagaacgctaatcatcagaatcat

SEQ ID NO: 30924 - DNA, 1925 bp, Heterodera glycines
  unsure (1)..(1925): unsure at all n locations
tgcatggcctgcagnngtcggtcccggtccncgctgcatctctanntttttatcgtcgaaaaattacaataaaaaatttaatccgcttctgatttattccaatgattgatcaacttctgcagattattttcattacttttttgcggaactgattttgaaaaacttccattcttaagtcattttgaaagtcatttctttgggagtgttttcatttttttttttgaatttttgttaacgatttttggcttaaaaataagcataaaaataagaaaccaaatttaaaaaaatatttttcatccaaatgtatcagagcaacaattggaaaatatttaaatgcctaaatcacaaatttacataaaatgtacaaaaccaataatataaattatgcatactgtaaaaataaatgtgtgtactgtacgtttactccgtttgtttgtttgttttttatctgccaaaactgatcagacattcatcgcctgctgctgtttctccggctcagtgctgtgagattcgtcggatttgaagaaagtgacgatcagtccgtcgctgatgaacaaaccgcaagagagcagggaaaagatctgtcaatttgcgcttatttaattgctcttcctttccctgccaaaagacacattctgatcacagtgagtgagtgatcattaggaatcatattttatgatcagtcatatttttcctaatttccaactttttaaatcatatttttttagatcataaaatgtgatcagccatattttggaaattttttcatttttcggcttatttttggtaaaaaccaaacatattttagcggaggcacacagaagactcacagataaaagaaccacattatcatcaactccttcaaaaaagacattcaactttaattttttttcattgtaattttttaattttttgactataaatattatccctattaatgaatagtatgaaaagaaaaaatgatgaaaattaaatatttttgtttttaaaaccttataaaattaaaatgttcgaatttctcaaattaaaattggccattttccacttaccccggctaatgcccatccgtttatcccacattgtgtgtcgaaatatttctccatagttgcaaaatttcgccgcattatttgtctgttcagaaaatcgtccagccaagggcaagcactgcaaatgcaaatgccaaatcaccgatcgctgctttgatttgctttgctcacctgtaatgcatttcgagcccaaaaacaaaaagagaaattggcacacagccaaaagaatggcaaacgcactgaagaaaaaagaaaaggaggagaaaaggaggcatttaataattaataaaataattaccaaaaatttggaatgttttaagcggagacaatgaatgatttgcaactgacaaagggggggggggcattctttgggctcatttattcggcttattttaccgaaatggaagtgagaagcatcgccacgcttaaggcggacgcacaaaattgggcactgattttgagggaaagggaagtgaaagcgaaaagtggggggggacttacgaaagtctaatctcggagaaagtcgccggaagttcgtcaaaagcaaatcccggccgaaaagtcctaagaaaaggtcattaagagagaacgcttatcagagggaaaggcatttgaccatttgtccattgtgaggagaagagaaatgcggttgccatttttgtcctgataatggccaattcccgagaaaatgagcaaattgacgagcagcaaaaggacaacgttggccattcgcaaggtcagcacaatgcgggcactgctcacgtcgcttctcctcctgctgcgaattggaaatgctgcgtgctttcatcccatgccggcccattcttttaagcccaaacgccccctcanaattattattgcgatttctccccactcgcc

SEQ ID NO: 30925 - DNA, 1020 bp, Heterodera glycines
  unsure (1)..(1020): unsure at all n locations
cattatcatttgacctattagagaagctaacaaatgggatgagaaagaagctttagccattggcataatgccaaaaaattttattcaaattgaattttcattaatactaattaattcataaaattttttgatggaaatatgtaatataaaatgcaaagcctaaaataatacagtataaaattcctatgaataaggctaacctaaaaaacattaaagaatgtttagcttaagaaaaatattattttaattttttattaaaatttggcaaagtgtcaaaagccaactttggcctagcctatgcctaaagaataggccacaaaaaaaattagttttccttagctgaattttatcagattttattgaatttttctaaaattttgaggcggagaagaatgggtacaaaaatgatcaacagatgaattggttaataatctccaaatagccgatcatttctcaattatatttcacttccgccgcttcttcttcatctcatttttcttttggttgcgcagacaatggcctaaataaaaaaagtgcaatttgaattcgataaaaacttttgaaaacgcgtaaaaaatgaatgcattttaagcaattttaaaacaaaaggagtaaaaactgctgagtttgttctcacccaatgcaattaattgccgacaatttatttagtatgaaataacaacatcgtttagcaaaaaaaaaagataaaattaaaggttttaacaaaaaatgactatgcgaatgagaatactaaaatatataccagaaaatgtttattaactacataatgaatatttgttttgtaatcaaaaatcagtataaatataatgaaaaaataaataattaaattgtcgttaaatcttataaatttaaaacttanatagttaaagtgaaattgccaattaaaattgaaattttacaacaaattaagtgaataaaataaatccgtggataaacacctaatggaatgaattngcaaaaccccgtgacntatttttgagcacaaattaaaaaaaaaaa

SEQ ID NO: 30926 - DNA, 1661 bp, Heterodera glycines
ctgaaacgaccttcccgatttcggtcgcacatgtccccctcaactgcagcttttccctcagcgatcctggcaaataattaaatttattcatttaaaattgataatagtttgtcaaatttatcctttaattaagaaatatgctttaaaaaattttaaattgagaggagtaatttgttagcaaatttatccgttaattaagaaatacgttttataaaaaattatcatatttccataaataattattaatttaaatttaaatttttgactctttactgggataccaagcttacaaaattaagggagagattcggttttttgaaataattccaaaatttcaaatcaattctcagttttaattgtcgtgaaaatgcacaacttatagacgatactctcgctcaatcaaatcatgtgccatttttggcattgttgtgccaaaactgaccctgtgtgaactttcgtagcacctccaaaaattcttggaatgtgactgtcgtgtcgttttgtgcgtcgtgcgccatgcaggcgaacatccgctgcacgaaaaggtcgttggcacgcatgccgagcgcttcagcaaactccgccttggtcagcgtcatgttcatcaccttggcaataaaacagtgaaatttcccaagactaagtgctcgaaatttagcctcgagaattgagagaaatatcgagacttgaccaaaagtatcaaaattcgatcctcgaaaatccagtttacctgtgcagaagcataagtgttgaagtcggtcgtgtgatcgctcaactgcggcatgttaaaagccttaaaaatgtctttgaatttgggctgtgactttctataattttttttttgaatttttaaggccaatagaggagaacaattgaagcaattggatgacaccaagaatggttgatttatgagaaattttgtgattttccgtgatgagaaaaattaaaaattaaaatttaagtttaatttttaacaaaacattaaaaaatgaatcattttgacgctcattaaagttaaagtttagctttgatttttaagtccatataaagtaaaggcagagtctttcttataaacacatttattttgagttttattgaggtgttttcggaaagggactgaaatagaattttttttgcaatttaaatgcatgataattaaggcccgctctgcgaaatttataccgtccgcaaatgttttttaagccgtaccaggtataatactggcaatatgcaattcaaaaataaattttaaaaatttttgaggcataaattcctttaacggaattagtagacgcacccgcgaatacgcctcgcggaagaaatggtccagcttagcgtgccgcttgtcctttgtctcagccgcttccaacagcacgtcgttgtccgcttcatcctccgccatggatttgccatgccgacgcaaacacgcggacaattcgaagcggaatttggccctaagccaattaacatatgcaaatttaatttaatttaatttaatttgtaattattaaattattattataaaatatattttagaaagattttgtttaataaacaattttaagaaattattttcttaatttaaaatttcataatacgcaaagggttgaaccttttactaacaatcataaaaagaacaagggcgtagtaaaggggggggg

SEQ ID NO: 30927 - DNA, 1856 bp, Heterodera glycines
agagagctgtaaaattgacagtttccgacccttttccatgatgctgtcaaggcgtgggagagggtacttgtcgggcaccgtaacttcgttaagtttgcgaaagtctaaacagggacgaattccaccgtccttcttttgcacaatgacaattggggttacccatggggtgtcagactcaaccatgactccagcttctaaaagctgattaatgtgcttcttcaattcctctttgtatttgtatggcattcgtcttggcgcagatgcaattggttcctcagttgtggttgttatgtgatgttcagcggcagtgaaaagtccgagatcatacctaaatttgctaaaaacctcagaaaattcttcaattaatgctttaagctgttctaaatctttgccttcaaccattgccttagaaaagtcgactacaaatgttgggtcaatttccattttctttcgttcagaaataagggcaaggatttcttttgtgctattttcctttaaaagcccatttcggtcacataacagttcgttggcaaatgccaaatgtgttcctttccaaatccattttggttccatggttgggttgactactgccacttttatttgtttctggcccgcaggcgagacgctattaatgactgacagtccctttttaataagacttatgtcagggcgatcaatgcaaaatgaattttttgggtttggggatgattcgattgaagcatcgaccaatatttgggagtcggccggaatgagcgtgtttttctctgccgacacgcgcaaatcgttaagtaagaggaccgaacgatagcataaattggcttcgttctccccaacaaaaaatttcccgtttaaatgatcgaattttattgggggcaatttctcaaagacatcccaaccgacaattacactgtaatcccgggccacagtaaattcggaatcatccacaaaatagattaatgaacggactgtgtacccagcaatgtttaaattcacctgagcatattctttgaggcgaatgacatgtcctgaggcactcattgcctccaaatcggatgaatatgtctgacaattgagctcatctgcaactgatcgtggtgcaacagtcaaacttgcaccagtgtccattaaacagcggacgtgtgtggagttaatcaatgtctgcaccacggcgtgatgtggagaaattgcattcagatttgggagcattggaaggtctgaattccgttttgagcggagcagtactgaaatagtgataaaaatcagaaatgggaatgataagcagataaatcattgaaggagaagtgaattgaattgagatttgattattcacatcgggatttgcaaaagcattgggaagaaaaactactaaaaacccaatgagtacttttggcgcccgaaaactgaagcgagccctttttaccggtctctttcgttttcctgcgattttgtgtgcctgggtttgggcgggttcaatgagcttaacgagactgagctcaatttcgttaccaacttctacagatgcattcagatccatcatgttgaggcgtgctggagatttcacaattttttgcgttttgtttccaccaaaagtcatgcgtcgtgttgttcctctgccaacgtattcatctctaatcattaatccaaaccggatcaaaaagtctgtaaaaacaatgattatcattatagacaggacgattttgccaatttgttcccaattcccaaacattttgctgcgaatggactcactcacctgctcccattgttcagacagagtctttgttataaccgtgtcctcacttttgattaggaatgtgagttcactttctcttgccaaattggcgtcgtaaaattggcca

SEQ ID NO: 30928 - DNA, 1109 bp, Heterodera glycines
  unsure (1)..(1109): unsure at all n locations
caaaaatacaaaaacttccaatttggattatttatggaatttactttgcttattcttttcttttttctggtaaatttcattaatttttcgcttttagccgcagcggcgatgactgaccagtgcgtttttggctttatttacttagtttcattctctcttatttcctttcatcaaaaagaaaatgcgcaccgatgctgatgaagttgtgcaggagaaggtacacaaataaataaataaaattattttaaagaattgtgccaataaattttattataaaggtcatcatggcccagctgttcgacaaacttggcgtcggcccgcacgacctgtccgtggataggctcgaagtcagagcggatgacacgtaaacggcaaaattttgttgtctattttacaatttcaattttcagattccaccgcttcgacttggcacggtgggccattggacacgatgtgagtgaataaatttcaaaaaatttgataagtgctaatttgtgattgatcgaaatgagatttctgatcaattggtcattcatttaatttgtttttcccaggtttggtccccaaatgcccgttggataatccaagtgccgcgtctcttcgacatttaccgtgccaatgtgagcaaataccgtagcacttttctgatcacattcacatttttccattttcagaaaattttgaaaacttttgacgactttctcgacaacctcttcactccgctgtttgaggtgttttctccaaaaagtaaataaaaaaaactggcattttcaggtcaccaatgaccccaacactcaccctgaacttcaccgattcctcaaagtgatcgaaatgcaaaaataccataaaacactcaaatttcagcatgtttccgggattgattcagtcgacgacgagtccaagccggaaaatgtggcatttacgaaggattcaccggagccggcggattacgacaacgaccaggtaaaaaggatcaaaatgatcaattcgcgttcaaaataaatcatatttcagaatccgtcctactcctattacttgtactacatgtaagcccaaatattttgnttcatttttgtctccgatcttttaaatcatttttttctctaccc

SEQ ID NO: 30929 - DNA, 1808 bp, Heterodera glycines
  unsure (1)..(1808): unsure at all n locations
tatagctacaggagtttcttttgaattcctatacttccaattggccaatcgggctgaaatttttaccaaataaacttttcccttaaaaattgaagctttcaatgctagtcgaaaaagtcaattgcaccacagttaccatatctttccttcagtgtgatcgagtgaccaaaattttaacacccccgggggactatgattttaaaaatccctagggggctggaaagtttttcgtgaaagacgaatatgacagcagaaagagcctaacatttgctacaatatacaaaaaatctcatgtctctacaaattatgcccatagagaaaagaaagaccaaaaatcaattattccgaaaagtacagtaaaccaaaagtaaattgaccattttatgggtagtcggtctttaggcttaccttcctcaacggagaagcattatagaactattacccaaaagcattgtaacaaattttatatctttttatctgtgatttcgtctttcacaaaaaaattttttccacctctatggatttttttttaaacacctacccctgtatttacggtatttggtcacttatgaaaagcaaaaaaaaacaatcacaaaacccaagctaaaaccatgtgacccgtcccttgtattttattaatgtacataaaaaatctcagccttttgattttttggaaattttccccgtttggatgggttatgcataccgtgtatggccaatcaatattgccatttctctgctctccgctctgtgtgaaggcttactttatttttccatgttttctctccgttccctaactcccattttgcccaatgctttttcttctctgtttttctctttgctgttgttggtgctgttttcgctcatctctctctcctctctctctctctctatttttttcttcaactattttcccccctttttccataatttcatttgcatttttactcactattttagttaactattttgagatttttcgtcactaaaggttgcggctctagttatgtgtaaacaggggcaaattaaaaaacaaaaataaactaaaaatattttaaattaattcaataattttttaagtttatacgttcggctcaggaatttttcggtgtttttcaaaaatccaatgtttgggagggaggcggtggtaccggcctcaaacccaataatttatttttttcaaaatattttcctttcccccaattccatcactgttttttttattaactcgccttttgtgaatatttttgatgcatttgcatatttgctcctttttcacttatgaatgaatgttttgattttgtgcatttatgtatttactctcctttttcacctctgtgtgcattaaattaaattgacaaaagtttaaaagtaatttttaaatgcaaaaatatttttgttttaaaaattgttttgggaccaaataaaaataagggaaaaaagcaaacaaaatcatctctgtatatttaatttaagcctgtaatttataaaacaatttaattcattaaccagaatggattttaaattaaatcaaaaaaataaaaattgcaaaaaaatatagattattaataaaccaaaagcttttctcgctacataaattccctcattaaaaaggaaaaattttacaatattattttttttatgcggcatttatttttttaattagagacaaattttttanaaaaatttatttccatgcctntggttttgccaataattatttcatttttaatanataaatttcccagaaattcctccactttnannatgaactgtgatttttgatgattacgaggcgatgagcgctt

SEQ ID NO: 30930 - DNA, 1055 bp, Heterodera glycines
  unsure (1)..(1055): unsure at all n locations
cctatttccaaatgaaaaancgggaggaaaactggcattttttaaatttaagaattttatgcctttttttgttgcaaaaactggctggcttaatattttaaaattttagagttttctttaaatttttgattaattgtttttccgtgattttactagtataaaaatcaatcaccacaaattatcccacccccccccccctctctcatatcaatgttaattgaaattgcttacgatttcgaaattggagttcaacgaaaataaaattccagaaaaaaaactatccccctcccccctctccttcactatttttagaaattggtttcgatttcgttttgaattcatcgaaaaaaaaaatttttttttttaatgtttatattgatagaatattaaatatatggacttattctgcgctaatttcaggtggttgtccaagtgcatgtgtccaaattgtcatttgtcagcaaagtgtttgacaaaagttcgcccattctgtcctacaataagctgagggttggcgagttcaaagtgttcgaccatttgtccatttcgcacatcaatgagatgatccatcgcgtgcgtttgcttttgtttttaaataattgctttatattttttcccataatttttagtcttttttttaataattttcgaaattttcaccgccttttgcctaccaaaacgatttattgttggacccgaaaaattgtttatcaaaaaaacccatcaaaatgatcatttttaagggcccccgattttttaataatttggtacgcctgttaataaacattaaaaaattttccttttttttgtcactttcgcatttcgattttttcttcaaaaatggaaaaatctatcaccaaaaaaaaattatgttaatttttacaatgtataattaacctttttttaattaatccaaaaatttttcgacggattttttttttttttttacataattccaattttacatacagttggaagggcctccttcnntnnccncccccttcttctaccctaggaagatgaagaccctttacgcgaggcaattctgcgcctgt

SEQ ID NO: 30931 - DNA, 1687 bp, Heterodera glycines
atggtgcccattctcagctaagcccccgctttgtctccccccgggccctctcgccccaatgcccacctcattagactttcgctagggaatttgttccacgtccccctgtccgccctcaatatttccctcctcccccgccccggcacccacttcaaagcggcgaaaagaataaagcaaaaaacagggggagggggagggcatggaattggaggggtcggcatggccatgccgtggcacactttccccccccccctcccattggcgcgccctttggcccgtccttttcccacactcaccactcgaatattgttaaaaataaagtcttctttcttttttggtggggataaagacaaactgcaatcgatctgtctgctgcccatttccgcttgtcctctaactgatcccaaggtcatgcttcttggccttagaatggccaaaggatcggatggaattcaatgagggccaaatcacttaatgccattaaatcatttaaaaattttcacgaaacttgaaatttttgtaaaattcccactgctgttgtgccgtcattctctgatgcccggccgtccgtgtcgatccatttaaaaactataccgtttcgaaattcgcatttttaaatgccaaaaattaatatgccaaaaactggcaaaccttttttcaatgaataaatttgtgcatacatatatatatatatatccctctcccctctcttttgttgtgatttttcggagcgattgccccaaaatttggcacattcgcccaatttgaatttgcatttttttcattgttcataaaatgccaatttgcaaatttgactctgttggtgtgtcaggtgagcgcctcccgccgccacccgtcgcttcagctccctttttctcgaatcaacgccaaaatttgtgtgcccaacagcagccccagcaaatttatgtccaaatgaattacacggcaaattgaggcaaccaaaattttgtgccaaattgccgagaagcgaaaaacaacggacgaacgaaccattaaactgaagaggagagaaaaggaaaagcaagcacaacgagaggacgaagaaaagagcagcagacggagcagaagaagcagcaaatggtgcgaccgacgacgggaggaggagacgaagacgaagcagaaacaacagcaggaggaggaggagagaaaacagcagcaggtgaggagagtaaagagatggagatgagccagggatgggaggagggagctggagcagtaatagaaccaatggaaggtcaaaaatgaaaaactacttgtgttgctggggtggggatggacatgactgatgggtgtttgctgggcgtacctttgtgaaccgggaggacagattttggctgaattcaagaacgactgtattggtgccgaccataagggacaaagcaaagggatgtggcggcggggggcggcgaggtcaaggagcagtaattgcccagtcgacacgcttaagtggacacaattcgctcgatttatctccccccttcccttctttcgccatttcatttcattcatccgtccttcctcgtcgttgcaccaccattcctttttcttctcttcccttttcttctcttcccttccattcacttatcttcctttttcttctcttcccttttcttctcttccccttccattcacttatctttctttttcttctcttccctttttcttc

SEQ ID NO: 30932 - DNA, 699 bp, Heterodera glycines
attgagtcccactgattgaaatgctggtggattgagtcccgttgattggaatgttggtggattgagtcccactgattgaaatgctggagggttgagtcccggcgattggaatgttggtgggttgagtcccagtgattgaatgctagagggttgagtcctgttgattggaatgttggtgggttgagtcccactgatttgaattcgggagaattgagtcccaatgattgaaatgctggagggttgagtcccgttgattggaatgttggtgggttgagtcccagtgattaaatgatggtggattggcgcagaaaattgtgggggggccgaaggccccagtacgaggccgcgaagcggccgagcgagtacctttggcgcaaaaaattgttggggggggcccaaggcccccgtacgaggccgcgaagcggccgagccctccccaactgttcaacatcccaaggcacacaaaaagttaaaaatgctaaagaaatttgctgaggttgagtcccggcgattggaatgctggagggttgagtccttttgattggaatgttggtgggttgagtcccagtgattgaatgctggagggttgagtcccactgattgaaatgctggtggattgagtcccggcgattggaatgttggtggattgagtccctagtgattgaaatgttggtggattgagtccccgttgattggaat

SEQ ID NO: 30933 - DNA, 981 bp, Heterodera glycines
cgcatcattccgccgatgaatttgcttagtgtgcgctctttttccctttttcggtcattcttccggttcttttccttctctaatattttcagcaaccgaaggatgaaaatttgcaagaaattttggctcgtgggagggcattcccgcgcaacacttacggcaccatcagtgccatttcgttgtgggaaaaggggcggggagaggggacgacccccgccaaagcaaccgaacatttgggcgaaataaaagcacaaagaattattggcacagcaaatggaagcgatttgaaatgctaaacggacaatgacaagaaaagaaaaagggaccgattggaaaatggaaaagttacagaatttgcccattcgtttaatcccccgcctactctttccaaattcgtttttcctattttcatcctccgattggcctatcgcgcgactgtcttctgctgcagcagcatcagttcaagtatttgctgtgctcatttggcgggaattggtggtcaggacaaaggtaatttgtggggatgggtgggaggggattaagcaattgggacgaacgaacgaataaatgggagtgaaagaagggaaaaggaaagatgaagcggactcgaaaagggggtcaagtcgaggggagcacacaaaggcgcgcggttggccaaacattagcccttttttgtcacaatttttttctctttttttgagtcaaaatgcccgacggtccatccatctcaaaatcggttgggtgacgaagaaatttccttcgtatgaattccttttttttactgacactgcgcaaataatttgggccattcattcattttcagtcagacggacgccgtaataaacgagagaaaaaagttcaattacacaatttaaaaagaattatatttaaaaataaatgagtagttgtaacagaaaggaacaaacgaagccatgtgattcggaaattttgtaaatgttttctcgggagtgagaatgtttt

SEQ ID NO: 30934 - DNA, 1065 bp, Heterodera glycines
taacttaaaataattgattaaatttttgagattgtcaatgaagacggaagcacaaccacacggacaaaaagctcaaaagcttttaggtaaaaataaataaataaatatattaaattagataattaaattttcaaagatttttttataatttgccaagtttaaaattatttaaaatttaaattttaatccaaattaagctcacgttacacccgtcatgaaacatttgtgaatggggttcgccaagaatgtacaacacggttccgtgccttcatggaatatgcgggcccggacggcggcttttgcatacggtaataattggatacacggtagattgtggacaaaaaaactgtacactaaataatgcatatggaaatatcgattgtgatagttagtgtacggtagacaaactgacaaaaaaagtggcatatactgtaggaaagaatacgatcgacggtgacaaaaaatgatataatgtagagaaaaacggtagacagtgcccgaaaatgatatactgtatgaaataatacggtagacggttcacagaaatttaaaaaaaaaattcaggctcaataacaacgcggacaaggatttgagtgaggatgagggcatcgatttggaggaggacacgcggagccgaatcagccgatcaaggcacgacggcattcggccagaaattcaaaaaaaaaaaattgccattttaagcctctctgaaatcccggacacgcagtcggcactggtggtgatcggcaaacaaggcatgccattgttggtggaccagcaaacggtggcaaaacggcacgaaaaggtggcacgatgggcgaatggcacattttaatgtcctaaaaatacgagtgtaaaactgcgattttctgaggggggagggggaacaatgacaattcgtacaataatttgtttaaaactgggaaaaaatgcgagcttttttcttaagaattttcaaaaataattgtttgatgaaaaattaaaataaagtttccaatttttttcgttggaaaattattaaaaagaaaaattcaaaatagaaattcaaaaaatctaaatgccaag

SEQ ID NO: 30935 - DNA, 939 bp, Heterodera glycines
  unsure (1)..(939): unsure at all n locations
cgacgatgcgaatcaaatcgcttgcgctgttctgtgtactccgaatcccacatttgcacgtacgcttgtggagtacagtacttctgaagggatcgtactcatatgaaaatggtaacggcgtggtggtaatttaattggttttacatacaaaaatgaaaagcgcatcccattctaaataacaaacaaaattacgccaaatttgcgttccttgaagaagtatcggtagccccggtccagaaggtaaatctccttgtagtccacgtatgggtaacgcgactcgttccggacccggtcaaattctcgcagtgcaagagccctgcaaaacgaatcggattaaaattaggaatggagtgtcgaacattttgggtccccttttctgcgagtactcgcagtagaagatgggagttcgcacaataatttcgccgaaccgttcttcctcttctgggtagaagagcttctcaatggaagtggtctcccacaaattcagtgagtacttaagcgccaaatgttggtaagtgcggagaaacaacagaaacagacccaaatgtggcccgcatcgtattcgtaaggatagcgacaatcgatcagaatgaaccgccgttggaactgttcttctgttagtgaccccaaaaggttggccatcgtatcggcgttaatgctgcggaaggctttgtgcggaacttggggccgttcaacggtgtcaagcgaatactgctgaatggttgaagaataggactcaaggggattagaatttgttttgataaaaaaagttagttcttaacggatgacacaccaattcccgaaccttgaacccgaagtcgaacaaagttggaaaataaattttggncaaacagctttgctgcgaggtggtggattgagccaaacgaatgccggagtccctcgaatcttgatcttncacttgcacatacgattccatct

SEQ ID NO: 30936 - DNA, 1788 bp, Heterodera glycines
atattacatatgtacatatttttatacaattttctttattgtcccattttttcgtacatattttgcaatttttaatattttttaaggaatttttttattaaatgcccccaaaaatatccaaaatttcgcaattttttaaaaattttgagaatttatagaattttttgtgaaaagtaaaattttttttgaaagtgtgctccaaaaaaatattttttttaaatactaaaagatgattctaacaaataagcctatttaggtcatttttattgcaatttatgcctgtttcaccctttagtaggaattttttcccaaaaaaatcaccatttaaaaaattctatttacatattttagtacatatttcatacatattttagtgttttttatcatattttatttacatatttcgcgatttttcttacataataaaagaagccctgctaatcaattaaaaataatttagattaatttaacttacctatttagtttaaaaaatataccgtaatttataaaataataattagaaaaataaatttgtttaaaaatgttaatacagtcatatgcaagttttgagacaagtgacaggtggcaaaaataccaattttctcgaaaatggagactgtatgaaataattacgatatcagaaaaaacccttgcctgtaattaagagaaaagagcaagttatttatatttttgctagaataagaatttggctgtggtcaaataaccttcgttttacggtttttcagtttctttttttcttattatgtaagtgaacaacaaattctttaaatattggtttgtaatccctatgaatatctaaaacaatttgagtgggaaagcatttgaaaaaatggggggaccttgacgactttaaagatcgaaagtttaaaaattccttaattttttaagtgaagatgttatatgaagaactttatgtaaaatttgcaaaataagtgaatcaaaagggacaaggcaacaagaacacaaattcacagaatcaagtaaaaaagtgccgcactttgcagtccaaatgtttgataaacaatggcaacgtctcaattgtcctgggccatcgctccgttgtctcttcaatcaaattcccattacgaaatccatcaatcttaaaaagtgcaatcacaatgcaaattccgattccatatttttccccaattaactctcacttgaatatgatccggtctgtgtgtaagtgtcagcaaatcgccatgatgacggagaccattcccttttggcgttctgctgaagaggaaagaaccgctaaattgaagcttaatgcttattcatcactaatcacccgagattaacctcctttcctccaaagacagcttttgctcttctccgattcgtttcagaacggaaaaagttgcggcatcgtttaaactgaaaagtggcggctgaatgctaacaatgccgaaatcgagctggtgaagcaaatcattagaagaaacaaatgcaacgggggaagtcggcgatgaaaatcgcttcatccgatggggacgagcagcggttgtcgtggcctctttcatggcttgtcgcctcgtcaccatgcgcttctttaccagtggcatcccaccatcgctggtcacttctccgtctgatgtgtttctggccatgtcttctccacgtcgcttcccccttttccttcggcacactgtttccattggcattcttttcgccgttcttttatggatgtttctttggctgtttcgtctctttctcccttcgtcgtccatttggcctttgtttctcgttcgctttttctctctgtgc

SEQ ID NO: 30937 - DNA, 1176 bp, Heterodera glycines
  unsure (1)..(1176): unsure at all n locations
ttaatacactttgtctcattagctctttcccttgtttatttacttctttcatttttgggtggacattttaggtttttatgaatttttctcccattctcttttaatattccattgcatttcctcccaccccacgccacctcactttagttttatgttctccaaataaagtttattgcccaattttgcataattcgtttgctttcaccacctgtcccttccctccccccccctttgttgaattgccagtcaaattccaacaaaaaatgccatgcgggcattttatcttttattgtctcccgggaagagcttgctgtgcctgcggccccatcacaacaattatttcgattgtcctcctcccccctcgcatgggctgcgattattccgcccattgggtaataggccgtaaggaagcgaaaatttgcccaatttgaaaacatttgagcactcaaaatacccaaaaatgccaatgaatggacggtactacctaaagcatgccaaatccaactgtcttacttaattaattcatccttatccgtataatttccctgtcccctgacggcgagagtcagaaattgagcacaaattggtcagtagctctctcatcaattatttacccctactcattcaccgctctcggtataaacggtcaagagtttattaaagtatgggaaaacgacaatagtgtccctactcaagtttatttaccggacatgaattttaaaaccgccggaggcctgngaaataaaattaacgaagcattcagccatcattacaaaatcaaaaaacaacgtggggaagagagaagccaaggctgaagaaaccaaagactcaaaaatagatgtcgcaaagagggccgcaaaaacgccccgggaaagatggaaaaaagacaactcaaatcatatcaaccattgtcttccagttccatccaaaccaaactaaaaaaccttataaaaaagaaaaccttcaaattttaaaaaaaccctgaaataaaaaggggggtttgaaaaaaagggaaaaaaaaggggacccaaaatttaaaaaataacacaaaaaaaatttaaatttttttcaaaaaaaaaaaaaaaaaaaaaccaaaaacaaaaacctttataaaacatgggggaaaaaaaaaaagttttgtgaaaagaaaaaaaaaaaaaacacccccgccccccc

SEQ ID NO: 30938 - DNA, 1730 bp, Heterodera glycines
tttaatattaatgaatgataggcgcaaatgtgggacttccagggagtaattaaaaaaaaattcgggtggacatattccttctatgggctggtatcttatttagatcccttttatttttatgattttaaaataaatttaaattggcgtactcaataaaattgcgtataactttgacattgtcgccattctggtaaagccaataataagcatcgattgctctggattcatccttatcgaagcggcttatcatgacatgacggcagttgtaattatacaaaagaaaacagttttcgggctcgcaccgtagcacaagatttgtatcattttcaagtttgttggaaatgaattcttgccgaatatgtctgagatatcaataatatataaaaccaagaatttgagtgaaactaatttgctaaacccgaataggcccaaataggaagaattattggcaaaaataataagaaaaaacactagcggttgaattaaaaaatgtgttaaaaacgaaaaaatattccgattattggtcggcataatcaacaagagagagaagaaaatgaaaagaactagagaaggagagagagagagaaacacaacgaaaacaaaaacaataataagaaaattaagagggaaagggagagcgataaaagtaaaggaaaagagaaaaagcaagagagagaagaaatgaaagaaaaagattagagagaagaaagcgagaaagaaatacagagagaggtggtgaatgaattatgagaaaaggaggagagaggggaagagggagaaagagagagggaggaggtggtgagaaaaagagatggagagaaataaagacaaagagagagagagaaagcgacaaaaaagagagagcgagcgaaagagaacgaaaaaacaaaaacagaagtagttagagatagagagaatgggaaataaaagagagttaaaggaaaatagagagattaaataattgagagagaacatgatagagagaaggaaaaaagagaaatgaagcgagaaaaataaaggaaaaagagagagagaagaagaagagagaggcagtgagagattagaaagagaagtgaaactgagtgagagagagagagagcagaggaaggaaggggagagaggaatggaaaggaagagaaaagaaaaatgacgagagagggaaaggaagagagagagttaaagggaaagagagatagatggagaaaaatggacagagagagagagagagattaagagggaaagagagaaaaaagggaaagagagagaaaaacaaacggtcagagagtgagaaaagaagagagagtttaagggaaagagagagagagagataaagggagggagagaaaggaataaataattgagagatagatcgtgacatagagacaaaaagaaaaaataggaaggagaaagtagataaagaggaaagaaatcatacttggatgaaaaactaatttattaataaactctatcaaaattttgcttttattatttcaaaataaactgagaggttggcgcctgaagcggcgcctaagcgctcgtatatattaaattaccagcaaaatacttattcataaatttatatttggatttatgcatttttgagcttattttcaagagccgaacgtttaaattatctctgaacaacaacaaaaactcactttccattgccaattaagtttagaccgtgaaaatctcgctgttcgcttcagcaattgtgaaatgactctaga

SEQ ID NO: 30939 - DNA, 1085 bp, Heterodera glycines
  unsure (1)..(1085): unsure at all n locations
ctctctgtcatgttttcgagtaataagaaacaggcgctcattattggtaatatctgctaaatcatccagaaaatatgaaacaaaaacatggacagaacattcccaaacattgacaaatacactaccagaaacagacacaaacattgccgaacatcggctaaaacgctaaaaaccaggatagagatgcccaaaacattccgcctgtttttggtatgcgcctgttttggcaatgtcaatatttgctaaatcatccagaaaatatgaaacaaaaacatgggcagaacattccgaaacattgacaaatacactaccagaaacagacacaaacattgccgaacatcggctaaaacgctaaaaaccgggatagagatgcccaaacattagcccaaaacattccgcctgtttttggtatgcgcctggcaatgtttttggcaaatgttgggaatctctctctgtcaatgttttcgagtaataagaaacaggcgcaaacattggtaatatctgctaaatcatccagaaaatatgaaacaaaaacatggacagaacattcccaaacattgacaaatacactaccagaaacagacacaaacattgccgaacatcggctaaaacgctaaaaaccgggatagagatgcccaaacattagcccaaaacattccgcctgtttttggtatgcgcctggcaatgtttttggcaaatgttgggaatctctctctgtcaatgttttcgagtaataagaaacaagcgcaaacattggtaatatctgctaaatcatccagaaaatatgaaacaaaaacatggacagaacattcccaaacattgacaaatacactaccagaaacagacacaaacattgccgaacatcggctaaaacgctaaaaaccgggatagagatgcccaaacattagcccaaaacattccgcctgtttttggtatgcgcctggcaatgtttttggcaaatgttgggaatctctctctgtcaatgttttcgagtaataagaaacaggcgcnaacattggtaatatctgcntaatcatccagaanatatgaaacaaaaacatggacagaacattcccgaacattga

SEQ ID NO: 30940 - DNA, 1182 bp, Heterodera glycines
aaaatcgcctgcggccatatgagattgatgcaacccgaggcattgctgatcgtccacgattgaaaaaatacataaaaaatgatgcagcaattaagcaaatgatcattgcatacgatatcaaagagaatcgcaatgacgctgatgtgctttcccacttgtacgcattacaatatcgtttagggatgaagggttttgaagcgtgggattagaattttaacgatgaaaataaaagaattgttgttgataaaaattttgtcactttgggtgggcgccgcaagtgtcggcgccgcaagtgtcactttggctgggcgccgcaagtgtcggcgccgcaaaaaaaatagccgcaaatgtcgggccgcaagtgtcagcgccgcaaaagtcggcgccgcaagtgtcactttgggtgggcgccgcaaatgtctgcgccgcaaatgtcgcatcaccatttgaagcgagtcgtgcgggggagtcgttttgttgccgaattttagcgacagctcgagttgttgaattgttttttttttgtttttacaaaaatccgacaatcgtggcatcattcgaaagctttacatttctaattccaacccgaattcgacgtattcgaacaattttttttttatccaaaatcagtttttctaccccaaattcgtgctttctccaagtcgactccttaagtaatatattttaaattttttacaagatttattcaacttgtcgcataagattttttgtaatttcatcagttcatttttcctttagatctcaaccgaatagaggagattaggaattattttgcgtttttaaatggaaatatttattataattatttaacttttgcttaattaataatttttttttgattttattaataagtaatatttcatcatgacttttagggaatttaataatataattctttttcatttttataaattttattttttgccggttgagtaaggtgtctcatagctaatagacattatacggaattttgacaaaaataacattgtgtagatttgtcatgttttaaaatagacacaaaattataggtggttaaattcaaatgattatatatagaaaaaaaatagtgtagatcatttcgtaaaaaatgccaatatgcgcgtttcgaaaaacggcaagttttacagattttttccgagaaatatccgtcataacttttct

SEQ ID NO: 30941 - DNA, 1188 bp, Heterodera glycines
ttttaagctttttaacaataataattttggatttaatatttttttcccttttttattctctacgagagaaataattttgtctactgacctattcttaatcgcgttaattgccttcgcttccgatcatttagtgatcaatttgatttaataatcaaaaattttttataaaatttttttatatactagaaaaagcgttaattgtatttcccatactcttaaatattaatttaatgtgtttaaattaaatcgtgacccaaaatgggtggccaaatgctcggaacaagttgcatctgcgattcagccgaactgcgacgaatagcggcacgaaaatttcatcatttttattgagggctgcgataattttattaatttctgtttaattttctttaatatcaaacaattattatgaaaataaaattttaactgaaattaattttacaaaatttataatcaaaattgtaaccaatagatttaagagttttgttgcgaaacaaatcaaaattccgtaattattaggatgtcaattttatgtaaatacatattttttttcctggattctccatgctctgaatagtatgaaaaacactttattttttgtgtccgcgaacgaaaatagggacttttatttacatatttttacatatttcgtacatttttggtatacatattttgcacatttttcttatatattttattttttacgtctttgaggatttttaaattgaacaaattttttaatttaaattttggcctaccaattatataaaatattttttaggtattttatacatgtttagtatatattatgaatatttgccacattttcttagattttttgcattttttgaggatttttaaagaatttttgttaaatgccccaaaaaatccaaaatctcgcaattttttgtacatattttcattttttacatgttttaaaatttagagaaatttcttctgaaaaaaatattttgaaaatgtaccactaaaaatcggttattttccaaaaaaagagatacaaaaaccaaataaacatttaaaaaattttataaaaatctggtacatttttggctttttgttcatagttcttacatatttggtctttttttaaacatatttatttacatattttgaccactttaagtacatattgctgacatccctagtaattatgtctttataaattaaata

SEQ ID NO: 30942 - DNA, 1516 bp, Heterodera glycines
ctaagggcatcacagacctgttattgctcaatttcgtgcttttgaacaccgaaaatccctctaagaagttgtgcccacagatgcaatgagccaactatttagtaggctagagtctcgctcgttatcggaataaaccagacaaatcgctccacgaactaagaacggccatgcaccaccatccaccgaatcatgaaaaagctatcaatctgtcaatccttacggtgtccgggccgggtgagtttccccgtgttgagtcaaattaagccgcaggctccactcctggtggtgcccttccgtcaattcctttaagtttcagctttgcaaccatacttcccccggaaccggaagactttcgtttccgggaagctccccaccagggcgaataaatccgccggcggatcgctagttggcatcgtttacggtcagaactagggcggtatctgatcgccttcgaacctctgactttcgttcttgattaatgaagacattcttgccaaatgctttcgctgtagtccgtcttgctacggtccaagaatttcacctctcacgtagcaatacgaatggccccgtttgtctctgttaaccattatctcggtcagcaaaaccaataaaatcggaccgaaatcctcttctattattccatgcacgaacattcaagcgaaacgcctgtttgaagcactctgatttgttcaaagtaaactcgccagcccaccgacgccgaccggtaaaggccaacgccggggaaagaccggcagaaaagccaaccgaaccagtaacacacaaagtgtgcaccggacggctagcacagatccaactacgagctttttaaccgcagcaataattctatgcattttgagagctggaattaccgcggctgctggcaccagacttgccctctcatagatactcgttaaagggtttaaattgtacccattccgatgaccggcctcataagagatcggtctcgttatttctcgtcactacctcctcgcgttgagagtgggtaatttgcgcgcctgctgccatccttagacgtagtggccatttctcaggccccttctccggagtcgaacccttatcctccgttacccgtcatcaccatggtagtcagatacactaccatcgaaagttgataaggcagacacttgaaagacacgtcgccggtacaagaccgtgcgatcagcttagttgttctgagtcaacactggacgcccggagggcgcttggttttgtggcgaaaaaatgcgctccgctctggggagattggagctttggtgcatgtattagctctagaattaccacagttatccaagtaagaagtcaaggtcaagtaaattatagctggtgtaatgagccgtacgcagtttccctgtctggcaggttaaacttacacatgcatggcttaatctttgaaatgaacacatcagttcaggcaggatcaaccagatagctgctagcgagcgttgccaagcgccgctattacagccgtcttgtaaagacggatagtttcagcaga

SEQ ID NO: 30943 - DNA, 1018 bp, Heterodera glycines
aaaaatttcaaaaaatttgatcgtccataaataatttttattgatcaggggctcaccaattttgcagagatacgtatcggagcactacaaattcttactaattttcctagatttattaaacccggtgaaaattttttgcagacacccaccacttttgcactaaaaaaaatttcaaaaaatttgatcgtccataaataatttgtaattgatcaggggctgaccaaattttgcagagatacgtatcggagcactacaaatgcttacttattttcctagattttttaaacccggtgaaaattttttgcagacacccaccacttttgcacttaaaaaaatttcaaaaaatttgatcgtccataaataatttgtaattgatcagcggctcaccaaattttgcagagatacgtatcggagcactacaaatgcttactaattttcctagatttattaaacccggtgaaaattttttgcagacacccaccacttttgcacttaaaaaaatttcaaaaaatttgatcgtccataaataatttgtaattgatcaggggctcaccaaattttgcagagatacgtatcggaacactacaaatgcttacttattttcctagatttattaaacccggtgaaaattttttgcagacacccaccacttttgcacttaaaaaaatttcaaaaaatttgatcgtccataaataatttgtaattgatcagcggctcaccaaattttgcagagatacgtatcggagcactacaaatgcttactaattttcctagatttattaaacccggtgaaaattttttgcagacacccaccacttttgcacttaaaaaaatttcaaaaaatttgatcgtccataaataatttgtaattgatcaggggctcaccaaattttgcagagatacgtatcggaacactacaaaagcttacttattttcctagattttttaaacccgggtgaaaattttttgcagacacccaccacttttgcacttaaaaaatttcaaaaaatttgatcgt

SEQ ID NO: 30944 - DNA, 1799 bp, Heterodera glycines
atgtttactttccatgcgaaataaatgagaattaccttctcattacaccggtaaacacgttaaattcgtaaaatttactcccttttacaattgttctttttgcgctaaaatttcgcgcaaaatgacaaataaataaaaaacattttccgctcttttttttgtgatcggattaatttcgcgcgtgaaattttgcccggcgctcactcattcgcacaaaaagtgttccccccccgggggcgaacaaagttcacccagcaaaatatttgtcaccagcacataaaataataccaaaggctttattcattcactcaaattatttatttttgtcagccaccgccggcgggggaaaagcgctttatttgtgttgtttttgtgtgcaagaaggttaagaagcatccgacagcacaaattagtgggtcccgggctgctggtgaatgaatggatgaaaacaacttctttttttgctaattgatttttgcattttcaatcattttgtaaattgttaatttaaaatgaatttttgtaagtactaaataggaaaaagtggatttttaaattattcggcgattgactttatcaaatctgtgaggtccggacttgaaaaattctaaatttccgttttttaggtgcctgattttacagtgtgtttttgacgatagggataactttttttaatatttttggattttctttttcattatctttttattttaaattcttttagaaaaaatattaatgaccgaaggacaaaggttattttcattttcataattttgtttttcgcttttcatcatttgtaatttttcgatttttcctttataaaattaaattttttttacacacagaaagaacctttgccctcatattccccgctctaatttccattcatttaatcattaattacgcattcattacgaacgctgctgatcatgacattccccatcaaactcgtaattttcattgtgttctgttcctgtgacttatggcctttgttcctttcgtttgggtgggaatgatcaaatgttttggtctgtctgatcactattttttagaggttgtaatcagtattcagtttgtttgaggtgcaagccttctgatcatttgaagtttcgggtttactcacttctgcaaggggggcgggacgatcactatcactttgtttatggcccaatcactttgttgcgtctgatcactttgcgtctgatttggccgcgtttctgcttctccttttctttgatcaaacaaagagagcacaacgaacaattagtcgcttaattgcttgcctttcttttctttctttgtctttgtcattgctggaacaaaagtttggacgtgaacagagttctccattttgggtgaaagtttgctagcagaagcagctggaaattaatttgtttactttttctgctcataattcattttgatggaaaagtaaaaaaaaattgtttaattttcaatttttaagaattttttgagaaaaaattcacttaataatgattgatatttgaaaaattaagaaattttaattttcaaaaaaatgtagcatggaaattttttgaataatttcagtcgaccttcatctaagttttttcttcttaaacagatttgacttttcatttatactttttttacaaatatttatttattttttttatttatttcattttttatattctcccctgaaacattgatcgttttgttgttcattctttctgttcattcccgcctaagggcggcttttcattagtcattcattcattcctttccacgaatttgtgacttttgccctcggaagaatg

SEQ ID NO: 30945 - DNA, 1030 bp, Heterodera glycines
gctctgtttcttagcaaactttgcccaaaaatgaccaaattctctattaaattttcaatttcacggtaaccgtgaccgtgaatcacggcacaccatagtaagggcgatgaaattaaataccaaaaacatgattattgttaaataattattaaatgatctgtaaaattgaattatttgcatgcagaattcaaaaataaaggaattgtcatgaatccgaaaaaatattggaccacaattaaagatataaaatgacaaatggcatatatattattctctcattaacttttgtcatgacctaaagaaattccaaatcgacaaattaaaaaatggcaattcagcggaattataaaaaaagaataacggcctcattcctaataactagagtatggatacaagttatgtaaacaattcgacatttaaatattataaaaatagtgagaaaaataagataatttaaaaataatttaatatatgaattatttgatttttttaattttaaattcttgattccattgaaaatctaattactaaaataacctataaattttcaaaaatatattgtttttatagatatttttttataaacagcggctgaaataatcggagttacacgagaatgatgaagaaagattcctttaaaaactcaaatatgaataaatttttaaaaaatagtaaaggaatttgcaaaaatttttgcatcaaatttttgcttattaagtttaaaaaagatagaaaaacctaaatatgtaaataaaaattaaactcaaatttaattatattgggaatttatgaacataagttcatcagagggtgaattgtggctttttctataggtacgaaaatatataaatattaaattaatgataaaattaaattgataatgtataaacaaaaaatcgataataaattaaaattaaaaagtcaaaatactaaacttcagataaggaacagctaagagttttttcggtgaaaattgacataggagatgaagaagagttgtcattggcaaaaccatcaacaattttcagaa

SEQ ID NO: 30946 - DNA, 922 bp, Heterodera glycines
  unsure (1)..(922): unsure at all n locations
gttttgtcatccatcaaaatcagtggctgcgttcctcgctaaattgtgatgaagcatctgaaattaaaaaattttgatacttgaaggttttatttaaattaagaaaaacttaaaatcccaggcaattaggtcaggaaatgtattctaagttttgttgatacgaaccccaaaatattaggtaactaatccgattacatggtcattgaagttggtgtcagggttgccattgatcactcgtaaactggcaatttccgacgcaaatttaacgaaagttaaattgaatttaaaaattttttcatctggccgccgctcaaaaactgtgtacaaatcatccatcattttggccaatgtgttgatattattggccaaattttgctcttcccattcataagtttgcgcgcgcccaaaattaactgcccaattagtggcaattaaaataaaagttagtgaagagtgccttagtaatttcatatttacaattattcgaaacaatttttacaaatgcaaatgctaattttcattttttttttgccattcatcgaattgtattgatcatctgacgtgtcattttagcaaagattatgccaatacctctaggctgataatgccacacgacaattttcacccaaacaaaagaaatttttaattcgcatttttcaaaataaaatctcttaattcattttaatattccttctaattaaaagttttttcatcgataaagttgattcagacaaataaaaaaccttaaaagcatggcgaccaataaaacttttttgaaaattaatgaaatttcttgaattttgcaaaaaaaaaaattagtgatacaaatgatttcaataattaaattttagttgtttttgagcaaaattattgctaattanaacttttttgaatgaattttattatttcaaaattncgtttt

SEQ ID NO: 30947 - DNA, 1254 bp, Heterodera glycines
  unsure (1)..(1254): unsure at all n locations
gccggcgctactttaaaaaagatattttttgaattttatcaaaaacaatagggcggagggacccttttgttctgcaaaaaatgtttgtgctaaaaaaaccgataaaattcgttctccggggttttaagggtcgctgatcacgaatttgacatttattttgaacaatttcgaatccccaaaccgaacccgaacaaaaatcgaaatttgaatttttcgattttatgatttttttgtttaaatttaggttagtaaaagggaattgatcaaactagagattaatcctgcgggatcccgccccgcaaaaaaatatccgttccattcccgaggcggggtgcgaaaaattgaaatttccgggcttcaccccattgagatcaatcaaaattaatgattcattattatttaggcgaaaaattggggtggaaggccggatttgaaccgccgctcggggccccttacgtggatcagttgtcttagccactagaccacatccaccactggagggatgactgttgttttggggtcattttccttcattttggcccctgttgcttttgctcccacagcactttgagctcccacagctattttcgatcagccattacaaccagttaagtcactccggaactaagccactcatcatattgactgtttcgatcgttggatggaatggaatttttattaacttatagcattattggtgcaaaatctgttattaaattgtacaaaaattccaattttttctggctgtgcctatcagtagcgcctgaacctttatggcaaccctggtttagtcggtataacggcttatacagacagttgtcccaaaaatgaatataccaaagcaatattgctgttgaacgttcgttatcacttcattggaagtgcaaattaagtcacggaaaatgaggtgacctgactcacatttttgtattttttatgagcagaatttttttaatattttgtaaaaaagaatagaaattaaatgacccggaatttaagaaacaccataatatggatgaataaaattttgcaaaaaatgaatcatccgaattttggaaaatctaatttcgtaccaatgaaaggggcggaaaatgagcgttggaggacagcagacaaatgcattttatgaagcgacttttgcctttnaaaattggagcgaatgacaangcccatgatganattgattttaactgactaaggagtatattcgcggatatggtttaatnttatgataatatctgaattntttgatca

SEQ ID NO: 30948 - DNA, 2030 bp, Heterodera glycines
gaacggatttttaggttttcacctatttttttacggatagcatatgctgagataagcgcaaaaaacacattttcttccatcacttttcgatttagggcgactttcagcaactattttcaacaattttcgcttatgaaactttataacaactattttgacttgtgaaatttttaaaaaattattttttcaactatttctgcttttaaacaaaaattcttatgaaaaatgaaaaaaaacaaaaaaaatgcaattcgaagtattgacgttaatttttttttaaatacacctctaagaatcgatttttcaaaaagcaaaaagcctggccatgatttgccggacgatcgaaaactttttgtgaaaatcttcaaatgtgtttgaattataattgtgcaaccgaaaaggataaagatgcgaaaattttggaaaattcacactttattgacatgtttttccaattttggcaacattttagcaactatttaggtacctatttcgcgatttttagtatttgagaattcgatatctgcttttttccatattataaattatattgtgtattgtttgactaacttaattttcattttaatttttttcaaaaatttataaatactttgtaaaacgttcgcattaaaattgtatacttagatttttaaaattttattcacttcattattcattattaaaaaattattcataatgttttctaagacttttaattttcaatttaaactattgatattagaattattgaataaagagtatgtattttatttaatttatttttctcgggcagtatcaattttatgatgcgctcatgttgcgaacttttaaaaggattgtgcaaataatcaaatgcttgttttaataattatagaaaattatttgattaatttaatattatttaaataattttattttactgcttatttttcatcatttttcaatcatttaaattaaaaaaaaacattttaaataaatttgtaggtgatagatttggttttgattagtactcgttttttattttttacttttttttatcttatgttcctgtcacgtaagcgggtgtaattcatgctcataatttttttgttcaaataaatatttataaaattaaatatttggtttaaaatgtaaacaattattgtagataatataatttatttttttggtgtgctttttatttgtatttattttctaagctgaaatttaatagaaattattttttatatttttgctaattggtttgattagaaaataactatgcttttaaattttcaattgataattattttaaaattctttttatatttagaacttagtttagttcgcgattttaattttaatttacaacaatgtcgtttatttccttatcaattcttttgcgagatttttaatattttctaattatgtttttgctctttttgaaagctttcctatttaaaattaattatatttcatggatgaatgaatataataacaaataatcttttcattttataaaaatttaacatttatattttgatttttgacatcattctgttaagtttcatttttagaattatttttttgcttgacccttttttatttatgtttgatatttgtattcaaattttattattttgccttgacttctctagtgagtaaaaatgaattcaaatttttgaattaaataaacaaattattagtaaagagtcagagattgcaacataagcgattcagggaataggctcccatgcttctaacagcataaaatacaatatttaaaatattaactattcagcaattaatcgcgacatataaaagaaagtttaaattatatgcttaaaataataaaaatactaaaatattacaaaaatccgcaattttttgctctataataattattttatttcatatttttatcactttttgagaattgttataaaataaaaatgacttttggattcgggaccaaagaggtgtgaacaggatttttgagtggaaaattttttttcacaaaaatctaccaaaaatatgtctttaggggttat

SEQ ID NO: 30949 - DNA, 980 bp, Heterodera glycines
ctccctatcatgctcgagagcatttgtatgtgtataacatttatcaaaaaaagagatagccatttttctgggataacctctaaatataaaaatcctctgtgaaataaaatggcgattgtccacagccctccgtctcatacgcaagcgcttttgtgaggtataaaatttctcaaaaaaagagatagccatttttctgggatagagtataaatttaaaaattccctcaaaaataaaaggtctattgcgcaccgccctccctatcatgctcgagagcatttgtatgtgtataaaatttatcaaaaaaagagatagccatttttctgggataacctctaaatataaaaatcctctgtgaaataaaatggcgattgtgcacagccctccgtctcatacgcaagcgcttttgtgaggtataaaatttctcaaaaaaagagatagacatttttctgggatagagtataaatttaaaaattccctcaaaaataaaaggtctattgcgcaccgccctccctatcatgctcgagagcatttgtatgtgtataaaatttatcaaaaaaagagatagccatttttctgggataacctctaaatataaaaatcctctgtgaaataaaatggcgattgtgcacagccctccgtctcatacgcaagcgcttttgtgaggtataaaatttctcaaaaaaagagatagccatttttctgggatagagtataaatttaaaaattccctcaaaaataaaaggtctattgcgcaccgccctccctatcatgctcgagagcatttgtatgtgtataaaatttatcaaaaaaagagatagccatttttctgggatagagtataaatttaaaaattccctcaaaaataaaaggtctattgcgcaccgccctccctatcatgctcaagcgcttttgtgaggtataaaatttctcaaaaaaagagatagcatttttctgggatagagtataaatttaaaaattcc

SEQ ID NO: 30950 - DNA, 1231 bp, Heterodera glycines
atcgtgaaaattttggaaaaaggactatctctttttttggtctacagtcaagggaattccaaccgcactctcagcataaggaccccgatactaattgttctggaattattttctcagcgcatttgatcgtgaaaattttggaaaaatggctatctctttttctggtctacagtcaagggaactccagccgcactctcagcataatgacgccgatactaattgttctggaatttttctctcagcgcatttgatcgtgaaaatcttggaaaaatggctatctctttctctggcctacagtcaagggaattccaaccgcactctcagcataatgaccccgattctaattcatccggaatcattgtcccagcgctcatgatcgagaccaatttagaaaaaatgtctatctccttatttgctatacagtcaaggcaattccaaccgcgctcgacagcataataactcgagaatctgactgttctgaatttttcttgccatcactttttttgcgcgcaataattgaggtaaaatgaaattctgcagtttaatagagcattcatgggaatatcgaacgccctcaccacttttggatttggttgtcaaagaaaaaagttatatccaaaaacttgtgctcatacgaaaacggcccgtacgaaaacgaccccgaccctaaaattagtcgtttttaaattactttcttcgaagaatgtttaaaaacggcttttgggtttaattactttggctaatttttcaggatttttttggatttatttcgtgcttttttggcatttttatgtgactttttggtcattttttgtgacttttggcattttttatgactttttcgtgactttttggcggtttttcatgactttttaagtcgacttttttgagatttttcgtgacttaaattcccatccctattgattaccaaagaccaaagatttggaaatgcaagaaaaagttattgccaagaatttaaatagcagttaatgtgcaatgaaccgaaatttttttatcatcgaaaaataaagtattttaatcagttataaataaaaatgattacggccaatttatatgcctttatttggccaaaaaaacatataatggccaattcacacgcattgtttggccaatgttttttttgaaaacaaagaattccgttggccaccattgtgcgccaaaacagcgacacatggtggccgatttgcctttaggcattttgaaaattgac

SEQ ID NO: 30951 - DNA, 818 bp, Heterodera glycines
ttccaaattttcacgatcaaatgcgctgagaacatttccagaacaattagtatcggcgtcattatgctgagagtctggttggaattcccttgactgtagaccagaaaaagagatagccatttttccaaaattttcacgatcaaatgcgctgagaaaaaaattccagaacaattagtatcggcgtcattatgctgagagtgcggttggaattcccttgactgtagaccagaaaaagagatagccatttttccaaaattttcacgatcaaatgcgctgagaaaaaaattccagaacaattagtatcggcgtcattatgctgagagtgcggttggaattcccttgactgtagaccagaaaaagagatagccatttttccaaaattttcacgatcaaatgcgctgagaaaaaaattccagaacaattagtatcggcgtcattatgctgagagtgcggttggaattcccttgactgtagaccagaaaaagagatagccatttttccaaaattttcacgatcaaatgcgctgagaaaaaaattccagaacaattagtatcggcgtcattatgctgagagtgcggttggaattcccttgactgtagaccagaaaaagagatagccatttttccaaaattttcacgatcaaatgcgctgagaaaaaaattccagaacaattagtatcggcgtcattatgctgagagtgcggttggaattcccttgactgtagaccaaaaaaagagatagccatttttcaaaattttcacgatcaaatgcgctgagaaaaaaattccagaacaattagtatcggcgtcattatgctg

SEQ ID NO: 30952 - DNA, 1241 bp, Heterodera glycines
ccttcgcgtgcgcaacttttggatgattttcgccaacagttgaaaaagcagcaaatgtatgactacgcactattggtccatcgaattgaatctatccataatagacaaccaattgataatgaaaaggtggcaaattaaaaataaattaataaaataaattttttaaaaaaattatccgcgttgggactcgaacccacgataaattctgtagctcagtggttaagcccggcacagtttaacattgccttagattcgaatcccctttggcgagttggacttttttatgttctgcttttgtgaaatttaagtatgggatcctgtccggagctctgatatacacaagagacttgatgggatagaaaatttgttaactatcttaattttagaataatttttaataaataaataattttaaaaaatatattttttttttgatattcttaaaagaagttttatttttcgaataaaaatttcattttttaagttagtgaatagcattttcaatgagtgtaatgcttggagaaattgggcggacatttgctgctcgccggaagatgataaatgcgaaattgtacaaaattttaatgaccaacagaaacaacaatttgtttggcatggcgacgaaattttgattcgaatgtcaaaaatgaataatttgttgagggaattgatggtaaaattaaaatttctttgtgcataatttcaaaaattttagattaagattaaaaacctttttcatattaatattataaaatatttatataaatttatttgatttttttttaattataatttttagtataatttaaattattcatgcttctcattttttaatattatttaggtatttttcgaatttaattcggctcccgcaaaatattttgccacacaattcaattttaattgcattgaattgattaaatatatgcagaagtcgcccatttctcaaacaaccaccactccagcagaagaggcgaaaaaaaattcattttttaagaggtttcaatttttttttgcgattttgcgcctagcaaattctatttctaaaatagtattgtgatatttactagaagattaaggcagcgcccggtacataaaaaaaaagtaggggatcggggtcggggagcaggcctaatggtcgggatctagacgtggatcggagagtccgggtccggttcggttaggaaccctaatccagtggaggatttactaaaattcggtggatttgtttatttgaattg

SEQ ID NO: 30953 - DNA, 983 bp, Heterodera glycines
agtaactcggctcagagtgagattaagggacgcaaaagagactattaaaagcgattcgaaaattctatcgactgatataataacgatgcagtcgcggcgttgacaactgagatggaaccaaaagttccataatatctttccataaggctggaaaggcagaatttgaatggccagtcgatatttacactgagcacccgttgaagcgggtgatgcgaagccatagcaaactgtatttttaaattctggccgcaattctaccaaaaacgtgtttagaccgcagtaactcggctcagagtgaagattaagggacgcaaaagagacgatttaaaagcgattcgaaaattctatcgactgatataataacgatgcagtcgcggcgttgacaactgagatggaaccaaaagttccataatatctttccataaggctggaaaggcagaatttgaatggccagtcgatatttacactgagcacccgttgaagcgggtgatgcgaagccatagcaaactgtatttttaaattctggccgcaattctaccaaaaacgtgtttagaccgcagtaactcggctcagagtgaagattaagggacgcaaaagagacgatttaaaagcgattcgaaaattctatcgactgatataataacgatgcagtcgcggcgttgacaactgagatggaaccaaaagttccataatatctttccataaggctggaaaggcagaatttgaatggccagtcgatatttacactgagcacccgttgaagcgggtgatgcgaagccatagcaaactgtatttttaaattctggccgcaattctaccaaaaacgtgtttagaccgcagtaactcggctcagagtgaagattaagggacgcaaaagagacgatttaaaagcgattcgaaaattctatcgactgatataataacgatgcagtcgcggcgttgacaactgagatggaacaaaaagtccataatatctttccata

SEQ ID NO: 30954 - DNA, 825 bp, Heterodera glycines
atattccacattttgcattgaaaactcagcgcatgaaaagatttgcatcgtgtcctcgtttaaccacctggccataacatcctcgcgtgtaaaagtcgtctggcctgaatggtaggatttcctcctctggaacttctacggcattccttggaaaaaagctgcgcgattgatcggcttgtggcaagttgtcctgcagttaattgtgcgcgagttgctcctcctggatggctctttttcccaatccacaatcgttgacgatcttcaggtaatcatcctccaggattccaaacgattggtccgacaagcgaatcggttttccgttgcatgctgttttcattttcgcctctttgctaaacgttagcgcctgttccttgcttttggatatccatgttccgcctgcccaatccgttgatcccgtgtgctctccgtccatactttcgacgaaatggtagtcgcatggcttacagctctccttgcactccgtttcccaattgatggactcgtgcgcacggcacgagtacacacaaaaggaaaactcttgttcgcgcgattaaccttttgtaccctctagaaattaacacttctgcggaggacgaagtcagtcaaattcaagtgactgacggagtccagtttgcctccagggacggtgaggcaggattcacaaatcgtcacgacagaatcgagtctgtctccagtcagaggaaggaatgagcggcaagctgtgaaagagcgaattcgaaagagacagccaacggaggaagtcagaggcaaaggcaaattgaaaaagaatgggccatatgatcgactgtgaccgggcaactacag

SEQ ID NO: 30955 - DNA, 1553 bp, Heterodera glycines
  unsure (1)..(1553): unsure at all n locations
tttttcaaaaaggcattcccaaatatgttattgccatccaatcatcggtgccgtaccgacagcttttacaaccccgcgaagaaggggctaagcaccacttttcctcccctctcttatcaacacattttgatgagaaaatggcatggcgcgcaaatggcataaaaaagaagaaaattggaaatattccacggaaaaacttacacatcgttttgcggatttggagttcaaatttcacttcagctggcgctgaaatattcgacggtttgagtaaaatgcaaaaaaaaaagtgggggaggagggcacttaaaagagaagggaagagctgctgaaatgagatgaaaattgtgccattttcacataataatggcgaaatataatgatattaaatctgcgtacccttcagacatgagctcacttaaatatgtcatttaagaaataacaaattttaggagtttttatgtggaaaaatatttaaataaaaatcttttgcgaatcttaattagtgttaaaaaatattttatcgtaaaaattattgtatatagaaataattttaaaaaactttgtcttcaaaagcaattttcttacgaaaatgaaacgcttaagaggttccaaaatctcatgaaaaatgagcgttttccgtcttacaatgatgagcccggaaaggaacggcccggcccaatataaagggccaattttggcactatgaaacataaaacggcacggacaaattggggtaacatttctaccgaaaacagcatcgataattggtgtgatggaagagaatgtttatgccaagattggttcccaaattggcagcaccccaaaagccttattattttcgctgtttgccgaatattatgtgtccggttgggcttggattttggtggcgtctttttcaaatgcttcggcacctctcattattattattatctttttggccaaaaatgttcccaccttttgtgacgaagaatggatgaacgattcattatgcatcacaaaatccattgaaaacaaaattcattttttgtggatttcaaataggaaagtgcatagctttctcaaaaatagaataagggagtaaaaaaaaatatgaaaaacaggaaataaagctattcgaaaatttggtttattgaattagttaaaaaggataaaatagttattggttaatttttataaaaattaattttcacacgaattgtttttcaaaattttaataatcaatacttaaaaaaaaatttatgatttgagagcggacttatttatttatttcaataaaagaaaaagccaacaaaatggaaaaatgcgtttacatttagtttgaacataaaggacgggggcggaggttggcgattggagcgacttggccacgcaaaaactgccgtttacgggggtccaattcctgctattttggccaaaaatacgggtgagcggccggaaaatccccgcaggggcccttctctctctcgagtgaacactaaataataacccagtgtattttaaatgaatattatattttttaactanaaatggggatatagttgaaaatatgaaaa

SEQ ID NO: 30956 - DNA, 1165 bp, Heterodera glycines
  unsure (1)..(1165): unsure at all n locations
aaaataccccctaaaaatcgaatttttgactttagcccccccccgccgaaggcaagagtctggcttcacccttagtttttgtattatttggctgaaaataatcacatgtaactcttgtatggcagaattcaggaatttcaatgtctaaggcatcaaaggccgccaaaaaaaggtggcgaaaatggagaaaattctatgaaagcatcgaattggcaatccgtgaacaaatagacacttcggctgtcacagctggccatgaagcggcgcattcttgggccataatcaaaggaatgccagagcaatgtatatctacgacaataatacccagccatggcaatttgggcctcactctatcgacagaagtggactatcaaagttgctctcttaacgagctgaaaatgatccttattgccacaatggctgggcttggacggagttttgggcatgatggagatatggaggccgctcggccaatcgctaagaaggtcgtttccttttgaactcataagctgcagtttttaaagccaaaaatgctttatttgcaacgaaattcctatgggctttattgcagtttaaatttttggtatcattcggcagcttaaaaacttcattattactcgaaaaaatctcagcggaattaaatttaaaattttgctatagcatataacgaaatttgttaaaattttaagtctaatgagataggaattcggaatgttgaatgatacctatatttctgagaaaagttatgaatttgaaaatttgtcgacatttttatacgtgaacatacactaagatttgtaaactgcaataaaacagccattttagatattgcgaaagaatgggagacggttgcatggacttagttcgcgtggtaaacgggcactgaaaagagaaattaatggagaaatcgacgcggccacgaggcgaaggaactgcttgtaaataattggagaaggttttagcttttagtccattctaaatctaaacaaattagtactttaattcgatttatttagttcgcaattgaattatatgtgcgaaaaactattaatgcggacgaagcttatgagtagttcttttagatatataatacctaatacatactaagtacaaattntaaaattttaggattttggcccgttatctccaggatgngcgtgtagga

SEQ ID NO: 30957 - DNA, 1610 bp, Heterodera glycines
  unsure (1)..(1610): unsure at all n locations
aatgttgaatgacaattcaaaatatnttttgagaaaccatcggaaagaaattggaaatttatttggaaaatgaggaggaattaaattatgaaattaatgaggacaaaaattggatcaacgaaaatactgaaaaagtaaaacaaaaaattgaaattgaagcttttcgaagagaattagagcaaaaaatggaaaaaatgagtgaaaatgaaatgcaaaaatggccaagcttaaaatttacaatgcgtatttagtgctgctcgaaacagaaatttcccgagaccgagacttgatcccgagactcgagaccgagacccaaaaaatccgagacttttctcgagtcgagaccgaaactctcgagcagcactagtatttaattgtcaacatttttatttaaaaaacgcattttccatggtaatccatcggcttctgtaagtgttttttcttattcttttttcattgatattccttctgtctcccctactgatgaatgatcaatccctattttttaaatattgcctcattatttaatataataaataaattatattaagtaaaatatagattttaataatcctactgatgattattacttaaaagctttttaatataatagacaaattagattaaataaataagatttgttggttttgctccctttataaggcttttgtgcttttccattttttcattttcataattactttaaggtattgaaaaatagaaataaattattttatttatttatttattttagttacatagatattagctaatttcttaataaaaaattttaatttattttgaaataaattttaataatattaatgagcatttaatttattttaagaaaaaataatgaaaaaataatgttttattttttctctgtaatttcttttacaattattgttcatccttgtttaattcgaattttaaatgcgagtccatcggtgagtaattatttgggcaatttaattttactaatccattttaattaattaggtcgatgacaaaatgctaacggcatttatgaaaggtcatcaagaaacgcaaattagtgaatattcaatgcagaagtatgaggcacaccttggcattatgtattatatgagaaataattggcactgtgacaaaatagcaaatgaatttgcagaatttgaacggacagaatgccaaaaatatcgcaaatatttggacattttgtacgaatatttgttcagagaatacatcggtattcacacagtgaagccaaaatttgtgtttaaaaagaaacattttgaaattgaagggccaataatttatgcgataaattgtttggccacaatttcacagttttattgctggaaatatgtatctaaattatattattcctcattaaagcgtttcttcaatttgtattttgcaccaaaattattgaatgaggagggattaaactatgaaataaaattggaaaatgaaccaaaattgccaattaatgaaatgattttggaattggcaattgacacggcgaatgaatggcaaataaatgaaattttagacggaataatgcgagaaaatttggaagaaaaattgaaagaaatgatcaaaaaaacggaagaaacggaaaaaaaata

SEQ ID NO: 30958 - DNA, 1372 bp, Heterodera glycines
atttgccaccaaaattcacttacactttaactgatcctcgaaggaggccaaaattttaaatcgactttttttttgccacccgtcatagatttcaatatgtggaattagatttcggcctggattcaggtccaggccatttttttgacaatataagcaatagacttgaatattcttttcttgaaaaataatgcaataaattttttaatttgcatttctcgcatccatttcagtgttcttttcttgattcccgtttaatttgactatgccaataaatttctggccaaataagtatattttgatcagtaaaatcctattgaaatttatagagatgaccttgttaatttgctattttatggcatctctatcgcaataaataaaaattaatttttttttcaacaaatagatataaccggagtaaaacccacaatagacacttaacaggtaatccactataaccatggtagattttactatcgagaattgatatttaaaaattgccggtacttttctaaaataaaaaatatagtgaagtgccaataaaatcaccagggaattgagtttaaatatggaacaagcacattgaaacccgaaatcaagtggagtgccagcaaaatcggcaggaaaggaatttaaatattcagaatgcgtctcaaattagttgaatggttttatttgcaatttatttacattaacggatttataacattatctcgatgcgacgaaaaaaatttgacatcacccttatattcattacagcgccaggggcttacaatcttcataatcagccatcagtaagcgactaaaggaatttgatttttcaaatttacaaagaaataaaatctttttaccatatttttcgtccttgctttttctgcagttcttctaacgctttcgaaatacgcattttggtccaatgtgtgttgtgtctatataaaattaatttttaaagaacttatttccgtttatacccttgcgtcttcgttgaatgggctctcaaaattcggctcttccaacagtgtgctcagccccaataagatttctctcatatgacggtctgatgaccatccaggtccaataagccaattcatacaaacatgccctttttgtggttcgcgtcgtgaaactaattttaaaattaatctttaattagtagggttgtaaattatatggattaacatattttttctgcgcatatgctatgaagaaaggggcttaaaaatagcatttctgcgttaaaattttttgatttggtgaaggtttttagtccatataaatccatattttgggggttttcgggaataaatccatatttcgccatttttgggtttttagtcctatattttggccattttttggaaattttcacaagaaa

SEQ ID NO: 30959 - DNA, 1754 bp, Heterodera glycines
  unsure (1)..(1754): unsure at all n locations
attatgagccaccatttggcaaatcggtctttttttcgcattaaagaagattcagncgattgcttggagtgtaagtaaaaaaacgttattaattttcatcttcatcattttttggtttaaaaatatatttgaatacttttttatactttgaaagacttttttattaatacagaattttttcaaaatttccaaaaatccgcaatcctgcgcaggatcctgcagattttaaatgcaggattgcaggattaatcctgccggatcctgtcctgtaaaaaattttgaactccaatcctgcaacaggatccgcaaatttgaaatttccggtctctaatgcaaatgccaatttaatgtgccaatagcaattcagtggcatggtgcccacgccaaacccaacgtggcattaatttctctcgccacgtacagaaaaatggcatattattttttgatccattgtttaattttcacccataaatcaggctttagcattgcgtggcaaattgattattagcttttttaatttacgattgaaaaaagcaaaagcataaattaataattatcaaatacctaatctcagtttgtaaatttatatggagcagctcgtttcgccctactcgaaaaaattaaaaaaaaaattaaaagttttaaattttagaaattgatggctttttcaagaaaaaaatcacctttcattacaattctttaatcaatttttctaaatttttatattttccaagaaaaattaaattcaagtattcaaaaaatcaaattttttttgtttttagatctttttatcccgaatcttgatttcgactttcaaaaatccgctctttattcaaatgcatatttaattgcttaaataaaaaatgaaataaataacccaaacaaatttagaaatattatttttctgtaaaatattaaaaatcgcttaataaaaatgtattattatattaattaatatttgttagcatgatcattattactttctgcgcaattttatttgttttaatttcaccaattttgccatcatttataacaatatgcgtaagaccgcacatattgaattattttgggcaactgatgtgtaaacgcaataacattatgcacatgatttacgaaaatatgcctaaaattgaagatcaaaaatgtggaaggtattcatgcactcgcttcgggtggattatttaggaaattgtgatcggaatgaaacgaacgcaatgatcaaaatcaccaaaactggcaccaatgaaacggttggtttgttctgtatgtgccagggaaggcattccgaggggcaaaaaattttcggaaattggaattccgaatcccccgaacatttcggaggtaccaaaatcggacttccgtgccattcctggtatgtgcttcaattctttttacaaaacaagcatttttatagaaggaatttacgatcccaaaaacgcatctttccttttatgaggtgccgattgtgctcatgttcggcacacgacaagtgacacataaaacttgatgattcgcgtggataaaaatgttattatttatttctttttatttttttgttaattttacccccgagtgctccgatcagggacgggcgaaacttcggcttcgaaaacttcgggttttttgagtttcgaacttcgtgcttcggcttcgggtaatttacccgaagttttgggaaaaatacacccctaaagattgagttttcaatgttaaaactgcgtcagttaatgattttcttttggtaaacttaaatt

SEQ ID NO: 30960 - DNA, 993 bp, Heterodera glycines
  unsure (1)..(993): unsure at all n locations
tatccttttttattcgctgctttagagtatatataattttttgctatatcctggncttttaatatttttgctgaactagctaaccagcctacacaaaaagacgtctttgtcgcaatcaattctatttgagcccaccatgagaataagaatgaatcagttactgtttactcagacttctcggtaaaagcgacttttattttaataaaactttttcaaaagaactaaaattatgaattcaaagcattatttttattttattttatcataaacgatttctattatctgaaaaatattcttttagatactgcattacagattgggattttatttggggtatgtcaaattgcccatttgattcaattatgcttattctttgtcacattctaaaaaaggtttattatccttttttattcgctgttttagagtatatataatttgttgctatatcctggtcttttaatatttttgctgaactagcgaaccagcctacacaaaaagacgtctttgtcgcaatcaattctatttgagcccaccatgagaataagaatgaatcagctactgtttactcagacttctcggtaaaagcgacttttattttaataaaactttttcaaaagaactaaaattatgaattcaaagcattatttttattttattttatcataaacgatttctattatctgaaaaatattcttttagatactgcattacagattgggattttatttggggtatgtcaaattgcccatttgattcaattatgcttattctttgtcacattctaaaaaaggtttaatatccttttttattcgctgttttagagtatatataatttgttgctatatcctggtcttttaatatttttgctgaactagcgaaccagcctacacaaaaagacgtctttgtcgcaatcaattctatttgagcccacatgagaataagaatgatcagntactgtttactcagactttctcgtaaaagcgacttttattt

SEQ ID NO: 30961 - DNA, 1084 bp, Heterodera glycines
acctttgagggtgtgaaaacagctgttaccggcaggtgtccggggcccattttcgcgcaaaattttttcgcgcatttttttcggggtactgtattttaaaaaatttttttaaaccggtgggtgtggggtgggattttaccgcactttttcctcattgtactgtaattttttaaataaatttttcctaattaaactgtaatttttattaataaaatttctacatttcgacggcattggatattttacataaaatttaattcgataaagtttggcgtcgttggctgctgctggtcagcgaacgttggcgggcggtgggattagtaaagggggggggggggagcattctttgctcaattattgtgtggacggtgtgtgtggggtcattttttctctttttctctcccccacacttatgttgttctcttttcttctctctctttctctctttttttctcttccttttcgttctctatcgcacacagcccaatgtgccgaaggtggactcatacagcccaaaactcacaactttttttttagcgtctcaattgatttcttctttttttgtaattaaatgttaccaatgtttttcccaacacccccttttttaatttattttaattcttttcaattgccaaccggatttttaaacttttataaatacattcacagcttaataattttttaatccttttttttgcactttaatttttattttaaaaataattttattcaacgttaataaaaaagttaacagatgttgtttttttgtgattgatacaaaaaaaaacatttttattgtaaatcccctttttcaataattcaattgttccccttcaccctcccgtccccacgctcgttccctgtccctcactcacgcgcttctgccggcttgtttttggcgtctcctgcatttcttccccctcctcttccaaccccctaagcttcttcgccgctctcgccttctctctctttctttttccactgctgcgattcgtgcttttgctcattgtggtgcttgccattgaccccgcctttgttataagaatggtaatttttaaatttaaatttcattttcactaccatg

SEQ ID NO: 30962 - DNA, 1503 bp, Heterodera glycines
tgccggtcaacagcgggtccaagtcgccctgaacgccgatgtaacgggcgacacggccaggcaccaggaaaccaaagtcgctgaatgatggatgtagtatgtacctgaaaagcaaaaaaataaccgatttttttttgtttctaaacaagaaaatatgtataccgtatttcctcgattataagccccggggcttctattgttcaacccccctccaaagggggcttatattcgagggggggcttttattgttcaacccctttccctatataaattcttaaaattttttgctttctgcataatggtacaatttaaatcttaatctgaaatttttgaattgaaaagatttttcattttttggcccttggaaatttaggcgaatgtttgaaaattcataattcacttctaaatgaatcaattaaagtgcaaaaaagcattaaaaatagagaaaaatctggagcattttatacttttttagaattttctatcttcaaaatgaagaagttattacataaatttaggaaaaattcgttttttgagaaaaaaaaatttataacgctgttctgaaaaggtttttttgaaaaacacgaaattcttcctctataagcttctgtttattctatatttttataagacttttgaaaaaaagtacaaaaataaactgattttggaattcgggatcataggtgggagcaaatggtttttttggaccatgggttcagatccacttgcctgtaaaaatgtttttttagggtttttgggaccactaatcaagaacttggcatccattttgcccaattccaaagctttgatccaaactcgaaaccccaaaaataatttttaaaaaatgttgcaggcatgtggatttgaacccatggccaaaaacccatttttaacaaaacaaaaaatatatttggtataatatttctatatttgcttgaaaattttttagtgattttcatcaaaatcttttccagtgcaatttattaacagaaattttttctaagctattgcttcgctattagacaatttccaaaaaagttatacataaaattgcgaaaagtcgaaatttttgaagttttttcttttccaggcttgaaaatcttttcgcttttggtaaggctaatagagcatatgttaagagctttcgaatgataccaacaatgttggatttggatgtcaaagaaaaaagctatcgtggaaaaacgagctggcgccgaaacgcgagcaccgaaacgcgtgggtcccgtttgtacaattagtctttctaaaatattttacgaatttaaaaaaaatactaattttttcagaaaatttttgtctgttttaaaagtatttaaaatagcaaataaatattataaaattatccataatttctctatttttaagcctttcttgatgtgtttttgattaatttaaagtgtgttatgaatttttaaatttttcactaaaattgcctttagaaaaataccaaaaaatttccaaattaaaattataagaaaatat

SEQ ID NO: 30963 - DNA, 1017 bp, Heterodera glycines
  unsure (1)..(1017): unsure at all n locations
tcgtcaaaaacttccattgattatgtgcttttttccatttaaagagnangngnagggncagagngagaggaaaaccctattagcaaagaaaagnaacagggggggaaaaaanagggacgaaaagaaggcaaaagaagcgcagaaacacgcaaacaaagccgagaaacacgcaccaaaaacgcacaaaaaacgcaaaagacgcacaaaaaaccagaaaacgaaggggcgcaaaaaaaccgaaaaaagcgcaggacacagaaaagagaacggggccaagggacagccgaaaaaccaaaaacgccggaaggtgttgtgtatcaacaatttattaataaccaaataaaaataaatgaacaaattgatgaggtcggaggagagcagcgacgaaggagaacaaaataataaataaatgtccaatgcgaatgaatggagcggagagccatgagtgagggaatgggcacacttataaaaacgttgggtcagagaaatgtggaagagataggcagagagagagacaatggaaatagtgtatgacagagaaaaagggagagagaatagtcaataacattgatgtggaatgatctttggtccttatccaacacctccctccttaagtcgaatgtccctcgatttgggattcaagatcggattaagccatatttaggctttgtcggatccatgtccagtcgttgagatgcgtggctgactcttcctgatcggcgcaaattcactggttgagcaggcgtttgctggtgattcttctgcggtttttgcgcgattggcgattgtggcggattttgtgcctgggtttgatcattttctacaacttgatcattgtcctccaattcatttggataacgtcgcctgatttggttggcatgacgatgaatggctcggccaagcgtcggtgccaaaatgcgatacgtcggagaggtgcccaatttctcaataattttcccggaagccaaatggctttattgtttttcaaattccaaaaataaatttttcttctttttg

SEQ ID NO: 30964 - DNA, 1209 bp, Heterodera glycines
ataattggttacgactttcaggcaaaaagagtctgaaaaaatgaaatatttggtaaaatttgacgaaattgattaccgcagaaaattaataggttccaaccaatggcattttttgtcattatgccaaagtccttacgatgccttcctacaaaagcacaataataaaaattttggcaccatttccatttgtgccggatggaaagacagcagtgacactcggcaaacgatccatcagtgtgggaagactgagttcggcacgggaaggtgagcatgtcgggagcaccgaattttgctgagcctttgccctcgggcgaacttttttggcactgacaccacggttaaggtcgtcagtgagggaggagttgcgatcggagtgcaactggaataaagggctgaattttgaaaaacctgggactgtttcgggacttcggatttccgagtcagacccggacagaatttcggtctgaatcggacacggacagatttcgggataaaagtacagtacccggattaaggccctgctgggaaactggaagtggccgagccatgacccggatttcctagtcggacccggacaaattttcggtctgaatcggacacggacaagatttcggtataaaggtacagtaaccggattagagctttaggaaatcctgtacagaattctatcctgtccgtggcgataaaaggcattgaaataaacaatttcatttctaattcacgcagttacccagcttaaaaagatttccggacattttgtcgaaaatggacaaattgtcacagcgtataaatgtcaataagaataaaaactaagccaggaaggatcgagaataggatttaagtccgagaattgggtcggcatataattcgacaatgcccaggccaaccaggtcgggaagtcgtacaaacagttgatcctcttcgcttaacaatgccgagtggtccaagccgtcattttcgttgcgaaacacacagacagccatgttcgcttcaaacgcatccgcaatgacacccatgtactctttgtaccaatggagtctatacaaaatgtcaaaaaaataataaacaaaattcgggtacaccctaaaacgtcgacactgaaacgtcggcggaaaaaactaaacctggaccggtttacctcagttgggccggctcggttgggccccagcacgtttttggctataatttttttctttgccaaccaaatcc

SEQ ID NO: 30965 - DNA, 519 bp, Heterodera glycines
aaaaaaaaggtattgaaaaaatttggaggtcgtgtgatgtaaaaagaaggaatagaattgagaagagacggaaatgtttttgatcaatttcaggaagtcacgaattgacagaaagccattaacactttcgtaagtcgcgttggtttaatcttaaaaacaaattaccgggtcaatggagtatcgatggctcactctaattgctttctccagtgccctctaatcaggcagaaaaagtcaaaaagagaaaaaagaaaaattgtcggcacttattttatgaaaagtaccgcctaaactgtccaactcctctctcgactttgttatcttcaagactctgatctgctctctcatttcccctttatgccgctctttcccatttccaaaatctccctaatttatcaactttttgcaatttgtcaaaaagtgtccccccgcccacccgccaattttgcgccactccaaacgctttatgtgccctctgaaattttgtgactgtgactgactaacatatccgccccgccg

SEQ ID NO: 30966 - DNA, 1557 bp, Heterodera glycines
  unsure (1)..(1557): unsure at all n locations
ctctantgtgtgaccaaccaaatattggctgtaccgctgctgttcttcactgtccgttctcgtgccgtctgttgtctcacctgccgccattgtgccacccatccaaaatggcattccgccgaccctttcgatttgtcccatttccgtctctcttcctcctcctccgacaattcatcctcccactcttccggtgactcttccctccctcctcccccatatgctcctcctcttccgcctccaccaaatctgccaaaattggagtaggacggcgacggcatttgtccctcacccatttcaacacttcctttcataaaactgaaaagcccaaaattttcaaaatgaatgccaagcaaacttgaaaaaaaatgcgcgaccgcaggattttctgtccgcgctctccacccctgatgtacacccccaaggattgattagaaaactaaaaaaacatacccttaagaatgggaaaagtttccctaatttttggtttttgtaatcatgtattactggaaaaatgcattcaaaaactcgaacatatttttcactaatcaatttgattaaatattttttggattttaataaaaaaaaagccctttcggtaataacacaattgatagaaagaatcaatttaatttacattgcgaaattaaattttaatttttcgcgactacgcctttaaacttgagtttatcttaattaaaaaagttaatgaatttttttggcacgcttcaagcatcgctcggttaacacggttttaggtcagcaatttttcagctttgccaatgattcattgtttgagtattattagattaaaaatttattgatgagagtcaaaagacaacaaaccaattcaaagatataaattaggatttagaaaacaagcaaatcacgtaaaccgaggcttagttgcgacggggctcattgttaaaacatcgacagtatttccatgcttatttagcgccacaactgtcaacgcgtaaagggtcgccggcttcagattctttacgactgcggtgtaagattttttcgggacaaacgcgtgctgaaaaacgcggcatttcgcgatttaaaaaagtttgtccgtggatgtgccaaatgggtcgatccatttaaaccgaggatatttttgcaattgtttttattttttggccttccgcgccgaaatggggagggcggctcgggctcgaccaccccaaccccccccctccccccctcctttcttcataccgaatttttcagtcattttttgtgtggtgatgcttagcccagtttttttttgctatgcaatgccttcctttttgcttgcactccctgttttgtttactaacttgcggacactttatcgtcttccaaacttcattgacattcttgtactgcacttcatagcactcgatttcaacatcggtaatgctttggcttttccacgcaatggtaatcgtgctttcggtgctttcaatagacttaagcttgcaattaacaaaaaactgagcaaaagccatttcgccttacacgtatacgttcaacaggctgcagagcagtacggcgactacgcgttggaac

SEQ ID NO: 30967 - DNA, 1486 bp, Heterodera glycines
cgcttccaagactgtcttgggcttggctggctgagctccgatcgctcgcctctcgtcctgctgatcagaggggggaggatccccctgattcgcgttttcgttgaattggtcgtcgtcgtgtcgctccatctttgttcaaatgcgttgtgttggtcctcggcgaccgaagtgctgttgctggtggttgtgctggtcctttgcgaccggggtgttgttgctggtgcccctgctaacggcaccaaattgtttgtggcaaagaaactcggccggcgctgacggctagggggtctgtgcgcgggagtttctctcccgtccctcgggcccaattcactcaaattgccgaatttgctgctgccgtcgggtccgtgcccaagggagtgaactggggagggggtggggaggacaaacaagatggggtttgcggttgttgctgtaacggcaccaccgactttttgaagagctgccggcgctcccggttgaggttcgggagaagagttggacttccggccgcgaactgcgtcaaccgccgggaactggctcccgtccttgtttgctgctgctctgcgggggagtgtcccccgcttcgattctcggggctttggctccccttggtcacttcgttcccgagcgaattttccccccttttttgccctctgaccctttcaacacttttccgacaaaatgtttattggtgatgatgatgataaaatggtcaaaaattggtggatgattatatgcgagatgttgatggattatatggtgaaaattggaggaagggaagggcgataaggattattgagggggtcaaaaattgggaatgattcagcaaaaagaaagaaaatggtgaggagtgagaacgagtgaagagccagaggtgaatgtgtgtccaaatggaatggaatggaatggaatggaaccaaaacattttccccctgggggggggcaaagattaagatgcaaaagagcgacgccgaagggtacaaaaatcggcggggagaaaaaatgccaaacaaagggaaaaatgagatgaaagaatggccaaatggaaaaatgtgatctgagaaagtgtgaacaaagagacaaaaattcggaggcagatgtgaatggcagaaaaattgaaaagaaaagggcaaatggtggagttgaagaaaacattatgtaaatgagaaaaaatgaagagaaatggaaagtttaaataaagaggggtgaaaatgttgacgaatatagaaaatggatcgcttaacatggcaatggcccttatccgggaatgtcccctccggatttcctggtcagcgtcgtcctcctcggcgcttcttccctcctttgtttgggtcccgcggtggggcgggggggtggctgaagatccccccggcccactcattttcctcctcctctgacagttccctcgccgtgccgtcggcgttgaagaccaaaatgccgcttcttcctcctgtggcactctcgtcggcaacgaaattccgacaga

SEQ ID NO: 30968 - DNA, 1027 bp, Heterodera glycines
aataaattgagcaatggcatcatccttatcatacttgctggtaaaaatgtggttcattctccttcaccgtcttgtctgatcacttggatctctaggtccttctcctttcaagataagcttttacctcattgtgcctttctctctctctttctctctctccgagcccgttatgtttttctatagccttttctatttcccctttttctgccttcctgtgatatcccttctcacatctctttcccctttatcttttccccctttctttcactattccctccccgttctcccttttattccttctctcccctctttcgtaattccgatcactttttcttcttcagtttattcttcttcttttgctgttgatggcttagtcattttgtcctccatgttctgcttatgttgtttctgttcctcattcctctcagcctcttctcccaattgtcctgttgatgacgatggctttggtgagcatatcatatcttggtgcattttatgttgtataagccaggcattgtcaattgattggactcataaagtgcattagagcccaattttactggtcccataaaaaaggaaacaaaaagatgattttttacgattctgagttgcaagtataccttcgacgcgctgccttaaaagttatgaactcggcaaaataaagatcccattgaaataatatttaaaaaattcattcagcggtttactattttgaaagaatttctacacaataaggaatacaaaaagatgttttttaaattatgggggcgccataaaatttcggcgccgcacacgtcattctgactgggcgtgggcgcctcaagcgtcggggccgcatggacccggaaatatccggacccgtctaaccctaaaattaactcattttgagatttataaatttatttaactttttattaatattgttttattttcaatttttattcgcttaattttaaatattattattttattatttcaaaaaatctttgtcattaatttaaaataccataaagttaataattaaaaa

SEQ ID NO: 30969 - DNA, 1446 bp, Heterodera glycines
  unsure (1)..(1446): unsure at all n locations
agctgggtttagacgntcgtgagacaggttagtttaccctactaaagacctgttgctatgatagtaatcctgcttagtacgagaggaaccgcaggttcagacatntggttcatgtgcttggtcgatagaccaatggtgcgaagctaccatctgagggattatgactgaacgcctctaagtcagaatcccgcctaggcaagatagcaatattcttgctccccggtgtcgggaggcactacttatgcgccgcttgcggtgcagcacaaatgccccagcatctggcccgatgtgcgtgcttaattgctcgcacattgccaaagccgtagcactcgtgtgccatggtggaacgtcggggcgcaaaatcacttgtatacgacttgactactggtcagggggttgttagcagtagagcagcttttacactgcgatctgttgagacttagcccttgatcggatgatttgtcttctttttccccctttactttttgtgccaacaacattttaggtacaagtacatgagaagggaaggctctcttaagggagtcaaatgcctcgtcagtcaccatgaaattaggtagaataagttcttgactttgcttttttttccatttatttcaatcggctagtgctttagggttttgtgttttgactttgcttttttttccatttatttcaatcggctagtgctttaaggttttgtgttttgactttgcttttttttccatttatttcaatcggctagtgctttaaggttttgtctttgactttgcttttttttccatttatttcaatcggctagtgctttaaggttttgtctttgactttgcttttttttccatttatttcaatcggctagtgctttaaggttttgtgttttgactttgcttttttttccatttattccaatcgaccacgttaattcattctctatacatttagtgtcttatttcatgaaattatattaatttaattttaaataaagaggcaaatttttacagaaaataaatagacgctgactaattagctaacatttataaagaaagtagaaatttgattaaatgcatatacaatatacaaaatattacttttttaaatttgtataaagttcctattttgtctttgactttgcttttttttccatttatttcaatcggctagtgctttaaggttttgtctttgactttgcttttttttccatttatttcaatcggctagtgctttaaggttttgtctttgactttgcttttttgtccatttatttcaatcggctagtgctttaaggttttgtgttttgactttgcttttttttccatttatttcaatcggctagtgctttaaggttttgtctttgactttgcttcggctagtgctttaaggttttgtctttgactttgcttttttttccatttatttcaatcggctagtgctttaagggtttgtctttga

SEQ ID NO: 30970 - DNA, 1137 bp, Heterodera glycines
tttatcgcccgtcctgaggccgcgaagcggccgaatgattaccacaaaattaaaaaacgggcgcgaagcgcccgtcctaaggccacgaagctaccgaaaattcccaacaaattaaaaaacgggcgcgaagggcccgtttgaccccaacaaaatttaaatcgggtgcgaagcgcccgtccaagcccaacacgcgcatgcactagcaacgaagtcctttgcgcgaagcgcttatgtcagcgcccgtccatacatacaaaaagcatactgtctacaccgagcaattactgtgcaaagcatactgtctacaccgagcaactactgcgccacacgctagtttatatatatatagaataaaaggggaactcattaaaaaaattaaggctcccggccgaaggccgggagcgccctgaaagtagtggaagggtcttacaactttttgaggcgcatctgggaaaactataggttttccgctccggtggccaactgagtcccggcggctaatttctcacttttgcttgcgtttgaaggcccgtaactttttttaaaagacagggagcggaaaattcttgctggtaggattttaagttgaagtgttttctaattttcaaaaaaaattccaggcctctacctatacttggaagggctgcagaaattggcaacttttcagtaccaactttgtccagttcagtccccgttgaataactcattaggctttgacctgagcgcagggtggccagcagacttattgtagagctttaaaagcccgatttttccagattttaaaatttcgaaaattttcaaaatttttcgagctaggcctaaaaaacggttttttggtttttgaattttaagaatttttaacgatttttcccgggaaaacggagaccacttccaaaacatagtttttcgagctctatcgactggtatttttttcagaaaaatttcgattttttcccggaaatagaaaaaaattttggcctgagcgggacatttgagtcccgggcccataactcgtcaggggttgattttagcgaaaaattgtcttagaacatttttgtagagaattttaaatgctatcgaatggtgtactacatgaagaagaattttcaaaaattttcgagctaggccccctcgaaa

SEQ ID NO: 30971 - DNA, 355 bp, Heterodera glycines
aacgctgcggacatctacatttttgaattgaaaaaaaattggtaattactctttctttttctccatattgaccatcatactcatactccccccacccttttcttcttccgccacccacctcccccgctacgcgccgctcccctccccttcgtgctcctctctgtgccgatgaatagggcgaggaaatgggcctaagaggatgctactcctccgttccttcaaagacactgacctttcctgtcaaaatactcgcaaatcttactgcaaatcaaaacacattaagctagcttctgcaggtcctgctcgagcggccgcccggggatcgatccccgatctagtaacatagatgacaccg

SEQ ID NO: 30972 - DNA, 1255 bp, Heterodera glycines
aaaggtcccggtcccggttttgcccaaaattcccggtcccgctcaactctaattaaaacaagtaaaaacttaagatatttcaattgtgaatgagttattaaataaggacaaattttaaaccagaaatttttattaagaaaaatatatacctattaaattttgggatcatttttttgaaaattttttcaattcttaagggtgaaaatgagtaaataaaagtcccgattttgttcgcaaacacaaaaaagaaagtgtttttcctaccaattagagcatggagaatccaggaaaaaatatgtatttacataaaattgacagccctatttatcacctataactcgcttcattccccactgaaccgaactttcatagttctccaaattagacctgagcgggaccggtactggtactgaaaaaacgtacaactgagtacctaagtaccagttttgaccgggaatactcccggttttatccaggttttcccagccaaaaagtcccggtttttttcaacccgaaaagtcccggtaccggtttttacaattaccggttaccgctctactctactccgaattgaactagctaatttatttattgtctttcgatagctctttgtattctatattagcctgcaaattacaaaaaattgagtactgtagaaatcaactgctgtcgtgatcagtgtctcacccacagtttaatataaaaattactgtcgaagatgcacccaacgaaaaatgtgaattttcatcttctttttgtatttgaatctgagttctgaattgaacgacccttcttcctttgtgttttaggcttattcaatttgttttctgcgcagtttgcatatatgtacatacacattaagaaaataacaatatccaatctcagaaaggtcagatttgctggtcgccctcctcgaacttgtagctgcccctccccattttctcctccgcctccgccgcactttccccgccttccgccgccgtttcttccaaagtgccgcactttctcagaccaatcagcgagagttgtgagtgccggtgctgcgtctgctgctcattggcgggggcagtgatgcgcgacattcgtcgctgagatgaaaggcccagcggggaggaggacacttcttcgctgacgcgcacagtgagaaaagtgccggagtcgccccgggacaaaagtctcatccgagtcgaacacactgaggccgttctcaccgctaaaggcggtcagacacactcactgaaattgtgacgcactg

SEQ ID NO: 30973 - DNA, 1051 bp, Heterodera glycines
  unsure (1)..(1051): unsure at all n locations
ttttctttctatttgaggaacaatttgggttatttttgtttgtccatcatcttcactcactttaaatttgtgtcttgttttaaaaatcgaaaatgcttttcattttttaaaattttaatttggaaacaaactgaagtaataaatttcaattcaacaatgaaagtggacaaatttttggacaaactttcgcgaaaactttcgagcagttcgctttgcttttgtccagcaataaattattggtaaatatatttacatattataaaatttaatgaattttttgtttttccatttaatgacttgccaatttaagcgatgcaaactttggcgaataccaccgaaaagcgtcgaccaatgagcggcaaaaggaagaagcggctgaaggggcggcggacgaagcggaccaatgttcacacattagcatcccggttcagtaccgcaaacattcgtccacctcggaaacgtcgtcactgtacgaccaaattgtggaagcggaaggcaaagcattaattaacaaataaacaataattaacccaaaaaagaaacgaccgattttgcgaaaaagccaattaaaggcaattttagttgagaacgaagagacaatgaccgaaacattttgggtccgacgccaacaacagcaccaattggtgcaggcgaccattttcccaattagcaaacccttcgcccgcggcacaatcagaatggcaaaggtgaaaagtgaaaagcaagacaaaaacaaaaggcaacaaatgcaatcgaattcattaagatgccaaagcgcgggtcatcaaaaaaacggcgcaattcattccccgcaggcattttcaatgaacgttttacggatgatctcgtcagtgtccaattgaccatctcagagtttaatatggccaaaaaatgcgaggcactcaaaaatatgaaacaataaaataaaaaattgaattttcatttttaatattattttgggtaattaatttaaatggaaccaataaattaattttatttaattgacccattatttttgacngtaaattaaagaaaaatatttaattttttt

SEQ ID NO: 30974 - DNA, 345 bp, Heterodera glycines
ccgccggagggggaaaaattgagaattttgaccatatttttagcagattttcatttttaaaaaattcataattttgtggattttcgaaaaaaattgtaattttctggctaaatttgggtgagatttccgtttgatactctattaaaaaccaaaattcaaattaaataattgccaaacattatggcaatttaatcaaaatttaaaagattctgaggattttccccaaaagtctcaaaaattctcaaaatttctcaaaaatcctcaaatcctcattttccaaaaaaatcctcattgacctatcaaaaagccacaaaatgaggataaatcctcagatctggcaaccct

SEQ ID NO: 30975 - DNA, 844 bp, Heterodera glycines
ctttactgttttccactgttttgctatgtctatgtgcgcaagttttgacatcagccactgaagaagtacaaacgcatggtatgtttttcaatattttaacattaaaaattatttaaatttattttaaagtgattgaatgtgttcgagttaacttataatttatttcaaatatcgagacaattttagacagcaggcacccagactcgtacttgttttcccaactcttactgtgcaaaaaacagaaatttatcttaaatcccagtacgatttgggtaattttgtacgaagtgggtttttaccatgaggcctccggtaaaaaaagacaggtgtttacaattaaacctgtccagtctttagtgttgatttaagaagcataatcctcatttcactttttaagtgaaaaatattcgtgctgaaattgaccaattgcacgaaaaagttgcgcagctttttgctaattttgtaagttcataaatttatttgctacaacagccgaagctcgaaattttgcagacggattatgcgaattaaaaaaatcaaaagataataaattactgtttatttgtgtataatcggcaatttattggaagagctctgttgctgagaatcatttttaaattaatatcacaaatttccgtccgcatatttcgacgcacaaaaaggcggtgatgcgacatttgcggcgcccagtcaaagcgacacttgcggcgcagacacttgcggcgagaacatttgcggcgccgacatttgcggcgacgacaattgcggcgccgacagatgcggcgaccagtcaaaaggaaatttgcggcgcagacacttgcggcgcccagtcaaaaggacattt

SEQ ID NO: 30976 - DNA, 1502 bp, Heterodera glycines
atgatcgaagccgattttcttcttggccattcgtgtcgaattttgcgtgtctccaacagtttggccacctgttggcccacccatccgcgccccccgtaaataatcaccgaaagtctttggcttggctccgttttatgctccaagtgggagctgaccactcttttcaaacctggaaaaggtacaacaattcatacaaattttcttttgaaactgaccttcttcaaaaggtgttttcggggtccatccgagttccttcgtggcctttgaaaaactgatcagatatcgctggtcgttgtagggtcggtcggcaatgtgatcgaattggggagcaacgagcggaaggcccatttgagtacggacttcgctttggacacattccgccacttccttcactgaattcacactttgtgggagcgttttgatcggcaaggaatttggccacattcaaaccattccaaccgaccatttttctccaaataagtgcccaagttgtaaatttgccccactcggccaacttcggccgcccgtatgattccctccgacgcgtcgtccacgtacagccacgagcgcaattggtccccgctgccttggacggggaatcgcttctgctgccgtgccatttcgatgaagcgaggcattagctaacatttgaaaatgtttgttataatttttagatttgtctgtcactttaacgtcccattggttgggcccgtaaatgttgttgatgcgaagggtcacaattggaagtgcgaacttttgttggaacagatgggcgtagaactcgcagattgcctgaggatttgcaaaggaattatgtcgaaatgattaaaatggcaaaacgatgcacttttgtggccgcgtacggattccccggtaaaattgggcactcttccgacttcgccttttcagttggccccaaatttgaatcgccgtacacctcaaaaggagaattccgatgcaaattaagtgtttcctaatggccttcaaatgctgctaattattacctcgtccgtgctaatgtgcacgaattttttcactttgccatattctctcacgcattccaacatttggacgaacgcgaccgaattgttctccaacgcttccattggttgttcatagcatcgcttgctggtgcaatcggctgcgaagtgcacaatcgtatcaatctgatcaatcaattaaagcaattattaaattgacaaatcaaaattaacacgcattaccaaaaaatcaattaaattaaatttgtttaaatcgtttctttttgatgtattaacatattttttgtttcctttgcgatttttataaacagtaattaaaaaaaattattcgtttactaatttcaatttttgttcgtcgtttcttaattgaatcaatttaataatgatgaatttcatcaatcatgaatgttttatttcatttcaattttcttagtttcctctccctttttcacctcattttgctccaaccacttttttcagcacttttccgttgcgaatgtc

SEQ ID NO: 30977 - DNA, 1373 bp, Heterodera glycines
  unsure (1)..(1373): unsure at all n locations
ccccgaaccccgatttttcacccccgacgtcggggtgcaacctattttggagtatttgcgtgttttagcgcataactttatgtgggttttaacatttttcccaaaaataaaataattttaatgtttagggtttttatatatnnaaaataaattatctaaatagattacaaaaactcgtttaaaagtaaaaattaaattttttctaattaaaattctaaattgtaaaacttataaaaaataataatttttaattaatgcaagatataagaaagaatacaataaattaaaatccaaaatattgagtgagttgtttattaattaaaataaaatgaaataaaaaaatatataattaattttatcaatacaattcgacacaaagacataagaattcaattcgagtgggaaacacaccatgaaattaaaaaataacagtttatacacaaataataacaaaataaaaatcaaaattgattaaattaaagcaaatattaattcattcattcacttagcctattaaatttgatcaattaaatgtaaaataatcaaaatattgttaaccaatgttaaaacatataacaatgagaacaattcaaatataatttgattactacagcagattgtttaaaaaaaaattgatgatgaaagaaaagttcctttgatataaaattatttaaagaaatttaaaaattaaaaataggaactttacctatacactttgaaacttaatcatataatttagcaacgattagaattattgaaataaataaataaataaattttgtttatcttattaatctattattctaatcaatattttggtttcaaaactaacaggaacactaagtgcactaacagctgcacatgaagtcgcacacatgaattttttataattcatttaaaagacaattaaaaataaatttaaaaaataatttcactaataatgttcttaattgttatattttctttttgaataattgaaaatttaaaatattctttgctaatgtacactcttggattgggttgggagagaaagaaattataaaggatttcaaaatttaagaacataaaataaacacaataggaatattaccaaaaagtatgcagtagattcagaacttttttgacggttacataagcatgcctcaaaaaattaattttttttcttcatttatttttatttgtaggaaatttaattaattaactcaatttctcttcttttctgtaatatttattgcatcaaaaatagaaaatattaaaaaataaaaaacttaaataaagaatgaggattgagagaagataattaatataatattattattacataatttgcagaaataaataaattaataaaaatgtgaacttaatattataaa

SEQ ID NO: 30978 - DNA, 520 bp, Heterodera glycines
ggggaaccgcccactttggcgcggccattttggcgccctatataaaatggcttttttggcgccagagttgaaaaactccaaaaattttcaaaaaatttttaatttgctttctttgtgcataattataagccgttttctttcaaagtaccatgctaatacaattgctagcaatggcgcagaattatggtgcctaatttaacttttatatttttgttcaaaattaccattcgggggttttcaaggatgtttgatcttaatctagccataggtccggactcatattcgaataagtatactggatattgactcgaaaattcgaaacccgacccggcattcgatggtacacaatacttcaaaaaataaaacattaactttttaacaaaattacgtcttatggtatgtagttcacagcaggaaaaaactgattttgacaaggttagttacaaattttgaaaatttaaaaaaaaatttttacggcgccaaaaaggggaccagagcgtttgggcccccgtttttgggc

SEQ ID NO: 30979 - DNA, 1875 bp, Heterodera glycines
  unsure (1)..(1875): unsure at all n locations
attttgcacgaatatttgtgcagaganatacgttgggattcacacaaagaagccaaaatttgtgcttaaaaataaaattgaaattgaaggaccaataatttatgcgctgagttgtttggccaatattttatatttttttcacagaggagaaattaatgcatataaattaaataatttgttctatttttctcataatttaatattgttgaatgatgagaaattgaattatgaagtgaaattggtaaatgaatcaaaattgccaattaatgaaatgattttggaattggcaattgatacagcgaatgaatgccaaacaaatgaaagtttagacggaataattcgacaaaattatgacaaaaatttggaggaaatgtttaaaaaagcggagaaaaaggcaaaaaaagacagtccatggaaagcctataaatacaaacataaaataattattagatcgaaattcaatgatgaaagtacatgggtgagatttaacattccatgataattagaaatattcaaattttagactgatgaagctctattttcggaatttgttaagggattagcgacaaattttgagaatttttttaagatggctaaagaatatgcaaattatttatggcgaataaatgagaaaggatgtatttatgggtataatagacaaatgatcaattttgggttatacaaaattaagaacatgaaaatgtatttgatgcaaaaatatgaagcctatcttggccttatgtatttgatgagagagaattggcactgtgataaaattggggaagaatttaatgaatataaacggaatatatgccaaaagtatcgaaaatatttgcatattttatatgaatatttattccggttgtatgctgaaggtttgttagatttttgattattttgaatttttttgtttattaaataataacgataatattttattaagctaaaaacccgaagatgtcgaaacaattgccaccatttgtgaatccaatatttattggacgaagttatttatattgtttaatttttgttatcaatacactgaatgattattcgaaatttttttggcgaaatgatgatttatgggatgatgaaaacgttgaaatttgggggagttttttggtgaatgaggaggaattaaatgacgaaattaaacttcaaattgctgaaaaggcacgaaaaaataaaattaaaaaaaatatctccaaacttcgaaagcaatttgaacgaaaaatgaaaagattatccgaaaaagccacggaaaaagccaaggtagcaaaggagaaattggaaaaagcaatatcaaaagcaacagatgatgaagcaaaaaaaaatctggaagaagaatatgattacatatttggctcattaaattcgtcgccattttcataaaattttttgattgtccacaaaatccgggttcttcttctgatcgcttcctaattcaaattcatttttcattaagaattgttctttcttctttttcccacttttccatatatgatggatgatctttaaaaatatattcttctttcataaacagaatttaagtttcattataatgtcggacggtgattcatccaaagcctttttaaacaaattttatccgcgcttgacttatgagatgacccaactctgacagaggaaattgtggtaagtgaattaagcctaggcctagtctaaatcttagggctaaaccgaaagcctaggcctaacctaagcattgtacaggtagcatttgtacaaattgttgagttgcctttttaagacttgtattgacaccgtngaactttgcaaaatttgaaaaatttattaagtatttggcaaactgtcaccgntgcccactatcagctcaattttaataagtatctctca

SEQ ID NO: 30980 - DNA, 1049 bp, Heterodera glycines
ttccctatagcctttcttttaattttgcttgggtttttcctccccataattgttttgagtcccccaacggacccctgaaaaaattgattttttgttttcggggcagtccccccgaaccgatgcgcccagatttatggggagaccgaatccttcggaaatagcttccctatagcctgtactttaattctgcgttggatttttgctccccataattgtttgagtaccccaaacggacacttgaaaaaatcgatttttttgttttcggggcagtccccccgaaccgatgcgcccagatttatggggagaccgaatccttcgggaatagcttccctatagcctgtactttaattctgcgttggatttttgctccccataattgtttgagtaccccaaacggacacttgaaaaaatcgatttttttgttttcggggcagtccccccgagccgatgcgcccagatttatggggagaccgaatccttccggaatagcttccctatagcctgtactttaattctgcgttggatttttgctccccataattgtttgagtaccccaaacggacacttgaaaaaatcgatttttttgttttcggggcagtccccccgaaccgatgcgcccagatttatggggagaccgaatccttcgggaatagcttccctatagcctgtactttaattctgcgttggatttttgctccccataattgtttgagtaccccaaacggacacttgaaaaaatcgatttttttgttttcggggcagtccccccgaaccgatgcgcccagatttatggggagaccgaatccttcgggaatagcttccctatagcctgtactttaattctgcgttggatttttgctccccataattgtttgagtaccccaaacggacacttgaaaaaatcgatttttttgttttcggggcagtccccccgaaccgatgcgcccagatttatggggagaccgaatccttcgggaatagcttccctatagcctgtactttaattctgaggtggatttttgctcccccataattgtttgagtacccca

SEQ ID NO: 30981 - DNA, 1215 bp, Heterodera glycines
  unsure (1)..(1215): unsure at all n locations
ctccctntttgatagaaaaagcatcagagagccttatttaacttttaattaacatttggtgcgtttcagagcacgttctaaaaaatatttatgaattaattttgcaaaataataaataagtaatgaaaaagtcagaatttcgaaaaattttaaaaacaacaagcgttggcattttttcaggttaagttagtcctttacaatggagaaggcctgcaaaatttggagagattatatcgattttagtgcgctaggttcgatgaaactttttaaaatataagcctaaactttttggcctgtttaaaaaggaattaaaaatttttaaaaattttattcatctcccttttgatagaaaaagcatcagagagccttatttaacttttaattaacatttggtgcgtttcagagcactttctgaaaaaatacttatgaattgattttgctaaaaaaataaaaagtaatgaaactttaaaaattaataaaaaattttaaataactactggagttggcatcttttcagtaagcttttcctttacatttttgatgctctcgcaaaatctggttcgcttctgaccagtttataaaaaaaaatcgatgaaactttttaaaatataagcctaaaatttttcgcatatttaaaaagcaattaaaaatttttagattttttattcatctccctttttgatagtgaaagcatctgagtgcctaaaataacttgcaaataaaatttggtgcgtttcagagcagtttctgaaaaaaatatttatgaattaattatgcaaaaaacaaataaataatgaactctcttccttaataattttcctgcaccgaaggtaaaaaattttaaatctgtattagttgtggtgggttttaatttgttggagtattgtgagtataaaaattgattaaattattaaagtgaagatgatgttttatgatggaagaataaatataattaaatagttgataaggagtgtttaaaggtaatgaagtgatgttaaagattggggtaatgagtatgaatttgatattgaaaaatgggatgagaattggaatgagttttttttggtaatgattanttgtgttaatgtaaagtgaaaatggttgttggtagaattaatttttgagaagttagattgaaaaggggtttagaaattttttgttgaaaatttaatgaaatttttgattttttataatatttaataattgttgaagttt

SEQ ID NO: 30982 - DNA, 659 bp, Heterodera glycines
ttctttatcattcccaaagtgggtaataaaagtttcgcgtgctaatccggcatggaaaggggaattcgtggcagcgtttcaagcagaaggacatattctgtcaggcgattggacggctcaacgggcagcctggccaacttcctgaaatcgccatttgtagcaaacaaattgaaaagttaaaggtgcgctaccaatgcaagccgagcttgtcgtacaattgttgattttcatggtccagagttttctcgagagcggaaatagtcttgaattttggtttttacaaaaaattgaaatgaaacttttctccgcttacccttctgttcagacagaccaccggccataacgaaataccgaagctgcagcagcaaaaaagcaatccgcagatcaaccagcgcaagtttctgctcacattcctctgaagaacgtaattcacacgtcgcaatgtgtcgtcaaactcttccggtgccaattttcctgtcagagcgctaggaaattccgttgaaaaatgcgagttaaggccaaaccttcgaaaaaaaacaagtgctattaatcctaattgtcttaaattaactctttccccatggctaagtgcccaactccacgaatgacaattggttctgttggtcatcgcccaatccggatgtgggaaaatttccaaa

SEQ ID NO: 30983 - DNA, 1692 bp, Heterodera glycines
  unsure (1)..(1692): unsure at all n locations
ttaaaaggtaaaatttgaaatcagcagatatttttcaaaaatttgtccaaccctcaaaactcagcaaaatctaaaaaatcaaaatttttcggatttttacgaatgaccatattaaaaaatcagcacaaatctcaatgaaaaatcagcacagttgggagcccctgctggaaacattgaaattaattaactacctaatgatggccctgaaaaatctcgatattgctttttgttttgatttcttgacacttacaagcacacacagtgccgagccgaacaatgacagccatttgttgtagaaacgaaagccgggccggaagccgggcgatttggcggccgacgcatcgaaacaggcaaaattggtgatggcaaaagcggccaaaaagaagttggaaatcaaatcagcgatcgagttcagctccccaatcatgatcgcctaaaaatgagcgggcttagccattctcatatttccttgtgattaggtcttggatatggcattattgaaaattgaaaatcttgcattaactgtaattgaagataaaggttcgaaaaacttgaaaaaccaaaattctcgacaagccaggtttcaacttattttttcattaatgtaagcatgccctaatggaaataatgctaacaaaaacaacaccgaaattgcgatcagaagagtgagaaaataggctctgaacgggtcgttggttttccgatagcctttcgcaaatgggtgcatataggggaacattttgtcggcacataatgcctgaaaaatttttgtcagacaaatccgactggtaaaatgcttcttttataaatacttgcaaaattcgtggcgcaccgatcagacagccgctggccgagcttagcgtggtggaaaaaatgccgacagtgatcagtggtgcccaagcaccctgcagggtcataacctagacgagaaatgtggtcgggataatatactcagaaaacaagggttaaatctagagctcgacctggatctggatccaagcctgggtttctcgaaggatccgggtcaaagtccaggcattcttcggcaacctggatttttcccggacatggatttccctggatttttttccagaaatccagttttagtcaaacatgaaaaagactacattttcctgggtttttgtccagaaaacccaggtccatggttttttcaaaatgtcgagctctagctaaatcagaatctgatcatagtaaccatggattcaattatatatagagcgcaagcagttaaattggccgtacatcataatcatttgccaacccaaaccggcacgtgtcattggcacggcacgacgggacggtgtagcnggtgggtgggtgggatgaagttcaggctcggaaaagccggttgcatcgcgtacagtagtcaatgccgtgatcaccatacaccttttatggtaaaagtgctgaattattgtcgaagaaaaatgcccaaacataccatagataagtgagtgttgtgatagcgatagcccaaaaagtgccgcgagggactaaatggtgcattttttcaattaaattttaaattcgtgtaaaaatttactggatttagacgggtctttgagatcacctggaaaaaaattcaagaaaagaaattaatgtaaggcaatttaaacatttcacagtatttgtgttactgtaattaacgttactacagtattcgggtctgca

SEQ ID NO: 30984 - DNA, 1050 bp, Heterodera glycines
accaagtcaagtccagaaaggaatattttaaaacgatttcgtttgtttttggcattatgataccgaatactttcggaaattatggaaacaaaattggagaaattcgaataattttttgactgcaaatttttttccttttttgaattgggttcaaaaaaattttaagagaatttttgattattaatttgaagtcttgaatttatttgacaaatccaagacttaaaactgggagaagcaaggggctgtggctgggggcctaaaatttgggccacattggagaattaattctgatttctgaaaaagtcccagaaataactattttttctttccataccttcttgtagagctcgagctgctctttccaatggtcttatcccggtctcgatccgtgccgaactcacaaagttatggagtgaaatgtgaaatattgttttcaccacaaggcattttttctgaaaaccggattcaaaaatctggggtttggtataaccgttttagaaatagcgtagaaaacagcttcgatatcaagaaaccaagtcaagtccagaaaggaatattttaaaacgatttcgttttgttttggcattatgataccgaataactttcggaaattatggaaacaaaattggagaaattcgaataattttttgactgcaaatttttttccttttttgaattgggttcaaaaaaattttaagagaatttttgattattattttgaagtcttgaatttatttgacaaatccaagacttaaaactgggagaagcaaggggctgtggctgggggcctaaaatttgggccacattggagaattaattctgatttctgaaaaagtcccagaaataactattttttctttccatacgttcttgtagagctcgagctgctctttccaatggtcttatcccggtctcgatccgtgccgaactcacaaagttatggagtgaaatgtgaaatattgttttcaccacaaggcattttttctgaaaaccggattcaaaaatctggggatgggtataaccgttttagaaatagcgtagaaaacagct

SEQ ID NO: 30985 - DNA, 1089 bp, Heterodera glycines
  unsure (1)..(1089): unsure at all n locations
aaaaaaaaattaagccctaaactttttggcactttttaaaaaggcgtttggggaaactcaaaaaaatttttttctccatcttcctttttgatactaaagcatcagagtgctaaaattaagttgtaaataaaatttggtgcgctttagagcactttctgaaaaaaatatttatgaaacaaaaaaatcgattttttcaagtgtccgtttggggtactcaaacatttatggggagcaaaaatccaacgcagaattaaagtacaggctatagggaagctattcccgaaggattcggtctccccataaatctgggcgcatcggttcggggggactgccccgaaaacaaaaaaatcgattttttcaagtgtccgtttggggtactcaaacaattatggggagcaaaaatccaacgcagaattaaagtacaggctatagggaagctattcccgaaggattcggtctccccataaatctgggcgcatcggttcggggggactgccccgaaaacaaaaaaatcgattttttcaagtgtccgtttggggtactcaaacaattatggggagcaaaaatccaacgcagaattaaagtacaggctatagggaagctattccggaaggattcggtctccccataaatctgggcgcatcggttcggggggactgccccgaaaacaaaaataaatcgattttttcaagtgtccgtttggggtactcaaacaattatggggagcaaaaatccaacgcagaattaaagtacaggctatagtgaagctattccggaaggattcggtctccccataaatctgggcgcatcggttcagggggactgccccgaaaacccaaaaaaaaattttttggataaaaattatttaaatgaactgactagataatatttaaaataggttatttctcttcctttcagtatccctgcaaagtttggtgcgcttctgatcagtttctgaaaaaaaagttaaccctaaactttttgncctgtttaaaaaggaattaaaaagttttaaaaattttattcatctccctttttgatagacaagggagacagagtgcctaaactaacatgtaaataaaatttggt

SEQ ID NO: 30986 - DNA, 1123 bp, Heterodera glycines
ccgcatattccatcctcatcgatacgccttttcatttccataatttgccgcttttcgcgatgccaatttgaaaatgaaaaatggcgcgcaacccccgggcgattggaaattggcgaaaaacagttgggcacagagaaaggcatttgtggcgagggaaacaaagaggagaaaggcgagtagtaacagaagcagcggagaatgatgacggagggagaagaagccatttgcaagggcgggggaagagggagaaaggggaggaggaaaagccatcaaaaaggggacggattgggaagcgaggaggacaacaaatggaggggagtaaatagaaaaggtggaacaacaaaacaatggctaaagcaaaggaaatgggcggaggaatgaccgaaagacccgcgggggaaattaatgggattaggcgatggaaacggcactttgacagacaaataagtgacaatggccgaagaaaaatactgcaaatggcattcattaagtggttaatgggcagtcggccatttgagtggagaggcaaactttgccaaaagccacaaatattccgtaaatttgaattaatgcaaaatgtgccaatgccctttgccccgcccgtttcccattccatcccattattacccttctgaccatcgtccgttttcccctgtgatttttcgaccccccgccgtatgtcattccctttcagagaatggcatttgcattgttttgctccttataaatcagcatttggatacggatggatgagcgatgagatgatgagccaaaaattgtttgtgtccgaaagggttggcataacacacaaaggaaaacggagttggcatttggcaagccgaggaattggcaaatggacaaccgaaggagggaggggggggggaggggggatggcactgcagggaatgcgcaagaggaaaagtacggtcgagaatggtctcgagaatgggaaattggcacccttcggcgagtgtttctcaccaatgcatcaaattaaacttttccacggaaattggaaacccaaaaaaggcaattaaatttccgcccaaaattgagcgatcattttcaaattagtttaaatgaatgaagctttattctttgcataattaccatttttttaaat

SEQ ID NO: 30987 - DNA, 1045 bp, Heterodera glycines
cttccccctcctccttcaccattgcctttcttccccttcctttgcccaacttttcctcccctcctcccatttgccttccgttctttcctcctcatcactcaaacattcctcttcttccaatgattgtgcttgttcttcctcttcttcttcttcaaaatttcatcgccatttgccaacggctgaaacattccatcaaagaatgttggaacaacaaatggaagaggcgaagaaagtgaagactttggtgaacatgcttaatgtgagaagaaagccgataaaaacggtgaaaaaattggagggaattcccaacgaaatgaaggcgaaatcgaccaatttggaagtgataatgaagacaaatgaacagcagaaaatgaggggacaaggacaatccaaggacgaaaaaaaggaaaagccgaaaaagaacaaggaaaagaaggaaaagggcaaggagaagaagaagaagaagaagtcggacaaaaaggagcaaggagaagcggaagtgcgaagagcaaaaaggaaaagcgacgacccctggggggaagaagggggcaactcggtgctggaggagccactgacactgccggacaacgaaagagacggcacaacgacgggccgatgcaacagcgaacggattagaaagtgacatttggggaggcacttataagcaagattactaatttttaattcaggatcattacgagggtgagtgacggatcgtgcccaattaattaactaacgaactctaaataattaattatatttaaccaaatgatttgctcaaaggcaaaaggaagagacgcatccgcgatcaaacggaacattcaaacggtggcggaacgccaatttgaagccaaattcaacgtgatttgtgccaacgctgacttttcatacatttcgaacaccgacgtacccagaaaaaagcattgaattaaagtaatgaaactccacatcattttaggagttctgtcaagagcagatcaatggcaacacgtgttatgtgttccgacaattggaaagaagtcacaaattaatcgcccgaaggaga

SEQ ID NO: 30988 - DNA, 139 bp, Heterodera glycines
acgtgtcggatgaaaggccattgaagttcaacaacaagatgttccatggctaaaggctgaagcggcgatacaaaatgccaaaccaaagaaaagcatttgtgatctttttaaatttgtttttatttttattttggtttat

SEQ ID NO: 30989 - DNA, 1799 bp, Heterodera glycines
aattttttatcttaaattttttagcttaattattctataatttatttacgactttattgtaatattttcactataagaatttaatgttcgaaatttttattttaaatcttttattaaaatttcgaattttaaaactttgttttatttttataaaataaataattttatagagcttgttaaaaaggttttattttcaattttcttttcaatttttatttgttcatattgtatttaatgtgttaaatttttgttttttacttttttaaatattatttcttcaatttctcgactgggcgatttcgattcggtttgatcccactttacaaattatacggctactcatttgatttttttcatctgaagagctgtttattttgaaaatattttttgaatcgtaatttagtcaaatttccttttaaatcaaaaacttcgaagaatttcaaattttgacataaatatttgtactatgttaattagttttaatgaaattcctctgacattgattttataattttttttatacttttgtaataaattaacattattattctggtagacaacacttaaagatatttagtttttgcacaaacgcgcaataataactcaaaattttttaaatttggatagggccttactaactaaaaatctataccattgatttttttagtttttttaatctaattcctctatataaagcattgattgcataattgtttcccaagctataatagcctgggtcaacatcagaaatgttaaatgaatttgcaaataagctggcaaataattcacatttttcatcaccatcatgatagcatttgttttcaaagactaaattcggtatttcaaagggattaacatagtatttttgtaggtatttaaaaatggaacgcggccgtccatgacctgaccccgcttggtggggggggggccattcgatagtttgaaatggagcactcgatgccaagctcatcgagtatacttgagacagcggtgctgtcgggagcaacgcgatccgacggctttggctcggccgactcggccaatcccatgacgacgatactccgccggcgttcctgctcttggaccgcttcctctaccattttgtactgcttggactgcagcaggtcttggttctgcggcagtatgatttgttgttgcagttgcacctgttgtagagagcgacaaaaaaattttgaaaagtgtttgcaggagcggcgagtcgctggtctcatcgtccgcgtcgttgctattcatgaggcgcgcaacgtccgctaattggtcactaaggtcggagaggacaaaggctttttttggggcgcaattttcagagaggaggcaacatactgacgtcgttcttatcgacgtcatacagtacaggaaggaatatagagcaggaaagaaatgacagcaccgcgccgactatgaaactgaaagcagaatgtgatgatggcactcatgttgcgacggattccggattgtagaatattagcgaagaaaatctcgagaataattcaatcttagagagcgcattatagagttaccccagaaagcattgaaatcatttgtttgcaaattatgctagtgagatggataaaaaaaaagaatagattttcttgagaaatccacgtatttttgagcatttcaattttaaaaaatgcaaaaatatgtgctaaaaattggaaaaaccaatgttatttttgcataaaaattccaaaaacttcatctttatcatttttgcccgcaccattgcaaataaaaacatttggaggggtttggggggtaaaataagtccttttttg

SEQ ID NO: 30990 - DNA, 347 bp, Heterodera glycines
cggtgtcatctatgttactagatcggggatcgatccccgggcgtccgctcgagcaggacctgcagaagctagcttgatggggatcagattgtcgtttcccgccttcagtttaaactatcaagagagggaggagagggttggagaaggaaaggaaaaaaaaaatgaaggaggagaaagggtgggggcaatgaaggaaaggtcagtgtctttgaaggaacggaggagtagcatcctcttagccccatttcctcgccctattcatcggcgcagagaggagaaaaaaggggaggggagcgtcgcgtatcgggggaggtgggtggcggaagaagagatgggtggggggagta

SEQ ID NO: 30991 - DNA, 123 bp, Heterodera glycines
agcttgctgcctgcggtcgattggcgaatagctcggcggcagcattgccctctttatagcggatcgcttcggtggccagttgcgtattcagttcggccactttattcgtgtaatcttctgcgg

SEQ ID NO: 30992 - DNA, 1412 bp, Heterodera glycines
atatcattcgatagcactatatgtacacttttttacctatgaaattttcaaaaatttttataaacttcaaaaaagttacgatcaaaaaggtttggaaaaccagttttttttttttagttttttggtcctaacttttttgaagcttaaacaaatttttaacgaaatttcctaggcaaaaaagagtatataaagtgctatcgaataatattaaaattattcaattcgatcaactatgaaaggagttattccccaaaaacgcccatttggtcggcgcccattcgacccggtccgttcctcctcacctttcttttcctttgatttttcttcatcactttgatcactccaaatttcttttttttcaaatattttatcctttcatccaaaaatccagaatcccccaaaaaccctcagaacggagctctttctggccacggtgctgcgaccgatgccaaaattcgttttgccatgccgccggtgcgaatcggcgaaacggcgcggaattgcggcagaaaatgtcgcaaaaaaaggcaaagagagcggcgccatgggagaaattcaccagtcattgcgacgcctcagagaacggctcgaaattgtcgaagagttctcagaaacgctgcaacttttggaggacaccgcacaaagaggggaggcagagaaaaggaggcgcacgagagagtgtaaggggtcaacaaacggcagacagttagagaggcgggcagacagacgcagtgccaaggaacagctgcactcgcgcagcgcaaaacgccacgcgttggcgaagacgcgttcccgctcgacggagcagtacggaaggacgagcggaaagggaggcggaggaggaagagaaggaggaataagaggggcaggaagagaaggaggaggaaggggaggatggcacggggtgctatttgcaaatgaacggattggtgtgcatgattacgatgatagcaattacatgattatgactcgtggtgataacagccgcttctgactcgacccatccctttccagcaaaagtgccatggacgacgacaaaaggaatcgaaatgccgaggatgggccggaacatcaccgctggagaaggcgaacgagcggtacaagcggggccagctgcttactcagcggggccgagcagtactcgcaacaacagcaacaccgacaacacggacagaacggcggaggagcagacgaaattttggacggaggcaaaaggaggaaacggaagcaatttggaagcagcggaagggggcgcgggtggacgagttggagaagacggaagatgtcgggatggacaagcacagaaataacacggacggaacaggtggggcatgaggaaagggtaaaaagccacgggcaaagcagggaagccatggtttgaggaaaatgaccccaccggcggggggtgccat

SEQ ID NO: 30993 - DNA, 1938 bp, Heterodera glycines
tagttttgaaccgtcgacccttattttggaaaattagaccccaaagtggcaaatttttgattgttttgtgtaaaagcgctacaaattcctgcttttacgtccggcgatgggaaaattgcacttgaattttctgacccaaacttaaaaaaaattcttcggggtgctttccccgaaggtttttttatttgaatacgtgcctgtccaacggtaacgaaaaacgccgccagaaatttatttgaaaagttgagtgaaatatttgaaaattttgtcaaaaataaccaaactttgcgattttgaaaaaattgttcattctatggatttttggaaaaattttctcgaattttttggaaaatttttagtgaagtaggtcttggagggggcacgaacaaggagaattctaaaattttcagcaaaaatattattttcttaaaaaaattccctttttttttgctctccggcacagaaatttttaaataacactgaaaaaaaaatttgacccgaagaacaaaaaaaggtctttggatccccccccccctccgaaattttttctggttttggattttttggggttaagtttccctggtctacatcccccgggggtttttctatcggtccttaagttgccccaccgcttacccccggcctttgcgtgcgcctcggtacaccgtctcgatgatgtcgatcagttcttggccgtcgtgcattggccaattgattttgttgttgttgccggtgcccaagtcgatcatgatatgcttgttcctaaaaatggaggacaatttaaggaacaaacaattgggaaatttatttcgaattcaaaaaacagtcataggaaatgcagaaaatgttttttttccctaaattctgagaaaaacctgaagaagaacatcgcggtgaccgggtcgtacaactcgtacattttgttgaagtcaggcacctgcaaatggaaggcaaaatgacaaaaatatagatttatttggtgtcgtcatttttttgctcacaatcaatagcaaaattgaaaaaaaaacatttttctcttttttaatgggaccagtatagttttcaaaatataaaaaaattcggttgtctgttcgaatttaggtccgataatgggaagtgacataaattggtgcccttttgaacttagcgaatcaaaccccccaaaaaattttcgaagaataaaccaatcttaacaagacggggtaaaaaggagcaaaatttggattttattgaaaacgcggaaataaccaaacatttcttgactggttggtcaaatacactgacaaaatttcggtaaaaattatccgtctcttaaaaacagtcaatttcaaaaaaatcccacaaccttacaagggaacctcgctaggagaaacttgaaaatgtggcgcgcgcatgtaactttcaaaatagcattgtatacgagatgcgcttatgaatgagcaagaaagacaagaaaaagattgaaaagaaacgggtgcggtaccaattaatttttgcttcgggattatattattatggaaaattaaccataggtatgttctagccgtaatcgaggggtttaatattatatacctaatttatgacggtctttgtcatgaaaaggttatcatgaattttgctactcttcaatagaaaattcttcggcaaacaattttatgaattattattgagaaattcggacgaatgcattatcgaattgacaggtgcatgcattttctaagagagtatatgggcaaattgaacattataggcagggctaggcgaaacttcggcttcgaaaacttcgggttttttgagcttcgaacttcctgcttcagctatcggtattttccccgaagattcgggaaaaatacacccctaaagattgagtttacaaagtgaaaaagcacccgtaatgattgggcttttggcaaacttaaaattaattatattcataaa

SEQ ID NO: 30994 - DNA, 1013 bp, Heterodera glycines
atagggatacgatttattagtgctaaaaactgccaaaatagttagttctaggttcaaaaaaaaccaaaataggtgcaaaaatgggaaaatcaagaaaaataggtaaaacctaaaaaataatatccctaataattaatgggttaaaattattttaattatatttattaatattggtttacttgtccgacagtttgtggtccaccaccaaataaatgatcagaatggcacgcatgccgtagaaggagaagcgctcgcaaaattcgttgcccaacatgaaaaagacgcccgttgggtacgagcggagactctgcaaaatgccctcctctttctgcggctgccgtgccgcaccttcgcactccgtcgagttggggctgtatttgcctttcttccgccgttgggtgaattcggcggcgccattgcccacggcatttttcagttgtttctgggtgctcagatcgccgatgacagtcatttgattggagtagtactgtaaatacggtaaatgagaaaataaattaaacaggtaattattattattgtagaatacggtaaataatgaaacaaattaaataggtaattgtgattactgtaaattacggtaaaattaaaaacaggttcaatttaatgtctgaaaaggttaaatttaaaaaataaaatttagaaatgaaaggcgttaatcctttgagaattatgaacgccttaaatagaatatattttttacaattattattattttgttaattgagttttaatttcgtcagcatcttatgaccattactaatattattataattattatttaattgatattaattgatttgaatgataaaaacataattaggaaaatttgttgttaatttaattacgagttggcgatcacttaatgatcagtcagtcagtcaatcagcagtaattattttaattgttcataatcggcggttgttttcttcctctgacctccaattgttttttttaattattattttattttcaattcccaaaatttaaatttt

SEQ ID NO: 30995 - DNA, 570 bp, Heterodera glycines
acctcaaaaggtgcatagtattataatgatttcaatagagaattagattaaaaattatgagaatgaaagtgcctgtctcgcgatatataaatccgcaattcgcgaaaaaatctgacattctatctaatatttgctataaaaattcacccataatctcgtttgacggctcataattctgggctcataaaacggaagaaatccgcacatagattttacaaaattgaggctaatttctcaaaatttcttcaagtcctttaaataaaagctccagctctcgaaaatagctaagatacacatatataaagggaataaccgataacgaaggataaactataagaaagcaactaaaaaatagaaaagttcatatggatccaaatattttggcgccttttccaatttttataaagatctatgattatacgcctcattaacatcccaaccttccccctccccctttggtccccccaactcatcccaaccttccccctccccctttggtccccccaactcatcccaaccttccccctccccctttggtccccccaactcatcccaaccttcccccacccc

SEQ ID NO: 30996 - DNA, 1123 bp, Heterodera glycines
ttcattttgctgctgttcaccatccttctgccgactgctgatgcgttttcacttcgcatcgttttcataaatttgccttctttaccatcttttatattcattcatcttttgtacattcgtcccactttctctttgtttatttcatctttaaaaatttttttattttgaacaaaaatttattaaaaagatcattgtcgatttactaaacacggattctgacataagactttagagtcaattaaaataaaatttggcaaatatttcaaaagtattattaccctgaggatgaatcttgatatctaaaagctaaaacctattacaatatatgattatttgatcattcaatattaaacgtgattttgtgtaattttaaatcgtatgaacaaactcaatttaattcacctaaatgtttaggggctccgaattatacgggttttatcctacatatttgtcagcaaatgtttacccatggccaaggcgtgctggccccacaaatggttcacatgcatcgtttggtgggcaatcagccacacagcggagggtcggcattcttcacttccgaaaatgtggaattggtgagtgcgcgggcatattgaattttgccattttcttcataatgttaggtaaatcaatcgatgggtaccaacggccattgctccgtgggagtggcgccgcataattttggctcctttggacaaccaaccaatgtgatggcattctcttctggccaggccatggcttccggcatggacaatcccattgtcctaatgggacagaatttctcagctgaccaaatggaagttgggccgggtcggacggcggaaaccaacgaggaaacgaccggtgcatttcggatgctgttcaaatgcccggagtgtggcctcgtgaaaaactccaacggagagttggaagtgagtggagcggcaagagtccatgcgtttttggcacttccttcaagggcgtagccaggaccttcgtttcgggggggggcaactcaaaaagtcgattcttaggggtgtattttttcgttgttgtaaacctctatttttaggggtgtattttcgtgttttttttttaaattgaattgattgcattatcttatgtttcctttgcataaacgcgt

SEQ ID NO: 30997 - DNA, 1119 bp, Heterodera glycines
ttccccaataaacttttcataccccatttttcgcaccgtattataaaaagtcttttttcccccataactttttcataccccattttcgcaccgtgaatttttatgatgaaccgtgagtagcttagagtacaaaaaatgaaaaatttgaaatcatgtttactcccttctaggggtattattttgtaaaaagtctttttttccccaataaacttttcataccccatttcgcaccgtgaatgttatttttattgaattctgaaccggtttgagtagattagactacaaaaaattgaaaatttcgaaatcatgtttcccactcccttctcccaggggtattattttgtaaagtctttttttccccaataaacttttcataccccatttttcgcaccgtgaatgttatttttattgaattctgaaccggtttgagtagcttagagtacaaaaaattgaaaatttcgaaatcatgtttcccactcccttctcccaggggtattattttgtaaaaagtctttttttccccaataaacttttcataccccatttttcgcaccgtgaatgttatttttattgaattctgaaccggtttgagtagattagagtacaaaaaattgaaaatttcgaaatcatgtttcccactcccttctcccaggggtattattttgtaaaaagtctttttttccccaataaacttttcataccccatttttcgcaccgtgaatgttatttttattgaattctgaaccggtttgagtagattagactacaaaaaattgaaaattttgaaatcatgtttcccactcccttctcccaggggtattattttgtaaaaagtctttttttccccaataaacttttcataccccatttttcgcaccgtgaatgttatttttattgaattctgaaccggtttgagtagattagactacaaaaaattgaaaatttcgaaatcatgtttcccactcccttctcccaggggtattattttgtaaagtctttttttccccaataaacttttaataccccatttttcgcaccgtgaatgttattttattgaattctgaaccggtttgagtaaatagagtacaaaaaattaaaaatttcgaaatcatgtttccc

SEQ ID NO: 30998 - DNA, 1044 bp, Heterodera glycines
ttattttatgggcgtatctttttcaagatctgtaaatcaatagcaccacgttttttgtgccgagaacaattttcagccagaaaaaaaattcggagggataaatctctttttttttgcaaatggtcattaattatgctgtcaaaatttctttttcgagtaatttctgtcccaccttttccacgagttcctcaaatgcgcattgaactccttcgcgcgtctttgcgctcgcctcgataaaaagcattcggtgtttcttcgcaaattgaaggccctcctcccgcgagaccattcttcgctccttaagttggtcaattgtttcgttgcgaagtttgctctcaccgcgtcgattttgttgccgaccaacattttgacggtgtcacttttggtgcagtaagtgtccacctccaacagccaatggtcgagattctcgaaagacggccgattggacacatcgtacaccaaaatcactccttggcctgaacagagagacgctcttaaattctcaaaatcgctgcacctccgcggtaataactcggtgtaagcgtccgaaagcgttcttggcccgccgtgtcccaaatggccaacttcacaattcgatcatcaattgaaatcgaacgaacgcgaaagtcaactccgatggtggctgccatgtccgggtcaaatttatcatctacaaatcgcgcgattaggctggatttcccgaccccactttcgcctaaagaaaaatataagaaaacatggacaatggaattgttccacgaaccgatggttagaattttaagagtcgtcaaaaagttgtcgccggtgtccattttaattagaaaaaattacttttccgtttttcaatttctttcgaaacaaaaaatcatttacaaaataaaaaaataagtgaaagatgagagagaaaaaaatgatatgatagagtcaaataaattaataattcccttttcgtcgtcattttcttttctgtaactttctaatataaattcacttaagaatggctgagaattctgaccccaaacttatcgaattgcttgacgatgc

SEQ ID NO: 30999 - DNA, 1381 bp, Heterodera glycines
  unsure (1)..(1381): unsure at all n locations
ccaattttaaaaactaaaaatagtgcacaaaaggggagcccccccgcggcggggcttaaaaagcattgtacagcatattaaaaccgaaattaattttggtatatttttcacaatttatttcaaaagacaaaaaaaatgattcaattttgaaacgaaaatagtgcacaaaagggagggatggttagacgaaaaagaggaatttttagaaaagagcgcaccccatctgatatttccatttttccgttccacaactggccaaaggcgactgtgctcattgacacgtagttgtccaataaggtacttggactttccacagtaaaatgtggtacaaaattttggaactgtcccgcctcacggcggggcttaaaagcattgtactgcataattaaaagctaaaataattttcgtatatttttcacaatttatttcaaaaagccaaaaagtccggaaccaattttaaaaactaaaatagtgcacaaaaggggagccgccgcacggcggggcttaaaagcattgtacagcataattaaaaccgaaaataattttcgtatatttttcacaatttatttcaaaaagacaaaaaaaaatgattcaattttgaaacgaaatagtgcacaaaagggagggatggttagacgaaaagaggaatttttagaaaagagcgcaccccatctgatattcccatttttccgttccacaactggccaaaggcgactgtgctcattgacacgtagttgtccaataaggtacttggactttccacagtaaaatgtggtacaaaattttggaactgtcccgcctcacggcggggcttaaaagcattgtactgcataattaaaagctaaaataattttcgtatatttttcacaatttatttcaaaaagccaaaaagtccggaaccaattttaaaaactaaaatagtgcacaaaaggggagccgccgcacggcggggcttaaaagcattgtacagcataattaaaaccgaaaataattttcgtatatttttcacaatttatttcaaaaagccaaaaaaaatgattcaattttgaaacgaaatagtgcacaaaagggagggatggttagacgaaaagaggaatttttagaaaagagcgcaccccatctgatattcccatttttccgttccacaactggccaaaggcgactgtgctcattgacacgtagttgtccaataaggtacttggactttccacagtaaaatgtggtacaaaattttggaactgtcccgcctcacggcggggcttanaagcattgtactgcataattaaaagctaaaataattttcgtatatttttcacaatttatttcaaaaagccaaaaaaaatgattcaattttgaaacgaaatagtgcacaaaagggagg

SEQ ID NO: 31000 - DNA, 1893 bp, Heterodera glycines
acgaaggattttgtggagtggattttaactgcttttaccaattacgatacgtacatttttgcgcacaacgccggacgatttgacggtaatttcaaaatttaatttttaaatcctaaatttttaggtcattttgtatttaattatctctgccgtaccgggaagaacccgctaccgctcattaacggactgaaaatttatgaatttaaagtgcaaaactcgaagaaacattcaaggctgatttggagagactcgtgtttattgatgccggtgaagcttgagttgctgaaggcgacatttaatttgtaatgtgaggacaagccctttttcccctactactacaacaagaaagaaaattatggagttcgattacaacatctgccaacaatggaagattattcaccagggtctatgaataaagagaaatttataaaattcgaaaaatggtaggaaaataatttaaaaaaaaacaataaaatcttatttttcaggtataacgaaaacaaggagacacccttttatttggatgaagaattgaaaaattattgccgaaacgacacggagattttattgctgtcaattattgagtttaggagaattttgatcaacgacattacgaagggatttgacccgttgccgaggagttgtacgaatgcgggggtcgcgatgaatatttttaaggcactgtttttgttgacggagcagttatcgattgtgccggagaagggatatgagcggtgtgatagagcgagtgtgatggccattaaatatttggagtggcggagcaaacgggatggaattgagatacggcacgcggggaatggacgagaggtcaaagttggaaattacaaattggatggatttattgcgaatgaaggaggtagggacaaatgcattgaggtgatgggatgttacatacacggatgtttgaattgttatgacccggcggcggaactgattggtggaaggacggcccaggaattgaacgatgagacgcaggagagattgatggagctgcgtaagactttggacgtcgaagaagtttgggtaagtttatctgacatttacatttttattgtgagtttttaggggtgccaaattgaaaaggaactgaaaaaggatgaggagatgcgggacttcttcgacgacagagggaatgagaaggggccgattgatccgcggatggcttatgcaggagggaggacgggaccgatgaaattgtttgcaaaatcggacgagaagaaaaaaattagcgtttacgatattgtgagtctgtatccgtctgtgaattacggtacagcttacccgattggattgccagagattattataccgaagagcgatgagattgatgttaattggacgagaccggaggatttgaagtataagggattgtataaagtgagggtcaacccgccgcgggggttacgggttccggttctgcagttgaagtgcgatgataggttattgttcccgttgtgttggagatgtgcgtcaaaatttaagaaggagactacgagatgtaattacaattgcccccatgatgagacacagcggagatacgtggcgacatataccagcgttgaattggtaagaaatttaaaatttgaaatttagataattttgacattttcaggcaaaggcgttggagtgcggatattctgtggacagattttatagagcgtggcattacgaagaagaggcggatgacttatttaaaggatatgtgagattgtttttgaagctcaaggaggaggccagcggttttccgaaaggggttgagacggaggagcagaagaatatttggagagaggaatataaagaaaaatatggaatagatattgaattggcaaaagtgaagaagaatccgggattacgatacatcagcaaattgat

SEQ ID NO: 31001 - DNA, 1233 bp, Heterodera glycines
tcagagggttcgttttattcagagggtcggtttagtcagagggtcgttttagtcagagggtcggtttagtcagagggtcgttttagtcagaggggtcgttttagtcagagggtcggtttagtcagagggtcgttttagtcagagggtcgttttagtcagagggtcgttttagtcagagggtcgttttagtcagaggttcgttttattcagagggtcgttttagtcagagggtcggtttagtcagagggtcgttttagtcagagggtcggtttagtcagagggtcgttttagtcagagggtcgttttagtcagagggtcgttttagtcagagggtcgttttagtcagagggtcgttttagtcagagggtcggtttagtcagagggtcgttttagtcagagggtcggtttagtcagagggtcggtttagtcagagggtcggtttagtcagagggtcggtttagtcagagggtcggtttagtcagagggtcggtttagtcagagggtcgttttagtcagagggtcggtttagtcagagggtcggtttagtcagagggtcgttttagtcagagggtcgttttagtcagagggtcgttttagtcagagggtcgttttagtcagagggtcggtttagtcagagggtcggtttagtcagagggtcggtttagtcagagggtcgttttagtcagagggtcgttttagtcagagggtcggtttagtcagagggtcggtttagtcagagggtcggtttagtcagagggtcgttttagtcagagggtcggtttagtcagagggtcggtttagtcagaggttcgggttatttccagggtctttttactctttgttgacgattgagattcttagaccccctatgaatcggtcggggtagttttcgcgtgagtatatgtttaggactggaattggtcgaatttgtgtttaacatccatgtttctaataccgaacccgcattcggacaaatttattaactttttaatttttttatttcttgcggctaatatcttctacagtaatttgtcagtttggtcggatgtgcgtcatacggaaataataattttaattttataataatataacaaaaaataacaaatttcagaacaaactaaggtcgcatttcatagtttcgggaaacaccggtgagaaaattgataatgtttttcggattccctttggcattggcataattggggtcatttttgggggaggggattgttattg

SEQ ID NO: 31002 - DNA, 1201 bp, Heterodera glycines
  unsure (1)..(1201): unsure at all n locations
gcagcaaggagggcatgaacaaattgccgagcactgaatgggattgccatcagctgggtgccatccaatttacggctgtcagttttctgaaaatttaaaatttttcaaaaaaatttttcccagggttccacagggccaccaaaagcggtggggttgacgcattatcagctgatcaatgggtgccgaattgcggcacaagccattgacatcaagcgggaggtgaacgcgtttttcgaacaaattggcaaatatttaaataaatatttgaaaaaaaaattaattttttaaaataaattttttttttaataaattatttaaaaaagaataaaaagtgtaaaaatttattaaagaaatgttcaaatataatatagtttaaagttgtgaaatttatttcggtaaattttacattttaaaagataaaaatatttgtaaaaataattttttatttttatcgactcaatttgttcaataaattttaaaggctaattatttttttaaataccaaaatgattaattaattttcattaattatccattcatttattaacctaattttatttatataaattaatagactgttctttgctgtgcccttccactttttcggataccggtttttgcattggccattttcacgccatttttaattgaatcgcggtaataatttaaatttaaaaaaatttaatccatttatttttaaataattttaagttcaatttttcctgagccttctccattgcctcgtttactatttcaatccatcaacaaaaatcagttaaactattttaattaaattttatcatttattaatttattatttataaaaaaaataattaaaattacctaattatttttcaataatttaaatgttttaaatgcaacagatgctcaactttgttgacaaatgccacggcacttcgccttctgctcaaaacttcgccgcttacacaaggccaaaagttttctttgccaagcattgacaccgtcattttgttgggcgatagggtaaaattttgcatttttttattttaaaatttaaatataaaatattattgaggtatccaccgatttgttgacagccattgagtcggtgatgccaaatgcaaaaggaatagcggtaattttaattgaaattacttaaatttttaggtcaaaaaataataaattttataacaaaagcatcttttanatttcaaaaaaa

SEQ ID NO: 31003 - DNA, 1288 bp, Heterodera glycines
ttttatttaaatataattaaaaaataaataaataaaactaattaattgaataattgccctcctttcacctgatgttcagcgtgttcagttcttctgcgcaaaccatgaagaagatgtccgtggcacgtgtgctgagaatcgcttgtgccggcgattgttccgccggcacggcgcgccccgggggcaaaaagagtttggcaccgccgcctttttgccaaaattgcaaaataaaatttgagagcgccacctgcttcttctcgtgaagccaaatgaaagtccatcttgtcctccaattgcttctggtcgtcaattatatcggccttaatttttaggatttactaacgcggcgccaagaaattggaaatttgtttgaatttttacattgtttttcaactcagttttcttgataagttatggattatgaatacaaaaagggtgtggtcagtttcaaaaattttattggcatggaattcgtttttgattggcggcttccctgggcagtgccattccctgactgatcaatcacccaaagtgatctgacggattgaccattcaattattgggtcatttttttcttgttcaatcaattggttagcccggactgatgcgatcagttgccaacctctgatcaaatggctcaaatttggcgaattgatccatcattctttgaccgattttcgtaaatgtgatcagtagttaattcctgactgatcaacccatcccaagtgggctggtagatagatcagccaatctttgatcactttcccgtgggccgtctcaccgctgccgtttgcgtcccaccgcttctctgactcgtctgaccgtcccactctccgttggtcgccacactgtctcgtcgtccttcccctttctctgcccgtgccgtgccgccctctccgtttgccgtgatcatttcgcgcagttgcgcaaattccgcgtcccgtcgcgacagctccgcctgcagccgtcgcacgcgtcgcagcagctgctctttgctgtgcccggcggcgacggcgcgcgcgacttcgtccgaatcgacggaagagccgccggacgaattcgctggaaattcaaaagcattttcatttgatcacaagcacatttaagcgaattaattatcaattacttcacaaaagataaagcccctgaaaatgtaaaattaaaaattaaatcgtttgatttttgctagacaaatagtgtaatttgcttcttaaatttattcttttgaaataatttaaacgttttaaattaattaaaaaacattattaaattaatcccaatatttctt

SEQ ID NO: 31004 - DNA, 1703 bp, Heterodera glycines
ttgtacctcttctaatcactgttgcacctcttctaattactgttgtacctcttctaatcactgttttacctttcttaatctctgttgtacatcttctaatcactgttgcacctcttctaatcactgttttacctcttctaatcactgttttacctcttctaattaccgttgtacctcttttagtcactgttgtatctcttctaatcactgttttacctttcttaatctctgttgtacctcttttaatcactgttgcacctcttctaatcactgttgcacctcttctaatcactgttgtacctcttctaattaccgttgtacctcttttagtcactgttgtacctcttctaatctctgtaaggccaacaaaatttgaataacgggcgcgaagcgcccgtatgaatcaacaaactttaaataacgggcgcgaagcgcccgtccaaggccaacaaatttaaaaacgggcgcgaagcgcccgtcttgagcctcgatgtggactaaaaacccctaataattttttaaaaattcaaaaaaacctccccaaccaattcgatcaatatgaatcgcttcacagcctaggtagcgaagctcaagaagcgcgaagcgctttttcccagtgttccccgaatcagttctgtagaatgtcgtacccgtacccatatgctacaatacctcattgataactcatttttctattgttgcactttgatgtcatatccaactcatcctgttacccatggaaaaatgtcctcccaatgggtgataatgaccattttaagaagtgtaggacccaacctggacccgaatatcccgttgagtctcagaatcttaagggcacaatttcttaactttttaatttttttatttcttgcggcttccacatgcgcagcgttcatgtcgcacgaatgaactcacgaccaacttctgcacaacgttatttaaatccgtgtgcaaacgtcctgaattttaaaagattttcaaaattcaaaataatatattaacatacccttgcacttgtctgacgggccatgaaactcacatcgccaaaatttcttaagtcaatctgcgctcaattggtcgaaaacatagagtgcgccgtcatgttctaacttaactttgtttctttttgttttaattttttgctgctggtccatattatataattgaaagaaccttaatttagtttataaactcacttaattataaaataaatattcgttagaaaaaagagtgaaacaaattttcgttaaataaatgtgagttatgaattctcttttatatgcaaccacgcgaaaacagccacgcgaaaacggccacgcgaaaacggccacgcgaaaacggccacgcgaaaacggccacgcgaaaatggccacgcgaaaacggccacgcgaaaacggccacgcgaaaacggccacgcgaaaacggccacgcgaaaatggccacgcgaaaacggccacgcgaaaacgtcctggcccgaaataaaagtaccattttttttctccttcttttgtggcttatcgtataaatgattaaattcttggcaagtcgctttgcctttgacggttgagtgagattgctgttagtttgttgtccaaaatcttactacgaatttcttgattattcgacatagttatttcgcattttctcactttctatgcgtgatttcgacagcaagtgaacccgacaattagagactgggtttt

SEQ ID NO: 31005 - DNA, 1248 bp, Heterodera glycines
tgatgtttaattgtatttttcatttcaaattttgtatcaccggaccaaaaattcacttattatttaaatttaacgcaaatccataaaattatgttttttttgatgctataagccaaaactgtgccatgtgatacatttttcaattcccttttcatttttgccattcgcctttttaaggccgcttttcgcttgaggcgcgtgcccaccaattgttggccattgctcggcttcactgttacgaattctcaaatttttatgccaattgcgtccccaatttgctcagcgaattcggacgagagaacggtttgggcgagcagagccgcacaaaacttgagaaagcattggcccattcgctgttcaaagtcagtgagagacaaagcaaaacaaagcaaaaaaaaaaacaatgcttaaattctttaatttttgaattatttaattttcaatcatttaaatttaatttgaattacgtaatttagccattgattaattcgggagcagttcgtttgctcttattgtgtatatatttgattctcaaatatacaaatttatgtacacaaaaaaaatatttattaaaattatacaaacaattgttatttttctaattaatattattaatttttaggactttatgcgcaaatatcaaattctgtgcaaatttactgatgtcatttggccccagggaatgtctgacgaggccaaaaagcaaatggccaaagattacggcgagaaaaactccgaaactgccaaaaatccttgttcaaaaccacggaggtgaacaaaaattacaccaaaattgatatgaaaaaatattaaattgaattaaattagtcagaatgggccgaatgtttgagatgcgcgtctatggccgagtgggaaaccctcacaccgcaaagccgcgcagggaacacacgtggagatacagcccctataaagcgcactacgattacgcggattactattccgatggatccgttgatttctattattaaaggaaaaatatatttatatccatttggatattttttactctcaatgagaattattggccagaaattggaataagaattgttttgacatacagtaatggtcaaatgtttaacagcacgtacacttattacttgtacattggtgggaaaaagtcttactcaaacgtttaactccaccaaaaaatgtacaggaaaattcaaatattgacttactttttattttttgatacaacattttgggcgtttcaacttcggtgttggt

SEQ ID NO: 31006 - DNA, 999 bp, Heterodera glycines
aaccccatttttcgcaccgtgaatgttatttttattgaattctgaaccggtttgagtagattagactagaaaaaattgaaaattttgaaatcatgtttcccactcccttctcccaggggtattattttgtaagtctttttttcaaaataaacttttcaaaccccatttttcgcaccgtgaatgttatttttattgaattctgaaccggtttgagtagattagactagaaaaaattgaaaattttgaaatcatgtttcccactcccttctcccaggggtattattttgatagtcttttttcaaaataaacttttcaaaccccatttttcgcaccgtgaatgttatttttattgaattctgaaccgttttgagtagattagactagaaaaaattgaaaattttgaaatcatgtttcccactcccttctcccaggggtattattttgtaaagtctttttttcccaataaacttttcaaaccccatttttcgcaccgtgaatgttatttttattgaattctgaaccgttttgagtagattagactagaaaaaattgaaaattttgaaatcatgtttcccactcccttctcccaggggtattattttgtaaagtcttttttcccccaataaacttgtcaaaccccatttttcgcaccgtgaatgttatttttattgaattctgaaccgttttgagtagattagactagaaaaaattgaaaattttgaaatcatgtttcccactcccttctcccaggggtattattttgtaaagtctttttttccccaataaacttttcaaaccccatttttcgcaccgtgaatgttatttttatcgaattctgaaccgttttgagtagattagactagaaaaaattgaaaattttgaaatcatgtttcccactcccttctcccaggggtattattttgtaaagtctttttttcaaaataaacttttcaaaccccatttttcgcaccgtgaatgttatttttattgaattctgaa

SEQ ID NO: 31007 - DNA, 1355 bp, Heterodera glycines
  unsure (1)..(1355): unsure at all n locations
gggcacttcatcggcgggcatactgaaacagatttttancagttaatggaaccacaaaatgacattcaaaatatgcgcgttttgcgagataattcccatataaacctccacaagcaaagaccggactcgtctttggccgcttcaatcgattcaggaatttcggtgccaaagttaaccataactttgcaatttttggtagcaacatgggggaaataaatatcgccggttcggtactggaatttttttgatattagatatacaaatcgtttatcaaacccgaatgtcggtgaatgccgcgccaagtggttgaccatttttgtaatagcgaatttcggcacgcccaacatcctttaagaaaacaatttaatagaaagtacaagaatgtgttgcccaaaactaaccaaaactgaagtgatcacttcatcgacaaagaacgggtcgacaaaatcggtgaaaatgttattggtcgctttattgcccatcgaagaaaaggcgaaggaattttgttgttcgccaagctaaaaatattaatgtctttatttaaataaacaatacctctcaaatttggaaatgtttaaaataatataaaatgttaccaaattggaagagtcagctcgagaccaaccaacacggatttggtgcggatcagcttcgtcaaacggcaaatgtttgagggagagaaattcagtgatctgtaaaaataagaattatttagatgcgctgaaaaagtacaggaaattccacttgccttcacttggaacgctattggtggcatttcggcgcgctgattttcctcgtccggcaccaaaacaccccaattggcgcgtacccctccccacatcaacgcaaaaccatcactattgtcgggatcgacaagccatttgttgctgggacatgccttcatgttgaagtcggagttgtctaaaaacccactcatacttttggaaatttaggaaatgttacgttcaaataaggaaagaaaattttttaatgaaaaggggtcgcttcggacggagtatttgagaggaaggaaacctttttggacgaaatcttagaaggccagaatgcctgggactagaaaatggtatttgctaattccagatccataaaaagctcaaaacaaagctgaataaataatatactcacaaaagtccagctcaacatgctcggcgtcgggcaatggttcatcttcaactggcttcggctcctgttcgttgtttttgctcctcggtggcaaaccggcggccaactcaaagaggtcgtcgtccatgtcctctggcacctgagtaaatttgctcattgagtaccattaaattttgaaatgaacagataaacggcagaaatttaatcgacca

SEQ ID NO: 31008 - DNA, 1431 bp, Heterodera glycines
tatgagttttgcctttgtattttaatcagtttccccatcatttatacattgttctaatacgtaaacatatttaattcatagctttaggatagtttcaaaatcaacatagtatatgcaattaattcacatttgtttggactgccggcgaagaaatcgcacccagtatgtcctggacggtgaactcctccaattgtgttgattcgccgcccgactggagcggtcgtcgcagtagcagccgtgtgggggaacatcaactgctgaaaatgtctgagaatgatttggcccgagacggagatgatggagttggcctggtgggtcgcgtacagcggctagtacaacacggtgtagggaaagtggggcaaattgtccgtcatgaacacccgctcctcacggtggaccttatgaaattttaaattgtagacattttaaaggatgctttttacaaaataaaaaatacaaatatattagaaaagtggtactttgaagtagattggtcccgtgtgatattttcagaatcatatcatcattcctgtacggtgtcgccaaagaaaatcgatatagagaaaaacataaaaatttttgaaaatctgcccacagataacacacaagtacccaaaattgttacaccgccagatttttattttattttttatttttcagtttcgtcatttgagtcctaatgactatgaaatttcagttccgtctcgaagattggcttatttttcggaattttcatcacaaaaagtcaaattttgccttaaaaagtgtaaataagttcctgtttgattacgcgtatttagccggtttcaaactaaaaatgcaaagttcgaaaaatttgaattttcgaacttttgttcgaattcatgtccggggttcgaaattggtcaaaatagatgccggatcgtgatcagcggccccaaaccctaggaaacatgctttcatgttttttgaaaacaaaaaaaacctttatttgatttgagtcatttatgcattattcgaattgcctttgattgttcagggcaaaacggtgacccaaaaagacaggcacaaactgctgcaggcgaaagagttgggaaaacggcaaaaatgagataaaaataaaaactttattatataataaataaaaaaaaagtacaatggcgtcaggctatgtctactacaaatggagaaaattggcgagaagtgatgtcaaaaattaaaaaatttgaaatgacgcgtcccgccgtacattagtgttaaccggacggcaccgtgttttgtgaattgaataattaaatttatttatttaattttatcgatcactgagtttttgtggaacgcccacactgagcttttttgtggaacgaaatagcaccggtaaaatctatcccactttaaaagtgctctgtggagatgggacaatagaggctggaacaattggaaaattttgcg

SEQ ID NO: 31009 - DNA, 2343 bp, Heterodera glycines
tccttaaaaaaaattctttattttgggaaattttttcaaaaatttcaggagtttttcggggtcctcaaagggtttttttaattggtcatgtatttttaaaaattttttgtgaacttttcatttaatttttctacggttttttgtttttaattttaattagttgattttaaactttttacctttatcaaatttttttttccacaggttatgccagcacacttttgttccttgtgattgaatcgggaaaaaaaattagactgcctcccccaaaacccaagtcattattaaatttataatttgctacttttaattcaatttttattaaaaaaataatattttttttgcttattttttcaattcaatgttttcacaaaatctggaaaattcccacatcgaaagacaaataaatttttacaatttttttacaaattccccatataaataataatttaaaaaacttttttcattctcttcttaccgtaccttaattcgaaaatttttatttttcattctcttcttaccgtaccttaatttttaatttttaaatttctatttcaaaatttcataaaataaaattctttaactccataacattcccatttttcataaattcatcccaaaatcaatttcctctctctctctaaccattcctttcactttataattaaattcaaacaaattattaatttttttttatttctacaaaatttgtaaacgtccccatatttttttcttttttttttttttttgcaatttcttcgtcccaaatgtgttgtgattttgtgtgtgtgtgtgtgcctcgttggcctcccgccccgcctcgtccgttccgtccgtccgcgtccgttcctcccatttttctctctaatcatttcgcccattttcacttttcaatttttcgccgtcatttttcaatgacaaaacaaaaattgagagtaaatttttcgcgggcaaaaggaaagcagcagaaaattgaacaaacgcaacgcaaaaaaccaaagaacaacacaaagagagcggcgacgccggcgctcggcggagcgcaaaaaaagtgaaagtgaacgcaaaagcgccgccgggcgcgggcggcgcccaaaaaaagcacacaaccaaaagcaattatcgtgccttatgcacacaaataaatttgacgcatacacactattttcatgcttaatttgtttctctttctttctcacccctccaccctttctctctctctcgcctctctctctctctcacttcctcctcctctcacgctttctcatctctctctctctctcctccctttctatccttcctctcttcattttctcactatctctgaataattattccttccttctcatctcagcctcactatttccctctctctctctctctctgtctttccatccttccccctctctctttctcccttcgcattctcccattcgcttatccttcccattcctcttgctctctccctttctctctctctagcttttttctctcgctctcttccaccacccccacactatcatttggccaatttttgtttatttattttttttattttaatctttagtccttctttttccattgctgccagctgccgttgtgttcttgcgtcagccgcgcacgattctcacgaggacgcaaaaaaaaaaattcgctcattttctcctctttttgaactgtaacactctctgccctgtctgactgtctcgcttcctcaactatttcacaaaattcgtctctctactatcattcccgaacgcattcataacacacattttgttgtctgctgccagctgcgtgcgtcttccagtctttttggccattacatgcgctgaattttgtgccagccgcgcacgcttcccatcacgttcatttgttcctctttttttctctatctctctctctctccggttttccatcgtcgtccggttgccgttaatttcttgccgctgctgctgccagccgcgcacgcttcccccaccggcgcggcgccgttggcccgtcccccttttcatgctctcgagattttgacgacgtaactccgttcttcatgcgctttctgttgtgtgtatgtcttgcatgcactcgcaactcttgtctctgtttcttttcccctccactgtacatgtttcaattttcctccatttctccgtgctcctacataaaaaaaaatatctcctttttttttttgcgctcccctctggggattcattttggtccccattctcgttttgtgttctgtgtctgtgctctctaacaattccttctttctcactctctctcttttctctctctctctctcttctctctcacttctttctctctctctctctctctctctct

SEQ ID NO: 31010 - DNA, 1339 bp, Heterodera glycines
cccacttctttttaatactttcctttccgtcgcgggactataaagagcagccgcgaaccgggacgcctagttatctatatataaaaataaggggggggctaaccacaaaacgacctggccgcaagcgaatatcgagagttgagcaccgagaccggtaccattcgaaagagctcggttttctctacaattctaaccgtgtggaaaaattagcgacaagcagacattttcgagaaaatcgcgttcgaacaaaaaaaacccggctttttacaactggccaaaaatgggttgtaaaatgtgtgttttgaccttatttctcgggaaccgtaagagctacgcttttgcggtaagcgaacaatttgtagagctcgtcgagaggaagggtgagaaaaaaatttcgtagctctacgacaaattcgaacaaagttataccccggcaaaggtcgaaaaaagccgattttttttgtgttttcgccttccggtttacaatccgtttacaattgcaaattcatccggaatgtccggaatttcacggattttgatgtttttcacgtgttttcttcacgtttacgtgtgtttttgacgtgcgttctttaaaccggttccggtttttcacgtgttttcttaacatttacgtgtattttcgacacgtttgcatgcgttttcaacatttcacgtgtgttttcgttacattaacgtgtgtttcaatatgttagcatgtgttttcgagtattttcacattttttgctttgtgttttactttgtgtttttgcatgcaatttttacagtttaaacaccagaacaattctgattgttccggaatgcttcaaaatagttctgataattctgttacagaccagaacagttctgaaaattctggtaagcgtccgaatagttctgataattctgaaacacaccagaacagttctgaaaattctggaaaacgtcagaattgttctgaaaatataaaattaaattaaataaaattaaataaattaaattaaaataaaataaaataaattaaaataaaataaaataaaataaattaaaataaaataaaataaaataaaataaaataaattaaattaaaataaaataaattaaaataaaataaattaaatttaaataaaataaaataaattacaataaaataaaataaaataaattaaattaaattaaatcaaatcaaaataaataaaaattagctgttttgcacgataaggggcgggcgcgaagcggcctgcccctcgaggtgcgcgagcgaggagcggagcgaagcggagcgacgagcgagtgtaccgagtcaatacgaaccgggccttttgcccggtagccacgctct

SEQ ID NO: 31011 - DNA, 1011 bp, Heterodera glycines
ttttgtagggctcaaccgcagatagtaatggcgttttcttcacaaaccccacatgtacaacggtgtagaaaaaagagatagccatttttctgagaatatctattcttctgagacagcaattttcaaaccgaccttttgtagggctcaaccgcagatagtaatgcgtttttggggaaaccccacatgtacaacggtgtagaaaaaaagagatagccatttttctgagaatatctattcttctgagacagcaattttcaaaccgaccttttgtagggctcaaccgcagatagtaatgcgtttttggggaaaccccacatgtacaacggtgtagaaaaaaagagatagccatttttctgagaatatctattcttctgagaaagcaattttcaacccgacattttgtagggctcaaccgcagatagtaatgcgtttttggggaaaccccacatgtacaacggtgtagaaaaaaagagatagccatttttctgagaatatctattcttctgagacagcaattttcaaaccgaccttttgtagggctcaaccgcagatagtaatgcgtttttggggaaaccccacatgtacaacggtgtagaaaaaaagagatagccatttttctgagaatatctattcttctgagacagcaattttcaaaccgaccttttgtagggctcaaccgcagatagtaatgcgtttttggggaaaacccacatgtacaacggtgtagaaaaaaagagatagccatttttctgaaaatatctattcttctgagaaagcaattttcaacccgacattttgtagggctcaaccgcaaatagtaatgcgtttttggggaaaccccacatgtacaacggtgtagaaaaaagagatagccatttttctgagaatatctattcttctgagaaagcaattttcaaaccgaccttttgtagggctccaccgcaaatagtaatgcgttttttggggaaacccacatgtacaacggtgtagaaaaaaaaagatagccttttt

SEQ ID NO: 31012 - DNA, 733 bp, Heterodera glycines
agtgtccgtttggggtactcaaaattatggggagccttttccaacgcagaattaaagtacaggctatagggaagctactcccgaaggattcggtctccccataaatctgggcgcatcggttcggggggactgccccgaaaacaaaaaaatcgattttttcaagtgtccgtttggggtactcaaacaattatggggagcaaaaatccaacgcagaattaaagtacaggctatagggaagctactcccgaaggattcggtctccccataaatctgggcgcatcggttcggggggactgccccgaaaacaaaaaaaatcgattttttcaagtgtccgtttggggtactcaaacaattatggggagcaaaaatccaacgcagaattaaagtacaggctatagggaagctactcccgaaggattcggtctccccataaatctgggcgcatcggttcggggggactgccccgaaaacaaaaaaaatcgattttttcaagtgtccgtttggggtactcaaacaattatggggagcaaaaatccaacgcagaattaaagtacaggctatagggaagctattccggaaggattcggtctccccataaatctgggcgcatcggttcggggggactgccccgaaaacaaaaaaatcgattttttcaagtgtccgtttggggtactcaaacaattatggggagcaaaaaatccaacgcagaatttaaagtacagggtatagggaa

SEQ ID NO: 31013 - DNA, 933 bp, Heterodera glycines
taggcaccgccagttggacaggtcttgcaccttctctggagccccgttaagggaaacttgaacaagcgggccaacccaagctcacggtctatacgctacacctcgcaaccccagaggagctgcgattcagcgctggactcttcccagttcactcgccgttactacgggaatcctcgttagtttcttttcctccgcttactgatatgcttaagttcagcgggtgttcacgtctgagttcaggtcgaaaaatcaaagcaggaatgccagtaatccaggcactccgccacagcatgcaaagcattggtgcgcttgagttacggtccgtaaaacgcgaattagaaccacaagttcgcgccagcacaccaaaaccccacagccgagctgagcaagtaacgtaagaacacgtacaagtacatgatcccacgaagcaacgcacaagcagtgcattttatggtaacgaccctgaaccaggcgtgccaatggatgtaactccaatggcgcaatgtgcattcgaatgttttgtgttcaaggtttctgcagttcgcactaattatcgcagttggctgcgttcttcatcgatccacgagccgagtgatccaccgataagactagaattcattcttcaacagaagtgtaaaaaaaaataatgaaaaaaaaagaaaaagctggcggtgcccgagctgacactcattgagtcttaagccacgtgctaggccaagcacgggccctaccgcgtcgtctcatcacggccacggacgtagcagcaagcacaaacacaccgctagttacggcacgtaagaccgggaacggaaccaccatccccagtcagtgtgttatgtgcctggcacaacaaccgctcaacgacgcacagacgccagcacagccgttaggtcgccccacgagcgtgcatcccacattggcgcagcgaaccag

SEQ ID NO: 31014 - DNA, 551 bp, Heterodera glycines
atcaggggctcaccaaattttgcagggatacgtatcgccattttacaaatgcttactaattttcctagattttttaaacccgttgaaaattttttgcagacaccaccattttgcacttaaaaaaatttcaaaaaactttaaaaattcatagaaaatttaaattcataggtactactgctaaatcaacgcagagacgcctttccttgacctttttaggcccctgcaaaatctggtgcgcttctgatcactactcgaaaaatgagtgattgaattttcactaaaaagttaagcctaaactttttggcctgtttaaaaaggaattaaaaatttttaaaaattttattcatctcccaatttgatagaaaaagcatcagagtgcctaaactaacatgtaaataaaatttggtgcgtttcagaaccctttctgaaaaaaatatttataaattaattatgcaaaaaacaaataaataatgaactctcttccttaataattttcctgcaccgaaggtactcactcggccgcttcgcggcctcgtggtgggccttcgccg

SEQ ID NO: 31015 - DNA, 1494 bp, Heterodera glycines
gcgcgctgtgctggcaatttcggcctctgggaccagttggccgcgctgcgttgggtcaaggtgtggatagagagggtgcactacgtttttcccccgccattcccctccataacttccccgcaagaaataaatttttaaatttcgttaaaagaaaattcaataaaaaaaatttctagcgcgatttttccaaaattttaagatgaattactagtacttacaattagtttttttcaaaatgacagggaaacaattctcgcgtgggtagtatttattgtttgcccgagaatttcggtctcgagtttcgacaactcgggaaaagtctgttttttttttgtcttgtcttgtctaggtattattgagtctcgtgtcttaaagtaaagtctcgttctcgagtctaattttcggtctcgagcagcactagtggacggtttttttttggccaattctaaacgccaaatttttgacagtgtaaaacttttcgagccccattttcttcacccaggaaaacattgccttcttcggcggtgaccccgaaaatgtgacactttttggccaaagtgcgggcgccgcgtgcattgacttgctgagcctgtcgcctctggccaagggtgtgtatgtacaatatttgtcataaaatttttaaaaataaaaattttttgagttttccttttcaggccttttcaaacgtatcattctgatgggcggaaacgcgtgcaccgattggtcaatgacgacgccggaacgcactcaacaggcggcgatcagaatggcacggaaagggggatggaagggtcggattttaaaggccaataaaattttaaatttattaaaaatttgtttttccattttcccggctttacagttaaattttattttttttaaaaaaaaaaacttaaaaaaaaaagaaaaagtaaaaaaacaccctctaaattcttagttttccagtgaaaaattgtaaaaaaaaaaattagaaaaaacttactttttgaagaaattttaattttttacaatagaaaaacattcattactaaaagatttcgacatttttttaaaatttctaccaataattatcgatttaaacaaaaatacacaccaaaaatgaatgccattttataccccacactctgattgattgaacactcaggtgccgacactgatctggactcattgctcacatttatgcgctcagttcccgcctacaaaatttcggcaccgctcatcggcaaatcggcgttcaaccggcacaaaaaagtgtgcaatttacgggaaaaattaaaaaaagatttttccattgattggatttatagggactcgacttttgcccagtgatcgacggggagctgatcaccaaatcgcctgagcaaatgcggcgtgagcttgactggcccttggaagtgattgttggcggcacagagtccgaggcattgcttttcggtgaaaattctcagatttatgcaataatattcccattgtttttattttaattgtattaca

SEQ ID NO: 31016 - DNA, 1455 bp, Heterodera glycines
  unsure (1)..(1455): unsure at all n locations
cagcagtttccctgcaaaatttgtgagcttctgatcagtctagaacgttgggtgataaaatgaaaaaaataattaaaaaaaataatgctggtgtggtaagtgtgaagaactgtgttcctccaggcaaaaaattctaagaaaatttataagcattgnaagagttctcagcagtttccctgcaaaatttggtgagcttctgatcagtctagaacgttgggtgataaaatgaaaaaaataattaaaaaaaaataatgctggtgtggtaagtgtgaagaactgtgttcctccaggcaaaaaattctaagaaaatttataagcatttgtagggttctcagcagtttccctgcaaaatttggtgagcatctgatcagtctagaacgttgggtgataaatgaaaaaaataattaaaaaaaaataatacttgtgtggtattaattcataaatattttttttcagaaaatgctctgaaacgcaccaaattttatttacatgttagtttaggcactctgatgctttttctatcaaaaagggagatgaataaattttaaaaaatttttaattcctttttaaacaggccaaaaagtttaggcttaacttttttttcagaaactgatcagaagcgcaccaaacttagcagggatactgaaaggaagagaaataacctattttaaatattatctagtcagttcatttaaataatttttatccaaaaaaaatttttttttggatttcggggcagtaccctgaaccgatgcgcccagatttatggggagaccgaatccttcgggaatagcttccctatagcctgtactttaattctgcgttggatttttgctccccataattgtttgagtaccccaaacggacacttgaaaaaatcgatttatttttgttttcggggcagtccccccgaaccgatgcgcccagatttatggggagaccgaatccttcgggaatagcttccctatagcctgtactttaattctgcgttggatttttgctccccataattgtttgagtaccccaaacggacacttgaaaaaatcgatttttttgtttcataaatatttttttcagaaagtgctctaaagcgcacaaaattttatttacaacttaattttagcactctgatgctttttctatcaaaaagggagatgaataaatttaaaaaaatttttaattcctttttaaacaggccaaaaattttaagcttgtgtggtaagtgtgaagaactgtgttcctccaggcaaaaaattctaagaaaatttataagcatttgaagggttctcagcagtttccctgcaaaatttggtgagcttctgatcagtctagaacgttgggtgataaaatgaaaaaaataattaaaaaaaaataatgctggtgtggtaagtgtgaagaactgtgttcctccaggcaaaaaattctaagaaaatttataagcatttgtagggttct

SEQ ID NO: 31017 - DNA, 1021 bp, Heterodera glycines
aaattacattaataattttattgttgtgctgttacgtcctttttttacatccatttgtcctccttgtcgtccatctgtcctttttgtcgcttagttgtcctctttgtcgcctatttgtcccatttgtcgcttagttgtcctctttgtcgcctatttgtcccatttgtcgcctgtttctcctaccatttgaaaaaccaatatttttcgttccggcacttgtgcaaaaaacatttggccaatttccatcgacaaacgcagcaaaaaaacaaaaaacaaatttaacaaattccaaataaataatttcttgtaaacaaattcctcttccaccatctcttccttttccgccgctttcttttccccctttttcatttcctttggcaaaaagtgccattaattaaaaaataaataaaatgaaaacaacaaaaatgatgggatggcaccaattcaaaaagcaaaacaaacggcactgagttcggcagttcaaaggatggaaaaaacgccaactgaccaaaattaacaaacagtggacgaacaacaatgaagccgccgcacctgtgctgctccgtattcattaagctccacataacttcttgattattatttcaatttctcgggctgttgtttctgctttacttttcgcattttctcgaactgcttcaattcttcggagttctgcttcaaccaactcctccgagtactgttttaactcctcagaatactgctccgatttttcggggttctataactctcagacggctttgcaattatttgtactgcttcatttcctctaagtactgcttcagctcctcagagtatggctcacaatcagcatttcctgaactgcttcaactccttgacgagtgttgctgtttgatcggcttcccattttctgctgtttgtccccaattttctcatgttctatttttctcccattcggtaaccttttcacttgtttcattttcaccactaattttggcatttttgagacttctcaccggggtggggcaaagaaaattaatga

SEQ ID NO: 31018 - DNA, 1436 bp, Heterodera glycines
  unsure (1)..(1436): unsure at all n locations
gggggggggggggcctgggatttcaaaaatagattttaagggggtatattttttntttttagaaattccggattaggcggtgtgtttttgattaattagattaataaaaatatatttttttaaattttaataaaaaaatctttatatttatattagagtagagcgggacccggggaattttgggcaaaaccgggaccgggacttttcaggttggaaaaccgggaaaaacccaagacttttccctgtcccggtcaaaaccggaacttaagtactcatttgtacgttattttcagtaccaggtccaggtccagctctactctaatttatatgtttaaataaatatttacttattacaaaaaccattgtttgctaaaaaaaattttcgtttaatttttttttcattggatttggtataatccataaacaaacttcgaaataaaatgaaaaccatttaagatttaaaaaaaaatgaaaggatgtacaatatttgtgatgaaaaatacttaaaaatgttacagtcaaataaatgatcgcttataatttaagttcgaagacaaaacgccaatcaggtttacaccattttgattttttcttagatcacggtcaatatggacgatcaaaaaatggagcagcagcattgcgcgtcacatgattaatgaggctaaatgaagggattcattaacataattaaatttgaaaaataaatgaattattcccaaaaatgtagagaaattatactgaaatataataaaacaaataaaaaatcactttaaaatataataaaacaaataaaattcacttttgaacggggataataattaataataacttttccattctttaaatttagaatttgtcaaaatttattatttactattatttttctaaagaattttacaaatataaataatgaaatgatttctttgaatttacaataaaaaatattttaaattgttttgtaatctattttcgtcataatttgctcaaatatgattaaatattcatttcattgaatatatcttaatttaatgcaaaatttcaattaaaaaaaatagttaaaatttttttaaaaagtaatttccagacaaaaatagtagagaagttttaggtttcggaaaattacaaatttttctgaactgtttcgagtatggaaaaagttagcaattatatcatctttgcagaagaacaagattgcgtgaatatcaggcacatccaactacgtcggtcaatctcttgcatctttagaattattcctcaagagttttgatgataccaaaaggtcataattcgctcatttattttaaaaaaaagttggaagtgccaaatttgctcaattttagagttttaaaccgatgcaaaacaggttttttggcatttccgcaactggacacggaagaatgttttcgtgtttacaaattaactccccngagacgaat

SEQ ID NO: 31019 - DNA, 1479 bp, Heterodera glycines
acgagtacagcccgggcactccacgaagatactgcatttgaggggaattgaactgataaacgccgagcacttcttccactgttaacacaccggatggaactgtaaaatttcaaaatttattattcttaggcatcagtttttttcggccaatttcacataaatttgaaaaatttctgaccctccttgtccatgtatgaaattcaagcattaaaggtaaaataccttatcgaccaaaacaatttctatttaatttccgatttcaaaatttttaccgacgcattttgcaaaatcctcctcatggatatttggaaaacgaattttgaacagtgccggtccaagtactgaacgacgatttcccgaggagcattcaatgccattctgacgacatttttcatcggcccaacggagtgcctaaatagaaaaaaatatcgaaattaaaaaatgaaaataaaaaattaaattgaaattacagatttccaaatttcaaattcatcgctgagtaacaaacgatcactctcgagaagattgcacaatattttctgatcaatttgcaaaaattcatctgatccgaacaagtcagccgcattttgacaaatgtaacgcaaacatttgatggaaaaatccttaaaatgcttacacttggatcatgaatctcacacaatttcgacaagtttcgaactcaacgaacccgaattcgaacaaaagcattattaataagggttgtaaattatatggattaacatattttttctgcgcatatactatgaagaaaggggcttaaaaatagcatttctgcgttaaaattttttgatttggtgaaggtttttagtccatataaatccatattttgggggttttcgggaataaatccatatttcgccatttttgggtttttagtccatattttggccattttttggaaattttcacaagaaaaatgaaaaaaaaacgaaaaatacacccctaaagatcaactttttggaaatttttaaaaattacaccccacaaaacacgaaaaatttgagttttcgtcgtcattttggcattttcaataaatattttcgtcatttttttgcgaacatttctttttttttaatgagaattttttcgaaatttggcaaacttggaggtgtttttgatacaacgaacaacaataaaaaatatgcatttttaagttttaaaccccattttttggttgtttattgtactttttaggtttatttaagcaaatattaaatatgcacaccttttttgggatttttgggggtttacaacatatattttggcattttttatccatattttggtccatttttggcctttttagtccatattttgggcttttttagtccatatttaatgtccatatttcgcgttttttagtccatataatttacaaccctaattataaaaataaatttgtttttctcactcccagtcgaaaaggagagcctgggcatacgcaaagaaaacattgcg

SEQ ID NO: 31020 - DNA, 1494 bp, Heterodera glycines
ctgattttggacataggcgtaatgtctgaacacttgccaatatttggcacacaaaaataaggtgtttgattttaaaaataatttaaaaaaattaggggggggggtataaaaaatagaaatattcatttcaacattttagatatcatagtgataattaaaaaataaattggttctaaagactcaaaatatcatctattacctatcttaaagctatggaatctgaaattgtaagaaattacaaaattttgataagaattcactgaaaaatcataatgaaaatactgagagaattaattattttaaaattactaaaagctcggccttaatcaaaatcccatttctcaatcccgactatttctaaatattggtctaccagtgacagaacaaaataggtgctcgatcgtttcgtaaaagtgccgctagacatttcatcaaaatgccaattttgtgatatctttgcaaaaaagcatactaattaaataatttattttatcgacagaaaataagatttaattttcaaaaaattcgaattgaacccgcatgcaaatactattggttactcatgttaaaacaggaatttttgtccgtggccttgtcaggatccacatcagaatcaggatatgatccgatccaggtaaatttgatcaggataaccctgaccctgattattatttttcacaattttttttggcattacttaaaataaattatgttaaaaaacaataattcaaattattaatagcacatgagcagaaacaaagcaaattcattcaaaattaaacaaaatatttcaccctttgaacatttaaacgaacattttaatttagggtttcgacaaaatatgcataattttgcttaaaaataacaaaatttcatattcttcggaagatagcccaggtttttctctattagactgcaaaaaaatgccagtgattagagctcggaggcatcgggatcaagtagggattttcctgagatctggtcccaatcacgtcttttttaaacggatcaggatgccgaccaaataatatatttaaacaataaaaattaaattatttaatttcaaagtaaaatttacttttttttaactttggcccatcaaaaaattttgtgtaaatttggtcgaagagcaatcctaatttaatcatttacttttcattaattataatttaagcgattaaaattgactgccatttctttatagagcgaaatgaattttaaaaatttcattgaaacattgtccgacatataaacggaaaaatgaacacataacgagatgaacaacattaatgggcaaactaaaaggagaaaatgagcaaaaacaaagctaattaattaaatatcacattaattaaccaaagaaatttaaaattaataatgtttaatttaaattgaaatataaaaaaacaaatagaaaaaaaattagagtcaaaattaaattatttttatagggagaataaagttataataaataaacaattaaattatcttaaa

SEQ ID NO: 31021 - DNA, 1009 bp, Heterodera glycines
cgtgctcacgttcaaagaacgctgctttcgtccagattcctttctttttcgggaaatgtgttcagcgtaaaatgagaatacggcacgtgcacattgcagtgccccctgggtgataaaccattctccgtcttccatccacgtgtgctttctgtcttcgtcctccacaccaaccgcaagcacattttggcttaagagaataaaaagctaatgcttctgaagacaattggatttcgttaattacatgattgctttgctggtcagaggacaatccgcccgttcacattcgacggcgtcttcaagccattgttttttgttgatttcgacttgcgccgagcgcagtgaaataagcgcacgatcaatcaaaagtggcacacgctttgcttgacctcgagtctcttccaacctggcagctgcgatccaaatcattcgttcggtaggaatattttcacgtgctttgttcaaaacctaaagcttactttatgtttgatcattacaataaagaaactttttgagcattttcgtaggtttcaagttttgccaatgccagccaaagttccgtgctcaatgggcagcattcgaccgcccgcgtgagcagtgatcgggcatcttccggcccttgtaggtcaacggcggccttccataatcgaaccgaacttgggttgttttctagtgctttgagcaacacaatcttccgccctttaagatcggcctccaaatcagcagcttttaaccaaattttaacagaatggggcaaagcccgtacagcattcgcaactgaattcaaaaagaatatttttaaattgtttaccgtaatttatagtaccaatgttttttcccacgttgggaggatgaagacgaatcgcttccagccaaaggtcttctgacttttcaatcttctcaagcccctccatgaccaagtttctggccgcctgcaattttccgctagcttcttccagccgtgctgatgcaatccatcctattttataagtttattatattaatgccacct

SEQ ID NO: 31022 - DNA, 1786 bp, Heterodera glycines
  unsure (1)..(1786): unsure at all n locations
gaaaagttcgtatacctcnnggattngatcagcagccttaactgagctttggtcttaaatttacatcacaattcgagatgattgctcactttagcagctgtcttgccagaaaagcccaaaaattgtgcaattttttggcattgtccctcggttattccgtcaaagactgaaattctttcctgaaattaaaaatcaaattcgaagaggaaaggattgtttctgttattattagcccactttgagtattaagacgggctgtgtagcagcaacttcttcaatgtccacgccacccaaaggacacgcaacgaccacctgaaaagagagagagagaatttgaataaattcaaaaacgaatgacaggtccggccgaagtggggtccatcagaacagaaaggtaagtctctcgtctgatcgtaattgattctgcaaccataacctgagcaaagaaaatcagtaacgaaacaaagacaaatcgaggaaaacgaatgaatgccttttttacgaccactccctcgtctcccgtctgttttgtgacgagtcttttcccgagcattccttcagtataacttttcgctttttccacgctgaaatttggctttttaaatcaacaaaaattgacatgcaaactcacgatttggtgattcgaattccccctccgttctttggacagccgataaaatgcccttttccccttcctccggccaaaatttgagctttaacgacgtattcagcatatgctaaaaatgaatattgtcgaaaaaagagtcgaaaatgaaccggtattttggaattggttgtccgtttgtttttcgttctgttcaattaggaaaaagttttgtacggtgcatccgtttttacgtaacaggcttttgctttggtattcttgcaaattcaaatttctgatttgagtcgctctgcacaatctattcaggccacaaattgaagttgttgcgagtgaagtggatgatcggcccagaaaattcatttttatcttgtggtatgaattgaagcaaaattagatagaaatgaacaagtgaaaaataaatatgtaggttaaggaagaaaatgaaaaggaatcgcggatggaaaacataattagttcgcgatcgcggaaaaaaacgctgcggatcgcggtcgcgtcccaccccggtagaggtagtataatttatttattaattttgcttacctattcaaaatatttttattttcgtggctattttagccgttgcccaattaaatttttgtaagcttaattgactctgttgctactgatgattgacatgttcaatttgtcatatgcttcccattcctcccaaattatgttcgtcattgtgataaactattttaaaatttattaaataattattaaacgtcttaaagatgactgtttcgttaataagcactcggaattttgcgctttcttctgttgtattcatttattttgccgctcttttgaccatttacctgcgttttcccgaattgaggccgtaagtttaaaattggatacttgtacagtttagaccacataattttttttaatgataaaaacatgttttagaggggtattcggggtcgctggtcacgaatataacatccatttcgatcaattttgaaccccggacccggattcgataaaaatttttgaaagttattttttcaccaaaatccacctttattgtccaaaatcgattcaaaacaatcccgggtttttatacaataactttttccatgttcgaacaaaccctatctttttggaatcattctaaagcacggtaatactaccgat

SEQ ID NO: 31023 - DNA, 1240 bp, Heterodera glycines
  unsure (1)..(1240): unsure at all n locations
ttctcgacataattatggtgtcatccatgccttttcaattgacccatttgacaccgaattattgttgcgattgttttaaaagcggaaaatggcacggcaaaagttggcacaattgttccgaattcgtttgttcagcagcaaatacaccacgggagggcaaccttttgcaaaaattatttttattttttaaaataaatatgctaaccactcgtaaaaacccatgcgtaagtgccaacgatgatgtaaattttgctgattctgacaaattgcattgagacataaattacgcaggcaattgaattgaacaaacttatgataatcacttggataaaaatctgaatatttatactagagcagccctaattcaatcaccccctgaaaaagacctcaaaaacgaaaaaaagtgtgatcaaaatgcatccgttcacaatgtttgttctttcttcaagtgggattttgtccgcattaaatccctcacagccgtacaatttgtcaaattcgtcatgacgaaacagcaacaattccatcgggatgaattttttttatttattaaaaaataaaaaattattatttttttagggaacataaaaattatgaatcataataatttttttgtttaagaaaaagaaatatcatattttggagtaacagttgttacacaacagcaaatatcgtgacaaaaacgcgtgttacatacccaattaaaaggacacaaattttaatggcaaaaaaaagtgaatgaagcgcgagaaaataatttaaagcagacatgaagaaagtggtaaaacttttaattcattaaacagaattatcatataaaaattgaaataacaattataaaaaatatctcgaatttttaaaaatttaaaaagtcaatgcggttcttaatttattaaaaaaaatccgcgtaaaagtaagaatatgcaaataaatttttccaacgaaaaataaaaattgccaatattggaaaaattgggaatttttccgttttatttccattaaaatcggcaaaaatctggaagcgagtatttactgctgatttgttcatctttgctgttgcacatggttttgttattgtttctgtttttggcattgttcctcaaaaagcgaaaaatggcatggcaatagttggcacaatcgttccgatctcaacaatccatgcaactgttaattgccagcaacatttcgtcacttgtttaaggaaaccacaaagctttaattttcaaaantaataaataaa

SEQ ID NO: 31024 - DNA, 1195 bp, Heterodera glycines
  unsure (1)..(1195): unsure at all n locations
aaattaaaaaaatgattctttaataaaatcattagaaaaaaactaaaattaaaaaaanaattctnttcttaattcattgaattattttacttttttattttttgtaaaatcatctgcaataaaatttcttaaatatttattcaaaaaaaaaaaaaatacataacacatatntaaatagaaactacgaaacaattatataaattatcaataattaagaaataaaaaataataattcggataagcttgcttaatcgtttaattaaccacctgctgttgttgttgatattgttgctgctgctgttgatgccattgccgatgaagatcaaaattgttttctgacttttgctctaaaagttgttgctgttgttgtccatcatcataattctaaaataaaattattttatctaatcaaaaatcgatttttaattgctttattagcaatttcaattttttttaaatgaaattccattttatttttatataaattttgtctttcaagccatattttaattacaatatacagaacaaaactggatactgtctgtacgaatgttaaatttttttggttttaaaatttcaaattcgatttttctcaatcgaaaagagttatttttattttacaaaattttgatcactttttatacccaatgggatcgctgaggaaatagaggtgattgttgtatttgttgctgttgttgataatttggcataaattgtcccattgcaatgtttgccgaattaattaccattgctaaaaggcccattaagcggcagtgcttctgtttctgttggcacatcagacgaataatgatgaagaataatgaataatttaattaattattattattattattgaggtaattttgaaatttatttaaagccaacttttgctggaaaaaagtgaaaattatttattttaaatattttgcaaaattaagcaaattggttgaatttgttgatgaaaaatagaattgatttaactccagtaactaaaattgtgaaagtaaataataaatttaaatttattttaaaattcataaaatataaataaatttaaaaattatttgttttaatatttaaaaaatttctttaaaaaatagagattaagttctggaattaaaaataaaaaaatagaaaaaaatttaatttatcgcctcattaaggcatgcccaataatgtcattcgatttagacaa

SEQ ID NO: 31025 - DNA, 203 bp, Heterodera glycines
ctgaaattgctcaaattgctgaaattgctcaaattgctcaaattgctgaaattggctatataaagaggcgattttgttcagtctgctcagttagtcacgtacagatggaaagcctggagttccggcggaggctgtgcgtgcgcctttcctctcttttgcagaggggataggtacctctagagacagggtctgtctttagaggt

SEQ ID NO: 31026 - DNA, 1533 bp, Heterodera glycines
tggatctgaacccatggcccaaaaaaaccatttgctcccatctatgatcccgaattccaaaatcagtttatttttgtactttttttcaaaagttttataaaatatagaataaacagaagcttatagaggaagaatttcgtgtttttcaaaaaaccttttcagaacagcgctattaattttttttctcaaaaacgaatttttccaaatttatgtaataacttcttcagtttgaagatagaaaattctaaaaaagtataaaatgctccagatttttctctatttttaatgcttttttgcactttaattgattcatttagaagtgaattgaattttcaaacattcgcctaaatttcgaagggggcaaaaaatgaaaaatcttttcaattcaaaaatttcagattaagatttaaattgtaccattatgcaaaaagcaaaaaattttgagaatttataagggaaaggggttgaacaataaaagcccccccccctcgaatataagccccctttggaggggggttgaacaatagaagccccggggcttataatcgaagaaatacggtaactaaatcctattctatccttccttgccaaatatgcgaaaatggatgtcagaatcgggttttagaaaaatattgaaaacaaagccaacggctttttctctggaaaaaaatgtgggtgagattttcgttttgatgctctttaaaaacccaaattattaagtgattgccaaacattatgccaatttataaaaattaagcatgaaatttaacaaattctgacgattttccccaaaagcctcaaaaatcatcaaaatttctcaaaaaaccacaaaaagcctcaaagcctcttttgaaaatatatgcaaaaatggagaaaaaaataaatcaaaaaccgggatgtcggagattccccggcttggccggtcccgatactggtctttccagctctaatctattttcttgaaaatttctaactcccattcctttatggtattataatagtgaattttttttgaaaatcttcttattctaaaacaggaaaaagagccaaattataatatgcggacatggaaatgagctcagacaaaccgaaccaaaaagtaagaaaaaatagaaattataaatttaatattgtatcttatacatattaaatagaataggaaaatttaaaaatggcagagaataaatccagttagtttttattcgtttttttgtcaacgccaataaattaacggcaaaattatgacgccataaaagaggtgaaaacggcaaaattataaacagaataatatttgattaataaactgaataaatttgaatttaaaaaacggcaaaattatgacctaaaaaagaacaaatggaataaaatttataatttgaaaaacggcaaaattatgaccccagaaaggagatgaacaaatggcatcaaatttgaatttaaaatataccagaacaaatcttttttataaataaattctttatcccatggttttgtttaatgtagaacttctaaaacatttatttctccattttg

SEQ ID NO: 31027 - DNA, 1152 bp, Heterodera glycines
ccgatattcaggttatttatttttaactaaaatttattattttttttttattaaactcaatgtgattgaaccaaattgtctaaaatgaagtcgctgattattcctttgcacacggagcgtaatgcaagaagataatcgcaataatgaccaatttcttccttgattatcgcaacactttcattccgcaacagctcaacgacactcataattccatggcacaaaagacaactcacggatccattcaacgagctaacatcattcggcgtatttagggaagtctgcaatcccgcatatagtgaggggcaagcaccatcaacaattaatttgccattgcgaaactcaatcagacatgctggctgtcccactggggctgggtgacaagtcttagtccaggcgagatggggatcaaaagctgaacaggcgattgcgcatgactcaaattttgaatcgaaggacatttggtaaaacagtaatttggtgattttgggcatttcggtaatcgaagaacgcaatgcatgagccattagttgattggggaggtgtaaacccgtttgatgtttcaaaagacaaaatgacaaaaatgcccaataagaataacatagtggtgttgaatggtgacaaaaacgctcagctatttataccccaaaaatgtacttttatcgcgtgacaacttaggtggcaatcattcactcaaacgcagtctactaattgaattgggaaattaaacagtcgaaacgagaattgagttttttcgtgagagaaattgaacaattttcatatgaaaagacacaagaagaattattaaaaactttaaaattaaattttccatacttaaagcgtcttggcgcataaaaaaaatatggaccataaaaatggaatgggacgcataaaaattcattctttgggacgcataaaaggtcacgggacgcataaagcggaacagaaccaaaaaatttcaaaagggagctccttttaaatagcgcctacgattctgagttcaattcgtgaaaattaaaaagtaaaagcaaaattttctttatttcataaaatttgtctaatgacattttacgcgtcccataacaaaaaataaaggaaaaaaaaattgaaatagaaaacttaaaaaaataagatagaatcttctttttataattt

SEQ ID NO: 31028 - DNA, 1392 bp, Heterodera glycines
  unsure (1)..(1392): unsure at all n locations
ttccccaatgtttttattttattataaactttccttgttcttaaactttaaaatataaataatttaatttattaaatactgaaacatttgcactaagattttttaattaaatgatttattcaaataaaaaattattcaaaataaaaacgtattttcaattttttagaaaaaataaatctaaaacaaaatctgacactttaatggcccaaaattaggtggtcatgatatcttgcatatgatctgccgtatgcattcctttttttctttaatatagatttttagagttttttttagcagatataaatcaaatccgtgttaattacttattaaattttaaacaattttgaataatagttaaatagtattttaattttatctaatttaaattatttaattaattctccgtgtgtcctggcttttaacattttttatcatgttatattgttttcggcttttgtgttgatatttaaattgcatagtttaaaataattcattttttctcatgtttcctttaacacgtcgggtagttttcttcttccgcattatctcatacattaatttgtatttttttttgttgttatatcataattttaataatattaattatttatttatttttattataaaattaagatataatataattatagaaaatcttgtaaatttgattcagatttttatttcattagatatttgtgttatagagcacgctagttattaaatttttagtatgcttttatttatttaaatataattttatttattaagaaatatgtaaattttcatttttatgcaatatataaataatgtctttctgaatttacttatgtgttaatgaattatttttctctttgatttcgagataaaactgtaattttaatcagattgttgctaattatatatttttttaatttcttgttttacattttaaaaaattacttttttaatgtgatgattattgcataaaaacccataacataatacaacaaataattaaaagattacaaattgaaaggtttttccaaaaagattatgataataaatttaaaattaattttaaaaaaaagtaaataatttatatcaaagaaattaaagtaacattattaatgtcgaaaattaaaggcacttatgagagttaaaaccgaataaagaataacaacttatttcatcgaaaagaaatcagttacttaagtgtatgttatacaagaaaataataaaaataaaaattaataaatccatttttaaattaaattatctgacgaaaaactcaaaataaatgtttaaaataattgcagaattaaagaattaaataatattttaacatttcttttaaatacctttaattactaatataatagtgctaaagcccgntgacaataatataaatacaat

SEQ ID NO: 31029 - DNA, 1050 bp, Heterodera glycines
ccttttcaagaattctgctctgatgcgttggatgagcccggaggagcccaatggcctaattttgcattatattgtgcagattgaccctcaaaatcctgaagatgatgagttggatgatcagcgacggccatggactgagaaaattgtggtgggcaattccgaagcaaatgccaaagaaagtgccgaacattctgtcggagggcatttggaggagaaagtgttggagggattggccggcgggcgccgttaccgcgtggaagtttggccggtcaacgaagcgggccaaggccggggcagcgggctggtccaattggacacgccaatttcgggtaatcgacggcattttcgcaagtcatgtccattttttttgttgccatcctccttcttccagcgccgcctcggcccgatcagctgagtgtcgaagtgctgcccgactccatccgggcccagcagctgcgcgtgcgcatcgacacggcacggcttagtgaacggaacggacgactgaccaaaatggcattgatcgtagcggagacggacgaaaacggcgaattggaggaaaagggacagacggagaaagtggcagaaaatggcggcggaagtgcaaacgcaacggtacgggttcaaccgagttattacacgcaaagtcataaaaaagcacttcctgcaggtgccctctcccacttgggcgatcgcccggcgtttgccgggcctttggccgcctttcgttgcgctcgaaatattggccgcaggccatgacaatcaacgcattgataaaaatgggggacgatttggacaaaaaatattgacggtgacgctgggcgacgaggagcggtgtgaagagagaccggcaaatgcaatttgcaatgggcggttgaaagtcagtggggggggggggggggattcattctttccttgccggagattacgcgcttttattttggcttttgaccacatgcctccgttccgccggcgtgtccaggcgacgagctgctgtacccgccgactaacaaatgtccctctggacgatgcttctatggcgaccataacggc

SEQ ID NO: 31030 - DNA, 1053 bp, Heterodera glycines
  unsure (1)..(1053): unsure at all n locations
gaaaaaatattttgaagcaatttttattcgatgatttatntacagccaaagtgaatcgcattccatcggcagaaaaaagttcaattgcatcaaaaagcgtaagaaaattgccagtatttttgacatctgaaatgcgtgataaatgagaaagttgcatttatgaatttgtatattttaaagttgccttttcattgttcaacaacaaatgtccatttgcacgaattccctgcggccaaaactgcggctgtttacgccaaattgccacgtggttgaaaatgtaataagtgagatgattttggatcaaatctttgccggaaaccccttcaaataaaagtgccattaaaagaaagtgccgatgaataaataaaaactcactcatatcgacggggtaccaatactcaaactcgtgcctcattctcttcagttttgcttcttcaattggcattttagtcgaatcatatggaataccttcaaaaatacattaaatcgaattaaataataaaaaacaaacaaattacccatgaatatgtaatcccaaacagcgtcagtcagttgaggtggtaaaatgccgagttcacccgtttcagcaccgtaaatatcattttgcagcaaatgcgaaacagtgtaataagcgttgtaaatggtactgtcggaaagcgactcgatcaaatattgtgggtcccatggaagtttagtgcctaagaaaccgaaaaaatataatagaaattgtgaataattggcgttaattgttttaccaagtccaaacgagcgagaacaagcgtattcatgcagccattcgatggtgtgctcaaagttgcgccgcacttcatccgaaaaagtgttaagcgaagccaaacatttgcgagtcgcttctttccatgccgggtccccgtagttaaggtacctacaacaaccagtacaattcttagttaaaaatgaatcaagactaagtttgccatttccactgaccattggtcgcacaatgccaccacacattcgtcgcccgaccgagagatcactttcttctcaggttcgacatatttgcacgcctgc

SEQ ID NO: 31031 - DNA, 1274 bp, Heterodera glycines
tcttcagggtcgggtcccccccccccgaaaaatgtttctagatacgcccctaggttgaatcacaaaaataaacagtgaaccgagaaaaatcgatgatcacaaatctaagtaaaaattttgcacttatattctgtgacatatttcaaattgactaaaaaaaattttatttctcaatttttaggtaggattgattaactgaaaaactatcagattcggtcaaatttagctatttaaatagggaaaagcggaagccaatgtgttggcgtaaattctccgaactttctacttttcatttccgtccttttaaatgagtcaacatttatattataaataaaatttattcgaatgaaatatttggctggaatttgataatcgtcgtccttgttattattatggtgttctttgtgttactatgcttctcactgtcaacttctgtcgcttattcgtccgctttttcattgtccgattcccctgtcatcgatttcgatgttataccgcaattgtttagcagagaaccacgagtaatagttgtcgaattcgattatgtctgaagggacagacacaaaaagccaattcttccgatttctcatcgcttacatcggcccgactgctcacaaaggagggaacccgaaatgggcacttgggaacattccaatcgaatgtaactgaagaaaattggggaggcgtgggaaaagcgcatcggagggaaagaaaaaaaaggggggcaatcccgtggaaaaacggaaaaaaaggagggggaatcttacggaaaaacgcagtccatctccgtcagattgttggcattgcccgaggggtcgaagtacaccgcaaaaccgatgtcctcctcctcggtgaggtattgccaactgaatcagtcatgtttctctctctctctaaacctctcgtctctctctttctctgggctctctctgtttctctcctcactctctcccttttctctcttcgtctttctctccctctctctattctccttccctttcactctctctttccggcacttcccccccgcgttctcacccaatgcgcgtgttcgccttcactttcagctcaatcaggtgtttgtcgcccgcgtagacggtggtcaactggtcatagtcgggcattgcttgggaagggtcgacgaaaaacgagtcggggacggggccgaggccgtagcggattttggaggggcacctttagggcgacggattagcctcggattggtcgcccactcactaggaagtccgttagggtccatcatccgaccgccccaa

SEQ ID NO: 31032 - DNA, 1222 bp, Heterodera glycines
acagagacaaattgggatagaacagcacgaaatttaaacattttattgaaaaatcagattttttaaatttttatctaaaattttgtaaaataattggaagagaaaataatatgtaaagaaaaggccgacaaaataccgataaaatttagtatggtagggtctggaaaccgtttttttttaatgtcaaagcgtcagatccggcgaatttttgaccgatttttgatttagcaaagaattcttgctttttcattttcttttgaaaaatatacttttggcataatgttactaaatttttttccgtcaatttaaattttttttatttttttttatgttttatgggtatataaagacgtcgaaaagatttttgatgcataatagcgcaaaaatgaatagacggtgaggaattttttttaattacaaattttcatttacctttactatttttttacggatttcagctggatttgtagcgatgtttggatggacattctcccatcttttgaccatgctcaactcggcctcaaattggcattgctttcttatcgtttcgatgctttggtggacacgcatttcgatggaaaaagcgaattgacaatttggcgactaatcagaattcgcaaggacacatcaggaccaaaaccgaaaatttgtgtaacgctggatgaaaataacaatgatatcgatgacgatgacaattttgtggattttccgttttcggaccgtcagctgcccaacaaaaattgctttaaaagcctttggattgagtaatttgaacttttcatgtgtatattaaggcattttaatttttcttcaggtacattgaccattccatcatcacttttctccattccaagaagcgaatcttcgacagaagtggcaccaatttgtatttgagtgtggctacggatttccagccgatttggaatgcttttgtccgtcaaatttggccaatttttgcgggaagtattcgccatttgagttttgacgctggcgatcctttggacaatttgcgtcgccgcatttcaccaacatttctcaccgatctcaatcgattctggtgctctgttacccgacggtattgctgatgatgggccaaatgcaactgctggtcaggcgttatccaaatggttacacactccgacaaaaaatggtcagccgaagcgattgtatcgcaatgaatatgtgggtgcaaatctcgaatgggtcgacaacttcaaagagg

SEQ ID NO: 31033 - DNA, 1433 bp, Heterodera glycines
  unsure (1)..(1433): unsure at all n locations
tagtactgggacgggagacgtctggggaatcgaaggtattgtaagcttttttacttttttcacttttaaatttatttagattttcaatttttttggcttttttgataaaaattttgtctattttttcggcaggcactgcctctgacaatgttttttatttatttagaaaaattaatttatttttttttttctttttgattattttaattgtatttcatcctgaaattttttaataaacattttcaaactttcaccttattaatttaaggcgaattttgccttttttaataaattctcttgtgaaaaggcaaaaaaataggcttttttaaaatatgcctatttaaatgactttaatttttttcacttttaaatttatttaaattttcaatttttttggcttttttgaaaaaaaatttgtctattttttcggcaggcactgcctctgacaatgttttttatttatttagaaaaataaatttattttttttcttttttctttttgattattttaattgtatttcatcctgaaattttttaataaacattttcaaactttcaccttattaatttaaggcgaattttgccttttttaataaattctcttgtgaaaaggcaaaaaaataggctcttttaaatatgcctatttaaatgactttaattgctgtcctttcgcttacgaccataccacgttgaaagcacgccatcccatccgatctggcaagttaagcaacgttgggccttcttagtacttggaacggagacgtcctgggaatcgaaggtgttgtaagcttttttacttttttcacttttaaatttatttaaattttcatttttttttggcttttttgaaaaaaattttgtctattttttcggcaggcactgcctctgacaatgttttttatttatttagaaaaataaatttattttttttctttttgattattttaattgtatttcatcctgaaattttttaataaacattttcaaaactttcaccttattaatttaaggcgaattttgccttttttaataaattctcttgtgaaaaggcaaaaaaataggcttttttaaaatatgcctatttaaattactttaatttttttcacttttaaatttatttaaattttcaatttttttttggcttttttgaaaaaaattttgtctattttttcggcaggcactgcctctgacaatgttttttatttatttagaaaaataaatttattttttttctttttgattattttaattgtatttcatcctgaaattttttaataaacattttcaaaactttcaccttattaatttaaggcgaattttgccttttttaataaattctcttgtgaaaaggcaaaaaaataggctcttttaaatatgcctatttaaatgactttaattgctgtcctttcgcttacgaccataccacgntgaaa

SEQ ID NO: 31034 - DNA, 831 bp, Heterodera glycines
atggtaggttaaccaaacgcaacaaacactcgcggaagctaagaacgaacgccaaattcagtaagtagcggcactcagtcgagaaacgcgggagagttggcatgcgcaatgttcatggcacagatggtggagaatgcggagttgcgtcaggaagtgcacaagttgaagacggagttggactcgctcaaggcattggtggcagcggcggcggttgtgggcacgaacaacggatttgacaacggcgcgaacggacaccaccggccgacccattgagcggcacggcactgccaacgttcggccgatgtttgacgggggggaggggtccttttttgttttatttgagttaattccaattcaaattaatttatttttatttgcttcgactttcttttgtctcctccgcaatttgtgatcgtttgccctccttcgccttctctcggattctttctctttttcttgccttccttctgctgttccattacttttttacggcaattccaccaaaaagtgcaattcgcataatttattccatatttattcacttcattttgacaagatattaattaaattatttatcaatttcacaatattttttacttatttatgtttttttctttttcgtgactttcttttataaatttgtctaatgaatgatttttcgactcagtcatttctatgagagagtctccgaactaacaaataagcacaataatcactttacttaagctaattagacatggaaggagtgcgcgagttgcgactaagtgaacttcttggatttttgttttttgactgaaattctctaataatttgttgtacttaattacctaa

SEQ ID NO: 31035 - DNA, 1001 bp, Heterodera glycines
  unsure (1)..(1001): unsure at all n locations
aaaagttacttagacaatttatgtgctcccgattccttttgtaatctcatttatactccttattcttcattgtccctttgcaattatgagcacataaattggagaagtgccccaaatcggaaatattcccaaaattcaaagaatttaatttttcgggaccaccagaataaaaagttacttagacaatttatgtgctcccgattccttttgtaatctcatttatactccttattcttcattgtccctttgcaattatgagcacataaattggagaagtgccccaaatcggaaatattcccaaaattcaaagaatttaatttttcgggaccaccagaataaaaagttacttagacaatttatgtgctcccgattccttttgtaatctcatttatactccttattcttcattgtccctttgcaattatgagcacataaattggagaagtgccccaaatcggaaatattcccaaaattcaaagaatttaatttttcgggaccaccagaataaaaagttacttagacaatttatgtgctcccgattccttttgtaatctcatttatactccttattcttcattgtccctttgcaattatgagcacataaattggagaagtgccccaaatcggaaatattcccaaaattcaaagaatttaatttttcgggaccaccagaataaaaagttacttagacaatttatgtgctcccgattccttttgtaatctcatttatactccttattcttcattgtcccttttgcaattatgagcacataaattggagaagtgccccaaatcggaaatattcccaaaattcaaagaatttaatttttcgggaccaccagaataaaaagttacttagacaatttatgtgctcccgattccttttgntatctcatttatactccttattcttcattgtccctttgcaattatgagcacataaattggnagaagtgcccccaatcggaaatatttcccaaaatcaaagaattttaattttt

SEQ ID NO: 31036 - DNA, 1102 bp, Heterodera glycines
gggtccactgcgtttcggcgccagcatgtttttggctataacttttttctatctaatccaaatccaacattgttgatatcattcgaaagcttaacatgtttagaagctttcttttcgtttttaataaagctaatagagcatgttaagagctttcgaatgataccaagattgttggatttggatgccaaagaaaaaaagcttaagtggaaaaacgagctggcgccgaaacgcgtgggtcccatttattcatgtggttggaaaagagaaaaactttaaagtatgtttctaatttaatttataaataaacgggggaggattttgttaaaaggtcggtcatttaaactttagatgttgaaaaaaagagaggatttatcaaaccgatccacacacttgaggaacagatagaatacatgaacagcgaaggtttgagaggccaaacttttgcgcttttaagcttgtttgcttttcagtttttgccgaaacttacaaaggacgtccaatttgttttatgtggaaacgtaatatgaaaggccagtggaaattgcaaccgccgcctcgacttttttgcattgaccgcaatggtaaactccgaaatgactaagaattggcatttcctgtgtctgattgcatttcccatttaaaggtcgtttcaacgttggaaatgcgtgtacggtgtgtcgtgatgagtatttgttcttcgattatagagtacgttcctcacaatgaccttcaatttccactgttttttagaatcccaaattgcttgagcatttcctttaccccggcactgatcagcccctgcccataattcaaaccggactttgtcaagaacagtacgtcaatttgcaagcccaacttctcaaggccaaagagcacggtcccttttagtttaatcgttggtcttttaaccctcaaattgttaaggtacgtttattttcaacgtgcccttccgtcacttcaattatggtcaatggtatccaaaagatgcgaatgcattaataagcagtgatttgggaggaggatcaaccgagcagagacttgacaaacgtcgaagacatttatccgaatccctcaatcgcatttgaaacacacaaccgggaca

SEQ ID NO: 31037 - DNA, 1148 bp, Heterodera glycines
  unsure (1)..(1148): unsure at all n locations
ttctaaaagccacaanaaagatntttgaaagcaattccccacccgatcggcgcgagaaaatgataataatttttgggctaattaattttggatgcactttttataatgctaatttttgagcaataaataatcaacaattaacggatcccgctgcgagattaattgttaaaatccaattctcaacacttccgtgacttttgcgcatatgcccaaatcggtttttaaaaaataggaaaaagcaagaattttctaaccttttttacatcagtaaatgcaaccgtgaccgaaaaatgcgtaagtgaaaaatgcgtcagtgatacaaatattctaaaataaagtctatagcattaagtattgtagtataaaaaaaaatctataagaaggtctttctgaattacgaaccacggacacgaactcgaacaagaacaaaaaacgaaactcaaattcataattagcgtttttgcttcaaaatggtttaaacactcggaaacaaactgaaagccatcaatcctgcaataagagatcattagtgccgtttttaaatcaaaaatggtaaattcgagaatttggactttcggctttttgttcgaattagggtccggggttcggaatttggccaaaacgaattccggattcgtgtttagtgagtgaccttcaaggtgctgctgaagcctagaaattttcaaaatttaaaaaaacccaatattaaatttcaatattttggtcaaatttttaaataataattgccaaaatcggaagcacaaaaaatattgccgtttttcactttggcaaatgaagaaaaaacgaaattaaaatttcgatttctaattttataaacctatttttctaccaatatttacataaagttggttgattatacaatataaaaagattaaatgaaaaattgccaaaaatattcaattaattggaaatcaaaaaaataaagtaaaaagaaacatttattctcctttttgacaaattaagaacttccaaagttttctcatctcgtctaccaccaattcatttgcacattttgaagcatggcttcggttcgtatttcatttttaattgattctaaagaaaaaaaattaagcatttaaaaaatataaattaaattatttaaattttttatttttttaatacgattt

SEQ ID NO: 31038 - DNA, 1250 bp, Heterodera glycines
  unsure (1)..(1250): unsure at all n locations
aaaaaaaatttggagcgatttgaatgagaatagaaaagagccaggtttcgatgaagttttggttagccaaaaaaaattccgaacatttaaaaatctataaaaaatttaaaaatgagaattcatgcgagatttctggaaataagcttaatatggcctagttaagctgtaaaaaaaatttggggcgatttgaatgagaatagaaagagccaggttcgatgaagttttggtaagccaaaaaaaaatccaaacatttaaaaatctataaaaaatttaaaaatgagaattcatgcgagattttctggaaataagcttaatagggcctagttaagctgtaaaaaaaatttggggcgatttgaatgagaatagaaagagccaggttcgatgaagttttggtaagccaaaaaaaaatccaaacatttaaaaatctataaaaaatttaaaaatgagaattcatgcgagattttctggaaataagcttaatagggcctagttaagctgtaaaaaaatttggggcgatttgaatgagaatagaaagagccaggttcgatgaagttttggtaagccaaaaaaaaatccaaacattttttataaaaaatttaaaaatgagaattcatgcgagattttctggaaataagcttaatatggcctagttaagctgtaaaaaaaatttggggcgatttgaatgagaatagaaagagccaggttcgatgaagttttggtaagccaaaaaaaaatccaaacatttaaaaatctataaaaaatttaaaaatgagaattcatgcgagattttctggaaataagcttaatagggcctagttaagctgtaaaaaaaatttggggcgatttgaatgagaatagaaagagccaggttcgatgaagttttggtaagccaaaaaaaaatccaaacatttaaaaatctataaaaaatttaaaaatgagaattcatgcgagattttctggaaataagcttaatagggcctagttaagctgtaaaaaatttggggcgatttgaatgagaatagaaagagccaggttcgatgaagttttggtaagccaaaaaaaaatccaaacattttttataaaaaatttaaaaatgagaattcatggcgagattttctgggaataagcttaaatatgggctagtaangctgtaaaaaaaatttggggcgatttgataagaatanngaagagcagttcgatgaagttttgggtagcaaaaaaaaaatccaaacatttaaaatctataaaaa

SEQ ID NO: 31039 - DNA, 2082 bp, Heterodera glycines
tcggaaatagattataccgctggtatctcgatatctgcgagtgtttttggtatttggaattgacccccggctgcatgacggactctactgacagctttctccattgacggaattaggggaaggcttgcaataacttcatttgacgcaccagcgaggcattcattcacaactgtgcgtggcatatttccacgggatgacaatgctgtgttgcggacgcttctgttgatcttagcggcttcacatcgtgttggagaaggggcatgattgtgcggctttcctagttgaacttcaactccagctctcatcccgatagtttttgctgtcccggtgcagttcattgttttgttttggtcacagcgccaataaatgaattcccttcgtgcttcttttttttggtacatatggccttcgaaaacgagtttgtagccgcccatttgtgaaggaaaaaacgtagccattatatttaatgaattttgtaaatttagttcagcttttatagcacctattcaggttattcgggcaaatccattggcaaaatttaattctaatcagttcagattagtggtttttggtcatatagaattttctcattaataggaataatgatttttggtcatatagcatttggtcatgtaacatttttctcattaagattagtgatttttggtcatatagcatttttctcagtccaatttgaataaatttagtaactggcatttctctcacagcttattttaaatcttttaatatatttgaattaattattattttgtgggtcctctgtctgtgggtcctttgagaggacaccgtgcacgtcacatagtccatttatcgattcccttttgacccgggcattcttctgtcttaagcagagcccattctctcatcagtcgttcttctcttcatttcgctttgtttgtcttcgtttaaatttcttattgataatatttatttcggcttttagttattttcttgtttagatttattcgtttcgtttttgacctgtatttccatcacaatcaactgaaaaacggcaatggatgattcggttggttttcttagcataataaatcttgcatttgggtggtcttccaccccttacgacagtaaaattagtctgttccgttcgtttacagttatcctctcgacggctcccttccgacttctccttctaaaaatttcatccaatcttctgtataatttttctatttccgtatgcttaacagctgtaaattcccaaaaatcatcctccaagtttgtgggaggggaattcaaaaattgatatggatgttgaaactgaaacacagggtagaacattttggccgacgacccaatgggaaggaaactcccagccgaacttttgttcgaaatggttctctgtgttcgaagagaacatgcccacgcgagcatttgcctctcgtcccttgtttatgcaaataatgctacctcgtgcttcattatggcggaaaatttgggtttcagtatgattttggatgtttccgctttttttttaaattttcgttgttgctgtttggacttgtctttttatttttgcactaacaattctgttattttatttttggtatttatttaaacgtttttgtctgaatgtggtgattaactcttcttccttccttttctcatttccattggtttttattggttttttttgtgcgtttccttttgtgttcggtgttcgctgtttgagcctttttgagacggtttatttgaaattcaatttaatttaggcatttttcaagctcaaagagaactatcaagacgcgatagcagctggacaagattggaactttgtgagacagacggcgcgtgatgatatcgcatgcaacaacgttatggtggctctggacagactgatggatgtgccgcaagtacgtacggtttgagggaattactcacatcaacttgaatttctaagaaagcgacactgaaaatggagattttatgttttcatatttaacacttttccttaacaggcacccgacaagaaggcaatttgtgtgctcgcaaacaaccgggcagactcaaaagagggtgtgggaaccgtcatgtttcagcaggcaa

SEQ ID NO: 31040 - DNA, 1120 bp, Heterodera glycines
aaaaaaaaaaatggattttttcaaggtgtcgtttggggttctcaaacaaatttggggagcaaaaaattccacgccggattaaagtacaggtatagggaggttttccgaaggattgggtttccccataaatcgggggcatcggctcggggggactgccccgaaacaaaaaaatcgatttttcaagtgtccgttggggtactcaaacaattatggggagcaaaaatccaacgcagaattaaagtacaggctatagggaagctattcccgaaggattcggtctccccataaatctgggcgcatcggttcggggggactgccccgaaaacaaaaaaatcgattttttcaagtgtccgtttggggtactcaaacaattatggggagcaaaaatccaacgcagaattaaagtacaggctatagggaagctattcccgaaggattcggtctccccataaatctgggcgcatcggttcggggggactgccccgaaaacaaaaataaatcgattttttcaagtgtccgtttggggtactcaaacaattatggggagcaaaaatccaacgcagaattaaagtacaggctatagtgaagctattccggaaggattcggtctccccataaatctgggcgcatcggttcagggggactgccccgaaaacccaaaaaaaaattttttggataaaaattatttaaatgaactgactagataatatttaaaataggttatttctcttcctttcagtatccctgcaaagtttggtgcgcttctgatcagtttctgaaaaaaaagttaagcctaaactttttggcctgtttaaaaaggaattaaaaatttttaaaaattttattcatctccctttttgatagaaaaagcatcagagtgcctaaactaacatgtaaataaaatttggtgcgtttcagaaccctttctgaaaaaatatttaagaattaattttgcaaaaaataaataaaaacgaaagactcagattttcgaaaatttttttgagccagctagctcggcgctcatttcagtgtaagttagtcctttaccggggagtatccctgcaaagtttggtacgcttatgctcaattagcaaaaaatatgagtgatcgaattttcact

SEQ ID NO: 31041 - DNA, 1436 bp, Heterodera glycines
gcgcatcggctcggggggactgccccgaaaacaaaaaaatcgattttttcaagtgtccgtttggggtactcaagcaattatggggagcaaaaatccaacgcagaattaaagtacaggctatagggaagctattcccgaaggattcggtctccccataaatctgggcgcatcggttcagggggactgccccgaaaacccaaaaaaaaatttttttggataaaaattatttaaatgaactgactagataatatttaaaataggttattactcttcctttcagtatccctgcaaagtttggtgcgcttctgatcagtttctgaaaaaaaagttaagcctaaactttttggcctgtttaaaaaggaattaaaaattttattcatctccctttttgatagaaaaagcatcagagtgcctaaactaacctgtaaataaagttttgtgtgtttcagagcactttctgaaaaaatacttatgaattaattttgcaaaaaataaataattaatgaaaaagtcagaatttcgaaaaattttaaaaacaacaagcgttggcattttttcaggttaagttagtcctttacaatggagaaggcctgcaaaatttggagagattatatcgatgttagtgcgctaggttcgatgaaactttttaaaatataagcctaaactttttggcctgtttaaaaaggaattaaaaatttttaaaaattttattcatctcccttttgatagaaaaagcatcagagagccttatttaactttaaattaacatttggtgcgtttcagagcagtttctgaaaaaatatttatgaattaattttgctaaaaaaataaaatagtgaagctttaaaaattaataaaaaattttaaattcagaattactggagttagcatcatagcagtgcttttccttgtctttttgatgctctcgcaaaatctggttcgcttctgatcagtttataaaaaaaaagttaagcctaaaatttttcgcatatttaaaaagcaattaaaaatttttagatttttattcatctccctttttgatagtgaaagcatctgagtgcctaaaataacttgtaaataaaatttggtgcgtttcagagcagtttgtgaaaaaatatttatgaattaattttgctaaaaaaataaaatagtgaagctttaaaaattaataaaaaattttaaattcagaattactggagttagcatcatagcagtgcttttccttgtctttttgatgccctcgcaaaatctggttcgcttctgatcagtttataaaaaaaaaaagttaagcctaaagtttttcgctcgtttaaaaagcaattaaaaatttttagatttttattcatctccctttatgatagtgaaagcatctgagtgcctaaactaacctgtaaaaagagttttgtgtgtttcagagcacgttctaaaaaatattt

SEQ ID NO: 31042 - DNA, 1224 bp, Heterodera glycines
ttgattgaaattaatgagtttaaccagggttgccagatttatttttcaaacgcctcatttggtcggcaaaaaagcctcattttgggtcaaaaagcctcatttttacaaatttattcaaaacacattaaaaatgttcaaatattatatttttattttccatgatcaatttgagcaattttttgttagaaataagcatttggtgaaattcttagcacgaaaatcgaagttgattttttgcggcgcttttttctaaaaaaaacttggggaaaagggaggccggcggtgccgataggcgccgccgggaaaaattttgtgatttttaatacaatttgttaacagatttgaccacaaaaatgaccaaattttgcgattttgagcaaatttttaagaaaataaaggatccctggagctcaaataaatgaattgaaatagaaaacccggcaaaaacccaaaaacccggcaacttcaaaaacccggcaacttcaaaaacccggcaaggacccccaaaacccggcaaatgccgggtttccagggcaaaatcgcacccctgactttcaaggacgttttcaaattcaagaacgtccttgaaattttttgatccgtttttctcctttggctttaatagcccaatcaaatgtatatctattggacaaaagaaaacagaaaaaaattcatttaagaactcaattacctgtgtgccttggtcgcctttgggacctaaaataaaaaatatttttaaataaattaattcttaaatagttgacaaattatgattgcagatagaaagtgccaattctttaaatgattttacaattggcaattgacatagcgaatgaatgacaaacaaatgaaaatatatcccgataaaaataaaaaaaattcgaagaatttttgcgaaattgaaattaagcattgacaaatgagaaaaatatttaaataatacacaatatatacaacatgaatcttttgacaatttcattttttcgtaattttcataaaaaattgtttgatctaaaaaaccttttcccatatttaaacattgttttatttgttattttttaaatttatttaattgtaattagtcgcataaactttttgagtcaaaaattttttcaaaaaacgcacacatttaaaaaaaaaaattcattttttatttccgatgggcagctgagttccccacaccccctgaaattatttagcccaatattttaattgccataatta

SEQ ID NO: 31043 - DNA, 1004 bp, Heterodera glycines
aggtcgaacaaaaagactaaaattcaatttttttttatttttaaactttggtttctattcaaatttagtttagggattgtaatagaagatgaccagcgacaccaaaaacctttcgggaatagggtaaattgaaatgctaatattaatttgtggattaatttagctttttctataaagtaactctacataaaagacaaagattcgatttgaattgtagagtttttatttttattttttattaatagaatttaatacatttattaatctcccttaaaattataatattttacaattaaataaaattttatacacaaaatgttaatggattttatgcaacctttttttgaaatgctattaataaataaattgataaaaacacattaataatctttttttataaaaatgaatttaataatttgacttacactttaataaattattaaataggtaatttgattaattacaaattatataaattattaatatatgaaaatccactattatatttaaaaactattatttttttcaaaacctttcatgagtagtcagaagaataacgagaaagttttatagtccaatcatctaataaaataacaataatatttattaaatatcaattacttatatcgttcattctttacactatattatgtggttggtcaatcaatctgtatattttatattttatttgataataatttttgaaaatattattattattttataaatcttttaaaaatgtaaaatcttttattaatttaattttgattttgtttttgaaataagataataatgttaagttcatttaaatttttattatttattaaattattagtattttaatttaaaattgaaaatttatgaattatatgttttataaagaaattggatgcttttatttttaaaaagagctgcttcgtgcttatatcgatattttatttaataattatgattttttaatacttttagaataattaatagggatgcgatttttagttaaatac

SEQ ID NO: 31044 - DNA, 1135 bp, Heterodera glycines
ggaattttcttttattaaaatttatgtgtaaaaggaattgtaaaagaaataataaaatttacaaaaaaaatccactaaaaaaatatttgggtttcagactaatggattcccaactcaaatttataaaaaaaaaatgcgagaaaattttgccatttaagaagtttacatattttataatataatttgatgacagaaaaatatttttccaataaaggattagtttctttcattcctacataaaaatgggggggggggggtaaaaatttggtaaattttaactccgttaatatttgaaaatacaaaaatttcttactgcgatcggagcccaaatgattgtgaacaggtagccccgccaatgctcatatgagcggacaaacacagttgccaaaatgcgttcaacaatcaaaatgtgtggcacaacattgcgactgtaaacgccgacgaaatacaaattggcaattgccggaaaaaagtgcatcttctcggcaccaattgggtcccaaaggatgaatttgaacagacaaattatgaagcgacaaattccccgctgtaaatagaatttttggctctatggtcaaagtggtgattttgaaatttgttaaagaacaaaaaattctaattcctaacctgactcgaacaaaagtcgaaaattcaaacttttcgatttatttcttttaaatttagcttaggaactcgggattttgttaaaatagatgtcagattggtgatcagtgaccccaaaaactaaatatcggacaaaattataagtaaattccaaagtgctttccgcaaaaaaattctttcggattcgttcattaaagaacgagaggaatctaaagataaatcatttgtaggatttgatgaggtacaaaaatattcatgaattttacatctgtgcaattcactgattttggtaccaaatttaagaaattaaaatcgataccaaaaaattttgatattaattttttgcctattttgaaaaccacttgcgaaccctatggtatacaacaaattttaccgtaagaatggtgaggctttggaaaatcagaatggctttcatgttcgggtggatgattgatgtgcgtgccaccaggcacagattggtcagggacaacggaatgccaaacaaatttat

SEQ ID NO: 31045 - DNA, 1070 bp, Heterodera glycines
tctgccgggagatgaagccggggacagatgctccccttactccccccatcgctatatcccgtcttaaaatgcttcttctcctgcacccgctttatcccctgccttctatgcttttcctctcgtctctaatgcttctcctccccatgcttttcctcctcccgcctctctatgcttttcctcccccgtctctctatgcttttcctcctcccgtctctctatgcttttcctcctcccgcctctctatgcttttcctcctcccgtctctctatgcttttcctcctcccgcctctctatgcttttcctcctcccgtctctctatgcttttcctcctcccgcctctctatgcttttcctcctccttgtctccaaaatgcttcttctcccgctctctttgcctttgcttgctcactcttgccctccttccccttcggtgcccaattattcagagaaaaagtgtgagagaggtggagcaggagggatgaagcaaagattgacaacaggcattatgtgacgagggcacaacaccaatcactcctctgcttctctgacagcaagcagcacactctctttgatcatcgcacactctctcaacacctaccctgccgctcccatatgaaaacatgtctctccaactcactctgcttctctgcccgcctctctccgatcagtgaacacacacacgcactactcactaaatgctctgatcagctaacttctttctgcttccgctgccaccgcctggtgttgatctgtttggccagcaaatgctgtgttagcaagcagtgtggtgggtgtgtaaaatgagccactgatagttcggccgaggagctgaggaaaagctgactgatcagaaaatggatttgttgcggggtcgacagaacaaagcgggggagggtgatggatcaccgagtaagaggcggataatgatgatcaacacagccacccatccaccttccggggagcttatccaatccaacccgatctgaatggaatggatgtgattttattgtggcaaatccttctaagccgtgccattaaccgaataagtagcattacccatgtcaacgatcg

SEQ ID NO: 31046 - DNA, 908 bp, Heterodera glycines
tggaggcggagcggaagggcctgctttttctggccaacggaacggtgtccgcaccgggcacggacaattagctgtcgctggaggaggcggtcaacctgggcatcctggacgcccggtcgctgaatgtacgcgacactaacagcgggcgaatgctgtcgttggatgaagcgctgcagaaaaaggtgatcattttccctccgtgcctctaaaaaaaatttttttttaatttgaaaatttgagcagtttctttggttttatgactttactcaaaaaccatcaaaatgaaaatttttgcttataactttgctaaaaagaaaccttattttgaattcttcatataatccgatcagcctaatatgctctattatccagccaaattccaaaaaattatattcgagaatatgcttttttgagttactctggccataaaaatttttttagaaaaaaacataaaatttatttgggaattgagtatttgcaaaattttatgttgaagcggtgctgagtcattatataaaaaccatcaaaaagggcgttatataaaaaaccatcaaatgaaaattttcaacataaagctgtccataacttttgtcacagtcaaccaaattcaacattcttgatatgatttgatagccttaagtgttctctataagctcacctaaattacaaaaattttggtcaagtttggcagttgagtattgtttataaaagtacacaagcaaccaggttttcacacatttttggccataacttttttgaaacttagccaaattttttgaaattttgcaggctaatagaggacacttagggctgaatgatatcaagctttcttaattttgttgtttctgacaaagatttgatcagaatttttgatgatctaaataattttatttctaattaaaaaattt

SEQ ID NO: 31047 - DNA, 1692 bp, Heterodera glycines
agtcaattttagatgcatatattattaaattaaactttcctaaaaaattccttttttacaacacaacaaaattgatgtgttgttagttatgatggtaatgttgtcaaaggttggcttcacgtacatcattttcggcacgcaacggttccgccgtgtccacactctttggcacgggatgcatgccttaaatttattttacaaaatttttaattgattttttaaaagtgccaattccataaatttaaattataattcaatttttaaaagtgcctgcctacctcgtcccaacaattcttgtgtgtcgccaaagtgaggctgaacacggtagggcatgttcagttgcaactcttccattgggtcaggaagaattggcctaaacaggggggagggataaaaatgcttttggtctcggaaaattctgattatattaatcttccaataatggtaatacaggataagaaattccgttaaattactgtacagccccaattactactgtatttcttacaaattttttgaaacttttgttaaaaatctattaatttcacaaggctgcaatattcggcttaaaatcatcaaaaataaagattttttttgattaatttaatatatattttcgtgtaaaaatgaagtttgtttaaaatttaatatttattgataattaatcccatgataaatataaagcaaattttttttattgttcaaagaattgcgttttattttttcaatatttttaacaaataaaaatgacaattttaattctaaaaattcaatttttctaaacatttctacaatttacgggctaaaaaaaataaatttgaatcataatccaattcgttaaaattttcttcattcaattggattgtatgaagccacttgatcagtatgagtactgaaaaagtaaaaaataaaatatttcaattaaatttttggaaagttcaatttttgcttttaaatttttggggtaattaaaatcaaaaaaaatttaattaatatttataaacacctgtagaatgcgtgttgggcccgctgagggctttccgcgcggatgccaaccgttgcggtggattgacgcgagccgggcaactcgcgctcaaccgcgcggattggccgcggcgtcggcaagtcgtactccgtcatttgcgatggcaccacagtagtgcgacgtgtcgttggcactgatgctggaggcgtttttggcagaatctatggaaacttattaaaaaaaaaactttgttaaaccgagtcggaattaaaatatgaaggtttatataatttgaatgaagttttttgggtcaaaaaattcatattttggggtttcgtaaacaaaaacccaaaatgtttaaactacatttttttattatttatttattttttaattttaattttaaatattaaaaatttattttaaaatttctaaattccaaatacttaccaatggctttgtttgttcctttttgggcaatggcgatgatggaactattaaaatttgtaaaaaaaatttcttttgcctatttttacggatattattcaatgttattttaaatgattaaaaaatatacgatattcaatttaatttccaattaatttgtcctctaataattattatggctaaagaatgtaaaaataataattttttttttggcatttctttatcacatattaaactggtggttagaaattgtgcaaata

SEQ ID NO: 31048 - DNA, 1212 bp, Heterodera glycines
atgcttgatgtttttctccgtcacaaaacctctttgctttccatggaatcataacgcactgaatttcattagcttggttcaccaacaaagcggtcactgctccattttgcatctgatcatttaccaccactaattcaaaatgattctacatatctgcgccaactatgtcctttgatgaatctatttagcaaaaaaacggacagaggaataactacttaacttataacttctattattacctaaatatacgtattcacgccaacagtcaccttgactcctcattatgccaactctaagaatcctgtctgatttcttaaccagacaagaacaccctcaacgaattatgataattgcgcatagtcttgttgaatcaattgactctcgaatgcacaattacagacaaaatgaattattgcgaatttcaatgatgttggacccccgatttgcataggatctgagtttatttatgagtggtttctggaaatcattgcagaggatttaattgattttgcaaaggaaagtaattttaacaattttaacagaagtttattttattttaagttaatcccgaaatgaaaccaatgagcaaaattttaacgaaacacaacaaatggatcaatcagaatctgctcattatacggattttagtgaaagtgatgagagcgctttaaaatgtaaacaatgaatgaaaaactttaatttttatttaaaattttagtggacatttggaacagtaacccaaaatatccttgctgttcatcaattataccatcggccctttctggagaacctgccccgccgttggcaccaaaattgaagctcaattagcgctttacaaaacataattcttttaaaaaatgcaataaaaaagatttttctttgactcgatgacattttttggcgacatggtcaaaaaattttaaaaattttacacaaaataattctgtcgaaaaataatccccccttctccatttatcccccaatctctaattatcccccccccctttctgaagagaatgcgaaaagcgaaacctcggcccattcctgatgtacacccctaaagattgggtttttgaaataaacaatggcatttttttttgggaaaaaatttcgcattttcgctttttttgggcatttcgctttcgccttttcgctttttattttgatttcgcttttttcgctttttatttttctctttgcaacatccctgat

SEQ ID NO: 31049 - DNA, 1342 bp, Heterodera glycines
gttaggtatccgacatctcaaaaagcagagcagattcaaattcttttgtttttttaatttatgaattttattttacttttttttctaaattttacattatttttgatttataattaaattcctcaaaatttaatgataaaaattgaaactgtgcttgttatcaatgatggcacgtgcagttgattctgtaaatttttcaagcaaaaaagggcaaaatttctgaaaatttttatttgacgagaatgaagaagcttttgtgctttaataattttaaatttggtacttatgtggtttacagaccataaaaaaaattttttttaacacatttctagggggttttcggggtcgctgatcacgaatctgacatccattgcgacgaattccgaatcccggactcgaattcgaacaaaaagtcgaattgagtcccaatgtttagaatgccggagatttgagtccattgtttggaatgccggagatttgagtcccagagattggagaaaaagcccagtctattttatcattcttaattctataacacaatcgtactgcctagcgggggatgcgccgaaggcgctgaccccgctataataaaaaataataattctcaactatgagcaaaaaattgacataatgccataatttaatatccaaatatgttataaattcaaaaatttaccaaatttcctttgattattttttccacttttccaaatgctcattttcaaggaagtccttgcatccaaggacattttttattttcaagaaagagggcccaatttcaaggacgtccttgccattcaaggacggatcccatccctgatgtagctgaaaaagggaaaaaattctgctttatattttcgtaaaaaatgtatttttctttttttcttactcattccattcattcattctatacatatttcttttttctgacatttcgcatttttttttgttttttgctcaaattttaggcagaattgtgagattaaaatttcaaaattaattttgaaagattaatcttttttgaagctcaaagttcgcatttggattccctcgctttgatgcttttcccttccattaattcatacattttcgcaattcatttttcagtttgcataccgtgcttcttctgctgttgctcgtttgtgccaccattctttgattcttttttggccatgccataaaacgacgacgcccccacaaaaaagaaatataaataaattaaacgagatttcgaaaaattcttcatttttcagctttatctgcagcgattgttggcttttggtgttcgattttcttgcgccttctcagctcggtctcgaaattgcactgattagccgccgct

SEQ ID NO: 31050 - DNA, 1680 bp, Heterodera glycines
taaaatatttaggcgtgaaaaaatggattttcccgttgtgccatgacttaatgacttccaaatcacaaccatcgtacgaaagaatgtttacacttttgcgtgcagcgtggccaagttttgctcccacttccttttccgtggattttgaaatggctatgtcaaatgccgttacgataatctttccctgatgccatattcggttttgcttttttcattttgtacggaacttacaaaaaaatgtgaacagctaggcttatggcaggtaattttccctttattttaaaatttttttcaaaatttaagcgttattgtgctgaaccggtgtttgctttgagtgttcggatgctcacatctgtcgcattcattccacttttgatatcaggaacgcagtgacagctcttgactcacgctagtttggaatttcttcgaggtatttcccaccattatcaaatgaacccttgaaaattgttgttttttgttaccatttatttattgttttttggtatttaataaaagttttattttatttttttcgttttaccaagtatttgaatttaaaaaattttttctctcactttggcgtactatctcttcattttaattatgtaaaaaacaacatttacttctctccatataactttttttctatgcataaaagttgcaccagattttgcatcgaatgttctataaggttttaataattttcaatcttgtttttttgtaatatttatttaagatttgtttgacttttttaattgtttaatggctaaaagaaatttgccacacaagctcaattgcaaaagagcaaggcaaaaaagggagaacaagcgagaggagcgacgaaccaaaatggccaaggcgacacacgcccgatgggccaagaaaggtgagtttttccattggtttttcgtaaaatctctaattttccaatttttagccgctccccagcccgacaccgatgccgaaaagccacaaccatctgaagaagggccgtcgacatcagaagcaacggcgcaggacaacgacggacaaccatcatcaactccaacaccggtgacaccgctggaaatggacgtgccatcggtggagatgatggtggtgtgtcattcccttcaacgcctgccgacgaagaccaacaaattcaaccaatgccgtcaacatcgacggcacgctgtgacgtggtggcgacaccatcgacttcaaagggcgccggtggctttggtctcgacgatcgtgagtgagaaatttcaccaaaaatttagttttttaactcgtttcattttcattacattgaaattttaattttaggttggccgctactctcatctcggcacacaagagaagatcgttgagaaactggtgaagcacacgacgatgttgaatgcactgcacgaccgtggcgttgagaacaacaaagaaaatgacaaatacccagattttgaccaaattttcacctcacttttatttattttcacattaatatttcgaaaaatttgagtggtttgaaatgagttaaattgtttagcattcacttagaaaaattctccattttaaaatctttttttgtataccaaatttattcagtttagttgggtatgaagaaagttatggcttatcaaaataaacaatcaaaaatgcacggatcagtgtaagtttgaattagcgcgcaaaaaattacgc

SEQ ID NO: 31051 - DNA, 1058 bp, Heterodera glycines
  unsure (1)..(1058): unsure at all n locations
tgaggtcttaacgatgtcagaagtaaaatctgatcacgtattcgtgatcagcggcccaaataaccnctaaagacatatttttggaagatttttgtgagaaaaatttttccactcaaaaatcctatgctcacccctttggttccggacccccccaaaaaaccttttatttttgtatcttattttaaaaaggtgataaaaatgtaaaataaattttatttaatagagcaaaaaattgcggatttttgtagtattttacttttacagaatgacttttcagaaccgagttctgaatttttttctgaaaattcggatttttccagaaattcttgaataactttttttcatttcaagatataaatttcaattaatcccataaaattctcctgatttttctctatttttagagctttaattcacttaaattgaccaaaccttaactgagcaatgaattttcaaaatttaacccaaatttccaaggaccaaaaaaattaaaaatattttcgaatttttaaaaaattccaaaaattatgaaacttaaaatagacatcatattcgtactcagcacctcaaaataccccagaaaaatatttttcacaccctttttcgaccccaaaaaaatttttgaaaatttctagggggcctagctcgaaaatttttgaaaattttacatcatttagtacaccattcgatagcatttaaaatgctctacaaaaatgttctaagacaatttttcgctaaaatcaacccctgacgagttatgggcccaggactcaaatgtcccgctgaggccaaaaattttttatatttcagggaaaaaatcgaaatttttccaaaaaaaataccagtcgatagagctcgaaaaactatgttttggaagtggtctccgtttctctgggaaaattcngttaaaaatcataaaattcaaaaacccgaaaaccgttttttaggcctaactcgaaaaattttgaaaattttcgaaattttaaaatttggaaaaatcggggcttttaaagctctacaataagtctgctggccaccccccgctcagatcaaaccct

SEQ ID NO: 31052 - DNA, 954 bp, Heterodera glycines
gaacagcggcttatggacactttgaactgaaagcgcaatttgcccatgtcgtcggcaactctgttttttaaagggagaaaaagggggttggcattatgttaaaatatgccaaaatcaaataaataaaaaaagactgaccgaaatgaatcggaaagtgtcgttatcctacagaaaaattgaaattttatatttttttaaagaaaatttatgtaacaaattgacgagctcatttttcagtttccaaccgattttccaccgtcaaaaaaaattttttaattttatttggagaaaggtgaatgcaaaacaataaattttggggtacaatttcatttttttggaacggaaaaaccccccaaaaatcagtttttttagttaattaaaatattttagtcccacaatttagaaagttgggcaaataatacttaaaatagtgggcctaccaattgacaatttcgccttgtgcataagtgattacgccttggccaaactgatgcctgccgtcctcgcaaaagttcaaaatgccattcaactttaagaggggggtgggggacattaaaatttgaaatgaattttttaataatttaaaaaattaccgaattaatggaaagcaatgtctcctcgtcaagatggactaaaatgtttaataaaaattagttgttggggacatattaaataaatttttctgtgtcttttaaaataaaaaaggaccaagaaaattctttaattttttttggaattttttttttaattttaaaaactgtttaaatttaatttatgaattttcgatttcattaataataaaggaaaaattttgtggaattaccattgcctttttgagcatttaatttgatttttaaaataaaaatgtaaaaaaaaaaattttttgtaaaaaaatcgtaaatttcaatttttcggattttattaatattaattgatcatatttgtcaattttat

SEQ ID NO: 31053 - DNA, 1552 bp, Heterodera glycines
  unsure (1)..(1552): unsure at all n locations
cgagactaccccccggggccgaatcctgagcatcattttgncgaggagtgatcagacgaatgagccggccatcagctgggatgaattggcaaagcgaccggagctcagcagacttgtggacggacagaaggacactgcccgattgatgttggacaatgtgccacgtatctgcaaaatgcaggcccctccggggacgggaaaaactgacgtggcaacgagaattatgctgtcaattctcaaagaaaatgacgaggcccgggtcctattcattgccccaatgaatgttgcagtggtgcgagcagttcagcagatggccgagaacatggaggaggtcagatggagagagcggatgctggcgctgtttgctgggacgggaaaggctaaataccgggacgaaattgcgcacatcggttcacatcttttggcttctgccgtcagtgctcctcaacttttggacactttggatgaggagaagaaaaaggtagtggcacggtatgtaaaggcgtgccaagacacaccgaaaatggctaatgagggaaaagttacggaaatattaatgggaaaggaaaagcggcgcctcgtcttctgcacattaagcttggcggaacaactgggggggctattttcagatttcgattatgtcttcctggacgaagccggacaagcaagcacagtgcaggtgctttccatgctgtcaaaattcccgggattgaagaaattgctgatcactggagatgaacatcagctcggggtcaatctgcaagaagtgccggaggcagttcgcgacaaatgcggtttggacaccgttttggagaatttaagggtcgcggaatcagtcgacaaaacggttctgtccgtcaacttccgtagtcacccagtgattacgaaatgtgtcgaagcagccgcgtacgcaccgcacggaatacagctgatctccggacgatcagcagaccaaatgaacatgctgagcggattgacaggatcaggctcccatccccagggattcccttaatcctgatcaaccaggactcgccaatgcagcctgatccgacctccttttcacagtcgaatgctggacagacaaggacggtaatggcccttctcgaacaactaaaaagccgcttcccgggaacgatcagagtggtatgcttgtacgcggggcaagcagccgaaattggactcatggtagcggaacggattaatgaagatggggaagaaggatggggcgaaataatgatcacaaccagtgacggcactcaagggcacgagagtgacttagtgcttgtcgtgacgacaagtgccgggggaggggtccattcagatgccttttggaatcacccgcgccgtgtgaatgtcgcactcagccgcccgcggcacggcctgatcgtcatcggtgatctggtccatctttggcgggcggaaggcgtgtggaaacgcttccttgaaagggccatcaaaagcacaaccgtggtctgtgcaaattacgccaatttgatgtttcaccggcacgcgcatcatttaaacggcaaattagtcggcgctgatggtctcc

SEQ ID NO: 31054 - DNA, 1692 bp, Heterodera glycines
atgttaaaaaggaactttttgcatgttgcgaccccatctaatatctgagccttattattggtgaaggcctttaagaataataaaatctccgaaacgtcctgctcattttgcaatttatgacgaatcatccttcaaagagcatttaatttcgaaattacattccaataaaaaagtttcatgttcataattgtgcattattcaacgcaaaatgtgataaatttctattttttaacaggcccaaatgtatggaaaatgtctaatccaatctagcaatttttgaagaagtcccctcattttcaaccgctttcttttcagtatcgccaattttcttttcgcttgacttataaattcgtgtgaccacccagtcgaggccgaaaaagttttgactgtcctcctataattttgttctacaagtaacaatgtccaacaaaaaaacatttaccttaatggtcacttttgcattaattgttgttcccaatttggcttcaaaatgctcatacagtttctgttcttccatttcatggacatcaattgccttaagtccgagaaacgcttccgcgacctgaatgtgcaaatattacgaaaattaaagaaaaattgaataaccgccgaaaaaattgttgcacgttgagtgcaggtgctgtcgtctaggtcttgtaaaacaattttcagataaatgtttttgactggcttctccactgtttgcccgcacgaatcgcacgtgagatttgttggtagtttgcgacgacaggggataccacgcactcggagcgggcacgactaaaggaaaatgagaaatttactagaaaacacaaaaaaatattcgaacatcataaacttgatagtgcaagtccgcaatggttgcagtaatgtaaaatgtcccagctcctgcataacggagaacatctttcaaacttttcgggttctccaattcttcctcatcagcgctggggcgttttgcaggaatttggaagcgtgagagctttcatctctacgcaagcggaggcatttcatctctacgcaagcggaggcatttcatctctacgcaagcggaggcatttcatctctacgcaagcggaggcatttcatctctacgcaagcggaggcatttcatctctacgcaagcggaggcatttcatctctacgcaagcggaggcaaacagtttactattctttttaagcccaattcactttttaaaattcggttgtatctgaaaaatttaacactatttaaaaaacatttagcaaacagtctcaaatttgttccaatttttgtaggttaatttaaaaaataattttagaaagttactgaaaaaataaacacaaaaatggcattttgagccttttttgaagaccgtagtaattcaaatcttacttagaaattttacaggctaaaaaaagagaaggattgattaaattcttaagattgaaaaaaaacagaaaagcgtgacaatatttttggtgttatttaaatttaaacagaaaatttttaaatgcaaaaaaaagaattttcaccgatccataatgctgttgttgttgttgttgttgttgttgttggcgacggcgaccttgcccagcgctatgccagacccaaggcattttggaactgaaataataaaatattattcacagtaaaaaatagttgaattaataagaaataattataatttaaaatgaattaaaataatttaa

SEQ ID NO: 31055 - DNA, 964 bp, Heterodera glycines
atgcgtggcacccgggagcagttggaatgggcatgcgtgcacccgtgaacagttggaacccgagggcttgttgaatgggcatgcgtggcacccgtgctcagttggaatgggcatgcgtggcacccgtgctcagttggaacccgagggcttggcgaatgggcatgcgtggcacccgagggcttggtttatgggcatgcgtggcacccgtgagcagttggaacccgaggggttggaatgggcatgcgtggcacccgtgagcagttggaatgggcatgcgtggcacccgtgctcagttggaacccgaggcttggcgaatgggcatgcgtggcacccgtgaacagttggaacccgagggcttggcgaatgggcatgcgtggcacccgtgagcagttggaatgggtatgcgtggcacccgtgagcagttggaaaccgagggcttggcgaatgggcatgcgtggcacccgtgctcagttggaatgggcatgcgtggcacccgtgctcagttggaacccgagggcttggcgaatgggcatgcgtggcacccgctcagttggaatgggcatgcgtggcgcccgtgagcagttggaacccgagggcttggcgaatgggcatgcgtggcacccgtgagcagttggaatgggcatgcgtggcacccgtgagcagttggaatgggcatgcgtggcacccgtgctcagttggaatgggcatgcgtggcacccgtgctcagttggaacccgagggcttggcgaatgggcatgcgtggcgcccgtgagcagttggaacccgagggcttggcgaatgggcatgcgtggcacccgtgagcagttggaatgggcatgcgtggcacccgtgagcagttggaacccgagggcttggcttatgggcatgcgtggcacccgtgagcagttggaatgggcatgcgtggcacccgtgctcagttggaatgggcatgcgtggcacccgt

SEQ ID NO: 31056 - DNA, 1364 bp, Heterodera glycines
  unsure (1)..(1364): unsure at all n locations
ttcgcagcccaacgcgacggtctccacgccctccggcacttcgtctccgacgttttcttcgcgtgcctcggcggccgtgcctttgcgctgtccgtttgttcctcggggctcaaattcgaccagcaaaagggcgaatgcgcatttgctgatcaatgcgggaaggaacggtgaagcgaagcggaaaaagattaattaagtgccattttcagaagggaattaaagcagacgaaaacggagccaatgggagcgaatttggagcacgggacaagcaattattacttgaggagtgaatacgaacaacggcaggaaaaagtggggggggggataaattaaaatttaaaagacaattaattaattggtaattatttgccaaattaattatttgtgtccattggcccttcaaacattgtcaagatttcctccgaaaacactttcttttgtccggacaaacgaagcgacacttacgcaaaaagcttctgcacttcttcgttcttcaagtgcactaatggtaatgattgtgcttttattgcgttaattaattaataattaaggcgttgcaaatgaaacgagatgctcggacaatttggtttatgatgcgaaatggaagcaatgcacgacacagcaaaattgttggcaaaacaggcattattcattgtggaaaagaaaggagaaaataattgtgcacatattaagcactaattggacaggaaaggcacaacaaaatgttcaaaatccaatggcaccgtatcaccacgcacaaacccaagccggggtatcgtatccttcagcgcatcccatggcattccaaccccaacccacggcacatcccatggcattccaaccccaacccacggcacatcccatggcattccttcctcagcccacggctcccaatgttccgctgtcgccttcctccctcgcctttgactgcgtcggcaaatccgatggaaattacgttcaccggccttgtcaggtgcttcttccattttccttttcccaatgctttcatttcgctgtcctttagcccatttatttggtctgctcgaataatgcgccggttcaaatgaattgtccagcaaatctcgtcttcgacccaacaacaaaagcgtgcgaatattcggagagatgcacaaaaaataacgccccggggtaattctgttcggtaaaatgccgaaactcttctcccccagggcttctcgtccgccgtcccccgcccctccgtcctccgtcggcgtcacccaccaccctccttctccgtcccattcgctttcgtcctccgtccatttgccctcacaggtgcgactgttcatgcataaaactgggacggttcggtataatgtggcactatttaggcccanaatcgg

SEQ ID NO: 31057 - DNA, 1435 bp, Heterodera glycines
  unsure (1)..(1435): unsure at all n locations
aatcgctccttatgttttttacagcttccccccccccccccgccctctcctggccatggcacacgcactttgctgactaaaatgtacaaagcaaagcgttcacgtgccaaattgaacagcggataaacacaaaagatcataaacagatgccaaggaaccaataagtgatttgcaaataatggaacacatttacactgtcaaatgacgacggatcaagtccactgcagttcatttgtagaggaattaagaaaattttctccaaaatattttgaacacaactttaaaacttcctggcaataactccaatagggaaaaaatttttttttcattttaacctaaattattttaaaactttcctatattaaattttatttgtgctgaatttcatataaaaacgctcctaaatcagttttatttaagaaaaaaagttagttgaaggcctaaaattagaaaacaatgcaccaaaaacaaaaatcttagaggttaataaaagtgcaaaagttactaagattaaattaaaagaaaaaattaaatttcatttttcccctcggcatatgtaggaaagcattagcacagtttgaatataattgaattttatttacttttgccctagaccaatcttaaaaattaattttccaacaagtgaatatatataatcatttttaccgcactaaataaagccagaaaatcactgctgccaattaatgaaaatttcacagaacgataatatataattaaatcagacggacggaccacccaactgctcagaactgaacaagtaattacgaccgcaccaacaattagtgcttacttttaagtctaataatcacctgctgctggcgatgctcatttttgctcttttattaaaaaaatagcctaattcggataaacggacgggcccaaaacatctgccccaatcatcgagagcgcagttctttttttctttggcgaaaaattggcatttacaaatggagtgattatgagaaatgcttaaaaattaattaaatggcggtgtgatggtgttggaaaggttatcggcgaagaatttttgatttaattaacgaaagaattaagagaaatgcttactagagaccgaatttaaatatgaaaaaacacaaaaatacggattataatatgaaaagttcatgaaagatggacgaaacatggaaaaaatgctaaaatattgtgttcaagtttcgaaaaattataaacattacatttttgagaataaaagcgaaaaacagattaattcacgaaaaaataataattcttgaaaattttgggttcaaggagtttgttttttcgattttcttgtggaaatgccagaaaatggaattgttttcaaaattcattattncaatttggcattcgccttctctgtccatccgtccggacaattctttgcgtatttctcatctcgttttcatgcgcaatg

SEQ ID NO: 31058 - DNA, 1285 bp, Heterodera glycines
ttttaattattaaattaataattggtgccgtaattaacctttaattgtcaaaattgccctcttctttgagttgcctcaccaaaagcaaattctcgttttctcccccatttaatcgccgtccgtttttatttccgtctcaaaataacaaaactcaaaaaatggtggcctttaatcaaaatgaatgaattaccaattgaaactttccgttattttaaacatttgcaattaattcccaaagaaatttcctcactttctttctgtcagagaatgccttttatcattttattcgccttttttaataaaataatattttattaaaaatttttttcatttatccctttcatcaaaagtaactaattagcatttaattttcttcagataggaaaaaatgtctgacggcaatctgccgccgcgacccccgggcggcagctcctcagcgggactgccaaagtcattcggtcagccatccaaatacaaattttgtttttgaagtaataattaatattgaaaagtaaggaaattaaaataaattattaagtgtactgtacataataatttgtcgaccttatcattgtaggtaattaattaattaattaatcaccaggggctcctgtatggtcgatcacgagaaaagaacggaaggaaatgacaccaccgacaagagggagcagagaaagcagcgaggaaaagtcatcggcaacggattcaccgtaccaatcgagaacagtgacaagcacagaacgggtcagtgttagccgagaatgatttatgaacagatcaattagcaagaaacttaaggttcaaattgtgcaaatgccattggaattgagcgaagcgagcgttgaacagctccgaatgttgacactgtcaccgcggacggaggcgagcagagaggtggccatttatgaacgatttgtcaatgggattatgctttttaaggtgtgcaccacttcaaccacaattggggcgggaagtgtccccctaattggcggtgtcactgctaatggggttcattaatcaaatgtcattttgtatcattatgttgatccatctaacactaaggtccctacgattagcggagtgtttgttcacggggaatcccggcaaacgaccacaataatcaccactaccacgactacctacaaaatattggaggatgaagggagcggggacgactttgaactggtcgacctcgaggaccgtgcccagacgacgtcggaactgagcggagaaatgccgttgaggatgacctcaaagacggaagaaggatatgtgatggtgaagg

SEQ ID NO: 31059 - DNA, 1157 bp, Heterodera glycines
aaatattgaataattcaataatttgttaaataaacttaaaaatacttaaactaactaaactaactaaaaattggtttaaactttagccttaaaaatgccaaactttatcaaattcgagcttcaataattacaaataaataaatctcatggttttttggtaataatctcattttgttgtaagtaaaaatttccggaagcgaataaataccaaaaaaatttgacaatatttcgaaaaattatctttttgttttttttatttccaaaaagtcgatccttaggggcgtatttttcgcttttgttgatttgcccaaaatggccgaaatagacttaaaaaagcaaaaatggcaaactatggatttattcccgaaaaattccttttggcataaattacacagattttgtctaaacaatgaccaaatttattgatttatgctaattttttaagaaaaaataggttttttggggccggtggtgccgataggcgccgccgggggaaatttgttttatgaattttgttagaaattagccaaatttttcagaaatttcattcttttggatgaaaatacgccctaaaatcagaacatttcttagaaataagaacataaagaaaccctacattaatcagatagaaataaattcaattgaaaacgccaaccggtgttgaactcctaacaagaaatactgttagtgttcaagcactaaccactaaaccacaaatatattggaaattaacagcaaaatttactttatttcataaaaaatttgtcaaagatggttaaaaattcaaatttgaataaattttttgccttttatcccacgaatatgccattcttgggggtgtattttcacccccgtgcccccccccccccgggggcgaaggtcgcgggggtggggattgcgggggtcagagtcgcgggggcggggacgggggtaaggccaaaaaacctgtcacgcccccggcgggggcgggggtgacgggggcggggctcgaaccctactttctttggtccgttcgttcaccaattcaaatggcacaatttgtgacgctgacagagtaaattgaacagtgtaactgacagaagaaaaagtggtggcatggcgaaatgtctaaacaaaaataaagcgtaaatttagggcaattaaatcaatcaattagt

SEQ ID NO: 31060 - DNA, 613 bp, Heterodera glycines
cattaacaattttaaaagaaaacaaataaaaatttaaatatagtcttttgaaattaatacttaaactataaaaaaaatatatatttcctaataataattttttttaatattcagtttcttctacaccaactatggtgtaaagttgatttgggtccttgagatgtgccaaatcactttgatgattattctgtggctattgttttattcaaggcttgtgccgttaaggatcaccaattgattttttgtaactatgtgaacaattaatataaattaaaatgatttcaaaattagtttcttaataatagaaaaattacattttcagcgtttaaacccaaaataatctaaattgacgtatatgtaacaccatttttaaaattatattttcaaattttggcttcttctggccataatttggtcgatttgccattgtaaattttcggcttttttccatagtcccgaattgagcagaaaaaaatctctcaaataacattataaatctgtctagcggattcgaacccatcatgacaaatgaagcaataaaatgtaaacgaaaaagtatactacctatattaccatagtttgctttctagggtgttttcggggtcgctgatca

SEQ ID NO: 31061 - DNA, 1828 bp, Heterodera glycines
aattaggatggcgctctgtttttgccaacttttccatcacaaacttttgtcgtcctggcattttctactttgttatgaaagccatcaatttggaaaggtgggacatttgaatggaaagtcaacttttattaggacgcattattattcatcatttaagggactaattttacaaaaaataatttttgcatttttataattttgaatttttattaattttggttagattaaattatgaattttcaaatgaaaccaaagtataaaaaaagaaatgttaaggctgtgttctattatattatttttattttaacagttttgccacgattggattcgccacgaaggaagtgccattggacgggtcaattggccaaattttgaacagttacggataccgaaacgatggctcatttggctgtaatggcatcaaccggccgtgcaaaatgccatttggccaaatgccaatgtcattatttggtattccatcgtcattttcccccgtggcaatgccatcggcggacgtgacaatggcatataaatcatcggaattttccactggcgacgtggtcggatgtggccttttcttggacactcagctgatctttttgacaaagaatggacgacgaatgggtgggccaattaaatttaaaaaacattttaagatgactcatcgtttttcatttcttctcccgccaattctcttttccgtgagtttctttgtgggcgggcgacaaaatcgaagcgaactttgggccaaatttcaaattcaatttggccactctttgaagaaagcagaaacaacggaagaaggcgataatcatttaaaattcattaatttttttgtgttttcattcttttttcaatttttgattttgtttttaatgctaattgtattattttatttgttttaatttattttattaaaaaatgttctggcgatttttggtgaaatttttaatagattctaaatgattgctgctcggcgcctggaaatttataagagttgggtattttgccagaattcggtttctaataatttttttgaattgataaatagacatctgcaatgtataaaaaaaattatgaaattactttcccccaacgcccacccccttcgcaatatacaaaaacgaaaaaaaaatacaataatccatgttcagttttgtaaaaagatgtctcaattatggacaactgggaatggcatttgtgtaatgattatgaattctaaaatgctaatgaccgaagtatttcttttttaaatgctaaaaacaaaatatttccacagcctttaacaaagatttattctattctctgaaactattaaatccaattttccaaatgaatttttaaataaaattctcaattggagcccttcttttgaggtcactattttgctcgaaatttaatttggttatattctaatgtaaatgaaattattaaagattttaacgtttttttcgagtaaacacaaattttaaccaaaaattttttagcaacgaaaaaattaagtgttggcgatcaatttttgagaaaattattcaatcttaggagtattttctgaatttttttgagccatttattaggggtgtattttcgtttttattcgatttttgataagaatttttccgaaaatcctgaaaaaagcgccaaaaattgcgaaataagcacaaaaataggcatttaggcattaagcaaaaatccaaaaaggcaaagttaggcattataaaagtcatcgtatacacccaaaaccaagcggaaaatgcgtttttcgtgcttaactgtgcgtattaagtgcgcagaatttttaggcatttgcctaaaaaacgaatcccta

SEQ ID NO: 31062 - DNA, 892 bp, Heterodera glycines
tgaataaagcactaatagtgtgtttgaaaacgcacgaaaaatagttcttgacaaaaaatggctatctctgaaagtcactattaaatcactaccgggaattggacaccaacttttgtcttctgttgtagcgctgaataaagcactaatagtgtgtttgaaaacgcacgaaaaatagttcttgacaaaaaatggctatctctgaaagtcactattaaatccctaccgggaattggacaccaacttttgtcttctattgtagcggtgaataaagcactaatagtgtgtttgaaaacgcacgaaaaatagttcttgacaaaaaatggctatctctgaaagtcactattaaatcactaccgggaattggacaccaacttttgtcttctgttgtagcgctgaataaagcactaatagtgtgtttgaaaacgcacgaaaaatagttcttgacaaaaaatggctatctctgaaagtcactattaaatccctaccgggaattggacaccaacttttgtcttctattgtagcggtgaataaagcactaatagtgtgtttaaaaacgcacgaaaaatagttattgacaaaaaatcctatctctgaaagtcactattaaatccctaccgggaattggacaccaacttttgtcttctgttgtagcgctgaataaagcactaatagtgtgtttgaaaacgcacgaaaaatagttcttgacaaaaaatggctatctctgaaagtcactattaaatccctaccgggaattggacaccaacttttgtcttctattgtagcggtgaataaagcactaatagagtgtttgaaaacgcacgaaaaatagttattgacaaaaaatggctatctctgaaagtcactattaaatccctaccgggaattggacacc

SEQ ID NO: 31063 - DNA, 1124 bp, Heterodera glycines
  unsure (1)..(1124): unsure at all n locations
taatatatagggatgtgaaaaatatgtacaaaatgtggtcaaaatatgtacataaatatgtaaaaaaaaatcccaaaatatgtacaaaaaacccaaaatatgtaccaaatatgtaaataaaaaatttttaatggttattttttagaaaaaaaaattactctaaaggatgaaataggcacaaaatgccataaaaatcatgcaaatagccttaaatcatcttttaatattggaaaaattaatttttggttaatttttattttttcaacagaatttttaaatttcaaaaattctcaaaatatgtaaaaaaaatatgaaaatatttacgaaaaattgccgaaattttggactttttttcaggattttcaaaaatgtccgtaaaaaatcctcaaaatatgtaaaaaaatgaaaatatgtaagaaaaagtacaaaatatgtaccaaatatgtataaaatcctgaaatatgtaaaaaatatgtaaataaaagtcccgatttttgttcgcaaacacaaaaaagaaagtgtttccctactttttagagcatggagaagccaggaaaaaaatgtatttacataaaattgacatctctaataatataatattgttcgtgcaatatttcaggtaaactgtgtcacccaatttttgccatttgcattgtatccgtccccatttccccgtactttgttccaacaagctgtgggcgtacaccaggtaaaatactactgctaacaatattcggtatcagtgatgcgatttgagccctatttgttgatattttcccatgttttcagagtattcttacacaattttacagggatgactgtaatttctctctgtttttggtaacatatgtttacaggaataaagaaccgccggagctaaaagctctttgaaaatttttcaaaatttggctttaaaatctaagatgaagcagttaattatatatttttgaaaattgttgggccaaaggttccgatcagggatgtgcgaaaatcacaaaaaaaaaattttcatatacgaaaacgaaacgaaaaggggcattcgacacgaaaacgaaacaggaaacganaaaagaaaattttgaaacccgaaacgaaacactaaacganaaaaattttgacggacg

SEQ ID NO: 31064 - DNA, 990 bp, Heterodera glycines
ttaatgggggctaaataaaacggaagtgacttgcccactgttgaggaagcacccgctaacagtgatgggatggatgactcctcggcggttaagagccttggccaaaataaccaccaaggcgggggggggggggaggggcatagagaggttgttcctacaagaacaagggaaaagtatgaaaaaaaaaaaaatggggaaaaagaggatggaaaattgtgacgtaaaattgggtatttttttaatgaggttcgagaccgaaaatcgccaagacttgagaccgagaaacccctaaaaaatttaagaattttgatggttcagagggaggataaaatttgacggaaaatattagagggtctcggagatatgtaagtacaaaaatggcgggatttcgaatcagtttcccgcgcacaatttaaaaaaattcgtaattaaattaatttcataggtgatgcgacatttgcggcgcagacacttatcactttgggtgggcgccgcaaatgtcggcgccgcaattgtcattggctgggcgccgcaagtgtcggcgccgcaaaagtcgagccgcaagtgtcggcgccgcaagtgtcactttgggtgggcgccgcaaatgtcggccaatcatttcataatacatttttaaaactttaaaacacaccaatgatttctgtgctttctaatctgtgtgtattttgttgtgttctgctgatcaatgtgaagaagacgacaaatttttgttgaacatataaattacaaatgataatggggaaggaaagtgttttggcgctttgtcgcaggacaaattgacgaagaacaaagaaaaaggacgacaaattgtccaacccctttggttggggtttttttctgaaaattgatttgagaaacataagaaattttttgttggaatataaataactgataattatggggaaggaaaaaggggaaattgttggtaaaatgttttggcgctttgacataggacaaatggacgaacaa

SEQ ID NO: 31065 - DNA, 984 bp, Heterodera glycines
  unsure (1)..(984): unsure at all n locations
ataaataaataaatttagaattgtagcagaataattgctcttttagtattacggcagnatattcattctttgagttccactttttaggcaggaccagactttgtgcgtataatgaacgcgaacagctgcacttcaataaaactggctcgacaaatattagggccaggaaaagctgtggcatttttaagaaagttatccttcaaacatcgcgctattttctattttgactccttaattaattacaaatacaataaataaataaatttagaattgtagcagaataattgggtttgtattattacggcagtatattccgtctttgagttccactttttaggcaggaccagactttgtgcgtataatgaacgcgaacagctgcacttcaataaaactggctcgacaaattttagggccaggaaaagctgtggcatttttaagaaagttatccttcaaacatcgcgctattttctattttgactccttaattaattacaaatacaataaataaataaatttagaattgtagcagaataattggttttgtattattacggcagtatattccgtctttgagttccactttttaggcagggccagactttgtgcgtataatgaacgcgaacagctgcacttcaataaaactggctcgacaaattttagggccaggaaaagctgtggcatttttaagaaagttatccttcaaacatcgcgctattttctattttgactccttaattaattacaaatacaataaataaataaatttagaattgtagcagaataattggttttgtattattacggcagtatattccgtctttgagttccactttttaggcagggccagactttgtgcgtataatgaacgcgaacagctgcacttcaataaaactggctcgacaaattttatggccaggaaaagctgtggcatttttaagaaaggtatccttcaaacatcgcgctatttttctattttgactcctt

SEQ ID NO: 31066 - DNA, 1601 bp, Heterodera glycines
  unsure (1)..(1601): unsure at all n locations
gagtttatagagcatcgctagaaatatctcctagtttcttttgtccacaaaaaaggtccagagatctctagcgacttacaaataaaatcccaaatcagcttttgatcccggcaggatcggtgttttacgaaatccctcccgccgtcaaaccccaattaaaccattttccctctgttaggtctgtggcgctttcatgcagttgtgctgggacctggtcatctttctccactttcttctggcagcaaatcgtctgctgatctttatgaaggcctcttttaagccctccattttgaacaaagagccaaagtcggagcaaattcttttcaatgtaagccgaaaatgattagctaatttaagcaattaactaatgagttcttccaccatttcagtctcttctcgtgctgatttggctccttttgatcgctttgatcattgcgtttcaaacgccgttccttggcgttttgtttcagcgcgattatgtttattttttggccgatcagtctctcccggcgatgcccatttttcggctctgtgaattttattggacctgctttctgttgccaactacaacaactttctatatatccattgttgttttgttgaaaaaggttgagtactacataatgctaaaattttggtgtaatcaaaaataattttagccccattatcaaaaattgttaatccgtcccctaattcccgatctttttgtccttatataaaaccaactcccaacaataatttaacgattcaattttaaatttccactttatttcagtatagaaaaaagtcatccgatggcaaaacggccaaaaagttcgtgctgaataagcaggaatggcgcattttgggccaatcggtggcaatgttcgttctgatggcatttattgtggccatttgggatttggtcgatttgctctcgtgggttctgcccgacgggctcattctgctcagtgatttcttctttttgctgttctgtggcatcagcccaattttgtatctgtgcactcttccgtatgttttaggggcaacttttaattgagtcccattccaattcacccctctgacttcctagtgaatgggtctcgcggtgttaggtcaaacctaaaaaaagaatcaatggggtgaagctaaaaagtatcaatgtgggcaaaccaaaaaatcaatgataataacctttaaatttaattattatttaaatattttttgccgaataagatcacaatttagctcaaacttagtcaaattaaacaatcttggtagtgagtgataactctatttgtactctgctatcggcatgtcaggcgaaacaacggcacatattggcgatcatttcgtattatttcgtcatcatttcgaccgtttctcctcaagagcgaatcgctatcagtgcggccttaactttgctggacagtaccactggcttcagagtgcgtactgtttctgccaatgttctgttttgggtccgatcactgcagtttggcattcccaagcgccgcaccggttcgacacacggagaacggcacaaaattcatgatcttcctgatcataagcacacaagacgttccagccaaaaaattacttaattaatgagaaaaantgag

SEQ ID NO: 31067 - DNA, 1369 bp, Heterodera glycines
aaaatcaaaaaatttttgaaaatcaaaatccccgaccccctaaaaaaaaaagagggaccatcagaccaagttggggtaaagcctttttgatcagccattttaccccgaaattagggcaatttgtggggacgcacaaaagataattcctctttcccatctactttggccatgcctttatacttttccgataatcgacattcctttactaatcatttcatttttcccattatgctttcattataaacgcatttatcttttaacttatcttttaattttagccaagtactataccatttttattttttgtcttgttctcccggaggagatacgagccggaacgcgccaccctttcatcacacattctcggcccctcactgcctcccgaacaaaaaaatgagggacagcgcgtccaggcatcgttctcccggaggagatacgagccggaacgcgccacccccttcctcacacattttcgtcccctcactgccttccgaacaaaaaaatgaaggacagcgcgtccaggcatcgttctcccggaggagatacgagccggaacgcgccacccttttataaagtcacacataaaataaaaaacactaaaactaacccgggggagatacgagccgaaatgcgtcaccctttcatcacacaacacataatccgttcatcattgatcttcattgccaaagaactgtccttcaacatgcgtacaatcacgttgaagtggaaggcacttcttcaaataattagattataaaaattcgttgttcgatttataaattaaccattttcactctgaatgatgctgccaagaaattgttgcatccaatcatcagttttaactgaaacgtaaaacaatttcttgaatctaaattgtatcggatttttaaataccaaatttgttctccggcgtctcaagagtatagactttgatgcagcttacgtacttgtcttcatctaccggtttgaacaaaatgggcttatgctaaaaaggataaacatttggaaatacagtttttaactatttagtaaatttcaagtttaacattagttcaacagaaaaagaccaaacaaaaaccatggacgttttttacgcataattataaaatagactatttactagaatttaatcttatcatctataaaataaaattataaataatgaagcattctctttaaaatataaaataaaatattaccccttttttaaacaataaaacattcagcagaagtctggaagtccttccatttccatcatcaaaaggatgaatttcgagctgcaaaaggagtttttaattaattattttaaaacatagttaaagatttatttaaacaagaccattttttgattttaaattatctcacgagt

SEQ ID NO: 31068 - DNA, 1561 bp, Heterodera glycines
  unsure (1)..(1561): unsure at all n locations
ggtaaaaaaatgaaaaaaaagaaaaacccttttttgtcaagatttttttttttttggtttcaaattttgtaagatttttttatggggccaacaaaaaaaaggcaacttttggttccaatttttcggtaaaaaaaaaaaaaaaagaaataccctttttttgtcaaagatttttttttgtttgcgtttcaaatatcgtaagattgttgatagggccagacaagaagggcaactgttggtaccaattttgcggtaaaaaaatgagaaaaaagagataaccatttttggtcaagaattttttttgtttgcgtttcaaatatcgtaagattgtttgatagggccagacaagagaaggcaactgttggtaccaagtttgcggtaaaaaaatgagaaaaaagagatagccattttttggtcaagaattttttttgtttgcgtttcaaatatcgtaagattgtttgatagggccagacaagaaggcaactgttggtaccaagtttgcggtaaaaaaatgagaaaaaagagataaccatttttggtcaagaattttttttgtttgcgtttcaaatatcgtaagattgtttgatagggccagacaagagaaggcaactgttggtaccaagtttgcggtaaaaaaatgagaaaaaagagatagccattttttggtcaagaattttttttgtttgcgtttcaaatatcgtaagattgtttgatagggccagacaagagaaggcaactgttggtaccaagtttgcggtaaaaaaatgagaaaaaagagatagccattttttggtcaagaattttttttgtttgcgtttcaaatatcgtaagattgtttgatagggccagacaagagaaggcaactgttggtaccaagtttgcggtaaaaaaatgagaaaaaagagatagccattttttggtcaagaattttttttgtttgcgtttcaaatatcgtaagattgtttgatagggccagacaagagaaggcaactgttggtaccaagtttgcggtaaaaaaatgagaaaaaagatgtttgatagggccagacaagagaaggcaactgttggtaccaagtttgcggtaaaaaaatgagaaaaaagagatagccattttttggtcaagaattttttttgtttgcgtttcaaatatcgtaagattgtttgatagggccagacaagagaaggcaactgttggtaccaagtttgcggtaaaaaaatgagaaaaaagagatagccattttttggtcgagaattttttttgtttgcgtttcaaatatcgtaagattgtttgatagggccagacaagagaaggcaactgttggtaccaagtttgcggtaaaaaatgagaaaaaagagatagctattttttggtcgagaattctttttgtttgcgtttcaaatatccgtaagattagtttgataggggctagaccaggagaaggcatctgctgggtacccaagttttgcggtaaaaaaaatgaggaaaaaagagatagccattttttttggtaangaattttttttttgtttgcgtttcaaatatcggtaagattgtttgataggg

SEQ ID NO: 31069 - DNA, 1792 bp, Heterodera glycines
gtgcaacagtgattaaaagaggtacacagtgatcttatgaggacaactgtgattaaaagaggtacaacagtgatcagaagaggtacaactgtgatcaaaagaggtacaactgtgatcagaagaggtacaactgtgattaaaagaggtacaacagtgatcagaagaggtgcaacaatgattagaagaagtgcaacagtgattaaaagaggtactacagtgatcagaagaggtacaactgtgattaaaagaggtacaactgtgattgaagaggtacaactgtgattaaaagaggtacaacagtgatcagaagaggtacaactgtgatcaaaagaggtacaactgtgatcagaagaggtacaaaattgttagaagaggtacaaaagtgtttagaagaggtacaactgtgattgattagaagaggtacaaaaattgaatgcaatttattataaattttaaaaaataaattaattattccttttattaattaaaaagagaattttgaaatgtacaataattgaatatttaaattaatatgaaattaatttttataaattcaattaaaaaaaatatgaaattctttattaaaagataattattattttttacataaattcttttattattaatttacaacaaatctttaaatataaattgatacaacagtgattagtaaattcattaaattaaaatgaaaatatttttaacaaatttaattaaaaaaatacatgaaattctatcaattaaaaaaataattaatttaaacttataaaatttatttatcaaaaaaaattaaattaaatataattttttatttattaactcaacaaaatattttaaattaattaaaatcattgaaaataacgtaaaaatgcacaaaaaaataatgttacaccgtccggattcgaacctgcccccccccctcaaaatgatgcctcagaatccccaatcacacggggattctgaggtcttgacgatgtcaaaagtaaaatctgatcacgtattcgtgatcagcggcccaaataacccctaaagacatatttttggaagatttttgtgagaaaaatttttccactcaaaaatcatgtgctcacccctttggtcccgaatcccaaaatcacttttatttttatatctttttttaaaaatgtgataaaaatgtaaaataaaatttatattatagagaaaaaaattgcggatttttgaagtattttacttttcaagaatgacttttcagaacggatttctgaatttttttctgaaaattcgaatttttccagaatttctggaataacttttttcatatttatgctagaaaatccatataaaacccataaaattctcctgatttttctctatttttaaagctttatttgctcaaaattggtcaacccttaggctagatatgaattttccaatattagcccaaatttccaagggccaaaaaattgccaaaaaataaagaatttttaaaaaattccaaaaattttgaaacgaaaaataaacatcatattcgtgctcagcacatcaaaataccccagaaaaatatttttgacccccattttcaacccaaaaaaaattttcgaaaatttctagggggcttagctcgaaaatttttgaaaattttacatcatgtagtacactattcgatagcatttaaaatgctctacaaaaatgttctaagacaatttttcgctaaaatcaacccctgacgagttatgggcctgggactgaaatgtcccgctcaggccaaaaaaattttctatttcccgggaaaaattgaaattttttcaaa

SEQ ID NO: 31070 - DNA, 1256 bp, Heterodera glycines
ggaaactttaacaatgcacaattggggtcaattgcttcgttgttgtcaaaatagtcaccccccgccatccccgaatgccgaactgcttggtcccgtcgaccgctgtccagcagaattgccgaacatattttgctgtgtaatgacttgggtggacgatggcattgtcaacattgaactggtggcagctgcaaagaaaatgtcggatggcgtggcggaggttgccagcggctgagaatggcacaactgatcagctgatgcggacggaagatagcctaaggcacaaaccattcattgtaaaaggataataaactgattaccgggcacaaggaattggagggcagcggtgagattatcggacgacgaagtggagggaaagtcaatgggcgggaggcctgggaaaatcattgtgtttccggcaaggggttaagccaaaagaaaaggaaaccgatgaaagggacggcactgatcagaaattggacccggtttagcgagaattcgcttagcgtccgttgtaagcggcgaacatgaagcggcttcgacgccataccgaccttttttaattgccatatttaacaaattacgccaattacccgcctcatttaatttctctttttttttgcttaccaatgacattatttccagaaattcctcctcgtcacattgcataatttggtcaatatcgtcaccgccttgtgagatgaaagtgtcgaaatatctcaaaagattgtgcaggtatttactaaattaggcacctgatggactgactgagtgagttttgcgcggtataaaactgcttggagttgccattcggcgagtgattgtgccgttcgcatgccggaaatcagcacggaggaagttggtctgagttgtaggatcattttgtatgaaatgagtgaaatcaaattctgattaaaatcaagcttatttgcacgtaaaacccaatttgattggaatgaatgtccaaattttgagaatttgcaaggaatatttgatcagattcctcttcaatggccacctgttgtttgtgttgttgctggtgttgttctgttgctgtgtgctcggcgactgctcattcattggcggacttggcgtcacatttggctgctgttgggccgtactgctcgaattcgtcgcgttggacttttcccccattttctgttgaattttcacaaatcaaatcaaaaaattttctgtaactattggaattatttttgtaaatattcttgtttaaattcttcaaattttatctttgtgct

SEQ ID NO: 31071 - DNA, 2354 bp, Heterodera glycines
  unsure (1)..(2354): unsure at all n locations
aaatataataatgaatttaattttaacttaccgccgtgtcctaatgtaaaagtacgaccataaaaaacaggacaaaatccgcttcaattgaagacgaacgcataatttattaattaataaacaattaaaagataaacctactaaaaataaataaaaccgaaaaaaatttcctattattaatgatgaattatactaatacaataaataaatgcaggcttttcaactgatcgtaaatgtaaattttctgctttcgtgttcaattttattgcttttacattattatgattcacaaaatattccgcaccaatcgctgatgaaaattagtgcaaaatgaaaatgaaattgaaaaataaataattaaaaatggatatttgtaattgaaaaaatcaaatcaattaattgaatttttatttttatttaattttttactttattaaactatttttgttaattttgataaaaattctatcataattggtaattttttttgaatggaaaaacattaacaatttgtaataataataataataataattactagtgctgttcgtgaccaaaaatttcccgagactcgaccccgggactcgacaccgaaaaacccgagaattttctcgagtttagattcgagaccaagactctcgaacagcactaataattactaaaaaaaatacataaatttttttattttgatagaaaaattggctgttaaaatgtaaattttaatgaaaattgataaattttattttcattcaaaatccatccgaagttgctgcatttgcatgccaagatcagccttctgctccggcgaaagtgcttgtgacaaaaagtgccagacaactcgtcgaatttgtgcaattgtggcaccattggaacgagcacgggcaactcttaaaaaacaaaatgttggcgaaaatgccaaaattggaaaatttaaattatttaaataaccgcctatgaaggtgaagcaaatcggagcgggacaaatagcggcgaacaaaaagctgcaaaaatttcaatttttcaaggaaatatttttttgccattttctcgcaacaaaaaaatttaattcctatttaaaaaaattgtaaatgaaactgtgagtaactttagctttgtccatcctgcttagaaattgatcactttcttcttcaattggttgaattgctggtggcgatggattttgtgccggcgcaaaaatgccattattagcagtgccactgaccaaagcccaaatttaaaacattaattaaatatttttagagaataggcctattatcctttagagtcttaaaaatataataattaaaatttactaaggagtctagatttattagtcacggtccaagaattttacagctttttgcatgtcggacagaataaatttcgggtttaactgcattaaactttaaaatttaatcatcaattttaaaataagctttcttaacaatgttagaatttttataattaattttaattgaataaattgttttttttttaaatcgaaatacttcgattatttcagacggtccttgcggaaagcgtaaggggacgggcaccaaagaaaaatcattcacgggaattttaatgacaaaggtgagcagaaaataataaataatcattaaataatatttatgcaaataaaaatttaattaatattttgatgggagaagagaatgaatgggatggaagagaaactcataaaagaataaaaattccaggagaagaaggaagggtcattaaaggtaattaatacaaccaattagaaaggaggacgaatgattaataggaaaaatacaaaaattaaaatatttaaacattattactgatcaagaggataaaatttatcactgattgaattaaattattttaaaaaacaacattccgtaaatatttattaatcaaaattttaattttaatgaataataaatattaacgaattgtaaatttatgtgtctctaatcagtgatcactttttgaaaagattcattttcttaattgaacaaattcattaacaatttaattattttgatacaaatcttatccctatttatcgattccttcatttacaactctgatcagttataaaaaggcacttctaatcaaatttcctttttaatggcatttttatcttataattaaattaaataaaattcaaaaataaataaataaatcgtaaagtcccctattttgcaatatgccaatgtaatgctggctaatttttactctcgattatttttacagctgttgcttttctcggctatataatatttactanaaacataaagcaaaatagtatagggagataaagaagagaaaaagaaatagttcagcctggcatagaaaaagagaagcag

SEQ ID NO: 31072 - DNA, 1201 bp, Heterodera glycines
  unsure (1)..(1201): unsure at all n locations
cagagacaagccttcgcaactggagaagagaatttaaaagaagatntagaatttcacactaaactttttccgaattccgatccgatttcgtttttttaaatttatggtaaagattttgctcactgccaaatgcttggagtccaatctcaaaatttggccacgccataaaactgctgaatgacctaatctttttggatcagaaaattgagtgcatcttttagaaagatttcttttaggaaagtcattcaccgtgtggctttgttggtgttgttgttgcgaaaaataaaaacaacccacaaaatgaggctaaaggctctgttctgacggaactgaccacttcctgccgggaagcttttccttctctgctaatggacatttaattatttttttatgtaaatataaaaatttgttgctgtttcgctaacaataataaatgggcgcatcaatgttcaattcgtataactgttggacaaaaaaacacttctaagaattggtgatgctcaagagtctcgagccaaaatttcgcatttatcaaacagcgcttaggtataggcaccgccgatgccccgcgttgatcaaagatttttggaaacatatgtagtgcggccggccaaaaattcttgattttacaaaaatgaaaaatatttttaaggaaaagattaaaattaacaataaattaaattactcaatttttttgcaccgagaaaataagccggttcgttccgttaaaatataagtaccggtcccggcttttctggtctcggcgagtcacggtcccggcttttcccaaaatttacggtcttgtgcatttctaatttctttttttttataatttgtatgtgactaatctaatcgctctttgatcagaaagcgataggatgagtttttacctccttaacaaaaaatatttggaaaaaagaacctcaaaaatccttatttctattgaactcatcagcttaggttgttcgagataaaaaaaaaaattgcgacgtgggaaacgagagcgaaaaaggattcataaaaagccccgccccctcgctttggctttttaatttccagaaatcactaataatgaaaaattacaagcagattttacgtgggtttattttagtgaatcaataaataagcaatttttttattttatgagttttattttctaatataaaaattttccattttcttattggaaagccaattattt

SEQ ID NO: 31073 - DNA, 2277 bp, Heterodera glycines
  unsure (1)..(2277): unsure at all n locations
ctatcggacaaacaaaaagtgtactgtgaatgccaacacgggatggaagggcacattttgtgatcagtcggccgaaaatgcagagaaagcattgtaaaaataaatttaaaataaaaaaaaagtaattaaataaaacatttttagcaatcaaagctgtccattgcataaaaatcttaaacttttaaaatcatcatcagatggctcgtggggatgcaaatgtttgaccggctttgagggagaacagtgcgaaattgagcgaaatccgtgctcaaaaagtacaaattttgaataacatttcgataccaataaattaaaacaaaaataaaattgcattaattaaaaattaatctgaaaataataaaaatattatttattaaattgcaggcccatctccgtgcaaacacaagggcaaatgtgtgaacattggtaacgatcggtaccgatgcgattgtgccccgggttggattggcctgaattgtgaagagaatcgcaacgactgtgaaaaaatgtggcaaaaataataataacatttatatgcatgccctttttaattttattttttaaagtgtctgtgccaacggcggaaaatgccacgacaaagtcaaccatttccaatgcgaatgttcgcgcgggttcactgggcgccattgtgaagtgtttttctgggcaaaatatttatgaaataaaaaaaattcgaatttctttagacctcagtgcccgttgacaaattcaatcggaccgatgtgatggacaaggaaaactgcaagaaagcgggatgcgaggccaaatacggaaaccatcggtgtgattcggaggtgatttgttgaaaaatctggaaattaaaaaaattattattaaaacaataaccattgtgcttaattctaaaaaacaaatttggaaatttatttatttaatttagtgcaatttatttgcgtgccaattcgacggcggcgattgttccacaaaacaggcacaaccctttggcaaatgcccacaggcaagctattgttcacatgtgtttgcggatggcaaatgtgatgaagtgagtcggttttatgtcaccacaactcagcttatttttaatttgttttatttttcctatacctatttagcaaattaagttttaaatccgtctattttctgaattaagatttgcaacaacgaacgctgcttgttcgacggctttgactgtttggagcgacaccaggcgacgtgtccgtggatggtcgactgtgccaaagtgtacgcggacggtcattgtgacgagcagtgcaatcaggcgaactgcggatgggacgtgggtggacatttcgcgcgggttcactgggcgccattgtgaagtgattttctgggcaaaatatttatgaaataaaaaaaattcgaatttctttagacctcagtgcccgttgacaaattcaatcggaccgattctgatcactttgncccggttgtgtggcttctctttggagcatttacttcttcaaggaaatcgaaatggtcagtcagtcaaattctgatcaatttttaattaataataattttttttttcgtttttcacagaatctcgcaactctctgaccattttctgctctttcctttccgttttttgtggtgcttcgatgattttcgtctccaaatcgaaagttccgctcgacagactccaaattttctgactctacttaatttattagtgttaatatcaacaattaatttccccatgttttttgccgttttttaatcgttcggtagtggcggataaaatttctcaaaagaagagatagtcatttttcttggatataagataaatttaaaaattctctgagaaattaaatggcgatgcgattgcgcaccgccctccctctcacgctcgagcgcttttgtaacgtataaaatttctcaaaagaagagatagtcatttttcttggatataagataaatttaaaaattctctaagaaataaaatggcgattgcgcaccgccctccctctcacgctcgagcgcttttgtaacgtatacaatttctcaaaagaagagatagtcatttttcttggatataagataaatttaaaaattctctgagaaattaaatggcaattgccgcaccgccctccctctcacgctcgagcgcttttgtaacgtataaaatttctcaaaagaagagatagtcatttttcttggatataagataaatttaaaaattcttctaaaaataaaatggcgatggcgcaccgccctccctcttccgctcgagcgcttttggaacgtaataaaatttcc

SEQ ID NO: 31074 - DNA, 1152 bp, Heterodera glycines
atacacgccgaagaaaacattgagtctctaatggttaaatttaaaatatgtattttttcgctaagttcggccagaaacattcgtcccatttctcagcactgtaattactgaatgaaattcaattgtcctctgacggattgtccggcggtgcccaaaacggcgccggacgatttttttttagacattagctttgttaattaaattcaataatttactaaaatattatataatatttttttaaattttcaagctaatgagttttccaagtgctttcgaaccgtatcaagtatttatgtataatttgaatgacaatgaaaaagttatggccaaaaaaatcatctgcgaccatttgtcctgctccgattgtctgggcatccccagtccaattgtcatgacattttgcacattcgaaagtttcctcttacttttattcgacttttctataaaatttcatccccgaatcaaatagccgtcatacatgacattctttaagaattaagcaaccttctctgataatttggtcggaaattcatccctggcatttgggaaggaatccaaattaaaagtttaaaatcattgaatgtttttcaattggccaaactaataaaaaaaaataggcggcattcaaatgccatcatttttctttggcatgtgccaatgtcatcagaaacccttcccaacttttacggggagaagagcggagcagggagtgggggggggggggggagaccaaataacacaatttccgttcctcaatttgccccttccttttgccccatggccggatggcaaattcgtcatccttttttggccaatttcgttgtgccccccccccccccgggcacaacgaaattcgatggcacgacaaatttagttgtgtggtgccagcgaagaagcagggccggatgacccctcaaagggatggcaattggtttttgtggttgaacatttggaaaatttgggggggggggaggcgggggagaaggagggccaaaagatgggacttccccacttcacacttcaaaatgtgtccatttacgggaggagtgaggggggggaccgcaaccgaacggacatgacaagttttgagtcgagattctcaaggcctatttggcaattaaatttggaataaaagcgattgggcttgaattt

SEQ ID NO: 31075 - DNA, 1087 bp, Heterodera glycines
aattttaaagataaatagagaattcttagggctatcgaatgatattaattaagtttggctcaattacattttaatttttttttccaaagcaattagattaaattttctttttagaatttcaagtcctctatttatcttttaaaatttcaaaaaatttcactgggtttcaaaaaagttccggacaaaaaaccgactaagattttgtggaatttaataaacataacttattttataatattttcaaaattttcaaaattattactctgatagagaaaaactagtactattgaatgacatcatgaaataataatttgttgaaattgagccaagatacgaatttatatgttgtacattttttattttcctacaacttggtagtttttcaaacaaacgacctagcaccctttattttctatttgttttttttactccaaaataatttttaataaaatatttagccgtttccgtgagatttacatagtagcaaatttaaagaaattttttgaattttttttttttttggtttacggaactcgctcatccaatttgtccttatttataaggactgtgtccttagtcactgattgattatcaaaaaccaggaaataaaaatttgagctctcacttcatcctcgcttatggacgccatcagcccatcattgtttttgtcctccaatttttcgatcgctttgcgcatgatcagtccaaccatacggcggttcttcttcgcgtcccatccggcctgtaaaggataattcttgatcaagaccaaccccgtcttgacaatttttgatcaagactggtcaaggccaaaccccgtccttgacagtttttgacaagattggtcaagccaaacctgtccttgattgatcaaggctgaccaagcccaacccgtccttaacagtttttgatcaagactggtcaaggccaaacctgtccttgattgatcaaggctgaccaagcccaacccgtccttaacaatttttgatcaaggctgaccaagcccaacccgtccttgacaatttttgatcaagattggtcaagggccaaacctgtccttgattgatcaaggctgaccaagcccaac

SEQ ID NO: 31076 - DNA, 1188 bp, Heterodera glycines
ttttttttttttcggggcagtcccccggaaccgatgcgcccagttttatggggagaccgaatcctccgggaatagctcccctatagcttgtacttaattctgcgttgatttttgctccccataattgtttgagtcccacaaccggccacgtgaaaaaatcgattttttgttttcggggcagtccccccgaaccgatgcgcccagatttatggggagaccgaatcctcccggaatagcttccctatagtctgtactttaattctgcgttggatttttgctccccataatatgtttgagtaccccaaacggacacttgaaaaaatcgatttttttgttttcggggcagtccccccgaaccgatgcgcccagatttatggggagaccgaatccttcgggaatagcttccctatagcctgtactttaattctgcgttggatttttgctccccataattgtttgagtaccccaaacggacacttgaaaaaatcgatttttttgttttcggggcagtccccccgaaccgatgcgcccagatttatggggagaccgaatccttcgggaatagcttccctatagcctgtactttaattctgcgttggatttttgctccccataattgtttgagtaccccaaacggacacttgaaaaaatcgatttttttgttttcggggcagtccccccgaaccgatgcgcccagatttatggggagaccgaatccttcgggaatagcttccctatagcctgtactttaattctgcgttggatttttgctccccataaatgtttgagtaccccaaacggacacttgaaaaaatcgatttttttgttttcggggcagtccccccgaaccgatgcgcccagatttatggggagaccgaatccttcgggaatagcttccctatagcctgtacttttatttctgcgttggatttttgctccccataattgtttgagtaccccaaacggacacttgaaaaaatcgatttatttttgttttcggggcagtccccccgaaccgatgcgcccagatttatggggagaccgaatccttcgggaatagcttcccatagcctgaattttaattctgggggtgggatttttgctccccctaaattggtttaagaaaccccaaacggaacacttgaaaaaatccattttttttgtttttcggggaggcccccccaaacc

SEQ ID NO: 31077 - DNA, 1516 bp, Heterodera glycines
  unsure (1)..(1516): unsure at all n locations
cccccccccctcncttcccttccccttccccctcatattccgtatcaattttccgatttcaaaacataatattgcacaaatgtttagcttctttcaaagatttgtaatcgtaaaattaattaactggcgctttaatacaattggcctgttttttgaatctgtttttatttttgattttctaccttgagaatttttttggtgttgcacagttaaaatccaaatatgagtatttaaaaataataaatttgtagaaatttttataattattatttattctgtcaaatgaatttgattgctcaaaaaacaaagaatgtctgttgatgaaacaattcgcgagttgagcgggacactcactcaactcaaaatattagtggttagtcaaaaagtgtttttaaattaaattgtgacgccgacataaaaaaaatgaatttttaattatttcaataattagaatttccaaaaactggcataaaaccaataaaattgtgttgaattttttgaacaaaacatttattaatgataaattctttaacagggtaaaatcaatgagcaaattagcggtgtcagtgcccgaattaacataacactgcaaaactttgatgactcagtggctggcattgctactgatgccaaccaaatgacaaaacaggtggacaccaccattgaccaggtgaaaattggtaaaaaaccaatttaaatcacataatataaaaatgggacaaaaatatttgaatttaaattgattactttttcaatatcgcacgcataaacaacattaaagttaagaaaaagcagctcttgaaatattagggttcattattcataatttgaaatgtaataattggtttttcgaatttaaaaacgaaagaaaaaatgagacaggactattgaaatataatcacatcattaacacacttatagagttttgttaatattattgtgatagaaaacatagaatttaatttaacgaattcaaataaaaaaattttacactaaattattgacaaaatagaaaatctgagtttaattaagatccctggttcctgggccttttacacgctgttttttgcgctaattgccgtgctcatccttctctcagtgctcatcataatcaatttaatcataaaaattcaatcattttacggcacaatgcgcgggggctcgtcaagtaaaagccatttaactattttaaaattataaacattaatttatttaggagcgtcgacgccgcttcaatcgctggtccaatccgagtcaaagcagccgcttcacacgcaacaaattccagccatttatcacgggcacattccaacagaaagcaacaagcagattgagggtgggggttttgaatggctcaactgatgcagttcacgcgaccaaacaatgagtatattccacaggttcttatggatattttttcttactttttataaactatttcatttttggaataaccaaaaacttgaaacccatttcatatttcaaattttggggttaaggacaataaatttaaaaa

SEQ ID NO: 31078 - DNA, 731 bp, Heterodera glycines
gggtgaatgcagaccagatacgccagctctgtccgtttcccctcatcggtttcacgtcctctttaactctctcttcaaagtgctttgcaactttccctcacggtacttgttcgctatcggactcgtggccgtatttagtcttagatgaagtttaccacctgatttgggctgcgatcccaaacaacccgactccaagacacgtaaagatgggtaggcaccgccagttggacaggtcttgcaccttctctggagccccggtcaagggaaacttgaacaagcgggccaacccaagctcacggtctatacgctacacctcgcaaccccagaggagctgcgattcagcgctggactcttcccagttcactcgccgttactacgggaatcctcgttagtttcttttcctccgcttactgatatgcttaagttcagcgggtgttcacgtctgagttcaggtcgaaaaatcaaagcaggaatgccagtaatccaggcactccgccacagcatgcaaagcattggtgcgcttgagttacggtccgtaaaacgcgaattagaaccacaagttcgcgccagcacaccaaaaccccacagccgagctgagcaagtaacgtaagaacacgtacaagtacatgatcccacgaagcaacgcacaagcagtgcattttatggtaacgaccctgaaccaggcgtgccaatggatgtaactccaatggcgcaatgtgcattcgaatgtt

SEQ ID NO: 31079 - DNA, 863 bp, Heterodera glycines
ttctgaaaatttttcaggtcatttcttaggggtgtattctctagaggttattgcatttttaatgtaatttttcggtaaaactcgccaaaaaagacaccaaaacggcaaaatgccaaaaaaggcattaaaggcacgaaaatcccgaaaaaggcaaaaaaaaggcataataaaagtcaactttgaagcctcaaaccaagtggaaaatgtgttatttatgcttaatatatcgaaactaatgcgcagaaaaaaggcatttgcctcaaaatgcggtctcttgctatgacgttactcaaaaaccatcaaaatgagccgaagttatgaataattttctgtcaaaaatttttattttgacccggcacccaaaataaaatatttttgaaatgaaatgcagtaaaattttaaaagtgcttcaaaaattattattattttctcatttttcttcgttttgtaaaaaaataaaaaataaaccaaacttcaaaaagtagtgaaaattctcaatttctgaaccttgaatttgattttcacataaaatattaataattttttaaattttttgctcccaaagataaaatttgtattcatcaaaatagaaaatttaaaaaatatataattaaaatttgggtacaaaaatgtggtttgcttactcttgctgtgaattgccccgtcggattagctttttggcccggctggcaccactggccatcatttctcccgcggtcataacaccggcggcagcgctggcaccagtgccagtgccgacgtccccctttgtgccaccgccaccgaccaaacggcgcaacgaaccgcccatcatggcaccaccaccaccactgggttcggcactggtgctgtggtgcttgcgc

SEQ ID NO: 31080 - DNA, 1247 bp, Heterodera glycines
  unsure (1)..(1247): unsure at all n locations
gtcgaattttaaaaaatgccaaaattttgggaccaaanaatcaatcccgggtttttgtgagtgaggggtttcacaggtggctaaattaccgctacaaattggtgtgccaaattggcaacccaaccggaaaccagtgccaaaaatcaatttaaatgattcaatagcaaaacccgaatttataggtataattggaaaattattttttatatttcaaaagcccagcttgaatttgtttttaaaaaaacgtgatttagacttcaagggtatgtgctccaaataccctactctactggttaaactgatcattgggtcccaccaacaaataaataaattcaataaattatacgtacatgccaacccaattcggcactgccagtcggtcgacaagcactcggcccaaatgtgccctggcataaaaatttgtgcggggttcgccgccgtgcagcagcagcacggtggtgcccgccttctccgccaagcgctgctgctggtggtggtgcggaggccgcgcattggccaacgccggcggcctaatcgtgggaggagaagcggcagaaaacaacgcaatgggcgaggaggaggaggaggaggacgaagctgatgaacaacgcatgacgatgtaatatgggagaggggaaaacatcagtagggagcagagaaggctgtaaaatggagggccaaccaaagaaagcaggcaaatattgattgatatgggcttaataggtattatatcattatcattagctctaaaaaatattattacattattcagactttgtgctttcgaatgctaccaaaaagatagtgtttgttcaaacatgaacaaagttattgtatttattgtataaaaacccgggattgtcaattgattggactcataaaagtcaattggactcataaaagtcgcttggactcataaagtgcattagagcccaatatttttatacaaaaaaggggggaatgggaggaatcaatctttgtgaaggaatcggcggcgctatttacaaagaggagtcttttgaaaattttttcaacttttttttggtcaaaatttttttttgtttaaaaagtcctgaaaccaagtacccgggtgttttaaaggtcgctgatcacgaatatgacaattatttgggcctattaagcaaatttggcgctagttataaagtgatagattttgaattttatcaaaaaccataggggggacccttttgttttgtaaatttttttttggataaaaatcgtgaata

SEQ ID NO: 31081 - DNA, 1857 bp, Heterodera glycines
cgcaacaaagtgtggacttgagttgcatgacgtttgccaatgctggactagaaatggacgaagctgagcagacgatgatgaacaacgaagacgaacaaaattgtagcgatcaacccattgttcaacggacaactcaagacgaatacgtcgtctctgaggattggccaaatgccaacaatgttggcacaaaaaaggcacgaaaaagcgaaacaacaacaacaagaaggacaagcgtgaaattgactgctggccaaaaggcattggaggtggtggcgagagttaattgagttatgccatgacaaacagaaattgtctcgagagcagctctcccccgccccgcctatcatttccaccctaaaagcggcttaaaaagggaactgaaaatttttataaaaaaatttaatgaaaaacgcgttgaaaatttttttagcgattttttggacaaatttttgaaaaaatttggtaattaattattaaatttacaaatttcaacaataagaaaaaacaattttaaaagatttttctcaacttgagtgagcctattgaatgcgatttgattgaaacaatttttgacggaatttggtaatttaatgaatgatgtggtgaccattctgcaggcattctcattccaacggcttcgttctgctgctggtccatcatcaacaacaattgaaacttctgctgttgatcaccttcacactgaaccgcaacaacgacaacagcaacgaacatttgctgatcaacaaattcagaacgaacacaattttggactggctgatcaaatcattttaccgaaaaatgaaccaccaaattcacaaaattcggtattttcaaaacagtttttaactgttttatgggccagtcaaaaagaaagataatttgttaaatggcggactcttattgcctttaattttcccataagattcaggccaatgcaatttttggaattttgattcaatttaataaaaatttaaaaaaatcataaaaaaaaattgaagttggatcaaaattaaattattcaggaccgaaatttgcatttgcctgaaacttgttggggacacaacaccttcaaatgaaatcaaaaacagtaaaattgattggatccataaaacagagggaagcaataaaactaatttccatacgatttaattgactactaattgttcagcagcagtactactacgattctgcagcagacgattgttgttgtccatcaacagcagcggaggatgaagcagttgctgctgttggctttgaatttgttggtacttccgccgctgctgctgatgatgaagaatggggttgtacttctccaccaatctcatcacaacagccaatttcacaatgcttttccgtcgtcacaaacacatcggcggcaacaacaagttgctcacaaatgacgcaacaattcatttatgatgaagagcatgacgaatttggtgatgagattgatgataatgacgatgaagcagcaacagcattgtcgtcgtcctcctcttttcgtccacaacaaattgtccatgtcgacatggatgtgttgcgcacaaattttgcacatcgttgtgaacagcagaggcgacagcggcgggagcacaacaatttgttgcggcaaagttgtggaggcaacgatgacggcggcacgcggttgcacgttgtcacaacttctgctggaataatgtcatctggaagtcaggaggaggagagggaggaagacaacgcgtcggtggaacaacgcttgtcaatgatgctgaagttggtcaatcattgatagagataaagggcatgaacggtggcacttcgtcccccctaaaaaactttaaaatttcaaacatggaaatctttcaaaaatcttattgt

SEQ ID NO: 31082 - DNA, 1234 bp, Heterodera glycines
atgattattatgatcattatcgcctcaattgatcaattagtcttcctctcggggaggcttcttctattctaaatcaaagccaaatgcaggattttaatctcagaaaacaggtcctgaaaaatttcaggctttaaagttagcctaaaatggatgctatcaaacggctaggttcgtgacttgcttggtaaaattttatcagtgtttaatcatcccaaggagttgattagatttgaatgtggtcagtaaaccctaagaagcgagactcgcgcatttattaggtttggtgattgggatttggtgtccgattccagctcatatttgctggcccaccttcatggcggcacaagtgccgtacggtttgaactcgggcgtcacgctgttctcctcgttgagcaccttctccatgtctacccaaatcaaatccacccgaggcatcattgtgaccagacagtggcgacggtactttaaaaggatggaaaagcaataaaattaaaaggatgaagatgaaaaaactggtacaaagatttcaatcaaattttgacattttttggcaaaatcaatgatttttaaaatctgaaccgaaaccggtgatttttcgaaaaatccggtttgaacagtttttgagaggccgggcccagaaaccggtcgtttttgaaaatgcctaactggcccggaaccggctatttttgaccgtttttgaccagtttatgatccaatccagtcaaaaattattcatttttatacattttcctttgaaaatatctctttcgaaaattttggaaaattttaagcgatttttcaattttatgatgaaatgaattacttactaagttgttccaaaaatataattcttttaaaaaaaactttaaaaaattttttttgaaaaattttgaagtttatatctgaatagctcatttaatgaagcctgagtgaaataaagccgaaatttaagagcaaatcgaatttttggttaatcctaattgaaagcccgaatccactcgcctcgccgaattaataaatgatggccaagaatggcatggcacccctctcgacctaacaaaaagtccgtctcacctcaaagtaccgcttgcacaggtgcttcaacttgtgtcgtagaaatccttttgtgaatttattgtttattattttttttaaatattttttattttttactttttgttgtttgcacacggtaataaaaggaaggtacggtacaacactttttggcactgat

SEQ ID NO: 31083 - DNA, 976 bp, Heterodera glycines
cccaaacaaacgcgcagagaaacaaattccagaacaattagtatcggcgtaattattctgagaatgcggttggaattcctattactgttgagcagaaaaagagatagccaattttccaaatttttcccaaacaaacgcgccgagaaacaaattccagaacaattagtatcggcgtaattattctgagaatgcggttggaattcctattactgttgagcagaaaaagagatagccaattttccaaatttttcccaaacaaacgcgccgagaaacaaattccagaacaattagtatcggcgtaattattctgagaatgcggttggaattcctattactgttgagcagaaaaagagatagccaattttccaaatttttcccaaacaaacgcgccgagaaacaaattccagaacaattagtatcggcgtaattattctgagaatgcagttggaattcctattactgttgagcagaaaaagagatagccaattttccaaatttttcccaaacaaacgcgcagagaaacaaattccagaacaattagtatcggcgtaattattctgagaatgcggttggaattcctattactgttgagcagaaaaagagatagccaattttccaaatttttcccaaacaaacgcgccgagaaacaaattccagaacaattagtatcggcgtaattattctgagaatgcagttggaattcctattactgttgagcagaaaaagagatagccaattttccaaatttttcccaaacaaacgcgccgagaaacaaattccagaacaattagtatcggcgtaattattctgagaatgcggttggaattcctattactgttgagcagaaaaagagatagccaattttccaaatttttcccaaacaaacgcgccgagaaacaattccagaacaatagtatcggcgtaatattctgagaatggcggtggaattctattactggtgagcagaaaagagata

SEQ ID NO: 31084 - DNA, 918 bp, Heterodera glycines
cgtacccccgatgctaatccgttccggagagcctcttcaaaattttttccattaccgtaagagctgcggaaattgtgaattaattctcagaaaaatggctatctctttttaggacaattttctatctcgtaaccccgatgctaatccgttccggagagcctcttcaaaattttttccattaccctaagagctgcggaaattgtgaattaattctcagaaaaatggctatctctttttaggacaattttctatctcgtaaccccgatgctaatccgttccggagagcctcttcaaaattttttccattaccgtaagagctgcggaaattgtgaattaattctcagaaaaatggctatctctttttaggacaattttctatctcgtaaccccgatgctaatccgttccggagagcctcttcaaaattttttccattaccctaagagctgcggaaattgtgaattaattctcagaaaaatggctatctctttttaggacaattttctatctcgtaaccccgatgctaatccgttccggagagcctcttcaaaattttttccattaccgtaagagctgcggaaattgtgaattaattctcagaaaaatggctatctctttttaggacaattttctatctcgtaaccccgatgctaatccgttccggagagcctcttcaaaattttttccattaccctaagagctgcggaaattgtgaattaattctcagaaaaatggctatctctttttaggacaattttctatctcgtaaccccgatgctaatccgttccggagagcctcttcaaaattttttccattaccgtaagagctgcggaaattgtgaattaattctcagaaaaatggctatctctttttaggacaattttctatctcgtaaccccgatgctaatccgttccggag

SEQ ID NO: 31085 - DNA, 1101 bp, Heterodera glycines
taagctggtgccgaagcgatatccggaatcattggaaattgcaacgatcagtgagatcaaccggatgatcaacagcatgtaagccgggagaagggatgcaactgatcagatggaagggcggcatatatcaaaaggattgctcataaaatgtaagaggggcgagcgatcaaattgatcagatgaaggggctctgcatataccaaactagttaagggtaattatgatgagacaaacaaattccatgctgataaaatgatcagaatacttttctgatcccgaagaaatgggataaaattagataatatcgtcatgatccgttgggtaaaaggttgatcacaagaaattaaaatcgaaaataatgcccccattttaaatccaagtattgcaggggcatcgaaggcgcaatgaaagatttgatggcggtcggcaagaaaatgttcggctgtacacgcaaatgcatgagcagcaaggcgggcaactgcgagaagtcgctcaggtggggaacaacaattttcgttttgattgttcagaccgacaaagaaaaacaaaaaaaaagacgagacttttctagagcgagacagaaacaatgcccaaaaatcaacattctgacattggaattttcatttgctttgtcagtggcattcttctgtgttctgttttccccccaaaaaatgccgcatcaaattttgaattgccatgcccaaaaacattgcctttctccgcacattcgtcgttttgtgcaggtgcggcttgaacttaccgccggacaacgtgttggtccagcaggtgaagcggtgcgccatcaacagcggactgaacaccgccaacgcgaaagcgatgtgcaaatgcgcgtccgccgcgggcgttaagtgagtgtaattttaattatttttggtttgtcctcgtaaaaaaaacaattaaatttgattttaattaagttaataatttggttaaataggatgtcactgatcaacagtgactcaacagtcatattcataacgcaatttgtactaattgcctaattactattttaattctttccagaaatttgacgcctgccgtctgcgcaaagatccgagtcacctaaactaaacatgatcc

SEQ ID NO: 31086 - DNA, 1228 bp, Heterodera glycines
  unsure (1)..(1228): unsure at all n locations
tagccctttttttttggagggaattttttaattttatactttatcccaagaaaaatgtctatcttctttttttgagaaattttatccctcacaaaagcgcttgcgtatgagacggaggggctgtgcacaatcgccattttatttcacagaggattnttatatttagaggttatcccagaaaaatggctatctctttttttgataaattttatacacatacaaatgctctcgagcatgatagggagggcggtgcgcaatagaccttttatttttgagggaatttttaaatttatactctatcccagaaaaatgtctatctctttttttgagaaattttatacctcacaaaagcgcttgcgtatgagacggagggctgtgcacaatcgccattttatttcacagaggatttttatatttagaggttatcccagaaaaatggctatctctttttttgataaattttatacacatacaaatgctctcgagcatgatagggagggcggtgcgcaatagaccttttatttttgagggaatttttaaatttatactctatcccagaaaaatggctatctctttttttgataaattttatacacatacaaatgctctcgagcatgatagggagggcggtgcgcaatagaccttttatttttgagggaatttttaaatttatactctatcccagaaaaatggctatctctttttttgagaaattttatacctcacaaaagcgcttgcgtatgagacggagggctgtgcacaatcgccattttatttcacagaggatttttatatttagaggttatcccagaaaaatggctatctctttttttgataaattttatacacatacaaatgctctcgagcatgatagggagggcggtgcgcaatagaccttttatttttgagggaatttttaaatttatactctatcccagaaaaatgtctatctcttttttttgagaaattttatacctcacaaaagcgcttgcgtatgagacggagggctgtgcacaatcgccattttatttcacagaggatttttatatttagaggttatcccagaaaaatggctatctctttttttgataaattttatacacatacaaatgctctcgagcatgatagggagggcggtgcgcaatagaccttttatttttgagggaatttttaaatttatactctatcccagaaaaatggctatctctttttttgataaattttatac

SEQ ID NO: 31087 - DNA, 1329 bp, Heterodera glycines
  unsure (1)..(1329): unsure at all n locations
acaacaaagaagacngaaagaggnnccagcaaaggacgccgacagcaganaacccccattttaaagagaaccccaaaacaccgaaggacgcaccaaaaagcaaagncaaagcgcgctcgcgcaacagagnggaggcatccgccatctgtgttttgctttaagccatccaaaaatcctctattaaagaagacaaaatttgataaaattacatttgattattttgatcatcattctgatcaaaataaatttctttcattctcataaataccgtatccaattactcattgattttgttttttattagaagaggtttaagaacaaaaaataaaagtgataattgataatcaattaaaattaattaacataaaaatacgagaaaaataataataaatagaaaaaagcaattaaatgttcttagataaaaacaaaaaattaataaaataagaaattaaaataaacaaaaaagagaattatgtttccatacaattaaaataatataataaaattgaaaattaataattatgatgaaaagttttaaaaaacataagcagggccctgactttctattttttgcccattaaaacaatttttgcagcgtttgactgaaattttagcttaaatatttggcaaaaagtattgttattgaaacgaaaatttagtcacattttaaatttaattattaaaaaataaagcgtaaaaattttggtattttcatgttaacataatttttaatattttcgcgtatttcttttccaaaatctgaaccctgcttattaacaaaagaaaaaaacgatgaaaaaaaagattaattaaaaaaatccacactttccactcttcaatcactcttatcattattttcttccacctaaaaatacaaagtgacaaagagagagaggggaagggggggggggggcgtaagtaattcgctgcacttacccaattgttttgcctccttctcaatttttaactgaagattctcgatcgtcagcttttgagtctcgatcgtccgcttttggttctccatcgtcagcttttgagtctcggtcgtcagcttttggttctccatcgtcagcttttgagtctcgatcgtccgcttttggttctccatcgtcagcttttgagtctcggtcgtcagcttttgagtctcggtcgtcagcttttgagtctcggtcgtaagcttttgagtctcggtcgtccgcttttggttctccatcgtcagcttttgagtctcggtcgtcagcttttggttctccatcgtcagcttttgagtctcggtcgtcagcttttggttctccatcgtcagcttttgagtctcgatcgtccgctttt

SEQ ID NO: 31088 - DNA, 877 bp, Heterodera glycines
attagtaccaattcccgttggtattagcttttgcaatgacattaataaggctcaaggtcaaacgattgagaaagtttgaataaatttgaggaaatgtgtgatgaaactaatttgtaaggtaatacgatagtcccttcgttttaatttgaaaagttttttattgcctatttggcgttatgcccaattttttaaccaaaaagcaataaaaacgaaaaatacattcttaggaattgaccacaaaaatttcagaaaaatacaccctttctcttattcgtcatgcgctcccagttttattaattttttttcttttgtcaatgcaatgataaagcatagaaataatcggctttactttaaaaaggaaaaataaaaatccataattcgcttctatttcaattgttaaattgataaacgattattataatactgtacaacaacgtaagaattcttcatgcgtactttacgtatcgacatcaataaggaaaagaaaacaccaattattgttgaaacctatgaagcactggaagcacttagcacaaatcgcgcccgaaatcgcgttgccgttgttgggaggacaggttttatcaccctaaaataattgtggtactttccgaattcaaggagtaattttcacatacatttttaaaacaccaaaaaatatattatacatacctcttcgttcagttgcaaaagttttcgcactgaatggaaatcgggtggaattgcgcactgaacgaagcaaaccgcgcacggcgatgtatttttcgggaagcattgcttggagtccattgagaggcaagcaaaagtgtgatcatattcagcgtatttgtcagtgactcaaaaaatccccgtaaatatttttataaaaaattttttaatt

SEQ ID NO: 31089 - DNA, 1181 bp, Heterodera glycines
attttttcggaaatcggaattccgaccccaaaaatgtcggaagtcgtaaatcggaattccgtgccatccctgtgtgcagccctgatttggaatcaaaatttcacaatttctttgatttttcgatttttctaaattataaatgtgaattactggctgttttttaactcaaaatttgttttccattattggcacaaaactttacgattttaatgtcaagcggaattaattatttatttattttttttttttgcttaccgccccaaagtcgtatttcttgcatttcctgcagccatcaattcatatgcaaaattggtgtcgatttgaaaatttcttctaattgcataagccaatgcgatgtaggttaaagatgaagcttaacaaaaactcgataattaaaaatattttttcagcaaaaaaaataacgaagaaatttctagaattttgttcatgcgattttccgactgccggactttccacccatcagaaaacctttgaaaaatagcgtagaaaattcaggattagaaaatttttggtctccagtcccaccctctgtggattttaattagctttaggctcaaaagttgtgagcggctccctgaaaaggagtctttttgggccgggcactaagctcatggcccggcactttcaaaattttgacctctaaaaagtatccaaatatctcaatcaatcataaaataataaaatatgaataaaataaaattattagataatcttatagttcttacctgtgtcaagtactataagtgataaatcgctgtttatgttgccctcaatagaagcaattcctccataaaggttgttttcaattggcgcagtattgataagtggttggaattcggctgaatttacccgttgaagcacgtagacaagaggctaaatatagacaaacatagactaattattagtaataatactttcaaaaaacctaggataaaaattgacaccaaaaaagaaattttaaggacgacaccaaaacagcgaaaaaaaaacaattatcattgctcttttcggtgatattcagacgtttttgttaattcaaatgtatttatcctttaaaaatttaccagataaattgaatttgcgcggttcgaatgaagggcattggtcggcattttggcacgatcgatttggcatttgttcaactcgcgcaactgaaaaat

SEQ ID NO: 31090 - DNA, 1378 bp, Heterodera glycines
atgtcaccgccgttttggatgcaatgttacgcatcaaattgtccgttgtgcccggcccgttgctcagcgtgttcgtgcaaaacattgccaagctgtacaccttccaactgtgcaaattggaggcagacgacgattgggacggaattgaatcgttggacaatttgctcacctccaaattgcccgagtaccaatacactgaccatttggaggcgcaagagcgggtcagcaacaataattaatcggtgcaccccaaaaactccgccgggcaaaaaaatttcaaacttagaaatttttcaagaaaaaaatcaccgacagcgcctaccggcaccgggatttgaatccaacccagagaatcaaatccctattatatccggatcacattcccggaaaattttggctgggtcccggtcccgtaaggcttctaaaaacaggaaaatgtaaattctcaaaaatttgtaaataagcaattggattttaggcttcaactaatttttagaatcgtaatttccatgtttttgaataacagtttttacaacacaacaggaagatgaggtggacccattccaattggcagaacgcttcaaatccgctgggtttgaatcaaacggacgacaccaccagcaacagcaggagggcatcaaagaagaagccgaatttgtcaatatgaataaaaacaacaacaactggcaactctccgccacactgtcgtccgcggtgcgtccgctctcgcatttccgcgcattgttccgcttgcttccttctttacggcgcgggcatccgtttttggcacacctttccgcgcttgcgcccgactcagtttttccacccgcttcatctcccattcatcgcttttccgcttcaacttgtactttgcgtgttgacaaagtttgtgcacaatgatttacaatataccaaaagttatgaacaagtttgtttttccttttaagttgctcttttttttcatcctgtgttcttgttttactactgtctcttctgccgatttcaacttccgtgtatgtagggagttttaaacgggtgcatttcttttccattaccccttgcatattcacagaaatttattggcaattttttaaagattttttatataaaaaaaatttttttttttttgtaaattctatgttagtaaattttaaaaaattctcaagaggaaacgaagcgggcgcaaatgagctgctccctttttaaaacttcacaataaaaatgtcttttctttgctcaggaaattgcgttggaaaacaaaatcaaggctgatctatatggagtgaatttatcttttacgtatgcccttggcggattgactgtcgcactcacgacaattatcattggaattatctgcggcctttacaatattctccac

SEQ ID NO: 31091 - DNA, 1051 bp, Heterodera glycines
  unsure (1)..(1051): unsure at all n locations
tttttatttttgacattttttatgagttttgttttataatttcgtgggaagagaatgaaataggtgagtgggggtgagaaggtcgcccaaaatcactttaaatttgcaaataccttgcgctttttgggactcgtccaccgtaatctcgcggataccgtacaacgcacgagcagcagccaaatttgatcggtttttaccaaatgcttaaaatgaaaagtgaagaatttgtgtccgtttttaatatgtttttatttttcgcacccagtcccaagtaggccaacgacacttcgatttccaccaaaaaattggcgtcgaacatgttggactcaaagttggtgaagctccatttgctgttgtcctcccttttgcgcaacattttctgcctcagtcggctgttctccacaaaagcgtcggccaacattcgcactttttcaacggcagtcgaagaaaaactctaaaaaagtgaaggaaaataattattatttattatttcaacaaatgatggaggacaccttaacaattaaaacgggttcagtgtcagtgtcgtcaacttcgatcgaaatctaaatcagaaaattcaacaaatgtgccaaagtgaaataaaataaatcattcagaggaggacgcattatttacattttctgcactttcaattttacatttggcacactctccagcagtgactgaaatgccccattttgtgatgcgtttttgaaataggcgagcaaatcggcgggaaaagtgacgcacagcgatttggcagaagcgcagtgggaacagaaggagggagggacgggcacgggttggttgtcgggatagaaggcggagggcacctttgaacacaaaagaaaaccaaatttgggtgaggatcggaccaaaaattataatcaaacagaaattcaaaatcaatgggttatgtggcatctaatataaataggaaaaaaactcaaatttagtttttttttttatagttttttgtctggggaagggataagaataggganacctatatggtcttgattgtgagcatcaaggtccaacaaattaattt

SEQ ID NO: 31092 - DNA, 1867 bp, Heterodera glycines
  unsure (1)..(1867): unsure at all n locations
tctatatttttgccatttttgtgcaaaaatctattaaatacaataaatttttaaaatttgcctaggcggtgcctatcggcataatggaataaaaattggaagtttcagcataaaaatagtctaattaatattttagtaggatagggcacccggggactcttcccccgaccacaaataaattaaaaacgctagatccaaataaaccaaaatgtttaatgctaatttggaaggattaaaatacgtcatgcaaaataagtttcttttcaaaaaaatccttatcctcagatgcagctagtctacatccaatatattcatcaagatgaacatggatgcgataaaaatgctaattaaaagtaaaaaaataactttaaaaagaaactaattgttattaaaagaattacttgctgagggtttttattagtttttatcttttttttaaaaaaaaagtttgtaaatttgagatgttaagaaataattaaaaataaagtgaagaaaaattagaaagaaaattaaatttattaaaaaatgctaacgttaattgtgatgcagttttactgtgttcgagaattgctagagtaaaccaaaatcccttttacttacttccaatcagcaggaaggaagtgatctagtgatttgatcactctggttttcataattttttttcttctaacttttccaatttttgtgcttttttaatatttgttggacaggtatgcttagcaaaaaaaaaatacgtaaatttttgttaccattaaaatctcttttttgttatcatcaataactacttgattaacatctttttgatttgattacataacttgaaaattttctctcaagaagcaatagaaaataaaaaaatgtgcgacttaattcagcaaacccagtgccattcggccatttaatttcccaggaatttttttttttgaaaaatatcgtactgcaaaagaaagtgccaaaaaatcaataaactattatagtttttatcaaattttaagatagaaaacttacaaaaaatccgctttttggatcatatcttctgaatttcaaggacgtttgtactaacattaataactgattttccgattttccctcttttaatggtcactttttgcactatcgttcattaaaaaagagaaaattggtgaaccaattcaaattctcatgtcatttactttgcccatattctctgttctcctctctcccactttttgggtcatcattttgccgtacatttatttatttatttgtgtcgaccctataaatattggcaatcaatcagcagtaagccattcaaaatgcacacccatcatattaatacgcttacataaaaaaaattattttacaaataaaatttttatcattttagaaattttttgaaaaaaaataaatgtcaacttttaccaatttgtcaagcagcagcattttcacaccagcagaacagggtaaaaaaaagattaattggcaaagaatgggtgaacaaaatatactaattaggctaaggatttatcgttataaaaattcacagagtttgaacaagtttgatatagtaagtgtcgaaaatttttggaattttgcaggcacttagtccttatgccaaaatattttccttaaatttaatgccattctgaaacgatgaacaaagatacaatatcttaaattcatgagatttttgtaacgttaaatccgtcctcatatatcattgtaatacgtttgtgtgaaataataactagagctgtaattaaagtcatttctttaaaaaattagaataaagaaaaagttttccggcttttgcttggattttcataaaagttgtccgataagtgggaaattactttttacttcctnaagacctgcagnngccatgcaa

SEQ ID NO: 31093 - DNA, 1120 bp, Heterodera glycines
  unsure (1)..(1120): unsure at all n locations
aaaaagactttacaaaataatacccctgggagaagggagtgggaaacatgatttcaaaatttttaattttttctagtctaatctactcaaaacggttcagaattcaataaaaataacattcgcggtgcgaaaaatggggtttaacaagtttattgggggaaaaaagactttacaaaataatacccctgggagaagggagtgggaaacatgatttcaaaattttcaattttttctagtttaatctactcaaaacggttcagaattcaataaaaataccattcgcggtgcgaaaaatggggtttgaaaagtttattttgaaaaaaacactatacaaaataatacccctgggagaagggagtgggaaacatgatttcaaaattttcaattttttctagtgtaatctactcaaaacggttcagaattcaataaaaataacattcacggtgcgaaaaatggggtttgacaagtttattggggaaaaaaagactttacaaaataatacccctgggagaagggagtgggaaccatgatttcaaaattttcaattttttgtagtctaatttactcaaaccggttcagaattcaataaaaataccattcacggtgcgaaaaatggggtttgaaaagtttattttgaaaaaaacactttacaaaataatacccccgggagaagggagtgggaaacatgatttcaaaatttcccccccccaaaaatatcatttgctcaaaacggttcagaaaaaaaaatcgtgccccttccccgtgccgtgcgtggggtttctcccgttttctgcggcctttctcgccttttccccctcttccccctggggggggggggtgggtgccccgctttccctcttttcttctttttcttttgctttgtgttccggccgcgtttcggcttcggttggtgtttccttcccggtccgcgcccccggggtcttgctgcttttttgggggggtgcgaagattctcccgctttttccctctggggttcgggcgtgggggctcccgttttctctctttttgttcttctctttgaagggctctgtccggccnncggggggggggcggtggccctcaacgaggccgcgaagaggccgagtgagtaccttcggtg

SEQ ID NO: 31094 - DNA, 1217 bp, Heterodera glycines
ttgcggtcaatccccccaagagaaaaaagagatagccatttttcgcaaagaatttttcgttagcatttcaaatatcgtgtgagtgtttggtagagccagactagagaaggcaaatgttggtaccaagtttgcggtcaaatccccaggagaaaaaagagatagccattttttgggcaagaatttttttcgttagcatttcaaatatcgtgtgagtgtttggtagagccagactagagaaggaaaatgttggtaccaagtttgcggtcaaatccccaagagaaaaaagagacagccattttttcggcaagaatttttttcgttagcatttcaaatatcgtgtgagtgtttggtagagccagactagagaaggaaaatgttggtaccaagtttgcggtcaaatccccaggagaaaaaagagatagccattttttcggcaagaatttttttcgttagcatttcaaatatcgtgtgagtgtttggtagagccagactagagaaggcaaatgttggtaccaagtttgcggtcaaatccccaagagaaaaaagagatagccattttttcggcaagaatttttttcgtttgcatttcaaatatcgtgtgagtgtttagtagagccagactagagaaggcaaatgttggtaccaagtttgcggtcaaatccccaagagaaaaaagagatagccattttttcggcaagaatttttttcgttagcatttcaaatatcgtgtgagtgtttggtagagccagactagagaaggcaaatgttggtaccaagtttgcggtcaaatccccaggagaaaaaagagatagccattttttgggcaagaatttttttcgttagcatttcaaatatcgtgtgagtgtttggtagagccagactagagaaggaaaatgttggtaccaagtttgcggtcaaatccccaagagaaaaaagagacagccattttttcggcaagaatttttttcgttagcatttcaaatatcgtgtgagtgtttgttagagccagactagagaaggcaaatgttggtaccaagtttgcggtcaaatccccaagagaaaaaagagatagccattttttgggcaagaatttttttcgttagtatttcatatatcgtgtgagtgtttggtagagccagactagaaaaggaaaatgttggtaccaagtttgcggtcaaatccccaagagaaaaaagagatacccctttttttggcaa

SEQ ID NO: 31095 - DNA, 1109 bp, Heterodera glycines
ggaatcatttaactaaatattaaaattaaattaaaaacccgctatttctcgcctaaattttctcattttttgtcggccaaaatttttccttttttagtcccttcactttttgggactttttgcaacagcggcgccgctggctgcagggcatttaccttaccgtacactccaaattcattccgttacggtgcaaaattttgttggccagctcactgtacgcgtgggtgaccatgccgttgaccacgctccaggtggaggaggagggcaaaaaataaatatttgttattttttaaaatagcaaaaatttagctttattcatttaggatttttggtgaaaatttcacaaaaaaataatttttataaaattattatcaatttaggaatttttttttggttaaattttatttttttttttttttttaaacaaatcaaatttcaatattttcgacacaaataatcgtactattctattttttaaattggtttttaaaccaattttgagaatgattgaaaaaaaatttctttttcaaggctaacaaaattcatggaatgtgaaaatggttccgagatagaaaatatgtttttaaataattattttggcattttgttttattttttttgcagatttttctcagcccctttttcccactgccgcgctcctttctgttcgactttcttgttgtttttgttggggcggtcaacctttacatgtacatatttggttggtggaaaaaaagattttcaaaaaaaaaaatttttttttttaaatttttccattttcatccaggtgtgatcaaatcattttctcacaaatacaggtgtggcatattgtgaaaaattaaacaatatatacctatatattaaaaataaataaatatttagaaacgaaaaaataaattacaaatttttctttaccattttttaaaggttttttctagaaaaaaatagaaaatgtctataaaaacgacaaattatgtttctttaatgtttcttaattcaaatttttcaagaaaattttattttgaaatttgcaaaaatataatatttttattatttctaaggccgaaaatgtttctagcccccccccccctaaaaattcttcctttttt

SEQ ID NO: 31096 - DNA, 1277 bp, Heterodera glycines
gggttgttgttgtttccttaccaccgtttccttaccaccgtttccttaccaccgtttccttaccaaccgtttccttaccaaccgtttccttaccaccgtttccttaccaccgtttccttaccaatttatttggttcatttccttaccaaaaaattttcgaaaaatttccgtaaaaattgataagttttttcatccctaaaaatcagttccctagtagtaaatattgagcttaaaacatttaaataaaaaaacactttttatcagtttcaaatcatggtatcatctcataattgcgagaaattccggacaaaaaagcaatgataaattgatggttaaaaggctgatgaagtggaaaagtattggggtctccgttgttaagtggtaaataattttgaaccatcgtgagaattcggcggtctgctttgcgatatttctttgccttttgcggtggttcttgtccagttgaacacttcgcgaagtcatcatcggataacttttgatcctttcgcagaaggtcaatgaaacgccaaatcgatggatgtgaacaggcaaatgcacattgcaggcgtctgttcgcggcttctgaatggttattcgtccggtcatcgctttgcagtgttcgagtgtaaacactccaaatgttcgggtcaaatcgcgggcgtgttcggcttccatcatgcttaagacgacccgtgtagttcatgatgaacctaatgaataattaaagaacaataaatagtaaacaatttctgagattgtcaatttaccagtcaaggacgggagtaagttcgtcgggaagagccatgtccagagcaatgattccaggggtcaaatctccaattgggagaaacgctagcgatgtgacacatcgtgccatttctgcgaatgtcgggtcattttgatagcgctaaaattttcgaaaattcgacttttttttgtcatgaattcaacctgtttcagcccaaattcagaaatttttttgtgaaaattttggacgaggtggaacagacatccgcgcacttcagtgaatgggaagactacattcagcgcagtgattgccgctgtctcgtatttggggggggcgctgtccgggttgaagtctggtcacacagcaacgagaatactaaacatacgctcgtatgtagcgtgcgtcttgttggaaagcatgcagtagcacactgggatgacccagcgagtccaacataaataaaaagataatacttgatagatgtttatgtcataccgcaccacagttgcgtaccctagtggaaaaggca

SEQ ID NO: 31097 - DNA, 1615 bp, Heterodera glycines
  unsure (1)..(1615): unsure at all n locations
ctttttgtttttcattcgcaattcgtttgccttatatctctttaaggngngnnnnnagnggncncaaaaaaggccaaacaaaccttacaggcgccaaagcaanngganagcannnanncaaaagaagccaaaagangagccnancgaaaaggaggagaatcagcaaaaggcgagcannnccgacaagaaaaaacaacgccnnannaacggngagccnccagcgcgccgagaacgagcgcgagaacccncacacgccccagcgaaagcggacggaagcgacccgaaanncngncaacaaaagtcagccgatgacaccgctgaatccagcaacgaaatcaggtcattggtggcggaaccacggaaggacaccacggacaataacacgacaaacgcagcatttaccgactcggaggaggagggggaagacagttcgtgcggcgttgggtttatgagttgcgcttctttggccaccccttcttcggctgaatgcgcttcggcaccgaaacggcgacgagtgattttgtcatctgacgacgaagaagagaaaatgatgggaaatggacagagaaaagaccaaaagggggacgaaacggagaatgaaccccaaagacaggcgacgaagcgaaagcgaagggacgcggcgaaagaagcgaaggaaaggacgcctccttccgttgcccgtgtcccacgggacgaaatacagacgacgccttcggcaaaatgtgcacattcattcatcaattcatttgtatgccatctataattaagaattaatatcttttttatcctttttccaattcattacagagcatcgactcaccaaacgcttcttccgtgcagttgcccttttcatcgcttcagattcaaccaaaaaacttgaaaaaccgcaacaaaaatgaccaaatcgcagagagcgcaaacgacggtgatgaggaagccgaacgtttccctcacttggactttgactttcttcgcactgaaaaaatcaaagacgccaaaggacgaaagcccaatcacccggaatttgatgaacgcactttgtttgtgccggaacattttttgaagagccaaacgccgggtaaaaggaaaagccgcttttgagaagtcaaatggtatttagggcacagacaatggtggaagctcaaatctgaacattttgatacgattattttcttcaaaggttaaaacaatattttttctttcaaaatattttaattatttagtggggaaattctacgaactgtaccatatggatgcggtaaaatgatgcttttcaatttatttcactggacacacttcctaattaggtcgtcgctgtcgagaatcttggtttggtttatatgcgggttcgttttccgattggactcacttttttggtttatatggtgacgttttactatcttttcagggcaaatacgcacactgtggatttcctgaggtagggaataaaagtgctaacccttgttcatttgcctaattcattcgtcagattggttatggcaaattccccgatcagttggtcaaccggggcttcaaagtggcacgggtggaacaatcggagactccagcagcaattggcttcatgacggaacaaagtgacggcgagtcaggagaa

SEQ ID NO: 31098 - DNA, 1481 bp, Heterodera glycines
  unsure (1)..(1481): unsure at all n locations
gtttcgtcgtccagacgaaattcgacccattccattttgcgcccgcgcgagtgacccagcacatacgccctgttgccacgccacgtgccatggggccgaagttttgtttttgtcctaaatttggagggaaaactgtttagatattgaattgcaatgcatttttcnccaccttgcggatgntactcagtgcgcaacggcaatttcgtagtgcgaagcgccggccaaaacnggtggcataactctaaattggaaaagcaaagtgttatttcgatcactgctcccccctcccatccaatttctctccaatcacttatttacctttctgttggtcgtttgcatttcggtcactgtcagccgcgtccccgtcggaatgcgcaagagacaggctcggtgccgaagtgctaacgaattgttgagacggagcacggcatcggtcgagatgaaagaacggtccaattgggtgtagcagtcgacggcgataaaagagacctcagcggacgagcccgaatgtgaagcaatgggccactcgaacagctaaaaaggggatttttgattgtttttaatatgctaattaggcgtttaattactcgcaaatcgattttcggataattctttcggtcgaacggcgcggcggcactgtcagagccggtacaaacagttgacgggagaagcacaacggaaaggaacggcatcagaaggacaaagagagatgagaagcgatggaagagaggggccattttttgaattcgaaagaaaatttgagggaaaattggaaaagttttttttttgctgaagaaatgaagctttattagtatcagaaaagccatgagaaaagagatgagaacgcagcatcgaaagaatgaaagagcggatgactaagccgaaaaagccattttcagaggcggggattcactcacagcgactaaattaacaaagtgccatttgtccatggcatatttgttggctaatttttggaaatttttccggtgaaaattgtttatttgaaaaggattaagcccaaatgacagttggatgctgtcatctgctgaatcgagactgcaattgggacggctatttatgcggttcagatggggcgggacaaaatttgtttttgcaccgtctgatgtccaaaaaagtttggacacggatggccattggacggcgcagaaaatggggcgggaaaataaattaatccgccaattaaagccgagagtctcgactcccctccgcctcccatcggccaaagaatgaatcagctcctccaaatttagcctaacaaatggtcgcaaattggcacgtccccctgaaaaaggcatgtgaatgcaactttttgcaaatgttgccatatcgggaagacattagccaaagcaaatggaaaaaataattaatgtgaggagagaatattttggtgatggaaaaaaagaaacagtaaatactgtaatgatgatgaaagaaaaccaccaattcttaatcaattcagc

SEQ ID NO: 31099 - DNA, 979 bp, Heterodera glycines
ggaattcctattactgctgagcagaagaagagataatagccaattttccaaatttttcccaaacaaccgcgccgagaaacaaattccagaacaattagtatcggcgtaattattctgagaatgcggttggaattcctattactgttgagcagaaaaagagatagccaattttccaaatttttcccaaacaaacgcgccgagaaacaaattccagaacaattagtatcggcgtaattattctgagaatgcggttggaattcctattactgttgagcagaaaaagagatagccaattttccaaatttttcccaaacaaacgcgccgagaaacaaattccagaacaattagtatcggcgtaattattctgagaatgcggttggaattcctattactgttgagcagaaaaagagatagccaattttccaaatttttcccaaacaaacgcgccgagaaacaaattccagaacaattagtatcggcgtaattattctgagaatgcggttggaattcctattactgttgagcagaaaatgagatagccaattttccaaatttttcccaaacaaacgcgccgagaaacaaattccagaacaattagtatcggcgtaattattctgagaatgcagttggaattcctattactgttgagcagaaaaagagatagccaattttccaaatttttcacaaacaaacgcgccgagaaacaaattccagaacaattagtatcggcgtaattattctgagaatgcagttggaattcctattactgttgagcagaaaaagagatagccaattttccaaatttttcacaaacaaacgcgcagagaaacaaattccagaacaattagtatcggcgtaattattctgagaatgcggttggaattcctattactgttgagcagaaaaagagataatagccaattttccaaatttttcttatagcaaacgcgccgagaaacaaattccagaacaattagta

SEQ ID NO: 31100 - DNA, 1491 bp, Heterodera glycines
aatttcagatcattgaacgagccgattggacagcgatgaatttttgtggccaattgtttacggactgtccaccaaactcggatgaaatgcagcaaattttgtcttcctttgagttagccaacaaattgaatggaagagcggcgaagagagacgaagaaaacggaggaggaaatgatggcggaggaggaggagggaccggcaatttattggaatgaccaattaattagaaaaaaactaacaaaaggcatcaacgccaatgtgtattttgctttatttaaatgcaattttcctctgtgtcacaaagcataaataatttgaaaccaacaaccatttggaatttatggcaatcatcaagaattggtgtcccgacgaaaaaaaatgttaaaattttgcaggtattttttctaggcttgaaaaatgcgcagatcacgaatctgagctcagattttgaaaatcattgatttttatctaagatttttcttcgactacttgattttttccaaaattttaagaaatttagtcgggcgtaaaaactcatgcgcagatgttgtagagactaaaaagagctttcgaatgagctattgaatatataaagaagtcacgttttaaattttttacgattttttcaaatccaattattaatccctaggggtcagatgagaaggagaccttgggttcgagtccgtttggctgcggtttattttttcatgacacttgatgaaaaatcatagacaaaatgaaggttcatgcataatcagagctcagattcgtgatcagaatattttttaacccaaaattcattgctaaaaaatttttaaaaataatttaaaaaatcgaaaaaaatcaagtagtcgacgaaaaatcttagataaaaatcaatggcaataaacctgcttaattatgctataaaatgttaaaattgtccccgaaaaaacaatttttgtcctaacaagggaaaatggaattttcattcattttttgcgcggcaatttttggcgcaaattttggtgtttttgatgtcaaaaaatatgtacctccaatctctaaagaccatagtttggattcatttcagtttagaaaaaattccacaaaattgatcctcagagaagaaattttagccagtctgtagcaattctcatccttttgtcttaaaagtttttcatttatactattatactgtattttgaacacaaatagaagcattttggagtcagttcattataaaccgaaaatacaagcacatttaattaaagaatggagggagattaaatgaaattggggctttaaaatgggtcggggtcactttggcgcgggccattttggcgccgcgaactttaaagtgttataacttttttcttatccaaccaaataaaaataattttgataccattaaataggcctaagtgttccttattaaactagcacatagtatgaaaaataaattctggttcacaaaatatatatcgcgcggtgtccaaatgtgcagaaaaa

SEQ ID NO: 31101 - DNA, 1040 bp, Heterodera glycines
aaaaagttatgtcgtcgatcgtttgaatatcccatttttcagtttgtcgtttgtctctgtcgtgtgaattgtctccaatcacaattaacataatctaccgtaaatttgtcgtttgtcaccaaaataaagttgtttttggctttgaacaaataaagatcgattgcaaaatatttttgagtaagggggcggagaataaccaaatgataaacaaacttatgctcatatgaaagcatttaatcatccaaaaagtacttttgccaatttttgtcacataatgtcttctcgtggaaccaatttgggtgccgatgaaatgttggcttttgcaaaggtagttagatccaaaaaatttatcccagcgaatattaaggccgttgaaaaaagacacgaaactcttttcaatacgacaagtgggccggcatttcggaaaatgatcgacaatttgtgtacggaaattgtatttcttttttaactttgtgagttaaaaagacaattgatctgatcacaaatcattgaaacgacgaaaggcttcgatctgtaaattgattcgatttttttgcgcatttatatcagcattttcagctagaggaggagcgcgtttttgcgaatgaactaaaaaatttgttgaaaaaaagatgcgtggtatcattaactcataaaataatttttcgagctcattcacgcagccttccttcattgaaataaggtaatccgttccaacatatgccgaatcagcaagtaaaacagaccccggaaatggacgccaaccggcctcgaaacgcagtccaagcgttttccgaaatacgcgctggtcatgaacggcaccgggaaattttgcactaacaaagagaaattttttgccttaaggcaaaaaattaaaaatggcacttcagtcgttaggttcgcacctccatcggaaacagccaatacattgagtgccgtccgtcgataacggccaatgaaatggcactaaagtggtcggacgattggcacccgtcggtgaaaatcagtctaaaaaccctattttctaccataatttgcaa

SEQ ID NO: 31102 - DNA, 1218 bp, Heterodera glycines
  unsure (1)..(1218): unsure at all n locations
aatttatctatatccaaagaaaaatgactatctcttattttgagaaattttacgcgttacaaaagcgctcgagcgtgagagggagggcggtgcgcaatcgnccatttatttctcagagaatttttaaatttatcttatatccaagaaaaatgactatctcttcttttgagaaattttatacgttacaaatgctctcgagcatgataggaagtgcggtgcgcaatcgccatttaatttcacagagaatttttaaatttatcttatatccaagaaaaatgactatctcttattttgagaaattttatacgttacaaaagcgctcgagcgtgagagggagggcggtgcgcaatcgccatttaatttcacagagaatttttaaatttatcttatatccaagaaaaatgactatctcttattttgagaaattttatacgttacaaaagcgctcgagcgtgagagggagggcggtgcgcaatcgccatttaatttctcagagaatttttaaatttatcttatatccaagaaaaatgactatctcttattttgagaaattttatacgttacaaaagcgctcgagcgtgagagggagggcggtgcgcaatcgccatttaatttcacagagaatttttaaatttatcttatatccaagaaaaatgactatctcttattttgagaaattttatacgttacaaatgctctcgagcatgataggaagtgcggtgcgcaatcgccatttaatttctaagagaatttttaaatttatcttatatccaagaaaaatgactatctcttattttgagaaattttatacgttacaaaagcgctcgagcgtgagagggagggcggtgcgcaatcgccatttaatttctcagagaatttttaaatttatcttatatccaagaaaaatgactatctcttattttgagaaattttatacgttacaaaagcgctcgagcgtgagaggaagggcggtgcgcaatcgccatttaatttctcagagaatttttaaatttatcttatatccaagaaaaatgactatctcttattttgagaaattttatacgttacaaatgctctcgagcatgataggaagtgcggtgcgcaatcgccatttaatttcacagagaatttttanatttatcttatatccaagaaaaatgactatctctttatttgagaaatttatacngtacaaatgctctcgagcatgataggaag

SEQ ID NO: 31103 - DNA, 1183 bp, Heterodera glycines
gtaatcttttattaccttttgtcgtaaatcacaaatgggaccacaattcccatgcaaaccaattgctggagttcggcaaaagtgcaaggattgcaataaaatgttcttcaataatgattgctagcagtatcatctttcttccaacttttgtcaaatgagcaaagagtgcaaatactgtggcgtcgtatgggacatgcgtaaaaattgcgataatgggagagaggtttcttttaaaaatttaataatagtttaatattgtaatagggtcacaaatgcaatgaacgctggtgtgaaaattgtcaaatcttccacgaatttgagcggggatgttttattcgcccattggagccgaacaagaagaaagaaacaaatgggtggcgccttgtcaccttcgacgttgaaacaatgcagcatgagcctgcggacccgcatttccctaaacgaaagaagcatcaagtgaattttgtcactgcaaaagtggcatgtccggattgcatttcgaccggaaaatggaaagaaagccttcttggaaaattctgcaaaatctgcggctatcatcggacaataacattcagtcaaatgccgttccgtgagacaacggtcgacagacaaacaattgaccgccaccctcttgttgcattcgttaaatggcttctctacaaacttccaaagcaatacgaaacaattgcctattcccatttcgggggacgtttcgacatggtcttggtctttcgggaacttttcatggagggactgaacccctcaatgatcagaaagggaaaccgtctgttcgagatgagggtataattttccatgtgtttatttaatcattttcccatctcaggtgaaaagcagaaagaacttaaacccgaatgtgacatttcgtgattcttggaatttgattcctggaccgctcgcctcaatggtgcccatgttcggcttggacgtgcaggacaagcccttctttccacacatggccaacaaacctgacaattatggatgccaaatttttccgtcgaaagcagattacctggccgacggaatgaaccagagaaacggaacaatttgatcaatggtaccagcaaaacaaaaatatttcgtttctgctggatgagtcattggcaaggtgattatgaataaatcaattttgataaaataataaaaaattaagctattgcaaaaa

SEQ ID NO: 31104 - DNA, 1654 bp, Heterodera glycines
  unsure (1)..(1654): unsure at all n locations
accagaaccgaaactatctgtatggatggatgacaaattctttacatttccattgcccgaccgnccgnngcccagcaaaattttctttaagaaccttcggatgtggtaattaaaaatcagagctatgacaataaaagcattcattccattttcagttacattgatcactccgtcatcgcttttcttcgttcaaatcaccaaattttcgacaaaagaggcacctatttatatttgtggattccatcaccacacaacacggatggccaactaatttgggacatttttggtcgtgaaatttggccaattttttctgaaaacattcgccacttgggctttaacgatggtgttgatttggacaatttgcttcgtcgcacttcgccgacaattctcaccgatctcaaccaattgacttcaatcgattcctgtgatttgtcgcccgaggcgattggtggtgattttgatgggccaaatgcaacaatttctgctggccaagcattgtccaaatggttgcactctccgagaaaagatggacaacccaaacgattgcgttgcgatgattacaacgaacaaacggacttagattggattaacaatttcaaggaggtgtggccataatctcgaaaaatcactgatttttgttttcaaattgtttagcattttctccgtgccaatgccatttcttccgtcagttaccaaattcattttgctgttcatgcgctgtcaatacaaattgtgccatttgaattggtgaacgaatggacaaaggaaaagctgacattggccaaagcaaagggatgggacaaccgatggataatgaaacgatgcaaaattattggggagacggcagcggtcaattgggaagacggaaattgggacaacaattgtaacagtgtcttcgtttggctttttcgtactgattgcatcgggtgagcaattaaaaaaggcatttaattttgtttaaataattaaaattttgcctaatttaggccattgtctccgccaccagcagaagaagccggacaaaacatcacaaaagggccgtcatctgaactgacaatgagtgatggacaaacgaacaaaaacagtgatcagccgcagaaggaatgaatgaattgagaatgatcgaccgagcataattcaaatcagtgatcaaatgtatcttataagaaaaaacctctcaaatatgtatatgtaaataaatcggatgcataaaaatggcaaaaaatatacgaaacctaaaaacaaaaaaaaaatgaacaaaaaaaacaacttgttttttgtgcgttttaacccggcaacttaatttgaattgctagctaaatatgctggataaaattcgggatcattggtcccataaaaaaggtcaaaaatgctcgttttgagcgatactgcaaatttgaaaacttggaattttcgtaaaaggttcgaatggcatttattttggtctagtacttttccatttaaggcccacatatttanatttcaaaaaagtcaataaagagttcgctaaatatccaaaaacagcgctgcagctattcgtgaggcataaatgcaataatttaggccaaaaatcatcgaatggagtccgtttgggattttttcagtgttcacgctanatgaattcgcacaaataaaaaccccacatttgacgaaa

SEQ ID NO: 31105 - DNA, 1253 bp, Heterodera glycines
  unsure (1)..(1253): unsure at all n locations
aatgtttatgcgttttcagaatatttggaaatgtttctttacngacattccagaatttttgttttatatgttttcagaatgtattattgttttcatagtttgtgcgttttcagaatgttttggttaaagtttctccctntatcacaatgtttgtaatgttattcttttatgggttttcagaatgtttggaaatgtttctctttagactttcccgataataatgttttcagaatgaattattaattctaatggaattattaattccaatgtttatgcgttttcagaatgcttgtaaatgtttcattaacgacattccagaatatttgttaattaaaatgtttatatgttttcagaatgtattattgttttcattgtttgtgcgttttcagaatgttttagtaaagtttctccctttatcacatactcttttatgggttttcagaatgtttgaaaatgtttttctttaaagattttcccgattattaatgttttcagaatgaattattaattccaattttatgcgttttcagaatgtttgtaaatgtttctttaacgacattccagaattttttgttttatatgttttcagaatgtattattgttttcatagtttgtgcgttttcagaatgttttggttaaagtttctccctttatcacaatgtttgtaatgttattcttttatgggttttcagaatgtttggaaatgtttctctttagactttcccgataataatgttttcagaatgaattattaattctaatggaattattaattctaatgtttatgcgttttcagaatgtttgtaaatgtttctttaatgacattccagaattttttgttttatatgttttcagaatgtattattgttttcatagtttgtgcgttttcagaatgttttggttaaagtttctccctttatcacaatgtttgtaatgttattcttttatgggttttcagaatgtttgaaaatgtttttctttaaagattttcccgattattaatgttttcagaatgaattattaattccaattttatgcgttttcagaatgtttgtaaatgtttctttaacgacattccagaattttttgttttatatgttttcagaatgtattattgttttcatagtttgtgcgttttcagaatgttttggttaaagtttctccctttatcacaatgtttgtaatgttattcttttatgggttttcagaantgtttggaaatgtttctctttagactttcccgacttctagag

SEQ ID NO: 31106 - DNA, 1215 bp, Heterodera glycines
cttatgctgttactaaggctacttttagcggcacatctcttttttgtgcaacccttattatcagtgagattaaacacaggattagagaaatgccaacctagcaaacgaagcatagcatagctgaagcccctgtggaaatcgctgttttgcaatttggattggtgacaacctttgtagatatttttatccgtttacactaatatagcctttcttggcaaattctaaatgctgtgggtattgcaatacctagaagcatgaactcaatgttgccaaactagatcggaggaagcctcgcaatcttctgaaaatagttgatttctacattttctagtatgtcatcgtaacaaattgaaatactgatgcattgtagacgcattcgatgccaaaattcagcccatctacgtgtgcagaaagtcaagcttcctttctgtaccatgtttttgtttcgaaaatatttccaattttgtttatgatgaaatagacaatttacaaaattatagaaatatattagcaccactacagtaccacaaaattctttcgtaaaacaccagatcaactgaaaagtctgatcgctagaatatgtagctttctgccatatgagagaaatatgaaataatggtaggagggatgttccaataacatgcttatgctgttactaaggctacttttagcggcacatctgtaatttgtgcaacccttattatcagtgagattaaacacaggattagagaaatgccaacctagcaaacgaagcatagcatagctgaagcccctgtggaaatcgctgttttgcaatttggattggtgacaacctttgtagatatttttatccgtttacactaatatagcctttcttggcaaattctaaatgctgtgggtattgcaatacctagaagcatgaactcaatgttgccaaactagaaattcgtaattgaaactctaaatgtttaataaacataaaaaaatatacttaggatcattcaatagcccttaaaattttcaatttatatcaagtttccaaaaatttcatagcattatcgatgtaataagtagggagtccaattatatgcacatgcatatttttttcctggactgtgggaggcctgaaacgcacgaaaaacatgtttttagcttggtttgaagcttataggacgtatttccatatgcatattttgcatatttgtgcatattttgagatttatgtgcatatttgca

SEQ ID NO: 31107 - DNA, 1007 bp, Heterodera glycines
tttcccagcaaaaaataaaaaattaaatatttttattcgacatttcttcccatttctgtcaaaagtgtcacttcttttatttttgtttcagtcggccaactcaaaaaaacccatgggaataaattttcagcagttttgagcagcagtcgcccctttcgtccgcatttgttacttttttgggaacggaataaaagttactgtacaaagagtaagtggcaaaaactgtaggggatacggtatttcatttaaaaacagaattttctttgagtgtttcttaccgccgggaacatcgaaagaataaatgggcaacaatagaaagagaatcgacaacagcaaaagtggccaaactgtgccgacgattggccaatgccaacccattcttggcattttgttcgcttatctctccgcccgttcaaaaacacttcgctttcgtcccattggtcaaaacatagaaaaaatatgcgaaaaaataaaaaaaaatagaatatgttgcagtaaatgatgccaaaaagtaatgaaaaatgtgcgcaataagcggaaaaattatgcacaaaaaaaagttattcgaatgggcgagaaaattcaaaaaaagaggagggaggggggaggggggaggagtaaaattttggaaggggtgccaatggcatggaaaaggcattcattggcactttgccgctcaatagggcggacgaaaagcattccccggggaataatttgggagaaaatgatggaaggagaggaaaagaaggcggaaacaatgggcgatgggaaggagagaagggggcggggggaagtgaagtgtttaacggccggacgaagaatgaatgaatgggagggaagaatgatggcggaagaaagttcgagaggggggggggggagggagaggattgatcaacggaacggagatggatcgaaatttttaaaaaacattcaagacacaccgtaagagagagagagaacgaaaggagtgatcagatgggggtgatcagtgatcaaagaggaatgat

SEQ ID NO: 31108 - DNA, 1306 bp, Heterodera glycines
ttgcatcaggtatacaatttccccatccccccccccaaatcattttggctcacaggttttgccgcccgcccaataccagcagatatctgaaacatgtctctatccttggccgattcaagcattttccgtttgatcagatccaacttttttctcggcccgtagcacaccatgttcgggatattggcatgttaatgcctaaacacctcaaatcctttttttatataactattgactaaatttttaaaaaatcgggatgtgaacataaaaatagccatggataatttgcttactgatttttggctcataaagtaagtgaattcattagagcccgccggcggggagaaatcggaaaaatacaaaaacatttttaatcccatggatttcgttcgccctctcatcgatggagattttgtttttgttttggtgttaatttacttagtttattattattgttattattattttaattatattttgtttgtctgtctttcactctcctctttttgaattgtctctcgtcgatcccgcccccgagagtctcgaggcgacacaaaattcattcgttgtttattgatccgtggagaatgaattttttgtgtgatcgagaagcatttgcattttatgacccatttttagcggcttaacaattccagcgcccaatttatttattacatttgaatttgccattttatctgggctcagtgtttccggaacatacattatggaaattagtttcaaggacgtccttccgttagcattcaaggacaaagctgagcctttttttataatattcatttttgtttatttttaattctaattttattgtaataaaattcattaatttgctcaaaaattaattgctttaagttttggtaaatgccatcatttaaatattattttggcaaaattgtgccaaaagctaataggatgcttatttgatgctgctatgattcacccaacagaaaaaaaattttttatttttttggcaatttgcacatgattttaattctaattttaaataattttttctttttgaaaaatgcccatttttccacctaaattattccttcgcttttttggaatcgatccggaattttttttttttttgcaaaatttgtcatttcatagagtagaagactgaagaagcgaatgctaattaattggatttcgaattttgttgccaaatttttactttttcaaaatggaaatggaaattgttaaaatgaatgaatcacaatttacaatggaaaaccgaagaaaatgaacagaaaaacattttaaagaagagaaattaaagccctgaaag

SEQ ID NO: 31109 - DNA, 1865 bp, Heterodera glycines
aaatgccaaatggttataccccttgcttcggccgatttcagtgtgaatttggttgagcgttgaaatttgcgttttgatgcttcgctgcgtgtatttggagacaaaggtccagaaattactaacatttatttatttgttaaaagtcatttccccaaagtgggcataaatttcaatttatccctcgatttacccgataaattatctttgagacacaattccaattctccattttgttgctggggatggccgattcgagtgccgtgaacccttgagaaaaaaagcgtctctgagtccatgtatgaaagcatcttcgatggcagtgcgcaatacttgtgacagttcactggtaacattcgattatgcccatatattatttgattcaaacaatacataggaaggcgatgataccaaaatcgtctgtggatagacaaacttgatcctataagcatcgccttctccttatggggtcacctttttacgctttgccattgtaatagcattgtaagggtcgatgcacttcactctcgagccggcgacggacgcgataaagccacaaaagtcggagacaggggcgtaaatttctgcaaattaaatgacgcttaaaaagaaaaaacaaaattcggttataacaagggatgggatttttaggcaaaagcctattttttctgagctccccgtggcctgaaacgcacgaaaaacattaagcatttatccagaaaatcggttctcagttttaacattttttgtttttaagtcccaaattaagttttataatgaacattttaaattattacctgggttgttttgtcggttgtttccacgtctgtacatgctcaatattccctgagcaaaataaacattgctcggcagatggccagtcaatagtgccgcaccagaatcaccatacaaagaatttgaatattagttttggaattttgtctattttaggaagagtgtcacgggacagggaatttttgccaaaaccgggtccgggacttgccgggacctgagaagccgggaccgggaaatttccaagtaaaaatttttttgaaaaattgaaaaatccaaaaaatttttgtatttaaatcgctcttaaccatgcaaagaatttgaatattagttttgtaattttgtctatttttgaattcggcattttcatgagtaaaatggcggaaaaacgacaaaattaaaaaagaattaaaaattacgttgacttacaattaaagcgcctgcgtttgcagagccagaacagagttttgcattggcaccccattttcttaaaattgaaatttcaaaaaatcataaaattattagattaacagtttgcatatggcgctgggtgataagttgacgacagcatggcgcagtttttggtcccattctgcgtcggcacgctaaaaattgatgaaaaatgtaacaatttattattatattttttatatgttatcatttatttttacatgtagcccatagccgactaaattcccccaagagtccttaaagcggtccagacgtgaagccaaacagacgggttcggcagaaacggtggaactgctctgaataaaattgcttgtgaaaaaaggccacaattttggcaaatgccttgatcagtgcgaaatcgtacgcgtaattttggaacgtgttgtcattttcttcgtaccgtggatcgacccaaaattcgtcgacgtggtacgtctcaccacgcgaacttagtgccaatttgtctgtttcaagtggcacccagtttggcctcttttgtcgtctagggtttacgtggcacaaataaaaatttgtgtacagacaatgggccgatgtcgcaaaataattctcccctaaaagaaattaaacatggcagcacccataca

SEQ ID NO: 31110 - DNA, 1196 bp, Heterodera glycines
  unsure (1)..(1196): unsure at all n locations
tttttcagaatgtggtcatagaataggtgggttgaaattatttgtattttttatgagtattatgtaaggatatttcgaccaaaacataaccatttcgagttcnnatgaggcatcaacttcattcttttcttgtcctgcccaattgtctcaaatgtatacctaaaaatgcgctaaaaatgatcaaacccgtttttagccgaatatcctgtcaatatttccctattagaaacgatactgtgaattctttcgcctctttaattcattcgtgctttgcttcggattagtctaaaaatttcaagacgccaattttacatattagccatttttttttatttgtgaccgcaaatttttacatactagccattttttattttattgtgaccaagcatatctttcctcgtatttctgggatttttttcagaatgtggtcatagaataggtgggttgaattatttgtattttttatgagtattatgtaaggatattttcgacaaaacataaccaattccgagtttcatgaggcatcaacttcattcttttcttgtcctgcccaattgtctcaaatgtatacctaaaaatgcgctaaaaatgatcaaacccgtttttagccgaatatcctgtcaatatttccctattagaaacgatactgtgaattctttcgcctctttaattcattcgtgctttgcttcggattagtctaaaaatttctggacgccaattttacatattagccattttttattttatttgtgaccgcaaatttttacatactagccattttttattttattgtgaccaagcatatctttcctcgtatttctgggatttttttcagaatgtggtcatagaataggtgggttgaattatttgtattttttatgagtattatgtaaggatattttcgacaaaacataaccaattccgagtttcatgaggcatcaacttcattcttttcttgtcctgcccaattgtctcaaatgtatacctaaaaatgcgctaaaaatgatcaaacccgtttttagccgaatatcctgtcaatatttccctattagaaacgatactgtgaattctttcgcctctttaattcattcgtgctttgcttcggattagtctaaaaatttctagacgccaattttacatattagccattttttttttatttgtgaccgcaaatttttacatactatccatttttt

SEQ ID NO: 31111 - DNA, 1934 bp, Heterodera glycines
  unsure (1)..(1934): unsure at all n locations
aaaaaaaccttcgtattatgccaaatcgccgaatgattgcgccaacacacaccgtattattcaccatttgcgaattgtcactgtgaaatttaactaaaatcctgtgactttcttccgcgctgaatttggggatggcccattgttcggcggtttcagtgccaatctgtgaaaatttgagggcaagacataatgccaagaaaataataagaatattttaattaggatttgtgcttttcagccatataaagtccatttttctctttttaatttctctgaaattgtgatttcaaataattttgtcattcaaaattcanagccgatntaaatgaaaagacaaacaaaaaaattctctccctcactctttatctctcgcactctttcgctgactctttctctctatctctctctctctttcttctctcaagtctcatgttattttcacattatctctcttctttcttctctcaagtctcatgttattttcacattatctctcttctttctcctctcaatctcatgttattttcacgttatctctctctctctgttcctctcattattattcctttttctctctgtctctctctccctctttccctattattcatttctctatatcttctctcacttccctcctctgttttttacccatttttccatgtattcctctctgtatgcgttccaatctgcgctgttttcaatcaacgttttgttgttggcgatgtgttcaaggaaacggaacactctgatcagcattgacttgttcacaaactccgccctctgctgctgatccgtcatccctcgctgatcaaattcaaaattgtcattcatttccctgtgatgctccttcaattttgccacttctttttcaaaatccgaccctttcggcgccattcgctccataactttcagtgttttgtgcgcaatgccattcaaataccaaatggagcagtaatactcgaacttgaggatgattagcaattagtaaataaataaataaaatcaaaaaattatttcttttaatcaaaaagtacaaattggcaatttaaaaataaattttttttttcaattgctcaccaatgtaaataaaatgctcatttggcctgactcatttaaatcgcttttcagatattcaattaaaaggcgtttcaacaacgcaagcaataactctaaagacagtttaaaattaaaaagaaaacaatgaaattaccttcgggaatttctttttcgtctttttttcttatttgttcaattgacaaagattttgctggacacgaaacatgctaaatgagaatatatttttttgttttttaggcaaattataaaaacaacaaaagtttggccaagacaaggaattttccctggatccagctcaaagttaaggcaattttctgtgtccaagtttttcaagaaaaaattggattttgtggataaatttttcaaatttcttattgttcttatttcagcttaaaatagcttaatggataaaaaaagaatagttatcgtcaattaaagtttaacagaattttttatatctttaattactttttaaaacaatttcaaaaacccaggcccacttactttttgcttttgctcaatgccttccttttccagtgtaaattcatcatcctcatctccaattattctccaatggaatttattcgcattttcccaattttcctccctttttccctccctttgttcatcatccgctactttttcctgttcttcctttttttgatcattctctgtttcctctttttccttttcttccttttgcttgttcaattctcctccattttggcgcaattttaaaattaatttcggtttatttccttttaccatttcaaaagtgttcaatttgtttaaaatattcgttgcagcattttcattaacaaaatcgagcaaattttcgcgaacctttttaggtccat

SEQ ID NO: 31112 - DNA, 920 bp, Heterodera glycines
tttgcgattttgagcaaattttgcttgtaattaaggcttcttacggtccggcggtgccgataggcgccgccgagggaacttttaaggattttgaccatatttttagcatattttcattaaaaaattctttaaattgccaaacattatgccgatttatcaaaatttaaatgaggattttccccaaaagcctcaaaaatcctcaaaatttctcaaaaagccacaaaaatcctcaaatcctcattttccaaaaaaatcctcattgacctatcaaaaagccacaaaatgaggataaatcctcagatctggcaaccctggcgaaaatatatagaaaaggagaaaaaagaaaacggagatataaagaatagaggaaaaaatgataaaaagagcaagcaaaggagagagagaaaggggaagggtgattgaatgagtgagaaaagatagagaggatcaagctcagtatagggactgtgttatataacccgtttgatcaaaaaaaaacgagagatgaaccaataaatagagagtgcgaagaaaaaaaatatctttttggcttactatttctttgtctctgttaatagagaaatacagaatttacttctctcaataaaactttttctatcaacacaatgacaataaattttgcaaaccaattgataaaaaattacgaacataacctagaaggatttgcttacaaaagggatctcctcatcattagctttaccaagattgtccaatttcgctgggaaaaatcttcaaaaaatttaataaataaaaaatctgcatgttgcgcaacggacttgaagctccgccctttgtccctttatctatcaattcagccaaaaaccgacattttgcggcccaagccaaaattgaatttttgagacctatgaaacgccacatatttttttcatttaattata

SEQ ID NO: 31113 - DNA, 842 bp, Heterodera glycines
ttagctcccgttgacaaaccgaagggtacattgggggcaatggatgttgggctaccgtatcagttattaaaatttttgtttttcaaaaaggatactaaaactgggataaccccattcagagactagtcaaaaaaaataataataggcttggactactatactaattagaaattttagaatgtgtctgttaaatgcaaaactgttgtgaaaaattgttataactcctttcagagaagagatagaaaaaaaataaaaatagggttagagagcccgtgaacagctgcatcggatgcaagtgccgccgttgctgtacgcctaacagttggtgagcaatgacggaaaattgcttaaaaaagaaaccaaacaaactcatcaattgttagctcccgttggcaaaccgaagggtacattggggcaatggatgttgggctaccgtatcagttattaaaatttttgtttttcaaaaaggatactaaaactgggataaccccattcagagactagtcaaaaaaaataataataggcttggactaccatactaattagaatttttagaatgtgtctgttaaatgcaaaactgttgtgaaaaattgttataactccattcagagaagagatagaaaaaaaaaataaaaataggtttagagagcccgtgaacgagctgaatcggatgcgagtaccgccgttgctgtacgcctaacggttggtgagcgaatgacggaaaattgcttaaaaaagaaaccaaacaaactcatcaattgtttgctcccgttgacaaaccgaagggtacattggggcggatggatgttgggctaccgtatcagttattaaaattgttgttt

SEQ ID NO: 31114 - DNA, 1818 bp, Heterodera glycines
tttcctaaaatttcttaaggacttgcgaaattttaatttcgggagcgtgcgcacaagaggttgggttgggttaagattttccaaatgaaaaatatttgtattataaaatgggaaaattttggaaataccgtttaattaatttctttaaaattctcaaaattttcccagcggcgccgatctgcaaggctggaacctcgtcctttagaaatttttcctaaaaaatgtgcgttgacaaaaaataagaaaataaatgagccgaagagtaaaaaaaaaaaaagtctcttgctcgggggggggaagggtgggttaaagctccccgaagccaatggtatggctaagagctcttttaattatgcaaaaaaggtttatattttagtgataatctgttgtaaaaatttaaaaaaatggacccgcctcaccgggcgggttcgaacccacggctccgctaattgtaaatgagaaacatttacactgaaccaacaaactgattaaagaaggaacgatcgattgaaaattttgcactaaaagtttcccagattacctgatcagaatatatttgaagccgacaatttgacggggaagcggagtgtccgctgttggcttcaatttgccattctttcgtatttgcatgccatttccattcctttgccccgcgcgacaaatttcgatggcacccaatgaccatatggcacccttttaaagatcaatattaatttattttgattgctcttactgaagtcttttttctatttttaataaaaatacccaaaaataatgttcttccattgtttgcttttttttcttttatattttgtttagtccttagcttaatttagtggcttttgaggtgaaaatgaggctgaattttttaagatgaggctaattctgtgtctttcagagatgaaagttttagtggcttttggaagaattttttcaagtaattgttaaaataatattttatgttaaaatctgtcaattaaacagacgaaaatagattttacgagattttccctgcggcacagaacgaaccaccggcccactaattgaactcaaagatagagctatttattgcggagaataaaaatgtggcacttttgctgtttagggtccctgaaaaaattaaaaagtgggcccttttgtaggaaccccctaaaactcccataaacaagtaacttttcacgacttatgaaaaaaattgcaaaacaaatggtccatttggaatttttttttcaggagccctaaacagccgtgccgaaaatttaagagattttcaagtcgacatctaacggaccacctgcacattaattgtttttcgggggaattaaacagcaaaaatgcaaaaaattgtcgggtctttccctgcggtactaaacggacaaccgataatttacatctgagagccctttgcataataagaaattttagcacttgctccaataagttaatttaagtttttcggaaaactaattaatttcctagcaaaatattacttgaaaatatctgtccactaatgcgttgaagcggcaattacacaatgccatgccaaggccaagcgaactgtgcccaacaaatgggaacacattataccaaacgtcattgcacacatttcttaaatgccaatttttaatggaatgtgccaacttttggaaaccaaaattaaattcatttaactcattatcattttcaattgctaattacccaatttggtttcaaaaaaaataataaattcattaaaatatttaataataattacaatgctttcaagtgtctcacagcttcccgaggatgatccgacatgttttggtgtgtcgataagtt

SEQ ID NO: 31115 - DNA, 1225 bp, Heterodera glycines
ggggctggggggaagggtggggagccccgcatgttgtggtacacgcatcgattatggaagccgcgcatgcactagcaacgaagtcctttgcgcgaagcgctcatgtaatgcatattcttttcatctctcacaagtaaactgtctacaccgtgcaatcactgtgcaaagcatactgtctacaccgagcaattactgtgcaaagcatactgtctacaccgagcaattactgcgccacaacacgctagtttagatataactaaagaaacagatgaactcattgctaaaacaaaaatctcgggaaccgctggcgggggggactcgggatttcgaccttgggggcaacttttgacggcgcatccaggaaaactataggcattccggtccgagggccaactgagcgccagcggcgctgaaacggcttttttaaatttttttttgttgtttttgggattcaaaaattttttaaagtcttaaatgaaaaatcggcctcgataggaaatcaagttgggaggtttggcacatctttttgctcttcaccgacctcgtagggcctaccagtttttccgaaaaactgcgcaaaaattgcatacttttttggccatttcagcgccggccgaataactcgccggggtttgaccggaggaggtcggtgtaagcggcttttttgtagagctcgacgagctctatccaaccatgtttttagatttcagaaattttcagaaattttcgaactaggccccctcgaaaattttccgtttttgaattttattattttttacagatttttccagcgaaaacggagaccactttcaagcaaccgtttttcatgctctatcgattggtgtcattttcagaaaaatttttcaaaaatttttttggaaatagaaaatttttggttactaggcctcaatttcagttctggcgcaataactcgtcaggagttgattttatcaaaaaatcgtctaagagcttttttgtagagaattttaagcccaatctaatgtgctttatctcatgtttataccatgagtttaaaaaaagttataaaattaattgtgattttgaaactcaaaaccataggggggaccccatggttttgcatttcatgaaaatttttttgctcctaaattagccaaaatgcatttttatggcataatttgaggtgctgaatacgtatatacgctttattttgcgtttcagacttttggaaggtggtaaaaatttt

SEQ ID NO: 31116 - DNA, 1120 bp, Heterodera glycines
  unsure (1)..(1120): unsure at all n locations
ttaattcctagggtgtaacttaagtttccgcacactttttttaaagaatttttttaagaatataaatttaaaaaaccacaatcatgatccgaaatatctgacattattattgagaatgagtttgctatttatcgggcaagggataaatcccattagaaaagtatttaaggagttagagttgataatgtaaaaatggtcattttcgaggtatgtatttttgatggctgatttaaagaaaatgaaaagagatacagaggcagagaaaacgtgagtaaatagagcaaagttaggactataaaaattataagaaaaaaattttattacttcaaaaatgaattattggagggccgagtctagaccatcaaataacaaaatgttttaaaagtggttttggaaattccgaatttaattaagctaagtaaattgaccacgctgagtccgaatatggctttagatttggtctctgggttctcaacaaacctgtacagctccaacttcatgcatggagttggagcagtacaagctcagggttaaaagataggtcagatttaaggccatattcggattctactggtctaatttgtacagaaaaccttcttttttgttatatcaggttacttttttgaccataaaaaattcgagaaaaattagtgggccaattttcaatttttgcatggtcgggaaaaaatactaaaaaaattgaataagcaaataaaaaatgaaacaatggcatgaaatgaaagaagactttctgacgaacaaaataaaaaaaagaattattaaaataactgcagaaattacggagttatgaatttttgaatttgtcaaaaaaaatagagttgagcgggaacttatgttacatcctaagtaatttacagaaaccccaaaaattggcatgcatttgcctgttccgctccatctccgccccattgtccgctttctgctgccccttcgccttcccccgctgttgcgttgcccggtgcgtcctccgctgctgttgaacaacaacgcgtcgttccgcttgcctcctcctcttccgccaccgtgtcattttcactgtccctcggttgcattttcgtggtcaaaaaggtggagcanaagtttggccgaacaccaacaa

SEQ ID NO: 31117 - DNA, 1842 bp, Heterodera glycines
  unsure (1)..(1842): unsure at all n locations
taattaaaaaatgttaatatttacgaattgtggcataaaaaatgctgtgattatttatgattctcccgccagaaatttntaaanaatgtgatnntatatttctctaaatgcagggaatttgtgtgttttaatcacaaatcaacgcaaaattgatgtgccgccaatgcatggcacaaatgttgtgccgaattctttgaggaaatgtggcatcaatggttctacaggcatagcatttacacgaaaagtgatagccaattggaaccgcatgaagacgataaaaaaccgccaaattttaatgtgatgccaactgagcaaatgctaattgacattttcgaggcgttaattaatgaacgcaattggggccaattaaagagacaaaaattagcgatcatttacaaaattggcaacgtgttggagcgagctttgcatgatgatccgatcaaaacattgaaatgcatgcataattgtgaaggttatggaccaaaaatgatggaaatggtcaaagatttttgtgaaaaagattataaccgaaaatggacaggagaacaccaaaagtaatgaatgtgacttataaagtgcaaataaaattttgttttatttatttaaaattcaaacaaattgatctttggcatgctggcaaaaattggcacaaaaaaaatccgcgaattgacattaaataggcacaaaaatcatacaattttttatttatgccatttagtagcaaaacacgtaaaacttaatcaaagcacttaattttggttaaatttcaaatttcaatgaaattattaaatattttagagttttttcagatagggacaaatttttaaagcaaaaattttttatcaagaaaacaaaataaataaataaattttggcgatcaatttttaaaaagtcaattctcagggatgtgtattctgaaattttttcgggccatttttgtttttcgtgcatatctgagcgtatcaagtgtttagaattagaaattcgatccttaaagttttgggactaattgctgcctgccgagatttgtgaacaaaatttttgaaattttccgtttctgaatttagaataactgaatttttagcaatttttttttagcgtatggcgcctaatttgcgacgtttttatatgggaaaattggctgtttaattacccaatgctcacagagaaagatttgaaaatgtttcatgataaaatcttaaaattggttggtcgcctggagaaaaaagtggagaaaaatactagttggattgagatgaatgtggtggacaaatctgtcctaaatattatcggccaaattctggtggcaagagtcagttcattaaatgagaaatttaattaattaaaaaaaataatattcaaatttaatcaaaaacaaattttttaaatcaaaaaaaaaattggatgaaacctaaggatgcctttacatttttagatcggaataaattccatatttcatatatatatcaattaattatttaattttatcaatgtataatatttaggtgctaattgatcatagtagcaaaacattcatcagttttgttaattacaatcagtcgacaatttgcaatttttgtgccaatcggacatcacaattttctggatgggagcacatttgtgtgtacaacatgtggctatttgtggtgggagcattgngcaatggacaggngcgcctaattatcatatcccttttctcaaaaattgatcgccagaatctaattattttataaaaaatttcatgcctttttttcgggattttcatcccttttttttcaattttttgccgcctattattgtgccttttttcgagattttgtgataactgcttaatcaatctct

SEQ ID NO: 31118 - DNA, 1210 bp, Heterodera glycines
  unsure (1)..(1210): unsure at all n locations
ttgcttagaattgataataaantttgttataaaaaatcctctttctttaatattcaagatttgtatttattaaaccaatttttatcaaaaaatttaaaaaatacttatacgtatacggatccgtattttttctggatacggatttttacggactacggattttccgtatttttagtccgtaagtacttaatccgtatcggtgtcaggtacgtaatactgatacttatccgtattttcgcaaaattccgatctctagtatatagtatagtattatagttaatgaacaaatgaaaatagaattaaaactagaaaaactaatcataaaccattgcaataccaaaaaatcaacattctgcacaacaaaagtgaatttaaaaaattacaatttttggttttttgaactaatttgggtccggtgtttgaaattggcctaaatgaaacttaggaatgcaaacttttaaaagaataatcttatatatgtatgtgtgccaaaaaaaccaccaaaataattgctaataaacttctaaaaactccaaaatatatgccaattaaaacaaaaggtgcttaataaatatgtgagtttctcaaaaaaaaaaaaaatcattttcatttcgctagcacaatgctaatcgaaagaattttaggacatatttttttacttggttaatgcttacattcttggagtatcaaacgaaatcttaaagtcccggaaaattccgaacccaatttcgaacaaaaaatcgaaaatccaaatgtttgtttttcagtttcgcctatttttatcaattcaaaaaatgtcgcacaatccgaagaaagcggaataagaaatggaaaaagcaatttaaaacaattattctaaatttcaaatatcttgctaatccttttccgttttcagcttcatttctgccgactgttggctcgaagtgttcgatttgcttccgccctttggccttggcattgcgatgatttctgaccgatttgaccgcagagtggacgaacatttcaaaacgcgtggcttttttgacgccaatgttgaaaaatctccaaaaatttttaattttgtctttctttgtgcataattataagccattttctttcaaagtaccatgctaatacaattgctagcaatgctacagaattttgatgcctaattttaacttttatattttggttcaaagttactattcacagggttttcgagggtgttgat

SEQ ID NO: 31119 - DNA, 479 bp, Heterodera glycines
  unsure (1)..(479): unsure at all n locations
tctagagtcannagtttattgtgggaaaaaaagactttttacaaaataataccttttggagaagggagtgggaaacatgatttcgaaattttaaattttttgtagtctaagctactcaaaccggttcagaattcaataaaaataacattcacggtgcgaaaaatggggtatgaaaagtttattgtggaaaaaaagactttttacaatattatacccctggtatatgggagtggtttatatgtttttcattttttgtattttttgtattttaatttgcttatttattttttaaattgtattagtagtagttttgttcttgttttttttgtttttttatttttgtttctttttttttttttttttttttttttttttttttttcttttttttttttttttttttttttttttttttttttttttttttttttttttttttttttttttttttttttttattgttttttttttttttttttt

SEQ ID NO: 31120 - DNA, 1133 bp, Heterodera glycines
tagagtagagcgggaccgggaattttgggcaaaaccgggaccgggacttgccgggacctgagaagccgggaccgggacctcgatttttcttcgggaccgggaccgggaaccgggaccaaccgggaaattttaaaaattcaaaaaattcaaattttaatttatttcaagtgaaaataatacaaaattaaattattattttttatttaataaaatccgaaagttaaagctaaattaaattaaagaaaattttcaaatcaaaatttcgtcaattattttaagcaattaatcatttgggctaaatggtcgaatattatttgaaatttagatttacttatcacaccacttttttcggcgcgctttttccagaaaacttttgggaagaaaggggttcggcggtgccgataggcgccgccgggggaaattttgaaaatttaagtgcgatttgatacagattttcaacaaaaatggcttcttttttgggattattaggctcaatttgtatggattttctttaaaaaaatgataaacatgtgtcctttaaaagaaaaatataatgaatcatatttctcgataggaaaccaatgaatatacaaaaagaaaattcaaaaacccccgccccacggggctcgaaccctaatttaaatatgcaaagtacaaaagcgcctcttttgtccacaactcaaattacacctaaggtaagggaggtcattaccactgaagcaccaccaattacaacaacgcaaacagtaaaaattgagctcactacgaagccgcgtaaaattgagccaaaggttaaagtggaaactccaaaatccttctccaaaggcattcaatttaaaagagtaataaatgaacaacaaatttacaaaattatgggaattaggaaaggcacaatcctgactactacaattccatttataagtacaactcaagcaccaaaaattacaaagccgaccacagtaagttcagtaacggtaccaaccaaatcaagtcaaaatgtaaaaacgactatgaaaccaagggttgatacaaaattaccgtttataaaaactacggtaaaaccaacggtaatagtcacgacaaaaaagacttctaaaacaatgccagtaaccttggcaccaaaaacgagaaaa

SEQ ID NO: 31121 - DNA, 1458 bp, Heterodera glycines
ggcagccgaagagaaagggcgtgtccgaagggagggaaagaggggagaggcgaacagagacggcgaaatgaagccgaattgctggataatgtgggaagatgacgccaagggtagaaacgaaatcatgccgatttgcaggaggaaaagcattgccaaaaaagggaattaattgctaaaaaaagcattttgtttatcggaagtattcaaaaccaactttaattttcataggaattttacaaaattttgactttgtaaaaagtgatgtgggaggattcttggccaacggggctgctccatcggtccaaccgccgctgccgaagagagtgacccgcccaaagtcccaaataaatgcattcggtggtaggaggggagaggggggcggggagacgaattgcctctcatccgtcctcttgtctgcttgccgggcaataatccctcgggacgaccgaaatgggatggatgagacggggagccgaatcaatgtgagcgggtgcccttcaccgttgtcaaattcgtcaatttgggagaaaagtcttccctttgctgtagcggcatgacttaccgaccgaccccaaatttgaaaggagggacgtcggcacggcatggaaaaagggtttatgagcaaaaagaaaatggggacgttcaacacgtgtatcagcgatgagctatttcaaaaaaccaaaattcatttcaatcacttgagcatttttcgagactaagcaataaaaagaagtgatgttcgagaaaaaataaataaaaataataggtgggggggggtcactcattttacaacccgcgaaagaaacagcgaaaggttggacgaacgaatgggtcctttgctaaatatgcacacaaaataacaactcggcacttcccttccctgccaatggccttccgcttggccgagaacagctcaacccgcacttttggctgtctttttcacgccgttattgacctaatgtgtgagtggtgtcaaaatgaaactgggcggaaaataataaaaaagaaatttgaaaaaccaacagaaacagagaaatcttagtgattcgagtgaattaatggaggatttattggtccaatggacaaaaatggacgggcgaatgactaaaatggaacgaatcgcgcaaatgtaaactcactgtggcaacggaaggggcaaaacccaacagagagacgagggggggcattgtctcgagaatttcgagaacaatggggcagaggggcagcaggggagggatttgggagtacagcgagcataatttgtgagtcgaaagaatggcacgactttgagcaaaccaaaactattagggataaacgagtgaaagtgcgaaaaataaaacggggagagagggggaataacttgtaataactgacgatcggataaaaggaacgaaaaaatgtaaaattgaaaacttgtgcattattttcgagtcccaattcaatgatacatggcctgtt

SEQ ID NO: 31122 - DNA, 1265 bp, Heterodera glycines
ttttcctaaaaagttgaataaaaaatataaaacgaagagggtagtagccaaaaatttagaccaattagagaaatcccgtgggtttaagagtgggggatctacgggaggctcgacaacgggggcagtaacccccaggggagactctgattcagagtgctcgggctcctctgccgggaataagatttccctgaactcgttaggccacccagtctctgattgccttagccaatcgggccccgaatgccataggctaaggttaagaagctcctgcggagatgcccccctagtgccaaggtcggcggggttgtccgatgacctcacgtacttaaaagtggcttctttctctttccttatttcggaaagacgattggcgatgaaaacgggctgaggggaattattagccaaccaggagagtacaatttgagagtcgacccaaaaataaattgtttcaaaaggccgaccaaaatttgaaagcacgaaattttttacgcgaactgcagttaaaagacctaataattccagccggggtattgtcaacccatcatttttaaatttcttgggcctcaggcgagatttagcaaaaacaagtgtgaccgccgcgcatccattaatctctgagcgcaggtaagcagcggcggaaaagcagttagggcccgcgtcagaaaaaacatgaagttgtagtgtggccctaccgcagggggttgggcgtgaaaaagcgagaggtgggccagcccattcagccgcgatcgctgcccaagccctttcgagcgtttccccaatcggggcatcccatcccgtgtttaaatcccacaaagattggaaaaagaccttggccttaacgaggcacgggctacatagccctaaggggtcaaagagggaggcaattgagctcaggactcctctccgagtcgggggaaaattaatcgctttaggaaactcaaaaatcagtttatcccttgacaaatcccatgaaatgcccaagaccctttggacatcacccaccagcacttcttcggaagggagaccccgtaaaacggctcgatttgcagatacgaactcatggaggcgcatcccggcccgggccatcacttctcgtgccttatgtacagattcggcggcttcttcggcagtttcactgcaaataagcaaattatccacgtaaaagttgctcattagccccaatggatcccccaaagaggccaaatggtagcgcaggacagatcacagaaggaacggagaagaactcacgccaaacgcaatccttt

SEQ ID NO: 31123 - DNA, 1108 bp, Heterodera glycines
tagggttgcgtccccgacgtcggggtttgaaaattcggggttcggggttgtcggggttggaagtgtcggggttcggggtcggggttgccaaatcgttcggggtttggggtcggggtcggggtttttcaatttttgccttatgccaaatagtcaaaaaactttataaatttttacttaaaaatatttaaatttcataataatacttttatgtgctttttattattttttttatcataaatattttgtatagaattaatgaaaaacacatacctaaagcatttaaaatggccaattttcagcgaaatctgtataaatctttttttggtcttttttttgcggcgctctttttctaaagacgtttaggagaaatgggttcggcggtgccgataggcgccggcgtgaaaaattttgaaaatttggatgggcctgttaacagattttgtccaaaaaatgatagattttttcgattttgggccaatttttttaagaaaaaataggtttttttgtggcgccggcgatgccgataggcagcgccgggtgaattttgaaatttaaggtctattttgtaacatattttcaccaaaaatttatgaatttctggtaaatttttattttttttctttttttttggaaattttcatgatttagtcaaaaaattgaatttttattcaaagaaaaaaaattgggttcaatacgtctataaattatgccaaggatgattgattttaatgggtatttttggtttaaaaaatcttattaatcatataaaaataaattaaaaaggaaaaacagccaaccggtctcgaactaataataaaagtgctatcagtgttgaagcaacaaccactaaaccacaaaaacataagaaagcatatgcaaaatttactatatttcataaaaatttgtcaagatggttaaaaaaaatcaatttttgtataaatgttttgccttttcccccacaaaaatgccattctttggggtgtatatttaaccccgactcggggtcggggttcgtcggggttgggagcgtcggggtcggggttaaccccgaaaaatggccaaaaaagtcggggttcgaggtcggggcggggtcggggacgcaacccta

SEQ ID NO: 31124 - DNA, 1220 bp, Heterodera glycines
gtttttgattaatctaaaaataaaatggacttttaagttccggcggtgcgggtcggcgccgccgaagaaatttttcttgaaatttggccatgtttcttaaaagatttacaccaaaattgccaattttgtatctttttggaccaaaaatttaaatacattaaatcaattgcaagtaaaaaaattttgaaaattttcgttcgtttttaacagatttagttcaaaaaatgacaaaattttaattttaaaaattaggagaaagacaactacttggaggcgaactgacccaaagcaaaaacaagaaaagaacaaagaacacaaccaagttggccacgaatgtttgaagccgaagccgtcgtttcgcccgtccctgctcgagacaaacactattctccgaaagattatatttttagctaattgtatcaaaaataaattgttattgattgtatttaaatatatgatttgctagaaaagtctaagtaattttcaataataaatgattttctagatttttaagtgtattaaaaagttctgtaaaataccggttatctctagtctcttctggtcaagtctaactcgtataatgaatagagaccgactaaaaagtcatctaaaatcgcgaaaaaggcactataaaaggcacgaaaaaattgaaaaaaagtatgaaaaggcacgaaaatcccgaaaaaggcatgaaaaaaggcatttaaaatttttttattaatgatttttagggagcaaaaacacgcaaaagttaaccaaaaaattaattttggtcatttaaatcattattaattattttataatgtttttcgaagaaggaaaatttttaaacctaaaatttttatcaagtaaaaaatgaaattttagcgatcatttttttaggaaaatttttcaattcttaggggtttattttttgaacaattttcagttcatttcttagggggtgtattttctgaaaaattttaaatcctttcttggggtgtattttcccaattttattaaatttttaatggaatttttcggaaaaaatgccaaaaaaggcaccaaaagggaaaaatgccaaaaaggcagttaaggcacgaaaatcccgaaaaaggcataataaaagtcaacgtagaagcctcaaaccaagtgacaaatgtgttatttattcttaatatatcgaaacaagtgcgcagaagaataggcatatgcctcaaaagtcggtctctaataatgaa

SEQ ID NO: 31125 - DNA, 800 bp, Heterodera glycines
  unsure (1)..(800): unsure at all n locations
gtggaacgttcgcgcattttcaagccgatgccgtcgccggatgagtactgcaagaacactcatttcccatcaaatactattgttgacccaacattgatcagcaacactgatcaaaatgataaagtgtagggctggcaaaattatacggaaatccgagattttttttttgttggatttttgaagaatgaaacgcacaaaaactgtttttaacttggcttgaagctgctaggttgtattattctatatccaacttttccagcttttgcaaattatatcccatttttccatattttttcattggcattttggccatgttttgccatttgatatcaagaaaattttggcagcctaattgtcaactaaaaattatataaaacaaatttgtataaataaatacgaataattttctttaaatttttggtcaaatgttaatcaaatttcccattttaattaaaagatgttgtcattttaaatgtattttaaaaagatttagcatttaatgtcattaaattatgacacaatattttctgtttgaaaaggtttaaaaaattgtgagatatcaaatgggatctgaactagggtatgtcggggccgggaattttcgggttgaaaacccaggattttctagctgggaaaaccgggaatttcccggtcccggtcaaaactggccaaaaccgggacttcggtattcagttgtactcagttgtccgtgttttggtcacaggtcccgaccaaccctaattttttcaatagtcgaaaaattttagcgctcttctttcccanaattaattaaaaaatat

SEQ ID NO: 31126 - DNA, 698 bp, Heterodera glycines
ccaagacccctgcccctgtaaccttgaggtacaattgcactttttaaaaaggcgggggtccgggacccctgcccccgtggcctaaaaaaacattttttttttttttttacattaactaagcaaaaaccaaagacccttgccccggtgaattatcgtccatcagaattgattctccgccgcgatgattgatccaaggattccccctcttccccgggcgagttgttatttgaagtgaggctaattacagttgaaaaagagagatggatgagaaataaggaattataaaaataaaatattttaacattaaaataacaaaattccatcaaaactaattaaatgtttatagtaaaaaggaattaaaaaacagttattatattaaaatcagacggggggggggaaaatgagtgtcgggatgaagggaataaatgttacacccagagggtgaatgggaaagaatggaaaacaaaagaaaacggaaaacgtaaaatttcaaataataatttaaagaaaaaacttattaaatactttttttggttttaggaggtttaacgagacccttttttaaaaatgaatttgtttgaagtgatggaggactggtaattactctcacttttatatgacggccgggaagggatagggcggggataattatgacgtaaagaggagctttggtgcctaattctggaaattttgatttg

SEQ ID NO: 31127 - DNA, 1211 bp, Heterodera glycines
taaaatgttattttaagcctatttaggtcattttggcccttcttttactcctttctactaattttttgtcccaaaaaattcatacaattttttaaatttaatatacccatttcatgtacttagtattttcgggaattcattttggcttggtgtttaggtaaaatttaaatatttggttggacaacgcactgggtccacgatttacctaaaaacatagaaaaacctctaaaatgagcgcccgtagcaccgtcggttagagcattgcacagttggaaaggctgtgggttcgagtcccaccgggcgagtcaccttttatgcttttttaaacaaataaatatttttaaaatactttcaaagaattggcaattttggtgcccaaattttgtgcgccattttggcttacaaattagtttaacacaacaccgagggaaaagaaaagtaaattagttttataaattaaattttctttttttagaaaatataacttggcaaaaaacgattttattagcaaaaatctgattgaaattgatatgaatcttttcattcgtccaatgtcaacaccaaacacaaatgtcgaagttggcacgagttcaaatagcagcgggtgaaaagagaattttgaattttttaattttttaaaaataattaaattaataaaaaaaatatttttgcgaatcttccagaatttttggcaattttaaattaatttaaataccaaaaataaattatcaacgaaattttaatttttggcaagccaaaatgcacataaaaaatgaatcctaaaatgacaattttcccagtttttcttggctaattttgcgaattttgattggaattggaaaaattttgcttcaattttttttcaattttaattctaaaaagcatagcatggaaattaaaaaaaaattatttttatgaccaaattataaaactcaaaaatacaaaattattaaattcaaaattattaaattcgaataccattcgtccaatgttaagaccaaataccaatgtcgaagttggcacgagttcaaatagcagcgggtgaaaagagaattttgaattttttaattttttaaaaataattaaattaataaaaaaaatatttttgcgaatcttccagaatttttggcaattttaaattaatttaaataccaaaaataaattatcaacgaaattttaatttttggcaagcaaaatgcacacaaaaaatg

SEQ ID NO: 31128 - DNA, 1695 bp, Heterodera glycines
  unsure (1)..(1695): unsure at all n locations
tttcaaggacgtccttgccatcaaaggacggatcccatccctgctattaccacataaaatttatataaattaatgnaatatcattagctttcaattgatgtcgtctttttccgttttttaattaccatgacaacaagcactattcaaccattcacattccattcatcattctcaacaacacttacttttacccatttattttccattttgccactgatttggtgttaaagaaatgtttgagccggcttgtgaattccctgtcaaaacgggtgcctcttttctgtccaagaatttgtccgtttttcataacaaggcaaaggggcacacattcgctgcgtatttgggcaaggattcggtgggtcaaagaaaacaattggagaaaaacctcgaaatatttaatagtacaaatcagggtttgccaattcgaaattgattttttgatggtgtttaataagcccggacgggacttttggtactgagaccggctttttctctaacaaaaatttctcaattaaaattttggaaaactttcaaaaaatccacaacattttccgctactggccttataatttaatttgaatgaaaacgccgactggcaatggcattcaaaaatgcccgtttgtgccatttttagaacgggcttttcgttataactttctttaaacgaatcgggtattaatcaaattatcaagcattaatgttaatagcagagatatttttgagaattttttcaaaattcccgtccgggctctagtgtttattaatgtaaaaattagcacaaattccaataaattgatatttttctgtgcaaagtgttaacaattgcattaatatttcactaaaagcgatggtacccaaaaacccgggtccataaaaacagttgggatgatccggtctcataatcacaatctggacctgtggattcattcacattagggtttgtcctgataaaacagttttttaaagaaaaataggaaatttttccaatgaatgggttttgtccattttggcgcagattcaaatgatgagctggaatgagtcattggagcagaacaattgcgagctgattaatttggatgagattttaaagaatgcgggaccaagcggagagaagccggtgtctttgatgcaggtgtacggtaggtaattaaccatacggcttggcccgaagtcctcgaggtcatttattccactcaataattgctaaaaatacccacacagtgttacatagtgtataaaaagcaaaaaaaaaaaaaatgacatgattatgcgaattcataattacatagaaataatctaattaaaattgaactgctataatgcttttccgtttttaagtgtgccttccttcgagccgaaatggtcctgttttggtcctcctggcgaccacttttgtgtcggtacgagttattttcatgtgtttattaagaaaacactagaacaataatcgttcaaaaacagctcattgacttcaaaacgcgcaagcacattctgacacatccgatgacggacattcttttgcaagcggtcgctgggagcaaacggacgctaaaagcaacgccatttaccagaggtgtaaaaccaaaaatgagggcccagattttttagtttttcagtttatttaaaattataaaaagttaataacaaagaagaaaggtttgcaatttaaaaaaaataaaaataattttaatattc

SEQ ID NO: 31129 - DNA, 942 bp, Heterodera glycines
  unsure (1)..(942): unsure at all n locations
attaaatatttaataatttttttctcgaataaggaaaatttttaaacctaaaattttttatcaaaaaaaaattatatattttggcgatcaatttttgagaaaatttttaaattcttaggggtctattttctgaaattttttctgtcattttatttatgcttaataatcggaactaatgcgcagaaaaaagcatatgcctcaaaatatgttctttattgaagatttcctcattagaaaaaaagacttttaaacatctttgtgtttgggatggttttttaacaaattttgaaattatttttttaatttaaatttaatttacatcattttctgtaaaatcccagcaaaggtataagctcaaacatttctcttaaatgcccaaaaatttttcatcagtgcttggatttaaaaaaattttttctaagctctccatcgcctccaaatttaaccgtaaatataaaattattttttcgggttacaaaacaatatgaacagtacatcagtttatagatagatgatttaatttgtttcgaaattgttgaagattaataattgatggctttcaaaattcttctaattgatatacaccattagaaataatttttatttcgttacattttttagtgttgttttattttttattatttatattagagctcaccattttgacaaaaagcctgaatctggatctggatttcatgttggacatggaccttagtctggattccctgttggacctagacctactggagcctgaattttcttgacaaaaatccttgaaaatccaggcttttcatggcctgaacctggcagtggacgccataatgattgtatatttaaaaaaatcgaaattcttgaatttctgaacctcttttttgaaacttaacaatttagagaagataaaagggcgccagttaaaaagtttttagaggtgaccnntgcagg

SEQ ID NO: 31130 - DNA, 1203 bp, Heterodera glycines
  unsure (1)..(1203): unsure at all n locations
ttagtcgtggaaagcntaaaaaattaatatntaaatgggttattcaaaaaacctcatcttccnntgattaagcatgccttattggcgataagctgattctcaagtgcattctgtaattttcgagttacaatatttggatacatacaaaaattttatatttattagacaatgttgggaatttcatttaaatatatatataatatatattttttctggattcgacatgctctaaaaagtaagaaactactttcttatgaaaatacaaaaaattaaaaaaaaattataacataaaaatttttttttcaaaagaaaatgtcaaaaaatccacctttaaaatatctaaaaaaattatattttaagtttatatttgtgaatttaatccccagccctatccattagccatcaatttttactttaactaaattatttgtttattttttaaaacatattgactcttttgcataccaaattttccatgttttttgcgtcctttttaaagcctttgtcattctccaaaaagttcaacttgaccaatatatttagatggtctctgatcgcctcaactgcgttttaaataaattttaaattaaaaaataacaaatgtttttgtaatagaattttcagaatgaatttaccattcttcattttcagaaaaaattattaataattcacgctattaataaaagaaatcaaaaaaaaaattacatggtatgatgaagatgaaaattaattgcattaaaatgctgatttgtgtatgaaatttcgtatgcatcagtatttcagcccgagtcccattatgtatctgcccaaatcccgaccagaattttttagccatcatggcacgaatcccgttcccaatttttcgcgccccaaaatctgcgtcgtgacccgaaagattttgatccatcccaaccctaatcccggtccctatgttttccaagtcccgcggcaacccgtttgtgtgtgtgtactcaaatctatgtaactttgcgagagtaagccaaaatattttctaaaattttttaacccattttggaaaaaaataaagggaataaattgagttacaaaaatcgatctaactcatattcatttaaatattaaaatctcatccctaatgatatgcctttttaatatatttaccgtataatggtcgtatttcttcaatcactttctgaataaattctttgtccaangggtgtcttt

SEQ ID NO: 31131 - DNA, 1091 bp, Heterodera glycines
gtggtcactgatcagctagctttttcccacttacaaatggtcgactttggccattgtttggccatttctgtccatgtggtcgcttccctcgggtacgcttcgtctttttctgcttcttcaatatttttgcgcttttcattcttctcctcagtaaatgccgtgctaattaatccgccggttgaattttgccgatttgtgccgtcgtttccgttccctttccatggattatcattggccatattgccgaaacaatcaaaagaaatttaaaatttttatttaatttgttgccaatttacaaatttaaaaaatattccctcaaaaagaaggataattttaaaagattattaagatattttaaaatgatttcctaaaaaatacagtaaaattacttttaataaatcgttgaaatgtttaaacatttggtggtgagaatgattaatctttctgtcaaactttttttggtgtaaaatttgagcaaaaactaaaaaatgactttgggtttggctgaggggggggggggagggggcgatgactttccccccttttccccctttttcctccttttttccccctttttccccaaatatttgtcatgccgtcgtcccccgccgcccttctcccgccgatctttcgtttggtcctttctcccctttgcccttatcgtccgtccgtcaaattttgttttattttatttttattttcgctgataaatggcaatttttgtatggcctttaaattggccgaattaaaaggaattaacaaaaattttgttttatctctgtaaaaaataagccgaataaattgcagaaatgactaaataaatgttttatgttttatgaatgacaaatcaaatgcacagaatgatttatggcccaattcggcgcattctccgccgttttccgtccgttccgtcgcccaccgatcatttgttttggctgctcttcacaatcgaatgttgataaaaatggcaaaataaaaaataagaaaattgaaaaaattaacggaaaaaataaaataaacaaaagatgaaaaaattaatacataattccaaagaggaaattaaattaaatgaaataaaatgaacctaagaa

SEQ ID NO: 31132 - DNA, 1110 bp, Heterodera glycines
tttcaaaattttcaattttttttattttatttcaaaattttcaattttttttttaaattctcaaaacggttcagaattcaataaaaataacattcacggtgcgaaaaatggggtttgaaaagtttattggggaaaaaaagactttacaaaaataatacccctgggagaagggagtgggaaacatgatttcaaaattttcaattttttctagtctaatctactcaaaacggttaagaattcaataaaaataacattcacggtgcgaaaaatggggtatgaaaagtttattggggaaaaaaagactttacaaaataatacccctgggagaagggagtgggaaacatgatttcaaaattttcaattttttctagtctaatctactcaaaacggttcagaattcaataaaaataacattcacggtgcgaaaaatggggtttgaaaagtttattggggaaaaaaagactttacaaaataatacccctgggagaagggagtgggaaacatgatttcaaaattttcaattttttctagtctaatctactcaaaacggttcagaattcaataaaaataacattcacggtgcgaaaaatggggtttgacaagtttattggggaaaaaaagactttacaaaataatacccctgggagaagggagtgggaaacatgatttcaaaattttcaattttttctagtctaatctactcaaaacggttcagaattcaataaaaataacattcacggtgcgaaaaatggggtttgaaaagtttattggggaaaaaaagactttacaaaataatacccctgggagaagggagtgggaaacatgatttcaaaattttcaattttttctagtctaatctactcaaaacggttcagaattcaataaaaataatattcacggtgcgaaaaatggggtatgacaagtttattggggaaaaaagactttacaaaataatacccctgggagaagggagtgggaaacatgatttcaaaattttcaattttttctagtctaatctactcaaacggttcagaatacaataaaaataacattcacgggcgaaaaatgggagggtttgacgaagtttattggggaaaaaagcctttacaa

SEQ ID NO: 31133 - DNA, 1055 bp, Heterodera glycines
ttgtggaaaaagtcctgaaccaagatgattcaatttttgaaattttaaatttcgactgcaaaaaatagctgattatttttacaatactgggcctttcatacatcgcaaaataatttcatttagagatcgacctgtacctggatccaggcctgtatttttcctggatccaggtacaggtacaggcaaatttttgacaacctgtattatttttgaaattttgcttaaaaattcgaaaaaatcttataatttttacattttagcttagagttatctcaagccatgtaaatcgaccttttttgcttttcaaaaccctttttacaacacattttttcaatgagatttggcgtacaggggggtccggcaataatgaatcgtccaatgatgatcaaataataaacattcatatattttgccagtgtcatcagtgccgcagcaattatcgccaatatattgttgtacagaagtgatttacggcgccctaatctgtccgcaacagtgccaaccataatgccaccaaacattccgccaatggcaaaaatgccgaccgcaaatgccctggacaattaattaataaattaatggaatgaatttattgaataataatgataatttttcaaagaattagtacagttcattaaaaaaattatgccacaaacattcgccaacggcaaaaatgccgacggcaaaagccctgagcaattgatataccctattcagaaattcgaaaaaaaaattggtttaaaaaaaatatttaaataatcaaaaaatttcaagtggaaaacccccaaacagaaattttagcgccaaataattttctggaaaatattaaattaaataataaaaattcaccatgtcgattccatctcttccactgatatcggaacccctttcatgtgcttgtacgaattcagtgaaccattctttgattaagtcggctggaaaatttaaaaaatattataaaactgggtgaaaaattcccggtttttcctaaaattaaaaaaaaaaaaaattttagtaaaaatttcccgacaagggtaaaaaaaaaaaaaaaaaaa

SEQ ID NO: 31134 - DNA, 1128 bp, Heterodera glycines
cccgatgctaatctgttccgcagagcctcttcaaaattttttccattaccgcaagagctgcgggaaattgggaataattctcagaaaaatggctatctctttttaggacaatattctatctcgtaaccccgatgctaatctgttccgcagagcctcttcaaaattttttccattaccgcaagagctgcggaaattgtgaattaattctcagaaaaatggctatctctttttaggacaatattctatctcgtaaccccgatgctaatctgttccgcagagcctcttcaaaattttttccattaccgcaagagctgcggaaattgtgaattaattctcagaaaaatggctatctctttttaggacaatattctatctcgtaaccccgatgctaatctgttccgcagagcctcttcaaaattttttccattaccgcaagagctgcggaaattgtgaattaattctcagaaaaatggctatctctttttaggacaatattctatctcgtaaccccgatgctaatctgttccgcagagcctcttcaaaattttttccattaccgcaagagctgcggaaattgtgaattaattctcagaaaaatggctatctcgttttaggacaattttctatctcgtaaccccgatgctaatctgttccgcagagcctcttcaaaattttttccattaccgcaagagctgcggaaattgtgaattaattctcagaaaaatggctatctctttttaggacaatattctatctcgtaaccccgatgctaatctgttccgcagagcctcttcaaaattttttccattaccgcaagagctgcggaaattgtgaattaattctcagaaaaatggctatctctttttaggacaatattctatctcgtaaccccgatgctaatctgttccgcagagcctcttcaaaattttttccattaccgcaagagctgcggaaattgtgaattaattctcagaaaaatggctatctcgttttaggacaatattctatctcgtaaccccgatgctaatctgttccgcagagcctcttcaaaattttttccattaccgcaagagctgcggaaattgtgaattaattctcagaaaaaaggctatctctttttaggacaat

SEQ ID NO: 31135 - DNA, 989 bp, Heterodera glycines
tcatttgagtgttgagcagaaaaagagatagacgtttttcaaaattttcagagccaacttcgcccagaaagaaaatccagaaaaattagggtcgtcgctattattccgaaaatgtggttggagttcatttgagtgttgagcagaaaaagagatagacgttttttcaaaattttcagagccaaactcgcccagaaagaaaatccagaaaaattagggtcgtcgctactattccgaaaatgtggttggaattcatttgagtgttgagcagaaaaagagatagacgttttttcaaaattttcagagccaaactcgcccagaaagaaaatccagaaaaattagggtcgtcgctactattccgaaaatgtggttggaattcatttgagtgttgagcagaaaaagagatagacgttttttcaaaattttcagagccaaactcgcccagaaagaaaatccagaaaaattagggtcgtcgctactattccgaaaatgtggttggaattcatttgagtgttgagcagaaaaagagatagacgttttttcaaaattttcagagccaaactcgcccagaaagaaaatccagaaaaattagggtcgtcgctattattccgaaaatgtggttggagttcatttgagtgttgagcagaaaaagagatagacgttttttcaaaattttcagagccaaactcgcccagaaagaaaatccagaaaaattagggtcgtcgctattattccgaaaatgtggttggagttcatttgagtgttgagcagaaaaagagatagacgttttttcaaaattttcagagccaaactcgcccagaaagaaaatccagaaaaattagggtcgtcgctattattccgaaaatgtggttggagttcatttgagtgttgagcagaaaaagagatagacgttttttcaaattttcagagccaaactcgcccagaaagaaaatccagaaaaattagggtcgtcgctactattccgaaaatgt

SEQ ID NO: 31136 - DNA, 1836 bp, Heterodera glycines
aataaaataaattaaattaaataaattaaaataagataaaataaaataaattaaattaaattaaattaaattaaaaaaattaaattaaatatatataaataaaataaaataaaattaaattaaataaaataaaattaaattaaattaaattaaattaataaaataaaataaaattaaattaaattaaattaaattaaattaaattaaattaaattaaattaaattaaattaaattaatttaatttaattaaattaaattaaattaaattaaattacataaattaaattaaattaaattacataaattaaattaaattaaattaaattaaattaaattacattaaataaaaataaggaaaaataaattaaattaaattaaattacataaataaattaaattaaattaaattacattaaataaaaataaggaaaaataaattaaattaaattaaattaaggaaaaataaattaaattaaattaaattaaataaaaataagaaaaaataaattaaattaaattaaattacataaattaaattaaattaaattacataaattaaattacattaaataaaaatacggaaaaataaattaaattaaattaaattacataaattaaattaaattaaattaaattaaattacattacattaaataaaaatacggaaaaataaattaaattaaattaaattacataaattaaattaaattaaattacattaaataaaaataaggaaaaataaattaaattaaattaaggaaaaataaattaaattaaattaaatcaaataaaaataaataaaaattagcagttttgcacgacaaggggcgggcgcgaagcgaaaattttttgtttgtagttaacatgagatataattaataaaatgaaacaaatttaaaaagaccaaaaacacaattataatagtgaataatcgctcaaataaaaaattaaataatatacaacattgtcttaatgaaaataaaaaactaaattataaaaagaattttgaaaatataaaattattaattgaaattaagtgattaacatatttttaaatttactattattcaattatactaaaaatataattaattgaaactggattttgatgtttcaagccttattcagtgcctctaaaaaatgaaaatttttatatgtttggagtgtttttataatttccaggaaattgtaattcaacaataaaaggtttatttttatgaagaaaaaaaaattaaaaagcaaaattaagaaaaattaaagaaataatcataaattaatctttaattaattagaataaataagcattcatttttgttttttaaattaaatatttaaaaatcaaacaattataactattataatatagaaaataaattcgaaactttataaaattaaatgaagttaactatgattattcataaaaataaactcttaaaacattgacaaaaattatcatacacaagaactaactgctcatattgtcaatttaattttatgaaacatataagtattagtagtataaggcccaatatccggccccaaaatttggccccatcccctccacgcttccacatcctttcttctgtttttcaatattccatttcccatcctttctttgcatagttgcaaacggagtcagttgctgctgccccctaatttcacaaaacattccgcgcagtaattgacagccctccctcaccatctcccttcgttcgcccgcttcactcttcttgtcccccttggtcgtactcctaccaaaccaattgctcacaaatagatccgcagcttactttacaagttccttaaattggggagataatgagccgcttacattt

SEQ ID NO: 31137 - DNA, 1120 bp, Heterodera glycines
aaaattttccataaattgtaatggcatccggggccgccaaatttccgtaaatcgaaatctggtgacacaaatttccataaatggttcattggaatccggaggccccaaaaatttccgtaaatctaaatcctgttccaataattttccataaattgatcattggaatcgcaggcccccaaatttccgtaaatcgaaatcctgttccaaaaattttccataaattgatcattggaatccgaggccccaaaatttccataaatcgaaatccggtgccaaaaagtttccataaattgttaattggaatccgaagtccccaaaatttccgtaaatcgaaatccgatgccaaaaagtttccataaattgatcattggaatccgaggccccgaaatttccgtaaatcgaaatccggtgccaaaaagtttccataaattgatcattggaatccgaggcccccaaatttccgtatcctgtgccaaaaattttccataaattgatcattggaatccgaggccccgaaatttccgtaaatcgaaatccgatgccaaaaattttccataaattgttaattggaatccgaagtccccaaaatttccgtaaatcgaaatccgatggcaaaaattttccataaattgatcattggaatccgaagtccccaaatttccgtaaatcgaaatccgatgccaaaaattttccataaattgtaattggaatccgaggcccccaaatttccgtaaatcgaaatctggtgccaaaaattttccataaattgatcattggaatccgaggccccgaaatttccgtaaatcgaaatccggtgccaaaaagtttccataaattgttaattggaatccgaagtccccaaaatttccgtaaatcgaaatccgatgccaaaaattttccataaattgatcattggaatccgaggccccgaaatttccgtaaatcgaaatccgatgccaaaaattttccataaattgatcattggaatccgaagtccccaaatttccgtaaatcgaaatccgatgccaaaaattttccataaattgatcattggaatcccgaagtccccaaatttcccgtaatcgaaatccgatgccaaaaattttccataaattgatca

SEQ ID NO: 31138 - DNA, 1854 bp, Heterodera glycines
tttttccaatttttatttttgtttccccccctcattaagcaaatggccggtgactccgaccgcgacccgggcaggcatcatcaccacaggcatcatcgacatcgtcattcagcgcgcacgtttttgagaaatttgggctaccaatcaccgcacaaactgggcagtggacaatacagcaaagtctacaaaggtggttcacaattccatgtgcttttccagcaccatttcccttcccttttcagtgtttgatgccgaacgacctgccgggcgtggatgcagcaactgaccaacggagtgtcctatttgcacgaaaatcgaatcgcgcatcgggacttgaagccggagaatattttgctcttcgaacgtggcgttctcaaaatcaccgactacggcttcgcgaaacaggtaatgaatgccacgcttcaacacaaacgttcaatttcctttttcagtgcgatgatggcgacatgtcttcaaccttttgcagaactaagctttacaaggccccggaactgctgcagaaacatgaatatgacccgttcaaagcggacgtttggtctgttttgttcgtttccattcactgcttttttcatcttcccttttcatttcaggtcacttggcgtcatttgctttgttatgcggaccaacacaatgccgttcagcagaggcgtgagccgaacacacatggtggaggaacagcgaaacagtcaataccgattcccttctcacttggtcatcagtttgcagtgtcgcggcgccattgacacgattttgacgtttgatccggagcagcgtccggtgagcactttttgtgttttttgaattttcaatttcaattccttttttcagagtgtcttcgatgtgtcaagtttgccgtggttttccgaagatgtctctgaacgttctgggagttcttctgatgtgagtgccaccagtgatacaccgctccttaatgtatttacttgcctctgtttgtatatttctgtgtatttgtgatacaccgctccttaatgtatttacttgcctctgtttgtatatttctgtgtatttgtgatacaccgctccttaatgtatttacttgcctctgtttgtatatttctgtgtatttgtgatacaccgctccttaatgtatttacttgcctctgtttgtatatttctgtgtatttgtgataacaccgctccttaatgtatttacttgcctctgtttgtatatttctgtgtatttgaataaatttcatttaatttgttttgactaatacgtccatgcgtgatgaaatttggccaaatttattgacatttccttccccattcaaacaccgaaaagtccttgccaaatgatttgcaactagaggcgaatgaccttttgaaggcgggggccttaaatatcaataaggctatacgccttatgacaagcgagatttctgccagcactgatgcttggaagtcatcgcacgtgcgaaagaggccattgatttgccggaagacatcactttgtggtaaattttggaagtgcggcaaaagtggggccgacttttaatgattcattttggtttccaaaatccattggtatttccaattactatcagttttcatttttggcacttttggaagtacggcaaaagtggggccgacttttaatgattcattttgggttccaaaatccattggtatttccaattactatacatatttagtaacctttcggacatcagtcaagattgggccctcagcgcccgtctgaggccgcgaagcggcctaaaaattccagataatcttttaaaaattccaaatctcttcacaacgcaatagcatatgtaggtagcgaagctccctaaagcgcgaagccctttttcc

SEQ ID NO: 31139 - DNA, 959 bp, Heterodera glycines
tttacctataaattggctaattttcagtgaataactgtttataaatgatcaaaatttccaatttttttccccagcggcgcctatcggcaccgccgcgcccccaaaactcctattttttcttagaaatggcccaaaatcgcaaaatttggtaatttgatgaaaaactgttctcagcggcgcgccaaaactcttatttctcattagaaaaatgatacaaaaatcacaaaatttgatgattttttggtgaaaatctgtcaacaaattttaatcaaattttcccggcggcgcctgccccctcttcccaaaaagtttttttggaaaaagcgcgcctcaaaaaagcgttttattgatttttaaagttggaataaaattttaaaaaatgctttttgctttatgattttaactattaaaaagttgtagaaaaaatttcgcatttcgcatattttggcttttcgcatttcgctttttttttcatttcgcatttttcagtttcgcaaatttcgctttttatttttcaatttggcccatccctggtggggagtcagtcattaacccatagcgacaagtttgaagcaaaagtctgggaaaaattgccgaatatggtatcggctcaaaatcgcacaaaaacacttttataggttttcttaggtactgggaacgatagaaaagcttaaaattgggcgcggaaaagcatttaaactggtttttgaaccggtttaaaactcgaaaatttgaatgaaaaagagggctcctgaccttttaaaacggtcaaattcggacaaatttggtatcattcgaaagctcttgatgagctaagtctaaaaaacaaggtatcaactcgaaccaatgccatctaagcactgggacaactgagtcccagagaaaatggacacttcagtaccaaaataaataaccatttaaaaggaaaaatttcgcaaaaggtagcatgcaaagacgga

SEQ ID NO: 31140 - DNA, 1150 bp, Heterodera glycines
aaaaaatggtgtctgccttttttcaatttagctggcgcacccgtaaaaggaaatacgaaatattaccgggatacaaaattaaagtaacgggactttttagaacagaacgaaaggatttatttggttaaggataattgttggaaatcgccatagatttggaccatatgcgaaaaattcgcggtgaacgtaataaagaaaccaaccagcattgacttgtgcaatccgactcgttaaaataaaatgatctttaaaataattgcataaatttatagggacagtatatataatgtctttacttgtaagtttggggtcagatgcgttcagaactgacggcacactacatagtttaatataaaaaatgttgtctgccttttttcaaatttagctggcgtaattgtaaaaagaaaaatacgaaatattaccgggatacaaaattaaagtaacgggactttttagaacagaacgaaaggatttatttggttaaggataattgttggaaatcgccatagatttggaccatatgcgaaaaattcgcggtgaacgtaataaagaaaccaaccagcattgacttgtgcaatccgactcgttaaaataaaatgagctttaaaataattgcataaatttatggggacagtatatataatgtctttacttgtaagtttggggtcagatgcgttcagaactgacggctgtaaaatgaaatacgaaatattaccgggatacaaaattaaagcaacgggactttttaaaaaaaaccaaccagcattgacttgtgcaatccgactcgttaaaataaaatgagctttaaaataattgaataaatttatggggacagtatatataatgtctttacttgtaagtttggggtcagatgcgttcagaactgacggcacactacatagtttaatataaaaaatgttgtctgccttttttcaaatttagctggcgtaattgtaaaaagaaaaatacgaaatattaccgggatacaaaattaaagtaacgggactttttagaacagaacgaaaggatttatttggttaaggataattgttggaaatcgccataaatttggaccatatgcgaaaaattcgcggtgaacgtaataaaaaaaaccaaccagcattgacttgtgcaatcacgactcgttaaa

SEQ ID NO: 31141 - DNA, 850 bp, Heterodera glycines
  unsure (1)..(850): unsure at all n locations
aaacgtctggaattattcttgtgctgatcaaaaatagttaaaaatagaacatatcataatagattctattgaaaattttattgaataaagtggttaatttttgttaaatttttaaatgagtaatttggggccgcaaaagtcgggccgcaaatgtcgggccgcaaatgtcggggctccgtgataataccggtggaaaaatttatacaattgcaaatgaaaaaatttggtcattttaaaacactagaaaaaaatttttttttgttttaatttttttaaagaaaacgacgggcggagaggagggagattaagtggttttcaaaaaaaaaaagttacccatggcaaagtcgggcactgccagcacatcgcacttgggcaacggcatcggaaagtcgaaccaatcggtgagaaagtcaactgcttcggtgaccaacttcaacgcgagcttggcctgctccgttttgccgggcaaagtgtacacacggcagacacagcccgtcttggacacggcctgcaaaaaataaatggacaaattgtggacggacagcaaaatgccaagtcaaacaaacaaatgccggaagagattggggaacaacaaccaatcaaaccccaaaaagttttcgtttttttttctttgaaagttaaaatatagcccaaggaatgaatccaggtcgttccccagagaatcctatatttaacaattgtaagagcaaaaaaggtctccggattgcccatccaaaacttgttttttctggttacgagccggttgcactacgcttccacaccgtatcgttacactcccanaaaatttttttgaaaattttccaagttgaaataatttcgaggggggggg

SEQ ID NO: 31142 - DNA, 1535 bp, Heterodera glycines
gattataaattgcaattttttttatgcggttcctaccccaccgcttttgacaccccccccccccccaattttcctgcgcctaagattttttttaatttgtaagaatagcttagtcaaaaagaataactttacaatttacagtttgattgataaatatgtaaattgaagcccaaacccgaaaaaagcttacaaatttgttatgaaaagctcaaaaattgattaattttaattggttttaagtgaacaagaaaattttattaaaaaactctcgggtcttcggtcccgtgtcacaattttttttttttgtttgcaattattgtcaattaaatttagtccgctttatctattgctgaccatcaaattggcactgaacatggagaagcatcaagccataaagatgaggacaatttggcaactgagaaaagtggcttattttttttttatcatttaaaatataatcataaaataattaattttatttatatttttccattttttagttgaaaatggatttaatttgtcattatttatttctctctttgttaaagcaaacaaatttttaaaatattgcacgataaaattggctaaccaattgacatgaaaattggtttctccggaagctatttatcatttttgttcatgacccgatttttaagtgcagtcgactataatatttttccccaaatggggctttagttataaaatcaatttaaaaatatcagaccattttcccataaattttgtaaattttaattaaaattaaaaattaattcattttcaagtgattgccgaatcggcaacggctgccatgcaatgttcggtggacagcttggaaatgatgaaaaatgagcaacaccaacaacagcagcgcgtgatgatggaaacttcggtggactcgttggaatttggcacaaaaatgacaacggcacaacaaaaggacgaagcagaaatagaagcattgttgctggtcgaacgagactcgttgagcagtgcacaaagtcagcaacaggacgacaacgagttggagcagtacagcagcagtcgaacagggacgacaatcacgacgacaacgaccacaatgacggaaaatgagcggaaagcggaagagcaccgtaagaaaacccctgaccgggacaccgtaatggagttaaacgatttttcggttttgtgcctatgtgaagatagacaatctaaaaataaaaaactatttgaatttttcatatttttattggattggaagaagtttttttgaaatagcatggaaaaattttcaagtaatgagctgatttgattttataatttttttcccaattttttaaattttaattatttatttttagcaacatcatcttcattcccattgcctttgccaactgctgctggaggcaatgggtaacatttaccactaaatactttttttttttttaattattttaaatttatttttgtctgagattctcacgcattctctatacatatacattaagcaatggttcacgcggtggacatcggctcaattgctcaaagttctgcaa

SEQ ID NO: 31143 - DNA, 476 bp, Heterodera glycines
cgcgctaaaaaaatgatttttttcaaatgattttttattgaagcgattagattttttggcgacatgtttatgaatttcaaaaattttctactaaataaatctgtcggaaaataatccacccgtctccatttatcccttcgtatcttctaatccctcccattctgaggaggttaaaaaataatctccccggtgggataattagagaaaatagtaggttcttttataacattgttacttattcactgtttttaataattttcaacaaaaaccaccattttataattttatttatatattttcggtacaatatttttttttgtacacgtttcttgcatacaattaattgttgggttcatttggacatttgcaaaacgacaaattcaccgcgtggccatgaaaatgaaccaacggtaaggaaattttaaactttcaaatcctaatatctatgtaattatcccgcatttcagttggatttg

SEQ ID NO: 31144 - DNA, 1092 bp, Heterodera glycines
ttaatacctcttcctatttttcgataattaaatttaattagaaagaaacagaaaaaaaatttttttagcttttttaaataaaagcgtttactattaaattagaaagaaagtgaaaaagaaaaaaattgttagccaatgaaaaaaaaggaaagatgagaaaaattggcagataaacttttctggtttcataaagaaaataatgcaaaatggtcataataatttctctattttgaattaattaaaaaataaaaattaatcttaaaaataaaataatactcacaaaaataaattaaataatgcatgaaaacatcaggaatcggtgggacccgaaccatcgagccacaaaagcacaggaagacgcactaaccacttgaccaccgagtcgcttgcctccttcccatttaattcccttttccttttccttcttttttggaaaagatcccgatcaaaagtgcttgaaatcctttttagagcatttcccggacccggacccacaaacaaccctgctatcattcgaaagccaagagtttgtatgcgaaattgtttcattttttgatttgaccacttttaaggcatgcaaaaagcgttcaaaaataggacaaccaaaaaaactgcaaattttgactcgttttccgaacgcagttcgaacagttctgaacgttttagaaaacccgtatttttcccttataggcaggccaaaaccctattgaatgacaccactcccgccccgtaactctcaaaaagacacgagattttcatttttatgcttggatcatgggtagaaacttcttatatagggaatttttgaattttttaaattttgaaaatttttcatttggccctcgggaatttgggctattacctattttgaaattcataactcattttaaagtggttcaatttaattagaataaagctttaaaaatagaaaatttgattttagaatttgggaccaaaggggggagggaccacatggtttttgagtgggaaaaattttttcacttaaattagctgaaaatatttttaacgggtattttagcgtgctaataaacaatctttaatcagaaatcgctttcgaaatcgttaaagccc

SEQ ID NO: 31145 - DNA, 1186 bp, Heterodera glycines
ccccttttctgaggaggttgaaaaataatcccccatgcggctataattagagcataaacggtaactgtttcaaccagaaattttttgtgataaaactgattaaaacttttatataatttttttacgatttcttggttcgaacaattctaaaaaaatttcctattttttttttacaattattaaggcatcacgcagtgtttcggcaacacattgtcaattccttggccacaatctgtcccggtgccgtcactgtggagccattgctgtcttcatcctcatcatcgtccacgccggcaccgctgctaacaaatttggaattgaattggaaactgttgcgacggttcgccaacaacatgtgggtgctgcgaagtgacgacgtcaaaagcggtggcggcgaaaacagcagcagccgaagtgccaccgcaaatgccgaagacggcggcgacgcatcggcgacgacgacgacaacaacaacagcgacaacggcatcggcaccatcagcagagcagcagcaacaataaaacgaaacaaaaagtgccaacaaaacaatgattgattgattgaccagcagaatgggtgtgattaatactaggagtgatcagaatgggtgtgatcaaccaaaaaatatatgaatatatatgttgccgacgtccatacattttactcacccaattcgttttatccgtcaatgttttgtattgtttgtagagctgaaaattctcgaggccaagattccgaaaatctcgacacctcatttttactcgaggcccgagagaggctcttgaacagctctaattggaagagaccgactagtgtgttttttgttgttggaaatatagcatcgattgaacccaaaaaaactgacgaattcggtctcttatatttcttcccgttccacataaatcatttttaatgcttgcttatattagaaaggaaaagattaaaatttaatactataattatataatttgttatataatatagtaattgatatgtgtttgtttactgtagtgtgcattttttttttttgcatttgtaatagcgaccctcacattaccaaattgctttttaaatttaaaaataaaaaacatataaattattctgtctgttttatttggtccgttctgagcagaaaaaacacaattaaggtaattatagccacatttttaacgactgattgacaata

SEQ ID NO: 31146 - DNA, 1315 bp, Heterodera glycines
attgtggaaaagtgggggtccacgtggcaaacatgttcctacctagttgttatattcctaataagaatcaaccgttccccataaaaaatcaaaaaatgggaggagaaaggcagcagcagcattaagatggagaacatgagcacaatgatcgaatggtaggcacaaatgctgctaatacatgttatttgtttgataaaatttccagcagtggtgtggtcaacggcgaaattgatgacatgaatgatcagcaggacgatgatgatgctccaacgtcaactgtttatctgaatttgggcaaagacgagcgcaccgcggaaaattattaaaggcctaaatagactgttagacaaatttaacacaccaaatgtttgaaacatttattcttcatcatgattatgttagagaaaaatagtaatagttagaataaacatattaatcggtcttttgctcttctgaaacaacatggagtaattcaattggaaaattgtcctggtgactgttgccaccaaattgtacaacacatggtaattggggatatttcagcataatgcgatgacgcacatataaatgttgttgaacagttattcccatgaatccacggtaggcaaacatcatgttggctccatgtcgggacagcgcatctgcggaaacagctacattccttttcaggtgatgggtggctaatgacagtttgttcaagaatttcacattttcttccttccttttctgaagcattttgtgaagccaagttggcgaacatcggttgaatcggcagagcactctcaccaagtcgcgtcgttctctttgtcgtcgtcgctgttgcttgcgctgtgcagatccaactcgtccactgctagctggtaataactgctgctgctgctcgctcgtccgcaacgtgagagacattccggcgagtcgcccggacaaatcatcagatccttcagttccacatacagaggttcgctcctgaatgtaaattttatttatgttttttttttggtatatgttttaatttaccacactacgccctctgtcttcctcttgggaaagcatgttgtgtaaagctcgagtccctcgacaagatcaagtgacccttccacgtacactggttggtttctgtgctcagtgtttgcaatatgcacacagtcgactgcacgcaacggattcggaaacaatgactggccgtctcctgttggactattttttatctcctccttaaggtaagcgtagagctcgtcaatgttgctcagtccgtaactgtcagtcaaatagcggattgcacgctgcatacaaagcgcacagcgagcagataaat

SEQ ID NO: 31147 - DNA, 1574 bp, Heterodera glycines
  unsure (1)..(1574): unsure at all n locations
ttaccatcaaaaaacccaccccccgttccactgttgactccgccgccgccatagtcgagcaaatcggacggaaaagtcgggaaattcggcgggaaaaccgaggcggcattttgctgctgcgtttgttgttggcgcgcaagcaaataattgtaattcaaccacaaagtgttatactgacaatgggaatattttttaggcaattattattatttatttttcttcggtaattaatattatttttaaattgcaaagagatcaatcgtcgtggattatttgccctccccctttcctctccattttttggcaactgattgttttctaagtttcacttttttgaactcattaaattttcaccgattgttgtttggagagggaaatgttaaaacaataatttttcattgtacttaaaagcccacttggtttctcagaagttcgttgtcctccaattggctcctcagtttttgctgaatttctttgcgcttcgctctttccatgtgatagaggcggttcaaattcctgcagagaaaaaaggcaaagaaatttaaaaaattataaaaatttataagaattatataaataatttaaacatgaaatcctcttcgtcattttgagcaatttttataaaatctcaccaaatttcccagtccgcgccgctgtcttcgtccggcgaaaagtttttgcgcgtttgacgctccgtcagttgaggtggcacatttttgtagcgggaagaggcggaggaaacgacggacaaatggtgccgattcgcgtcaaaaggataaaaatcggcgacggataaacggcgggaagacactgcgggggaaagggaagaaatatttcttgaaatttttaaaaattttttgaaaatggaacatcccaatctgtgagtgtccaaatcactttaaaccccgattgtttattctaaattctcggcctttttggctccggtgcaaaaagtggtcgattaattgatatataagcatatattatgtaatttatgcaattttccatcttttattttaatgatcatttgccataggttcgggtccgctcgaagtgttgtatccccgggtttaaggcttcaagccatttcaaattaccattttaagagagagcaatttatttaaggaaaaagcattgacaaataattatatgttaaaaccgggaatattttgggtcaacaacaacctaagagcattttgggtgggttagtgcaattggttatttgggaaaggattgccaaaggcaaggaacggcacagactgacccaccgcaatctcgcagccctcgagggggaaattgagtggacttatatactggcacaattggtatggactttggataggatgaggggtatgacggcataaacacaaaggaataagagagaaagggatggcatatgcaacagaggtgatgggatagaaatggcacgataacattggaaatgagaggggcaggattggcttgggatgtgatgaacagagggacaagtttatgacgggattgagtcggggaaagtagggaaatttacattatgcancannatatgaattttgaatgctgncgatacagcataa

SEQ ID NO: 31148 - DNA, 1265 bp, Heterodera glycines
ccatttccaggcaattattgttgctaggagcggccttccaacgacggcaataaaagtgggtaatttatcggcgacggtacaacggaagaagaggaaaagaggacggatgtgcccctccctctcttcacccccttttgctgttttccgtcatcaaaacatttttcaccgtcgccgaccgttggcgaaaccatcatcagttttatttttgttgtccattttgcgactatttaacaccgtcgaggccaattctcgaaacgccgcgcatactcacatttcggaaagcgaagaatatcaggcgagtgacaaaaaattaattattcgatcgaatttgaaaattgttttctctcggaaaaaacattaacttaaaattcagtttacaaatgtcaatccgaagtgcgagcgcatccgaattgaaatgtgcaacgacattcaggtagaaagaaaagggagagtgaaatcggaattttttaaatggaaaggataaaagcaaacccaaaaagtagggaaatgtgcggaattgggacattgggtacgcacattttgtcagttaaactgtttgttttagtacaacatgaccatctatcccaacttgctgaagcatgccaaacaggaggaggccgagatggacatcaaacagttcgcttttgccttcgtttgcccttttcatttgccctgcctttttcagatacgaaatgctggtgaaggtgcagtgcagtgccgacttcaagttcttcctgtgcactttgttcacgcccgtctgcaccattctcaacgaacccattccgccgtgtcgccacctttgcctttccgcgaagaacggctgcgaaacactgatgcgcaaatttggctaccaatggccagagatattcgactgtgacaaaatgccggagagtcgggacggaatgtgtgtgggggagagcaaaacggaggaaacggacggcggagcatcggcggacggaaagggcgcggaagagccgacggaaaggggcggaaaatgggccatggaatgtccgcacacaatgaaagtgctcagcaaacgaaggtaagcctaaattgggggctgaagtgggttttgtaatgcaaattcacttaggaaatttttattcgatattttttatatgggattttattgtttttttctctcttaattaaataaatccgagtcgatgttacagaaatttgatgccgaaaatttttcgaattcgttctctaattttccctcttggtaggcttgcgaatcatgctaaatgtcgacctgccaggcc

SEQ ID NO: 31149 - DNA, 1211 bp, Heterodera glycines
  unsure (1)..(1211): unsure at all n locations
cgggaatgggttcttgtacaggtaagacctgtgaaaaactattaancaatgaaacggtgaatgagttagccgagtcgaacggctacccgggcaattcctactgtttggacagcgggtcattttggtttaacggttgtggtggcacaaattctgcctgtctatttaccgcaattacgccgtaccaacccgacccggaaataaattcacatatgagatgtttcgttgtcctacgtgggatttccggatcatgaccgggataaaaatcaatttgcatggtgagacaatccgaaatgaagaggccatccttttctccggtcacacctttcgcctccaatcagcgaatttgtcgatcaccccggccgtctttgggagtccagcagcacccgcattgtccggaaaattcattggcggttcgaatggaggtgcattgatcccttctctcgatccagcactgcattgtgctgacgaggattggacatcgaacgattactcggggaaccctccactaaactccccctctcgatcggcccattagtcttaaactaccgtaacccacgtgaagtttgggtcgactcggactttgtaccaattcagatggtcttgagaatggaaggattacgcctagcaatacgccaccaaatggcaacatgtaagataagaccacagggtttaaaaggttgctataaatgccgaatcggcagccgtttttcctatacctgtacggccagctatggttcacctttggctgaaattgtatgtgaaaatggagcaaattgggcaattccgtgctccgctcagccaacgcagcacaatacctctttgtctttcgacacagccaaaattaagacaaattgtaaggtgacgtgccctgggggtgacactttattcgaaatggaaggcactctggcctatattttttcgatcagccgatcctggcgtttgactggagacaaagccgaaaatcaaccaggagggtttagcctacctgaaatcggtgaccttttccacgtcttgaaatggatcttcagcggcacccagctgatcatcattttgggagtgtttttcgtgggaatttgtgctctttacattttcctcaaatttaacccaattttttggggttatcgaattttggctaggaaaatttggattaccatttttctgctcagtaatctgtcatgggctaatgccgaaaataaaatgaacatgtcaac

SEQ ID NO: 31150 - DNA, 1323 bp, Heterodera glycines
ctattatttttttttatctggcttatataaaatttttctaacagagccacaaaaaatagtctagcaataggtagataaattaacagcaaataaaaactgatgaagaaatatgcgtttccaggacttctcgcaaattttgccatttcttttagttagaagaagcagtaatttgccggaaattttggcttttagggtttatagaacttgtaactaggaactagcccagcacctcttggttttttttaatttttcaactttcccggacaaattttttcagcgaatttttgtccccgataagtgtgatatttttgcggagcaggacaaaactccgccgccgaaactccgccggccgaaactccgccgaaacataactccgccggggaaaaaattttctaacttagaaatttttcatgaaaaaaatcttagaaaaattttttcttagaaaatacgaatataaaaatattttctaagaattttccagcgatttttttttcaaaattttttgagtttttcatcattaagtcttgaaaaaatcgctggaaattttttagaaattttttttcttccaaatttctaagaaaaaatttctctttgaaaaattaaaaaaaaaattgttttggcagagtttcggccggcggagttatgtctcggcggagtttcggcggcggagttttgtcctgctccgtggcatttgccgtagcaaaaaatgaaaagctcgtcccccccagaaaatttttttaaatttcttaacctaaaatttttaaaccagcaaattttgggaaaaattttggcaaaaatttagtaactcatcataaaataatgaaaaaattgctgaaaagttttcctttttttcttgaatttcttattaaaaaattcagtaattcagttttttttttgaaaattttctagtttatagaaattttttgcgggggaaacggcgggtgggcagaatatttttttgggtatttttttttgttgccaaatttagtaattctcttaaattttgaaaaatgctaatttttcttgaaatttcttctaagatttcgttcttttatttttataaaaattattgggagtactaaaaattttgttttttgccattttatatgtttttttgcaggtggaacggtcgttgaagaagatggagaatcggctgaccaacaccggactgttccaattcagcgccgactgtcgccggggctcccttctgttgccctctttgctgtccaactttgggcccacttatgtgtgcaaaatcacgagaataggctgaaaacatcatttgttagcatcaccatttttatttttgtcacttttattaaa

SEQ ID NO: 31151 - DNA, 688 bp, Heterodera glycines
atacatgagatttttctggctttttgagagaaaagtcacttcccggcccagttttttttaaaaccccgagctctaaggcaatctataaaaaatgattttaaattacaaggagaggagcaccttaccaagttgttgtgttcgactgttttgtcgggatgaattgagattttttgtgtgtgttttaggatgaagggatacataggcttggggaggggaggagggcggggggagagagagttggggtgggggtgaagggtgaatgagagatggaaagacaaaacgggaaaaggggaactcttccaactcttccccttcctccccccgctcttctatcatcatcagcagcagaaggaggagtaaaggaggagaagggggacttccccttccacattctcaatcaattgcatttagtggtggggggtttgagaaataaggggaattggaagggatggaaaaaagcgacaaaagagcaaagcaaaatgccctctttcactgctggtcgagtgaacgcgaaaactgtggatataatatgtaggacatttggccacaaaagtacaggctgatcactggcggctctgggctaatgagtgtgtgatcaaaaggcgggtcaaagtggagacaatttacggaaagtaatacataggaggaatgcgagagaagtcaatgatgagaaactgaatggagaaag

SEQ ID NO: 31152 - DNA, 999 bp, Heterodera glycines
  unsure (1)..(999): unsure at all n locations
aaaaaatttttttttttgttttgggggcagtccccccgaaccgatgcccccaattttatggggagaccgaatcctttggggaatagcttccctatagtctgtactttaattctgcgttggatttttgctccccataaatgtttgagtaccccaaacggacactaaaaaaaatcgttttttttgttttcggggcagtccccccgaaccgatgcgcccagatttatggggagaccgaatccttcgggaatagcttccctatagcctgtactttaattctgcgttggatttttgctccccataattgtttgagtaccccaaacggacacttgaaaaaatcgatttttttgttttcggggcagtccccccgaaccgatgcgcccagatttatggggagaccgaatccttcgggaatagcttccctatagcctgtactttaattctgcgttggatttttgctccccataattgtttgagtaccccaaacggacacttgaaaaaatcgatttttttgtttcataaatatttttttcagaaaggcatgcgcacccgtccgatccgccaagttaagcaacgattgctgactagccaaaaggttcggtgccgtgatgaaacgaaccagcactgcttaccccgcggcacccggcacggtcccccgaaggaatggatttaattaaattctctccttcggggatttttttccattaggtcgtccgttagcgttcgattgctctagtcaatttttcaaaatttttgttgaaatatttgtcgtgctctgaagggcgtgggagggggggggggcgaaggcccaccacgaggccgcgaagaggccgagtgagtaccttcggtgcaggaaaattattaaattttaaaattttttaattgctttttaaatatgccaaaaaatgtaggcttaacttatgtagtgaaaattcgatcactcatattttttgctaactgagcagaagcgtaccaaactttgcagggatactccccgngtaa

SEQ ID NO: 31153 - DNA, 970 bp, Heterodera glycines
tggtttggcaaatgatttcacaatttgaccacatgatgcgaaagacgggcaaatggcattgaatgaacaatggcatatgcttccgttgcaccacggaagttcatcttggcatattgagccggctcatcaattccaattttattgccggactcttctttgcactcgacataacaatgtcctggccctttgaaagggtacttgagtgcgtatttaatatttgctttgttaccatatgcaaacagtacattatggtgtactcggtaacgcagcagaatataaggattatacggcacgacatgtgagttgtcgtatattaagccgtttacctctaattgggcaccaccatcagatggtgaaggccggaaatacatcgcgggcctgtccgggcgcaaaatcgtacattttgagtaaggggctgggaaccccttcttgcaccgcccgtaaattgggtcgctaggaccacaccaactgtcactgcatctgtgcagttgcatatgcattgtttcgcggatttcgcgatgcatttttgcaatgggcgtgtcgtcatctttatcaggcaaagatggaatgtgcgcccatatgtattcctgaatgacatatggaactgcgtccaggtctgtttgcgccacaatgtgggcatgtgggcctcctcggccttggaactccattgattcaccgtaaccaaggattgttccgaagaactttttgtcataaagttcttctcggaactcagcgattttgctgctccagacacgcatccacatgtcaaaacggtcagtaaatacttgaccgtttttgtgtaaattctctttgaactcaggccattccctgttgttcgtgaaagtaatgaagagacgcgcctttttcgcgtcatggcaccgtgcaaaaacggtgttgcaatcttcatacattttcttccatatattggagagaatttacgttgtgttcggaaagccgaacaacactgcca

SEQ ID NO: 31154 - DNA, 1238 bp, Heterodera glycines
gaacacaatcgtttcaaaaaaatttaatataaattcttattttgtcccgaatcccgcccaaaatcatcgggttgggattcgggacgagaaaaatattgggtttcgagtgacccgaaacaattctggtacgcataaacaaattttttgaaatatttttttaaatacgccacctgccctcggaaatgttcaaattcacagcgggcaatgttggatcgtcctccgatgacatgaacacaaatttattgcaccgttttgcccaagtcgccttcacgtgaatggcccgcttttggtggttctgtttgccggtcaaaatccaacagaaaatgcgaacgcgtcgagcaatttcgttggccaaagtgacaacactcattcctggggaaagcaaaaaataataattaaaatggaaattcaattgaaagttgtggataaaaaactcatgagaagaaagcccaaaataaggtaaccccacaaccaaaatgtcaaaatatttttaaattttcatcatccggagatttcggcccaaacctattattaaaaaatttgtagtcgaattgagttttcaataatttcatagacaaaaaagagtcaagtttgttttcaataacatataaatttttcgtaataatctaaaacaatttttttaaatttttgcaaggatttttttgaaaaatttttgatttttttagcaattttttggaaaaactgaaatgttaattcatcataatattttgaaaaagcgcaatgatttgtcaaaatggaggatttatcaaaataaacaaaatataaaggcctgtctatttgcccacctttctgctgcactgtgtggaaaaatacgggtgccgtagcaaattgttcaaccgagccctgcaacattgaaaaaaaaaattcaaatagattcgctagaaaataggcaaatcttcttaaaaaattctgtcttttctggaaaatttaaaatttttcaaaataagtcaggtataatcctaaaaattcgtaaaatacttattcatttttacgtgctatatttatatgaacagtcgaacttctcgctgttttcattcctacataaatataatacaaaaaacgaatcgagacaaaaataaaaaagactcgtaaggattttgcgggatctagtatgttacgggcgggattcatctcgcgagatcccattcccaaaaattttgagtaatcttgatgtaattagaaagcttttcaaatactctattactttacaaaaaaac

SEQ ID NO: 31155 - DNA, 1573 bp, Heterodera glycines
ttcataaaaatttatatgcattttttgtttattctaaaaaataattaaaaatctatgcttatattcgtatttattaaaaaaatcgtatatttcgcgatgaaagtgaattattttatttgctacgtgagaaaagtgaattattttatttgcctatgaaccaaaaataaaattaaatattttctatagtaataatttaattatattaaaatatgaaaacttaaattcatattttatatgattcttaaaaaatatttaatttaataaaaataattcaacatcgctttttgtatataatttccgtttaacagttaaagaagactattaattattacctattgaggtttatacaagcgaatatacttatcaactctcataaaaaaaattaaattagaaaaaattaaatggaaaatccgtttttaaatcagccaaatttattcaattgaaataaaaaaaacaaatttattaccttagttctttaataaaaggttgctacgtcagatagttgatattattattaacatttaatattaaataaaaattttaaaaagattaaacaaatgaattggaaataaaaaaataatatttctagatttattttttaaataatattttattagaaaagttttaaatagagtgccacgggaccgggacctggtagaggacaattgagtacagctgagtaccaaggtcccggttttgaccgggatctggactagtcccggttttttcccggttttcccagccaaaaattcccggtttttcaacccgaaaaggtcccggtcccgggcttgcccaaaattcacggtcccgtggcactctacttttaaaacattgatttaaattaaataatatttgaaaaaagatgaaagaatggatttaaaaaggtgatgcgacatttgcgccgcgccatttgcgccttacagcaaaaatggacatttgcgccgctcagcaaagtcgacacttgcgccggtcatatgcccgcagacagttgcgccgcggatatttgcgccgctccatttgcgccgtgacatttgcaccgcctagcaaaaatggacatttgcgcggcgcagtcaaaaataatattttcattctaatatcaataagatttacactaaaaaccaacaataaaaataacaaattaaaaatttcttctacgcagttgaaaacggcgttagttgctgccccctgccccaaattttgatcgtcaatgccgagcagtccgccctattcacttacagcaaacaaccccccccccgacgaatatcctatgaaaccacaagattttctccttgaaaagaatcgaaaatttcagaagtacaccattaagacttgaaatttttttcaaaaattgatcaccaaattttgatctttttgattgaaaaaaaattttccttattcgaaaaagctataaatattttaataaacatttaaatacccaaatttgaattttttacttacgttttaagtctcttcataaaatttaaatgcctttttttttgcgatttttttttggtgctttttttcgagaccataaatacttatgataaataatttatgtaattaaatttaaaat

SEQ ID NO: 31156 - DNA, 1266 bp, Heterodera glycines
tcgttgtatatcagatcgcctggtatgccatcttacaagtccactatctctccgagaagatgcatctactgttctcggtctgggaggcggttctgcatgaggcggaggacttgatggaggataatgagcgggagttggaggaatgggtggggatacgagaacgtctcccaggcggcggtggtggtggaggaggagcgggaggactaggtccacgtcgaggacgtctcccaggcggaggaggaggtggtggcggggcgggaggtcggggtggtgtgtctacacctctcaatcttcatcttcgccgcctttccttagcagtacacttattcctttcgtcagctcaactttggctggcctatcttcaagttccctcctcattttcaagtatcgcctaagctgttgattgtaatggacattttttgtactgggatgtgttcgctcgaccctggcacggtctaaatcatgtcgaacagcatccagatttaggtctcccgtgttggacatggaggtgagaccacgataaatttcttgcgggacaagtaaaaatttatttgccatctctgttaaatgaataaaattcaacaatgatgagaggtatttatgcgtttttgttcacaaaggattttgccacttccattagaacgggtgtcaatagggcagcgaacaatccgccaaatcctgcgcctttctggacaagcactcgcttggcaccccgttcacttctcgctctgctgattcggcgtacagtatccacataaggcattagtcgcttcttctgtctggttgtcaaatggaagcgcgaagcgacgagattcaaacaaatttcaaccagcgatagtagttgttcagtgtttgcttttcgtataagtttcctgcatttttttccggatttcgtcttggccaaagcacacaaccagtcgcgattctgttttatcagctctccaatctttacttgttgctgcttatgccgctccatttttgggaatgaatacaactgttccttcgtcttcaccctcctgctcatccttaaatatgttggttcgcagccgtaacgacggatctgatgcagcgtgcatatcaatcagcaaatagccataggggacgggcggtcgctttgcgataagcatcaaggaaaaagtcgatctgacgcggaaagagttggacgccaatgttgcgaatggacaacagggaattaagggcccgcatcaacacccagtactgagcggacaggcgggccactttggattttacgttcaaacaaatttt

SEQ ID NO: 31157 - DNA, 1112 bp, Heterodera glycines
  unsure (1)..(1112): unsure at all n locations
aaaaatatatttttttgttttcggggcagtccccccgaaccgatgcgcccagatttatggggagaccgtatctttcgggaatagcttccctatagtctgtactttaattgtgcgttggatttttgctccccataaatgtttgagtaccacaaacgcacacttgaaaaaatcgatttttttgttttcggggcagtccccccgaaccgatgcgcccagatttatggggagaccgaatccttcgggaatagcttccctatagcctgtactttaattctgcgttggatttttgctccccataattgtttgagtaccccaaacggacacttgaaaaaatcgatttttttgttttcggggcagtccccccgaaccgatgcgcccagatttatggggagaccgaatccttccggaatagcttccctatagcctgtactttaattctgcgttggatttttgctccccataattgtttgagtaccccaaacggacacttgaaaaaatcgatttttttgttttcggggcagtccccccgaaccgatgcgcccagatttatggggagaccgaatccttcgggaatagcttccctatagcctgtactttaattctgcgttggatttttgctcccccataattgtttgagtaccccaaacggacacttgaaaaaatcgatttttttgtttcataaatatttttttcagaaagtcgctctaaagcgcaccaaattttatttacaacttaattttagcactctgatgctttagtatcaaaaaggaagatggagaaaaaattttttaaaaaatttttccttatattttggttatatcgttttgcttttggtggggtgcttggaacagtggaatcatgcgcacccgtccgatctggcaagttaagcaacgattgctgactagccaaaaggttcggtgccgtgatgaaacgaaccagcactgcttaccccgcggcacccggcacggtcccccaaaggaatggatttaattaaattctctccttcggggatttttttccattaggtcgtccgttagcgttcaattgctctagtcaatttttaaaaatttttgttgaaatatttgtcgtgctctgaagggcgggnggggggg

SEQ ID NO: 31158 - DNA, 1188 bp, Heterodera glycines
tagccaacagcaatagaaattatataaaatctactcctccccgttatcatataaatttaatgcattacagaatttactaaaatgtttgggaccaaagattgacgaacggaggatagatcggaagggacaaaggggtaggtaacattttttttttgttgaaaaaactgtaataactatcatttttaaaagcaataagagaccaatggaaggcataaaataaaataatttactttatttaatgtgtaacgggtttaattcaattattttggtttatttgttaacagtgttgaaaattattatcaacatcgcaattcccaaccgataatccactggcaaattgacaaacagcccatcagaagggcaacatgtcgacaatgctgaacagaaagtcgggcccgaaatttgcctggacggagtcattcatgtccacgagagtacaacacgcatacatgtgaaacgattcggcttgcaaaaattggcttgcttaagaatgaaacaattcgaatttgttttgtcttttgaatccattcatttacttacaaattttgtggccattcaatgtgaaaaaaatgccccggttgtttgcgtccattccgcatccgacaacatcaccgggaccaaactgtgcgaatccgtcaagcacatccggcacatatggcaatttgctgtggatagacccgtcgctccacaacgcaatgcttgcctcaaaatgcccgaccaattcatgcatcctcatgtgctctggggcaagtccaactccaacatcccttaatataatcaaacttatttgaaaacattttaaattcacgattgcatctgcataatggtaatttcaaagtaaaacaatccaaaggcactgttggccggcataaccgagcgcaccgacacaaaatcttaaaaaaaattaaatatttatttattttattaatattattacagttatttttcgacaaatgctcgaccaacaaaaaatcataaacgtaaattccctcgttgcaatgattaatgtcccagctgtttaattgctgggccgcgagaatggactgaaggcaaattttgatggtttcaacagttcgggccagattattctgaaaaaagtgaacagggtgaataagtaacaatataagaaaaaatgtcattttttattcaattaaatttattgtctcaaaatcatggccaaattttctt

SEQ ID NO: 31159 - DNA, 1190 bp, Heterodera glycines
ccgtggcattggcctcgccattgctcacaattaatccctttgaggcaattaaaatggacaattacctaagtcacaaagcaattgcaaaattcacaggtcaacaccacccaaccgccttcggacagttattttgcggggaattcggaatggaaccttataaatgtgagagagtcttttgctaatttaagtacaaaatcaaaaattcggttcaggtttctgttcggaacatgcattacctcgaagaaggcgaataccgtgccgaagtgagaatgatttggaaaatttattggcactctctctgaaaattgccgcccaatgctctgatcactacttaaccctttcctctctgatcaggtccatttcgtattcaatttgcgccgtcgtcccattttttacatcactgtgatcgtcgtgcccatctttctgatctccgctctttctattctcggtattttcacgcccggctcaaacgaagggccgcgcagtgagaaggtactcattttcatttaattgcttttattccatttctcctctttccctccccttcgatcactaccattttcccttatcctctgatcactcccctttcccatccccagctccctccaaacacggcattttcttctcaggtgtcccttggccttggttctcttcttgccatgaccgttctgctgggcattgtcgccggtgcgatgccaaagagcaattccattccgcttcttggctattacattctgtccgttattcttctttgtgccattgccgtcgccgtttcgatggcaataattcgaaaatttaattgaaaatgccaaatcttcattcattttaaaggcatttatgacatcatcaaaacgttatgttgacaatgcccgaataccaagcaaattcacttacaggtgaaaaagcgaagccacggcaaaaagcaaaagcaaattgggaggggagaattggatttatcattccctaaagaaaacctttgtacttcttggtaatggtaaatataccgtaaaaggatgtcactcgtacggccccaaatgtacacagtacgaagagcagaaaaaatggaaagaatggcacaacaaaaggggcaaatacagcggaccaagtcgatatcacatcaaattctgggggtccgcttctcagaggcttacaaaggcaagtggggaaaatggaaaagggaagggcatttt

SEQ ID NO: 31160 - DNA, 1045 bp, Heterodera glycines
aaaaaggaaaaaccctttttttgggaaattttttttttttggggaaaccatttttcaaccccccttttttggggccccacccccaaaagttaagcgtttttggggaaacccccccatgtccacgggggtgaaaaaaaggaaaaaccctttttttggaaaatttttttttttggggaaaccaattttcaacccgcccttttgtagggccccaccgcagatagtaatgcgtttttggggaaaccccacatgtccaacggtgtagaaaaaaagagatagccatttttctgagaatatttattcttctgagacagcaattttcaaaccgaccttttgtagggctcaaccgcagatagtaatgcgtttttggggaaaacccacatgtacaacggtgtagaaaaaaagagatagccattttctgagaatatctattcttctgagacagcaattttcaaaccgaccttttgtagggctcaaccgcagatagtaatgcgtttttggggaaaccccacatgtacaacggtgtagaaaaaaagagatagccatttttctgagaatatctattcttctgagacagcaattttcaacccgaccttttgtagggctcaaccgcagatagtaatgcgtttttggggaaaacccacatgtacaacggtgtagaaaaaaagagatagccattttctgagaatatctattcttctgagacagcaattttcaaaccgaccttttgtagggctcaaccgcagatagtaatgcgtttttggggaaaccccacatgtacaacggtgtagaaaaaaagagatagccatttttctgagaatatctattcttctgagacagcaattttcaaacctaccttttgtagggctcaaccgcagatagtaatgcgtttttggggaaaccccacatgtacaacggtgtagaaaaaaagagatagccatttttctgagaatatctattcttctgagaaagcaattttcaacccgacattttgtagggctcaaccgcagatagtaatgcgtttttggggaaaccccacatgtacaac

SEQ ID NO: 31161 - DNA, 1853 bp, Heterodera glycines
caaaattgtacgaaatgcatatcttagatttttccaaatttcgagagtgttgaaaagcagggaaataaaaactctaacagcagcctataaaacttttgtacgacctcaattagaatatgctactgaagtttggaaccctaatcttaaaaaagacatagataaaattgaacgtgttcaaaaaatttttacaagaaaagcacttagaaaatgtggttttgtgtacaaaaaatatggggaaagactaaaaatcacgggtttacacaaattggaagaaagaagaaaaatcaatgatttaacaacagcttttaaaataatcaaagggttcaccagcctcgatgctggaaaaagtttctttttctcagaaaggctcaggaggcctttacttttacgggtaaagcgccacacggccaaaactcaaaataattttttcaatagaatagtaaaaaactggaataatcttccagtggtagcggtgcaaattaataaggcaaaggaattcaggggtttactaaaagcaatgagttctgagtaggattttccatgttgccatatttacactatatttttatcacctgtgaatttttaacatttgattgatttatttttattcattttttattacggtattcattttgtattttttatttgaccaactttatttgttgttttctttttggcaccatataagagcactcatgtgcctttggtttgctcgataaattaaattaaattaaacaattgccttatttggccttatgtcttcgtcatgtctaaatttgtgtaactataaagttaaattcatttttccattttctcgatcccttcattaattttaaattatgtatgttttcgtttccccacacggaaaaataaaaaaaacattctcacacctataaatttgtaaaaaaaaaccttaggaaattttttatcagaaaattcaagaaaaaaaatttttagaaaattttttcagcgattttttcaaagttttatgatgaattaataatttttcttaaaaaattttctaaaattcgctgaagaaattttttaaaatttttccttgaaaattttatcaaaaatttctcaagattttttttcttgaaaattttctagatttgagaattttttaatttttttccgggcagaaacgatgcgggggaactgattggagaaacggtggggggaggaacgtagagcaccgtggcgctcacttggccagtgcatatgaaaaatttgtgaggtgagacacctcataagacgcgaaattctacgaatttcaaaaagcatcattttccctaagaaattttaaaaatatcaaaacttttaaattcgaaataaatcttagacgtttttcgagaatttggatgaacattcgctgaaaattttggatcggccccttcgtcaggtcaccgagtttataaagcaaagagagtcagatgaaggaagaccaatgcgccagatttggataaatacttacaaaaataggcgttcagcggcagacattattgtcattactagagatcggtattttgaaaaaagcctggacctggacctggattccatgttggacctggatttcctgggcaaaaatccaggtccaggaaaaatccaggctcctcgagacctggatccaggcctggacctggattttttgaaatttgttttaaaaagcaaacaaatgcttgaaaaaatcaattatttgctagaagcatctaaaaatatctaattaataataataatgtgtttttaaatttatttaatctgtttttgaaaacttgaaaaaacatcggtcacttgaaaaaataaattctaaaatttcgtccaggaaaatccaggttttttcctgttttgcctgg

SEQ ID NO: 31162 - DNA, 1384 bp, Heterodera glycines
  unsure (1)..(1384): unsure at all n locations
tttatatttcagaaagaaagacataatgttgattaattccgtttttatgattcctttttttattagtatttttcaacaatttttaattacattttcaattgcaaattcatcggtgagttaattataattttactaatttatttcattaattaggttgaggacaatatgctaattgcatttttgaaaggacagaaagaaattcaattcagtgagtattcaagacaaaaatatgaagcacaccttggaaaattgtggagaaaaatttgaagaatatttaaaggaaatgttcaaaaaatcggaagaaaaggcaaaaaaagataaacaatggaaagccaatgaaataaataatggcaaacatttaataattaagcattcgaaatttgatgatcaagggacatgggtgaggagacttaacaatcaatgaaagttatataaatccaaattttagactgcagatgctctattttcggaatttgtcaaaggtttagcgacaaaatcagagaaattttttaaaatggcggaagaatattcaaattatttaagtcgaagtaaagagaaagttttatttgatgaacaagcaccaataattgttgggttatgcgaatttgtggaaatgaaaaagcatttggccagaaaatatgaggcccatcttggccttgtgtatttgatgcgagcgaattggcaatgttcctattttttcaattttattcattgctggggacaatgccaaaaatttcgcaaatatttggacattttgtacgaatatttatttcgactttatgttgaaggttttatttttaaattaatgatttttaaatattataatgcatatttaaggcaaaagcaatgaattgacctataaattaccagcagtgaagccaatatttatgaatcattataagaactcaatgcaattaatttcagtcgtcagggctctaaatgaaattgcgatattattttggtcaaacgacaaaaacaaatttgaggataatgattattggaagatggttttggtaaatgatgtcgaattgaattatgagattaaagaggagaaaaatttgtttaatgaatttaaacaaaatattttgaaaaagtttaacgcaccaaaaaatatgcaaaaaaatggaaagaaaattttaaatttatcaaatgaaattgaaaacaatcttcggcaagaatttgatcaaaaaatggaaaaaatatatgaaaatacgaaagaaaatgccaaagaagaaaaggcaaaattggaaaaagcaattgaaaatgcgacaaatagtgaagaaaagaaagttctgngagttgaatacattgacaaatttggcactttcaattcatcgccatttatttacgnaatttgacaaatttggcactttcatttcgtcgc

SEQ ID NO: 31163 - DNA, 1309 bp, Heterodera glycines
  unsure (1)..(1309): unsure at all n locations
atttgacctgtttgttcagcaatgtcctgaacatcaccctacacggcaacgattggttgtccaccctcataatgcccagctgttcatccaccgcttttccctcatttgacacgggcccaggaaggctaacgaaaagcgaagccaaatcagtggacggcttcatctcgagtagaaaggaaccagaacgccatgactcatttccattcgacaaacaattctccataaatcgttttaaaaatattttgctaaatttattcgtggacagaaagaaatttaagtaagagtgccgaataagtaacaaaataaaagtctggatggagtaaaatttaaaatttatatcaaaaatgataaaatttgaaacaaaacaaaacaaataaattaaatttaacaaaaaaacaacaataaaataaactaacaaggacttcaattgttgagcaaattaaaaacagatcaaagaaaaccaaatatcaattcctttgattttttgggtataatgcaccaggaatttgaccacgaacaatgtgccactggagaggatagtgagggtcaatgccattccaataatcctcgacaggcgcatgtgaaaggattggcttcattttgataaaatgtttgatccattccaagtcgtatacagggccaacagagggggcatttctggagaaaatcaaattaaatttgccaacaaaatgcgaattcaaatgctcacctttcaccgctttcctcctcgtcctcctgaatacaaagacccatctcttcgccctcattatcggaatattccatcttttttgcttttccggtattcctttcccgcactaatcgaagcgtctcgtcgtcataaatcagcaaatactcgccttcattttgttctttgagcccatcgaggagtgaagataaacgctgaattctcgtagaaagtcttaaattgaatttagaagttaaagttatggtcgttaaattatttgctaaactatacaatttgcggttctcttggtcaagttttgaccagtcagaagccgcctttctgtcaatttgcatcagatgaagttgacgcatccgttcatcaaagtgcacgcggaaagttaagtgctcttcggagcctttcaatgtcgcagtgaccaaatccatgagaatttcttcagttgacattttctaaaaatttccatgtatttaaaatgtacaaaaatgaattttatatatgggtctttccgttcatttaagaataaaaaataagttacctccgcggcgatttcaggcaaaaattcangccgaacgctcagtgaaacagcgcgcgaattttcaatcccat

SEQ ID NO: 31164 - DNA, 1921 bp, Heterodera glycines
taatttatatcgattagatcattttggaattcacatgctctccttgatttgttaattttccttatatttctgtttttggctttatttaatctatttaatcttcactatggtcatttagttcccttttattgcgttttttaataataatttttagataacgaaataccattgcaaatatttttttcacactaaattgattaataaagattctcattttctaaatttttcgtttcttttttggaatattttaattaatctattcgattttccatatttatattgggaaaaaaatttttcattttaaaattttatatgtcattttttaataagatatttttaagataattgcatgcaaaatttcttttcatgattatttaattttttattttatttttattatttttttaaaattattttcaaaatatcttgtattttatttaaatatctacttcaaaatagagagttttttgaaaaagattgaattttcagaatttctttattacatgaccgaaagatttaaatttaaaactttatcaaaaaagaaatgatgaaatcaaaattgaagtacccatatctcagcgggtataagtcctagagacttgcggtcttttgcatactgtagaccattttgtcctttttctgatgaacctaacggttttttccagaaaattttcccaccccctaggattttttttgaaaatttccccgatttccaatgtattttggggtgtctagatcaccatgaaggagtgatcggatcaacttgttgttaaatacttttttgatcagcatcaaaacttatgttagcatgaattatttcagatttttctgtgctctcaaatttgagattcaaaaactggtgttaaacatatgcaccactgaaaatggggtatggtacacaaagtcaactgtaattcgggtttgaaccgatattttgcttaatgattggtatcatttgaaagccattaaaaattatacaaaaaatgtcaaaacatttggtcatcaccaatatttaactttttatgaagccaaatttctcgaaaaggctagtggtgttagacttatgctcctaactgtatgcactgtgaaagtgatacaataaatttttaatttttaactttgttcacaaaatttattcacactcatacataatataatatgcaatgaagttttgtatggaaatgtcaccgtttttgactgcctcaacttgacctcaaatttgcactgatttttccacgtttcgatacgcgctggtgtacaaacatttctatgacataacttaattgacaatttggagagcaatttgcaattcgcaaaggcaatggaatgccgaaatcatttttcgagggcaaatcttatggattcatacttggaaaaaaaaattttccttgtgcacaggttttcttaaaatttttgcataggctagactatttttgaatcttttctactaaattttattttttagaaatttgttttctaacattgtctcctgcatttttacaagggcatttttttaattagaggtcgtttttggctggcatttcactctagtaattgttttctttgtcatcatcgcgtgttttttgtttatttttaaagttctgtgctttatcaaaatgcaaacatatggatgggcggagcgagtgagtaattgaaggctaattaatattgctgttcgagattctcggggtcaagtctcgttctcggaaatttttctgtagcgttactaattaaccgtaggtttgggtaaaactgcagaattgcagctcgcgccaattaaaaaaaatgcgaataaggcaatacgagatgcactactctgaattatgcattttattttaattctgcgcataaataaatttttggcattatgattcatccattacattagcataaaatagcggtaggggtcaactgcgtctga

SEQ ID NO: 31165 - DNA, 1629 bp, Heterodera glycines
  unsure (1)..(1629): unsure at all n locations
aaaaaaccttttttttagctttatctcgatttgcttaattcagcnaattttgttctaagaaactatttcatcttacatctgatcaatatgattccacaattttggttcgtatttcaaatttataatataatgaactattcaaattaaaattgcaacgatagcccgtttttttaggcaaaatgtgccgctatgaccatggcccgttgtcaaccgctgaacgcgttagcaatgttgggcggggcccgactgtgccaccacacgccaccaaactgcacggacgccattcgtccgcttggtccgaaaagcaatgtgccgagttttaaggttttcttccctaaactgataaaaaaaataatatttgaatcacatttaagggccaggcaattgtgaacgcggaaatgaagaccatttcgtacgacgactacaagggcaaatggttgatcttcttcttctacccactcgactttacggtactttgcgaaatattttctcgggaatttcttgtcgtaatttatctgaacttgacaaaatttcagaaatttgactgatttatagagaaaactcaggaaatttgagagatagagaatgtttaggctcttgtttctggtttcctaaatttggtgccatacaatttttacgtgctataatcaattaaagggtcccctttttggttttagtaaaatttccactgtaagtagcgccatcaattgagctgtttttgtgcaaccccgaagttgaactttacttttagttttgctttttaagttccattcttttccccgacccttcagtttgtgtgccccaccgaaatcattgcgttcagtgaccgcgtcgccgagttcaagcagcttggctgtgaggtgatcgcctgctcatgtgactcgcagttctcgcatttggtccttatttgttccattttctgttgatttaatacgatccgccgtatgtttttaggcttgggtgaacacaccgcgcaatgatggcgggcttggcaagatggaaattcccgtgctcagtgacttcagcaagaaaattgcggctgactttggcgtgctggacaaggagaccggactgtcctatcggttcgtttttctcggccaaattctaatcggtaattgaaaaaagtctaaacttttcccctcatttcagcggtctttttctgattgaccccaatggcactgttcgccattgtttggtcaacgatttgccggtgggccgaagtgttgacgaggcattgcgcattctgaaggccttccaattctttgagaaacatggcgaaggtccgtcatttattttttttttaaattttggcataataaatcgaaaactgactcaaattttgcgaaacgcacttatttacaaaagttttgctttagaaatttaaatttttctgctcccctcggattacacgggctttgggtccggtgcaccccaaaacgtcgtcggaagactttttgaaccatanactttgttcgctgtcaatcaaattaagaaattngttggtgttgttcgatagctctatgtgtttattattaatttgcaaatctcaaaaattttcgttaagttttaaaaaaagtatggccagaaggactcaaacccagtaatcgaactttnttgctcagatttttt

SEQ ID NO: 31166 - DNA, 1263 bp, Heterodera glycines
aaaaaagcttggcttgagaatcaagactttcgcagcactcaccactaatcaccaatgttttactcgcacacctcttcattgtgcttttcatttcaaattttgaaaattaatttaatcaaataaaaataaataaaaattaaagatttttaaatggatgagcgggttgcctttcgtttttatttgttttaattgacaaacaacaataacaacaacggcacgtgtcttctcgtctgctagctatccctattatacaaatcgctgctttttccatcgatcgttcgttgatttgctcgcctaattgattatgatggccatttccgagccgtgccatgacattggaggcacaacagccggtggcactggtgcaggcagtggtggccatgccgccacagcatggtcaaacagtacggccacaacaacaacggcaccagtgccaagcagcggtggcggtggcattggcattcgcttgcaccagcaggcgagcgacgacgaggagaagtgcctgctgacgcccacctcggagcacagctgttgcccctttgacaatgagcaggtttcacagactgtggccatattttgatgggttttttggcgtttattttgtcggtctcgggggctaaggattaaatttttatgaatttttgtataattttgctaaaaatggactctaattgtaagagatttgagtggtgtcaattcgtttgtcataataaatttgttttgcattagaaatgctttggaaatacccattttccgacattttcaaataaaaaaaaaacccagcttaaaaaatcctggaaattttccccaatttttagtccattttcagaaatttcaaagcacccctctactttagtaccccacttttttgcaaataaaaaggctcaaaattacaatatttgtgttgttttatctgcattttgcacaaccgagcgacacaacaaaaacactaagtgctgataaaatgtgaagaaaggggggaggtgaatgaatgataagaaaaaagcaactaatgtgaccgctttggataacccccgcaggaaaaaggggaaaggttcgccgaaggacgattcgccgacagacgattcgccccgacaaaatgtgggaccgaatgtttttaaataaaattgaaataaatcatcaactttctgggaaaccccattaattaacacacactcgcgctgactttatccttgacatatatgtatccatttagagcgtgcttttgtaatgcgatacaaaagttctctaaaaagacatatg

SEQ ID NO: 31167 - DNA, 1725 bp, Heterodera glycines
  unsure (1)..(1725): unsure at all n locations
atgggtttaagaactaatttgagtcttcgctaaaaaccttctactcaaaaacttcgatcaattaaagaaattattatatacattaattattcactttcatcaatttggcattgttgctgagatcggcagatatatttgcgtttttcacgaatagttcgccttaaaaaagcattaaaatgagcaaatataaaaaagttaaattaattttttgcctgaaaaaatctgagcaagcttgacatgacggggccccaaaattatagcattgtatagctgatttacagatggcacacggttccgagagaaaaggacgtattcgacggcacgaagaatgattagtgcctggcttttttggcattttctgttaaaataattttttctaatttaaaaatttattttatttacaaaaattttcattaaaaaagtgattgaaagttagaatatttaaaaaaatcaaattagttattgataatattttaattgtacaaactatttatcctcaattttttttttgctatgagaaagtactggttacaactaaaattgttctaataccatgtgcaaaattcattaggaccacaaccgtaatttgtgtataattaattgactgcacaaatcttttccaacaacagcagaagaggtgtttcccccataatcctcgacacattctttctgcttcaataaaatgggatgcagatgattgacaatttgtaaatgggaaaaaaattgagttgtatagcaaaagtagggattaaattgcagggattaagagacaataatttcttgaaatatacaatatatatttatttaatattcaaataaaaatgcataaaatggaatgtaaatgattaatttaaacatagaagtacactccgacaatcggcggggagagaaaagtcggggatcggagatgaaattgcccgcaaagttagcggatcaaaaagtcagggatcggagaggaaattcaaaaaacaaaaattgtagggtatggatggaaaaaattaggaaaaaaatttatttgtcgagtaacaaaatttcataaaaagtcgaaaaaaagataaataattaacttataaattggcatttattcgtataaaactaatcaattaatgtttttgcttttgcattaaaaagttaaaaaataaattttgaaaaattttagaataaagaaaaatgagtgaaaatattcaaaaaattaattatgtaatttagattgaaatattttgtcaaattaatgtttggctgaatgaagaaattatttgatacatttaatagtggtattttatttgtttttatcaattttcttgagttttagataatttatttatttaaatattgtgatatttaattgtttttttatcaacaagaattttcgacagacttaattacctttttaataaccaattgacaatttaaaatattttcatcatttaaattattaaccttaaattattcgaaaacaattttttctgtttgtgcatctgactaatgttaaaactcacaaaaatgttgtccgaaaattgtctatgcactgattttacaagaaaatattttttttaaatggacatttagccacctgtgcaaatgttggggatattttttggccaaaaaggatggatttattaggccaatcattccactttcggtgactcaaaaaatttcgaataatagtccanattaatacaagaagaaaatgtaaaaaattgtaatttaattttaattatttca

SEQ ID NO: 31168 - DNA, 1019 bp, Heterodera glycines
gggtattattttgtaaagtctttttttcaccaataaacttttcaaaccccatttttcgcaccgtgaatgttatttttatcgaattctgaaccgttttgagtagattagactagaaaaaattgaaaattttgaaatcatgtttcccactcccttctcccaggggtattattttgtaaagtctttttttcaccaataaacttttcaaaccccatttttcgcaccgtgaatgttatttttattgaattctgaaccgttttgagtagattagactagaaaaaattgaaaattttgaaatcatgtttcccactcccttctcccaggggtattattttgtaaagtctttttttcaaaataaacttttcaaaccccatttttcgcaccgcgaatgttatttttattgaattctgaaccgctttgagtagattatactaaaaaaaattgaaaattttgaaatcatgtttcccactcccctttccccgggggattattttgtaaaaactttttttccccaataaaattttcaaaccccattttttgcaccgggaaggttatttttattgaattctgaaccggtttgagaagattatactaaaaaaaattgaaaattttgaaatcatgtttcccactcccttctccccgggggattattttgtaaagtctttttttcccaataaaattttcaaaacccctttttttccccggggatggtattttttttgaattctgaaaccgcttggggagaataaaataaaaaaaattggaaaattttaaaatatggtttccccccccctctccccccggggatattttttgaaaaatttttttttcccaaaaaatttttaaaccccccattttttcgccccggggaatgtttttttttttgaattctcgaccgcttgggaaaaaataaaataaaaaaaattaaaaattttaaaaaactggttccccccccccctcccccggggggatttttttttaaagttttttttttcccaaaaaattttgtcaccccccttttt

SEQ ID NO: 31169 - DNA, 1482 bp, Heterodera glycines
  unsure (1)..(1482): unsure at all n locations
tgatttcatctctgatncatagtttgagagtcaaacccccttagaggccaccattttgccaaataaaaaaaaatttcttgcgaccttttttaaaaattgcggaacaaattcatccattccctctcaaaaaatccaaagttcccccacctctgatcaccaggaagtccctcctccttgtacaccccggaatcagccaataagaattgctcctcactgtcctcactatgcttgtagacctggaaatatggggaaatatcggaaataaaattttaattttcgaatttttttcccccacctggtacgcctttgggatttccaagttgcacaattgattgggaattgggggcgcttcatttatttcatggcgtgctcgttgaatcagctataaacaataataatgaggtctaataaactgtttttttttcatttcgggtacaattcatttcccgctgaaaaacatttttttaattaataatttttcagaaaaacccatagaattttttctcatataaaagggatttttaatttttttttttttttttgttatagttttttgacaagaaaataaatatgggggtgttcggagttgagcaaaactgcaccttttttgtggcacttttgcttggcatcacggacagcaccgcatccggcacgttcatcaattcattggctcgaatggttgccgggtcttcgcccgtgaccagcgcacgcttgcgaatgttgctgacaatgcgcaaccgctccacccgtgccgcacttgatgagcatgtgtgctcgcccagctgacgcaccgggttgttgtgcagatcggtgtgaagacggcctttaaacagcaacaatcacaaacgacgagagacataatgccaaaaaaaaaaaaaattttatttaaaaaatttggcaatggcaaaattttgtggtttctgtaagataaaaaatgcgcttatcacggatctgagagcttagattttgcaaattacatgagtctatgattttcatcaagtaatttatttttcccataaattgttaattttctaagaattttttgtttgtaaattccgtgttctgaatggtatagaaacaaatgctttagaataagctattaaatgtatgaggaaattaaattttaatttattattgctcctttaggggtcttatgaggcaaggtctctagggtttaatcccgtttgactgcgggttgttttccgcaatttaaatcaacatgaaatttttctgtcaatatgctaaactgccaaacttctggatcaatgagttcagattcgtgatcagcactttttttcgttttcacagaaacacatcattttaccattgccaaaaatttgaaaaaacggaaaattaatttttgttggaccccggcacttgacgatgcgtgaattgaagaactcgcaacgccaaatttgatctctttgctggtactgagtttgtgccgaacatagagcataccgtcctgcaacaatttgggtt

SEQ ID NO: 31170 - DNA, 1735 bp, Heterodera glycines
  unsure (1)..(1735): unsure at all n locations
agtcaacgactgtcgatcaaatgcanccggcagcacttgtcactgtgcgaattggcaccaccgtttgtcgctgctggtacaactgacgccgttccgctaaccgcggcgcccgaggcagccgggggattgccagggtcgccttcgatgatttggttcaattgttggagcagctccttgccgaaaaagtgccaaggaccaacttcgaacttcatttcggtctaaaacgaaaggcattaagtcacagaaatcagtgattcaagagcttattgttagtctaaaaatggtctattttccaattgtaaattttcctttacctgcccaatggtgaccattgcgcgaccctccaaaatcaaaatgaatttgtccgatggctgcttctttacatacagccgcgctttgcgcgggagcgccgtcttcggacagttgaagtcggccaaatgggacacctccacccggtgcacatgcgcccggatgaccttctcgaggatggcctgcgcgattctgtccgtgtgaaacgcacggcggaaagtgccctccaaaaactgaaaggatgggtatagtcattggtaaatcaacgatcagtgataggtgcaagcgaaagtcaaaaacatatccgacgaagatctaacacaaaacgtaatcagaatggtgataagacaagaaaagtgaatgacgcaacataaaattaattaaaagtacaatatcaaactagtttttaagttatttgatagcttatattttacaattaaggtttacaaaaaacgagagaattttacgaggacaataaaacaaatgattttatgaattgaatctaaaaagaacaaaatcccatcttgaccacccctacacacaaagtcagcacatttatttattctcacacgcatacacacctgaatggttacgagttgcatttgcatagaaatctgacaagcttccccgtcgtcgatgaacaattcaaggtcacggtgctttaaattttttcaggggtattttgtgatatctcttccattttcttaacgacacttgttggcggcgcctcttgattttggtgacattgtccgtgacgacgtccgtttcgtcgacgatttccgcttgtaaaatctcctcgacgatgtcctcaagcgtcacaagcccgaccagttcgtatttgctttctttgtcctccgtcgaaggggcaacgacacggtccaccagcgccatgtgataatctggaaattaaagacaagcgaatatttatcgtttttatcagtaagagttaatacttaccgccttttttaaactcctcgagcattgttcgtagcggggtattttccggtacatgacgcactggatgctggtagtactcacacacagtcttaacctgaattatttttttagataaaaatgaaaaatcaagatattagcccacaaataaattgggcgtcgggatccaacagaatcaagtccttgacaaaaagcagagagaccacattgccgcgcgagccgtcgaatatcggtatgcgtgtgtagcccgagcgcacaatttcggcgatgttttttgcgttgagaattgtatcctgcggctgcatgaagacgtcctannaacaaataaagtacacaaaaagtacaaacaaattctcacctttattcccgtcatgacgtccttcacaattttgtcgttcatctcgaaggcgccaatcgcaatcttcagctcctccgcttgcgccgcattcttcatgntcagtttgatgagctc

SEQ ID NO: 31171 - DNA, 836 bp, Heterodera glycines
atcaaaattagaatagagaatatttataaaagtttatctttccgtattttaaaacaatttaaaattgggcatattttgcgttacaataacaatttttatggtatttaataaattatctcaaaaattctccaaaattgaattttttggtcatatctgttaatcaattcgtaaaatcttcaaaatttcccaccggcgcaaaaaatattagtagcaatttatacatttcgctgatccttttcccagtgggaaacgaaaagtcagttggctctccccggacaattcccgagcgactccggagaaggaattcttctccgtccctttttctcgttatcccgagtccctttttcgatcccggataaaattcccctttggttttccttcccactcccatcccaggccgtccctcaggattttcctttttggctatttttcactaaaatacatttggaactcaactccttttcgttctcaccgatgtcacattaaactcataattccgttttaccgatttcatattaaattcgcaattccattctcacatttcaatcacaaccattttccatttttaaataaataaatcgatcgtattaattgaataatggagaagttaaagaaaaggacatggaaatataaagagcggagaattgcttaaagggaattgggcaattaaaagtggaatgggaaattggggaaaattgcaagaatcccggggaatcacaaattcgggaaggacaccctttaattattcgagcctggcgcattccctttctgtataaatgatagtgtaaaaagtaaatgaatttaatgtttctataaatttatattatttttaatta

SEQ ID NO: 31172 - DNA, 1445 bp, Heterodera glycines
cgcctaagggaccagttgatccgctggctcatcatcattagcatcattcaaccggttctggcgcagttctcgacgggtgccttctcccagcgacaaaacgcggcggcgcctttttttttgcggacgttaattacgccaaaatatgacacgtcgtcgcgccgtcccttggcgcaggaaggaaatgtcctcccctcggcgcatcatcagcagcctcggctggctcatctccattggcgtgtcggcattgatcagcactaattgagcagagcaaaagagcaaaggaaggccgcggattgatcactgatcagagccaatcgggactctgatcactaaactttctttcactaagtttctcctgttttttatgaatccaatcgccttccgccccctttcttaagccataattttcgcttccattttttgtctttactaaaaaactaagtgcaaaaaacaacgaatgataaaaaatattttaaaatgaaaagtaacttatttatgataattttggctttttcttgtagcgtttgcaattttgcaatttaacatattttgaaatataatttaagtttaattatattaaactattttattattatccattaattatgtaaatttttcccttttgaatgcatttgttcgagaaatgaccgttttccgtccgttgcctttgccgataatttttctgctgtttttggcacgtgccttctgcgcactgccgccgcttggccctctgaccgatcacttcctcaattggctggtctcaaatgggtacgaaggcgacgcgttcgatcggcctgacattgggccaagcggaagtttcggaggcaaactgaccacggcacaacaggtgagaatttgggggggggggaaacagtcaattaaaatttgaattaattgtttttttagataacgaaagaaccggtcatttttatacatggaacggtgggaatattttaatacgattaaattaataaaatgattaaaatgctcaaaaataaattatgtaaaaaatatttaaaaattcgatgggcagggagacgccgcacttcacacgcaggcgccccaagcgacaggtgacaacaaattagcatgaaactttgcaattatgttaattaatgcaattgctttcttttaggctggagtcggtccatccaatatttcctcgagcaaaatgtacagaaaaatcattaaaaccaaaagttaaattgtaaagcctgattttttcattttgctacttcagtacacaaatgccgaactttacgccacgacttggggcgacacgtgggggacgggaaatattctgggtaaaattgataataaattaagataaatcaaaaacaaaatccatttttaataaagaagagtttcctaaaaaatttaattggcactaattaacagatggctatgccaccatgcacacctgcttcctatttggtcaattttga

SEQ ID NO: 31173 - DNA, 1247 bp, Heterodera glycines
  unsure (1)..(1247): unsure at all n locations
ctaaaaaaggagtttgagtacctttccagccattctaaaacaccgggccgggacgccaaactcagacacagtgaaatctcaagatttngagaaattcctaaggaaatgccaaaattttgaactttgtatatcttgaaaagaacataaagggttttctgatgtgaaacttgtataaaaactgtcaaccaatcaatttgcctctgtacagaatcgcttttaaaaaattcaaaaataaattggattacactagaaaatgcttttgtttggcatacattttacgctgtctaatcacttattatcaaagcttcatggctttatgttacggcttttctcaggtgccttatgtatttgggcattgatccgtctcagcgcaacatcagaaaaatcgctcaaaacaggcacttgtcaaagcagattttggaggacgaggaattgatggcattaattgacgagcgaaatttgcctccggggatgccgggagaggaagagagaatgcgtggcgtagagggagaagagaagggaagggagacgcagcggaatggacgcagcaaacacaacaaaataaaggaagaggcgttgccggaagacgacgaggtgagaatggaggaacacggcacaacggatggaggggaacgaatggggatggcacaaccaatggggcggggatggcacagcaagcttcgggagggcttaatgccccgtttggtcaataaagcttgccgatttagctttcaaaaaagatggctcctttcctaaccaatcctgacatctgcccactcgtgggcaaaaatttggagggcctttgcccggcaatgatttgcaccgccggcgtggacattctccgcgacgagggaattctgtacgcacaacggctccggcaatttggagttgcggtggaatggaaacactacgaatgtgaggcattgccgaggggtggaggatttcgaaatgcgtttctttcagacgcataccacggcattttgaacatgtgcaaaagtcggcagcgtctcagaatccttacggacatcagtgaatatttgcagagaacgctaattgatagctgacttttgctaagggcggcggaaacactcaaaaaacgaaccgtgggcaaaacgccaaaggaatagctacgaattgcgaaatatttaacttttgtttttagtttaaagatagcgaatagacagaatagagaggagggagagagagagagagagatgagagaaaccgagagaggaaaaagtaaggag

SEQ ID NO: 31174 - DNA, 1838 bp, Heterodera glycines
ggtgttgtatttttcttttttattgcatttttgttcactttttttgggcaaaacgccaaaataggtgaaaataagtttttaaaaattttttttagttttttaggcgctaaaaataaaaacctagaaaataggcactaataactcgaaaagtagcttaacaacccctaaaaaacatgtttttcgtgcatttcagaccctagggagctcatgaaaaaaataggtaaaaacctaaaaatattatccctagtaataattggagaaatagaacggttgtgtatggatttccatttttttgtatgtttttgctaagtggcacggcatttttagtcgtatttaggcacttacaaaattcaaataaaacacactaaaatcgaaagatacatcttaaaacgtaattagatatctattaataaatcattccatttttaattaatttattttttacttttaggtataaatcacgtggaaaatacacatccttcaaagggatcatcgcattttgttgtattaaattggcatttttctgttttgtcacttacagtggaagcgcagcccattgggaaaagtggacacaaaatgggcaattaaatttgaatttaaattttgttttcggatcatttagaccggtgatgtgccatctcggtgacccagcccatcagcccgaaactgcttattacactgacatcaatgccttaatttcatattgtgccgaatttgtgtgctatgcgctgatttggctgatcatttggagaagaacagcacaaagtcattcagtttaattaggattagagaaacgattatattaaatttggaattttttaaatttgatttccatttatagaaccctattttgaattagcgaattaattaatctatgaaaaataattaatgcatttttagttacggaacatgtaaaaaagttgacaatttctgtgagtgttctcatgtcaattgggctcttatgctacattttggtcaacacataatattttaaattaaaattaattaaaataatattaataataatttatatcccatttcagaaccttttcattgtgaagggcataattccgctgctcagtttggacccatttgcaattgaattttgtgtctttccgatcagtctttttttccaaacgttggcatacggaagcagcgcaccagtgctttacttttgcaagtgcaaaacacgaaaataaaagtttttcaaaaaagtttggatcagaaattcatgcctacccatggctggacctgttttttcccctgaaaatccaagaaaactcctagccctggctggacctatttttttcctaaaatccaataaaactcctagccctggctggacctaatttttttccctaaatccaataaaactcctacccatggctggacctgttttttctgaatatccaagaaaactcctagccctggctggacctattttttttctgaaaatcaataaaactcctagccctggcttgactgttttttctgaataatccaagaaaactcctaaccccggcctggacctatttttttttatgaaaaaccaaaaaaactcctaaccctggtttgattgtttttttctaaaaaacaaaaaaaaacccaacccctggtgggacttatttttttttttaaaaaacaaaaaaacccccacccctgccttggattgtttttttttaaaaaaaaaaaaaacacccctgccccgggggggattgtttttttgtaaaaaaaaaaaaaacaacccacccccgggtgggatttttttttttttaaaaaaaaaaaaaaaacccacacccccggggggggggtttttttttttttaaaaaaaaaaaaaa

SEQ ID NO: 31175 - DNA, 1125 bp, Heterodera glycines
cggaaccagcacttgtgaaaagcggtttgtgacggaacggtggtgatcacacgcgagcactgcgaagtgaacccgaagaacgagtggatgtacgcgcagtacgcgtaccgcgactttgagaacatttacaagctgaccttcaacgtgataccacgacggatgtccaacacatttaaactgatcagcgaagaatgaatgaccgacccgaaattttgtgtattttcgttgttttttatgaatgaatagtcactgattttacacattattcctatgttctttaaggcttttcttgccatttaatttttgtttatttatatatatatatttttgctaatttgaatattttccattcattccaatggaagcgcctaattcgccgatggcatcggcacagaacaggggccatggcgttgacccgtccactgtcagtgccgatttaaacgacatttgtgggggacaccgacggaatggcaaatgaagaagaggcgggggactctattgtgaaggaaattgtggcggcattgttgtcgggcggaccgttcccagcagcgaaaaactcaaaaatttctcggtcggtttttttcgacgagcaaaccgaaaatcgaaaaaaaccgaaaaaaaccgaccggtccgatctctactatacactatttacgcgacaaactttcacataaaaaataaaaattatttagcaatttaacgcgaatttaaaaaaacagcaaatttattgtattaagtggtgtaatctgcaggaaaaaaattttgatggaaatgggaaaaagcattttgtgccaaggaagcattcctgccacaaatttaggcttcaaaatgaaataacccgattctcgttattaaaaacagaattgtggaaatttataaaaaaaataaataaataaaataatacagatatttttttctgattgaattagtattcattctcgagcaacccaatgattttcaggccaaatttacgggtttcaaaaagtaggaatggaatccaataaatgttattttcttctctactagagaccggcgcgggccgggatcccgcgcggaagtttcgggatttgcgggattagggatcccgtcccgcaaaaagtatggattccaatcccgcagcgggat

SEQ ID NO: 31176 - DNA, 1152 bp, Heterodera glycines
  unsure (1)..(1152): unsure at all n locations
aagtcaatggcgcaatgtttcgggattttacctatagaattaagaataaaactgacaacttattaactgaaaattataggtgaatcacaagataattcaacatttgggcttaaaatccggagaaaagtcaattggcgcaatgttttcgggatttacctatagaattaaagaataaaactgacaacttattaactgaaaattataggtgaatcacaagataattcaacatttgggcttaaaatccggagaaaagtcaattggcgcaatgttttcgggatttacctatagaattaaagaataaaactgacaacttattaactgaaaattataggtgaatcacaagataattcaacatttgggcttaaaatccggagaaaagtcaattggcgcaatgttttcgggatttacctatagaattaaagaataaaactgacaacttattaactgaaaattataggtgaatcacaagataattcaacatttgggcttaaaatccggagaaaagtcaattggcgcaatgttttcgggatttacctatagaattaaagaataaaactgacaacttattaactgaaaattataggtgaatcacaagaaaattcaacatttgggcttaaaatccggagaaaagtcaattggcgcaatgttttcgggatttacctatagaattaaagaataaaactgacaacttattaactgaaaattataggtgaatcacaagaaaattcaacatttgggcttaaaatccggagaaaagtcaattggcgcaatgttttcgggatttacctatagaattaaagaataaaactgacaacttattaactgaaaattattggtgaatcacaagataattcaacatttgggcttaaaatccggagaaaagtcaattggcgcaatgttttcgggatttacctatagaattaaagaataaaactgacaacttattaactgaaaattataggtgaatcacaagataattcaacatttgggcttaaaatccggagaaaagtcaattggcgcaatgttttcgggatttacctatagaattaaagaataaaactgacaacttattaactgaaaattataggtgaatcacaagaaaatttcacatttgnggctaaaatccggagaaaagtcaatggcgcaatgttt

SEQ ID NO: 31177 - DNA, 2383 bp, Heterodera glycines
ctcttaaaaaaattattcgcattaaaatattatttttccccccgcttgtaataactaagccagcgaaaaaatatgtaaaatcataaaattcagggctctatttatcatgcaccgataattaggacatagtttccactttgtgaattcctattctcattttagccgaaacagttatcgagtttctataaaagtttgaaacattgtccgcctcaactgctgacattggcaccttcatgggaaccatctcattgggaacctacacgttgttgaaggctgcgttcccgctcggttcgcttgttgccagtgccttgaatattgcaacaaaagtgagtcaatatccccatatatgaaaatacggtatttaaataaatttcagccatcgaaatcccaacatttttatttggtcttttaattaaatgagtttccctgatgcttacatatcatgcgtttgtttttttcttctgacgtgctattgggattgaaaaataattattagacactttttaccagttatttaggtgctaattgggaaacctcgattatttggcagttttcctttattacacttatcgctatttacaaaatatatttcccgtttatacattttgtttttggtttagcctgaatccgaggaatacaaggccttccaacagcttcacaaaaaaatggatgaaaattttgataacatcagaacaacaattggagtagcgaggaaggttatatcgatggaagcacgattgcttgactacaaaaatgtaagcttaaaaataagtttaaattattatatgatttaagtatatttttttcagaaggttcaagttccaatcaatccactccgtgacctgctggacttgttttggaacccggctgttccaaaaaaggcatcggatgtcgacgagtttcgattgctgtgctatcgttctcacgataagacgcccttaacaattcttcatgtgaatatattttttaatattaaataattagtttggtaaatactaatcagaaggaaaattttagagaaaagggattgttttcattttttgcgtaggtattttacattttttgaattagaataaagtcacttgaaaaaaagtctaataaactaaaagatgttattgatttaatgctttaaaattaatatttaaatttaaagtgatttaacaaaatttatggattactttttattgtatttttatttttaaatgaaaacaaaagaacattttaatgttttaaaaaaaaatttttaggccaaggctccgatttattaaactcagggttccgctctcaattcggggtttaatgggtaaataattttttgtctacagtacatacgagagcacacctacgacgaatgcgtggcagggttgtcaccagatcaaatttcacagcattcaatgtttcacccattcttgaacaaaattcggcttcaaatcattaaagaagtggagaaggaaaattttgacgggttagtatcaagtaaaaaaactcggattattttgcaatgcaatcgagttgggaatgctaatgaatgactagctaactatcagtcagtggacaatctttcagaagagataatccgtcagtgaacccgtcagctagttttagtgccttttttgcgattttggtgcctaatgctgggcacgtaattttgaagccttttttgacttttcatgcgtttttcgtgccttttttcccgaaattgatatgaaattaactcccaaatatgtaaaaaatgtattattttttcggataaaaaatcttagcaaaaggtgaataagcacaaactgctataaaaagatctaatttgtcttcgaataacgttttagctagcttagaaattaatttcgacattaattttttttgtaaaaaagaagattttagggaaacaattttgagaagaaatttccataatctcaaaaattgataaacaagaagattagtttaaaaaaattattttttcaatgtttggttctttttttcggtttgtgcatttttatgccttttttcacttttttcttgccttatttaggtgcctatttaacaaaattttgtgtctaaaaattctggctctactaatgaaaatcattttaaaaaactaataaatttttctacaaaatgataatttttgaaaattttttaaatttaatcgatcaattaattttgcaagatttttaatcattgctcaaaatatctgacgaattgaccactgaccggtttttcaattttatcaatatttaaccaatgtaaaattcaaaaaatattatattatttaaatcgtgatatttgcctcatgtttatagagcttctcatttggttcagtgaaattgatgacgacgatcgcaaaaaattgttgaaagaaatggagaacacaatctttgctttt

SEQ ID NO: 31178 - DNA, 1309 bp, Heterodera glycines
  unsure (1)..(1309): unsure at all n locations
tgcagaatgatttaagccaaatgcatgtgcaaacaatggaaaagttgcccatggtcagggaggaattttgccaaaaaataaatggtatactgtcaattactgtattattgttgttacaattagcttgatgagcatggctgagatttatctgtttatacataggcgttaccttaatgcacaattttaataatatttgtggtgcttttaaattcaaaacgaaagtctgaattttttaattttttattttgccagaaatgagtggccttgaaataatccgacgcttctgcattatgtttccactggacaaaatgatcatgatttggccaactgttcgcaaatgtcgcgtttccaggaaagtggcggattgggtgttgcttacgcatgacccaaacataccaataaaggaccaacaaataataccataccaaggtatgtcatgccaagtaaaacacgacgcggttatattacaatttttttcatttttccaggcctatgggaacaaggttttcccgattttttgtcgtccccgaattccaagttcgaacacgaagattttaggcattgattcgggacaaaaaatatccccctacctaaagatgcattaaaagtcatggatggataaattttaaaaataattttttgtgcaacaattgtcaactttttccatttttaatatttttaaattttgggcaaaatccgatccaaaatggcataaaatttcaatttctgcaatatgtttttgctttcagacagtgaggcagttctgttatcaaacacttatgtggacttgttaaaagacaatgaactgtttgaatcaggcacagatgtatcacagatatatcgcataattcaacaaagcgacaaatttttattggcagcaatttggctggtaaattaataataaatttaagatagttgctgaacctaaaattggcacccttttccacccattccattagcattcaaaaaaaaaaatcagatctaagaacgccataacttaggggtcaatggcaactcgtacaaaagtcaactcatgctttacaaaataaagcctaagcttaagcctatgcttagaggcatagtcataagcttcggccgaagtctaaaccttggcctaaccgaagcaattgacgagttgccttagtacaacattgtacgagttaccttttgaacgagttgtcatgacacctaacttagacacaacccaagacgggatattgataaaagtgtatgcattttacaaattattttccctnattttaaattatgaataaattttatttgaaaaaatattcgttttctgcttaat

SEQ ID NO: 31179 - DNA, 794 bp, Heterodera glycines
caatttccaatgaaaagcgataaattggaaatttgtgagtatttagtccgatgaatccttcgcttggcaacgcttttgtgccgtcgggccccgtcgcgcttctgccgcttggccgtgacctgtgctcgttggtttggaccgtgtcaactgccgacgcggcacggcttctccaactgtcgcccgaacactttgtggaagagctgaatgggacacttgtaagcagtgccttttatgggtctccaaataatggggtccattttgaattcgttttatttgcacttttaaactttcgaattatctttttccatttttagcaatttgacaactcttcggctaattccctcgtcaacaattcgttggattgtcttggcaaggcactgaactttttgccgtccaaagaatcgcctgccaaatgcacaattccccgcgttttgtcgctgccttacgatgaccgtgccgtgtttcctctgtcccttggctacgcttacgactacattcggccgcgggttgcgcttattgggtacgaaaaattaaatcaatgtggcggcacagatccttagattttaagcaaggattttgtcactcttggcatttttaaatcgaaaaacccatgagaatggcgcgtttatgccaagtttaagaaagctgaattcagtgatccggtctcattttatgcaaatttaaccaccctcattaaatgtaacttttggttaaaatgttagggaaaagtaccgataactgaaaaatgggaaaagggcctataaaagaaaaatgacaattcggcgctatatgaa

SEQ ID NO: 31180 - DNA, 970 bp, Heterodera glycines
aaatttttctttatctgtcaacttcaattgagagaaaaaacaaaagcaattggattccaattaccaaggacagtgaaaagctgacccacacgtcggtgtcattcaaaattttgggcacagctttgtcaaaacattaaaggtgtcaatttcctgctgctgctatggcttggctttgctacgggcggtgagcaaagccgacgctttttctctattctgaagtaatattcattcattcacataccatcccaaaaaaagagatgtgtaccaataaatagagagtgccagagaaaaaacaatatctttttttctctaatttttctcaccttttggcgtactatctaatattttcattattaggaaaaacaagatttacttcaccaccagcagggatattgcaaaaataaaaataaaaagcgaaaccaaaataaaaagcgaaagcgaaaaggcgaaagcgaaatgcctaaaaaagcgaaaaggttaaatttattttccaaaaattattcataattgaaatcataaatttgaatattgtggtgcaaaaacaataacatttcagcattttcgggcgtcaagctttttctcaaatcattaaaaaaaatttttggaaatcgcaatgccaaataaaaaataaatataaataagattatttccaatatttaaatttttaaacaaaatttttctgacttggacttggtatgtagatatcttcaaaaataaaaatgggtttttcttgtattttcatcgaagaaaatcagcacaaaaaatatgttaaagcccctaggaaccataacttcgtaaaataaactgcaaagaaattttgccaattaatttaaaaaaagtttactgtattttctggccaactctttttccaatgctttatatttgtccaagcacttcttctgttcatccttcaacacttggatttgtccaaccaaatcttaagcatttatattttaacaaatataaattt

SEQ ID NO: 31181 - DNA, 1004 bp, Heterodera glycines
ctgcaagaaattagataggcaataaattgttgtcataacttttgtgtaaggaattattttttgaagtgagtcaaacaccctattagtgctttgctgtgccgagaaccggcaggcaatggatggctttcaatctgcaagaaattagattgacaataagtggttgtaaaaaacttttgggtaaggaattattttttgaagtgagtcaaacaccctattagtgctttgctgtgccgagaaccggcaggcaatggatggctttcaatctgcaagaaattagattggcaataagtggttgtaaaaaacttttgtgtaaggaattattttttgaagtgagtcaaacaccctattagtgctttgctgtgccgagaaccggcaggcaatggatggctttaaatctgcaagaaattagattggcaataagtggttgtaaaaaacttttgtgtaaggaattattttttgaagtgagtcaaacaccctattagtgctttgctgtgccgagaaccggcaggcaatggatggctttcaatctgcaagaaattagattggcaataaattgttgtaaaaaacttttgggtaatgaattattttttgaagtgagtcaaacaccctattagtgctttgctgtgccgagaaccggcaggcaatggatagctttaaatctgcaagaaattagattggcaataaattgttgtaaaaaacttttgtgtaaggaattattttttgaagtgaatcaaacaccctattagtgctttgctgtgccgagaaccggcatgcaatggatggctttcaatctgcaagaaattagattggcaatatatggttgtaaaaaacttttgggtaatgaattattttttgaagtgagtcaaacaccgtattagtgctttgctgtgccgagaaccggcaggcaatggatagctttacatctgcaagaaatagattggcaataagttgttgtaaaaacttttgggtaatgattattttttggagtgagtcaaacaccctat

SEQ ID NO: 31182 - DNA, 1071 bp, Heterodera glycines
aaaactttggtccaagccaatgaatggcacaaaaaatgacaaataatgccaaagtgggggaggagtaaaagatcaacaacagcacatactgtaagtgtatttgttatctcttttcgcaccaaaaaaaaagtgtgaaagaaaagcaaacaataaataaattttcaggcaattttctattaattccatttaaattcatgctcattattttacttaattctcgataattagttataaaatggtatggaaacattaataatgtaaagcaatttttagttccgacctacgaaattgaatttcgtgtcatcataataccgtacccattttcaaaaatacgggtaatgattatatgaacttttgaaaatcacaatgataaagaatcaaataattacctatgcaaaaatctgaaaatggatttttttttttcataacaaaattttttttaatgatttattttacatatttaaaaaaaattccaataaattcgaattttcaccaaaaatgaatttaatttacaaattgttcaaagtggacaaatataaaatatttgtgcttttcaattgatgctcaactcggcaaagtgcccgtgcatgaagttcgcttcatttggttttcatatttctgctgtattttgtgtgtttttgtgccaattaattcggccggtatttttagagggattaagcgacgatagcataccaaccaaagcgcaatcataacgccaatttcggcaccttcaaaaacccaaatgggtcttgggccgaagctgcgataaagctggctaaaagatgaaacaatcaatatttaaatcgaaaattttaaaattaattcactatcacattaactagattataattcgtttccgacccaatcactgccgggccaagcattcggcccagccctccgcacatttccagcatgccctgctcctgcgtttgcatgcgcggtccgatcacacgcgacagcagcggaaccattgtggcattaatgttagggaaggcgatgccaatgcagaggaagatgaacacgtaatagacccatatattcacctaaagcatttacaaaatacagcaaaca

SEQ ID NO: 31183 - DNA, 1261 bp, Heterodera glycines
  unsure (1)..(1261): unsure at all n locations
cattcacggtgagaaaaatggggtttgtcaagttattgtggaaaaaagactttacaaaataatacccctgggagaagggagtgggaaacatgatttcaaaattttcaattttttctagtctaatctactcaaagcggttcagaattcaataaaaataacattcacggtgcgaaaaatggggtttgacaagtttattggggaaaaaagactttacaaaataatacccctgggagaagggagtgggaaacatgatttcaaaattttcaattttttctagtctaatctactcaaaacggttcagaattcaataaaaataacattcacggtgcgaaaaatggggtttgacaagtttattggggaaaaaagactttacaaaataatacccctgggagaagggagtgggaaacatgatttcaaaattttcaattttttctagtctaatctactcaaaacggttcagaattcaataaaaataacattcacggtgcgaaaaatggggtttgacaagtttattggggaaaaaaagactttacaaaataatacccctgggagaagggagtgggaaacatgatttcaaaattttcaattttttctagtctaatctactcaaaacggttcagaattcaataaaaataacattcacggtgcgaaaaatggggtttgacaagtttattggggaaaaaaagactttacaaaataatacccctgggagaagggagtgggaaacatgatttcaaaattttcaattttttatagtctaatctactcaaaacggttcagaattcaataaaaataacattcacggtgcgaaaaatggggtttgacaagtttattggggaaaaaaagactttacaaaataatacccctgggagaagggagtgggaaacatgatttcaaaatttttgttgaaatatttgtcgtgctctgaagggcgtgggagggggggggcgaaggcccaccacgaggccgcgaagaggccgagtgagtaccttcggtgcaggaaaattattaaattttaaaattttttaattgctttttaaatatgccaaaaaatgtaggcttaacttttttagtgaaaattcgatcactcatattttttgctaattgagcagaagcgtaccaaactatgcagggatactccccggtaaaggactaacttacactgaaatgagcgccgagctagctggctcaaaaaaaattttcgaaaatctgagtctttcgtgtggatttattttttgcaaaanttaattcataaatattt

SEQ ID NO: 31184 - DNA, 980 bp, Heterodera glycines
aaattttattaatccgagttcagattcgtgcttagcgaccccgaaaacccctgggagcatgtttataatgccttaaaaaaattttttttatgtggtctaaaccacataagtaccttatttttttctaatttaaataatcattttaatttttaaaacattttcatctgctgcaatattttaaatttattttgaaattcatttaaatcttttagaaattttgaattttatgtttatttatttttgtaaacttttaatacttaataattaagtcactttttattttttcaattatattttcaataaaaattttgaaaattacttaatgaaataaaaataaactttttttaaaaattatttcaaatgaaataaaaattgggttttttaattatttattttagcgttttaaagttgggcaatgcctttgccatttttgaaccgggccctgcaaatgttctcgagcgtcgatttgcccgatttcgcatcagattggcactgttcgacgccgtgtcactttcacagaacgaggctgctcaatttgttggcacgaaatttgttgatgacgacaattatggcacttttgggcgcctaaaaattgggcattttgccacaaattatgccaaagacagtgccgtcgttgatgatgacacaaccaattcgaaaacaatcaccgattttggaccaattgcttatgccattcaaacgtcgggctctaccggtgcaaaatttttgttttttgtgccaaccgatttttgtgtgaaagtgccaaaatttcgtttttttcggattttcaggcattccgaaggtcgtcttggttccgttctctgccattttgccaaatgttgaggattttatgtaattactatgtgaaggaaacttcaaaaaacttcgaaaatttctatctttttataaaaactgtaatttaatgacaaaaatgaaaaaaaaaattcgtttttcaaaaataatgcaaaatattttttgaa

SEQ ID NO: 31185 - DNA, 2257 bp, Heterodera glycines
ttgagcgacgaatgtcagcagaaatttctcgacgatccccaccaactctttgacgatgccgacacaattgggctgcaactttcggcattttctgcggattcgttgcggcgaaaattgtccccccaagtgacagacattggctggtttctccgcctcttttgcacccaaaacggtgcaaatccaatgatttgacactttttttgctcattttctccttttttgtcagatgatggttccttttgcgtttgtccgtccacttttgtgtgctgtcgtgcccaatttgtgctgcggtcggccgccgacggtgccaagcagtggcgcctcgacgagttcgagcagtccgtccgtcggctgctgcccgacgccttccgtcacctcaacccgtgcgactttctccacggaattgccctcctctccgattcgctcgtctacgggaaaacccttcgggcgcttttgcccgatgcattgcccagggaattgggcccgaggtggtgcacagacagccattgaccatttccaatccactttggtgctcgagactgagctttatcaacgatgagattttccttgagactcgacatacacgagccccttaatcccgcgacttttctcgaatcgagactctcgagcacaaccacaagggatcggaattgtccattctgcttatgactaatcgccccccgccccccacagattgatgcatttgttcggtctgaaagcctcgtggaagcgtgatgagttgcggccatacgttgcggacttttgctccaattcagccaaaatggaagagttgctactcaaatactgcaaaattattggcagtggcgctgaacgtgcttacatttacagacaaatgtgaagaacctaaattgatcaatattttgtttttgccttaaatcgtcgctcatcgttataaattttgcttttggaattaaaaatttttttctttccatcggattcctcccctgcagaatgaatgattggttgtgtgtactccaaacaatttggaaaagggaatggtttatttagacgagctttaggttaggcttaggcctgagtttaggctattttggaaaatatgatttggtttttgtatgagttaccattgaaggcagacaacactagtggttaactggacttggtggcaccaccggaccaattagccatttttcgtgaactgcatatttttttcctggagtgtgggaggcatgaaacgcacgaaaaacatgttttaaacttggtttgaagcttctaggccgtatttccatatgcatattttgcagggaaccggccactttggcgcaagactctatatcattttgatttcacagcaaaattaaataatcttggtatgattttaagtggcttgatagtgcctattaacctgcaaagtttcaaaaaatttagctgagaaacaaaaaagttatggccaaaaaacctcaaaaatttgcattttcctggccatttttggcgcagcgcgccatatcttttttaaaacctaatataattttttgaaattttgcaggctaataaagaacatttagacctattgattaatattaacattattttatttggtcgaattaaaaaaaagttatgaatctttaaacttgtctgcgccaaaatgaccccgaccctttttcatggaaccatatgcttgcttttcttggacccacccaggcctatgtttttcctggaatgagtaatggattttttgtaagcataggcttgggttttcggttcttatcccttttgtccccctccccccctgaaatttttttaaaataattttttctagggtaattttatgcgctgaacacatatatgatgtttatttttagctcttatgctcttacgtgtgttacgtgaaattttttgactagtcaacaacagtatttcgtcgataataatgtgctttgtcccccccccccccctccatttttcgaaaaaaataataaaaattttaaaaaatcgtgaaacaccttccctgggggttttcgaggtcgctgatcacgaatctgacatccattcatattaattccgaacccgaacccgaattcgaagaaaaagttgaaaattcaaatttaaattttatttaatttttcaccattgctcaaaaattattataattcattgaaacatcaatactggttattctgtacagattctaacataaaagtaaatttttaaaaatttgaatttcgaccttttgttcgagttcgggtccggggttcggaatcggccaaaactaatgtta

SEQ ID NO: 31186 - DNA, 1018 bp, Heterodera glycines
taaaaacccaaattaaatgattgtcaaacattataccaatttatcaaaattaatcatgaaataaataaatattaatttataagatgcaaattttttggaattaatatttaagacaaatttgaaataaaattactatggtttaattttacattttaaatcattatttctaatgcctgaattcgttgccggtacagagaaattggcacttttaacaaaatcagcaactatacagctaaaatattgaataatcgatattttgataaataataatagtttattttcagaaggacactatattcgtgaactagtcatttactttacatatacactataacacataaataaataaattaaatcagaaaactaaaaaatataaaaagagtggcattaaaatctaaattagagaatatttaaaaatgtgataataaggcctcaaactttcagttatgtgaaatttttatcccaaaatttttgaacaaatccaatacaggtgtttatttaaaccattttaccacacaaaagaaaaaatgcataaataatacttaaaaattcatgttgtgtttcataaggcttcattacaaaatttttgaattagtgcaattttgtgaaataaaccaaacaaaaactataaaatttcagtttcatttaaataaaaatttgctatctcattaaatgctaatttattttttcattcaatttaagcatcaaatttaattaaaataatataacaaattttaatatctacaaattgataataaggttttcattgagactaattatttttaaaaagaaataaatgaattaaggattcattatttgtgaacaattattgatagaaaaaaataatggaaatgttaatgaattctataaaataaatgaaaacgttttaaataaaaaacaataacactaaaacatctattattttttatgaattgagctaagataacaattatttcccctaaaaatatctatgtgaaataaaaaaattttttttgtaagaaataaagggttcaaaaaa

SEQ ID NO: 31187 - DNA, 1246 bp, Heterodera glycines
  unsure (1)..(1246): unsure at all n locations
ttctttatgtgttttccttttttctgtgnatgcaatttttgctttgttgccgatatgccttcacttctttcggaatcatttttgattttctttttctctaaattattaacttatctaatttcttctaaacttatgcacctcgtccaatcgtgcatctttttgggttttagttcctgaatcattcatttgtaaaaggagaaaagaaattctatttaaaaaatgttcagttgtttgagtaaaatcatcttcattttgtatttgtggtaaaaacggtcttaaaaatttattaaaattacaaatcttaagattgaaattacttacttcatattcagttaatgtttttaacaaaatttcgtctaatgcctcatatattttagctctgggtcttggttatattttttcatttttcaatttgacaattctatcgactacttccgacatcactgtttgaaaaaaatttaagaaaactccaagagaagcatgccggacactatttcgatctcttaaacagatttttctgtgtatcataagagttcaaaaacctttttatagctgaatgccacgcttccgcagggtttgtgtttcttgttctggctaaattatgaaaattccacaaattaccactttcaagctttcttatccattctcgttcatagtactggtgaaattctttaagattttcatttatatttccatcaacttcaaatgcctttagatgtggccatattcgaattgaagccttttggggctagttcaaaagtcgcatcagcgaccataatccgacaattttttgctgcgtctaattgtgtttgagaggcgaatatcattacacctatttcttgatttttatagatcagccattcacttccagcaatttttttccccattgttaatttgattgccccaaatttggttaattgaagcctcggaggcacatcaaatggttctgctgcttctgatccgtgtgcttgctgacgtcttctgttataagactttctaatttctatccatgatggatagaggttagtcaaggaattttgttccaaagaatcgacatctttttgcgcatcttcttccctaactttttcaaggccttgtctccagatagtctttacatcgctattacatttaaatattttttttctttgttttctatccacttgttctgcttttattacttccattgtttctgcttcacatttcgagttatgttctgcctgggtgatgaacaaccttttctcccccc

SEQ ID NO: 31188 - DNA, 1097 bp, Heterodera glycines
ttacctcagcaactgttgttcagttttgttctctttttgtggccgtttttgtttttcacgctgatcactgctttttgtaattgaaaatttagttagtttttttgttgggctaacaaataattaattaattacccaagtgtttcttcagctccttgcagtttccattgttcgcgccgattacgaaaccatatctaggcaattcattaaaatcttaattacccaaaattatttcaattggacactaatcaaattaacgggggggggcggagtgtgcaatcgactctcgtaggttctttaactgtctgttctcttatttttctaccatctctttcgctgtctctctttctttagttcctccaccccactgacttgtcctgccgccccgttaatatagaaataatttggcattatttaaaataatcttttactttgacttccgtttccgtcaaacagtattctgcggccattttcttgcgcattgaaatgtccggatattttatctgttcaaattcgctttccaatttggcatatcgcttggacgaaatgcaaatcagttccatattaaaatacataattagaatatttaattttaaacaaagaatttgtgttttaatgaattcaaattttctacggcgtttgtctgttaacattaatcatttccacaaacttttttctttatctgtgccgtgtgttctgcgagtttatcccattttctttctcttgttcgtcgactttggaaccatttctaaattaattttcgaaaataaatataaattaaataatttgggcgtccccctcaattacattaacttgctccgccgtaaggcccatttccttggccaattcttcgcgcatataagcatccgggtatttgatcttctcaaattcgctttccaattcctgccattggtcagactaaaattttgtcattattcacataaattaattaaataattttatattttgtagtttaaattaaaagaattttgactctaaatggtcgtttttttaaattttgctaatttaattttttttttctatgcattagttaccgtatattcctgtcgcttagccaaagtggacatttttaagttatt

SEQ ID NO: 31189 - DNA, 1384 bp, Heterodera glycines
cataattgacttttattatgtaaattattgctttaccctcctcaaatcacactttttttttgcttgtaattttctttttttaatcaaaacagagatgattaattttgtttgtccatcgcttttggtccaaacaaatgatttctatagaaaaatggctaaataagatagtttttgatgatgttatcagcagctatcagcagatcactgacaaaaaaaatttacataattaatcggaaaaaaataataattaatagtgatcaaaaataaaaataaaaaaggtctcagtattcggtttgttaacttaatttttgatcaagatttgctccgaaaaatgatccaagttgttttgcttttttgctgaattttaattaatcgaggtaatttactgtcaagagatgccgccgattaccgccgctgtggaaaatttcataaattttctcctgatttgttaatatgtagatagatattgcaaaactgtcaatcttaccgaatttttaacacaaaaaatataaaataagtcacaattttcatcaattatttaactctgaactctaagtgttattttggattttttttcccatttttattcttaaaactaacaaaatctccaaagacaaggagataataatctttgaagcagcttcccttaattatgaatttaatttttacataatttctcgaaaagcgatgtcttccaattaaagaatttttttagtttgtttgttgcaaaaatctttaaataatcgagaaattttttaaattttattgggaaatccttaaaaagatcatcgtctttacttaaaccagataataattgtttgacacctgtagaaaattatttgtttttttgtttatgaacattttaatatatgatattttattcaaaattccccaaaaaatagaattaataaaatatttttgcaataaattggttttaaatgccatcatgggttaactttcgagacatttgcttgcatgggacacttttcttcaccattcatcataatttgctcaataagcattgaactgcagcagatggtcaacaatcagcgaattggccacagcaaaagcggctaacaattaaatttaaatcaaaaacaaattcaaaattatgtttaccgatcactagcatcagtcctccaaaattggcacagtgtccgatggcattattttcttggaaattcaaccaaaattctctttcaattatcaatgatacgaacgaatattttaccgggtgctgggtcgttactcaaaaaccatcaaatttaaaaattttgacataaatttattcataacttcgcccaaaattaatcaaagtttaaaatcttgatacctttccgatagccctaagtgttttctattattctgcaaaatttcaaaaaaa

SEQ ID NO: 31190 - DNA, 1295 bp, Heterodera glycines
aaaaattatttgtgagtaaattggtttttaccgattgagccgagtttggttgcccactcatcaattagcttttcaatttgtttttttacttttaaaattttttctttcttcttttgacttaattcaaacggagcgatgaattggataaactaattaaaaataagaattgaaataataattaatttggtttcttctttttctttttttacctcatttgatagtttaatttcactttcacgagtgaattgagttgttcggattaaatggtaatcaaaaaaatagtcatcattataaagaaaagcacctattttaattaaaacattttaaaaaataataattaaaagacatttaacctattttctgttgtttttccatcttttcaatgttctccacggatttcaccaaattttccacacttttgaaaagggaattcagccgttccatgtttattatgtgtgaataataacgttgccaatttggtgcgcatttcgtttcatccgattcgtttgaagcggtaattttttgcacattttttgctaccaaaactgaaaatatgtgcgtgtgaagaatgtccaacatttggttgaattctgtgcttttgaatgacccaaattgggtggtaattagcccattagcttttttatcattttgaggaattgacacggtttgtttgggagaatgggttttaaaatcggcactttctttttcaattttcatcagttcaatcgcctccaaatactcaattgttttaattaaactcctttcattttgctcactaaatttaatttgctctttattttcttaattaatttattaatagtttccagttatactacagaataagccgtaaaaccgaaatttttttaagtttttattcaaaaaagaagaaattatttttttatatttaaaattcttgattaagttatattattttgaaaaaaagtacagatttttcaaatttttcgccactatttaggccaataaattggaatttcgctcctaaaaatcctcgtcctaattataatattccatagatattttttgatcatttaattatgaatattatttaatgatcaaatttagatttttcttactcaagaacatatatatccaattcattgtgcacaaaatataatttctccatcaaaaatcgcatcgtttcgaatttgtccaattttatgccgacaaattccttccattttccattaaattttttccaattgtttttttctgcaatttcattttttgcacttttttcaataaatttgcgcttcgcttcaatggccttttcaagc

SEQ ID NO: 31191 - DNA, 1317 bp, Heterodera glycines
  unsure (1)..(1317): unsure at all n locations
gatacaaaacgaaggaacgattgaaaacgtcgaataagccatatgatgacccaaaaaatccagcagtcgtaccataatttagcggttttttaacataattgcaaaatttttacgagatttttttttattatggcggtgaaaaaaacatttttctacgggcggcgaactaaaatcaaatcgcggtttttgcgtgtgcttttgcccacccggtagagtcggttcagaatttccttcttctccaaattgaattggcattcgcctttccccttggccaaaagtgtccttttcttttgctcttgttcctccaattcggcaagctgaatttgcttcagatgacgctcaagctctggaaaataaagcaattcgtttttaaatgtggctcaaattaaacaaaatttccatttttttaaattctaaatccccccttttttaaccggtgtatcgcaacatcaaatcggcgtttatctgattgaactgggggttgtccgatgtgttcatgtgttccgacattttggtcttcagataatcgagcgagaacgaattgggcaacaaatcgctgatggcaatggcatggaaataatgctgaaaaatgagaaaaactttaaaataagtgaggggctgggtaattagtgtaataagacttaattaatgagtcattaccgaaagatggtttatcgagcggaggaggaacagccgtgtgacggggtccggcaaatgctgcaagtgcttcttcagcaaaccgacccgattttggtattgcgtttggtcgtccacgttggggaacacaatgtcatcctaatcaaaattggggggaggggttaataaaattaaattattcattacaaacaaatgaaaataataaatcattcgcttttttcgcccacttttcctagggctgccaccagtcgcttttccacaatgttctgcaatttctcctgcattgagcgctgaatctcggccatacaacttttgatggagtccacaaattcgttgttgtgcggccgactgaccttttcgacgcctgcaaaatgcacgcattttcatagacaccgcaaaccgaccaatggatgcctcatggaaaaaattccaagggtattggtcctggaaacccaaaaaaaaaacccgagactaattgttgtaagaggcagctagaaacgtgaaaaaatctgcaaattctgttgccttcgcaacacttacggtccaccggcggcgtgacgtaatccttcaaattgtccaactgatgccgcacggaactaatggtttcggctctcnaattggcgcacagcgatagcatgtgctaaaagcaattgccaattt

SEQ ID NO: 31192 - DNA, 1032 bp, Heterodera glycines
agctgggtttaaaaattttttcaaaaaatcaaagtcttttcgtttttatttaattatttattattttttgcaaaattaattcataatttttttttcagaaagtgctctgaaacgcaccaaattttatttccaagatattttaggcacttagatgctttttctatcaaaaagggagatgaataaatttttaaaaatttttaattcctttttaaacaggccaaaaagtttaggcttaactttttttttcagaaactgatcagaagcgcaccaaactttgcagggaaactccccggtaaaggactaacttacactgaaatgagcgccgagctagctgggtttaaaaattttttcgaaaatcagagtctttcgtttttatttaattatttattattttttgcaaaattaattcataattattttttcagaaagtgctctgaaacgcaccaaattttatttacaagctattttaggcactctgatgctttttctatcaaaaagggcgcgaagcggccgagtcagtattcttggttgcaagaaaaaacaggccaaaaaatttaggcttaactttttagtgaaaattcaatcactcatttttcgagtagtgatcagaagtgcaccaggttttgcaggagcctaaaaaggtcaaggaaaggcgtctctgcgttgatttagcagtagtacctatgaatttaaatttcctatgaatttttaaaggttcacaatttatttattttttgcaaaattaattcataattattttttcagaaagtgctcttaaacgcaccaaattctatttacatgttaaataaggctctctgatgctttttctatcaaaaagggagatgaataaatttttaaaaatttttaattcctttttaaacaggccaaaaagtttaggcttaactttttagtgaaaattaatttactcatttttcgagtagtgctcggaagcgcaccgggttttgcggggtaagagctgagaataatgcggattcgtataattatttaactgtccccataatgtttctttaa

SEQ ID NO: 31193 - DNA, 1403 bp, Heterodera glycines
  unsure (1)..(1403): unsure at all n locations
atgctatttttaagcccctttcttcatagcatatcgcttcttcaaaatatgnnaatccatataatttacaaccctattaatttattttgatggctgattttaaaaatggatatgggcgaaatgtccccaatcgtctatgggaaataaatttttgtgtcgtcattgactttttgccgctttttcctttgctgaattggtccttcccctccattttgatttcaaaataaaattcgggtaattaataaaaaagtttctaagctatttttcgatttttgaaaaaataaaattaatgaattcatcaaaaagtataaaaatcagtagggatgcgatttttaggtaagaaaaatcccagaataggtacttaaataggtaaaaaaaatctcaaaataggtattaaataggtacaaaaattccaaaataggtaccaaaataggtaaataaaaatttttattaacgattttttagcggaaaaaagcaaacaaagaggtaaaattttggttctacatatctctttgtaaacgaaaatttaaatatattaatattttcttagataatattgacattttaaattaaaaattttgtcaatagaaaaaataaataaattttgggataaatttttgagaaatttttccaattcttagggtgcatttttgaaaaattttttggtcgattcttatgggtatattttttgattttattgcatttttgttaagaattttttgaaaatccttaaaataggtaaccaaaatgccgaaataggtataaaaataggtacctaggtaataggtagaaaaatcccaaaataggtaaaaataggtattataaaagtgggtgtagaagctccaaaccaagttaaaaactcgttttttatgcttatctcaacgttacaagtgcgtaaaaattttaggtatttaactaaaaatcgcatccctataaatcagtcagaattttgcttttttcaggaaaggcaagcgcacctcaatgcgttacaggccgtctgcgatgccgacatcaaaagtgtcaaagaggaagaggagaaggagaaggaggccgcgcaaattcttttacaggcggaaaaacagcgtgaagaggccgcgcaaattcttttacaggcggaaaaacatcgtgaagaggccgcgcaacttcttaaagaggccacagaacgtcgcaaaaaggcggaagaaaaaaaggaaaagtctgttccaagagcttcgatgtcactggtcacgaatccgttatccatttagtacaattccatatcacggacccgaaattcagttcgttttcgtgtttanatanaatttgaaaatccgaaaaactaaattttcgattttttattcaaatcagacccggggttagaagctgtctgaaatggatgagagggattcgtgatcagcgactcc

SEQ ID NO: 31194 - DNA, 1260 bp, Heterodera glycines
  unsure (1)..(1260): unsure at all n locations
aaaaaatgtgtttttattttgttgcaaaattttcgtttttttaagtcttaaaacacttgggaaaaagaaaaattttcccgattaatacaaaaaaccaaaattttaattaagaagaaagacacaaaaatgattaaaaagagcaaattgatcgaaaacattagtgaataattaattcttccttcagagagtgnccaaatcgaatttgaaattgggcccaaaattcgcctcaattttgtcaccagagtcaaacaaagtaacgaatggataaaatgagccatcagcaaaagatggatcaaccataaaatcagaagtatctgtgaaaaagttgcgggattttgattatttaaacataaaaatcaattagcattattgacgccaattcctacggtatcaccaaaaccgtaggaatatttgtcgcagaaccatacacactgggtttggcacaatgtgagacaaaagttttctgtagattattctgattacaagcattttaattttttttaattattggctataattagggcagggaaatttaggtaagaaaaatcgcgaataggtattaaaatcaggtagaaaaaatagttaaataaaattttttatttatgttttttttgtgaaaaaagcaaacaaaaagataaaattttggttctattcgtatgaacgtataatttaaatatttctagtattttcatagcaaaaaatgaacatttttaaattaaaaattttctcaagaaaaattataaagaatgggttccactaacatcatttactaggcgatatcctcctgctgatcactgtgattgataaaggggcgacggagggacttatgcgcccattcaaacaaatttttgtattcgcactttttgaaattgaaggggtttgattcaatttgcaaaaacatttccggtttattcctgctgcacgtgcgcatacataaggaagagaggcgaatagagcagggctcggatcgaaaaattttcaaaatcagaacatcgggtccaaaaaatcagattctggggtcgaaaatcaggacattttgcaaaattgcttcaaatcagttatttttacaatttttcgatcaaaaatgtatcaaatattatatttttcgtctcccattatcgattttaacaattttggggagaaaattagcaaatcatcaattttagcgcattcggaatcaaaaaatcagattttaaagaattttttgcggcgcatttttccaaaaaacttttaggaaatgggcgagggggggagggtccg

SEQ ID NO: 31195 - DNA, 1287 bp, Heterodera glycines
caaaatcccgagggccaaaaaattgccaaaaaataaagaatttttaaaaaattccaaaaattctggaactgaaaacaaacaccatattcgtgctcagcacctcaaaatagcccagaaaaatatttttcacccccatttttgacccaaaaaaaaattctgaaaatttctagggggcctagctcgaaaatttttgaaattttccgggcatatagcacacctttcggtagagcttaaaattctctacaaaaatgttctaagacgatttttagctaaaaccaactcctgacgagttatgggcccgggactcaaatgtcccgctgaggctaaaaattttttctatttccgggaaaaaatcgaaaattttccgaaaacaataccagtcgatagagctcgaaaaactatgttttggaagtggtcttcgttttgccaggaaaattcgttaaaaattcttaaaattcaaaaacccaaaaaccgttttttaggcctagctcgaaaaattttgaaaattttcgaaatttttaaatttcagaaaatcgagcttccaaaactctacaataagtctgctgggcacctttccctcagataaaaccccgacgcggtattcgcctggtactgaagtgtactttttgagcacgcttcagttgccattttctgcaggccagggggtggctctattaaaaaaataaaaaataccagcatgtagaggacactttggcggggtgccctcgcagcgggcattttttgattcgagttttagaaaaaaagttacgggccttgaaataaaaacaaaagtgagaaattagccgccgggactcagttggccaccggagagaaaaacccgtatttttcccagatgcgcctcaaaaagttgtaagacccttccactactttcagggcgctcccggccttcggccgggagattttgttttttaagacgagtccccctttttctctatatatatataaactagcgtgtggcgcagtaattgctcggtgtagacagtatgctttgcacagtaattgctcggtgtagacagtatacttttggtatatatgggcgggcgctgacatgagcgcttcgcgcaaaggacttcgttgctagtgcatgcgcgtttgataagtgatgagcaagtgcattcggccgctttgcggcctcagacgggccttgcgcccgttttttaattttgcgggggacattcggccgcttcgcggcctcaggacgggcgctttgcgcacgttttttaattttttgtggggcattcggccgcttcgcgacctcaggacggg

SEQ ID NO: 31196 - DNA, 1040 bp, Heterodera glycines
tctcgctgatatggtatgtttcagttaaggtttagccgatctacaaaatttcggcactgtctattttgtaaaagcgaatcaaattccttggatttccaaagtggaattacagaattgcgacggcaaatcctaaatagacaacgacgctttcattataaagctttaagggagacaaagtaatacgaatatttcaatttcttacttatccgaatagacaaagataggttacacacgaacatttttatagaaattccggctgaaactaaaatccctcttttggtcttaacctatgatttttggcccattatggatgaattaagtatagaaggcgtcgcagaaatacattcatattttctaaattcgggtttcagaaaattaagatttaaaagaggctgaattacagatgcttttcaaattttgggtgtatccgaatagaaagaagttggaaatcagtacttttcacgcctataaaattcgggccgaaaaatattggtgtttgtgactagaaaaatagcagatgcatatcaaatgactacagaaaattacagcctccaagaaaataattgctttgcacaagcaatattttgtagagcccatcaaacacattgtgcttataggaaaggcagaattatacaataggggcctttttattatgattacaacaaatcagcatggcgtctcactgatatggtatgtttcagttaaggtttagccgatctacaaatttcggcactgtctattttgtaaaagcgaatcaaattcctttggattccaaagtggaattacagaattgcgacggcaaatcctaaatagacaacgacgctttcattataaagctttaagggaggaaaagtaatacgaatatttcaatttcttacttatccgaatagacaaagataggttacacacgaacatttttatagaaattccggctgaaactaaaatccctcttttggtcttaacctatgatttttggcccattatggatgaattaagtataaagggcgtcgcagaaatacattcatattttctaaattcgg

SEQ ID NO: 31197 - DNA, 1284 bp, Heterodera glycines
  unsure (1)..(1284): unsure at all n locations
ccatcaaaantctgaggccaattcatcgccttcctcttccattggtcgcattgtctgttgaaaaacaatttttggggaccctggttagtgctatatgtccatgtcaaatttgagtcgagaattcccgaaattctctcacaccccccccccttttttttggacggttctgctgttcttcgcttttctgcaatacttgatttatataaaattttttaaaaatttcactattttggctccaccatttgctcgagactggattcatttgactctcgaatgtcttttggattgattgagtcaattccaattctcgattagaggcttcttgctttatctcacaaactgctgcttactgctggtgggatgattaccaatcgggacaacattttgccaattcttattttataccaaaaagcttgacatggaatggaacatgatccgcgcggagggggggggggggaagtttgagcaccagaaattgggcatgagtaagtttggacactttaatttaaaaatttaaaaactaaaaaaaatgctagattacgctgagagttcatctttaaatgaccctagcagcgcttataatttattgaaatttaaaatggaaaatttagaactttattatttaatcagtttttacagctgtttaaatgtaattgcttggttttcattagagcccggaaatttgaaattttcgtattccactgcgggattgaaactcaaaagggatgatggagccaaaaatggcgaaagttttcaaatactttataaatcaattattaatccagaaaatcgaagaacaaaaccgtcaaaaaaagagggaagagggggggggggggtgagggaatttcaggaattctcgactcaacaaaattgacatggacatatatgtagcacaagccaactttaactggcagacgacaacttcaagcagtatttttcaaggatgaatgagtgatagtggtgagcagcagcacagaggaggaggagaagcagcaaattgcaaaagtaaaagcccctcaatcggcagagaatgggcggcagcgcccgagggcttcaatttatggttgagaatatgcaaaagaagcgcacaaccggcaaggcgagttgtgttgtgttggttgttgctgctggtcggctgaatgagttacggacggagacggaggaacagatcggacgaatttgggggagacggaagtaaaatgggggagggggaaagaggtcatcatcattcatcctccattcataaagtcattgtaccgcgccaatcgaacacagcagtagcac

SEQ ID NO: 31198 - DNA, 1192 bp, Heterodera glycines
  unsure (1)..(1192): unsure at all n locations
acaaaattgctcataacgccaaatagcgtaattggcgtaaatttttggcgctaattcaaaatttacacttgtgccgtttttgtattgttttaaatttttttttttgtgtacataaaaacgctaaaatgcaaaatacgaaaaaatcgcaaaaaatcagaacaagtgttgaaaaactggtactagtgcagtttgggtccacaattttggtcaaatttttcagaagcgtagccagacagtcagacagtgcactatttccttctttatttttctcacctcttcccttttcccacacacaatgctgccagccagcacacggctgcttactgtctacccttccacccgccgcggccccacgttgacagacagtcagacagtgcactatttcttcctttctccagtgactaagcggaagaaaagaaggaaatagtgcactgtctgactgtctggctacgcttttgaaaaatttgacccaaaagggggacccaaaccacattagtaccgaaaaatttttccctatgttcaaattttcttcaaattttgcataggccaatattttgaccccctctagcgattccaagtttattttatggaacttaagtttttaactcgagatcggctcttctatttttacaagggaaaatccccaaaaaattttaagttttgcaaagttttggcgttctgattactaaataaataataaacttatttgcactgggagcccaaaattgaatcgccgtgtccaatgataccaaatttatatacgttttccgagttacagttcgggtggttcccttgtgagtcggacctcaactggctaatacttactctctaaattaaatttgtaccaatttggaaaaatttaattgttaaattttaggccattcccaaagcattttgtgcgttgactcgccgagttgggacgatcaaatggtcgcctccgggtccaaagacaattccattttcttttggcgcattggtggagtgaagacggactcggccagcgatgggcaccaaaatttgacggatgcatttatggccgacaaaattgcagtggccacagggcacactcattccgtggcaaggttggcttcagcactttggcatttttcgtcattgttggcattgaaatggctgacaatgatagaatattatttcngtaatcactaaaatgctcttttcagtatcgcctttt

SEQ ID NO: 31199 - DNA, 1281 bp, Heterodera glycines
  unsure (1)..(1281): unsure at all n locations
ttatagccctgcttttctcttgtcagttgaaggtctctcatggcgntgncaatcataagntatttttttaaatttatttttcatcaaaaacagtggatcattttatttggtcctttatcagcatttttcgtggtatccaattgttgtcagatgaatgttttcttggtgagggaggagatggaatggcgtgtggagcatgtcgttgtcgaattgtccaaattgtatcgccgattgctaaatgaaattcattctttcattggttttaactttcgcctcgggcactcacaaaagtgctgttgttcggaatgtgctgtgggccgtgtcgcccagctgagagtggtgcctggtgggcttgggttcggcacgagtcgccttctcgaggggttacggacggagcggcgtctttcaacgcctcccaattcgggcccatcgttttgcaatgcacggcctaagggcaataaaagagtaaaacggcacaaataagaacattaattacaaagcaaacaaagggctgacccaagggaccgtgttagttacgccatccaacggagaacggacgaataaacggaggaagggatggcatttgcgcacctatccaacaactttccccggcccttccaaggccatcccccccccccattttctcccctctttttttccctttgttttgtccatcctctcactttcgttccctccatcaattatgcttccaaatgacacttttataactcatttccctccccgtcgtccccgtttaaaaaaagtgattgggcatcactcgcacctttaagccatcggcgttaaatgttaatccccaaaatgatgggacttggatggattatcgtgtcaatttgcagcatttccttcccttcgcttcactcacttcgtaataaggaggaaaggaattggagagggaaaaagcgaaataattcaatattttggtcattttgaagaacaaaaacaaagtgccaaattcggcttttccttgtcaatgccttcgtttgcttctcaccctcagatgcttgcgtaagcttgaagggtgcgtgtatttcttttcgcagcccaactgatcgcatcggtagggtttcctctgcggttgatgaacatgttgatgtttcttccgatcggaactgttggcaaaatatttgcaacaattctgacatttgaagggcctttcgcctgaaatattcgaataggtcaatcgtttctttcatttttctttttcaatttttttcattaaaatctttgaaatgcaaaacatttccataaattgactaaaaa

SEQ ID NO: 31200 - DNA, 955 bp, Heterodera glycines
  unsure (1)..(955): unsure at all n locations
tcaggctgtcttttaaatttttgacagccttcaactccccagtttgtgtcttattgaattcttgaaatcctactgctttgcctctaaaaaggctattgagagatttattttagaatgtgaaaattttatttacattattatttttggtagatttattagtgctgacaattatattaagtagaaatcactcaggctgtcttttaaaatttttgacagccattcaaaatttttttataattttttgttctataattgaactcattgaaaatttagactgctttgcctctaaaaaggctattgagagatttattttagaatgtgaaaattttattttcattattattttggcatttctttagcatgaattggtagatttattagtgctgacaattatattaagtagaaatcactcaggctgtcttttaaaatttttgacagccattcaaaatttttttataattttttgttctataattgaactcattgaaaatttagactgctttgcctctaaaaaggctattgagagatttattttagaatgtgaaaattttattttcattattattttggcatttctttagcatgaattggtagatttattagtgctgacaattatattaagtaaaatcactcaggctgtcttttaaaatttttgacagccattcaaaatttttttataattttttgttctataattgaactcattgaaaatttagactgctttgcctctaaaaaggctattgagagatttattttagaatgtgaaaattttattttcattattattttggcatttctttagcatgaattggtagatttattagtgctgacaattatattaagtagaaatcactcaggctgtctttaaaatttttgacagccattccaaatttttttataatttttttggtctataattgaactcattngaaatttagactgctttgcctctaaa

SEQ ID NO: 31201 - DNA, 554 bp, Heterodera glycines
atgaaaaatggggcaaaaaagtggcaatttggagagagaataacagctcaatcgaccaagcggtgcacatgaatgaacagtaagctgcgatgaaaaacagctgtcacagccaacccgacagcagaaaccggccctccccgcccaaacatggtccgatggggacaaaaagtgcacgtgaatggagacaacatcaaccaatgcatgtgaatgttctaccgcaaatgaaggaagtcacagcgaagaaagaagagaaggaagagaaaaagacagcccatttgatcagcccatttctctaattaattgttttgtatgtaggcccaacccaaatgtgatcgtatttaagccccatgatttgttcatttcagggctccgatcgtgcaccgaataaagagaaaaaacccagcatttgggtattcggtagcccctccccctcgccttcctctcctacccccaccccgaaccatggacgatgaactgtcccgttgcggcttgtgggccgagccgcaacaagtggcgctcctgggtggattttggtggggttttgagggttgtga

SEQ ID NO: 31202 - DNA, 1669 bp, Heterodera glycines
  unsure (1)..(1669): unsure at all n locations
tttacagtagcgccgctttttctttttttgaaaaggacgaactttcaattcgttttcttttgagcccaaaattgaatcgctttgttcaaagagtttatctttcgtgaggtatgcatgtagttatttaacattattataaagtttggattttaagattttccttattttcatgagcttcacatggcgtgaaatggtacgaaaataaagtatttttggtcctatttctcttttttcctttctttttttagtagactccaaattgtactattttagacagcttaggtcctcaaaattcccagtcctttttacctacaatatgcggggaaataatgcaaattgcacttcttatataccacgcattgaaagaaattttttccatttttccggtgttttttggttcaaaaatgagtatataagccgacttttttgctccctctcagcataatttccgtgtccaaataatgcctttcttctccccctcctccgccgtctttttgctgccctttcaatttcttttggttgtcctcggcactgttttcgtcgtcctcagccaatgctgtggttgttcgaagaaggaaaaggccagttttcaacctccttccccacaacgagcaaaaactgacatttacaccactatttttttcagccgaaaaaacccgaaaagtcgtcgaaaacgcagcagtcaatggcatccaaatcgacgacggcaaaagcagaatgggcgaatgcgcttccgtcagacgttttttcttcaggtgatgccgcattttgtgtgtgtgatgtgtcgagaatttccctccttttttcagaagccaacatggactatgggacattgcggaatttcgatactcaattttttggaggagcatcgccgttgaaaccgcaacgcggcactggaaagaaaggcgagagaccaaaatggacaatttggaaattggaataattgttttttgtttttcaggtccggcgccgcccgtcgttaaaaagccaccgccgtcaaagacaaagccaccggagaaagggaaaaaagtgccgccgcagccaccatgtcggtgttgatcctttgatttgaaattttcatgtgtatagtgactttttgctcccatttcagcgaagaaaaggccccggcaaatgggcaacaaacaaagtgatcaatttaaacgattatgactgaatggcacacacacttttctctttccccatttcagaacagacaaatgccgacaaattcaaggaatttttctcccagagaaggccgtccagttcaattagtaggatgacaaggggagaaattgggcaattaatgcttttaatttccatttcagttggcactcctcaaaaaccaagccccggtctcgtaccatgtaagaactatatcaataatgatcatcacaatcaatttttgacgaattttccccccatttagcaagccatcctgactatggcacacttcacttggtggacaaggatcttttcaccaaggagcagcaggcgaaaggtgggcacatcaggcggagaaaacggcacaaaacactttatccatccctctccattttcagatgccaaacgaacgccaccaaaggctgggcctctatntgttncgagtgangtgagatgcattgaaattggacancaaaataaatggtcctttttcattttcagcgngcga

SEQ ID NO: 31203 - DNA, 1181 bp, Heterodera glycines
aaaaaaaaaaacacacccccccgcggggggggtgttttgttttttttttgtttaaaaaaaaacaaccccccacggggggggggttgttttttttttttttttaaaaaaaaaaaaccaccccccggcggggggtttttttttttttttttttaaaaaaaaacacccccccccggcggggggggttttttttttttttttaaaaaaaaaaaaaccccccccccgggggggtttttttttttttttaaaaaaaaaaaaccccccccggggggggggtttttttttttttttaaaaaaaaaaaaacccccccggggggggggtttttttttttttttcaaaaaaaacacccccccccggggggggggttttttttttttttttgaaaaaaaaagccccccccggggttggggttttttttgttttttaaaaaaaaacaccccccccgggggggggattttttttgtttttttaaaaaaaacgccccacccaggggtgggtttttttttttttttcaaaaaaaacaggtccacccagggctaggagtttttttggattttcagaaaaaacagtccacccagggctaggagtttttttgggttttcagaaaaaacaggtccacccagggctaggagtttttttggattttcagaaaaaaaaacaggtccagccagggctaggagttttcttggattttcagaaaaaacaggtccagccagggctaggagttttattggattttcagaaaaaataggcccagccagggctaggagttttcttggattttcagaaaaaacaggtccagccagggctaggagttttcttggattttcagaaaaaataggcccagccagggctaggagttttcttcgattttcagaaaaaacaggtccagccagggctaggagttttcttggattttcagaaaaaaaaataggtccagccagggctaggagttttcttggatattcagaaaaaacaggtccagccagggctaggagttttattggattttcagaaaaaataggcccagccagggctaggagttttcttcgattttcagaaaaaacaggtccagccagggctaggagttttattggattttcagaaaaaataggcccagccagggctaggagttttcttgggtttacagaaaaaacagtcaagccagggctaggagttttat

SEQ ID NO: 31204 - DNA, 1039 bp, Heterodera glycines
tcccctcgatgttttaagtgataaaatttaggtataactccaccccgagaaatttgaatggacttaaaaaattgtaggaaaaaaatttattgtttatagataagccaacaattaaaattaatgaaaattttcgatgacaagagttataaaaacttgtcttcaaaaatttaagacacaatttctatggactcaaaaatttagtaagaaaaaaaaaataataatttttgcttcgattttgaaagccgacgatttatctgaaataaaatttttgattttatacatattttctattggaattttgaacaaattgctcatattttttaccattaaatacaaatttggatatgaaaaaaaaaaatttttttttgtttgtaagtttttactttattttgtctaaaattttcaaaaattcaatttctaatttttaattatttggattatattcatcatgcaattgatggagccatgccttttccaagtccgtcttgtgctcgtccttaatttgtgcaaattgaatagcgctgttcgcctccttaatgtactgcttggtgtcgttgctgatggtctccaaatcgccagcaatcacatcaggcatttccacatgaccacttttgttcattttgatcaactcattgctggccccgtcgagcacaaccttttgaacagaaaattaattatgtaattaataattgtaaaattatgagtaggatggaaattttattcaacaaaaattaccaaatattttgagaaaaaatatttaaataaaaaaatttaaaaaaaaatttatgtaaaattttttgtatcaattttttagacaataaaatcgtaaaaagtaataggaaaaaatgtcacaaaaactaaaatgaaggcctaaaaatatattttttttgtatttaaaaaatgattttcaaaaaaatttctacagtcataatttaaaattaaaaaggaaaaaatgaagagtttaggtaacatattacggtcaaatttttaaaattacttgttttaacgctaattaaaaaatcagtaattaaaaatcgct

SEQ ID NO: 31205 - DNA, 1540 bp, Heterodera glycines
tgcaaaaattctagaaattttttgacctcttccgtgaatttggcccctgttttatttattcattgctcgtctcttcaccacctgcaacgcgtcgattggttggttctgctgctggtagagaacgccgatgctgcgccaaatgttcgcgtccgactcgtcgctgtctatcgccgttcgataagagacgaaggcgttttgtgccgcttggtcctgtcaaatataaatcaccaaatgatgccgtcctccgcttcccctgccccgcccccttacggcgttgtatcgcggctgctgctgctgcccattcgccgcgttcggctgttgctgctcctctgcgcctttcttcgccaattcccgcctctgttcgctgtagcaaaggcccaagtagcaatttgctttgctatctgacgaattaaaatcacaaatattttcttaatcattcgttttgatagtaaaatgctccgactcgtcggggagagttcgcgcgctttgcacaataatttctccgcgtcctttagcttttggtattggtgctccttcggttcgcgctcgcgagtgcaaaggcttatccaacctgaaaataagaaaaaaccgaaatggaaagtttcaaattgagaaacaaaacgcaactaccaagtcttgaatatattgcggccagaagatggttgctgaacttaacaacggtgctttcgtcaattaatttccggtattcctgaaagaattttcaaaataattataatacatttcgatgcagaaatttaagtccaaattatcaagattaaattttcaatattacttctactgcctttcggacgtcacccgctatatctgaggacaaaataaattattatttttttaattaataaaaatcagcaaaacaaccgaaacaatgcgcaatttgaaagcggagaaaatgtttgggaaaagcgcactcctcttggccctcttcaaaggcaattgtcaggtgttttaatgccaacggaatgttgtcgacggatttgaatgaaaggcctaaaaggcaacatccgtttgagcagtggccacttaagcggggcttccccccccccccccgcccaccgacccaatcggacatgcacatcagagaggacggagttggcagtgtacggatgcgaaaaaagtaattggcagaaaagatcgatgacactgaaaagagtacaaatgcaatacaaatgggaaattggcaacactttctgtggcctctggtttgtgttgtgtattcataaaatacatatttagtagcaaaataacataggttttccgggataatccgtggtttggtatagtaattctgttttgtttactcaattaatgctaatgtaaaagaaccatttattcatgaaacctcgaaaattttagggaaaaatcaattgcaatcggaattccgaaagctgatgtttttgaatttggattggtttaattattttaccatgtaaatttgaaccaataggtaaaattaaaacgaaaaaaaattttgttgggttgagggagaaagggaaaggacgccaaatgaagagggcatatg

SEQ ID NO: 31206 - DNA, 861 bp, Heterodera glycines
  unsure (1)..(861): unsure at all n locations
taaaatgaatggctaattattantttaatatcaaaactttcagtttctatttatcatttaaattccagaaataataaataaatcaatttttatttttcaatgaaaatttgtatttaggagggaaattcattttcaccttnttcgctcggctgttcgcgataacaaaaataaattaacgatgatgcaaaaatttaatgattgattgtaaaaaggatgcattttccaattaaaatgaataaaattccaaatattttaaaagcgtataatgcaaattaactaattgttttcaactaatattaataaataacatttntttgtcttatgaaaaatttgggtggctaggtcgtnttcttaaaaaccgccanctatgggcgtnttcttaaaccagccaagggataggaaaacaaaaaatgtaagatatacaaattcataacttggcttaaattcaatttaattattcttcgtatcattcaatagctctaggtgttctnctatcagaatattaatttttatggtcacaaaattttaaaaaatcttgagtcagaattttttggccataacatttttgaaactcaatgaaattttttgaaattttaaagattaatagagaattcttaggtctattcattatataaattaatttaggctcaattccattttaaggactttagaattttaaatgtttataaataaatatgcatgaccatggcaaaaaacatagcatgttcaatgctttataacttttttcagaagcaattagattaaattttatatatttatcttgaaaattttaaaaaatttcattgagtttcaaaaaagttatggccaaaaaattcagacacaagattttttaaaattttg

SEQ ID NO: 31207 - DNA, 424 bp, Heterodera glycines
gcagcttataaccagcccggcgtatcagacgtacataccgacggacggcaccgatgaacagttcctgttattccgattcggtattgaagggcatgaatgtggcttttgtttttatggtgccgatggagaaatgaagcgcgttcacaagaataagaagaatttgccgttattgttgatgtacgccttgtcaaaagacaaaaaattggacgtgtatctttgtgattagccatttgctaacttttattagggttttatcaaatattagcgttaataaattgttgaaaattaaaaaaatatttttttttgtggcgcaaatgtcgatttggctgggcggcgcaagtgtcagcggcgcaaaagtcacggcgcaagtgtctgcggcgcaaatgtcgatttggctgggcagcgcaagtgtcgcggcgcaagt

SEQ ID NO: 31208 - DNA, 1386 bp, Heterodera glycines
aaattttaaattacaattatcaattattgagacatttaaaaaaatttaaaaaatatttattaattaataattttttaaattttaattggtaaaattaatgggcttgttgggcttgttttttgtgatttaactccatttattgaaaattgttaatattattcaaatcatttattttgcgaggaatttttcattcttaatatttttcaagaaataaaatattattcaattaaaatcactaaattgtaaaacctttttaatatatttaaattataaatttgtggggtttttttttcaccttcgctccactcatttctgagcctgtttatgataattctccgtttatgccataaataagtgcgtgtgacgaaaaaacagcacaaaaaactgatggcaccgccggccaaaaaaaggaactgaaaattcaaacaaattaattttttaaattgcaaaaagtgccaaaccgtcgcggcaataaccgactcaaactcggcaccaagcgaagtcagacgcatggcaaaagccaaaaaacaaaacaaattaactaattgagcaattaacacaataattattagggcagcataaatataaacaaatccaataaatctgaaaaaaattttaataaggcgagatatggaaaagattttattaattaaattggtaaagatataaaaatttggaatttgtgctaaatcattttaaataatttaatcatttaaaatgactgatgagagaagagacgaaaattaattaaatgttaatgatttaaattaaaataaaataaatattggattttcatcttcaatttataaagatagttttataaaattattttaaataatttttataaagttgtttactcttttttggagtagtaaaagtttaagtgggattaaaattcactctttcgtccccattccaccgcttgttgccgctttttgctcttcaatgcattttgtcagcagcagaaattgatcggccgaacgccgccggcgctaaaatccgtccgaaaagccctcgggaaaaatggaaaagagagagcaaagagaggagcatcgttcggcggagggccaatgctcgtcgatccgccaaatttcgattttttgccttgaagcaatctgtgacgcaaaagccgggccaactgatgacgccgggggggggatttgggcaagtggctgcacttcgtttgtgcgccatcccaaaagccgaattttagggtaacaatttttaattgggtaattagtgatgcacgagagtctcggaattaacaaacaattctccattcgagaattttggtggtttttagggtgcttaggtctcgattttattcttggaaaatcgcttatatattagcaatggcgtctgaatttgacgtaaagaattcgaatg

SEQ ID NO: 31209 - DNA, 756 bp, Heterodera glycines
tttttcgtgattatcattttaatttcaatttaacaattttttatttatccaattaaaaaataaaaatcaaattttcgactatatcattttttactcgtcggaaatcattgaattatcgctaaattaacatattcgaccaaatatgtgaagcaaaaagcaaaaacaattttttcccattaacttatttattatgcacaatgggaattaatttcatttgctttactaatttttattccatttttatttgaatattattttttacgaatttttattattactaattttaaaaaattctcaaattttacgccatttataattttaaacaaatttataggaggaaagattttaacggcactacttttgccagattaacagtttattgtcagattgaccgatgggattgaagaatggagcttggaacattcttttttgctgtttattttttcagcttttaggccaatgctttggtaaaaataataattatttttatgagaaaatttatataattttaaattcaatagttcaaaaattttatatataaaaatattaaattggaattttctatttttacccacatcaatcattttttagtccttaaaaatgatgaatataataattttatttaaaaagaaaattattttttaagcatacagagaattgaaatggaaagttggccgtgctcaggcacagacaaacagtaaaaaattagaagtcaaaactgggaaatgcgcgtttgaacagtatttttgctgatga

SEQ ID NO: 31210 - DNA, 975 bp, Heterodera glycines
  unsure (1)..(975): unsure at all n locations
gtaattaaaaaaatcggctttatggtcncaattacggcataaacgttttccaggtgtccgtgattcgttacgaagcgccaattctttttcataatgccaaacatttcaaatactctgtattggaagcagctcgtcaaattaaagggtaattattatataattattaaatttattatgttaatttaaatattcagccaattgttgggcattggcattggcactcggacgggcagtatgaaaagcatgaaaagcacaaatgccggtgaaaagtttagaaaaataaatgctaatttagtcaacaaaacctttaaaataaatttgatgcttttcaatttcattaatttagttttgttcaacttattctttatttgcttaattaaggtaatgttggctccggcgcaggtccttcagctccaacaaacaaggattcaattcaaatgaaatcaacactgttgatcagcggcgacattgtggtaaagttttaagtcgattttaaaaattattttatataaaattcattaaaatatacattcatataacttatatacaaatttcacttaaaatatttttttgactcttaagtagggactccatttttttcggggtttttgtgcctaaggtgcctactttcggatttttgaaaaaatccttaacaaaaatgcaataaaaacgcaaaatacacccctaagaaatggcccgaaaaaattttcaaaaaatatacccctaagaattgaaaatttttccaaaaattgatccacaaaatttattatttttcttaacaaaattttttgatttaaaaatttattcttttcggaaaaaaaactttcaaatatttattaatttcatttacatttggaaatttttagtgttttgctacataaaaagcgttaataaaaaactttatttgcctatttgaggatttttgtgcctatttagtgcctattttgcgatttttctgcctaaaaatggagtccc

SEQ ID NO: 31211 - DNA, 1494 bp, Heterodera glycines
  unsure (1)..(1494): unsure at all n locations
ttattttatgactgccaaattaacattatatctaaccttcaccagacaaaacccttaaatcaaaatacacaatgttaactgttttttttttaatttatatttttatatacacattttttgtttggaatgaaattttattatcaaattttaaccaatgtttaaatttaacgtttaattagatcatttatccgccgggatatttggtatatctcgtttgcctcgccttccaaaaataatggcaacagcctaacganatcgggtgggtaaacagatctgtggcaaccaattaaactctcacataaatttataaaactcgtcattttcaatagaagaatttcatgnttataantgataaatacttttatattttgctcttttttattnaaatttattttttaaacttaaaaattatattttttttcatccaaagtttgtgtccgacgtttaaaaattttttaaaacttaaatcaggaaatttatcctttttatttttcttttttgaagaaaatccaaaactttttttttggtttttaaatttttgaaaaaaaatttaaaaaataatattttttttttttttttccaaaaaaaacaaaaaattttttacaatttcggtaaatttttgaactaaaccccccttttagaaaaaaaaatatttctctttcctctccacaaaatattcccttttttattaaaaaaaatttatttttttttgggaacaccccttgtgggggcgcttgttttttaaaaagggggggcgaacaaaaaccccctccaaaagaagggggggggagaacaaaattttttttttgttttttttttggtttttccccccccttttaaaaaaaaaaaagaaacaaaaaatataaatataaaaataattttttctgttcttataaaaaaatggtggcgcgcgggagaaaagagggggaataatatttttttgttgggggaaaaaatatttttttttttttttttttttattttattttgttaagaaaaaaaatttttttttttcctctcccaaaaaaaaaaaaaaaaggggggggggggggcaaaaaaaaaaaaaaaaaaaaagaagggggggggggtttataaaaaaaaaaaaaaacccctcccgcgggggagaggaaggggggggggttttttttttttttattttttggggggggggggggggggggggggaaaaaaaaaaaaaaaaaaaaaaaaaaaaaaaatttttttttttttttttttttttctttttccccttccccttatgagtagggggggggggggaggggggagggaaaaaaaaaaaacacaccccccccccccccccccccccccccccccccccccccccaaaaaaaaaaaaaaaaaaaaaaaaaaaaaaaaaaaaagaagggggggggggggggggggggggggggggggggggcgcccccccccacccccccccaccccaccccccccccacaaacaacctttttttttttttttattttttttttt

SEQ ID NO: 31212 - DNA, 1540 bp, Heterodera glycines
  unsure (1)..(1540): unsure at all n locations
tggtttggtgttattttagggtttgataatttcagcaagcccacactccgttagcatttaaaactcccatattcgtgtttacttcctctgccattttatttaaggcccttgtgtttgcatatgcccttcgatttacaattctaaatgatctatttacagattcctctaggcgtagaacttctatgtgggctctttccaaatcgggaacctttaccgacgttttaccattccaaaaatttcggtcaatgattgttatgtttatttcttcatccctctcttgactggtggccctagagccagtcttttttgagtgtgacataagccacgaaaatgtgcactgattgctgtgttgaaataagtgaggggatatttgggaatgatttgaatatatgcttggctaaacaaagaaattttatgctataaatatttgaattttggtcatcattttaagcttaagcaatataagaaattgttgtcgggagtgataatgatttctttgcttttcctcgatgcttttaaatattgccaaataaaaagaattttcttagtttccgttcgcttttgatgggaaattacataatgtttccatagtcaattgacgattgaacgcggtgataagcatcattccattaagatgcaagcagctgactgtaaaagcaattagcagcatcggcggtaatggccggaaggggtcaaagtgaatgaacatcgtgtgaaacgaaagattagtttaaagtgaaattcgaattaaagttatttgtaaataacgttttagttgaaatttaatttttatttattttatttttgcattaaatgttaatttgcgtagtttttctttctttttcttgactgttctccccagggagtaattttgcattaatttccaattttatgctttacaataccaataattgagggtttatttttaaatgaaattttatgataaaccttattatctcagaagctatttaattgattcggatgtttttatcgcggttaattagagcaccgaaaattggtttgaatcgtgaagtttatcatttctaactcacttctcaaaattgttgataaattgcaaacatatttttccaaaagtctgttgacactttctgaaaataaattctatactcatgtattttccacttattagattttgcaggcttattgctgcatgttagttgacacttcttcaaaataacctatgccctttattcgttcaaaacaccatctttgttgtttcgctttggattgataagcccgatgataaatagctcgagcgcaaaacgcgtgcatgtttggaaagtatcgttcataccaataattgagggtttatttttaaatgaaattttatgataaaccttattatctcagaagctatttaattgattcggatgtttttatcgcggttaattagagcaccaaaaattggtttgaatcgtgaagattatcatttctaactcacttctcaaaattgttgataaattgncaatatatttttccaaagtctgttgacactttctgaaagtaatctatactcatg

SEQ ID NO: 31213 - DNA, 1060 bp, Heterodera glycines
tagaagaggcaaaacagtgatagaagaggtacaacagtgattaaaagaggtaaaacagtgatcaaaagaggtacaacagtgatcagaagagctacaactgtgatttgaagaggtacaacagtgatagaagaggcaaaacagtgatagaagaggtataacagtgatagaagaggcaaaacagtgatcaaaagaggtacaacagtgatcagaagaggtacaacataaattcaaattaaaaattgtatgaattataaatttattaaattaaaaataaatcctccatttattaattgaaaataacgttgaaaattaataattgaatatttaataaatttaagatgaaatttacaaattcaaaaaaataaataattaaattctttaatgtaaaaatttttttttaaataatctacaacaaatcttaagattagttaaaaacattgaaaatgacgtaaaaaggcatataaaataatttacaccggccggattcgaacctgccgccccccccccccagaagatgactcagaatccccaatcacacagggattctgagggcttaacgatgtcaaaagtaaaatctgatcacgtattcgtgatcagcggcccaaataacccctaaagacatgtttttggaagatttttgtcgaaaaaaatttttcactcagaaatcatggtcacccccctttggtcccgaatgccaaaatcacttttatttctataaattttttcaaaaaagtgataataagctaaattaaaatttataaaatagagcaaaaaattgcggatttttgtagtattttacttttcccgaatagcttttcagaaggcagttacgaatttttttctgaaaattcgaatttttccatgaaattctggaataacttttttcgttttttagatagaaattccaaataaagtccataaaattctcctagatttttcctctatttttaaggctttattcctgtaaaattgatcaacccttcgatttgttatgaattttcataatattaggcctaaaaaaacgaggccaaaaaattgccaaaaaataaagaattttaaa

SEQ ID NO: 31214 - DNA, 1286 bp, Heterodera glycines
gggggtcgcaaattttgaaaattttcttaacaaattcattaaaaatccaaaaaattttccccggcggcgcctggcggcaccgccagaacccaaaaatcccaatttttcttaaaaaagtggcttaaaatcgcaaaaataggccattttttggtgaaaatctgttaacaaatcgcattaaaaattacaaaaaaaaattttcctggcggcgcctatcggcaccgccggccccctgtttccaaaattttgaaaaaaccgcaccgaaaaaaaactgttttttgaaaaaccaagcaaaaaaaaagtcttttgcggccgatcccccttcgcaaaaattttggccgacccaccccccttttttatttatttttggtacataaaatcgctacgtaagaatattaatttaaatttaaatttattttatttattcgtatttattatttaaaataattttaaaatgttgtattcttgatttcattttttaattaagttaaaaaaactattttttaaatttattgactattttttgttgttgctttttttgttattttaatttaaaatgttatttttattgatttctaattttttttttggtatttaatttttttttttttttgtaaaattcgcaatctctgccccaccgagttaggaattgcgatgccttgaggccaatgtccggtcagtgccgtccaaaccgattctcggggcaatgaatcgtccccatttgctcgctgattacaacagttgacaagctgacgaaacagaatgagcagatcacggaaggatgacagaaagggatgatgactgatctaaaaagcgcacaccaaaataaaataatataaaatttcgtttttaattttcagcaattttcttaataaatcacattaaaatttccaaaatttttccggcaacggcttaatggcaccacgggacccccagtttaccatagtttttgtaaatttgtccgcaaaatggctaaaatcaattatttttggcgaaaaatggctacaaaattaaaaattccattttttatatcgatcctacaataataaatatttttatgcgattttttaaccccataaattaaaccacctaaggtgcaatacaagttctctaaatctagactaaaattggtaccgaaaagaaggaagttatgaatttttcaaaaaaaggtattaaaaaacaaacaatgaggcaagcccatttaaaaatgaaataaaaattaatttattatctattttttttaccaagcaaagtgaaattaacgaagccgaactgcttgtgtttgcatg

SEQ ID NO: 31215 - DNA, 1139 bp, Heterodera glycines
ttttagtttaaaatatatttgaatacttttttatccctcccctgttttttattaatacagaattttttgaaatttcctaaaatccgcaatcctgcgcaggatcctgcagattttaaatgcaggatttgcaggattaatcctgccggatcctgtcctgtaaaaaattttgaattccaatcctgcaacaggacccgcaaatttgatttttatgcaggattcagcaggatcctgcattgattttttgaaaatttaaaaaaaaagaatgccaaatatcagaaactttcttttttcaaaaatttttttctaataaaaatttttcgtttaaaaacttatccttattcgaaaaaagtttatacaattgaattttttatgtgttttgctacctaaaaagcgttaataaaaaatttttttttactatttttgtgcctattttaggatttttctgcctttttaagtgcctatttcgcgattttttgtgcctaaaaatcccatccctatacataatggattatgacttttttgcaaaggaatttaaataaaaattattttactttaatttaagctattattatgagccacccaatttggcaaatcggtctttttaaacgcattaaaaaagaatcagtcgattgcttggagtgtaagcaaaaaaacgttattaatttttcatcttcatcattttttagtttaaaaatatatttgaatacttttttatactttgaaagacttttttattaatacagaattttttgaaatttcctaaaatccgcaatcctgcgcaggatcctgcagattttaaatgcaggatttgcaggattaatcctgccggatcctgtcctgtaaaaaattttgaattccaatcctgcaacaggacccgcaaatttgatttttattcaggattcagcaggatcctgcattgattctttgaaaattttaaaaaaaagaatgccaaatattcagaaactttcttttttcaaaaatttttttctaataaaaatttttcgtttaaaaacttatccttattcgaaaaaagtttatacaattaaattttttatgtgttttgctacctaaaaagcgttaataaaaaattttttaaaagtatttttgtgcctattttaggatttttctgcctttttaag

SEQ ID NO: 31216 - DNA, 1911 bp, Heterodera glycines
  unsure (1)..(1911): unsure at all n locations
ttataattttaaaancggagcatacattaatttttattagcatattttttggtcggctttcgcttggacttaatttgttttatcattgtcattagtcattcattaccttgtttagtagatgaattatttgccttttcaccacctgttaggaaaataattatgaattttaaagataaaaacttttacaattccttaaatattcaagtaaatttttattaaagattccgaaggtaaagcacatatgattttttgataagaaatttttgtaaacagaaaatgatcactcaatttctcaaataaaactgaaattaaaaatttttgccaacatatttatcaaaatattgaaaaaaatagaaatatgtatcctaatatttaaaaatcccgttcttgtcattattaccttgtttttttctgtgtcgtagaagatgacttgttttttacgctttcaccacctgctgcattaccatttgttgcttaaataatattttaaaacatttatttgaatgcgtattttttgttttaaatatttttaattttttggcaaaaattatttttatttatcgtttaaaataatttttggcaaaaaactaacgcattccgttgactgaaaaaagttcaaatgggaggcaatggccaacaccaacagaaagatggctgttgaagagaatcgcatttttacaaatgggatttgggttccttttctgacctaaaagaaatttcgaatattttttatgatattagaaaataagaattttcatagtcaaatataaatttatgggccatttatttttgaatttggaaatttggtttcgtccgcctggtgtcatgacaattcgtataatgttgtgcaaaggcagctcgtagaattgcttaggttagacctaggctttagtcttaagcttaagcttaaacttggctttattttgtaacatacgaattgccttttctacgagttgccattgactcgtccgcctttcttcgttcactaataaatgggttcccaactgaattttccaaaagcttcatttgactgacaaaaagttgcatctgaaactttatcccagatataaaaaccaataaaaaaaaatttttttttttcattgcctatgttcaatttctcagccttttgtttgtcagaaacaaacacttaataaaattccgagcaagaaaaacagggaaaatgttggaattttatgaaatttttacagatttgtccaaaaagtaattttgagagatttttttgatatcagataatgcaattttatggggcagaaaggtcctgttttttcagagttgtcctgaattggcatatgatcgcaaacattaaatgtccttatttttttgtttagtcctaaccaaagaaatcaaatgaaagatgaaaatatatttttattttttagattcgtcctctgaattggaatgacgatttgaataatcgaaaatgtcctgatatatcagaggtgtcctgaaatgcacaaatgatccgaaacattaatatgtccttattttttgtgtcttggattctgttcatagtaatatttttttcgaaaaataattatggcaaattagtgaatattgcgtctttttcatagtcaagagatttgatccatagacaaagttttttatgataaaatttttataaaaatttcactttaatacaaaatttatatcccaattgttacaaaataaagtcgtccaatttccggcttttcaattttggctcattttcacattctccccataattattattnggcaagtccaatggccttgtcacatttcgcgctgcatttgctgcacggttcgcccgcttcataaaccggcgcgccanagtaattaccactnaaagggtaattaaaatatatttaaattgaaaacattttttgttaatgtggcttacgctgcgtaatac

SEQ ID NO: 31217 - DNA, 1059 bp, Heterodera glycines
attaccgtattatctctaattatcgccccgtctccatttaaccccccccccctttctgaggaggttgaacaataatcctcccaggcccgtaccaaaagaacgaggtaatgttaaaatttgcctttttgaggccaaaaaccggaaaattttacaaaaaaatcattttttcgccaaattttctcgagaatattgaataaatttaaattttcttagaaattaataaatttatgtcaaatataagcaaaaaagcgaaaaaatttcgcttttcgggttgatttttcaataaaaatgagtaaattttagctttatcgtgttttttcttctaaaatgatttttaataccatatttagccatttttgaaggttttactttaaatttaacaagtttaaagaaattttgggaaattataccctcaatttggaaaaatttatgtccatatttcgcgatctttggtccatattttatggccatattttgcgattttatatccatataattccccgcccaagtatttgcggataggcaggataaaatgaacaaaatgaaaaactcataacaaaatgttttagttccaagtataaaaaaaaatgttagttaggcattgcttttttcaaaagcctaaattaacatggaatttatttagaataaactttgaaccgatggatcccataccgtccccggtgatatcgtcagtggttgatttcgtcagtgagtgatttcgtcagtaagtgatttcgtcagtagttgatttcgtcagtgagaaataatttttaaaaaaaatttacctatcaaatattaaaaatgaattcaaaaatgcaagtgatatgaacatgctcgtaaatactctaacggatcacgattatcgaaattttccacaagagtcatcaaattgttgtcctgccgaacccattttgcccttctcttttcatgaggtcctctaattcattgcgaagccgttcattggcttgtctgacctatacccaggaaaatccatttcgaacaaattaaaatcccggatccgaacccagggacggtcccaggatttggtttggggggggg

SEQ ID NO: 31218 - DNA, 1201 bp, Heterodera glycines
ttgctgatgatcagataaatcaaatccactgatcaaatccgctgtgccattgtttccacggatcattcaagcatatatttgcgattgatcaggcctatattttaaaaaattgataatttttgctcaatttttgacaattatgcctgccaatgacgaattcagtgtgtagcgtaagccgaaaagttcggtccaatgaatttttcatcaaatttctgaacattttaaacttcttagacctcagaaaaaccgtggtcatcaaaaaatctttctattgtgatcatgaaatatattaattttttgttgccaacctttggtccaacttactaaccaccaaaagcagccttttggcttttcataaatgccatggcctcaaaaacactcaattcgcccccccccatcccgccgtttttgttggtgacattctcccattttgcttgatcacttttttaatcaaaaaagggacaaaaattgtttttttggcataatgtcacaatttttcgttcttttaccgttcacatttcgttcacaatttttcccctctctttcttttttttttttgtcctcctccgccgtccatccgcccaatttttcgtgtcgtaaaatttgcaaaaattggtgctgggagagtggggggagcgggggatgagagagtggtggattagtggatggtggaaaatggaaaagaaaggagagaaaattgagagagacagaagaggagagagagagagagaggagagagatacagagaggggagagagaggaagggggagagaggaaagatagagagaggacagagagagagagagagaggagagagagcggggggggaggttaaaacaaaatagtgcatgtgtttgtcatggaggcggagagagtgagtgaggaagtgaacagggctcgtgggaccaaaggctccctcccccgggggtgggagggggacgtgaaaatgttgtttacgtgctcggggacggacagtcctttcctcttcctctttttgtcccagcagtgtttctatttgttcatgggtttctttccttccctctcttactctctttttcctgccttccttttttccaactcttcctcttcatccattctttttcaccctcctcttcgcgttctctctctctctctctccctttctttctttctctaggagatatgttcagggatggcagatgaaaattttcaaaagcctcat

SEQ ID NO: 31219 - DNA, 902 bp, Heterodera glycines
ctaaaattaagaattcacaatacaagtcgaccccgctcttacctagggtatatagcttatatgcattttcccactcacagctctgaatgttcccttgttaacgtaggtaaattagaaattaaaaatgtgccaattcggtatgccaacgacggaaacactaacccaaataggtgggccgtaggcatttgataatgtcctcctcgaccccgccggcactggtcaccacacagtccacctggtcatgctccagcaaatagcgaaatgtctaatggaaatttgttatttaacaaaaagccatggcaaaaagatggcactaacctccctaagtccagaagtgaccaaattggaggtgtacccgaggaaaatggttagcctacgccgacggcgccgattcggttgcgggtagtcgaaaaaggggtcaacaccaggctcaaattggacggggacggaacgctcctcaatcatcgcgttgatttcctgacaaaaagtttcattaaaattatatagataaacaagcacccaaaaatgatgcattggatggggaaaaggaaggaagggggcttgagagttgaatcaacggctcttttttttttgctataacaatacgtgtttaaatggaaatgattgttgctgaaaatgtacctggatggcgatgcccatgtggctggcctggaagccggtggtcaaaaaggaatccaacaacgcctcccattgaatgccggcgttgaaatcatagccaacgatgaccggacgctgctcatagtcgtgcaactgttgttgctgctgctgatccgaattgaccaacaccgcctgacggcacagtgccaactcagcgggacagggcacaaccgaagatgctgcaaaaggacaccggaatattaatcgtataaactcattgagaa

SEQ ID NO: 31220 - DNA, 971 bp, Heterodera glycines
agttaatttttttgtgctgaactgtgtttgggttctccttgcagtgcgctcaactaagtctcttggagttagagcatttttcatggtattttcaagaaaattgtgcaatgtgggcgacccggaacattttagacagtttccaaaccaaacactcatagtaaaaaattatttcgttagaatacgagaaataatttgaaacgaaacactggttactaatttgcatatatctctgcgaaaattccagatccaaaaaaatcagctataccattcgaaagctgctttcaggcgctctcagaaaacagtaaaaacgctcctattcatgcactaggcgctgagatatatgcacttgactttctgcatataattgccattctccgcagcaaacttcgcgttctcaagcgtgaatagttaatttttttgtgctgaactgtgttagggttctccttgcagtgcgctcaactaagtctcttggagttagagcatttttcatggtattttcaagaaaattgtgcaatgtgggcgacccggaacattttagacagtttccaaaccaaacactcatagtaaaaaattatttcgttagaatacgagaaataatttgaaacgaaacactggttactaatttgcatatatctctgcgaaaattccagatccaaaaaaatcagctataccattcgaaagctgctttcaggcgctctcagaaaacagtaaaaacgctcctattcatgcactaggcgctgagatatatgcacttgactttctgcatataattgccattctccgcagcaaacttcgcgttctcaagcgtgaatagttaatttttttgtgctgaactgtgttagggttctccttgcagtgcgctcaactaagtctcttggagttagagcatttttcatggtattttcaagaaaattgtgcatgtggggcgacccggaacattttagacagtttccaaaccaaacactcatagt

SEQ ID NO: 31221 - DNA, 915 bp, Heterodera glycines
ttggacttttcgaccttttgctgaaatttctacaattagttaataaataattaatacaaaattagttttaatttgtggcgttttgcccacctcgccgccgttgtgacgtgcccactcgcgcgggttcagcgtgttcaccactccgtttttgtacagccacgcgccgcgcagcatgtttttgcctccacggagcacagcggggacataaaaaataattaagtgatagtaattaatcataaaaggctttgttaatttacgggttggccttgcaataagccgacaagccaaaggagaaagtcttggacttcggccggaagacgcgcaattggaacaacactgtgaaaacaaacaaatcgaattaggaaattaattatttaaaaatcaaaaaatattttttgcccttctatttttacacaaggttcgcgtccagcccaaccacataacgtttcttcgggaaatgagcagtggccgcgtggaaatagctgcaaaatgcgattaaattctaacataaaaaacataaaataattttttaatctttgccaagggactcacacgtccgtcacccattcgacgtgcggtgagttggccggcgaggccaaatggtcgtgcgcaatttgcttaacttaagttgaaaattttgtaatcgtgtccaatccaaatttaaatgcttcgcaaatgctaacttttttgcagaaattcctccccatactgttcccgaatgtgtgccggcgcctgtctgtatgtcttttcgaaactcgacggcacattttccggcgtggtcatcggcgttcggaaatagcccggctcaacgatcgccacgtgcacaccgaagggggccaactctcggctaaaagtgccgaaatttttaaataatttccatttattcgctttaaaaggaatttcaaactgagtgag

SEQ ID NO: 31222 - DNA, 936 bp, Heterodera glycines
taaaaataatacaaaattaattttttaagtaaagaaacttttcgaattcgggttcgggattcgaaaaatggatgtttggaacatatccgaccaatttcagtcgtaaacaggcactcacgcgaaaacgtaccccacgcgaaaacggccacgcgaaaacgtcctggcccccatagcgtgggtttcgcagaaaattaattttcagatccctctttgagattgggagttcaattcccgtggtattaatcccgcaaaaatcccgcgcgctgtctatgttttttctatggatagatagtattttattagaaaagtttttctccatgtaattttcaattataatgatttgtaacataaaaatactacttacaattagttagatttgaaagccattgttttctctatttgcttgcaatatttcaaaaaaaaaaattcgttacttttcaataatgaaatcttgcaggttaatggagaaaagaatgtttgattatttttgtcagagagcagctgcggaatggctgacgaatttgccaagccgaaatttgacggcaaaatcttccaaaaccccgacagcttcacaacatggaaaaacccgccttcggcaggggacccgagaagttggcgggacttcattaaatggaaatgggatgcaaagagcacgaaactgcccaatttgaaagtatgtttaaaaacttcgttttttgtcactaattgtaaactgcaagaatgccgcatttcccatttaggtgcttgaccagactttgccggtgttaaagcctcggttccaaacggattctcggctttcggccacttggctcggccatgccacactttttgtgcgcattgacggcatttcagtgctcacagacccagtgagttggaaacaataatagacaaagacatctttttgaggactttaggtaaaaaatatttttcattcca

SEQ ID NO: 31223 - DNA, 1159 bp, Heterodera glycines
  unsure (1)..(1159): unsure at all n locations
cattggaattcttttataaaataanaataatataataaataaaataaattaattttatttgtttacagtttagaacaacaacaatcgtgttcattatggcaaaattaattttgttggcgttggcctttctgagcatgtttggcattgtttgtagtttggaagaaccgtaaaattttctaaaataaaaaatcctataaattttaaaaataatttaaaattgaaattaaatatttactaaaatcttagtttaatttaaattattgccaaaaattggattatccataatttaattggccataattttagtcgagatctaaatgtgttcaaatttcaaaccgctttaaatgccaatgttataatttttggaatttttaattttaaaaatttatttttatttttttagctccgtttgctgtgaccagtgcggcaaagagtttttggaatgccaaagcacgtgcaaactggagcatcgggcaggcaatgtggaatgtccagagtactgcaatttcgtgttggaagactgctcgcgcgataagtgtcgtaagccatgcccacgtcccagagataaacactgaaaaaagagtcatcgagaaaaatgaattcgatgggaaaagcgatggatggaaaattgtgataaaatccatgaaagaattaaacaaaatttacataaattttatatactaatattattgtattttgcaaattgattttaaagaatttaaagagtaaaaatccaactcatactaggcaatctcgtactattttatgacaaaaaaaaaaacaaagtcgtccaaattaaacattcttggcatattccatatcccttaagattttctatctatactcagacttcaagaaaattttattggttttcaaaaaaaccaaaaatcgaaaaaaaaagattctttttttttcgtcaataattttttaaacttcatcaatcagttttttagtttgcaaagaaatagagaagcttaatgttaaatttggttgacttaagcaaaaattatgaccatttttttgcctacaaacagcatttttaaagatgaattgtcacattttaagcgacaaataaaatttaattaggttaattattagggatgcgatttttaggcaagaaggtaaaatttcagcgcacttaatagcaaagtgcaataaa

SEQ ID NO: 31224 - DNA, 1254 bp, Heterodera glycines
  unsure (1)..(1254): unsure at all n locations
gcaattttaggtaacttttgcgctttgaaaatcatcctttcaaaaagaaaatcatccttacctctcgaaatcatcaaaatgatgataaatcatcactagggctgtcaattttatgtaaatacatttttttcctggattctccatgctctaattggtagaaaaacactttcttttttgtgtttgcgaacaaaaatcgggacttttatttacatatttttacatatttcgggcttttatacatatttggtacatattttggactttttcttacataatttcattttttttacatattttgaggattttttacggaaattttggaaatattcaaaaaaaaacattctcaatttcggcaaattttttgtttattttacatattttgagtagagtgcagcgggaccgggaattttgggcaaaaccgggaccggaacttgccgggacctgagaagccgggaccggtaccgggacctcggttttttttcgggaccgggaaccgggaccaaccgggaatttttaaaaattcaaaaaattttaaaaaatttaaaaaattcaaattttaattttttttcaactgaaaataatacaaaattaaatttttattttgtttttttatttaataaaatccaaaagttaaagctaattaaattaatgaaaattttgaaatcaaattttcatcaattatttcaagcaattaatcatttttgactcaaatgatcgaatattatgtgaaattcagatttgcttttcacatcattttttcggcgcgcttttccaaaaaacttttgtggaagatgggggtccggcggttccgacaggcgccgccgggggaaattttgaaaatttgaatgtgatttgttaacagattttcaacaaaaaaggctggtttttggggttaatatgctcaattcgtacggattttcatttaaaaatgatgaaatatgtgtcaattaaaaaaaactatgaggaatcatattttgtcgatagggaaccaatgaatatacaaaaagaaaattaaaaataatttaatttatgtagaggggtcgaaccaggggaaagaagtaaggaaagtcaacgcgactagccactaggccgtttgtggacgtgtcaactttccttttaaagaatatatttaattattttttcaaaattttcatttcagtccaattttcatctctaattttcactcagacccccattcttaccagtgcttgttttttccgggtcccggntgccctaccgggaccgggacctgag

SEQ ID NO: 31225 - DNA, 916 bp, Heterodera glycines
tctctttgcttcttcttttctcccccccccccccctaacttttggcctcacttaaatgtgattttcttctccatccaatttttgtttgctttttgtgctcttttcgttccaatttccttcttccttccgttcaccaaatggcctcattttgcgctgattcgatgcgcaaacacttttcaaaagtgccgttcgtccgtctgtgccttttcactgtcttttttctttggctgtgcctttatttgcatatttttttgtctaatttcaccaaattttacttcaatttttgatcgttaaccgatttaaacattaattaataaaaatttatttttattctgtattgtgatttcaataatgctttattgtctcttggcacttctcaattgctttttcacatttcttcttgtgccaaatgcatattcggatcgattaccaaagtaaataaaataaaacaaatgtaaattaattttgttttcaatttaatcaatgatagggcaacgggtaaatttgttctgttcaccgactttcacattgacaatcattatgacccgcgaggcgacccgaccaaaatgtgccattggaatgaaacgaatgccacaaatcgaacaatggcaaatgccaacacttcgcccggcccatttgggacacggagttgcgactcgccattggtaagagaaaaaattggaaatgaatttatagttggaattgaatgaatttgagcattttcagtctctcgttaattttatggtgaaagaagcacagaaacaattggaaagccccgattatgtgatttggacgggggacaatgcggcgcacgacgaatacgacgagaaaagtgaaaaggaaaagcagaaataaacattaaaataagaaggaaataaattgcacagggtttttcgacacattggaaagtgccaat

SEQ ID NO: 31226 - DNA, 357 bp, Heterodera glycines
  unsure (1)..(357): unsure at all n locations
ggggactgctccgaaaacaaaaaaatcgatttttcccttaaagggccccggggcactcaaacaancagggggagcaccttaaaagagcccaccaaagnacaggcnanagggaagcnacncccgaaggagncggncnccccagaaanctgggcgcaacggancggggggacagccccgaaaacaaaaaaaacgagaacggcaagaggccgcaagggggactcaaacaaggacggggagcaaaaaaccaacgcagaaggaaaggacaggccacagggaagccatccccgaaggacccggactccccagaaaaccgggcgcaccggaacggggggactgccccgaaaacaaaaaaaccga

SEQ ID NO: 31227 - DNA, 1121 bp, Heterodera glycines
atggacccgagcaaagggattttacaacaaaaatgaggataaagtgacgctggccattgattttacggtgggagaagaaaaaggaaccaaaaaacgcaaaattgaccgatgaataagccaatccaatcacactcattttctattattttatcattttcaaattttatcaaatcctgaatcttgcttttttcctattattttttatttttcatagaatattttgtgcttctccactgacaatgaccatttcgccttttcaacgataataaatgaaaacaaacattatttaaaccgccggtgttaggtcgaacctcaaacgacacaatggggtgaacctaaaagagataattttaataattttattttagtaaaaattagcttttctaaatggaatcccgcagtgattaatcccgcaaatatgaaagaataaaaaagtggatgatgaataagcccatcgcctaatactggggtcatggcgtgctgagccgaaccgaaaatagtctcataaattttaacattattatatattttaattaaaaaacattgctttaaaataattaaatttaaatatttttattgacactgagactattttcggatcgacctagcaccaggtcacaataccaaactcatgtcatgcttttcacatgttcctcaagtccaaagaatttgttaattataaatttttcttttttatgtggaatgcttccgagtgccgagacgaaaaaatgccagtgtttttaatgagtaattaataaagtttttttcctttttcaatagtctttgtgtggataaagtgggcatttcaacattttttggtcccttgttaaaatcccttacacctaaatccattttccactttttatttatgcaaaataattgtaaccgagcacgatttttcaaagggagccaaggttcagagtacttttttgtggctagctttttcaaaaaactttggcaaatgggagaggaagggcggtccggcggtgccgtttgcgctgcgcgagagatcccgcaaaatcccgcgcgtgatcccgtcccgcaccgggctctaatctacacaatgcataaaaaaaaaaaataaattttgtataaatgcaacttacgatgaaaaataaatg

SEQ ID NO: 31228 - DNA, 1284 bp, Heterodera glycines
tcgatggagaaaaatctagtttgatatagtaataataattgtgtcagtaaattgagtggagtgtacatttctgtctccgttcactgacagagagtcgtgtctttagtgtgtaagttagtcgtcaaacgacttttgtgccgaacaaatggcaatactaagggagatcacgtgcgacatcgtaggctgtctcccgaaggctcttatgttcttcagcacacagacatcttcaatatgatttgatatttctatgtctcagtgtcctcatcatctgcataacatgggataatcacggcagagactgcgccgtgcatactagggatgtgttcaatcgtcagacaccgatagcagcgcgcatatcagcgcgcaggtaatctcggatcaagcttttttctattgtatctggtgtgtgatatgtgtgggataatatgtattcatagtagatctctgtgtcatgatcactcacagattcttgtttgtgtgatctatatatatatatatatatatatatatatatatatatatatatatatatatatatatatatatatatatataagaaaaggcatttatttatattctaaaaatttcttataaagccttgccattaaatttatgtacggtatgtgtcttttcttattacgttcatctttttcatcgaatctttgatctgctatacatatattatttcaacaattttattggcaaaaaaaaatgaaatgaaatttcaaaagcgcaaatctcggcactttttgttcgagttgaaacttcttgtcaagaaaacaaatagataaaattttttgtagacgaattttttgagaaaatttttcatttatcattatggggtgtattttcagaaaatttttgggccgattagaagccctatgaaaacagtgaattgagcgtggaatttggtcaattctcttaaaaagagagggaaaaggaaaggatttttctgcgttcgacaatcttttcgtgaataattcctaaaattttgcctattttatttttaaatctcattaaaaatttcctaaattctcttaaaaagttgactttctttgcgttctctcgcttttccttttgccacagggcggatcggagagcaaaaaatgcatgcctaattaatgagattgattttcgaagtggattaagtgcatttatcgtttcattgatttgaattgatgaaaaataacaaaattttgagtaacagttttaaataagatggatgctttaattatatgttaaaaagggcttcaattcattgatccaatttcgtaagcgcatttt

SEQ ID NO: 31229 - DNA, 2015 bp, Heterodera glycines
gccaagattttaaatttaaaaagcggaaccccaggattttaaaataatttttaaaattggaaaaaaacagaacgccataatttattttgaaaaaaacagaatgccaagaatttaaatatttttaaatgaggaaaagggggaaacaaaatgcaagaaattggcaagaaataaataggaaaatttggcacaaaaatgtgcaaaaatttggcaaggaaataaattagggaaatttggcacaaaaatgtgtaaaaattggcaaaagatagggttaaaaattgtggcaaaataatgccaaaaattggcatgaaataaatagggaaatttggcacaaaaatgtgcaaaaatttggtaagaaataaatagggaaatttggcacaaaaatgtgtaaaaattggcaaaagatagggttaaaaattgtggcaaaataatgccaaaaattggcaagaaataaatagggaaatttggcacaaaaatgtgcaaaaatttggtaagaaataaatagggaaatttggcacaaaaatgtgtaaaaattggcaaaagatagggttaaaaattgtggcaaaataatgccaaaaattggcaagaaataaatagggaaatttggcacaaaaatgtgcaaaaatttggtaagaaataaatagggaaatttggcacaaaaatgtgtaaaaattggcaaaataaagggttaaaaatttgggcaaaacaatgccaaaaattggcaagaaataaattgggaaataagggggcaaaacaatgccaaaaaattgcggcaaaatggcacaaaaaacggtaccataataatgccaatctggcacataaataataaatggcaaaaagtaatgggtaaatgggtaaacaaatgccaaagaaggaaaaaattaaggcataaataaatgataatggattattgattggcttttccttccgtaaagtgaattaaatgaaatgaaaatgaccaaatggacaaaaaatcaattaataaattgtttattgtctgaaggtgtcaaattacataatgggcatgcgggaaggagggcggcaacacaaagtacgcaaccaattaattaatttgtttatttggcaccttttcaacacccccacccctccttaattgatttgtttatttgaccccctccccccttctcgccgcctgctctcgcccccctcccgccgctggtgacgtcaatttttccctttatgagagcaaattaatgtttatcatcaattgccaatgtggccgagtggttagtgcgtcagtctggccgcccccatggggttcggatccgcttggtgcggggaatttttggagaattttaaatgaatttaaattcaacgtctttgatctttaagacgtttaaaataatttaaaattaaataaatttaattaaaataatttgcataaagtcgcgcaccaaaaaaagtcgcgcaccccctgcaataggtttgggtttgcaagaaaaaagtcgcgcaataggtttggctttcaaaaaaagtcgcgcaataggttttggcttcagtactgaaaagtctggcgctcagatggcccgcgctcacttggcggcgctcaaatggctggcgctcagttggccatgcacccctcccacacctatggggggctaccgtaatccggacaaaatggagtgggtaactactcatctgtacataaagtttcggttctggtcctttgtccttgtctattatgattgttctccaaattgttaattcgcttttgccatcgaaatgtttgtccaccaacatccggtggccatgtttcggctatcactatttccgttcacctgcgctttaatttaatatgtgcgatgtcacggcttactcattgacgaaaatcggatactgaagagcgaatccttggcttttttgcggaatttgtttgtcctaacactaacaaaagtacgataaaggtcgttctattaacgaatcaaattagtgtgaactagggttggttgggaccgggaccaaaacacggacaactgagtactgaagtcccgggtttt

SEQ ID NO: 31230 - DNA, 984 bp, Heterodera glycines
tctgaaaatgaccaattaattaatcattttggcaattagccaataaagaaatttagttggaaattgaattttgacacacatttaaattttaaagagtttaaatgaggataataatggcattatctgagcaaaggttgaatcgctttttatttgtccaaattttataaatttatatcattaaaaatctctaaaaaatattcatatgcattttctaaactattaagcaacccataaaaagttaaagcttgaaactgtataacttgcatttttcttatttttatttttaactgttttatttctttgcgagtcattgtgagttttggtcagataatagagcttatgaagagtttttgcagatatcatttgattggcaaacaaataaaaaaaatatgcttctcaaattgcaagactcagttggcccactttaaattaaaataaaattgaaaatgaaaatgatcgctaacctgaacagtgacaaagcgaatgtgatgccgcgaaatcattctgaaaaggaagcaatttgcacgcttttcacttttattaacaatcccaaaaaatgataatgatatttcttaagtgtttttttttgttgaaaatgattttaaaataattattcattttttgagtaatttaaagggttttaatattaaatattattattaattgacatggaattgaggcaaaatgttcacttttgctgtgccattgccactacagaatcggcaaagtatttgtccttgatactcccgccattgaatgccaactcaagatgggcagtagcggcgaaagtgtccgatttcagggaccaaacacgcaaagagtggacaccgatcactccgggcaagccgatcagatcattgtacaacttttggagatcaatctggcggggggttgcttccatctgaaaatttattctgaaatgattttcaattcagttttaaatcacaaatcatttaaaaaacaaaagttcgacatcaataaaca

SEQ ID NO: 31231 - DNA, 1186 bp, Heterodera glycines
atgttgccactctgtcgtgtgcagttctgcttttttcacttggtgaaaagtatgaagaagcgaattgcttccgagggtttaacccaggtattgcattttttattttccaattgaatttttcatattaagacatacaacaacaatgccgtgtttgctgaaaagagcaaaatgatcacctctatggcttttcttcctgtccaccatctccgtgctggcctcaatgttttgcagacacaactccctcaacaacttattggcgtcttcgattggtgagttttttggaatattaaatcaattttttttatcttaaaggttcatggacaattacaccagaaggccgtagttcaatggtggtttgacagtgcttcgcaccggaagaatggagtgtgcatcaacggacgttggatggaggagacagaactaacaattacgcagaagcattccatagaaaacttcaacaggcatttgattgtacccatcctagtgtcttccacttcatcaacacaattcgatgtgagcaaaagtcaattgatgctgacatctcacgatgcgtcgctggtgaactccctcctctaaagaagcccaaatatcgtgccgccgatgcgagaattcttcgacttttgcagggatacaataccatcaacaataacccggctaaccaaaatgaccacaattacaatgccaatgtcaatgttaatcccgataacatcaaccatttgctcgttggtgtttctcgaaattatgaaatgcgcccgtaatttttcaatgctttgttatttttttttgttgttaacacattgataaatattttttgataataaattaaacatttttagaaaaaaatcagaatataacccatgtgacacaaaaacagcttgccagactaaaacgaccccctgactaaaacgtcccctcagactaaaccggccagactaaaacggccagactaaaacggccagactaaaccggccagactaaactgacccggtccgaggcaatttttgtcaaaatgatgatatatgcctctattcattattttaaccgaggtcaccattactctcgatcccctccccttccgtcatgtacgggtcggggtccctttcccctttacttcattacgttagcatatcgtaccttatgggatatctgccttcggaataaaggacattattccatttgtatatta

SEQ ID NO: 31232 - DNA, 1590 bp, Heterodera glycines
  unsure (1)..(1590): unsure at all n locations
aaattttgggtatgtttagaaatgaaaaaaagaccagtgtccagccgggcattgatgttacatgcggccatcagtggtgacatggcaaattgcggcgcgcccaagtcgacgtcggccccgtgtttgaccaacgcttggcacacttcgaaatggccatccattgcgccaacccaaaggggcgtcacaactgaaaattgatggaaaaataaataaaaattctaatttttccgccgttagaaatgaaaatttgatgggaaatcgatgtctttaagcaatcttttcaaacatttttctgccaaaaaggtgggtaccctcagcagtattacgaaaatcttctttttttttaatttgcgataagttatgtcccggtgaagtttcgcccgtcgatgttttgaggtgtacccttcgttttgacccaccccccccccccggtgtgcgaaggngtcacccttttgaatcactgacccccaaaaagcattttttaatgaatcttctcactcactggtcatggtgggggaacctcttgcgtcgatgagtttgcgaaggcacatttggttcggatcggcgccactctccaactgcaacgattacgataaaaaaatttttagtttttgattgcgttttttcctaccaaaatttccaccatttcgcctgtgcccaacacggaggccagcatcagtgccgtcagcgttttgttggtgccctccggggcgtaacgcgtgcgcaagaagccgcgccgcttctcctcgctcaatgtgccaatcaatgccttcattcgtttggtgtccttttcgtagatcgggtcaaacagtggctccacctgaaatgcgaaaattttagtttcgactttttgtaagaaatcgggtccggggttctgaatttggtatttacgggttttggcaaaatttgattaaaaatttttttgtcaaccatttgccgtttgaactcacttcttcgcgctccaattcaccgtccgatttcagtgcattcgcttcatattccttaattgtttacaatatcgtttcaagcactgtcacggcattttttttttaaattttcaactttttcatttctgccagcgcccgttagcatcaacggttttttttctgaatttatgaataaatccaaaaaaaattgacgtttttgggtgtaaaaccgttccaaatcaacttctagatggtgggccaccttttttgaagaatttttgttcaaaaagtcatgaaaatatgttatgggtggttttcgggttgccgctgatcacaaatctgacattcattttgatcaatttcgaatatcgaacccgaaaatgtcagattcgttcgtgatcagtgacccagaaacccgccccataaatcacgattagggatcaaatttcaattttttgtgaattttaaccgcaccaaccttccatgagatggtttgcacatgaattttgtagttggttttgctaccgccaggcatggacaggaggaaattcattggaagagattggtaaataaatcagtttcaaatcactaaatttcggatttggggattgattatatattagcaaaaattaagaaaattgaacaacaaatgngttttatgtat

SEQ ID NO: 31233 - DNA, 1357 bp, Heterodera glycines
atgttggcattttgtccgcttttttccaataataatcataattgtcgctccaatttttcaaatttgctttccacaatgttggcattttgttcacttttttacagcaactcgcgcgcaccaacgatttcgcgcccgcccgcacatttttcctctacaccgtgtccatggtgcaggtgctgaacgcgatgatcagcttctgcacccaggcgttgaacaacgtgatcagacgacgcatgttggagagggaaaagcacgagtgcgtttttgggggaattgcgaaggcgacggcacaaagaattgttgaaaatgccgaaaatttgatttgggctttaagggctttgttggatcgccaactgaaaatggaggtgatcctcagcaacatcgccaacgacccgacctttgatgacgagtcgcgcactcagcaggtagaaacaaagaccaaaacgaaatgccattcagtgttgggcgctgggcaaagtgaactaattactagtaattgctcgaattcgtgccgttttttgggggggggggggttttagactctgctatggttagttgtaacttgtggtttttgatggtctatcgatgctacacccgaaatttttatggaaaattttgtatttttgctgagattttcgattttccttgttcgtacccacccacgccaagacctcccttgtatacggtagtgatgttttgatgggccgatcgcattactgtattaacatttttccaacacgaatttgtcccctacgattgtctctgacccgttattagagcgagctgttgttcaacaacaatgggatatggtgccattgtttatcaattagaccgtaattagtctacggtgtaatgacgtttgatgagggattgccttactgtacatcatttccatttgtgtcccatcattcgtttgccaaaatcaaaaccccaaagatggccgacgtggagcagtcctacatgaccgaggcggaccgccgggcgttggagcgctttcggcgcgctgaacggcgcctgttttccaccgagattgagctggacaaggtgctgttcaccttccaacagtacgacatgctcagacgccgctgggccatggagcaggcacggcaaatgccgcacggcagacggaaaaggcaacaagcggcggcggcagctgtggcggcgacaacggcacagtcaccaaacgtgaacagtgccagccatttggcgaagtcgtgatcagaaatggtgttgtgatcggaaatggtgatcgatcgcttcactctatcgtgcttttttttgttttgtttggctttttgcccataaatacgggatacaaatgactagttcccatgactcctccctcaccttggttcca

SEQ ID NO: 31234 - DNA, 2068 bp, Heterodera glycines
  unsure (1)..(2068): unsure at all n locations
aaaaataaatatttaaaatttatatttanaaagaaattataaataaaattcccctaaattatttaaataataaaataaagcctgnaatataagaaatactaaaaaatttaattgtcttaagattaagacaaaagaaagaaagatcttcgacgagagattaagcattcattaattttcgaaattataacctatttctaagacgaacccaaaattaattaatgaattatttaaatacctggtaacaaattttaatttttaaacaataaaatattaatactaattattaattaatatgaaaattggatatattttcttatttgtcgtgaatatctttttaacaaacgcaataaaataataaaataacattcaaacacataaattattataaagaaggcaataatgattttacaacattataagaaattaaatttttcaataataatgatcaaatatttttatttttccaaattattgtaatattaatttctttagaagaagtcataaaacaatataaaaatccttctaaaataaattataaagtccatgaataaaaagaaagcaaaaaaagataaaaattgaaatctttatgatgaagatatccgaaatgggatcaacgaccaaaatttatatattttaatagatatttgccgaaaattcgtacaaaatttccaattttgcctagcggcgccttcggcacctccgatgacccaaaattccctcaaatattatctttattgcgaggtgtttttgaggttctgatcagtttcaaccaattccgaacaaataaataaaatttcaataaaaaatctaaattttaaaatcttaattcgttttgcttgaattcatgttcgagattggtcagatttatgttgattagtgttcagcaaaacaaattaaaaattaaaatgcctattaaaagttaaaatttttactaagcatttaaaagtctaaagtcaaaataatattaagcaaaatgaaacaacaatcacgagggcagcataaaatgaatgaacttttcaaaagaaaagtcatttttatgaaaagatttttaacaaattttgttcaaagaacaattagttgggaccgtgcagtagtggtcataaacttttatcgaagttttttttaacttttatagagtggcaggcagcccattgaattaattttcagtaatcttttaataatttcagttaattctaatgcattttgtgagtcaaacaaattttaataaaaaatattttattctattcccatctattaataaatcatactattatgaaaaaaccagcacaatatatcagttttttgtgatttaatttctgtgtaaattgaaaatattaaacaaattaaaattcaaaatattcattcatttatttatttattttttctttcataaaattttatttttaattttcgtttttattgaaagaaaaatttttttaaaagtggtctcgctgtgttcatttttatcaatttgggggtccatattcaaagttcaataactttgctaacttactttccaacccaatataaatcacaatatttataatataatttaatggcacatacatcaagggtattaaagccacacaatagaataattggcgatcaaatattattctacaaatattcaaaaaataaaatgaaataagttaatgaaatttaagtaatatgatagttacatttttaatcattaatttgaatctataaatattactttatttattaattaaaaaatgtaaaaaattatttcaaaattaattatgctaaatgtatttctcaataatttattggatttttttatgtaattagtttaaattctgaaatttctttaataaaccggtaaattaaatgcaaaatattttttatagaaaaccttttctaaaaatttataaaatagaaaataagcttaaaaattgaattgaaatttgttaaaaatagtataagaatacaacaacataatattagcgcttcccactcaattcactaacaaatttgagggagcaagattgaaaatttttcgggaaagtaatcttcgacgcttaattgaaaaaactaagttaaaaaaatt

SEQ ID NO: 31235 - DNA, 905 bp, Heterodera glycines
ttttataatgcacaaaatttcgccccgttaagtcctcgtgctacgtttggctctttcgtttggagtggacagtttcagaaacttctttgcctgatttttaacagattttgtattaaaaaatgccaatttggttgatttttcgtcttaaatttaatttaaaattaaggatctgagaccggcggtgccgttaagcgtcgccaagaaaatttttgaaagtttaattgtgatttgttttatgtaattttcgagttgttgatcacgaatctgacatcaaaatttagattattcagaaccccggacccaaactcgaacgaagtcaaaactcaaatcttcgaattccgcatttttatctcaaaacgaaactgaatcttagtccaaaataaaaaagttaaattagggaccacaattgtttgccattaccataaaaaatcatttaaactcgaaaattcggaatcatgacatttttagtggatttttgtctttttcgtccttttatactcacaaatttgtccattgaaattgcgcaactaacagatttttcattggttgaaatggctatttaaaagcgattcttcgtcaattgttgtcattgtcccagaatcatttctttttttttgatgtttcattttttcattcgtgtcaataatttttcagcctccaatttcagccacatggctacgactgactggggccaattcgacgctaacggaactgactacgatgccatctacgacgacacagatgacgaagcgggcactacggacaacgggcagggcagcgggcagggcggcagcgtgctcaatcacctactgacgcaggtggaacatttgcgacaattgctgtttctgtttataattgaaattccattttcaggttggccccggaaagactccttcagaatctga

SEQ ID NO: 31236 - DNA, 1058 bp, Heterodera glycines
cactagagaccggaaatttcaaatttgcggatcccgctgcgggattggaactcaaaattctttgcgggacgggatcccgcgggattaatcccgcaaatcccgcattttccaaaaaatgcgggattgcggactgggatcccgcaaaatcccgcgcgggatcccgtcccgcgccggtctctacctagcaccgtgtggcggcaatggtaaattttcaattgccaaaaaaaaaagaaaaaatttctcttaaaatttaaacccagcagaatttctatatttggaaattacttatgtttattatatttctcaaatagatgaagcaccaaaaatagaccaagcaaaattgggaacaaaaatggaactgagagagacggcatggaaaacaactgctggagagaaaagagaaacaaattttaaattaaaattgaaaatccttttttaaaaaaattaatccataaataatttattagcaaaaatataatgaatttattttattttgttttttattttacttatctataaataaaaaaaagtcatcagaatgtaaataatatgttgtgaaaatattaattaaaaataagtttttgttatatttaaatcaattttatagattttcagtaattattttattaaaaaaagaaattttattttataaaattattaaaaaatatacgtaaaatatttttaaaataaaactttaagataattttgatttgtaaaaacacatctatcactattaaaggttatattaattatatttcaatatttgacgacaaatattttttgcagaataacattgccattaacttccttccaaattttttggattggccatggaaaaaaattgggttggcttaatgaatgaagaacaaagcaatttaaaggcattgtgcctatgccttggggggtggggaagcggccggcacatttatgccaatgccaaatagacagacaaattccttccttcctcccccccccctctctctctcccactccttagctcattgtgcggtgtcattggcgcgtgccgcccattcaattggcggcacttccattaatta

SEQ ID NO: 31237 - DNA, 1061 bp, Heterodera glycines
  unsure (1)..(1061): unsure at all n locations
aaaatttcaaaaaatttgatcgtccataaacgatttgaaagagaatagaaagaaccaggttcgatgaagggttgttaagccaaaaaaaatccaaatatttaaaaatctataaaaaatttaaaaatgagaattcatgcgagattttctggaaataagcttaattgggcctagttaagctgtaaaaaaaatttggggcgatttgaaagagaatagaaagaaccaggttcgatgaagttttggtaagccaaaaaaaatccaaacatttaaaaatctataaaaaatttaaaaatgagaattcatgcgagattttctggaaataagcttaatagggcctagttaagctgtaagacacccaccacttttgcacttaaaaaaatttcaaaaaatttgatcgtccataaataatttgtaattgatcagcggctcaccaaattttgcagagatacgtatcggaacactacaaaagcttactaattttcctagatttattaaacccggtgaaaattttttgcagacacccaccacttttgcacttaaaaaatttcaaaaaatttgatcgtccataaataatttgtaattgatcaggggctcaccaaattttgcagagatacgtatcggaacactacaaaagcttactaattttcctagatttattaaacccggtgaaaattttttgcagacacccaccactttttcacttaaaaaaatttcaaaaaatttgatcgtccataaataatttgtaattgatcagcggctcaccaaattttgcagggatacgtatcggaacactacaaaagcttactaattttcctagatttattaaacccggtgaaaattttttgcagacacccaccactttttcacttaaaaaaatttcaaaaaatttgatcgtccataaataatttgtaattgatcaggggctcaccaaattttgcagagatacgtatcggaacactacaaaagcttactaattttcctagatttattaaacccggtgnaaaattttttgcagacacccaccactttttcacttaaaaaaatttcaaaaaattgatcgtcca

SEQ ID NO: 31238 - DNA, 1713 bp, Heterodera glycines
ttgatgatgaatttttcctcaaatattttttcattttctccacttggaattcaagcccactgtcactatatattttcatcgggataattttagacttttcgaacacacgatcaaaagcttcgatcatgtcctcactcttctttgacttggccggtgcactgaagatcattcgactcagcacgtcgatgcagaccaataaatatttataaccgtcgttatgctttttcaactggtcaaatatgcacaaatcgcactgccaatcggtatggaagccacttggtatcgtctttagtctcgggaatcttttcctgatgggcttgtgaatcgtgtatgttctctgcttttctaggaatttattaacgtcatcggtcgtaatttccgggtcaatctttttggcatcatttaaaattttttgaattccagcaaaacttgccggagattttaaattaaaataaatttttgataaaattttctctacagtctggcccatattagtggtttgaagggtttcttctctcgcactatgccgggtgtttttatagattttattgcctttttccttccacgtccccacatgacctttgatttatcaaccatgtcttttactgtcggatccttcagtaacctatctttgagaaattttgcaccgcgcggtgtttcatctttcttccccgcgagatacaacaaaacatctctataattactgttttcaatcggcaaattcatgttcgactgtacctttccggccgccgtaattttaaataaatctttgttttccttcacgtacctaaaaagaccgtttaaaagggtcgggtgtataatagttttgatcggaatgggttttaatgtggatgttgtttggggctccggagttaactcatttattgtatcattatctgattcaggatcaggagtttgctcttcaagtcttttcctaggaataattattttccggggttcatcggtctcctgtggtttggattgagtgttgaggcctagatatggtgcaacattcggaccgggtacatgattctcaatcactaccttctgtggtctattttcaagtatcccctttaccgtacgcctttctttatagagccaatcgtgtctcttcgccttgaggtcctcgcttatgccggggtcttgtaaattctgagaaatttttgcgtctaaactcgctttttcattttggagataatcaccactattcatcgcactccgtagagccaaatattccgcctcgggaatcattaacattttctttgcaaatttcatgatgttattttttctaataaatgttgggctaaaacactcaggacaggtatcaagacagctcccagggctataccactcccctgttgtatcctttttcttgccgttttctctgaacgagatttggcaatttctctataaaaatcggcgtattgtgccaaccttcttttttgtttgttcgttagtttaaaactaaaactcaatatatttgcacaaatttcaacgattgccaaaatttggtcagctgtagcgttttcgattaattcgttcttcttttgttctgatctggtggaggcaagcttctttaggaatgctgtattctccttcacttcggagctaaatttatacatttttaatttaatttaaattcatattcttatatactattcaattggtaaataaatttccagagtctcatctggaaaaattttgctacataat

SEQ ID NO: 31239 - DNA, 2372 bp, Heterodera glycines
tttttaaaattataaactttttgagaatacttaaggctatcgaatgataaccatgaatgttaaacttagatgaatttaagcaattttatgatttcactttcccattcaatacgccctgtccaatttacgaaatgccaaaggcccccaaggtggtaaattttacgaatgatccagcttcagatttattatatccaaaaattaaaaaaaaaaattattgtctcatttacctcaagttcgttgaattttataatgttttctttacaaagtttcccttttcttgcaagcattttctttttcatttgggcataatttttgtattttgccaaaagtcgactttctttggttgtctccaccaaaattgttacaggcaattttgatttacaatttttgaatcctttaggtgtgaacttattttcgcgcacatccgttgtgaaattccattttattttgcccttttcatcggtgacaaagtgaaattgtttttggggcttgcctaaatttggtacattttatggatgatgttacgagaataaattttttaaaaaccttaattgatatgtcaaaattagcaaaataggtatttagagatccaaaatttttcaaaaatttggattccgagaccccaattttttggaagcggaattagaaattccgaacacgaaaatgtcaggaatctgattctgggacaagtaaaggtacggagatttcgtgaaaattatgaaaaatgacaaactaattgcatcaaaaaagccaataagctttaatttcagaaattgagaagggctattggacttttttaccagcagaattcaaaaaatcattaccctcatttgtgattttataagtaatgggagcttttttttgaaaattaaaactattttgggaattgaggatttgtgtttttaaataaattctcaaaatttatgcattgtttattcttggatttaaataatggtagcgatgctcgagactgaaaattcccgagactcaagaccgagaatttaccctcaagattgaattttatgattattacaaaaattcttaccaattgggcctgacaaaatacgaagtttataatggtttctgggcttaaacctgtattcatttggacttttaataattgagtgcttgaaactttccaatgaatggttgattttttcacaattaattgccgaattggaattctttgttgactttgattggtttggtgtcgatttgggtgtggatgattttagtgatgatttgagtaataagggcactttaggcgaaactgatgatttggacgatttcgctccactaatccgttttgaatttaataagggcgccataagagaatctgatgatttggacgatttcggcccaccacaaatctgtttcggatatgtcaaaaatatggcgatgaaaaataaaaaacttattatattgaataaaacaagcattaattgacacagaatcgctgtaattaataagttatgagaagtaaattaaaaattttaaactgaaaatcaaattattttgtgttatattttgtgattgttaatggatcagaaaatattcttatttatttgactttataatatttattaaataaaaattataatataatattaaactaaaataataaaataattatattataattatccctaatcaataataaattcgattatccatttttgtgtgatgctaagcgttgggaataatgttttttaaagcaatgtaactttttttttatgtgatataattaaaaaaaaagttaaaatttttaaaaataataatttaaacaatgtaaaattttttttcatgtgatataattttaaaaagttaaaaatttttaaaagagcaatttaaattatcgtcaaaaaattaaaagcctcatttaaaaactttaatttttcaacccgtaatctattcaagtttcgtattttaaaaacaggtttgtcttaacattgctcaaaagcaaccctaattattgcgaatggcattatgtacaaaaataacataaaatgcagaaattaattcttaaaaatgcctaaatcagtttttctgtcaaattgcaaaaaaaaaaattcttgttatataaaagttataatgagaaaataagaaaattaattgaaataaaattaatttatttttttaaaaaaattagaaaatatatgtattattgctcttaaaatttataaaattaaaaaaataatcaattcattgatattaaatttggcataaatttttattatttgattctcgaattcgtgattattgtaaatttcagaaacaaagttgttacattgttgaaaaatttgcctcaattttttgcggagagatttggaaatatcaaacaatccaagtccatcgtttttcgtataaaaatt

SEQ ID NO: 31240 - DNA, 1417 bp, Heterodera glycines
tttatttctggcattctgttaaacgctgctgcgggatcatttgcgattgttctttattttaacaggtcattatcattatcggattattatttttttttcatttaattaattttaatttattactttattaataattaacttttagcactgaatatcgccgcgtgttcaaaaaagaatttctcattttattcaatcgtttttgcaacacaaatggtcatttttaataaataaaattttataaaaataattaatctatgcattgaacttttaattttagcacttgttgttctactatcaaaaaatattgaatacaatttttttaaacaaatatttaaaatttgtttttagctgttcaaactattggcacaatccaagtgcgaagtgccaacccaaacaataaaatgaacaaaatccgatcaagccaacagagaaatgttcatacgatcaatctgaatcgctaatgatacggaattttcgttgatatttttaacattttttatttaattgaaaaaataatggaatttgattggaattttgtattatgcaagataataattttgtaaaactagaaaaatttattttaaattaaattttaaaataattatttgttttaaaaatgcctcataaacattgctataaactgaaaaaagttaaaataatttgtattatgtttcaaaaaatttatggtcaaaaaggtttcaaaacttaactttttgtgagtacttttgaacataactttttttttgaaagttaattaattttttgaagaaaaaatgcatgccaatacaaagaacatttagcactaatgtagaaaagcctttcaaaaaataaatataatatcctaaaattttgaaatttcgattttcaatttttttattaattttttttattaccacccctcggtggatttatggaattttctaccaccttaatttgcattgcattttttctcgactttgttgacacagttgcgagaatggcgtcggactgccggaagtcaaaattggcacgacctttaattagcctcgggcaataatgtttagctaattaaaaaaaatcataagataaaaatgattttaaattgagtgtgaaataatgaaatttgatttttgtgagaaaattttaaaatggcggatttagtaaatttactaccaccttaattgcattgcagtttcttggcttttgaaattttggcattttcccatgggaattgtctaaagatttctgtgtccgttaatgaaatttttaagatgattgtcccacttttgtaattaggcgaatttataaactatatttggcactttttttattttttaaccaaaaattacgtaaattaaatgcatgtcttatttcttattttatactttttcaattcgatatttcgtgggtaaatttaaatattttaaaataaatttaa

SEQ ID NO: 31241 - DNA, 957 bp, Heterodera glycines
  unsure (1)..(957): unsure at all n locations
aaatcgttaatttatttgacaaatccaagacttaaaattggggagaagcatggggctgtggctgaggaaccataatggggccccattggggaattaaacatgatttctgaaaaagtcccagaaatgtcgattttttctttccatatcttcttgtaaagctcgagctgttctttccaacggtcttatcccggtctcgatccctgccgaactcaaaaagttatgaagtgaaatgtgaaatattgttttcgccacaattgggagaagcatggggctgtggctggggacccaaaatggggccccattggggaattaaatatgatttctgaaaaagtccctgaaatgtcgattttttctttccatagcttcttgtagagctcgagctgctctttccaatggtcttatcccggtctcgatccctgcagaactcaaaaagttatgaagtgaaatgtgaaatatgttttcaccacacgggattttttctgaaacccatcggaaccaaaaatctagggtttggtataagcgttttagaaattgcggagaaaaaagcttcgatattgagaaaccaagtcaaatccagaaaagaatattttaaaacgaattcgttttggtttggcattatgataccgaataacattcggaaattatggaaacaaaattggagaaattcgaataattttttgacttcaaatttttcccagttttgattgggttttcaaatagtagtttggttcagaattttcccctctacaaaaaaaatttataatagaattttttattattaattcgaaatcgttaatttatttgacaaatccaagacttaaaattgggagaagcatggggctgtggctgaggaaccataatgnggccccattggggaattaaacatgatttctganaaagtcccagaaatgtcgattttttctttcatatctttctgtaaagctcgagctgttcttt

SEQ ID NO: 31242 - DNA, 1084 bp, Heterodera glycines
  unsure (1)..(1084): unsure at all n locations
aaaaaagtaatttgaatacaaanaaaagatcgacacatcaaaatgtgataaagggtcgattgaaagcaaatcagagacgccgaaaattattcattgcatttttgcttaagtcaccacgtcatccgtatctgttcagtgcgggcgaggataaacaggtcaaatgttgggacttggagtacaacaaagtgatacgccattaccacgggcatctgagcgcagtgcaagacttggcacttcacccgacgctggacattttggtaacgtgcgcacgcgactcgacggcgagggtaaaaaagaaagtgaaaaacggacttggtttgatgaaattatcttaaggtatgggacatgcgaacgaaggctcaaattttctgtttgtccggccactcggacactgttgcgtcggtgatttgccaaggtgtgaatccgcaagtggtcactggaagtcatgactcgaccattcgcctgtgggacttggccaccgggcgcagcatgtgcacgttgaccaaccacaaagtgagtgctttgactggcattgtttatataagggggaggagttgacctccccgaggtgggaggttgtcaaaactttcatttaaaaactccattccactgcacgcaatcatcttcaaattttcaaaaattccttcaaagctttaagccttggtcattttatgttgtaacaggatttttttgaataaaaataattctaaatgaaaataaaaatcgtaacgaattaacgccgtcgaacttctttcatgaaaaattttaactacaaaagaaaaatattttcatgagctttaacaaatacactaaattttaagtttttttcctgccatacctttggcagcgttgatttttcttttttttattcattttttcgaaattcttaaaaatcaaataatgaaacttttctggctttagtttagtttagtttatgcgtccaatcaatgaccatcctcacaatcagttttttttgccataacttatttttacgagggaagggagcaaactgtcagcggccgggaaatacatatgagttataatacctttagatagagcagagtcgacttctattatgaatttt

SEQ ID NO: 31243 - DNA, 1742 bp, Heterodera glycines
agtagcaagttatctgtgagttactgttactttttgccttccacgaccgcaattctgctttggtaaagcagcacatgtgtcattgcacgcttctttgtattctgaaattgaaataaaaattttaattaataaaaatatatttcttctctaaacatatcaaatactttcaaaatggaagagattttgaaaattgaacaaaatgttaattttgaatcttgaacataccaaattacgacataaattttttgaaatccatgaaaagcaaataaaattttgtttttataattccaatcaaaaaactccagtggaaatacagtaaaatttatgaaaaatggatcaagtgaatgtccgattataacggttataaaattcggaaaaatttgaaaaattttcattttaattaaagccattttcgtaaaaagattattaatgcttattcatttaattgttaaaaacaacattaccgtttgacatttcagcatccgttaattgcaaaacgatgaacagaaaaattgtaaaagcgaaaaactttttgcgcatttttctaaattttttaataaaaaagaacgatttaagcaaattatgtgcatttaaattttacgaaaataccttttccaattaacatggattaatgtacatattttataaaataggccttcacaaataatatatttatcactttaaatagatatttttacgttttgggggcattttgggcatttaaaattaacgaatttacactaaagaaaaataaaaatgaaattttttacaaaaacgaattaattcaaatattcgcttcaataaaaaacaatatgtaattaaaaaaatattaaatttttgcatttttattttcaaatccatgaataagcacaaagcaaggaggtcgtgccaaaataaggacaaatcttacaaataaggacacttggccgccctgattaatgtacatattttataaaataggccttcataaataatttatttatcactttttcataaataagagtttatgaatgaaaccattagggcccgtacggaccggggtcccgccgggattttgccgggactcccgacccagttcccattttttggacaaaccattaggaccgaaagtcccgtaaaaacgggagtcccggtgccgggatgccgccccggtccattttccaagtcctggccccgttcctttcccggcaatttcaaaattctgggctctcgaaaccattattgttggatttggccaacagaaaaagttatgtgggaagtaacaccgaagggtgggggattatcagggataatagcacattgtgaagcagggggaccatgaggagtagagagggccaagtcaaatggaactaaaatgaatttttaaaaattaagctaaaaatttcgcgatgcctttttttgacagggtgttgggtttttagaaatgtaaaattgatacattttttatcatcttaacccaataaaaattcattttttccaaaattttttattattttaaaatttaaataattaaaaataattttctttaattggcataaagagtgaaagaaaggtatgtgacatgcgcattgtaagtggcttttcgaccgttttaacttattaaatattttaaaaattaaatttattaaatgaaaattgagttaaaaatgaacctgaaccgttgggcaaattattttcaaaaatgtcagtcaaaaaattaaaaaatattaaaaaaaaaataaaaaagcccaaatatttacctt

SEQ ID NO: 31244 - DNA, 1100 bp, Heterodera glycines
  unsure (1)..(1100): unsure at all n locations
gttcgtccacagcgacacggccttttgtacacatcaacgtgaatacggtaggtattttaacatgagtacgatagttgttttacggtggttcatcattggttgcaaatatgatacagttgtttcaacatggatatggtaggtttattagtttcgtggcacaattaattgtctaaatatgtctaattgcgatggaaaagtgcttaatcttcgttacattttcaaataattggcactaataatatttttgattaccaaagtttgttttgcccaactttattgggtccgtcattttccaagaatcagtagtgccaaaactttctaattagtgtttgccaatgccaattaattggtctgatgttcgggctttttcaaaaatccgtgccaattaattgcttcccaacttccctaattgccaaacattggcacggttttcgacatttttgctgcttggatggcattattcaaaaaatgtggcgcctttttcaggtggaatatgccgtgccatcggagtaccaatttgtggactatttgggcggtggtaactacggcaacgtgatgtgagttgagcacatcctcacattccacagcagacaacaccaaaaggcatttaaaaccaacaaattttatttccggcacaatttattcccccccccccccgccattttcaagcatttaattatttgaaaccccaaaaaaatttaaatcgttcaattttttgaaatatttcactagagatcggcatctggccatggtcccatgcctggattttcctggatccaggtccaggcttctcaaaactgaacctgaacaaaatgacaaatttgataattagggttttgtcgatcaaattgtttaaaaattcaaatcctggcacgggtttctggattttgatcgtaaatgggtgccattttactggttggtcatcgacccagaaaattcatagcttattgttataaacgtaaaatgaaaaaactccgcggcatttttttgcctttcagtgtgccattggccaaaaaatcggagaaaaaaaattcccaaattaaatccggcattttttggccgttcattgtgccattggccaaaaaatcggagaanaaaaa

SEQ ID NO: 31245 - DNA, 1312 bp, Heterodera glycines
aaaaataaacaaataatgaactctcttcctttataattttcctgcaccgaaggtactcactcggccgcttcgcggcctcgtggtgggccttccccccccccctcccacgcccttcagagcacgacaaatatttcaacaaaaatttttaaaaattgactagagcaatcgaacgctaacggacgacctaatggaaaaaaatccccgaaggagagaatttaattaaatccattccttcgggggaccgtgccgggtgccgcggggtaagcagtgctggttcgtttcatcacggcaccgaaccttttggctagtcagcaatcgttgcttaacttgccagatcggacgggtgcgcatgattccactgttccaagcaccccaccaaaagcaaaacgatataaccaaaatataaggaaaaattttttaaaaaattttttctccatcttcctttttgatattaaagcatcagagtgctaaaattaagttgtaaataaaatttggtgcgctttagagcactttctgaaaaaaatatttatgaaacaaaaaaatcgattttttcaagtgtccatttggggtactcaaacatttatggggagcaaaaatccaacgcagaattaaagtacaggctatagggaagctactccggaaggattcggtctccccataaatctgggcgcatcggttcggggggactgccccgaaaacaaaaaaatcgattttttcaagtgtccgtttggggtactcaaacaattatggggagcaaaaatccaacgcagaattaaagtacaggctatagggaagctattcccgaaggattcggtctccccataaatctgggcgcatcggttcggggggactgccccgaaaacaaaaaaaatcgattttttcaagtgtccgtttggggtactcaaacaattatggggagcaaaaatccaacgcagaattaaagtacaggctatagggaagctattccggaaggattcggtctccccataaatctgggcgcatcggttcggggggactgccccgaaaacaaaaaaatcgattttttcaagtgtccgtttgcgtcccgcgccggtctctagtgctcagcgcctcaaaatacccaaagaaacttgttaaagaattcccagaaaaaatttaaaaaaaaaaattcgggaccaatgatcgacatgattgctctttaaatttgtggaaaatatagaggaatatatcgttctgcaatttttccttcctgcgttaactttcaatttgaagcatattaaattggagagaaactttgctgaaatataactccatgaatacaattaactgttaa

SEQ ID NO: 31246 - DNA, 932 bp, Heterodera glycines
gagagagagagaaagagagagagagagagagtgagagagagagagtgagagagagaaagggagagagagagagagagagagtgagagaaagagagagaaagagagagtgagagagagagagagagtaggggagagagagtgagagaaagagaagacaatgccaaagtttgaaaacaaatgaaaaaaaatttaaattttaagctggaaaaagtggaaaaggaaatgaacgaacggactgaagaattggaagaaatgagagaaatgctgacgcactttcaacatgtaaaggaagttgatttaaaacaattggaacaacaaattgagcaaagacaaaagagaggggaagaaagaatggacaaaaaggaagaaaaacaaagggaggaaaaggaaaagcaaagggaggaaaaggaaacgaaaggcgacagagaggagaaacaagcgcaaaagagaggggacagcagcagaagaacagtgctaatggtggacaattcgagcgaatgggccgaacagctgcagaaagtgcgggaacgggccaaactctgtgtggacacttacaaggtaaaaggagaaaagagagggagagaataaaaaggaaatgcgaaggaacaattggaaagtcgggacaaaacattggacgaatatcgccaattggtggaacaactccgaaccgaactcaccgaagtacggaacggaagaagagaagcggaggaacagcggaagagagacggagcggaaacggaagaggagacgagcaaaagcggagaaaggaagcggacggacgaatgggaagcggaagaagcggaggagcggtgggagaggcggacgagggcattggagaggcagctgaagaggatggtggaggagcaggcggagatggagagggagcggacgaagctcagagagaccatcagagccaaggaagagagcgagag

SEQ ID NO: 31247 - DNA, 1514 bp, Heterodera glycines
  unsure (1)..(1514): unsure at all n locations
tccgttntaggctgcccctcctctttctcgctttcccttcatggaaaagaaaaactctgtgaccaaagtgagtttttcggatttgcatttcctttttttctcaattttccctccattgtttaagattgtgcctccttcaatgctttcgaaaccgcagaaaattggatcattcaaagtgagccaatcgtttttttgccatcttccccccaatttgcctgtcatttccttgtttaagccacagccatcgccgatgggccttccgcatccgaaaaacggtgtccgcactggaattgtgagtttttgttttggggcgtttcaccggcccccccgtgaaaatttaaaaaagaaatttttactaacataaatttttaaagaaaaatcttataagttgttttcataagaaattctaaaaaaaattatttgagaaattttatagcgaattactaagattttcggaaaattttttcttagactttcctcatgaaaaaaaactaaaaaaatttaaaagatttcgtggggtaagcgtagtacaacacactttgtttggctgtgtgttggtttaatgttttttgacaatcgatgtttaaggctgttcccacttcgatatgggcccccaacgatgatgacatgtacaagccgaagcagtacgaccagcaggaacagccgaagcaagcggagcgaccagcagcagcgcacggcaagctggccgacgacgacatttacaacccgaagcaatacactgaacagaaggctggtggtggtggtcgaccgacgtatgaagccgcacttgccgacgatgacctgtacaatccaaaacaatacagtcagaaaccacaacaacaaaagggcgccgacgatgatgacctgtacaagccgccgcaacaatacaatcaacagcagcagcagcggaagatgggccgaccgaaatcgtatgaagatgagcttgacgaagatgatttgtacaagccaaagcaatacaattagaccgagcctatattatatgtctatatgcttatgtaataataatatgtatgttttatgtgtgtgcgataacgagtgtaaatattcatttgataatgtgcaattctggaaaactcatcatttgaccgcgatttgacaattgaaaaggattttcattaattgaaaggttttataaagtttgtaaagggcttaacacaaaaaagcggaaatattgaacatttttactgaaaattagtcaaatattttagggtttatctcaaattttaacctaaaaaaaattttcaaaacttttgttatctctgttagtagagaaaaactgaatttacttcgctctacaaaacttttctaatttatatccacactaaatttttccgtgatgcgccatttgtgccgcgcagacaaaaataatattttcatttcaatttcactaatatcaataagatttactaaaaaccaacgacaaaaataacgaattgaaaaatttaaaaaatatacttaaagatagacattaatttttttattttaatcattaa

SEQ ID NO: 31248 - DNA, 892 bp, Heterodera glycines
tttttattttctcggcgggggccgagctgctcccgactaaaattccatggaaatggaaaaaattttaatcaacttattgtccattttaataggagtggtctcatcaacttttgcgcctgtgcattggcccttgccgacctcggcttccgtgccatcggatgtcgaattgacagcggtggcctggcttttctgtcaaaggaaattcgtcgccgtttccgacaaattgccactgagtattttattaaatttttcgaccaagtgaaaattttaatttcggagctaaaattgagtggtttgccaatttgaaaattgtcggctccaatgacatcaacgaagagacaatcattgctctgcgaactcagggacacgagctgaatgcttttggtgtcggcactcatcttgtaacatttttgggggttggcaatatttgaccatatataataaaaatgaaactaggtaatctaaaaagagcatttacctattgtaaaggcgatggttcctttctccatcattcattttctttgctcaattctttttttataaggtcacttgtcagcaacagcctgcgctcggaggtgtgtacaaattggtggacttggatgggaaggccaaaattaaactgagcgaaagcaaacacaaattgttgatcccgggacgaaaaaaggcattccgattgtacagcaaaacgggtaaaacaaaatggaacagtgaaacgggagcaaatttgacaagagatcgtattaaggaattcccttggtcgatttgatgatgctggacaacgagcccgacccgacgcctcacaaagaaattctttgcctccacccttttgagccgggaaagcgtgccaaagtgtttcctgaccgtgtggagcgattgcatcacattgtaagtg

SEQ ID NO: 31249 - DNA, 1787 bp, Heterodera glycines
tgttcaatggaatcgaaaattttgtatttgtttttgtcctctattagggatgtcaattttatgtaaatacattttttttcctggcttctccatagcctaattagtaggaaaaacactttcttttttatgtttgcaaacaaaaatcgggacttttatttacatatttttacatatttcggggttttatacatatttggtacatattttggactttttcttacatattttgatttttatttacataatttgcgggttttttacggaaaatttttggaaatcctcaaaaaaaaatccaaaattttggcaaattttttatttttttatacatattttgagaatttttgaaaatttttagaaatttctagtgaaaaaatttaaaaaaaaactttttttaaagtacccctccaaaaataattttttaaatgttacaaggtgattctaaacatatttaggtcatttttatgccattttacgcctatttaacactttacgaaggttttttcccaaaaaataaccatttaaaaaattttatttacatattttcgtacatattttgggtttttatattttttacatatttatgtacatattttgaccaatttttgtacatatttttgacatccctattcattattatcctttttctaaagatattttgtatgaatttcttgaatttaagcaaagcaaatggctgaaaaacctgattccatttggttttatttccatcgtcctataaatggcgcattcgctgcaaatattgcagtgccatttgatttttaaacaaattaaaaatttgtcaattgacccgaaacccggcctttttctcgacccgaaacccgacccgatgatttttctcgacccggaacaaccctgccccgcactcaaactcaccactggaagaaaacgaatagctggagtccgaggccgactcgcttccactttcgcttgtccccacttcctccactgacggtggttgtgttgcgcaacgtttctgcgccattgaacgttgctgttgaactgttgacaaaaactgacgcaatcgcttcccatccgtagccggcaaacagaagaaagagccgaggaccaaagtcacgtgccggattgatcggagagccgacattctgtcaagcagaaattaccaatagacgagggagggagtgattatgccaaagacaaacgtaccatgccaaaagaggaagtgatcagaaagatggccagcccaaagccgatcggatgcacccattttggcacttggtttcgcggatcgatcagcgcattgacgaaaaagaggagcagcgcagtgccgacaatttcatccacaaacgctgcaaaagggaaatgtgagacaaaggagagagaggcgagagcgagaggaaaggagaaagggagaaaaaaatagaaaatcctgaaggaaaagcatgaatgagatgagtgtggccattacattagcatttgcttcgcttacctgtgtaatgtccgatgtgttcgtccggaaaggaacagaaaattgcgcccgttccgctgggccctcccaccgttcgaatgcccgcgtcgaatttctcgaatgattctggcaaaaaaataataattttcaaaattttcgaaaaatagcaagtcaacccacacctctgtagacgtggaagcaaagggcggagccgaaaaaggcgccgacagtttggacgagggaatacagcaaaaagtgcgcaaatggcaatttgccaaggctaacgaaaggcgagagacacggccgggtcaaatggccacctttggacgggggaattggcaca

SEQ ID NO: 31250 - DNA, 1083 bp, Heterodera glycines
cacgactttctagaacagaaaaaaaaattttccaaaaaggggggggactatcggtagtattacctaaatttcttctaatcgtttttacgtttattcgatcaaaatgtattaaaatattttatattttttgcttcccattatcgaaataacaatcaaaattatgaggaaacgtggcatttaaaaatttattgctcgatacatcacatatatacaatatacatacagtaattggtgaatgccaatatatacacatatgtacagtgaacaaaagcagggcaaatgaacatagagacatcgttaatcacatacaatacatacataagtataatatcatcactcagagggcatcacatcacatcaaataataaaatgatgaaaatgagtatttataaaaaataatattatgggaattctattgaaaattaattaataaaaaacacggtaatagtttagatggtacccccccttttttaaaaaattttttcaactttcaaaaaatcataaaaacatgtttctaggggttttcggggtcgctgatcacgaatccgacatccatttcgaccgattccgtaacccctgacccggattcgaacaaaataaaaaaattgattttttaacaaaattcacatttattgctaaaaatcgattcaaatgcacgaaaaagaaaataatcaattcctaaccttccgcaaaactatgttcattggacagtgaaccattcacaaaactttgggaacccaggcaatcgccttgcccatacccagaatgttgaatcgatgtgaaagaaattgtaaaggaatttcaaacggcaatttgggaacaagactgaaacatacgacacctatttcccagaatttatttggcgccagcggtctggagaccgtgaaaatgcgccgtacaagttctggtcgcctgattccgcgctgtatccgtgcattcatcgataataccaggtcaggcctccgggatttcggggcgagcaataatgggctacaaaaagatttccaattttaaatgtgccggtgattagctttttgcgtttcccttccagcaacatcatttgggtgctccacgtggtggcgg

SEQ ID NO: 31251 - DNA, 1240 bp, Heterodera glycines
gtgtgtttaaatattatcagataaacaagatttcgcagtgtgtaaaaattcaaatttttcttcttttaaatgtgtaatataataaatatttatgaatttcattgataaaaacacatgctcaagagagcactccgagaaacgcgatactttcctcttggtgttccaattttcattatccatgtactattttaattttttctcattattaaaaattatttaaatattatatataatcattttactgttttggttttgttgcaaattataataatgtaaacgatctccttggttcttttccattattttttgtgggttcgattcatctttctgactgaaaaattaaaatatataaatgatatattttgaaaactgattcgaatagattgattttttgttttattaatttcaatgtgtatttattaatacagtttcaaaagaattaattttttattctcttttttctctcgtcattaagctggtcgctagaagcttgtttcgctaagtttaggtttcatttaataattttttgtttaaactattcatttttatgataattaagaaaatatttaattattttatccctgctgaaagtacctccgagcccgctttcaaggttgattatttaaagcaccaaatatataagtacgagcgcttggcgccgcttcgcggcgccaaacgcgtttttttatctatgctttggattttgcttcagcaataaaagcttactaacggcacccgcgacgggaacgcaccaaagcattgggcaccaaaagagccggaagctcaaatgatagttagagggacaatttgtgtcccgccctaccatacgctgaaccgcttccataatacagcgattaacttacctttaatggctctttttaaaaatttaaaattttgaaggttcctttgaaaaaactaattatgtatttctttttctttttaattttatttaacaacttagccaaaaatactataaaatttctttccaaacaatgttatcaacttttccatcaatattttcatttgataatttaatttttatttgttgccacgatccaacccgtgacaaagccacataggtttggccatgtgaaaaactttgacgcgtccaatctattccaattttttggtaagtggcaccttgacccttaataaatgttgctgcaaaagccaaacgcactggaaattgatgtctttttaatgggacaggaaattcattttctgttatgagagatattct

SEQ ID NO: 31252 - DNA, 1425 bp, Heterodera glycines
  unsure (1)..(1425): unsure at all n locations
gactacgctttcgacccgtgggctcgagcaaaggctttcggctattactcactctacgaatttctcgcatcggattatatgaaaggacttgtgtttatagatttcaaggataatggcgaggcaattttcatggcgatccccggtgatgagtcaaaacatatttttattgaacaacgaatttggcactactacagagaaatgtaattgccattcggataattttaacatttcaaaatattttaaggaagagtcgtaagctgtttcgtagacgtcgtcgttcaattggtagccataatgggcgtaaaaatttctaaatccaatcccattgtgtttatgttctttttttcttgtcctaagccttttaatgattgaacccaagcagaaaacacctaagtaattcctatagattatttttcttttaaattaaatctgtccattcattcattccgtgtccatttcgtttaaatgtctttaattagtaattccatatattgtttcacattccatttaaatttaaaaaatatgaaaaaattatcctttggacatttcaacaagttggtttaagctgacaggcagccattgtcttcttgggggattgtattggaacagcagagtgccatcaatataaatggaatggattccgaacatgtacacttgcttcccatcttggaatttgcttctttgtgggaagaattgaatgccatttgtaacagcagttgattcaacgagttgtttgaaatttgtcggtggtaattgcacaaatggcgtattgattggcggaacgctgaaaagaggcgctgcaggccgagggagtggatgctgaaaatgcattccggggattggtgcgcccgtcagtcgattctgagcctggccgatgagcatcaacgcgcgtttgagttcagcttaaatgaatacaatttttattgttttctgtcatggcgaatcgtcgcccattattacccatgataacttgttgactgataatctcttgcgggaataaattcttccagttcatgtaattcttcttcaccctttccaattcttgcaccgaaagcatcggagaattcaattgagagcgtaaaaagtcatagtacttaataaatgaattaaggattcactatttaattgtttaaaaacccgcggaaagaatgaatttgccaaaatttttccgattggctcgccaccaacaaagtccatccagtcgaaaagttcaagttgatcaaagtaatcagttgtaatgagatcgattgattgtagcgccttttcgagtttcggcaaaatattcattccaataaaagtgtgaatgatgccactggagaacacttccttccatggtcgaatgcattcgatggcactgtaatgtaatttcattgaaaagtaaggcaaataaagacatggattcttttanatgaaaatttgaattta

SEQ ID NO: 31253 - DNA, 1534 bp, Heterodera glycines
tatttcattaaaaaatcaattattaaaaaaacaaaatgaccccccagccttttcgcgacataatgggtgaaacgacgattctcttagagccaaggtaattaaagaatcaacttgaattttaatccacagatatttaacaaaaacaatctttcgtccataattatatcattggatgtaattaaattttttctcaacttcaaatacagttcaaacttacattggagaattaattaaaataaaatcaaaaatttagctaaataatatataatgaaataataaataattcttcaggtatctaatagtcagcaattataattttttttatttaagatttttaaagaaaaatactaataaacatagcttaatgaaaaattatggtttagagataataaaatatcaaatataaataaatttcataaaaattcaacaaatacaatttaaattggttcaaaaatgatcaatttagagataatattattaattaatgtgaaaaactataaataatattcttcataagaaaaataaaatttaattattattttattatttttttaaaacttaaattcaaaatttaattttataaacataattaaagacatttaaaaagatattagcattaattattaaggttacgaaaaacaatgagaaaatttacaattaaaaaatagataattattaattaataagtaaaaattaaaaaagctaataaaatattcaattaataataattattctataaaatattattgcattatatttatatgaaaaattataaatttactagcatttgtttaagtcaaataaaattgtgaatatgtaagaaaaagtgattaaaaagtccaaaatagtaccaatgttgtaaataaaactagaataatcaattttctgcaaaggaactacgcttgaaccagtcacacataaaaaaaatttggttttaagataaaatattctgagtataaataatagcaataataaaagcacaaaaataccaagacacgaagataaagatgataaattcatataaatttaaatgagttagttaaagaaaaatattcaacaatatagatatgttgtgaattaaaattagtagaaaaccaaataaaaataaaaataattggctctaattcgccagtatcttcgctcattgcaattatcgagcgcctacatttcgtaacactttctttccttgcgatcggtgttaggtcgtttcttaaattccgcctctaggagttctctatcagaatataattttattaaattttttacttaaaaataaaaaaaagttaaggtcacaaaatttcaaaaaatcttcagtcagaattttaggccataacatattttgaaactcaatggaaatttttttaattttaaagataaataaactaaatagttgacttgaaattttaaaaagaaattttaattttattgcttctgaaaaaattataagcattgaacaggttatattttgccatggtcatgcatatatatttaggaagataagaaatggtaaatagctgctgaagtgaaaattata

SEQ ID NO: 31254 - DNA, 2014 bp, Heterodera glycines
  unsure (1)..(2014): unsure at all n locations
ttaaaatgcttccncatggcgcggcccaactttcgccaacttttcgcaagacagctactctgcagcgccaggcgctaggcgccatttgcgaaaagttagcaaaaacaggttagcatatctcggcgcaaagcgcccggcgccagacggcaatttgttttcccagcctttcagggtgcgggacgcgcggggaaaaaaattctgtctctctagcatcgctggcgcaaaagttggctctctatggcgcaaagtgggcaccacaagttagcatatctcagcgcaaagttgtcgtagcgcgccaaacttttttttaaaatgccccccttgggatggcacgcatttagtcaagcggcgccaaacttcagcgccgggcgccacgcaaagttagcaaaaacaggttagcacaactcagcgcaaagcgcccggcgccagacggcaattttttttccaagccttacggggtaccggacgggcaggggaaaaaaatttggcttcctagcattgacgtcgcaaaagttggctctccacggcgcaaaaccggctcgggcgcgcgcccatttcgacccttcagaattgtcgaatcgcgccaaatttttttttaaaatgctccccacggcatggcacgcatttcgccaagcggcgccgagtcgctatctgtgcgccgccgggcgctatgcgccgattttcgaaaagttagcaaaaaaaagttagcatatctcagttcccaaatgtttttgctgtcttttgcacggtgaagttggagtagggggagatcagttggctaacgcaaaaggaattgggtcgataggtgcagaattcgcaatgtgcgggccacatttgcagagagccccccccgtttttatatatatagataactagccgctctgagggcatgcgtggggagcgtgcacttgcttaccctagccggtcgagttgtagccagtaacgggtgcacagtccaggttggctgggcagtagcagctaccgaaagatgcgtgtctggatgttcgtgcagcagcagctgccggtgtgtgcaagacttgtgagagacaatgatttcaaggagagactcttgctaccggtgcgtgcgattgatcagatttacaaattcgaatggagagactcttggcttccttacttgagctttgcccaaataagtactgacgcctcacaccagcgggaaggtggtctctttgcgcaaggcaaccctcacctgagccattgtttttttgataaatatatattttttttttgcttaaaaaggcaatggctcaggatcattgggcttctctgatcatcttcccccctcctccctcggcatctcttatcattttcgtcccctcctcccccggcatttcattagtccatcccccttcaaacttctctgatcatcttccccctcctccctccacatctcaaatcactcacgctaccgttactattgatccatagatccctcctccctattaatcaacacatagatgctccatactctatggtcattcgcgaaaataaattaccacaaattatcaaaatttttcaattttctgcctaatgtttctaaaaaaattattgaggcttctaatttcgtaaaataacaatttaaacatttctatgctttaggcagtcattcgacctgtacctgaagaagatcctcgagggcttcaaccccgacctgtacccggtcgccattcgagcaaaagcgatgaaatgcttggcccaaattgtggaagcagactaccaagtacagcaataatacataatccatgaccaaactcaactaattaccgtataattagataaattgctccatttctccttcaattcccacgtgctaatgatcgcggaggtcaacaaaatttgtgcaagatcggctgatccgatgctaaacgcgtccgtgcgaaaagctacgttcgaatcctgatcggcaagtgtttgggcacccggcccgacttgttggacacgtactactccattttggtcaattcgaaaaaggtcggtggccattttgcatccc

SEQ ID NO: 31255 - DNA, 1235 bp, Heterodera glycines
gtatatgcgttacggtacgcactaccgacatcttgtctatactgcttaacaatttcaaaaatccctttagcttcatctgccaactcacgacacattaacacatcttttctgtctaaacacttatccatttcttttctaataaatccaattttctgcttttcttcgtttaatttttctgagaatccttgtacttttctcacccattccaatagcctaccgaaccatgttttcatgcccggtgcctcaggatgacgaactttaattttctctgcctcagaaattgccctattagaaacagccgcgaaatctcgggcttcagtatttaatctgagtgtatcccgaaatgctttttcaatggtttttctcgcagcgttcaattgttgtttctcttcgttagataggcaacaacaattaggatttgtttggccaaataccaaaccaaaaagtacgaacaaaactattttattcattttattatatttattttttgtctgagttcttttatattttatttatttgatttttcgaaacttttaccaactcagcatcataaaatattcccttaatattatccccatttaaatcttcaattcggtaagcgattggatctgatataaatattttatatattttcaaaatttcttccgtaaaattcggaagatatcccttggcgaattttcctttttcttttgtaattcgcactaaatcaccaattttatatttattatttttttctgtttctaaatttccaaattatctttcccaaataatttcggtattttcaaaattaattgaagatggtttgacccacagggtcctattcacactgttgtcaatgtttgttgttattttgtctattacatcgacccatcggagagtgttcttctttgtaaaatatctgcaaaaacgctcctttattgtcctatttgccctttcaactactctggcgtgcatatcggggctatacattacatttctgatgatgaatttttcgtcaaaaattatattcccattcatttatttttgcatttttgatcatttttattttatatattcatttcaactttttaccatattttcattttttttttgcaaaaaaatatatgaaactccttatttttatgcgtattttggttatttttggtacctagcttttgcacatgataacctacatttccgtaccacattagccaattgtatctccacctgaaatctaattctcttgcacctgtatc

SEQ ID NO: 31256 - DNA, 1918 bp, Heterodera glycines
  unsure (1)..(1918): unsure at all n locations
caattattaatagcatattctaatacatacanaattatttagtgcacanatgatatttttagtttcaaaaaataaataataaatgaatgaaaaatatgataatatcataaaatcttagtttaataaaaatcagataacccaaatgtgttgctatgaactggacagtcacagccgtgaattggtgtgccatcgccgatcgatcaaaattgatgaggaaagaaggaaaaatgatgactaatcgaccatttgacctttctcattattttgttatttttcacatttggagtcatttttattttatggaaatttttacctctatttaagggataacgatttgtcatcagcattttgatgcttgaaatttcaaatatttcttgctttctgaccccgggagggatgatgctatgcatgcttatcatgatcataattgatgaatcgaatgttgggaccaaaatggggtgaaagagagcagaattcatcaattcacccaatcactaaaatataccacaattcgaaaagaagtgtttgacattgcagcggaaaatttgggctgtgaaaaaggagagcttgcgactgttgttcaaagaatttcaaaaaacaaatgcgctaacaaaattgatcaccgaaacactcaaccgtggtgcgacattgtggtatcgtctcgataacaattaaaagaaacataaatattattaataaatttaactaaaataaaataaataaataattatataatattcttcatttaaaaacatgcgctttaatgattatttaacaaaaataaattttttatatttagacaagaataatttttaatttaaaacaaattttagctttttagcgtaatcggatggaataaacatatgaagaaatgaattataagtcgggcatttattatatattattttataaattattctaagtatttatttaagctaatctatttagctttcgtttttcgtcaataattatttcgtattatcaactttaacaatgaattaaaactttaattactgtttagcaaaaaataccaaagaattaaagtcataaaaatatattttggttggtaatttacagatattaaaaaactatgcgcttctcttttaaaattattataatattattcttatatgtaatgtcgattttttgtataaatatttgtttaaatgagcatttttataaattagaattatttatttatttgtccaggtcgtattaatgccttcaaggtcttcttcatttgatatataaagttaatttatttgtgcggtattattttttggtattatttaaggtaaatatttatattaattattatatgtattaaataattcatgcgaaaataacaatcctccgtgcacttgaatctattaataatttataaacccgtgattagtttataactgtaattaatagcaaaaaaattttattatgtgcagatgtccgaatgttctttttttttgatttgttacattttttaaattattaattgttggattaatttacgatttcgattttttcgattttttagtatttttagtgaattttatgtttatgggcgttactcaaaaaacaataaaaggaaaaaagaatttttttaaattttgcaggataatagaaaacacatagggcttaacaaaaaatatttttgacacttttcgattttttaaatatttttttaagagacggattccaaacctccggagcgtattccaataagggcctaacataagttttatataacgtaatacaaattttagatgattttgatttaattattcgaaataaagaacgcatacgtaaatactcattcttcatattcatttatttgtccattcgaataaattaggcaatattttatgcataatttctgtgcaattaaaaattctttgtttgtaggttattttctataccattt

SEQ ID NO: 31257 - DNA, 573 bp, Heterodera glycines
gggggggggggggggaacgagctgctcccgtttaatacgccgtattttttttaacattttttcaattttgcctgcaaattttcttttaacttccttgaaaaaaatagatggaaaaattaaaggaaaaaatccaagggtcatcccgtttccaaaataacatgtaaaaaacaaaaaaattaaattttaaaagaaaaaagtctcaaaaaatacatttaaaaaatttatgaaattgaaaaaaatttaaattttttttcaattcttgcaattcttccttcaaaaaatttcttttatgtttttcttgaaagaattatgcaaagattttttttaattggcctcaagaatcgagactagtgaaacacatttgtcgagagtatgccatttcgacctctttttttgccgtctatgcattcgactgttgctggggatggtgttggaggtgttcttctgctgttgctgcttcaactcctgttgctgctgctgtatggagcgaaagaatgactcggaggggcgcaacttttgttgttgttgttgcaggagttgacaaattgtcggaaaatggtcctgtacatttta

SEQ ID NO: 31258 - DNA, 1038 bp, Heterodera glycines
gtttttcatgtcaaaatgttgtcacaagactcaatttttttcctcctccaattaaattttgcaatatttttttataaaatcacttctgaacctttgcctgatcacttcatccgtctgctgttcacttggtccatcgcttggcttaaattcgaccctttgtttggccagatgatccaattgggctacacttttggccataaaatttcgcagtttggtccaaacacttttaaatgtgtcattcttggcaatcacttcatttgcactgtttttctccatgaattggtccaatgttgcgtaaatttgtcgataaattttgacagttcgaataaatttgtcgacattttgtccccctccattttcgccattttgccttcttgcctcatgaattatgtgaagaaaggtatcaacaactctgaaactaactttggtaagtcaacacaaaatgttttttcaacctcatgccaactgatcaaatgaccaaatcaaaggcactgatcagaccaaaccaagtcaaaggagtggaggggagagaaagagaggtcgggtcaaaccacaaagccaaccgatcagtgtgatcggacaatgagacgtatggagagaccagaccaatcagaggtcagagagacctgatcaaatcactaagtgacccgacctgatcagacagtatgaatcaggcaaaatgccggtgccgtcgattgagtttcggtcccatcataaactccactactgacagacgaaatgccaagccaccaccacttaccgttcagtgtcatttttggcactttgctcaatttgtgccaccaattcggtgccattgaccgttccgtcgccggaatttgccattagcaaacaagcaatgttattggccgaaacgttctccaaatggaccaacacacagccgaacttcagctggaaaatgtgctggccgaagagaagggggccaagcgaatgggaaacggcgaaatgtgccaattcgacggactcgcggaacaaatcgaaggcatcgagcgaggccaatgcacggagcacctttgaagg

SEQ ID NO: 31259 - DNA, 865 bp, Heterodera glycines
caaggaccaaaaaatatttttgacccccattttcaacccaaaaaaatttttcgaaaatttctagggggcctagctcgaaaattttagaaaattttacatcatgtagtacaccgttcgatagagcttaaaaagctctacaattttgctctaaggcattttttggctaaaaccaacgcctgacgagttatgggcccaggactcaaatgtcccgctgaggccaaaatttttttctatttccgggaaaaaatcgaaaattttccgaaaaaaataccagtcgatagagctcgaaaaactatgttttggaagtgccctccgtttttctgggaaaattcgttaaaaattcttaaaattcaaaaacccgaaaaccgttttttaggcctagctcgaaaaattttgaaaattttcgaaatttttaaatttcagaaaatcgagcttccaaaactatacaataagtctgctgggcacctttccctcagatcaaacgccgacgcggtattcgcctggtactgaagtgtactttttgagcacgcttcagttgccattttctgcagcattggcatttacagttagaacccccaaaccaacggcattctgtgccaaacagtccaacttaaaatcctaccagcaagcattttctgctcccgcttcttcccgcaaagttacaggccaccaaagacggacaaaaaaattttcgggccgtttcagcgccgccggcgctgaaccgtccaccggatcggaatgccgatagttttcctgaatgcgcctcaaaaagttgtaagacccttccaccactttcagacccctcccgacagccgttcgactcaagttagtttttaagacgagttgcaaccattattctatatat

SEQ ID NO: 31260 - DNA, 998 bp, Heterodera glycines
ttccattccttctacaatcgcctttatacatcccattatgagctctaaaattatcagagtgccgaaaatcgcatgtgatctaagcctagaaaaaaatggtctaagtaaaaatcgtaaatacgctcaaaaagcttctcaaacaattttagcgcttccaattccttctacaatcgcctttatacatcccattatgagcgctaaaattatcagagtgccgaaatcgcatgtgatctaagcctagaaaaaaatggtctaagtaaaaatcgtaattacgctcaaaaagcttctcaaacaattttagcgcttccaattccttctacaatcgcctttatacatcccattatgagcgctaaaattatcagagtgccgaaaatcgcatgtgatctaagcctagaaaaaatggtctaagtaaaaatcgtaattacgctcaaaaagcttctcaaacaattttagcgcttccaattccttctacaatcgcctttatacatcccattatgagcgctaaaattatcagagtgccgaaaatcgcatgtgatctaagcctagaaaaaaatggtctaagtaaaaatcgtaattacgctcaaaaagcttctcaaacaattttaacgcttccaattccttctacaatcgcctttatacatcccattatgagcgctaaaattatcagagtgccgaaaatcgcatgtgatctaagcctagaaaaaaatggtctaagtaaaaatcgtaattacgctcaaaaagcttctcaaacaattttagcgcttccaattccttctacaatcgcctttatacatcccattatgagcgctaaaattatcagagtgccgaaaatcgcatgtgatctaagcctagaaaaaaatggtctaagtaaaaatcgtaattacgctcaaaaagcttctcaaacaattttagcgcttccaattccttctacatcgcctttatacatcccattatgagcgctaaaatatcagagtgccgaaatcgcatgtgatctaagc

SEQ ID NO: 31261 - DNA, 966 bp, Heterodera glycines
ggggcagtccccccgaaccgatgcgcccagatccccccagagaccgaatccttcgggaatagcttccctatagcccttactttaattctgcgttggatttttgctccccataattgtttgagtaccccaaacggacacttgaaaaaatcgatttttttgtttcataaatatttttttcagaaagtgctctaaagcgcaccaaattttatttacaacttaattttagcactctgatgctttttctatcaaaaagggagatgaataaatttaaaaaaatttttaattcctttttaaacaggccaaaaattttaagcttgtgtggtaagtgtgaagaactgtgttcctccaggcaaaaaattctaagaaaatttataagcatttgtagggttctcagcagtttccctgcaaaatttggtgagcttctgatcagtctagaacgttgggtgataaaatgaaaaaaataattaaaaaaaaataatgctggtgtggtaagtgtgaagaactgtgttcctccaggcaaaaaattctaagaaaatttataagcatttgtagggttctcagcagtttccctgcaaaatttggtgagcttctgatcagtctagaacgttgggtgataaaatgaaaaaaataattaaaaaaaaataatgctggtgtggtaagtgtgaagaactgtgttcctccaggcaaaaaattctaagaaaatttataagcatttgaagggttctcagcagtttccctgcaaaatttggtgagcttctgatcagtctagaacgttgggtgataaaatgaaaaaaataattaaaaaaaaataatgctggtgtggtaagtgtgaagaactgtgttcctccaggcaaaaaattctaagaaaatttataagcatttgtagggttctcagcagtttccctgcaaaatttggtgagcttctgatcagtctagaacgttgggtgataaaatgaaaaaaataat

SEQ ID NO: 31262 - DNA, 1890 bp, Heterodera glycines
  unsure (1)..(1890): unsure at all n locations
tttaaaatggcctacacntggacaaaatttacaatcgcctccacccatagaaatttcgaacccatggttaaacggaaatagccctttaaattaaattccacccaccttcaaattcgtcgtgccaacatcaagtgccaaaattaatggacagttcgacgccattcgaattcttgccaaaaggagcgcatttaatggaaaatgacaacaaaaataaagggttaagaatcataggaagtggaattcttctcatttctgcgaataaaagtaaaaaggataatttgtaaatatttaaaacaaaaatgacataatttaggcatcggaatacagtaaacaatgaaaaatgccaaaaggagtgaaaaatgggaaagtattggacggaataaaaataccagcaaaattctttttccatggcggaaggcaaaatgaggtcataatttaattttgtttttattcccgtaaattcattcactcgccgattgtcctcatctttttcttcgataaatcgtacccttttggcgcttcaagtctgaaaaaaaacaaaatgggaaatggaacttttttaccctttttttgagggagggtagggctacagaatccgttgtgaaatcaaaaaaaaatacaagtaaaactattggaaaatcgggcaggaaggggacagtgacgcaaaaacttttgaaaaattgtggcgtaaaagttacaaatattcgttgcttttatgtcggcttcccccgcctaccggcgccaactatgggagagagtaagtaaaaatgtagagaggaaaaacataggtttgttaaatacagcacaactcacttgtacccgtacatctcacaccagccaatcgggaacagttcacgagacctaaaaaatttccgaattttttcgtgtccccatcatccgttccccggccacctgtagtcgaacagctggtccatttcgctctcccatccgtcaaagtgcacttgcagcagacgaccgcggatcgcacaaatggtggccggacagaccaagttgggctcgcattggtcggtggcctccaatttggcaccgacctgaaaatttagtatagcaaaaaatgttaaaatacagacaaatttggcaaaataccccatttattttactatgaaaaagcgtaccttaaaatactgaagttttgccgccgaaggaagtgggtcctggcaatgaaaaagatgaaagaaattcaaagcgtaagtgtaaatttaaaaaatatgcttacaaaaagtgcattgggcgccggaatcgcttggcactgccgcaaataatcgggccacgaaaaatcgccttcagtatctaaaaatgtgaacgaaaaatgagaattaaaggcggaatggtatgatggaaaaggagcattagcatttgaaaaattttcaaaatattcttttggaaaaatatacccccccacccccccgcgggagccttcggcccccgcccccccccgcccttcagagcacgacaaatatttcaacaaaaatttttaaaaattgactagagcaatcgaacgctaacggacgacctaatggaaaaaaatccccgaaggagagaatttaattaaatccattccttcgggggaccgtgccgggtgccgcggggtaagcagtgctggttcgtttcatcacggcaccgaaccttttggctagtcagcaatcgttgcttaacttgccagatcggacgggtgcgcatgattccactgttccaagcaccccaccaaaagcaaaacgatataaccaaaatataaggaaaaattttttaaaacattttttctccatcttcctttttgatactaaagcatcagagtgctaaaattaagttgtaaataaaatttggtgcgtaagtagagcactttctgaaaaaaatatttagaaacaaaaa

SEQ ID NO: 31263 - DNA, 1301 bp, Heterodera glycines
  unsure (1)..(1301): unsure at all n locations
caggcaaatcgccatagtatgntgatggcgctggcagcgcgaacccgctctccaacatataatcatcatctgtatcactttcgggtaaaggagcggcagctgcttccgcaagaaggtcccgcacaaccggtcgccgtcgttgtatatcgtatcgccttttctcccactgctccagacgatcagctctccgagaagctctactcggtctgggaggacgttcaggacgaggcggaggactccctggcggagaagggggagcgggaggaatctgcgggggccaaggacgtcttccgggtggcggaggaggtggagggggaggacttgctccnatgtctagggcgtctcccaggcggcgggggtggcggcgggagccgcggtggtgtgttcacaacttcaccatcttcatcttcaccacctctcctcatcaacacacttatccctttggtgagctcaactttggtcggtctgtccgcaagctcccttctcattttcaaatagcgcctaagctgttggttgtagtggacaatctttgcagatggatgtgttcgttcggcccgggcacggttcaaatcgtgccgaacagcatccaaattgatgtcacccgtctccgacatggaggtgagaccacgataaatttcttgtgggacaagtaaaaatttattcgccatgaaatgaatgaatgaatgcacgaaaaaaaaatggtgcgtggtatttatgcatttttggtggacacaacagattttgccacttcaattagaatgggtgttaagagggcagcgaacaatccgccaaatcctgcgcctttctggacaagcacgcgcctggcgccccgctcacttctcgctctgctcacccgacgtacagtgtccgcatggggcatcaatcgtatcttctgacgagctgacaaacggaagcgggaagcaactatgttcaaacaaatttccaccagcgctagcagttgctcagtgtttgcttttcgtagcattttcttgcatttcttcgctgagcgagttctggccaatgcacagagccaacccgcattctcttttatcagttcgccaacctttacctgctgctgtttatgccgctccatttttaggaatgaacacaactgtcccttcatcttcttcctgctcatccttaaatatgttggttcgtagcctcaatgatgggtccgacgatgcatgcatatcgatcaacaaatagccatagggacgggcggtcgcttttcgatatgcgtcaagaaagaagtcaagctacacggaaagagctgaacacccaatgttgcggatggacagcag

SEQ ID NO: 31264 - DNA, 995 bp, Heterodera glycines
tagaaaagatgagagagagagagagatagaaaagaggagagagagagaagagagagagaaagaaagaggagaaaaagagaaaagaggagaaagaaagagaaaagaggagggagtgaagaggagagagataggaaagaggagagagagagagagagaaaagaggagagagaggaagagagagagaaagaaagagaggaggagagagaaagaaagagaggagagaagagagagagaaagaaaagaggagggagagaagaggagagagatagaaaagaggagggagagaaagaaagagaggagagaagggagagaaaagaggagggagagaagaagagagaggagaaaagaggagagaaagagagaaagaaagaggagggagagaagaggagagagatagaaaagaggaggaagagagagagagaaaaagaggagagggagaaagaaagagaggagagagagagagagaaaaaaggagagagatagaaagaggcgagagagagaagaggagagaaaggaagagagaaaaagagaaaagggagaaagaaagagaggagagaagggagagagagagagagagagaagaggagggagagaagaggagagagagagaaagaaaaaaggagagacaagaggagagagatagaaaagaggagagaaaaagagaagagggagaaagaaaagaggagagagagagagaaagaaaaaaggagagagagagagaaaagaggagggagagaagaggagagagagagaaagaaaaaaggagagagaggaagagagagagaaaaagagaagagggagaaagaaagaaaagaggagagagagagagagatagaaaagaggagagagaggaagagagagagatagaaagaggagagtgagaaagaaagagaggaggagagagagagataagaggagggagtgaagaggagagagatagaaagaggagagagagagagagagataagaggagagaggggagagagagagaaaaa

SEQ ID NO: 31265 - DNA, 1511 bp, Heterodera glycines
  unsure (1)..(1511): unsure at all n locations
tttacatttcagatcttcntaattttgtaaactgaaaatgtgaaatttaagctttttgctgacgatcttaaggcctatctattctctcaaaaaatactatttctccactccattctttcattaataaatttcggaattactgtgaattaaatggccttaaaatcgctcctaacaaatgcttagtttcacatcttgggcctaaaaaccctaatgaatgttactttataaataatattccaattttaaaaaatgtaaaaggtgaaccagttagagaccttggcatttatttttcaaatgacttaaaatgggaaaaacacatagaatatatcactaaaaaagcaattaggacatcttttactttactcaaatcacttaaaacgaaaaacccaaaaattcttataaatatattcaatgtttattgtcgatccattttggaatttggttctccggtttttaatccatatatgaaaaaagacattgatgctcttgaaaatgttcaaaaaacttttttacgtattgtttttagacgtaataataacaaggatgatatacccggttataatgaacttctccaactttttaaacaagaatcccttttaaaacgcagaataaaaatagatttaagactcttccatgatataattttggaaaagatccatattcagcataatgattctttttcaaaaatatattcaggactgaaaaacgattatattataaaaaccgcttattgttcaaccaatgttcggtatcattcgttttttattcgtacctctcgcctctataggtgtttgcctaaagaggcaaggttacttaattccattgagtttgctaaacttcttgacacctatgatgttgatgctttaattttgaaaccacctcatctcattcagtgaccaaatttatttatttattttgttatttatgtcggtgtcacgcttggcgtataaattgattgattgattgatttttatttttcattttcactattcttcttttttgttctatcgatttgtctttatattattactacatatccagaggtgggatttatttatgctaaaaaccgccaaatatgcaatatatgtgtgccaaaagccccaaaatatgtgctaaaattaaaaaaatgccaaaatattgccaaaaatagaattagttgatgttgtttctttaaatattatgccataattattattattttaaggagcaaaataaaacaacaaaaaataacttttagaactcaataaaatgcgatggaaatatctgagctttgacttggaattttgcaagatttttaataaacaaaaaacattttaataaattcacataataaaccaaacttcttaaaattttaataatggaaaatagtcaataaaaaataatatcacaaattatgattaaatttttaaaactttatatcttctatcgcaataatatttattatataataaaaaacaaataaacatttttcgaattatatatagataaataccccaaaaannatgaataaa

SEQ ID NO: 31266 - DNA, 1765 bp, Heterodera glycines
  unsure (1)..(1765): unsure at all n locations
aaaaagcaaagaatttacttttttttaacaataaaaaggaaaaatgggtattttaatgggggataatantgtgaaaataatttcnccgcatttgnttgnttgtttcttattcattctttctttcttcatttgtttaaaaatttngtgtgcttcttcttgtgaataatatttttttattcctataaaataatttattaatttttaatattttttgtttatttttgccaacttcctgagatgccaaatttctttctccatttgtaaattgtccgaatgtttatgcctatttcttctgcgattttttcttccaattctcgaatttcaccagctggtaaaccgttttgagtgcgcttttctttgattttgtcaaattttttaataagcatttttcgttggcgatctgtcaaccatttttgattgcctaaaaacgtaatgctgaattctgctatttttgtgggtgcgtgaaaaattttaagaaaaaaatatgtcttacccaaaccaaatttccttgtccaatttttaatttgatgaatcgtcacacccaattcacttgcaatttgttcccgctttttgtttttctgaaggattgaattttgaatcagtatcatgcaactgatttgaacaaatttaccaatattgatattgtaattttagaaaatttaaagaattaaaaagtgcatacctggttcaaactcccttttctctttatatattgcttaacaattcttatcttttcattatctgataattcacttcctgtaaatattaaaacttattttattttgtttttattaaagttcgatattttgaaatgcttagacttgaacctggacctgaattttctggacacaaatccaggtccaggaaaatccgggattgtcaaagcctggacctgattaaccattttttgataacttgaagtaaacattagtcacctaaataataaatttaaaatttcatccaggatagctaggattatcatgcctaacctagaccttgattttatatttgactggacctgttcttttctggcaaaaatgcaggaactctaggtccagaagaacccaggttgccgacatggacttggatctgtacccaggaaagtccaggccttggccagatccatgttacactttaattttttaatgtttacgttttgcaattgttcttttgaaggaatttttcacagatttagttgccaattttcctttttttgacgacttttcatcactttcttcgtcagtttgttcatagtctgaacttgcggtccatgattcttcatctgtatccgtgcattttttattgaatttatttaattatattaaaattttacccgatttattttcgtctgaactttcttcatccaaattctgttcatcattaccaaaatgttcatcattttgctcggatttaattttatcaaattcatttggttgtgcttcgttttttataaaaatattttcttcgtcattttcctccttttttatttttatttttccataattttttggctttccattgttttcattttgaattgtttccgttttaatttcaatttctttagtttcggcagttcgcaaaagctctgtttccaaagttaaagcatcctttggcccaaccttaattcaaatttcagactaatacacttaattttatgaaaaccttttcatttttgctccacaatttaagccanaaaaatcaccgggaaacgcttgacatttgcttggtagggtaaaataatggaaaacaaaaaaataaattttca

SEQ ID NO: 31267 - DNA, 947 bp, Heterodera glycines
taaatcaaaggacacgattttaaaattttcgagggtcgtgattttgctctccatgtgaccattcctttataatttaccatttttttcaaccaagtataactttttatgtacaagtcgctaccattaaattaaaattcggcagtaaattttgtgctcttttaatgagcttattcaaaatgtccatggaaatttttccacccctaggaatttttttcgaaaatttccccgttttttgtcacgtcactacgaaggagtgatttgaacaagttgatgtaaaaaacttttgatcaggctaaaaagataaaaaaattaattatttgagatgtttaaatgaattttttttatttttgaaaaaatgctataaggtgtttttcacgtgagtcaagactttctgcccctttttgagtaaagtctgatcagacgacttattcacgagaatgataaagtggaatgaaattattttgcgatgtatgaaaggcccatgtattgtaaaaataatcagctaattttcagtcgaaatttaaaattttaaaaatttaatcatcttggttcaggactttttccacaatgtatctgtgtcacttcatttttaggctccaattttaatatattcgcgttttttaaaaatttatcggtactgtcgaaatcacttaatgtcgaattcactaaatgctgtggatacatttaacatccccttttacagatttaactcaaaatataaactgggcaaaaaattcattccctttgctgggagggtaacaaaattgtggaatcaactcgacaaagaactaataaaaacaaattctttaaatcaatttaaaaccaaacttaaaagttcactagggtaatgaaaccggaaaagctagaattataacaaattcctaagtgatttggtattttttaaatttattttttttcgacctcatttgactttgacctcaatttat

SEQ ID NO: 31268 - DNA, 927 bp, Heterodera glycines
ccttaccctaagagctgcggaaattgtgaattaattctcagaaaaatggctatctctttttaggacaattttctatctcgtaaccccgatgctaatccgttccggagagcctcttcaaaattttttccattaccctaagagctgcggaaattgtgaattaattctcagaaaaatggctatctctttttaggacaattttctatctcgtaaccccgatgctaatccgttccggagagcctcttcaaaattttttccattaccctaagagctgcggaaattgtgaattaattctcagaaaaatggctatctctttttaggacaattttctatctcgtaaccccgatgctaatccgttccggagagcctcttcaaaattttttccattaccctaagagctgcggaaattgtgaattaattctcagaaaaatggctatctctttttaggacaattttctatctcgtaaccccgatgctaatccgttccggagagcctcttcaaaattttttccattaccctaagagctgcggaaattgtgaattaattctcagaaaaatggctatctctttttaggacaattttctatctcgtaaccccgatgctaatccgttccggagagcctcttcaaaattttttccattaccctaagagctgcggaaattgtgaattaattctcagaaaaatggctatctctttttaggacaattttctatctcgtaaccccgatgctaatccgttccggagagcctcttcaaaattttttccattaccgtaagagctgcggaaattgtgaattaattctcagaaaaatggctctctttttaggacaattttctatctcgtaaccccgatgctaatccgttccggagagcctcttcaaaattttttacggttaccctaagagctgcggaaattgtgaattattctca

SEQ ID NO: 31269 - DNA, 1083 bp, Heterodera glycines
taaataccataaaaatatttacattggcatgagaaaattatttaattgttttataatatatattttacaatttgatgtgaaccattatttttgtgtgatctcttactcctgtattatttgatcatctattcatttttgtacctcgagctgcagtgtaagtggcctatgcccttctgtggtagtttttatttgacattaaataaataaattaaaaaagcaccttttttaaactgaaaatcaggaacgttcctggggcggggggggggggggggtaaacggtcccccatgactcatccacattcgaaattattaaagaaggaaaattttgtctaaaaaaattttcgatttcattatttgtaccccatccaagacattccttcacccataccaaaaggcgctgccgcactctgatgtaaaagtgccattgaagcaattgttggtcctcaatgtaccgggcattgtccacggaggcaatggcctcgcgaaagtccgcgctttggagtgcttccaaaaagaacagacactgcgggaatttgagcgtacgcgcgtattcgggccgtttgaagtacagcaaatacttcaaataattgacgaaatagtcctctttgaagtagccgcgctgggccaaatctgacaaattattaaaaaccaattgtcagtgtcaaattgtgcgggttgatgtggcagaatgtcacgacttaaatttggctgtttgccattcgtgcaaaattaacgcacagttgaggtaatgcgggttagcgagtgcctggacgaattcgcactcaatttcaaagcgtcgcttcgcttcttccgccgtctcctgacgcagctgttgatggtgcaccaaaaattggcctgactgactcgctgattgtgaggcggagagttgctggccgaggtggggaaaagcgccggagggttgctgagagtgggagggagggacaacgccagaggcaccgacgaaatgctgcggagggaaagtgccggaaggaacggaagacggaacggctgcaaaaggcaaaatgggaaaaagcgggccatttactaacagtacctcgcgagtaatccagtgcgtttgttgaa

SEQ ID NO: 31270 - DNA, 1104 bp, Heterodera glycines
tttcattcatcaaaaaaataaaaagattaataaccgaacaattcataaagaataaaataattgaagagtaagatatattctttgcaaattacttaaaataataaatttttggaatattataacttgaatgatagcttgtcggcatgctaaaattataaaatgataataaatcaatcagactgaatcttgcatgaataaataaattttattaaaaaattcttaataaataaatacagaggagccacaaatatttattcgttagaatagaaaaaaatcaaaaacgctcaaaagaaaaatgttttactgtagtacgaaaatagttttaatttttctatatcagttaaatttttgaataaacaattactataacaaataattaaatagtgcattctaatgaaaaaaattttattttactatactatattaattttaatttagggatatcttaatttcaagaattaaatagttaaattagaaaatcggaatggtgaggaaaaaaggatacacgacgaactatatggggaaaatagttaaaattttgaacttcaatacaataatatttgtaaataagaatgtgaaaattcaatcaattaaataataaaataagaaaataaatataaaaggtttatattcctaaaatgatatattaaaataaaattttgctaatgacctagtgaaaaaaaactttgtgtttctttgcgaataaaaaaaacattttagatttcattattagataaaattgtagttagaatgcgaaaatttaaaattttaaaaacaattaaaagaagattatataaaaaattaaattataaacttaaaaagtattagaaaaggtgcccaagtttgatttctccaaaaattttattaaatgagatctaaaaaatatattaaatctatagaacacatagttatttgttatagcaccaaaatttatgctgtcgtaataaaattgaaattttttaaaagttaaaatttattggatttttacttttagtcatagcaattaattgaaaacaattcaaaattgttttcattggttgaaactaaatgaaaattataaaaaattaataacaatataaaattaaaaaagtgctaatcccatga

SEQ ID NO: 31271 - DNA, 1463 bp, Heterodera glycines
tcagcgagtataaatcgtataaattattgatcatacattagtattgtagagtattttgtgttctttttgattgcttaatcattatttccataaatttgccaattccctaggaatttttttttttcaaaaatttctccgtttttcagtgtattttggggtgttcagatcatcatgacgaactgatttgttcaagtttgaagaaaatacttttgatcgctaacataagcaggaagttttcaggaatttgactaaaattgtctgttttatcaccagctaccaaaaccatgaccatgacagtatgatttacgtattttattttaaaaatttacattcactgtcgtaatgtccactgtccaattgtccacttctgtccatatgactttcattgtcctaatgtccactgtcgaaatgtccactgtccagatgtccactgtacaaatgtccgggacatattttggcgtttggccatttaaaaaaatgttttttttttcgccaaaatttgcctactgtagtttaaataaattataccgtaataataaacataaaaattaaaacaagaaattccaggcctgcttttcttcatgggcaaagaccgtgatcagctgatggtggagcttgttggtggtcgaatcagtttgtcatttgaccttggctcagggcttggcaaattgttgaggtaaggggctataaaaaaatttttttttgaaaatttattaataactttttccagcaatggccaacggtacaacgatggaaaatggcatcttgtgcagatggatcggcaagaacgttcggccaaactaaaaattgacgacacggataaagtgaggaagaaataattttttgcatattttttgtttattattggaattttaggtctcaaaattttcttggaattggaaagataattgtgttttctatgattaaaaatttaaactttttactcaaattacttgatcaataaacttaggtatctattttaagtcatatttttcttgaacttatttgcgacttaccccttccaaaaaaaaaaagatctaaaaaatttttaaataattaatttaagcattttagttggtacttccccccccccccccctcctccctccgaaaatgtagcaattttttaaacaaatctagacaagagttcaaggaattttcccaagcttggtgtatttgtgcgcttattagatggtggtggtattttgtaaattttccctaaaattttcacaggttgagggcgagtcgcctggctcaatgttcgagatgagtgtttccgatgtgttcttcattggcggattgccgtcaaacattgacgcacggtttattgtccacccgttccatggctgcatgcgcaatttgaaagtgcgtaatttcactaaattgggttccaataccgtatattccctctaaaacagtatcgaattttgcgctaataatgaaaattttgtgtcaatatcgtaa

SEQ ID NO: 31272 - DNA, 1222 bp, Heterodera glycines
  unsure (1)..(1222): unsure at all n locations
tttttaacaatgttatttcattaancaggggaaagttttcacaccaggaatttgtatggcaccgggaagttttggcactatcttaaggatttaaaaataaaaatatttaattatctaaaaatgcaaccatctaatttggggtcttggtattttcgggtacaaataagacgggtattcgggcctaaacccaaacagaaactggtacacgtctaaccctacatttagagtgtaagaattgactaaataagattgccaagttcgcaatttaattttttttttaaatccaagaagatataatttttaagcccagggattatttgaggatgaaatcattaatttagtattttttttagtttttcaaattaatatcagtgcccaaacttcatgttgacaattttatttaatcatttcattctcctgtgtttttacagttccttctgatgtgttgtcaaaagatgaagtgattgccgtttatcagttccatacccttccaaatcgtcgtgggatattcaacggatttttcccaatgccatttccgactaatggacggatttctgatcggaaaaagggcacccttttgatggacattgaaaaagtatccgaatttgcacgagaagaggttgaaagcagtcggtatagcgaaaaaatgtacataaatggacttccatggaaaatatatgcagaaaatgataaagatgaaagcactgacaataagttgtacatttttcttttgtgtgatgtcccagaggaaggtacaaattaaatattaattaataataattacaattaatttccattaagacaaacattggaattgcaaatgctcgggaaatgttcggattgtctcacaaaagaacggagtgttgggtttcaaaaaagtattcgttgaccttgtttttgataatgagaacagctgtcaatgtgtcaaatcgatttcatttgcagtgagtgacaattaaactttcccttaattgacccaattatggaaaattaaggaactgatggacctgaacaatggattttacaacagagaagacgacaaagtgacgttggccattgatgtcacagtgaaagatgaaaaaacagagaactttctttcggatcccaacaaatccaatgggacaatttcgatggaaattgaaaaagtgtcggaatttgtgcgagaagtcattgggagtgaatgcgaaagtgaaactgtgcacatcaaaggattaccatggaa

SEQ ID NO: 31273 - DNA, 1008 bp, Heterodera glycines
tgaatttgttcgttccaaaaagcaaatttgggacagaaatggcaccaagatggagctgtccattgataatgaccaactgatttgggatgttttcgcccgagaaatttggccaatttttgcgaccaacattcgcaatttgggctttaccagtgccaatggtttggacaatttttgtcgccgcacttcaccaacaattctcactgatctcaatcatctgaattcaatcaattccaattttctgttgcctgatgcaattgctgatgatgggccaaatgcttctgccggccaagtgttgtccaaatggttgcacacgccgagcaaaaatggacaaccgaagcgattgcattgcattgattattatgatagatcaaatcttgagtgggtcaacaatttgaaggaggtggccggccatattttgactgattgattgcctttgatttgcgttttctttttgtttaggcatttccccgtgccacttcttccgccagtttcattattcgaattgatcatgtgagaaaaatgccaaatgctgagccatttgaattggagaacgaacggaccaaagaaaagctgacattggagaaagtgtcacgttataatgttgttaatttgctgttggagcgatgtccaataattgttggggagacgacggcggcggttcaatgggaaaacgacgaaaattgggacgccaattatttgaactatgtcaaatttgagttgtggcgtggcattaattgcattgggtgagagcagcaaaacaacggaatttgattttgttgaaaaataaaaactcaatttagaccattatcgccaccagcggaataagaataagccgaccaaagcaaccaaaatgtcgtctgagtgtgcggaagtgaattaattatatttgagaaatggtcgacgatctcacaaattacaaatggatttgatgcttattctctctcaaaaatgcttttattgcttcctcaacatttgcttgttttattagaatttttgttacatatactt

SEQ ID NO: 31274 - DNA, 1066 bp, Heterodera glycines
ttcttcatataattttaatttattcattaatttagaaccctcactagttccaaatattaaaaaaatattacatgtaaatatggcgacatatattgtttttatatatagcatataaattaatttaaaagatttcagcaaacgtaattaatgaattttaaaactaaaaccataattaaaataaatatattttaaaatgtaatttttattcaataatttttttaagaaaggttataaaataaagaattaactggtaaaaataatttattcaattctacaatgcagaaaataaaataaagcattattgagcaaaaatttcaaatgaaaaaggttgatttattagcaatataattagttaaagcgaagcaaaaaataaaaactatgaaggattgggtacaagaatttagtaattatataaaaatgaatgcagcaataattaatcattttctaactatatccaaacgagaatcaattttttgaaaattaaaaaatcaataaatatctatttttataactatttaaaaaaagaaattttcctgcatggctttatattttttgaatttttttatctttaaagttttttcaaacacattattttctttattatctaatccatattttaattaaaatattctaacatttaagttttaattgctatatgaaagcaaaattattatttttatttgatatccaaaatgaatgtgaaaaagcctaatacaaaattcaaatacaattttcgaatgaagagacaaacataaaaaagataaaattgacaacaaataatatttaaatggggaaattaagctaaaacaatcgtcatgaaaaataataaataaaaggataaatcactatttatcctacgggcgccgcaaaactcggcgccgaaattgtcgattttttaaatttgctttatttaaattaagtgtttaaaatttacttacctgtaagtattttcaacttgatcttcgtccctggatgatttgttgttggtaccgttgtttattagattatttataatattcataagcatgagatcatttgtttaaaaagccaaatttgtgcctacatt

SEQ ID NO: 31275 - DNA, 1770 bp, Heterodera glycines
cagtacggtatcattgccatgaaggtcaaattaaaattagaaaattaatacatttttaaaatttatttcagagaaaaattcttagccaaatgacaaagaatgactttgccattgtgggagaaaatattttcaccgcttttttggaggaacacgacaaattagaccctgaggcggtggaagaacttaaaaagcgccacaatgaaatttttggcacggattaagctcacaaatgatcaattgtttctagggtgaccaattcatttgattgtttcaattacatattttcattttcggaattttggccaatttttctccatcgatcactcattttaactgctggtcgatttctttaagtaaagaacgcagaatttcttcatattcggtatgcaaaatttgtgcaaaatttttggtagaaacccctcgtcatttcgtcccctaagccaaaatgagtcatttcgtccctcgcatgggcagaagcccaaataggaatcctattttggtggagttttaaaaatttcagatttttaattcttatttctagggtaggtcactacgggttattgaccggtacacccggttttcggtttcgtttatttcggtaatggaaaatttttttgatttcaatttttaagtgttggctctacattccttacattcctttagtcgatatatccccttgattcaattaattttgggataaattacacagattttgtctaaagaatgaccaaatttattgatttatgcaattttttaagaaaaaatcgtttttttttttggggggggggggagcggcggtgccgataggcactgccgggagaaatttttttatgaattttgttagaaattagccaaatttttcagaaatttcattcttttggatgaaaatacgccctaaaatcagaacatttcttagaaataagaacataaagaaaccctgcattaatcagataaaaatcaaataaaatgaaaacgtcaaccggtgtcgaactcctaacttttttatttaattttagcaataattcatttgaagaaataagttaccgtaaatccgctatttgaaggcccctctctggtagaaggccccctccaattaaaggcccctttttggaggggttgaacaatagaaggcccgggccttcaaatagcggatttacggtaattaatttttctcgatttttttggaaatcccggtcacgtacgactctactaaaaattaacaaattttattatttgtcttttttaataccgtattcagaccttttagaggtttttttttactaaaatttattaagtttgaagaaatttttggaaaaaccattatatttggaaaatttatgtgcatatttttgcaattttatgtccatattcgtgattttatatccatatcattggaaaccctaatcatatcgactcatacacattaacttgttctatttgttccccaattaggagctaattgtatttttcccaatgaatcgtttttgtactaatacccagccggccaattttgggctccaagtacaattatgctggatttttatttagtaatcagaacgccaaaactttgcaaaacttaaaattttccgggaattttcccttgtaaaaatagaagagccgatctcgagatagataagaaactttcagaaaacaaaagagaattcgatagaaaagaccaaaaaattcacttaggcaaaatttcaataaaattggtcaataggaaaaaatttttttcaagggcaaacatttcaataattttaattctttttt

SEQ ID NO: 31276 - DNA, 1327 bp, Heterodera glycines
aacttctgtggggcacgcaaaaccctcctcaaactcccgaggatttgactaattttccttctatacaaatacgaaatgtaattgcattgcccggtgttccacacttttgtgagcaaaattttcgtcacttgaaggtaacgagcagaagaattaacgccaaatttaatccaaataaaagtgaatttgtaatagataatcaaattgctgttttatttttcgcgtaatgtttcaaataagtaaattcgctttgagggatggagaaagaagccaactaaagataaaaaagacagactcggagatagaaatgagatgcaagaaatttctcgctttttaatactattttttaattttaggactacctattcccttcgtcacttttggaaatgtttacgaaaaatttatacttaaaaaagagtgaaattcatttacaacaaaaactgtcgcaattggctgccaaatatcaaaacgtctcaattgggtcgtatccgaccatggaaaacaagtaaacttgaaagctttgtgtcgcagctttatttacctttccgtcagttattttaaaactcgtctaagcattgaaagcatttcgaaggaattaggcaatttggcttatgaagaattggcaaatgaattttcaggtaattttacagatgaattaaacgtaatttccaattcattcaaagagtgggtggtgaattacgatcccgaaccgtgggaggattgtgtccataaattggacatttattgcgcgactcaaaccaaggaattttctgtcaagcttttcaatgccatcgcaacaattgacgaaattttggacaaatatgggtgagtgcatctcaatctaaacatcctccccctcccccctcagctctttggatcaattgacgatttcattcaatggaggcaaagattgcacgcttattttgcatcttttccgcatttgtgttcctaaaaaattcgggaaagaaaagcgaatcgaagggtttttcgtaggaggcgatgagttttgcgaattaattgcatttgttcggaatattttcccaaagtacttatgctactctttcttatctttcataaaaaactcacttctcgttgtgtaaatactcattggagtggctcgagatgataggggaattgaagaaggtattggctgagctgccagaattgccactggacattgatcctcaagttatatagtactcataaagtgcattagagccggaatgatttcgttcccatcagaggcacggattttccatttcccactttaaataattaaataaataattaaattatttatcatttagtttaggctcaactcaaaaaaaaa

SEQ ID NO: 31277 - DNA, 1106 bp, Heterodera glycines
  unsure (1)..(1106): unsure at all n locations
ggtgtagtacatttatntggtgctctcatttttgggcgcnggatctataaaagtatctttgcataatgcacaatgcttaagtcctgatcaggccaattgttccttgtataccaaacgaagacgttctgtggtgtagtaacattatttggtgctctcattttttggcgccggatcttataaagtatctttgcataatgcacaatggttatgtcctaatcaggccaattgttccttgtattaccaaaacaagacgttctgtggtgtagtaacattatttggtgctctcattttttggcgccggatcttataaagtatctttgcataatgcacaatgcttaagtcctgatcaggccaattgttccttgtattaccaaaacaagacgttctgtggtgtagtaacattatttggtgctctcattttttggcgccggatcttataaagtatctttgcataatgcacaatggttatgtcctaatcaggccaattgttccttgtattaccaaaacaagacgttctgtggtgtagtaacattatttggtgctctcattttttggcgccggatcttataaagtatctttgcataatgcacaatgcttaagtcctgatcaggccaattgttccttgtattaccaaacgaagacgttctgtggtgtagtaacattatttggtgctctcattttttggcgccggatcttataaagtatctttgcataatgcacaatggttatgtcctaatcaggccaattgttccttgtattaccaaaacaagacgttctgtggtgtagtaacattatttggtgctctcattttttggcgccggatcttataaagtatctttgcataatgcacaatgcttaagtcctgatcaggccaattgttccttgtattaccaaacgaagaagttctgtggtgtagtaacattatttggtgctctcattttttggcgccggatcttataaagtatctttgcataatgcacaatgcttaagtcctgatcaggccaattgttccttgtattaccaaaacaagacgttctgtggtgtagtaacattatttggtgctctcattttttggcgccggatctttataagtatctttgcataat

SEQ ID NO: 31278 - DNA, 566 bp, Heterodera glycines
taaataacaacaaataaaccggggcaattcgcattaaaacatttggtaattattagagctcgcaaaaaaaggcaccaaaaatcgcgaaaaaggcatgaaaaaggcatttaaaattttttattacggattttagggaacaaaacacgtaaaacttaaacttaattttggtcatttaaatgattattaaacattttataatgtttttcaaataaggaaaatttttaaacctaaagtttttgatcaagaaaaaaaatgaaattttggcgatcaatttttggagaaaatttttcaattcttagggatgtattttctgaaattttttcgggtcatttcttaggggtgtattttcccgattttattgcatttttaatggaatttttcggaaaaaacgccaaaaaaaggcatttaaggcacgaaaatcccgaaaagggcaaaaaaggcataataaaagtaaacgtagaagcttcaaaccaagtggaaacatcgttttttatgcttaatatatcgaaactagtgcgcagaaaaaaaaggcatatgcctcaaaatgcgagctctagtaattattc

SEQ ID NO: 31279 - DNA, 1262 bp, Heterodera glycines
  unsure (1)..(1262): unsure at all n locations
ttttgcagttcgatcctgtcaacatgtcattgttttatgtgagtatgatgagtgattaattgctctctaaattaaaagcttttcntttatctagcgcattttcagcagcttcaatgacatctccctcccggaattcctcgaaatgctcgacaaattgctggacatcggacacctacatagccaaattgtttatttagaaatattttctgattaatgtaatttgcattaatttgtattgtattaaaggaatcgcatcaccgtttggcttccgaattggtcaccggaatggtcagcggatcgaagctgtggcagtacgcaaaagtcaagaaggtgcaggagcggctggagcaacgattgaccgacacttttttgggccttacggaagaagtcgaaaagaattggggcacggcgttggccaccattgttcgtcatcattttgtcagtttaatcattagtaattatttcatcgtttagttcggtgcgtgtgagccgcgcgtcactaattggcttatccaaatccttttcggactcgcaaagcgacccacagaaataagcacacaaattaaaacgtaatttgtttgctttcctcacaaattcgttcctttttttaatatttatttaccgtttaggcgtttatatttgctacaatcgggccttaaccaggtgcggtaaaagacgacattctttcatttttttaatgccatttgtcttacattgtttagtatgaatggcgaattccgaacgaatggcgccgattgtttgaactttgcatggatcatgtcaacggattgggctgttcctatcaaaatgtccgcttgcgcatcggaaggtgaacaaaatgatcaatgaaatttgggataaatggtgggcccataaaaattaatttggcattccattgaccgaaaaatgtccgaaaatggacccttaagaaactgaccgcaaatttccgattttcagcaggccgcaaatttcatataacattttaatttcctttcttcagctgccttgccaccatttcatcgtccgatttcaagaaagcgcttgtcgaggcgaacggaggagaagcgaacaccgacgacgacagccaattgaaacatgtcaccgttgaggaagtgatctcgcgcataaatgccatggtaacgtttgttgattgaatttggtggcgagaataccgcgtgggaaattattcaaattttatcattatccaatcagtgtgattctatttcaacatttttggggggattaattggttttcctataaa

SEQ ID NO: 31280 - DNA, 1140 bp, Heterodera glycines
  unsure (1)..(1140): unsure at all n locations
ttttttattgatgcattatgatcagagcccgcttttttattgcncttaaaaaatgacaatttttaataacgattctaatttatggaaaaataaaaaaattaaattaaaattgtgaacaaaaataatctaataaaaagatatttttctttaacttagcaaaaaaaataaataaattattgcttgaagatgaattcctggttcttctcagttctcgcctcggtcacggtccaagctttagaggtaacagcatttcttggtcccgcttttccccaaaattcactatccgttcagctctacttttcaccatagaaagcaacaaacattcaaaatagtagttaaacgccaaaataatgtataattaattgtttttaaaggtatagtattgtggctcccgtggtgggccgaaggacaaaaagtgcaaaatttgccaaatttttgacaaaatccactcataacttttcttagactcaaccaaagtgcacaatcttggcatcatacgatagctcttgaattgcatattagcttgctaaatttaaaaaaaaaatttttaagtctttcaaaagttatgacaatttttccagttttttggctagatcacataataaattttctgaaatttagcaagctaataacgcatttcgagtgctatcgtattaccaagattttgcaatatggttgcgcatgagaaaagttatgagtttatttagtcaaaattttaccaaattttgcactttttgtcctttgacctagcacctgtggctccatgtgacaattgtgacgataatacctatgaatttccgagctaaaattgtatttttcgtgcatttcttatcaaaacaaaatgtgaagaaaaatagctaaataccgtatttcttcgattatacgcccccccccctcgaatggaaccccccccccctcgaaaataagccccctttggaggggggttgaacaatagaagccccccccccctcgagtagaagcccccttcaaatataagccccccccccccgaaaattttaaaatttttctaaatttttaaaagtttcaaaaaaattttttcacagactcgataattatattgcgaatttgataacatttattaaaatatttcttataaattttaattttgaaatttttttg

SEQ ID NO: 31281 - DNA, 1161 bp, Heterodera glycines
  unsure (1)..(1161): unsure at all n locations
ggttcccggtcccagatttgcaaagcccaagtctgggccccggtagggtcggcccaaccgggaaaaacatgcactggtagaatgtgagtcgagcaaaaaatcaatgagcgaaatggggaaaaggaaaatttttgataaaaataatntaataatattattaaagttatattttcaaatgcacaaatgttctagtggttaataaaaaaagcagccttttttgttgcaaatttgttaaaaaattgtactcaaattttcaaaattttcccgacggcaccttttggcaccgccggacccacttctttcccaaaagttttttggaaaaagcgtgccgaaataaatgatgtagaaaaccaaaaaaaaaaggttgtcgattagggcggtggtatcccctcaaaaaaaaaaaaattctgggatcgcccctgacctctggaccacaacatcttccctaattataaaaaacgattcaaatcccaaagtttggcgaaatttggaataatttctgtcaacaaatatattaaaacttcaaagattttttacggaagtgccgacaggcactgcatccttgaaaaataccgaactttctgaagttttcaggaaatttttttcgattttgcaaatcagggttggcagatgaaaattttcaaaagcctcattttgagtcaaaaagcctcatttttacaaaatttattcaaaacacgcttaatatgttcaaatgattgtccaaaattttcagtaaatttttttgaaattttaagcaattttcttaatttttacagtcaatattaaaatggtatattagatccttctcctgacatggacttattccaataaaagaggaaacatttatttttataaaaatgaattttttttaatttgttgatttgatttgttaaacttatttaatattaaattttttgcccataaatattttaaaatttgtcactttttctcaaaaaaaaagttttaatgtttttggtattaattaacccacaaaattctgcacagatttttacgtttttttattatttttataaatataaaaattttatacaaattaaaatatgtaaaaatcgatgaataggcagcaattaagctgctgtaacaaatgtaaagcttattctttatacaaaaagattcatccatttatgattttataataaa

SEQ ID NO: 31282 - DNA, 1491 bp, Heterodera glycines
ttttttttttttttttttttttttaaaaaaaaaaaaaaaaaaaaaaacaaaaaaaaaaaaaaaaaattaattttttttttttttctcttttttttttttttttttttcttttttttttttttctttttctttgggggggggggggggggggggagggagggaggggcagcggggggggggagaaaataatagaaaaaaaaaaagaaaagaagagtaattatttttttatttttatttttttatttttttttttatataaaaaaaaaaaaaaaaaaaaaaaaaaaaaaaaaaaaaaaaaaaaaaaaaagagggggggggggggggggggggccccgccctcttttttagaagaaaaaaaaaaagaaaagaggggggcgcgccccccccctcttttttttttttttttttttttttttttttttgttggggggggagagaaaaaaaaaaaaacccccccccccccccccccccccgggcggggttttttttttttttctctcccgcgcgccccccccccccccaaaataaaaaagaaaatataaaaaaaaatttttttcccccgccgcgccgcgggggggtttttttttttttttttttttttttttttttttttttagaaaaaatttttttttggaacccctcttttttccccaaaaatatttttttttttttttttaaaaaaaaaaatttttttaatttcccccccctttttttttgccctttttttcaaaaatttttttttttaaaccttaaaaaaagcccccccaaaaattttttttcccccttttttttacaaaaaaaatttttttaaatttttccccaaaaaaatttcccaaattttccaggggaaaaatttttttggtataactttttgccaaaaaaggggtccaaggggggccaagcccctttttcttgggcattttgccattttttggaaccccggattttttaagtaaaaaaaaaaaaaagatcttccggtcaattggccaaaaattatcaaattccttaaatttcaatttgcaaaaaaatgaattttttggtaataaattcacactgctttttcattcacacaattttcacagtttgcggcaaatgctcggtaagaaaaattttatttaattggccgtttaaatgctttaatgggatgtataaacaaaaaatatactgtaacatacagccagtatactgttgatgataattatgaagatgaagatgaaaacgattgagttaagttgaatcaaatttctcttttataaattttaaattggtgacgaattctttttctcattgcttttgcccataattattttaagcatttgagcacttgataaataaatgtcttcaaatgtcaatctgaaagtgaagggttcgataatgaattttaaattttctgaatttactaaaagataaataataattaattttaggagttaaataataaataatctaaatgaatttgaaatttctgaattgattgaaaaattaaattaa

SEQ ID NO: 31283 - DNA, 1062 bp, Heterodera glycines
  unsure (1)..(1062): unsure at all n locations
atgatcttttttatcatatgtttcccaataaattttctttttggttaaaactatttttaatcaaaagaggaggtccggcggtacaaatacgccgaactttttgaattttaggcttaagggcttccatttattttttgggtacaaatttatgcatttaaggaaaatatggtgtgggcgacccaaaaattttgatttttcttaataattttcacaaatttttaagtttggaacatatcgctctgcctctgatcaaatttttgtttaggcagatttgtacgccgattatgaaggagatggtgatgatgataatgaggaggacgagcagtactacatgcatctgatcgcgcacaaagactcgttggaatttggctcaattatggtggtgccgccaaccgagccattaacaacagcagatggcaattgggtgcccaacgaaggcaatgttagccgtctcagcagtcaaatgagttttagcgccgatggcttaatgacaccgcttggcacgttggacacgcaagagaccggtgagttatggtgatcagtattggccaaagttgaaattgatcatacgtgatgtttaggtctattaatagggcttgtaattatatggaaatccatttttatttcctggactgtgggaggcctgaaactcacgaaacacatatttttagcttggtttaaagcagggtagccagatgtgatgatttatcatcattttgctgatttcaaggggtcgatgatgattttatttttgagatgatgatttgctgatttttgagaaatttgatgatttatgctgattttttgaaaaatcctcaaaaatggccatttttagcctatcgacaccgccggccccgaaaattcctctanattttagcnaatttgccaatttacgatgaaaatctgtttaaaaaatggttaaattttcaaatttttactccggcggcgcctaattcaccgccggatcccaaaaacattttacatttttattgatttttttattcgaaaaaattttccaaaatgctgatttttgaccccaaatgnnatgaatgatttgttgtt

SEQ ID NO: 31284 - DNA, 2007 bp, Heterodera glycines
  unsure (1)..(2007): unsure at all n locations
tggtcaatttaagtgaattaaagctttaaanatagcaaaaatcgggnagaatnttatgagattatnntgaaatttataccacaaaaacaaaaanagttattccagaaattctggaaatnttctatttttcagaaaaaaatttatatctcggttctgaaaagtcattagggaagagtaaaatactacaaaaatccgcaattttttgctctattaaataaattttatttggcatttttatcacatttttaaaaaaagatacaaaaataaaagtgattttgggattcgggaccaaaggggggtgaccaggattttcgagtggaaaaattttttcaccaaaaatcttccaaaaacatgttattaggggttatttgggccgctgatcacgaatacgtaatcagattttacttttgacatcgttaagacctcagaatccctgtgtgattggggattctgaggcatcaaattgaggggggggggcaggttcgaatccggacggtgtaacattatttttttgtgcatttttacgttattttcaatgattttaattaatttaaaatattttgttgagttaataaataaaaaattatatttaatttaatttttttttgataaataaattttataagtttaaattaattatttttttaattgatagaatttcatgtatttttttaattaaatttgttaaaaatattttcattttaatttaatgaatttactaatcactgttgtatcaatttatatttaaagatttgttgtaaattaataataaaagaatttatgtaaaaaataataattatcttttaataaagaatttcatattttttttaattgaatttataaaaattaatttcatattaatttaaatattcaattattgtacatttcaaaattctctttttaattaataaaaggaataattaatttattttttaaaatttataataaattgcattcaatttttgtacctcttctaatcacttttgtacctcttctaacaattttgtacctcttctgatcacagttgtacctcttctgatctctgttgtacctcttctaatcactgttgtacctcttctaatcactgttgtatctcttctaatcactgttttacctttcttaatctctgttgtacctcttctaatcactgttgtatctcttctaatcactgttttacctttcttaatcaagttgcacctcttctaatcactgttgtacctcttctgatcactcttctaatcactgttgcacctcttctaatcactgttgtacctcttctgatctctgttgtacctcttctaatcactattgtacctcttctaatcacagttatacctcttcatcaaatttgtacctcttctgatctctgttgtacctcttctaatcactgttgtacctcttctaatcactgttgtatctcttctaatcactgttttacctttcttaatctctgttgtacctctttttatcactatagtacctcttctaatcattgttgtaccacttctaatcactgttgtacctcttccaatcacagttgtacctattctgatctctggtgtacctcttctaatcactgttgtacctcttctgatctctgttgtacctcttctaatcactattgtacctcttctaatcacagttatacctcttctatcactgttgtacctcttccaatcacagttgtacctattctgatctctggtgtacctcttctaatcactgttgtacctcttctgatctctgttgtacctcttctaatcactattgtacctcttctaatcacagttatacctcttctatcactgttgtacctcttctaatcactgttgtatctcttctaatcactgttttacctttcttaatctctgttgtacctcttctaatcactgttgtatctcttctaatcactgttttacctttcttaatcaagttgcacctcttctaatcactgttgtacctcttctgatcactcttctaatcactgttgcacctcttctaatcact

SEQ ID NO: 31285 - DNA, 1112 bp, Heterodera glycines
ttcttcctttttctcctccccctcttcctcttcatcaaaatccacttttccgtccttttggttcttaatgtggtcctgatttcggtacatctctgcaatttgttctgatgatgttgcattttcgggttttttgtccgctaaattaccaaaatataaaagtaagtggctcctttaatcgtttccctcgtccatccttcttttttttacctcggtttcgaatgaaacgcggaaagcgaagtgaaatgcctaaaaacgagttttttgtgtctggaaatgacgaagaatgacccttctcagcgtcgaccaatccccgcgcagccaaatgacgtggcgaaatggacatgtcggccgccttcacttcccacaccaccgacggttcaaaccaatggtcgggcgccaacgaagggtcgaaggcgaagtacgaacggggctaaaagtgtaaacagaattggaaaaagagagtggaaagggaaacaaagaccttgtcaatccgaagctcttggaattctttaaactgacttttcaagtcttcgtctttgaacccagtgccaatctgaacaaatattagagttggttgcgaccggaggatccccgctcaaaccggggaacgggaaaaccgaggacccgcggaaagaaggattcgcgaagcggagatcccgtacggggatacttcgaatttatatattgtaattttggaattttataattttgttagtttttaatagatttcgtccaaactatcaaattttgatttcattataagattctaacaataagaaagaactgggtcagatggtatcacaggcgtcaaaccattttgaaaaaaaaattcggaacctttgcaaaatgctgccaaaattataggccaaaaaccatgaccaaaaaataaaataaaataaaaaatgtttgttttaattgtatttaaattttcaaaatatgaaagaaaatgtattttttaagagaaaaattttaaaaataatagcaaataaagaaaccatacccaagaagttaaggcaacatttacagcttaatcacagtaaaacggagatgaaaaccatggggatcaaaaaatgtgaattttctgtatcaaacctttgcaattgattcgtact

SEQ ID NO: 31286 - DNA, 1214 bp, Heterodera glycines
aagaaagcaatctcgaaaaagcatgggacaattgagtcgacagcatcgctaattggcagggggaaaagattaaacgaagtaattaacggacagagggcaaaattgtcaaaaatgtggcggatggaaaagcaaagaatttcgataattcatattcaaaagccaaatattcaaaattatttctaaaacaaatatttgtttttataatattcaaaaagaaaaagttatattttagcgaattttgaagcaattaaataaaagtcttttcttatcagtgttatcaattaagtgtttgttgttttgctctcattcatcactttgttcctaattagtgagttaaaatatgtaagtctaataaatgtgaagtaaattaatgttttttaaaatgcctaagtgctcaattatacggcttcccagatcctcggatcatcatgccccacgaatcacttatccgtggattgaaatccgtatgcataaagatcggattcggtgatccgtggatcaacaatccatggatttttcgcggagtatggacataaatttttccaaattaagaagaaaattctcaagaaaatgatattttggaaaattttagggtctttagggataaaaaggccaattttgttggtttttgggcggttctaatagaggcttttggaaaaatttaatatggcattaagaacaaacaatatagaaatatggacaaatcgcgagttttcgtgcatttaattaattctaccacagtccaggaaaaaaagtatggattttcaatataatttaatgtccttgttgatcagatttataagaatttaaaattgtttggaattttcccccttttaaattccgtttttaaatcctttttacggacaccaacttctggtgacatttcttttagctaagctatttttatattctatttagttaagcttctatttttaataagttttataattgccatattttggctggcaggagaattgtcattgaaaatgaatgaatgatttgacgatgcaaaaatggaaaatggcgcatcccaaaaatatctctccctctttccccctatcactcgttccttctctgatccgcttctcttctctctatctatcctaacacattcactaatccttttttttctacggcaaaacaggttaatacaaaacaatgattagcgaagcacacgcccctcgcgccctcccttcccctccccttcccatccc

SEQ ID NO: 31287 - DNA, 1697 bp, Heterodera glycines
atcactattgtacctcttttatcactgttcttcctattttaatcactattgtacctcttttaatcacttttgtacctcttctcatcactgttgtgcctcttctaatcaatcacagttgtacctcttctaatcactgttcttcctcttttaatcactattgtacctcttttaatcacagttgtacctcttttaatcactgttgtacctcttctcacactgttgtacctcttctcatcactgttgtgcctcttctaatcactgttgtacctcttccaacacatcttccaacaatttttgtacctcgtatgagctcaacaacatttaaatacgggcgcgaagcgcccgtccaaggccaacaaaattgaaaaaccgggcgaagcgcccgactgaggccgcgaagcggcctaacaagctaaaaaacaggcgcgaagctcccgtctgaggccgcgaagcggccttaatagcctaacaaattagaaacgggcgcgaagcgcccgtctgaggtctcgaagctgccttaatagccaaacaaatttagaaacgggcgcgaagcgcccatataagcccaacaaaaatttaaaaaacgggcgcaaagcgcccgttcgatgccgcgaagcagcctaaaaatcgctgataattttttaaaaattcaaaatctccacaaccagagctaatctaggtagcgaagctcccaaagcgcgaagcgctttttcccagctaaatagccgacggttcacgcacccgctagttatatatatgttatatcgattaggcaactcatcttcaaaaacaaaatctcgggaacggctaagcgtacagggctgaaattttgcaccgaggggtagctcgagacggcgcatctgggaaaactataggttttttggtccgaggcccaactgagtaccagggacttttttcccatttttgcgtgcgtttgaacgcccataacttttttcctaaaacctgaaccaaaaaatgtctgctggtaggaacctaagttgaagtgttttctaaaaaacaaaaaaaaatccaggcctctacctataataggaaagcttgtagacttggctagaaattcagtaccaactttgtccacttcagtaccgggcgaataactcgccagggtttgaactgagcggggggtggccagcggacttattgtagagttttgtaagcccgattttttcaaattttaaaatttcgaaaattttctaaatttctcgagctaggccccctaagaggttttggggtttttgaattttatgattttttgccgatttttccggggaaaacggagaccactttcaaacaaccgtttttcgagctctatcgattggtgggatttttggaaaaatttcggtttttttccggaaatagaaattttttttggcctaagcgggacatttgagtcccgggcccataactcgtcaggggtcggttttagcaaaaaattgccttagagaaaaattgtagagctttttaagctctattgaatggtatattacatgttcgaaaattttcaaaatttttcgagctaggccccctagaaattttcggaaattttttttggggcgagaaagtgggtgaaaaaattttttctggggtattttgaggtgctgagcacgaatatgatgtttgttttttgttagggaaattttggaattttttaaaattttttgaaaatcggtcactttttt

SEQ ID NO: 31288 - DNA, 1842 bp, Heterodera glycines
ccgatcagaggggggcgaagctcggcttagtactcgaagccgaagccgaaggcgaagcccaatttttattcgaagccgaagtccgaagctcgaagcccaaaaaacccgaagttttcgaagccgaagccgaagttttttcaaaatttttttttaattccaaaaaattttttcatcacaaaatttcggttaaatatcaaatagaccaaccaacaacccccttcgataaataaatataatgattttttttaacaatgtattttctaaatttcaatttaaaaaataaagggaattttggaactccggcggtgccgataggcgccgacgggaaaaatttgaaattttagtgacagatttagttcaaaaatgaaaagattttcgattttaattgttaaatttatattaaatttccgtcgaaaaaagaataattttgaaaaattagaagaaaagaaaggacttggatgggaactgatccaaagaaacttaatgaaaagagcaaagagccctaccactcgaccatgcgtgtgaacaaaaaaattaaaacaaaagattaataaatatatattaatttaagtttatcaaaagcccatcactaagggtgcattttcacattgaaaactcaatctttaggggtgtatttttcccgaaacttcgggtaaaatagccgaagcacgaagttcgaagctcaaaaaacccgaatttttcgaagccgaagccgaagtttcgcccacccctggccccgacagattttctccttgcccaatgtatgccattcagccatttgtgtctttgtgccatcaatcacttccgacactctcaatgactttttttccttttttccgccggtgtttgtgcataagataaataaaaattatgtaattcatattggtctctgctttttattccctttttctgctatttgctaacaaataaaacatacatattttgctaaatacatacctatttaataattaacctttaatgttttccttttaccattttatgattaaaatgatgtgaggcgtaacaaatcaattgcatcaattttattcttccgcacccattcaaaggctaacaacaaatttttaaagtacacaaccggcagaaaacaaacattttcttttccgtaaatatatgtataaatccatccatttggcactcttgacttatacgatgttttccgtggacggatcccgacaaatatgataccaatcgatagctctcaacaagacaaatcgatctaggggtgggggaagttgatcagaagcgattaaaccggttaaacctatttgttacctttacacaacatgcttttacaatttggcatcagttcccgatattttcatcggacatagcattttgaatctcacgcattcccacataaaatattaattcaaatatacaataaaattatttttaattaaaaataaattatattttaaataaaaattcttaccattttcattttgcttttacaatttgacttttcgtctgattctgttgctcatcagccacaacctatgagaaattgactaaaacaaaatcagatattataaaaaataggaataaaatttaatttatatttttgtaccccaacgccaattaaagcgataagatgggccacattgaaagtgagcatgttgaatttgtacaacggtcgaccattaatgaatgactcattaatgagcgggatattaaagaccaaatgacctccggagaaaaaaaaaattacaaatttgttctgaaaatgccaaaaaaaacggaagggcagatcccttggataagtttacctttaaataattaattaattaacgaccagccccagaaaatggccctccagctaaa

SEQ ID NO: 31289 - DNA, 899 bp, Heterodera glycines
  unsure (1)..(899): unsure at all n locations
ggaaaggacaagcaccaacggggggggggggggtaaagcagctgaagacttgaaaagttgaaaagggggaaggcaacaaaccaaaatagtcatcggcggaggaggaagaagtgcatgcaaacggagaagaggggagacaaaaaaaggaccgatgagaacacttgttgagggaggggggaggggggggggggacaatgtccgttgaatgacccttgaggacggaatttaattgacatttgggcagcgatcctcccagggccaacggcaacggtaatggtaatggtcggacagattggcaaaagaacacatcggaaggaaaaagaagatgattggctaagaggaggagtgcatcagtaattggccaaatcgggagcatcattttatggccactaattaatcaaacgcctaattgactaattaaactcttcatggcaattttctacatatttattaattgtccaattaaatgtacaaatccttgtcctgttgttcccgttcccgtctccgttttcttccgctgaactgcttgtcgtcctcgttggcattgctgtatttgttccaccgccttctttcggctgtgtccgctgtttttcccccgtcgtctgtcatttgtgtcttcaaacaaacaaatctcatcagcgaacattgtctcattttgcgacccaatctcgggatgatgatcatcatcatttgatgatgatgcccacagaatcccttccgccccccaatttctccaaaccttccaccaatttcccctcctccgcttcgccttgcattttggggttggagggattgctgtttgatttgttgaggaaaagctgcgagggatgcgtgcgcggaattggtttggatttggaggttggaggagacggcggagggattgggcggtggnggggggg

SEQ ID NO: 31290 - DNA, 773 bp, Heterodera glycines
cacaaatcatggtactgtaccaaattcagtaaaccctaccggattcagatttgtcgccaacacattcttccatggaaatcatacgcattgtaccgtacatgagttggtcagttgcactgtgtattccacttgaacaccatggttttgtgatgccccatccggcgacaacaaatggttgtgaattcagcatgttttttgtaccgtcagtaaatttgttggaaaatgagagttttgagtttgaagatccttgaaaaagaatttttaaaacaaaaaaaggacaactattatataaaagccaatccaaaagcacaaacacaccaaccaatgccaatgccgaataagcaaatgggccgaacggttgacgaaaaagtgattggttcctcactctaacaaataaatgaaatcccatttcttaatggtattttattacctcaattaaagctaaatcaggtttagctatatgtatgatgtcctcattcgtgaatgtgtcttttaaaaccacagaaatggcattttctttgaatttgacaattttattgcgtattgtgtgcctttgttttgaactttgagcagcaccataggtaatgatgaaggggcctgcaaattaatacatgtaaaactctttatagatttaaagattttttggtttttattacattatttaacggtttaaacccgggatttttaaaattttcggtttttccgatttaatttttcttcaagatgcatgctctaattgggattttttaagcccaggaataattgctaatgtt

SEQ ID NO: 31291 - DNA, 1322 bp, Heterodera glycines
  unsure (1)..(1322): unsure at all n locations
ttttattgccgcacaaatcgcctgagggtgagtgccgcncctcagccaaaacggtccctttttgtcgtccgctcacaccttaacgaaaaaagcaccgaacagggtccaacaacaaaaccacacggagaaacgaacgcaatgcgttattaaacccgttttatttcacaataaatacaataaaaaaggcacattttatcatggaaataaattaaaatttgaaaattaaaacaaaaaacaaacaaaaattcacgtgacaatttgaatggctgtcattgtaaaatgttcaatcgcttttctccaatcgccgcccgaaagagaaattcgaatggaacgaacattcttcagggaaggcctggcaacaagcagaaaatagtcatggagaggagccgaattcggtgggggaaaagaggaaaaaagggaaaaagcatcggaggaaaaattggagggggaaaaggaggaattgaaaagggaggaaaaggaggaaaggggggaaaaggagtggaggaaacggacacggaggagcgaattgggcaacggaacggaagacaaattggcggacaattggatgacgaaaaacagacgaaagcctaagagaaaaagcgaattaattggaaggaaaagccaatttaaaccaaaaatgagaggaacgcacctcggagttccgccatcggattctgtgcgtacccaaattcgaccagtgtcagtccatcgtccgtttcgtcggcgtcgttttgtctcaattccgtgccgttcattgtaatcggtgcgttcttctcgtaaaatgcgtgccattgttccgtcgttgccctttcggcctgtacttcgtccaacggtggattttcgttcactaacggcgcaattgctttgttacggttgaagcgcgtctcggacaaattctgctttttgcccggcagcgacgaatggcggccgatgtgttggaaaagcggcggattccgacggaaaacgacgacgttcaaaatgttctgggcaaagagtgaaaaagcgaaggaatgaatgcttctgatcgcagcttcgcaaatgcttctcccttctttctcacctttttgatgcattgcttttcgctgtcgtcgagactgcaatattttgaagagataaatttggagagaggcgggcgaaggcccaccacgaggccgcgaagaggccgagtgagtaccttcggtgcaggaaaattattaaattttaaaaattttttaattgctttttaaatatgccaaaaaatgaaggcttaacttttttagtgaaaattcgatcactcctctagtaggctaattgagcagaagcgtaccaaactttgcagggat

SEQ ID NO: 31292 - DNA, 1255 bp, Heterodera glycines
cgaccgtgacgtgagattgaattttgaggatttgaagccctacaaccaggaaaaactcagcttataaatagaaaatgatcattaatattgccaaaaacaaattttttttgttaaaaattttgatatttaatcaactgagacgcagttggcccgtttcgaccgggaccaaccgggaaatttaaaaaattcaaaaaaattcaaattttaatttatttcatgtgaaaataatacaaaattaaatttttattttgttttttatttaacaaaagccgaaagttaaagctaattaaattaatgaaaattttcaaatcaaattttcttcaattatttcaaacaattaatcatttttggactaagtgatcgaatattattagaaattcagatttacgtttcacataacttttttcggcacgctttttccaaaaaatttttgaggaagaaaggggtccggcggtgcctataggtgccgcaaggggaaattttgaaaatttgagtgtaatttgttaacagattttcaacaaaaaaggcaggtttttgggattattagactcaatttgtaaacggattttctttaaaaaaatgataaacatgtatcaattaaaaaaacaatgaggaatcatattttgtcgataggaaacccatgagtatacaaaaagaaaattatcgcaattaccaatgaatccttgataaatgttttttaaatattaatattaggtatttgttgaaaatttgttagtttttataaagaattttttggaaatttgataaatttttatttgggacccaaacgtgtggggcccaaacgtgagggcccaactgacatagaccggtagtttttgtaaaaatttttggagtcgattcttagggtatatttttcatttttattgcatttttgttaataattttgggcaaaatgccaaaataggcaaaaataggttctttcaaaattttttaggctttttagacgctaaaaataaaagcctagaaaataggcactaattatatacactttcaatctcggaagtattctttaaagaatgtatttacccggggtgtgctttatgtatccaccaaattccgttccaaattccatggggaaattcctttatgagaagaccaagtgatcgagaaatgctttacgcagtgtaaaagccaggcggactgatcagctaagggtgtgggtgattggtctagtggtatgattctcgcttcgggtgcgagaggtcctgggttcaattcccagatcaccccagat

SEQ ID NO: 31293 - DNA, 1820 bp, Heterodera glycines
  unsure (1)..(1820): unsure at all n locations
atttttaaagttttttgaaatttttttaagtgcacattggtggtgtctgcaaaaaattttncaccgggtttaaaaaatctaggaaaattagtaagcatttgtagtgttccgatacgtattcctgcaaaatttggtgagcccctgatcaattacaaattatttatggacgatcaaatttttagaaatttttatttatttttgcataattaattcataaatatttttttcagaaaatgctctgaaacgcaccaaattttatttacatgctagtttaggcactctgatgctttttctatcaaaaagggagatgaataaatttttaaaaatttttaattcctttttaaacaggccaaaaagtttaggcttatcttttttttcagaaacttatcaaaagcgccccaaactttgcagggatactgaaaggaaaagaattaacctgttttatcacattagcttgtcatcagtttttataaaaaattttcaaaattctgagtctcctattattttatttttttttcaaaattttgaagggcggagggggggcgaaggcccaccacgaggccgcgaagcggccgagtgagtacctcggtgcatgaaaattattaaggaagagagttcattatttgtttattttttgcataattaattcataaatattttttccagaaaatgctctgaaacgcaccaaattttatttacatgttagtttaggcactctgatgctttttctatcaaaaagggagatgaataaaatttttaaaaatttttaattcctttttaaacaggccaaaaagtttaggcttaacttttttttcagaaactgatcagaagcgcaccaaactttgcagggatactgaaaggaagagaaataacctattttaatattatctagtcagttcatttaaataatttttatccaaaaaattttttttttgtttttcggggcagtccccctgaaccgatgcgcccagatttatggggagaccgaatccttccggaatagcttcactatagcctgtactctaattctgcgttggatttttgctccccataattgtttgagtaccccaaacggacacttgaaaaaatcgatttatttttgttttcggggcagtccccccgaaccgatgcgcccagatttatggggagaccgaatccttcgggaatagcttccctatagcctgtactttaattctgcgttggatttttgctccccataattgtttgagtaccccaaacggacacttgaaaaaatcaatttttttgttttcggggcagtccccccgagccgatgcgcccagatttatggggagaccgaatccttccggaatagcttccctatagcctgtactttaattctgcgttggatttttgctccccataattgtttgagtaccccaaacggacacttgaaaaaatcgatttttttgttttcggggcagtccccccgagccgatgcgcccagatttatggggagaccgaatccttccggaatagcttccctatagcctgtactttaattctgcgttggatttttgctccccataattgtttgagtaccccaaacggacacttgaaaaaatcgatttttttgttttcggggcagtccccccgaaccgatgcgcccagatttatggggagaccgaatccttccggaatagcttccctatagcctgtactttaattctgcgttggatttttgctccccataattgtttgagtaccccaaacggacacttgaaaaaatcgatttttttgttttcggggcagtccccccaaagcgatgcgcccagatttatggggagaccgaatcccttcgg

SEQ ID NO: 31294 - DNA, 2074 bp, Heterodera glycines
  unsure (1)..(2074): unsure at all n locations
taatttatacgtttaatttaaataaatcaaattaaaacattaaaaataaattaatattttaatttaaaatttatttgcttattattaaattgaaatgtgaggccagaaaaaattagaacaattaaagttaataattttaatatgtataactttataaaatttaatttaaaacaaaatgaaaaattaatctgataaaaggaattgtcgaaatataagataacagttaaatcttcgggtacctgtttggttatgtgattttcctaactaaataataattcattattttttcgacctaaatccaaaacttctttataggttaaaaaagtaaaaaaaatatgaaaattgaaaaaatggaatgataattattcttgaaaaattacatttgagattttctttccggacacaaaaaacacacaaaaaaaaatgccgcgatggacaaaaaaaggtgcaaaatcaattatctaacttttcctatgattttttatcaataaataatatgtcagttttatttgatttttaaatatttatcaaaggtttcaattccatgattcctaattatagaaaaacagaaatattaattttagcaacaaacgcattgtgtaatacagtgtaaaatgaaatgttttacagatctcatatttctaaattaaaatttacattttatgatgaataaatgttaaatttctcagaagcggatgtagataatcgatagtcttagtgcacaatttctggctcagcaagtcccgtttttacaaaaattcccgggtccatttaaacttttttctaatttctttgtaaaattatttgtacgaattacggcactaagagtaatatgctcctttttaacgcttcctcactatttttccactaattttttctttttgaataaaaggtgatgatttatttcagttgttaaataaatttagagatcctatgcatttaatgttaaaaattattaattaatttaaatttaaaacaattgaataactcggcaaaaaatcagaacaaaaaatctttaaaaataataatttcattattttacaatagatgttctgatgaaaaaaaagtttctttctagccatataattattataaagaggagccaaaaaataaaattgctaattcataaaattatttaaatacttatttacttaaaaaagccaaccttttgtaattataatttcattataaatggatttattattaaaaaaacgaaaacataatcaaaaaaataaagacatggaccatgattagctgacctgtattgatttataaatttccattttttattggttttgaaaatagaacttcacaacaatgtataaaaattaatctcaaaattagcaatgaattaatatttttcttttttgaaaatattgaaattaatattttaaaaaataatatctttattatttataaataatttatataccaatattccagttgaatattttcaaaatagttaattaaagttaaagaattttttttttgtttatttagtaaaattaatctaatactgccaggaatagtgattatatatgaagtaggcgtaccatcaagataaaaaatatttgagggaaaattaatttatgaagttaaataaataacaaaaattaaaaataaacaaataatttaaacaaatataatatttatttcaagaacaatgcgtattttaatatgtacaatttcaatttgttataaaataaattttctttattacactacaaaacttaacagtttaatgttgaaaaaaataaattaggttaaatatatgctatttttttgaaagtgtaatatttattaactttttttcttaaaatgcgtatgactcagaatgatttaatattttttggatgggttttattatttatttttatatactcatatcaatcatattataaaactaattatgaaattataaaagcttatataaaatttattatttataataattaaatgcattttaataaagaatatttatttanaataattgaaattagttattcccaattaataaatatttttaaaaaaataatgtaaaattgaaaaaagcataaattaaaaaagaatcatt

SEQ ID NO: 31295 - DNA, 2043 bp, Heterodera glycines
  unsure (1)..(2043): unsure at all n locations
aaagtttaggagggaggaaaggggtcataagagtgtctttgtaatgaaaaggaaggaacaattcgaaaatgatggaccatcgacggactgactgatcattttgcctgatcagtcctccccttttgatcattcttttttttcgcatttccccaatctttcaacgaatcacccaataaaatcgttaccgcttctgtttgtgtgaagcgcttaaataaaaaggcggaggagagaatcccccggggctggcaataaagtgagatgatcggcgcaataaaaggggggggggaaacgaaagtcgtcaaaagtgcgcgcgaagcgatttcgacgggagaaatggggaaatcgaacaataaacagaagaattttgtgaaaataacgaaaaaggaaaggaaaagaaaggcaaaggcaacaaaacaacagcagaaaagggcaattcgaaaagaaaatttaaaaaaaagaaaaaaagctaaaaatggcaaaaaatgggggaggggaggaaaagatagggcacaaatacgaaacacggagaccccacgaaaacccatgggaggcaaaaaataccaaggaaatgcaaatattaccgaaaaatagggattaaaaaatacttttaactattttttgtatgttaaatcaaatgtgatactccccgcccatccgaaagttgcgaattaatttaaattttatttttctgtgtgttttaaacgacatatatacagacgtaccatcgaacattgagagattgaacagaatgttaagcgctgagtttcgtctttccttcggcacattttgccccaaaagtgccaccaatttggccaggtttttgttgacgatttcatgaccaacagagggaacggtgctaagattgagcagaagaaaccctaaaaatgcgacggcaaattgaacaaaaattcatccaaaaaatgggtataccaaaaaatgtttctggtaattcatttgcattggcattcccttgggtaatttgcggcggaagaagcgaatcaaaaaaaaataaaaataatgattttataattaaaatcgaaaaagtaccgaaaactgtgtccagaaaatgagtgtcgtgcttcgaaatttgttcaaacagtcgcaatggacaaaaacgggacaaatttgagagaagctgaacaacggagacgcattttgttgcatttgaaagttgcaattgcaaacaccgcttaacgagtgaggccgaatcggtcagtttttctgcaatttgaagagaatgggcggagatgttgatcaaaatggccaaaagaaggggcaaagagtccgaacgatcagtgccaaaaagacgcaaaaggtcgtcaattaacgcatcggaattggcaccccaaaagtcggaattgggggaaagcgaaagcaacaattttagggcggacagctgaacatccggacgagtcccatcggagagaaacactctcaattccatctccatctctgttaaatttgaaaattaaaaggataaatgtttaaaacggaatctaaaattggcacgcattcaaacaaaatcaaagatttaggtccaaacttcgagactgaattgatttctttttattcttgcattagttaaaaataacgccaaatttaaaattttattaattttttgaaaagaaggaaacacttctgcttgttttttcctttaataatacagtagattcttagatttatgcacaacaagggcgtatgaggtgggtgggggtttctccagcctttgacagacaaaattttcggggaatttcctctccgatccccgacttttctctctcccgagggtcggggaggtgccctaattaaattatttaaatttggactcggagctatcctttgcattttagtggcagtgatggattcgttgaagtgttcagaattanagtccgttgggttggacccgaattatggtataccgtagtttaatttggtatttgcttacagaaattaatttttgtccattttaanggtgggacatatgcaaagtgcggaaaacaacagattttatgtgagtttattgctttttcaaatttaaacccc

SEQ ID NO: 31296 - DNA, 1445 bp, Heterodera glycines
  unsure (1)..(1445): unsure at all n locations
ttttaattaatacagtctggcgccgaatctttggcgctgaaacgacccatccagtctctttgccatcggttttttttcattattcgcctcatgccgttcggatgtgtttatacgattctggcactcacacagtgtaattaccgacacctgcactttaactatccaggattctgcaaggagtttaataaatcctgccgcttgttttctggaaattttttgaccctttttaaaattttttaaaaatattcaaagtaagattgaaaatatataatttgcgtaaaggaataacaaatttaacatttcttagattttttgaataaacaacattttcacttattttgtcaaaaactattagaaaaatgcataaacatattattataaaaaatattaaaattttttagatttataagcatgagaatataatttttgtttttaggggcattaaaataaatctgaaaacatatcttggaataatgccttcaattgcactgattatcgctttcacgacatggtcttacagtcttttttctgtttggcataaaacactcaatttgcctaatgatgatgagattaatttgattgacagcatttaaatgagaacataagcaattttttggtttatcgtggaagaaatgtgagtaaaaaaaagttttgatgagataaatttgagatatcggttggaataaaacaaaattttaacagaaagataataaagaatgctcacacttcaattttaatggtttcatatttacacaaaaaacttattactaaaaacaattaaattttgactaaaaaaatttataaatttttgctaataaaaaaacataatttcaaaaaactttgaccaaaaaacctttgatttatggcaataatttttttttatttaatgaaattttagaggaaaattgttaaaaattagggctatagaatataaaaagattgttttatgtttatgtttaatttatgaatttgatatcacgatgatcaatttttcgtcaaatttttattttgattataggatcatttaactgttttttagttcattttaattttaatttttgtttattttaaattttttaaaatttaaattttgataacaattaaggatgatttgtcacagcaaattgtaagaggagctgagacatttgattttgcagtttgtttttgtattattgccatttgtgggtacaaaatgaccaggtttgttgacaaaaaattggacataaattcaacacgacgacgacaaatcaacaaacaaatcacactcaatttatgcattcaggtactgtatttaatacatcttgtaaaagtcttgtcaattttttagaatttaatttaattttagtgaatttaggcattatttccactaagcctgaacataattggcattttaatcattgcatcaatttcgtttttaaattttgactcactnaaacttacaaata

SEQ ID NO: 31297 - DNA, 1564 bp, Heterodera glycines
ggtggcttatgcacatacttatgcaaatactttactgaactaacactattaaccttttcaaggttaatgtgacacttgaacattttcaacaggtacaaattgtgtgggacaacccacctgttgtctaatgcatgtcttcttccatttgcaaatacttcaacagttcttccatcatttggtcttgcgtacaatgccaaaccattttcaagaacaattgtctcttcttgaaatgctttaggatatcccttggagcatttcctccctctcattccattcttgtcaacaaattcttccatgcatggacaatttgggttcaaatcaccacatggaccatggatcataaatcttttaaccaattcaaacaaatcaggcactaattctttatcaggtattctcgcactaattcctttcttctcaacatcttcgccatttatcattttatcttgttctgtcaatgtcaaaagcaaatgaatgtgcggtagtccccttccttggttctctaccggatacatccatgcaatcacttcaccaaaaatctttttcttagcaatctcattcataatagctttaacttttaagttaaaaactctgacaaccaaatcaggtctatcaattgatgtctgttcatgaaacaaattctctgaaatctctgcccattgcgggttacatgtcattgtcaaaaacatgtcaggcttaccaaaccgtcgaacaacggccatagcatcctgaaaatacttctctacatatctcggactatttgtcacacttggaggaagaatgaccttccttcccagcggcaaacctctttcttgagctcgtttcatcaacatgttatcaacattcttatatgcatctgccaaaatcttcttttggttgttctttatccaattcattctatctccttcaatctttacatattcatcaacacaatactgttgaaagagctttccaccgaacaaaatcggattaaactctctctctctaattgctaatgtgtagcacacatattgcaatctcgttactcttctgttactatttctatgcttcatttcagggtgccaaccaagcgtaccacgcggataaaacagcgggtaagtcattggagttaccattgaatctgtgcccttcaaaatcttcaattcctttccacgttctctcaccacaatcttggcattaggtacttcaccgtcagccccaggtacataaactgcagcaacttcattcgctcgaggtacattgtactccaaacgtctgtccaattgccttccggtctcaaacaaaagcttgatctcggctggctctctgttctcatttctagctctctcaacttcttcatcttcttcttctttcatcatcatataggcttcagcaaaaggattcacatttttaatcacttcatacgcagttctcagcaattgagggtcaattccgatattggcatctctcattgctctcattgcattttctagtatctacgatgaaaatctgcccataagtaggatcatcgccatcttctggattcaaagccaaattcattctatgataaatctgaccgtaaatgcgg

SEQ ID NO: 31298 - DNA, 1779 bp, Heterodera glycines
  unsure (1)..(1779): unsure at all n locations
atggttaaaaaataaaatntaatgcatttccgtntattntcatcaattttcctcataaaatattttccctttattattttcttttgaattaaatttattatctatcatcaccaaattttttaatttattggttaaaaaataaatttaatattttgtagtgaattttcctcctaaaatatttttccctaattattatttttaattaaatttattcggccttttaattgatgcaaaatctccccacatttaccactgtgtataattttatccacatttcttcttttttaaataaatatttattctgtcactgttctctcccctccctttttttgcccattttctctccccaaattcgcccatttttattactcataatcaattcgaattttattcttcgcttcaacacaattttcacagaccatcataaatggatttcatcactttttaaatttgcagccgatttaaaattaaaaaataaaaaattataaaaaatccaaaaattcttttgcctttgtttcacatgcggacacatgtttttcccatttaaataatatgctaacacaatgttggcttcacatattcacataagctggccaaagcaattaggcataagaaataatttcttgccaaaaacgcggtttttccattttttcactgcgtatttttgcatttaaattccattttttaaatttattacaaaatttttcggctcttttaattaaattttcgaaaaaatgattaatcatcacacaaaaaatgcttttggcccttaatttttgaatttgttaatacaaaatatattattatttctgtcccctgctggggaaacggagtttcccaatccaaaaaaattgcttattttctcagctttttaaagcgttttttcggcataggcttgctgaaatccaacaaattttcgattttttttctctaaaactaaaatagtcttcccccttctgctgatagaaatgaattttcacgaatttagtgaccttctccgtttcctcctcaaatgtgttctgtgagttggtgaaatgtcctcggcaacacttaaattaaattttattactttgattacatttcctcaccattcttatcaaatttcatttaaatctctcataaacagggcagtgactaatttggtccaaaatttgataaactaaaatggaatattttaaaactaaatattttaaattcaatttttttaaattttatcattttaatttgtattaacaataatttcaaattgcaaataccatttaaattatgctattttatttatttttagtacaaatttaaaataaattttaaaataataataaataaatgaaatatcattattaattttttgctataaattattttatttatgaaattattattatttaattatttctcttaggaattatatcattgttttaattcttttgcttataaaattattattatttatgaaaattgttattaatattttaatctattaatatttgaatcttatataattgttattattatttaattatttctcaattaaataaaattaaattttccaattcattttcatttcacttaatgaatccattcatttaatctgtcatcattccatttgttcatttcctttttctcgaaatgacaacacaaaaaatgagctgtcctcgcctttccccccgcggcggttccttttaattataaataattttaatagtgaaaaagaaattggccacgacattggcacgccattgattaggctcgccttttttttattgtcatgacgaccat

SEQ ID NO: 31299 - DNA, 1073 bp, Heterodera glycines
tgatcaatttttgatgaaaatttggaaatgaaagaagaggaaagtgaagaaatgtccacaaattgtgatcaattggaacaaatggcagaaaataatggtcaaatttgtgatcaaattcgaattttaaatgacaaacaaaagaggaaaattgtggaaaaattccataaaaaataaaattaataaaatgggaaagaaatactcgagaaaagaatggaataaaattgaaacgaaaattgctcaaaaatcgggtgttagttataggaaaatctacgaatggtaaagagaatttggaatgatgatcataaatagttattcatatgagcaaaaacttcaaatagtaaaacaatttgatcaaataaatggcaaaataaaaaaaaataaatgaaaaattggagagaaaaagagaaaaatgtcaaaaaataataacaaaatcagaagtattaatagatggaagaaagaaataaaaaacggaaagttggagaaaaaccaaagaatttttgagcaaaaaattgaaattgtgaaaaaataattcaaaataaaaaacgaatttatacaaaaaaatgggaaacattcgaagaaggaatggaaagaatttgatgcaaaaattaaacaaatgtttggtgttaattattggacaattgaaagatgggtaaaaaaattaaaaatcaatcaaaatgtttcaaagggtgaaatttttaaacaaattgttatttattaattaaatttaaaaatttttattatttaatatattacagggcagaagcattatacatttgcgaaaaaacggaaaaaataaaacaatattatcaattgaaaaaccaaaacccaaagctcaacgatcgccaaattgcggaaattttaaatattacaaaaagatctttagaaagatataaatctgaattcaagagaaaaagtgaaggtgtcacggattgactgagaatatttttcagttttcagggccattcattgttaggttttgataatttaaatttcttaaaatttatatattattcggcatttcattcattttcccattggtgcttatatgtagagtaaaagtattatgcataatg

SEQ ID NO: 31300 - DNA, 1423 bp, Heterodera glycines
taccgtcccttttttccctttataaccgtgccctctcggctttcgctcatttgtcgtccctttcacgggaagggcaaaatcgtgcaaagaaagcgacgtcagagacaagttgccccgcctattttgtgtacacacaaaatacgattatcaaagcacacttttgctgcaccgttgagaaaggtaacgtctttggacaatccgtcagtaatggataatagtcagtggatatatatcaactttttttttaatgagttatggtaaatgtgcgaaaacaatcttaataattaattaaattttttatcatttgatagaaattaatatagacttctaaaaaggatttttttctaattatttttaaatcatttttacattattttataaaaagatcttgttttttaaatgggaataattttcataataaattcggccaagattctgaaaagcgtctcgacagtgctggaccattaattccctttttctaaaatggatgctttttaaccaaaatttgtgacaaatagattaatgacctattgacaagcattaagcaaatgcatcttctctaaactaattaaggagtctgtccactagggcaccaagcttacattcacccgttgaccgatggaacaattaaagtttgatcacatcacaccaattatgccggatatcaccgttttagtgtaatattcgcaacttcgatgtaacaacttcgtgtccccctggctacgtttgccttgaggcttttttggctccatttgttgtgcccagacaatgactggtgtgtttgcgtgcttcacaaatctgtcgctttgtgcccattcctttcccttttggcaggttatcccgaacagggatgggcgaaacttcgagcttcgaaaacatcgcgttttttgggcttcgaacttcgagcttcgagtaattttcccgaagtttcgggaaaaataacctctaatgattggcttatggtaaaccttaatttaaatatcattattaactttttgtttttaaatcttcactacattggtggtccagtgggttgtgcttttggatccgttcctatttcccattggatcagttcccctccaagtgttttttcttttaatttttcaaaattaacatttaaaaatataatataattgtaatatttttaatatgtagacccaaaatttacatcttttaaccggcgataactacccccgccctatttttcttaaaaaatagactcaaaatcggaaaatattttcattttttgcttgaactaattggaactcgctttaataaaagtcttcttccttttctctaaaattaacaaacaaataagcagaaaggaagaatgggtaaaaagaaataaattaaaaaatacaaaatttatttctaatttctaatcatcacgcccgccgctatcatttcctcccccatttcttcc

SEQ ID NO: 31301 - DNA, 1125 bp, Heterodera glycines
tcctgaaattttttgggggaaaaagaaaggaatccaattggttgaaaggcctttttggttttttttcaaaacacaattttttttaacggtgggccatctccattcataacactgacaatgagcatgctttggtttcatttttcttctgtcctggaaagagtcgagcatttcggcgagtttttgtcgctcgtccgcgcttaacacttcttccgggtcgcacacgtaactcttcagaggcattttgcactttgcgaattgcccctcgcgcaacggatttggataatcgttgatcagtgaggaggcggacaaaaattggggacagaaaaatgggaggagaaaaaatggaaaaagcaaaaaggaaaactcagtagcagaagcagagaacatatgtaatttagcaacaataatattatattattataaaatatagatcaaaaaaaaagaaaagaaatttatccaacaaaagagacgagcaaataaccaaagcaattaagaaactaataatcaaataaataaacgattggtggtcattcgaaaaggagcgcactttagtaaaataaacaaaaaaaatgtaggaattacataaaatgaagcatatttcaattggtacatataataatacatagaatatgttacagtcagttgcaaagcaacggagcaaaatttatgcaaagagaaaaacccaaatttcttgagaaatttttacttctccaaaatgccatctttataatgaaaaaacaacagataaaatgagaatttcagaatagtttttttgaaaattcaatcaattgcctaacagtcatttttcttaatgcttctctttttgaattgacgacaaagctgcaaatgagaaatggtattatgtattcaaaacaaaaagcagtccgaaattctcacccaaatggtcacattgtcaatttgggcaaatattttcccaccaattcaatgacccactctttagtcaacatttcctccacaaatttgtcattttgatttatcaattgtttgaatttgatcttaaataaacgcaacaaaagttcatggtaattttccaattctttcgaaattttccgtccctttatttcttcatccattttgtttgaatttttgctgtctttcgctttg

SEQ ID NO: 31302 - DNA, 1179 bp, Heterodera glycines
ttattaaataaaaattatatttattattaaattccagctattaaaatttgttataaaacataactgcaattagcttaatttttattttataaatgtagcgggaaaagcaatagatatatttgaaaagatttttttttgaaaattacataataaatactgatgaataaaatccaagggtcaagtgtgaagcaaattatatttcgtgaaagaacttgtacttggctgctcaagaagataaagaattataaaatttcatttttaaataaaaaatttatccacctatttgaaaaaagaataatttgtaactaatattaattataaaaaaattgttaaaaggtcttcaatcaactacgtaactcaatgcagtcaaatcaagaatatattagaaaatatagaactaagtaacaattaaaaaacgataataaacaaactatagctctgtcgtagaattatttcatcaaaattttaaagcagacgtcaatcttcatttttcgaaatatgtttacaaaaataggagttaagacgaataaaatctgtttaattcatcgaaaaatattttctgaatataatttaattttttctgtgcatattaaataaaaataattttgtaactgaacatatttaataaaaatgaatgtaaatatttatcgaaaataaataggaaacaatatatttacttcttattttggcctcgaaacattaaaaaataatttaataaattaataatagaatttcttttaatgttttttcatatttgagtgatcttagaaattaattttttttttaatttcatttttattttcataaatttttaatagaaaaatgttaaaaagatgcaataaaatcaaatttaaataaaaatatacatggtatgaaaatacattatatctaaattgtaatataaaaaattatcataaccttgcttaaatatttcatagcactataagttcgctattattctgcaaaaaatcaaaaaactttattatctttcctttgaaacgcattaattatttatagttctatgggcttatttttataataattaaatttaaataaatacttattgtttaaacaaaaataattgccaattcttttgaagactttcatttaatgtggtcaatgctctttccgaatccggttcccaaaaattacattatccaaataaacaatgggaaatgg

SEQ ID NO: 31303 - DNA, 1190 bp, Heterodera glycines
  unsure (1)..(1190): unsure at all n locations
tataaaattatcaaaaaaagagatagccatttttctgggatagagtataaatntaaaaattccctcaaaaataaaaggtctattgcgcaccgccctccctactcatgctcgagagcatttgtatgtgtataaaatttatcaaaaaaagagatagacatttttctgggatagagtctaaatataaaaatcctctgtgaaataaaatggcgattgtgcacagccctccgtctcatacgcaagcgcttttgtgagtataaaatttctcaaaaaaagagatagacatttttctgggatagagtataaatttaaaaattccctcaaaaataaaaggtctattgcgcaccgccctccctatcatgctcgagagcatttgtatgtgtataaaatttatcaaaaaaagagatagccatttttctgggataacctctaaatataaaaatcctctgtgaaataaaatggcgattgtgcacagccctccgtctcatacgcaagcgcttttgtgaggtataaaatttctcaaaaaaagagatagccatttttctgggatagagtataaatttaaaaattccctcaaaaataaaaggtctattgcgcaccgccctccctatcatgctcgagagcatttgtatgtgtataaaatttatcaaaaaaagagatagccatttttctgggataacctctaaatataaaaatcctctgtgaaataaaatggcgattgtgcacagccctccgtctcatacgcaagcgcttttgtgaggtataaaatttctcaaaaaaagagatagccatttttctgggatagagtataaatttaaaaattccctcaaaaataaaaggtctattgcgcaccgccctccctatcatgctcgagagcatttgtatgtgtataaaatttatcaaaaaaagagatagacatttttctgggatagagtctaaatataaaaatcctctgtgaaataaaatggcgattgtgcacagccctccgtctcatacgcaagcgcttttgtgaggtataaaatttctcnaaaaaagagatagacatttttctgggatagagtataatttaaaaattccctcaaaaataaaaggtctattgcgcaccgccctccctatcatgctcgagagcatttgtatgtgtataaaattatcaaaaaagagatagccatttttctgggatacctctaatataa

SEQ ID NO: 31304 - DNA, 1679 bp, Heterodera glycines
  unsure (1)..(1679): unsure at all n locations
ttattttattaattattttatataataaaagatgggctattaataaggaagggatgcgagacaaatttcccattatctctccctttcctttcttttactctcttttcttttccattgcaatttactctctttttttcccactccctccttctcccacacacacgcacgcgtccaacagactgctgctgcacagcagcacgcgtctgttcactgtatgcccctctcacccgccgctgcccgcgtagacagacaatcagacagtgcactattttcccaccatccctccctctaacctctacatcctagaaggagaaatcttttaccttctttttctgtgctatttcttttgtcttcttcttcttcttaactatttattttcgtctcttttctttatattctcttctttttcaaaacaatttcttttcatctcttttcaaattcatttttaacgcaaaactcaaacaaatcgccacacaaattcaaaacatggacacatccggacaaacaatcaactttattatataagattttatttatttatttaatcctctttgatggacagacaatttgttttgtaagtttatttacactgaatacatttaatttattcattctcattcatccattattcttcacattttccacccaattcgattggttatttattctcttaaattttaattttaataaacaactcaacttttttctacagaaattcttcttatttattttataaatagaaccctaaattttagattgccggaaccggtggggtaggaccgagactggaaaatggaccgggactcccccctttttcggaactcccggtcacaatttttttgatcgggatcccgccgggactggaactttttagaaagatgaaaaattggtgaatgtcaaaaattgaaaaaattagacgtattatttgtgacattttttatttgttttaacactcatttttcgcgcgatttaaaatttggacgattttctattcttttttaaaatttcgacaggcctcgcgagtttcaaattcatggcaagaaataataaatacataaatttaattaatttcctgggacgaaatcgaacccgaggatatttttcctattaatcacaattctgaagcgcgagactaccagtgtctttgtccggtaatagtttagatggtacccccccttttttaaaaatttttttcaactttcaaaaaatcataaaaacatgtttctaggggttttcggggtcgctgatcacgaatccgacatccatttcgaccgattccgaacccctgacccggattcgaacaaaataaaaaaagcagtttgggaacaagactgaaacatacgacacctatttcccagaatttatttggcgtcagcgttttggagacagtgaaaatgcgttttacaatttttggttgcatgtctctgagttttatccatgcgaacattgattattttctttttcgtgcatttgaatcgatttttagcaataaatgtgaattttgttaaaaaatcaatttanaacaaaatcaaaaatttcaataaattctctanagttttgttgcgcccctccctgtcgaaaagtgatctcattgaccgtgcccgactcatttccttgtgtaatctncacgtgaaaatgacccgtccagtgattatattgtctatgctgggcatgtgctt

SEQ ID NO: 31305 - DNA, 1471 bp, Heterodera glycines
  unsure (1)..(1471): unsure at all n locations
tttgagcacgtacatcagtttgtcttcgtcctctcttctcagtttcatcccttccacttcctccaggcgccaacaaatttcccaatttgtcaagtccaaatttagcaaaatattctttaaaaacatttaattaattagtcaattagtgactgaaactgatcaaacccaccctcaactcgcgctttgcttttttggccatttcggaccgtgaaattttggccattttcagtcgttccaacaaatgttttcttatcgcgtgctttgcccttatgaattcaatggccattaactgtaattgcttttgccattaaatttaattatttctttttgtccaccttttgttcgtcccttttgaatcccttcgcaaattcaacgaatttctgctcaaattccgcgtctgtatgctgctgttcgcccaccatttccatcgctttttcgcgcctttcctcgtccaatttggccaaaagctgcaaaaagacggcgacaaagtgcagaaaaggttgggtgggcagcacagagcccaattggcacatttggccgagcaattccatgccaatttcctcaaataaacgggcaaaaagaatgaatggcatttcaatcgaaaatttacaaaaaaaaaatgaattttgcctttgattcttttggcaaattggcgacgaattgcttcaattgtgcgactctttgcgattcgctaagtgtcggcgcattattaattcggtggaacagagaacgatttgtgggggataatgaggcgacaaaagtggccaatttgctgagataatcagccgggaaaaggtcattttgggccgcagaaaaggcgaaagggcaaagggcggccaaaattaggagaaaaagcggcaaaaagaagagaaaagaaaagcgaatcatttggggaaataaatttaaaatattaattaataaggaaaaaagggaattggcccaacaaacaacagacaaacagcaaaaacgagtttaaaacaaaatgcccccggggaaaggcaaaagggcgcaaaagggagaagagacccattaatgaacgaacaccaatcaaagtcaaaatcaaatggaaaagaacaaagttggaaagcaccacatccattctgagtatttattttaaaaccaaagcaattaacaaaaaaagttgattaaattctacaaaatattcaatttttacaaaataaacgatttgaattttgagtagcgatcacattttggtgaaaatattttaaattaacaaaaaagaaaatgttatcggtcagacttaattacttaataattaattacacaaaacaaaaaggaatgccaaagtacaaatgaatacaaaactaattaataagttaattaacccaattaaacattttaaattaaaaaatgtttttccnaaatgtttttcttctcctttttcaaattttgtgattggctcggaatgccttttcctccgtctcatcgcagcctaaaaatattcggccaa

SEQ ID NO: 31306 - DNA, 1642 bp, Heterodera glycines
  unsure (1)..(1642): unsure at all n locations
tttcgctcacagtttgatctccaactgatttccctgttcagaaaggccgcgtcctcttcattgatctgatgccattgagcgctgctgaccaccacgacaatggcctaaaaggccaaaaacataattaagggagaaaagattcgttttgatgccaaatcggcacaaaggcaattcctttccctaccaaacaaacgaccaaaacaattgccaaaacggagagaaggaagacgagggcgagcagaaagcgatggctggagagaaggcgaacggagaggggcaacgggggccatttggaagagggcggcacggctgacacttggggaagggcgatctaagcaaatgggaggaggaggggggacgagggcatttgaaacatcaaaaaacgaaacgaaatgccaataattatgggcgaggggggaacggaactctcgagggtcgtctcgggttttctcgtttcatcaaaatagcagaatccgtgcagcctcacaacacactcaccaactgtgctttgctgctgccctccggcattttttcctccgccaatccttcggcacttttcctttcgccatccagcaaataatcattttttgttgtcattccttcgccatttcccaacttcggcctcggctgctgatgataattttgttggtcgtcgtgtgccaaactcagttcggctgatgaaaagggcgaaattggcgcatccgatccatcgacggngacgtcagtcattgaccgaatcggcaccgatgccgtggccgaagacagcgaagaccaatcgggggacgaattggaggaggacggagaagcagcagacatttttatgaacacaatgattcaaaaaggagacaattccctaattaattatccgaatccgttattcagtacgcggtccctaatgaataatgatggttaattaagcaattgatggggaataaaaagtaacgaactgatcatcattgtttgcttctgataaaactttaacctcacccaatgttcgttatttatttattttttaatgctgacatcattaaatttgaagaataatcggggaatttgtagggggaattgagagggattaagccactttaattaagcatcgattgacccgtggcgcactctttgaggccaaattgaaaatcacaaaggaaagaagcaaacaaaagcaaaaagaactgagaatttggagcacgaattgccagtttaaaatgcatgggacgaggccaattccattaagccaaagaagccgaattttgcacatggaaatgaacggcacaaaaattggccatcggagaaggccaattttggaatgcatccgccagcggtcggttgaccaatgaatgcattttaaattctgtccggagatcacaaattcccttttcccccaaatttccggcggtgccccgccccaacggccaatgaatggttttggttggccctgctgacccatgccattgcgtgtttaatttccttaaattggcttcaatttatttccgctggatgggtgataaaattcaatggaagggatgggaaaaagaatgaccaaatatggcaaattgataaagaaatggacaaaaggaacctcctaagggaatatgtatattcttaattagataattactaataagtaatgaccgtaataagt

SEQ ID NO: 31307 - DNA, 1727 bp, Heterodera glycines
cttacccaatgcaattgtcagcattcaaatgaatattgactccattcaaattgtctgccgacttttcgtaacccctctgaaccgtctccccaatttgacaccgcttcaacagccaattaacatatccaaataagcattcgtgcttctgcagggtcagcttttcgttggtccgcttgttcaccgattcaaactgtgccattgatgatgatgccacgaagagaccaatttgaacattgtatttggcagcaatggtggcactgacaaatgcctaaacaatgttcggttaagtgtactgtctgtcagcattgtttgaatgacgtaaatgtcgcggaccaggccgttttcacgtgggccaagtttttgaactatgacttttttcattgtcaaccaaatcaaataatcttggtatcattcgatagcctcaagagacctctattaatctgcaaaattttgaaaaatttcgttatggttcaaaaaaattattgcctgaaactccaaaaaactggttttccaaaatggccaacttttttttgaaacttaaccaaaattttcataattttgcaggctaattgaggaaacttagggctagcgaatgataccaagattatttgatttcggaaatgatgaaaagttggttttgggttttttgcattataattgtttaaattaaaatctattgactaatattaattaaaaaattatatattaaataattaaattttaattattcgaatagttactcggattgaaacttatcttaaaacctataagccataaatttttgctttgtcattccacctataaatgcttaagctagactatttttgtcggatggtcccagcaatccgcatttttggaaatttctagatttgtgagattgtatggattacccccaatttttattctttttggtcagtgttaccaatgccgtcgcctcccaaaagatgttgccacaaatgaatccggcgattgctgctgctgattttcaccaatttcgaccgaagaaaaggcggcggaggattttacatattccattaaaaattaatttttcagtctgcaaatatttaagaaaaagttgaaaactgaattattttttggatttgtatgtagggagagcatgactgtgcaaatgggggaggcgggtcagttgggtcgggtcataacgacgaacgaaagggtcaacgggggcagggggtgggaacggagaagagaaaaggtcattaaattaattagtaagtaacttgaaatgctgtataaaatttacggatcaattttctactgacggattgtccattattgacggattgtccttcacgggggggggggggcggctgggaaaggtgaagagaaaatggcaaaaatgataattaaattaattaataagcgacttcaaatgttgtataatcgtagacaatcttttaaatcaaatcaaacgatcgcaagatttttgatcattattcaaaaaaataataaagtttgctgacgagtacgagtgcgaagtgttcaagtggtcaagaaaatgtgccgttcagaataaacgtggagcgacaattagagatttttaattgaggatccgaaatttgtaatgcgtacaggtggacccagcatttagggttttcgttaagttagccatgcttaatgctccagaaaatcggtgacggaaagggaattcgtagtcgtcaattccattcaaaatgatcgacagatttcacaaatactattaatta

SEQ ID NO: 31308 - DNA, 1068 bp, Heterodera glycines
aaaaaagagatagccatttttgggcaagatttttttcgttagcatttcaatatcgtgtgagtgttggtagagccagactagagaagaaaaatgttggtaccaagtttgcggtcaaatctccaagagaaaaaagagacagccattttttcggcaagaatttttttcgttagcatttcaaatatcgtgtgagtgtttgttagagccagactagagaaggaaaatgttggtaccaagtttgcggtcaaatccccaggagaaaaaagagatagccattttttcggcaagaatttttttcgttagcatttcaaatatcgtgtgagtgtttggtagagccagactagagaaggcaaatgttggtaccaagtttgcggtcaaatccccaggagaaaaaagagatagccattttttgggcaagaatttttttcgttagcatttcaaatatcgtgtgagtgtttggtagagccagactagagaaggaaaatgttggtaccaagtttgcggtcaaatccccaagagaaaaaagagatagccattttttcggcaagaatttttttcgttagcatttcaaatatcgtgtgagtgtttggtagagccagactagagaaggcaaatgttggtaccaagtttgcggtcaaatccccaggagaaaaaagagatagccattttttcggcaagaatttttttcgttagcatttcaaatatcgtgtgagtgtttggtagagccagactagagaaggcaaatgttggtaccaagtttgcggtcaaatccccaagagaaaaaagagatagccattttttcggcaagaatttttttcgtttgcatttcaaatatcgtgtgagtgtttagtagagccagactagagaaggcaaatgttggtaccaagtttgcggtcaaatccccaagagaaaaaagagatagccatttttgggcaagaattttttcgttagcattcaaatatcgtgtgagtgtttggtagagccagactagagaaggaaaatgttgtaccaagtttgcgtccaatcccccagagaaaaaagagatagccattttttggggaagaatttttt

SEQ ID NO: 31309 - DNA, 1588 bp, Heterodera glycines
  unsure (1)..(1588): unsure at all n locations
ttntgctgagcatataaataaaatagtgaaaaatgctcatttaaaggcatatcatattttgagaataatgaagacaagagagctaaaaactattataagaatgtataagacttacgtcagacctcaattagagtatgctgttgaaatttggaaccctaacttaaaaaaaagatatagaacgaatagaaaaagtccagaaatttttcacgagaaaagcctttaaaaagtgcggacttttacatagatcatattcagaaagacttgaaatctgtcagcttatagaattagccaaacgaagaaatattgctgacttaactatcgcttttaaaattatgaagggttttacgagtcttgatgctagtaaactttttactttttctgatcgatcctctcgtaggccattacttttgagaatgcggcgcacaaccgcaaaaagcaagaataatttttttaacctataggtaagaattggaataatttaccaattgttccaattcagacagttgtgactctcgcctctcgccaaaactctcgctctcgtcttttctgagacaagtcacatccctgttacagggcactgaaaaaatgcacacatttaatgaaaattaataaataattttttgacaactattctcctgctgattgcatcaaaatttctgacttatgtacataaataagtaagtgttttggtgaatgtcatttccaaatatatttctcatcaatttcactcaaattcgaaataaattatttaaaaatataaaaaaaaacaattttattattttataactctgctcaccttatgatgaaattaaactcggcgtttgaccttccaaataatgatgcgttgtgtttattggaattttttatttacccaattggcagcggcagaagggaagtgtttacctcgttatttttgtttttatttgccacatttgtcttcattcgcttttttctctttaattttctaacaattgaattgctttttttccataatgaatttaaatttgattaattacactaattactgccattagttaatctatgccttttattattggcaatttcagtcacaaagcaattatttgattttccaaaaatggggaagggccgaactaccggtaatagcggaggaggcaaaggcggaagcggtggaggcggagacgaaaaaagcggcggaagcggagcggggaaaggaacggtggctgccggaagcggaggtgtacgcggaaagggtgccggacagagcggaccagcagcagcagcagcaggtgggacgaaatgaatggcacggttggagggaagggaattggcataattggcacagtgtaatggactttttcattggcattttcaatgctagcaaaagcattagttttctgtggtgagctggctggaaagaatggtacacttttccctactctcagtcgataaaattgtaaattgctgttttatcccatagttgagttttttcgtaaaaatgccgattttttacagattttccgagaaaaggtctaataaatttgcccaaaggtagtgaaagaatatggggggtatatcatagctctctgattgctagcataaatatcaa

SEQ ID NO: 31310 - DNA, 1342 bp, Heterodera glycines
cgggtaattcgccttccgcaccgatcagttcctcctttttcaggcggaccatctccgacttttcgaccatttgttccgcttgcaccaaaaagtcggactgatcttcttgctcttctgaacatggcaaaaaaactagataaagagcaggtctttgaatttaattcaagcagtctgtcagattcgtgctgagacaaaatgtgaaaaagtgcaagcgatcaaattaaatcaaaataattaattttataaataaaaacaaaataattgttttatttactttaaaaaaatattatttaaatattcgtaacttaattaaactttataataatcaataattattttgcttttaatttttgaaataattatttttgcttttaatttgatcactttcactttttcgttcttcgtcatagcaactgtctgattaaagcctcttaaattggaattgcctctttcgtcgctttgctgttttccatgctcaagttcggtgtgtgtttctgtccgcttttcctccatttgttttttggccctttcctccgccttttcttccatttccgtctcctcagtttcccgtttcagtgccgttagcttttggtgcagtttggtaagctcttccgcctccgattccgacatggtttcccttccgcttccccctttcttcgcctcctcctccccttgtcgcaatttactttcaatgacctgaaaggatttgctcaaataaaccttggcattttgaaaagcaacaacagctcagcagatgcttcatctcccctaatgcttggtaatttctgtttcgacccgcctgaatgattgtggtgacggtgctgctcagtttgaagatgatcctccgtctccgagttgggctcgtcgacgcggcaccgtccacgctcatctccacgaactttcgggtggccctgcactgcttcttcagcatttccatttgcagctcaatcctccgcagcatcgcctccgtttgcggcacgcgcccttccgcggcggctgagcgcacttcggcgtccaatttggccaaatgttccgccgtttgtgcgtaatttgtgcgcagtgcaatttcggcctcaatttcgtcggccaattcccgatggaaacgcttcagtccgtttttctctctcttcaaattggatgaaagtttttggagatgttttttgtgttcatcaacggaggcaatggccgcgacagttttcaagtccatcttcaactcggtcaatcgttttgccaataactgcaaaaatgctggactaatcaaatcagcatgaacatcgttttaattagcctttcttaattcctaccctggccaagttccaatcccgatctctatcttttcatc

SEQ ID NO: 31311 - DNA, 1448 bp, Heterodera glycines
attacgtccttgcgttgattttcggccattaaacaatatcacgattcccgacccatatccaataccgagaatggataagacaattttacgggtcgctggtcaaacattttattcaaccttggatttggcctccggattttggcagattccattggattccgaaagttcttataaatgtggcattgttaccccttggggactttatcaaatggtaaaattgccattcggactgagaaatgcgccaagcatttttcagaggaccatggacaaagctttggagggtattcggaatgtaaccgtatacattgatgacattttggtccatacaaatacggaagaggagcatttggagactttggaaaaagtattttgccgattgaatgaattcggattaaaattaaaaagagagaaatgcgaatttttgaaaaatgaatgcacatatttgggccatattttaaatgggaaaggctatcggccctcattgaataatcaggaagtgattgaaggattcccagagccggaaaatgccagggaagtaaaaagatttttgggtatgatgtcttttttccgtaaatttatccaaaattttgcggaaattgcaaatccgttacaacagttaacgaggggaaaaatccctgaatttgtatgggaaatcgcgaaaaagaggcatttgggaaattaaaaaataatttactgaatgccaatgcctaagggctccgaattacgaattgcctttttatcttttcaccaatgcgtctgctattgcctatgcgggagcgcttatgcagagccaaaatggcaatgatttatactctgtcggttattggtcccgaactttgtctacgacagaatcaaaacttcagcccacacacggggaattagcggcaatagtacatgccgtagaaaatttcagaccaattatttagtggcagatgcattatcgagagttgcaattaaatgggaacaaatagaaggaaacagcagagaggtcattccttttttattgacagttgatgatgaaataggtttacatcgaaaactatagaaaaagggacatttgaagatagtatactgtcccgagatgattcatcgggcacattttggcattgtgagatgcaaagcccgagccagagacttagtgtggtggcataattggtctgaggaagttgaaaattatgtgaatgagtgtcacatttgtcaacaaaatgcgtcaaatgaaccgcgtgtggaccccgaatataaatggcctgaggccaaatatccattcgaacgggtccacgcagacctcgcgggtccaatttgggggacgaatttttttatagttgttgacgcatattctaagtatccatttgtgtgtcaacgaagatgatgatgatgacgacatttattcaattttgattgagtacccacaatttcctgaggcccaacattaaggacgggacggttat

SEQ ID NO: 31312 - DNA, 1155 bp, Heterodera glycines
acgcttatatatatatatatatatattttttttttttatttaccgaaattaaaattgaaaaattatgtaaaaccatacacaaaaaatgtaaaaattctaaaaaaaatttaaattaaaaaataaataaatttaaaaagcaacaaaaaaaaattaatgaaccaaaattctgttgattttcccccgctgctgtttctttttcctcattttttctcccctttttttccctaccaaataattttggccaatttcgtacacttttgactttttgtttgatttctatggtccaagaagtgttgtcatttttccaaataaattgtattttattacttttaaaactttgtgaattttcgggtgcctttgtgcgcattaataaaacgaaatttaattaaccaaaatgtccttggccccaatttgggcacggaaagtcggccgatttaatgggggcgaacaatcggaaaattgaaaggaacgaagttacttaaaaggcattcattcccatttaaatttaaatcatcaaaaatttgaattgtttcaaaattaaaaaaataatatttttttaagaaaaaaggaataataattttaattacgcaaaatgtattttaataattgtaataataataacaataatcacaataacaatgagaagaacaagagcagtagcagcaataataacggtcaaattaatgcgaataaaacggcaacgacgccgcttcgatcggcactgaaaatgaacggacacagcgcaaacggcaaaaaacaggtgccacaaaacaatgaacaaatggcacatcaatcggcggatttaaccattgaaatttaaattaattgaaataattattaaaatattttttagttttaaatacctttctcagaatgcttttcaaccccaattataattcctaatttttaaacaatccaattgtaaaaaacgacaaacttttcaggcccattttccgctgcttggctccgatctgttgcccccgtccccgccgatcagttcccccgcctctccgcatcagtccgtgccaattccgtccacttcgtcggcgtcggctgtcactttcgcggccggcacttttactgatcatcggccgcaaatgccaagcgcagtagcagaagttgcagcagtgcctgatcatcgcgaccaatgcctat

SEQ ID NO: 31313 - DNA, 1509 bp, Heterodera glycines
  unsure (1)..(1509): unsure at all n locations
tcaggatccaaaaaacgaatttgaaatttnaactaaatataatctactgaaagaggaattgcgaaaagaaaatgtttataaaaatatgacttgggttaaatttgaatgtgaaattgcaaaaaaattgggcacaaagcgaaaaaatatttatgaaatgaaaagaaaattaggacaaatacgaaagagaaaaacagtggttgttgaagatagggacacaaaaatggaactgatcaaaaaatttgatcaattgagaaatcaaaaaatttccggatttaattatgacgcgaaaaaacgggaaaaaattgcaaaagaaattgcgaataatttgggataaatgttgagataattcgcgaatggaaaaaggaattaggtaagatataaaccgtgacaaaatcaattattattactaattattatttatttttaggcataataaagaatttttcaaaaaagcaaaaaattaagaaaattaaacaatttgaaagattaaaagaagagtttattaaaaagtttaatttgaaaatgagtcgaaaaattagcaaaaaaattgctgaaaaaattggtacaaatatgcactcaatatgggattggaagaaaaaattccaattaaacaatcgtaatattttaataattaaatttatttttatatgaaattgcttttttaaggaaagaccaaaacttacacggatgctgagaaattggaatatgtgaaaaaatgtgaggaaatgatgaaaagaaacccaatgatgagtgagacgaaaattgctgaagaattggaaatccctaggcaaaacttaagacgatggaaaaagaaatttggaaccaatgaaataaattgaattatttttgtggatctaacaaaattggatattgagaattgggcactacagaatatattaaaaaaaaaagaattttcaaaaatattttcgtaggaatttcatcaaaaattagataactatcatcatttcgcattgataaagacgtatgtatcaacacattcattaatattttttagttcaattataacggcctttttttggaaaacttagcaaattaatttccgtaaaaaaatgttttaagcatttttttcgaattttaattccacttagctctcgtaaaatcagaaaaatggaaccaaaatgacaaaaataagcaaaaaatggaccttttcatgttacgtcattctaaaaaaaataaatttttaatttgctatgcagaaagaggctcaaaaatagcatttaaacgttaaaaatttttgatttggtaaaggtttttattgcatataaatccatattttgccatttttgcgtttttagtccatattttggccattttttggaaattttcacaagaaaaaaatgcaaaaaaagcgaaaaatacacccctaaagatcgactttttagaattttttaaaaaataaacgcaccaaaaaaagagaattttttcaaaattttggcaaattgtttgggtattttattcgcttccgaaatttttgctgacaacagaatg

SEQ ID NO: 31314 - DNA, 1491 bp, Heterodera glycines
ttcaagcagaagacacacattctttgtgcccgctttttgggtggtgcttggaagaccgtctcattggaggacatgaagattcacagaattaagtaaaaacgacatctgtatagatttaccaagctcttcagaggcggaatgagcaacatgcttttcctttgccgtctgactgaaaatcacccaccactaaaaggggagccggacaaagtccttctgcgcgtgtattttaacccagaaacggaaagtcatttggtggcagagtctgttattttcacccttctctctgaacgacacctggggccgaaactctatggaatattcagcgggggccgtcttgaagaatacattccggtgagcaaagggaattgcgatataatgtcgatggtaacaaggggagagatcattggcactagtacctggattgtttttcaatcttcgaagaataatagttataataaaatcgtggcaaaacccattaaaactattaagtcacggccacttacttgccatgaaattgcattgcccaccatggccaacaaaatagccaagaggttggctcgagtccatcaacttgaagtgccaatttggaaagaagttttgaatctttttattatttaattctttttcgtctttagccggaatatatttgtgacgcgcttgaaaggtgcttttcagtttttgttttgcttttcaaatgatctaaggtggcttattcaattgaaacaaatgcccagtggttctcgtgatttcgatttgccggctgaaagtcacgaatgggctcctccgagcataaattgcgaagatttacagaaagaaattgagcacctgaggtgtatttcattgagctattccataattccctttttaaggagattgattgtaaagagtcggagtctggttactttctgtcataatgatcttcaagaagggaacattctcttgcccaaagcacattctggcaatatccgaatcggctccgaatcggacgaaattttatctggcattgacgggaatatgacgaacaattcactgaccgccttcaacccgatggatccccgtctcgtgctcattgacttcgaatacgcgagttacaattacaggtgagtgcttttgtcattcacccacgatcgtgtaaacaaaaacggaaaagaaaaatcagcttaaaaaggaagaatttgccttcttaagtaacagtattgtttattgtaggggattcgattttgccaaccattttgtggaatacagcatcaattatgacaacgatgagccacctttttacgaaatgctcccagagaagtttccttcggaaggacaaatgcttgagttcatgtacaattacgagaaggaacttcgccctaatgccagtgaggaacatttgtgggaaattgcacggtcgatggtcgaagtgagttttggcctttctttgaccaatgccagcacattttttcaggaaactgttccttttgtgcccgtctcacatttgctttgggg

SEQ ID NO: 31315 - DNA, 945 bp, Heterodera glycines
  unsure (1)..(945): unsure at all n locations
aaaggcatttaaggcacgaaaatcacgaaaaaggcacaataaggcataataaaagtcaacgtagaagcctcaaaccaagtggaaaatgcgttttttatgcttaatatatcgaaactagtgcgcagaaaaaaaaggcatatgcctcaaaatccgagctctactgatcacagaaaatatagtcatagaggcaaaaattatttcatgaaaattgaatattttttaaaaattattgaaaattttagaaaatattttttaatcgaaaaataatattaaatattttaaactttaaactttctcaaaattttttaaagtattctctaactttttttttaaatatttttcaaaattttagtaacaggtaccccgttttctctttttttttatttaattttaaattgtttttcaaatcctttgaccctcgctcgtccgtcgtttttgccatcaatgacccttcaatagcccatcatccattttcaccgattggtgtccaaattgggaaatactaaaggtgaagaacgctcttcactcactgcaatttcttttctgctgaactggcgcctctgctcatttcttttttgaatttgttttgggtatattttgctgtccaaattgactttagacaaatgccattttcagcgcctttgagtgctgaagagccaatgtcattagccagcttaattaccgggtcgaactgtttaaagacgtgcggaatggaggacgtccaattcgcggcgagggttagtgccgacgaaggcaaacaaattataaattaatcactgattctgagggatatttgtcactttctctcttgtcgtggccttcccgagcttctttcctccgcctcttttccttcagagggcctccgaccttttcatcacaattcgcngttgtgccgttgtgctcacttcacttttggcacttttctttattttaatgattgcttta

SEQ ID NO: 31316 - DNA, 1587 bp, Heterodera glycines
  unsure (1)..(1587): unsure at all n locations
ctgtgggcacaacttcttagagggattttcggtgttcagccgcacgaaattgagcaatagcaggtctgtggatgcccttagatgtccggggctgcacgcgcgttacactggcaaaatcagcgtgcttgtccttccccgaaaggggttggtaaaccggtgaaaatttgccgtgattgggatcggacattgcaattattgtccgtgaacgaggaattccttgtaggggcgagtcatcaactcactctgaatacgtccctgccctttgtacacaccgcccgtcgctgcccgggactgagccatttcgagaaattcggggacggttagtgttccggcttcggtcggtatgcagactggaaccgatttaatcgcagtggcttgaaccgggcaaaagtcgtatcaaggtagctgtaggtgaacctgctgctggatcattacccaagtgattcctattcaccacctacctgctgtcctgttgggctagcgttggcaccaccaaatgcccccgtccgctgatgggcacaggtcgttcgagatgacttgtggacgctgcccaacattacggggcagctgcctcacgagccatgcttttggggtgcttccatacgttggagctgtggtataccgctcagtgctgcacatgtgaaagcctgtgtatggctgctgcgtggcaatgtgtcggtggcgggccgcctcgcttggctggttcgctgcgcccaatgtgggatgcacgctcgtggggcgacctaacggctgtgctggcgtctgtgcgtcgttgagcggttgttgtggcaggcacataacacactgactggggatggtggtttcgttcccggtcttacgtgccgtaactagcggtgtgtttgtgcttgctgctacgtccgtggccgtgatgagacgacgcggtagtgcccgtgcttggcctagcacgtggcttaagactcaatgagtgtcagctcgggcaccgccagctttttctttttttttcattatttttttttacacttctgttgaagaatgaattctagtcttatcggtggatcactcggctcgtggatcgatgaagaacgcagccaactgcgataattagtgcgaactgcagaaaccttgaacacaaaacattcgaatgcacattgcgccattggagttacatccattggcacgcctggttcagggtcgttaccataaaatgcactgcttgtgcgttgcttcgtgggatcatgtacttgtacgtgttcttacgttacttgctcagctcggctgtggggttttggtgtgctggcgcgaacttgtggttctaattcgcgttttacggaccgtaactcaagcgcaccaatgctttgcatgctgtggcggagtgcctggattactggcattcctgctttgatttttcgacctgaactcagacgtgaacacccgctgaacttaagcatatcagtaagcggaggaaaagaaactaacgaggattcccgtagtaacggcgagtgaactgggaagagtccagcgctgaatcgcagctcctctggggttgcgaggtgtagcgtatagaccgtgagcttgngttggccgcttgttcaagtttcccttgac

SEQ ID NO: 31317 - DNA, 2506 bp, Heterodera glycines
  unsure (1)..(2506): unsure at all n locations
cgtttcagaaccctttctgaaaaaatatttaagaattaattattgcaaaaaataaataaaaacgaaagactcagattttcgaaaatttttttgagccagctagctcggcgctcatttcagtgtaagttagtcctttaccggggagtatccctgcaaagtttggtacgcttctgctcaattagcaaaaaatatgagtgatcgaattttcactaaaaaagttaagcctacattttttggcatatttaaaaagcaattaaaaaatttttaaaatttaataattttcctgcaccgaaggtactcactcggcctcttcgcggcctcgtggtgggccttcgcccccccccccctcccacgcccttcagagcacgacaaatatttcaacaaaaattttgaaaaattgactagagcaatcgaacgctaacggacgacctaatggaaaaaaatccccgaaggagagaatttaattaaatccattccttcgggggaccgtgccgggtgccgcggggtaagcagtgctggttcgtttcatcacggcaccgaaccttttggctagtcagcaatcgttgcttaacttgccagatcggacgggtgcgcatgactttctgaaaaaaatatttatgaaacaaaaaaatcgattttttcaagtgtccgtttggggtactcaaacatttatggggagcaaaaatccaacgcagaattaaagtacaggctatagggaagctattcccgaaggattcggtctccccataaatctgggcgcatcggttcggggggactgccccgaaaacaaaaaaatcgattttttcaagtgtccgtttggggtactcaaacaattatggggagcaaaaatccaacgcagaattaaagtacaggctatagggaagctattccggaaggattcggtctccccataaatctgggcgcatcggttcggggggactgccccgaaaacaaaaaaatcgattttttcaagtgtccgtttggggtactcaaacatttatggggagcaaaaatccaacgcagaattaaagtacagactatagggaagctattcccgaaggattcggtctccccataaatctgggcgcatcggttcggggggactgccccgaaaacaaaaaaatcgattttttcaagtgtccgtttggggtactcaaacatttatggggagcaaaaatccaacgcagaattaaagtacagactatagggaagctattcccgaaggattcggtctccccataaatctgggcgcatcggttcagggggactgccccgaaaacccaaaaaaaaattttttggataaaaattatttaaatgaactgactagataatatttaaaataggttatttctcttcctttcagtatccctgcaaagtttggtgcgcttctgatcagtttctgaaaaaaaagttaagcctaaactttttggcctgtttaaaaaggaattaaaaatttttaaaaattttattcatctccctttttgatagaaaaagcatcagagtgcctaaactaacatgtaaataaaatttggtgcgtttcagaaccctttctgaaaaaatatttaagaattaattttgcaaaaaataaataaaaacgaaagactcagattttcgaaaaattttttagagcaagctagctcggcgctcatttcagtgtaagttagtcctttaccggggagtatccctgcaaagtttggtatgcttctgctcaattagcaaaaaatatgagtgatcaaactttcactaaaaagttaagcctaaattttttggcatatttaaaaagcaattaaaaaatttttaaaattttattcacctccattattgatagaaaaagcatcagagagccttattaacttgtaaataaaatttggtgcgtttcagaaccctttctgaaaaaatatttatgaattaattttgcaaaaaataaataaaaacgaaagactcagattttcgaaaattttttttgagccagctagctcggcgctcatttcagtgtaagttagtcctttaccggggagtatccctgcatagtttggtacgcttctgctcaattagcaaaaaatatgagtgatcgaattttcactaaaaaagttaagcctacattttttggcatatttaaaaagcaattaaaaaattttaaaatttaataattttcctgcaccgaaggtactcactcggcctcttcgcggcnctcgtggtgggcccttcgcccccccccctcccacgcccttcagagcacgacaaatatttcaacaaaaattttgaaatcatgtttcccactcccttctcccaggggtattattttgtaaagtctttttttccccaataaacttgtcaaaccccatttttcgcaccgtgaatgttatttttattgaattctgaaccgttttgagtagattagactataaaaaattgaaaattttgaaatcatgtttcccactcccttctcccaggggtattattttgtaaagtctttttttcaaaataaacttttcaaccccctttt

SEQ ID NO: 31318 - DNA, 738 bp, Heterodera glycines
aaccacttgcattccagcaatctcggtcatccaaataataataacaattttgtctgcttttaggttggaaccagcacgacatgtacagagagcagcgagaacaaggaccgaagtcgtccaggggaaatgtcagtcaaaagcactcgaaaaaaggaaattttggtgtttcagtatatgcgttatggccaagacagtcgcccgaacggagaagaggcggagggacagagaggggacagaggccgacggattggacagcagcggggctttggcggaggacgaaatgccactcataaccagccgatgacgagggacaatcagccgatgacgagggacaaccagccgatgaggggggaccaacgaatgggccgtctgatggaagaaaaaggcggttggttaaatttgggtccatgagtctttcgtattattgatttaagctgctgtgccagaagatgaagtggtgccggatggtggtgatgccgacaatgatgacatgggcggatttggtcgtgcgcatcgcacacgggctccttctaaatttgtttagacctccgtttttgggttttttgtttaattattattttgataatttgtcaccccctaattatggcaattgattattccaaataaattttgaaaacgcaaccaaataacagacaatcaatgaaacgtggttctctgttcggtgaatactgtcaaaaaataaatggaacaataatgggttgtgccggattgacagcc

SEQ ID NO: 31319 - DNA, 605 bp, Heterodera glycines
taatacataccgtatttgctctaattatcccccaatctcaaattgttccccagtctaggaggggtttgaagtttttcaaaagttatgacaattttttcatctttttggctagaacttttaaaaaacgataaaaatttttgaaatttggcaagctaataacgcagggttggcatatccaaagtcggcttccaaggaagggtatgccgatttgcaaggacataatggggaaaatattatgcaatttggttgcgtctaagaaaagttatgagttgatttagtcaaaaatttagcatattttgcactttttgtccttcgacatagcaccaggggaaatcagcagttgttgataaaatgggttgtatcatggcagcaaactcacaagggcgattcggacggaccaaaaatgatcacttgccatttgaagatctgaaaaagggggagagattgaatgaaggcaaaaatttgattaaaaaagaaagtgcctacattatcgtcaacgaggccacggacagcgaatccatcggtggggttcgtctgaagttcgaccaattgacgggctaacgaagcggacatcagtagaaaatacggcacgacacagcacaaaa

SEQ ID NO: 31320 - DNA, 812 bp, Heterodera glycines
attttttaagaaaatagatacaaattgagcctagtaatattaaaagccaaccttttttgttgaaaatctgttaacaaattacactcaaattttcaaaatttcccccggcggcgcctatcggcaccgccggacccccttcttccccaaaattttttcggaaaaagcgcgctgaaaaaagtgattgagaagaaatctgaatttctaatattcatttagcccaaaatgattaattgtttgaaatgattgaagaaaatttgtttaaaaattttcattaatttaatttagctttaacttttggattttattaaataaaaaaccaaaataaaaatttaattatttaatattttcacgtgaaataaattaaaatttgaaccatcctctgtccccactttcctcactccccctcccctcccccttcagatacctttgcattcgttaccccttaaactctcgccaaatctgttcaattcgtaatgtgcgcattgccactgtctgcatcacttgcatttccatcatttgtggccttcccaaatgtgttgactaccatttcgccgtttacgaaggccttttgtacgttgactcgggcgaatgggtccctctgaggtcagtcggtcccccccccccccccttaaaaggctccgtccccttttaagaagctgtctgtccggcttcactttcttcgtccaattggtcggccaaaatgcctttttcaatgcttacttttggactcgcgttgtcgccttcattctcctcccgtcccttctactcatttgccttaacgccctcctcatccaattggtcaattaaattac

SEQ ID NO: 31321 - DNA, 1618 bp, Heterodera glycines
  unsure (1)..(1618): unsure at all n locations
gggactcgcaaagcagcgaacactccgtccaacaacaaccggtggttatctgaggggaagggcgtaaagagcagtgaatggcgccttcgcttttactcggatttcgaatgcaccgatgtccaacttggtcaacacttcgtccattattttcaaacattcggcctcttgcaccatcacttcgccatttccagcaatgtcaaagtcctaattttaaatttgggtgacatttccaatcctttgtgataaattcaacactcacacattggtagaattcccggtaacgaccttttgtcatcactggttgatctcttctgtacactttggcaatttgatatcttttgatcttttctactttatttgcagccaaataacgagcaaaaggaaccttaaattggacgaattaaaaaaattgtcacaactttatttaaaacaatgaacgaactcccgctaattgtccatatattcgaatgcgtttatttgtatgaagcaaagcatttcttcatttttagaattgtggaaagataaaattgccaaaaaattaacttaccgtgaggtcgtaccgcaaagagcaaagctcgcctccctggtcggcaaggtcgtagaccaacttcgtgccctcctcgccgtatttgcccatcaaaacttcgcgcagttcgaacaccggcgtctccattgtcaccgctccgtgtcgtttaaaagtttcagtgacaattgccaggactttttcacgagtagccatttgttcgggtccaaaatcgcgagtacctagtaaaaaaaaaatttgacatttcatttttttattaaaatccaacatgctaatacaatccattcgagatgacagaaaaaggaaaaatttcgatagacagataactttttagacataatttatgatttatggcgcaagaaaattttgggccggatatttttctatacaaatcggtgaattatattatattaaaattaaaaatggcaacctttcggagtcttcaactcgtatttggacttgaaatcgtcgcccaattccatctttttcttcataaccgcctccttttttgcttttacctgcaaaggataaaatgaaaataaattctggagtgaatattttgatttcggccaagtcgtatcccggattcaacactgttggttttttccataatttgccctaataactaataatgccattacttttaccacctgtcttcccgatcggtgtgtgtacactattcgtttaacgaaagattgcgaacaaaagtaattttgaaaaagacagatgggaatattactaaagtaaaaatttaaaacaaaaaataagtaaaagacaaacaacaaacttcgcaatttttttccgcgatgatatcattaacatttgtagcatcagaagctgcatctaaagccattcctaaaagatttttaaattctaaggcaagaacaaagcaaaaagattgaaaaataaaaaatatatttttttgaaaaaataaaataattggcattcaatttttttgctctattttgatttaaaaatgaaatcgttaactctcacggttatcgttgcnaattacaataagtgaaagtgaaatacaaaaaaataatttaatggcaaaaagttacctaagctatc

SEQ ID NO: 31322 - DNA, 1127 bp, Heterodera glycines
atttggcacgagtcgaacgctcgggacaagcccaggcggtctgaccagcggcttcacctctttgggcaggtattggcccatacgaaacgaaaacatcgacagcgtcgggttcaggttctgccgaggccaaaaggcgaataaatttcccattgaattgaaaaggcccttccgctcgacgttcgcctccaatccgttgacaccgccgcgggacacttcgacccctctggcgacaacgacggaagcacagaggcaagaaacggaaaaggcggaggagcaaagcgaagagccaccgagcaccaccccccaattaagcagggcacacggcttcgaccagggcagcagcagcgcgtacccgccattccccggcagagagcaatcgccggcggaggaggaaaaaatggcacgactaaaatacagcccaagcggactgtgaagagagaatgggagagagagagagaatgggaggagaggagagacagaaacaatcaaagaaacagacgaaaagcaaatttcaattaaccatttttgaactaatcaatcaatcgcatcattatcatatgcttaaaaaccaattaaaaacgaaggcggaaaaactaagactcaaaaaaacagaaagccaaatgtttgggcattattatccgtgttgaattttatgtacaacgaaagtcaatcaatcatttatacgcaaaagcgtgacgccgaaataaagaaaaaatgaaataatatcaaaacaatcattggtcacttttgaagttggggtggcaaagaaatcaacaaattcagatcagatctttcaagaagtttggcaaactctttaaaatcatataggaaaatgcataaaatttttacgcgtccaattgttttttatttttgtttgatattaagccgaccgaccttagcggacctggactcagtggtccgctaacgtcccggattttttacaatttcctagtttataaatttggtttttaaagattatggtattttggttctagtgcagaatacacgtcccatgggtttttacgcgtcccattgaatttcatcaattagctttttctttctttaaaattaaccaaattttttattatgtttccagaatagaccatgcttggcaaagcatgtccagg

SEQ ID NO: 31323 - DNA, 1018 bp, Heterodera glycines
  unsure (1)..(1018): unsure at all n locations
caaaagaaaaagcgaattacggaaaaacttttcaaactcttgccataaaattcctttttcttttttaatttggatataaaattcaaaaatgtttgtaagaaaaaaaattaaatgattaaatccttttaaaaagttaatcaaaattgaaagaatcgcttttacggttaaaagaaattaattacccccccccccaatcgttaattagcaattatttgtcccattttcggtgtgcccactcatcgcatcgaagtcaaaaattggccatgagagaagggggggggggaataatgaaggaaaagagaaaacaaaaagggaaataaaaaacatagtgacaaaggaggctaattaatgttacacataataattaagaagccatttgctgagcatcgtttgtcaaaatgccaaatggcaaatgaatgccaatgggtcgaccctcgggggattatttgaggcgaaggcattgaaagtgcgcattcaatctttgctcagccaaaaaaaaggctttttgagtcgaattttagaccaatgaatttttgaaataaataaatatatttttggtggtaatttgcttttctccaataaattgggtgaatttacaattcactcactttagttttaatggtttaatttccccattttttaaatttgattataattaattgccaaatcttttcaaagttcattttgatttcccctttcttcctaattaacctcttattaattgatttccatttagcagcagaaggccccctccctttcgtcttccatttctcttttgtcctctttcgtccctttgtccgctttttcttcggcttcgtcttccgttgctgcgcccaatgaatttgttggctcagatcagcaaaaggaaggtgagggattacagttttaagctgatttgggtttaatagttattcctttgaatcagagagaaaaaagaaaataaaacggagaaattaaattaaaaagaattccaaggataaaaacggagaagactcgcgaatgctcnatgttctactct

SEQ ID NO: 31324 - DNA, 1407 bp, Heterodera glycines
  unsure (1)..(1407): unsure at all n locations
ctcgaagactgtggtcgttgtcggcacgncagcccatcggtagaagaggcatgaagccgagggcagcccacacgaattctgccaaaaactggtgctgcgcatacagagtaaatgcccagnccgatgattgagggcaataagttcaggaatcgtctcccggttgcgaatggcactgcacgtgtttccgcgacacgatcctgccgatgggcatcgcttcacggctgtcgttgagatggagtaggaacgcagccaactttccgtttttggcacacaaatcatcgtgattgaggcgaggcaaagtcggacggctccgagcagctcgtcctgttgggttcgaatgacgaatgagttcgtctgatccgatggcagtagtgttagcacggtcgccgctgttcctgcgcatttcagtccttccgccgatctcgagcagtcctccgatcgaaccattacggagatgggcttggtagccattgtggtgccgaagacgagcagaagagggagaagtgaagccgccactactcccgtcctggccccatggccccgttcgggatgctgccatgcctgggccattgctcgagctctcctgccgagttgtagtcgccgctgtaactcccggatttctgcccgcgcaacttttgctccctttcgcattttgccctcgattcgttccgctgttggttgtgggagccgtcgtccagttgcccaattgatgaatttgacggggtagctgactcccaaggcaattgctcgggagaaaagcgttgctcccgaccagaatcgggagaccaatgagcaacagcagccgaaaacggctagcacaagtgccgctccaaaaccgaagagggtggatgcccaccgcgggtggcacgttgggttggcgagctgctcccaacagaagaagcagttgatgagttcacattcctctctcgctgggcaccgctgagtgacattgtaagggggggcccgactcccaccaacactgaccgctgcatgagtagccatgaatcagtacctcagccggtagttcgtagctgatcactgtcgctgttggcacagttgcccagcatccgtccgggcagcaaatttcgactttctctagccgctgaccgctgctggtcttcacgccgcgtttcgtgcattccatgtggcacggcagcatcgtcgtgtgcatgtccgggtccgattgttccgacggtggtagcgatggggtgggttgacaccccatgccaaagttgggcagataagtgccatcattaccgccaaggcgaccagggggaatttgctcccccttttatcgaccttccgatgctcaggtgaccaaattctccgtggcttgcgattccgctgtgattttcgtcgttcatctccctgcactgctcgaccctccgacaattgttcgttccgctg

SEQ ID NO: 31325 - DNA, 1020 bp, Heterodera glycines
aaaaaagagaaccatttttttgagaaattaattccccaatttccccagcttttccggtaatggaaaaaattttgaagaggctctccgggaacggattagcatcggggttacgagatagaaatttgtcctaaaaagagatagccatttttctgagaattaattcacattttccgcagctcttacggtaatggaaaaaattttgaagaggctctccggaacggattagcatcggggttacaagatagaaaattgtcctaaaaagagatagccatttttctgagaattaattcacaatttccgcagctcttacggtaatggaaaaaattttgaagaggctctccggaacggattagcatcggggttacgagatagaaaattgtcctaaaaagagatagccatttttctgagaattaattcacaatttccgcagctcttagggtaatggaaaaaattttgaagaggctctccggaacggattagcatcggggttacgagatagaaaattgtcctaaaaagagatagccatttttctgagaattaattcacaatttccgcagctcttacggtaatggaaaaaattttgaagaggctctccggaacggattagcatcggggttacgagatagaaaattgtcctaaaaagagatccatttttctgagaattaattcacaatttccgcagctcttacggtaatggaaaaaattttgaagaggctctccggaacggattagcatcggggttacgagatagaaaattgtcctaaaaagagatagccatttttctgagaattaattcacaatttccgcagctcttacggtaatggaaaaaattttgaagaggctctccggaacggattagcatcggggttacaagatagaaaattgtcctaaaaagagatagccatttttctgagaattaattcacaatttccgcagctcttacggtaatggaaaaaattttgaagaggctctcggaaacggattaacatcggggttacaaaataagaaattgccctaaaa

SEQ ID NO: 31326 - DNA, 1588 bp, Heterodera glycines
ccaaaaaaaactttttttaaaaatattttaggcatgaaaagtatagggcaatttttccccattaaacataaatattgtattagctgtgaaagaacttatcaaattgaggaaaaacacagcctggaatgcgaggaaaggtgtaaaaaatgctgtagaataggtaaaaataaaataagtaattttttactggaaaatctaaggcttcgatttcccgtgccccccgggaagaaaaacattaaaatgcgataattgtaatagatctttttttaatgagaaatgttatgagtaccacaaaaagaaaatatgtaatttatacaaaaaatgcacgaaatgtcaaatggagtacactactgatactaaaaataaacgcgaatgcggtaaattttaagcataaatagtgagattgagaataaaaatatttagaagaacaacattgtagaaaatgtcatttattccatgatccaaagaaattatgctttatgcaaaaattgaaaatcaaaaaaatggccccatataggattgttgcttacgatttggagtgcacggtatttatttttaagttcaaaaataatattttaatttagactaatacaattttggacgaaaattcgctgagaaaagagactgtacataaaccgaattttattagtgcccgatttacctgttcattatgtgagggagaaataaaggattgtgaaatttgtgggaaggaaccgcgacatttaaaatggtgtagtaaggatgggattgacccgttactctttcgttaaatggattataaatttggaaaaatatgaaacgtatgcattcgcacactttagcggtgagaataaaaaaaataaaaaatgatgaaattcttttttagggcgttatgattcacactttgttttgagggacttgcgaatttgggatataagcagccggaattaacgatagcggatttaaaaatttatgagattaagtttagaagaggcgaaaaattcccgaaaattcattttcgggacagttggcttttaatgcaaaataaattggctcacctaccaaaaacatttggtttggattgtgaatcaaaaatgtactttcccaatcaatttaacaaagaggaaaattatggtaagaaagaatttccattaaaaaaatatacccaattttaggcataattttgacaaccctcccgccttttgaggattattttcctgatgaattaagtgaagaagaatatgacaaatttaaaaaatggtattatgcaaattataacagtggatttaatgtggttaagttaaaaaattttttatattgaactatttaataagacgtgctgagattgtcaacaacaatagcgtcttcatgtatgaagtagggaccaaaataaaatgaaaataaataaataattttttagcatttttcgtgccaaatttttaaaaaatagcgaaacaatcccgattattcctgagtgggtttgaaccaaaagatagtcaaagtaatatagcgatcaaatattttgaatggattatgcacagagacagagttagagcaagacatgccggaaatgggggagaaattatgctttttggcgataaaaaattaa

SEQ ID NO: 31327 - DNA, 1347 bp, Heterodera glycines
aaaatatgagcacctttaccgctcgttggtttggcgtattccccggctgcccgaacgtgaaagtgccatttacaagtcgtacatgctaaagtaacacagaatattgactccaatttgacttttccattgtttctcctaaggtgtcgctttgaattgtcctcctttgatctgatgcccgatcactttgagccctgcggcgtcgtcgaatttacaatgcctttggcggtgatcagcaacactgtggtccgatcagtgggcgtggagcagcacgaagacagcgaaagtgtggagaaatttgtgcgctatgtggccaagtgcaagtacaggtagagagagaaagaaattagagagaaaatgagtgagaaaaggagagaaaaatgacagagaaatagagagagggaaggagagagagtgggaaaagagaaaaagaaaggggagcgcgaagagatgttctaataatgtgagctattcgagaaacctttcgagaagatttgattccaagacccgagattaatatagagtcgaaaccgagactcttgattactctctcgacaattacctaattaatccaaaatcccaattgtcggaataagttcaaaaaatgaatatgaaaaaacagaagttctttaattacagtttggaaatcgattaccagcaatgttctgacttggacaatgagttggccaccagcgcagcagagaccgaagagccagcggaaccctcgcgccatttggccgcgtttgacccgaaagatgtgcagcaaagacacgaggggtaataaatgtttcagccaattgtttaagcatttgtcacgcttttattcctttatcagataccgtatcgaattgcccgacgaccgtacgaatttaacaaaaacgggagacgaaaatggagacgataaacgaaaacgaaggtcgagcagtagcagcagcagcaatgacgaggacggggggagaagggcatttccggtggtccaaattgacatgaaagggtacggctattgagaagagaagaagcgacggaatgaatgaaagggcaaacaaaaaatgcattaaccgaacaaatgcaataaatcaaattaattaattaaatatttaaaaagataataataaaataacaattaactgattgtttggttgttttttgtcagtttctccaaaaggccaaagctgagaaagggccgttccatcaaaacagtgaaaccttttcaattgtatccatttgaaagttcttcgaaaaccccaccaaattcaaaacatcacatcgccatgccggcacggaaaaaggtatttgaagaagtgtaagaaacaattatctgcctgccacttcgctgctgaaataattgaa

SEQ ID NO: 31328 - DNA, 1055 bp, Heterodera glycines
caagtattatcaattgatgggactcatacttagtaaaataccattggacccataaaagttgatgaactcataaagtgcattagaaacctcatttaatttttgtccttgacttttttaaaactcaataagattttctgaaattgaacagattaatagagaaatctttgggctatttttcatatcaagtgcggtttcaattaaaatggcagagcatttcgtaatgcaaattttcatttttacctttaactcggaggactttgacaaaagttatgacggttttttgtcgaaaacaatacgaaaaaagatctttataaattaatgcgtacatgcgcgatttcttttgcgccgcaacttttatctttttagttaacaaagaaaaggtccataaaaaggggaaataccaaaaatgggatttgaaatctataaaaagtctataatttaatttaaaaaatattcaaaatattttaatccaacaaacagtagcgcagctttctttatccctggaacataaaaacatccatactaacattttccgtcccataaaacatgaaaattttgttacacctaacacacaccaaaaacaatgtgtcatcgagagtgctcttatttatgctccgtcactcttctccatgaacagcgtgtaggggcacaacggcttctccttggtcccgtacaacaccatggccaagatgtgcatgccaaaattggtttcagtctcacatagcattcctcctgcagcgcgcgcacctgcggattgtacagaccgtattgcccatcaccaaaccgccacaacgagtgccctctgggagatgaggcaaaattttaccatatgccttgagaaaaaagatagtgaaaatacggtagaaaatatttgtggtaatgacacagtacagtatagagtactgctaaaggctttaagggttcaaacaccaagaaaaaaacaaatacgaaaatattcccccccccaaacgaaaatctaaaaattttatagactattttcgtaacaaatagcactcaaattttcaaaaatttttccggcggcgcctatcggcacc

SEQ ID NO: 31329 - DNA, 1694 bp, Heterodera glycines
tttcagaaccgagttatgaatttttttctgaaaaatcgaatatttccagaaattctggaataactttttttcttttgaacattataaaaccaaataaacctcataaaattctcccgattttttgctatttttaaagctttaattcacttaaattgagcagtccttcattgagttatgaattttcaaattttaacccaaatttccaaggaccaaaaaaattaaaaatattttcgaatttttaaaaaattccaaaaaatctgaaacttaaaataaacatcatatttgtgctcaggaccctaatttaccccagaaaaatatttttcaccctctttttcaacccaaaaaaaatttttgaaaatttctagggggcctagctcgaaaatttttgaaaatttccggccatatggcacaccattcgatagagcttaaaaaagtctacaattttgccctaaggagttttttcgataaaaccaacccctaacgagttatggacccgggactcaaatgtcccgcacaggccaaaaattttttctatttccgggaaaaaatcgaaatttttccgaaaaaaataccagtcgatagagctcgaaaaactatgttttggaagtggtctcagtttctctgggaaaaatcgttaaaaaatcctaaaattcaaaaacccgaaaaccgttttttaggcttagctcgaaaaattttcaaaattttcgaaattttaaaacttggttggatagcctttcaaatactacacatttttgctcagaaacaatttttcggtcaaagcaacccctggcgagttattcgcctggtactgaagtgtacattttgagcacacttcaattagccaagcgtgcaggccagggggtggctctaataaaaaaataaaaaataccagcatgtagaggacagttgtggggagtgccctcacagcgggcactttttgattcgggttttagaaaaaaagttacaggccctaaactgcaagaaaaagtgagaaatcggtccccgggactcagtcgtccgcgctgaatttttctctatagttttcccggatgctcctcaaaaagttgtaagacccttccactactttcagggcgctcccggccttcggccgggagattttgttttttgaaacgaaactcaaaacctatataacatatatataactagcgggtgcgtgaaccgtcggctatttagctgggataaagcgcttcgcgctttgggagcttcgctacctagattagctatcgggttgtgaaaagatttggaatttttaaaaaattatcagcgatttttaggccgcttcgcggcctcagacgggcgctacgcacccgtttttacgttcggtgatttttaggctgcttcgcggcctcagacggaattctgcgttggatttttgctccccataattgtttgagtaccccaaacggacacttgaaaaaatcgatttatttttggtttcggggcagtccccccgaaccgatgcgcccagatttatggggagaccgattccttcgggaatagcttccctatagcctgtgctttaattctgcgttggatttttgctccccataattgtttgagtaccccaaacggacacttgaaaaaatcgatttttttgttttcggggcagtccccccgaaccgatgcgcccagatttatggggagaccgaatccttccggaatagctgacctat

SEQ ID NO: 31330 - DNA, 969 bp, Heterodera glycines
gataaaaaaatcatttggtaatggattcaacagaaacggaaaaattagcactttgtggaaaatattttacttacagatttgaaggtttcagacgcggtgtagaatcttaaaaaattaatactatttaaatcttttataagatttacgcgatacaaattaaggaaatagtgaagttcatgtgatcttaatagaaaatggataaagaaaaggtggtttattgaaaaaaatggtgttaattcgcgtgcagaatctataaataaattaatattattttaatcatttaaaatattttagttatataaatgataaatcgaaatgtattaatgctcagataaaaaaatcatttggtaatggattcaacagaaacggaaaaattagcactttgtggaaaatattttacttacagatttgaaggtttcagacgcggtgtagaatcttaaaaaattaatattatttaaatcttttataagatttacgcgatacaaattaaggaaatagtaaagttcatgtgatcttgatagaaaatggataaagaaaatgtggtttattgaaaaaaatggtgttaattcgcgttcagaatctataaataaattaatattattttaatcatttaaaatattttagttatataaatgataaatcgaaatgtattaatgctcagataaaaaaatcatttggtaatggattcaacagaaacggaaaaattagcactttgtggaaaatattttacttacagatttgaaggtttcagacgcggtgtagaatcttaaaaaattaatattatttaaatcttttataagatttacgcgatacaaattaaggaaatagtaaagttcatgtgatcttgatagaaaatggataaagaaaatgtggtttattgaaaaaaatggtgttaattcgcgttcagaatctataaataaattaatattattttaatcatttaaaatattttagttatataaatgataa

SEQ ID NO: 31331 - DNA, 2101 bp, Heterodera glycines
aacaatttgtagacttagccaaaaccgtattcagtccaaaaccagagaaaataaatctagtttttggttgctcggggtcagttcggagccgaccgtttcagcgccaccaaatttgaatgttataacttttttcattgtcagttaaagttaaaaagtctggcatcattgaaagttctatatgttctctatatttaggtgtcaaaatagaaaagaatgattcaaaattaaaaaagctatggcaagcggtgccgaaaaaaccaagaaaaagtcaaatttttgagtaatttttttatgaaccggcgaaattttttgcaattttgaaggctaatagagaaccttaagagctatcgaatgataccaagattatttgatttatttgacaaaaaagataaaaacgaaaattgaaaaaaactaaaatgtaaattgaacgaagtcagaaaagtggatcgaattcccgggttatctagacagatatggacgatacctgcttcacacttcaaccaaggagagacgagcatgcaatatggcctaccacgatgtctcgcgcgttttttccaatatgcctgataccgcgtataatttgggaacgtttaattgcaaacacttggcacaacattttttttccgctggtacgtttttgccatagaaagggggggggagttaaaaatcagcaattataattccgtataatctttttttcttcacaaatttgtttttttatttatagggcatccttggatttactcttttattcttaccaaaatttccttttttccttttattttgtttttgctagatttaaatcgacatcctaagttttcctgtaattttctaaatcgttttgcttttttaccgttctccccctctctctatctctctctcttcctgtatcctttatttatagaaatgcccgattccgactccgactcgcagccaaacactgatttgcaatcttattttaagaagcgacagaatgcgattgcggtaatgaacacatggtcgcaatagaactgttgtggcgacaccacaaaatgtttgacggatgggttggttatattgcaacccatgacgcaattcgcctgcgtttgtggtgccggaattgcaatataagactttgcgagacttacgaattttcccgcagtgggaagaaaaaaaggtgggcttttatcaaaaaccgaatgaaaactccatctgcaattttcattattcttttgaaatgaacaatttgtagacttagcccaaaaccgtattcagtccaaaaccagagaaaataaaatgatacccaggattatttgatttatttggccaaagaaaaaaagttaaaaacgaaaatgtaaaatgaaaaaaccgaaactttttatattctcttcaccctccccccctcccttctcttctcttcccctcccttcccggagggtgttagtctttgttctgtttagtggctgtcatcgacagaaagccgaatggaacggacggataaggaaggggaaaggagaagaagcgaatcggacaaggaggagggcgcacaacacacagagttaatgcccacccgcccacccattcgggaaacgaatgggacggagggcgaagacgacagccaccattactcactcactctctctctctttctttcgctctcctataactacttttattcacccttcccccactccactctctatctttcattttccatagtgacttcccttcttctaacaacttttattttcttttctttcctttctttctttctctttcttttatctctctctctctctgtctctttctttctcgtttttttctttctttccttcctttctttctctctttcatcttttttcctttctcatcttctccttcctctttttcttatcttccataattccttatgccttcttcactttctttcttttcttttcatgttaagtcagagaaggaagagaacagacatcacagaattgtcccaaaactcgctttatcggcaaaacggagaagaccgaaacgaagtcggcctgccattctcttctattctcatgttctttccttatctctgttactctcctactgcctccctagtcactctccctcccctcccttttcc

SEQ ID NO: 31332 - DNA, 1805 bp, Heterodera glycines
  unsure (1)..(1805): unsure at all n locations
aaaagattttaattatattttaaattttaaaaatgtgccatacgaggtcaaaaatgatgttgacaagcgctggtaaaaagtcaagggttagtgcgaagcataatgtgacaacgacatagcaatttttcttaatatttcaaattaattgtaggtaattactaattagcataaaagagggtaatccgtacaaaaatgataattgatcaattattaataaattataaaatacctttttgatcattgcgcagctaattgtatgaaaactgtacaacaaataactgcaaccaaaaatgttcatgatgctgatggtacacttgaaaaccaattgaggaatgttgtgccattttaatgggagtcatttattttatgatatcatccgatagctttacaagtgtttggtatagcttccaaattttgaaaatttttgttaatttcaaaaaggttattaccaaaatatttcttccaaaatttttggccatcttttttttcaacttattaaaagtgatttttttcgggaactatgtataatgaaaaatataatttcttccattaccgtaatctcgaccatattgttacagaaacccctgctgtttaggtaacttaccaattttttaatgtatttttcgaacccatttttatggaaatgcatgctcattttaagtcattagtagttatcccacggggagcgtcccaaccgtcccaggtgtgaaaacaggtgttttcaaggtgtgaaaacatgtgttttcacacctttgggagggggtgtgaaaacaaggatcgcccccggtgttcgtcccaaacccggtgtttgtccggggctggtgcgggaaattttccagccatttttttctggcgtttttttgaaaaaatttttttctaaccaaanaggtatggccattactcccccatatnttctcagtaccttttattgaataaattattttcccgcattttttctggcgttttttaaaattttctagtcaaaacgtatgggtaattttcagtaccgattattggcatactgcaattaaaattttaattttttaattttaaattgtgtttgtttgtttcttttttagattttctttaatcgtcattacaaatatttattaacagttttattccaaaaaaattgattttcatcccatttccctcattaattcccttaatcaaaatttaatcgtccctttctgcgctcctccgctgcctttcttctcttttggtactgaaatgctgcaaacttatttgcagcatcgaaggccgattgtgagctgatggacgccgtcgtggacggcccaggattttgcttctcttcggcttccttcgccagtgctcgtttcgcccattcccggaatttctttccaccgcactttttgttttttcggcgctttgtttttgccaagtcaatgccgtgtgcctattttatgcaaagtaaaaaaaaatttatccccgaaatttgcacctcttcccccagttgaatttggtccccaacctccatacaaaagctttcctcgtcttcctcctcgcccgattctgcttcttcttcctcctcctcttccaaaccccttttcggttgtgcttcttccgcctctccttcttttcggtttgcttcctcttccaaaattttttggatcatcagctccgggctctcggtgaatgccaccaattggcggttgcttgcccggagccgttccttgacaacttccgccttccgcttttcatactcaactacatcgacgcaaccatcctttaaatttttattttttaattatttaaattctttttttttcaccatttcggttgac

SEQ ID NO: 31333 - DNA, 1490 bp, Heterodera glycines
aaaaacgggaatatataaaaagcgggacagaaaatgggatttccgcttttctgtcggctcgaattctttcacaacagtaaagactaagtaagcattcgacttgcaatacacacatatatcccgtttaaaagcggctccataattaaactttttttattattttttaattgtcagaatttacaaaatttcaaaaaaaaaaaatgttcacacgcagatgacaaatggttgttgagaatgatcacaaagaaaagaaaataaatgatatttttcgatttcaagtgcctttttgctttggttggccatcgccgccggcttcgattcttcgcgctttatcttttttttttgatcagtcacaacactccgccaaacagcaaccgcagcagcatgccaacaatgcccacagacaacagttgttgctcccttgctgttgcggacggtcgcgctcgacatagctgcaaaagagtggccaaatttaccacaaatttaccattttatagaaggctaacaactcaaaatttagaataacaatttattgcaaaatctaagaaaaattcagtccgaaatttttttaaaataaaaatttagtcattatcaattttttaaattaggtaaaattgattttaaaatttttttgctatagagaaaattaaggtgattgtagtaaaaaaactttctgaacagtttttattggttagtatccaaatttgctaattaagtgttggataatccgtgtccagacatttgcgcctatgtccaaaataaggttcaaatttaagttttttttaatcctagaggttttaaacagcattataattatgaaaattttgttttattttttctagaatttgttgacgataaaattgtcacatacaatcactttcaatcgcttatttaaggcagtttagttcatttgggttgaaaaccgcaagttaaaaccctatttttggcataggcgccaatgtccgaggcgcaaatgtggcgtaaatttataatcagtgaaaattattttaaaaaaattctcgccccatagaggacaaaaaaaatggaaggaaaaaacgcacacgacttgtggctgcggttgttgttgctgaggatagccaccaccaccatatgagttcggctgttgtgggtacggttgcgatgggtaaccgtatccaccgccgccaccaccgtagcccggctgaccgtagttgggctgtggctgctgcgggtactgttgcatgttcgggttgtacggcggcggagcggacatttattagttaaactttttgtttgtgcaaagcgcacaatgacaggacgacgcggaaatgaggtgaataaaaaagttttgtgcactcaaacgaaacttagaaaatggttagaggtcatgtaaaaatggaaacaaaatttatattgagcaaaaacattttccgtgtaccaagggtgggactcgaccgcgattcgcggcgttttttttcccgcgattcatgaccgcggcaatttgatccgcg

SEQ ID NO: 31334 - DNA, 1242 bp, Heterodera glycines
tcaatgctattaattttaaatgttgtcaaatttacactttaataaaaaataataattttctattaacaaaaaaacatcgaaaattgaaattaacacgcaaattctgctacattttatgtaatatttaaaaataatttagtgatatgtccatatccaaaaggaagatatactaattgcccttttaaataagacaaacaaaattattattttttatattgaatatttaaagaggctgcataaaaaatgctaatttaaagtaatgtacctttaaaaacaaacttctgtagtcactgacatgaggcttcaaccaactctgtcaagagaaaatatttgtaattatttagatattcaagtaattaaacaaaatgttacttatttaaatttttagttaataaattacaaacagccgttattctatcatttaaataatactaatatttatctataattcaccaaaatttgcaacgataaccatttctatcagcgttataatatatcagaatcaatcacaattaattggtaatcatgaaaacaaaaattaataaatagtagaaaactttggtttcctattcaataaatatttttctcgaatatcttattgcaagtaaaagcaaataagcaaaaatatcggtaaaataaaaaactaaacaaaaatatacgaatcaaagattttaaatgttgttatacgaacctacactaaattataaattaaacttattaacttttacatttctcaaaactgttaaaacccaaattttaacatgctctctgagtcgttgttaattaataaaaatgtagcaatcttgaactcatttttgtcataaaatactaaatttacttcgcaataaagaatcaaaaaaggggcggaggagtatccataattttagaaaaaaactatccaagattaaataaattattatagaaaattaaaagcagttagcataaatttcataattattgtttaaaaaataaaatgaaattatacaaaataattgctcgaaataaccttctttaccgggattctgtctgaatatcggctacccgacttttggggatttgcaacttggggacccgacatttggggacccgacttttggggatcccgacatttggggacccgacttttggggatcccgacatttggggacccgacttttggggatccgacacttagggatcccgacatttggggatcctgacatttggggacccagacttttggggatccagacatttggggat

SEQ ID NO: 31335 - DNA, 1417 bp, Heterodera glycines
ttttcaaaaaaataccaatcgatagagctcgaaaaactatgttttggaagtggtcttcgtttctctgggaaaaatcgttaaaaaatcataaaattcaaaaacccgaaaaccgttttttaggcctagctcgaaaaattttcaaaattttcgaaattttaaaatttggaaaaatgcagctttaaaaactctacaataagttcgctggcaccccctcgctcagaccaaaccctgacgtggtattcacctggtactgaagtgggaaaaaaaaattaactgagtctccgtgtctgtacaggtccgggatttggtcagatcaaaaaataaaaaataccagcatatagaggacacttctgcggagtgccctcacagcgggaattttttgatccgagtttcagaaaaaaagttatgggccgtcaaacgcacgaaaaaatgagaaatccgtacctgggactcagtcgtccgcgcagaatttttctctatagttttcccggatgcgcctcaaaaagttgtaagacccttccactactttcagggcgctcccggccttcggagaattgacggtgaaatgagacgacgcaaatagtccaacgaccaccatcgacaaagcccaagtggcgaatgtttgacacaaaaattggctatatttcacgagcaaaaatgtcccaaatcggctggcgaatccacaaatgtaattcagtgcctcttttgtcgaaaatttggtgatttgaacgaagaaagccatgacagagtgatcaatgtacctaaaatggatggaatgcttttattcccatataaaagtttctttggctcttgtggagtttaggcccaatactgtaaatttagttgaaaacgaaatttgatttttaccaaatttgagtttggggttcgaaatgagtcgaaacggaaattcagagcgaattttgctggacaacggacggtcgggcaatggaaatggcacagaattgacagcgccgataatcacaaataattccgataatcacaaataattgtggtgccgttgttctgacactgaccttgcgacgaatttcgattgctctccaaattgtcaattcgctctcgtcatcaacatgtttgtccaccaaaagctcgaaatgtggcgaaagaagtgccaatttgaggccgagttgatgacggtcaaaaagggaaagtgtccatccaaacatcgctgcaaaccaactgaaattatgaaaattaataatttagcggaaaagggagcaataagtttttgacaaaaagtttttgaccaaaatctctcagagaatgctacacaaaaccaaaagttttctattaaaaataaaaactttcaaaatttacaaaaattgttgttttttccttgaaaaaattcaatttttgaattttttttatatttttgcggcgagattttgtcccggcgaga

SEQ ID NO: 31336 - DNA, 729 bp, Heterodera glycines
aatgcctatcattaaaaaaaaatgagtattgaaacgaaggcgccaaattcaaaaatcttttattcccaactgatcaaatctaatcaaacataatttttagttgataattcgtgtttgaaagctttatttgattaaaaatattaaaagtaacaatattttaacaaaatggggaagaaaaccaatgttttttggcttttgatgtatcaaaggaatccatatgtctatcaaaaatggaattgagcaatgtctgatgttctccgatcttcagcagcagttcgtcgcccttgtaccggaagaagcgctcagactaaaacaaaaaaatagttttttgaactatgaaatcgaaagttgttcaacctgcttgttcaaaacgtggtgtaaatgttcgatgccctgttcactgatccatgcgaaccatccccagcgcttggcaaagtctggaccatgggcgagcgaccaatgcaatttggggatgaatcctgcggcattgtttgtgtcaaatgcagttggataggtctcccaaagtttcttaaaaggggaatgtgagaaaaatgcaaaaaaaatttttgccttgaaatagccatgaatgccgagacatttgtttgagaaatctgtgatttgttctgttgtcaataggtccgcacgtccaaaaacgtggagctcccgaatttcgccaaggagggcggcaatatccatcgaaaacggtgttccaatcgatcggatttcggt

SEQ ID NO: 31337 - DNA, 1748 bp, Heterodera glycines
tgaatagatttttgacagaaaattattcataatttcgtctattatagatcaaattttataatatagatatttttcgatagccctaagtgttttctattatcctgcaaaattagaaaaaaattctttaagtttaaaaaagttatgacctgagaagctcaaaaacccaagtttttttgaacatttttagtcataactttcttgatacttaacgaaactttttggaattttgtaggctaatagaaagcacttagtgctatttaatgatatcaagaattaaaaatttagatgcttttgaacaaagttatatcaaaaaatattttcatttgatggttttttgactaacgcccattatgatggtttttgactaacgtcatagcaccgattgaacttacggaacggaactgacccccccccccccatcgcagcatatggtcccgctttatctctattgagggcaattagcaatgttttggcacccactcataaacagcagaacaatttgctggcgcttacattagcagcaccgccttatgtaggaccgaacctcaccaccgtatcacaaatttgacgaaaatgccattcacaccacagtaatttgacgaaaatgccatcctccccccccccagcagtaggaggcggcacggacgatggcatccgttcgcggtgagttcatttgtgcgcgcaacaacaaaaaaaaattggcaaaacgtacacacacacacacacacactaattactaattaattgtgcgcagcacagaaactaaaaacggcacagcgcactcatacgcattaattcacacatcgcaaaacaaatattattatgttatcattagcgcgtgtaaatttgtttgaggacatccgccgccggcggcaccgttcggcgcgtctgatgagggcacaattgtcatctccgcgtggagaaaaaataagtaccgtaaccatatgacaccacagcgacaaaaagcaccgtaacaacaattattgcctgctgttcccgcagggtgggcgggggaacaccgtaattagcaaataagataaaatttcgcgcacaatttgctaatgaattgagcactggcacggaggcggggggcgggagacatccgtcggcgcggcaaaataaatgagtcaaacaaaagtgcgtatgccggcgcccctccccgcccattcattagtgacgctgctttggcatttctggcattttgactgttcgccattaaaaacaaaattgctttttgtcaattttcccccattttaaagtgcaaaaaaagggcaaaatttattattttggcgaataaaaatgaaataataaatataagattatattgaaataagaattattttgtttgtgatgtgctgtttattgcatgaccatttgctgtggcattcattttgtgtatggatcaatccgcttcacctacggcaaaaataaatttggccacaaattatttatttacaaccacaataccaataaccatttttggtccatttatttaaagcgtgtaaaatcatatgtaggtttaatcacaaattagccgaaatgtattaatcccgttgggttggataaaacgaaaaaaagaaatgaaattaaatgaaattccggaaaaaagaaattagttttttagtaaattttattttgtcgaaaattattatgcgatatcgagggtatgggtacgactgagcgatgccgtattttccgaatttgcctgaccatttttgggcctcggtagttttcgaattttcgaaggg

SEQ ID NO: 31338 - DNA, 1833 bp, Heterodera glycines
attaaccattttcacccatataaatccattgactctgtttccaatcttttccccttttttatccgcgccactcaataaaaaagccccgagggtatccacctgctttgcttctcccccaattatttaatgatttttgtctgtctgacggcgatttgattttgctgttgtttgttgttgttttggcgttgtgtttgttgttgctgttttgcaaaatctgatcgggcggaagaggaagcacacaaattggtggttgtcaatcatccgcggcgattggtggcgatttgtggggcgttttgcccctatcgccgcccccgcccacggcgatcggtcgtcgctgacggcggcgtcggtggtcacgcgggcggggggcatttgtcggattttgcccccagcggaaatagcctctgcttggcgaggattatccctcccccggccggcgccggagggagcaccaccgctgactaactgacaacgtgaatgtgcgcagcgggcgcgcacggcctgcgcccgcccgtaatcaatcaaaaccgccgccaaccaaaccaaacgctgcagcacagtggcagcggcggcgggtgatgtccgctctgccgccctttgtgaggcacgcagcgcggtgcatgcacacaaatgatgtgtgtttgtttgtgtatgtgtttcagtgcggcgcatgcatccggcgtgcatgtacatgtgaaaccggaagcgcacactgagaaaggaagccagtgcacgcaagttgattatatttagagaaaaagaagaagtaacggaaagtgtagaaaaaactaattggggttattaattgttggtccggaaaggacacgccataaaatgcatccggaaaaggaaagcagtgtttatagagtgcatgtccggaagaaaaaacggaacggacatgggacacacggatttgttgaagtgagtaatttaaaagtgaaaaaagaaaaaaaagtaaaaaagtaataataataaaaaatgaaaaatgaaatgccaaaagaaaaatgaaagtatttttttattattaattagggatgcgatttttaggcacaaaaataggcaaataaaattttttattaacgctttttaggtaacaaaccacgttaaaactttaaatatttcaattgtaaatgaaattattaaatgttttaaagttttttttcgaatatgaacaaaattttaaaccaaaaatttttattaagaaaaaaatatattaaatttagggataatttttttaaaaaattttacaattcttaggggtgtattttctgaaaatttttttgggtcatttcttaggggtgtattttttgtttttattgcatttttgttaaggattttttcaaaaaccctaaaataggcactttatgcacaataaacccgatataggcaaaaataggcattataaaagtcatcgtagacaccccaaaccaagcggaaaacgcgtttttcttgcttatctacacgtattaaatgtgcaaaaattttaggcatttgcctaaaaatcgcatccctattaattaaggagaaaaataaatatttttgtgatgaaaatcaaatgaagaatgtgcgttttcgattgcgcccgttcattcaattaatttgacaatttcttttgcggttgaaagcaaaaacaaaacaaatttattttggtaaaaaagaaaatttagaaatttatttatttttttatgttattaattgagaaaataaatgacaagaaaaggattaaatcaaaatgaattctcagcaaatataaagaaaaagaaaattttgaaaaaataattaatttaaaattaataaacaaaaaaatttaaaatatttttgattataatttat

SEQ ID NO: 31339 - DNA, 1046 bp, Heterodera glycines
aaaaatctacaagtacatatatactgtaccttaatgttttgtatggtaaaaaaatcaaaaatttccgcttgcacgagacctaataaaagtggagagcataagcaagcatctcatcatcgctaaagaaggtggttcccctccccccccccgttttgcccccgctcgtccgacccattaattcatttttattccatcccctaaacattcattcattcacactccgtccgtccccaaggccagcagcagccaccaccccaccccacctgtctatgtctgtccctcgcgaagcccatccatttaatttgggcattcaaaaaaaataaatttagaggcaaatttgtgggggcgacgacaggaaggcgtcctcctcctcgtcgcgtcaccctccgctttttgaaagaaaatttttgaaaatattcccacaaatattaattcatatacacacacacacatatttttgaaacgcggaaaatgtttgggggtttcaatttggtgccagccgatcgtgacaccccccccccgatctgctgctgctgatcactccaaatcaacatagtgatcgttcttggctgaattgacagctccgtctttgtctctctcactcgcatactctctctctttctctgtgtctctctctgtttctctctctctatctctcagcagaacccaatgaaaagtttgtaactgatcgttgttccgctctgtccattcgacctttttaatttgtgacggtcggtcaaaacagagggaggaaggctaaagtgtggtcagagatcagcaaacactttactgatctgatcgggaaggagttttacattttaaagcgaaaaacccgagaaaaaaacaaatgtttatttgtgtaattaatggtgtgctatttttgcaataaaaaggcttggacaagcggtgggggtcggtttagtctggccggtttagtctggccgttttagtctggccagtttagtcagagggtcggtttagtctggccgttttagtcagagggtcgtattagtctggcaagctgtttttgccctacattattcaat

SEQ ID NO: 31340 - DNA, 820 bp, Heterodera glycines
aatagagcccggaattttgaaagtaccgggaccgggcccgggcttcgaaaattgaccggggcgggccgcccgttcaaaaaaagcgcgttttaccgggcgtcccgggcccggttcaaaattttgaccgggcgcccgtacgggaccgggcttttttcaaaatttttggaattttgattaaaaattcgaaaaaattttatagtcctttattttagcttagaaatgtcaagccattgtaaatcgaccttttttactcttcaaaagaattttaaggtgtattttttcaaaaagattttgacgacattgggggggggtccggcagtgccgacagggccgccgggtaaatttttgaaaatttgagtttggtttgttaacagatttacacgaaaaaatgacaaaactttgctattttgagctacattttagaaaaaaatttagctttttgtactaggcgacgctgaagaaaaactttgacttttaatgaaatttattaagaaaatttttggtttttcatgaaatttgaaatttttttttttgtaaaaagaaagttatgaaaatgttgttcaatttcatatggattttggggtctttttaacagttgaaattgcccaaaaatttcaaaaatccaaagttctattgaaatttttgaattaaagacatttcgccaaaataattatttaaattttcaaattttgggcagtttcgctagcggaatttaagcccgttttagcccggtcaaattgaccgggcccgggaccgggaccgggcttcgaaaattgaccggggcgggccgcccgttcaaaaaaagcccgttttaccgggc

SEQ ID NO: 31341 - DNA, 1512 bp, Heterodera glycines
  unsure (1)..(1512): unsure at all n locations
aagtgcgaaattcgaaattttggggttgagttnaacgttcgaattcggacccagtgttctaatgtaatatgtattagctaggtatataggtaagaacctttattgtttacctattggcatttgcaattatataaaaagtgcccgttaaactgcagtttcccggactttcgctttgcttttcaagattgaagctttcttctaaatatgtatgcgtttccatgctatgggaattagtttcataatgaagaaagttaaacccagttggtgaagctttaaaaatgtttttaaaaagaacaagatatttacattaaagttttctttaatgaatttcaactttcgagctttttgaagcaattaaattacaaagaatacatattcattttttgctaaaacgacttataatttctcagaaaaatttaataatattacctattctttttctcttttaaggtaaaagaagacaaaaagaaaattttggtcgacatgaatatcaatcctttgtgtagaaaaaatttacaaaaggtgaacaaaataaaaattaagggagagggatttcttggaaaatttataatattgtagcaagggagtctagcaaaataaacaaaaacaaatgaatggtattcttgctagactcttatgttatatggtaacggattatagattaaaaaaagaattaaatttcggtaaaaaaggaaatttggttttttcattttttcgggttaaccatttttgaaattttacttagacgagcatcggcctcggcaaactcagatttgaagtgcctgcggagggcttccatgtgtttgaagcggagcgtaatggactgaggctgaacctgaccaatggaactatgtccgtgccgggcactgacaaatcactgtctttggaggagaccgtcaacttgggcgtctttgacgcacggtcgctgattgtgcgcgacccacgcaacgggcgaaggctgccgctgaacgaagcgattcagcaaaaggtgctcgcctgtttcaaggggcagcccattaaccagggaaaattcgaaaaatttattttcgaaactggtttttttctgtgagaaaagtctccaagtctatcttagataagaaaaaaattattcctaaaaactttaaaccaaggttttcagattagatattttctaaaatcgcatagtttttctttaatatgtagagaggggaaagtccgcccaatcttcgcacgctcctttcataactctggcggtcgaaactccgccaagaaaaaattttcaaaaaagtcgctcgtaaattttttataagtattttttcggtaatattatcgatggtaggaccccttttttgaaaaaaatattttatctcgccatgccacagatgttggacgggcttggccaaatggtgcaccgaggtcgtcgtctgacgttgcgcgatgttgcgtttcgcgcggtaacggaatcgcccgctgctactgacggcagcaaaaaaatcatacaatttccgtccgccgctgctgaaacgggtggtc

SEQ ID NO: 31342 - DNA, 2115 bp, Heterodera glycines
  unsure (1)..(2115): unsure at all n locations
ttatacatcccattatgaactctanaattatcagagtgccgaaaatcgcatgtgatctaagcctagcaaaaaatggtgtaagtaaaaatcgtaattacgctcaaaaagcttctcaaacaattttagctcatccaattccttctacaatcgcctttatacatcccattatgaacgctaaaattatcagagtgccgaaaatcgcatgtgatctacgcctagaaaaaaatggtgtaagtaaaaatcgtaactacgctcaaaaagcttcacaaccaattttagcgcatccaattccttctacaatcgcctttatacatcccattatgaacgctaaaattatcagagtgccgaaaatcgcatgtgatctacgcctagcaaaaaatggtgtaagtaaaaatcgtaactacgctcaaaaagcttctcaaccaattttagcgcatccaattccttctacaatcgcctttatacatcccattatgaactctaaaattatcagagtgccgaaaatcgcatgtgatctaagcctagcaaaaaatggtgtaagtaaaaatcgtaactacgctcaaaaagcttctcaaccaattttagcgcatccaattccttctacaatcgcctttatacatcccattatgaacggggggattttacaccggattaatgggtcatatactacttacgttagtaaaaatttgttctcctgccttaaatgatcaacaaccggtaaaatctctcatatttaattaatataaaattacattgatttaattttagcgtattacttacatttttgttaatatcatttttgctagaagatattattgaacaaaaattttctcaataactagtttatagagttttataatttttttattaataaactaaaatataaaatatttgtcaaaaattgaatattataattaccttttttaaacatttattccaataaacatattttttattgacttttatccatttaaattgtattcttgtctagcattttgcacaacataattttttgtatttcatttaatttaagtataattaaaaatagccttaaaaagaatccttttttaaatttagccattttaatattatcattaatctatattttaatacaaagcaacaaattctctcactattttggaaatcaggacgggatactgcctctttttcaaaattcttataaaacggtcaaaaatagaaaaatttaggcgcaggcaatttttaagaaaattaatctcataaaaattttcttctcggtaccaacaaacctatttctttactcctattagctgttaaatatttagaaattaaaaaaccctttttatatgtaagtaattaattgttttattcttttagcttttttcgcattttcttttcaataattcttttgtatttacttaataagaatgcatttaaaacttttttaaagtagcacccaaaacatttgttgtttgacatttaaagagaggttttttaaataaactttttttttcttttttcctttataaattttcaacaattttaattaattcaaatatttactttagaactggaaaggataaaaattaaatttgaaattttttttattgcaattccatttaaatgctcatttttattaattaaaattcaataatatgattgtgcatttttttccattagagttctttttagcgcgtctcaagttattatgtttatttttgatgaaaaattcaggcaatctgattttaataataaaagtgaattatttcaagtccatttgaccgttgaaactgttttgttccctactgcctattgagttaaattctatttatttaatattattttagtaattatgatacttttttgagttttgatttaatcatttatatattatcttttggcttcaaaatttttcttttttactatgctttatattttcattatatttatttaatattactttagtaattatagtacttttttgagttatgatttaatatatattttaatatcttattatgtcatatttatttaatactactaactaatatataaaaggtaattagattttgattgtttttcatttattttaactaaattgttttagaacggagagtgcttttaataaactcgtat

SEQ ID NO: 31343 - DNA, 1515 bp, Heterodera glycines
aaagggggggggggggggagtcccttttacaaaattataaattcaattttcttggttccgtcccgtttttccaccgtgaccaccttggatttcgcaagtacgggtcgctgatgtcccttttgtcaaagaatgagccgtccttgttttccaggttcatcgcctctatgattttcatgcgcacaatgccatccggctccgggaagtacagcttggccacgtcgacatttggcgccaacggaacgacgattttgttgggcaaaaccaacagattggccacctgacaagaagcagaaaatgcgggagggaaagtgcaaacagaagcgaagagtggtggtgtttagtgttcacctgagtgttgaccaccgaccgaatggcgtcgatcagtccgggcagctgtacgaactcgcccatgccggtcaaattgaagtcgaacttcggcaactccatgaacgaactcgacacaccgccgaccctaaaatgggagggaatgcaaaacacggaacaaatgacgagaatggccaacaattctcgaaataaaagaccggcaaattttagacatgggaaaagcattggctgacagacggactcttttcattttaatacaaaaacaaggaaagtttttccggtaatcgcttattcgttaccgtacccattcctacagactgaaaatgaccgaccgatgaaaaaacaaaacaaaatgccaacaacaattgtacacaaaccaaacacacacattggcggttgggagagcagcggctggagggtgcagcggagtttgccggagaacaccatttggttgagtccgccacggaagccgcacgcttgcacagcgaactcggcgtcccccgcgtacaccacgtccatgtccatgatcacgcggtcacggcccacattttgggtgtacactttgagaccgccctgggaaagggtgaaatttggacgaatggcgagcaacgatcggaatggaatgtccgctttctgctgactgactgaccactctgaacggaatgtcgcccatgtcgacagcgacaaatttgaaggatttgaacggcgccggaagttgggcacggatttggggttcgatgaactctttcaggaacactttggtgtactcgccgatatggggccaaatttgttgaattatctgtcaagcgagaatggaaatagacaaatcagtgaaaaatgaaaaaaaaataaggaaaaacaatttaggggcctaataaatttttcattatttcaatcaaaaataaatcgccaaatataccctcccccccttttgcccagaatatcccttttgttgggatttgagccctaaatgcaaagttgatcggatcgtaatggtactggcgcactttgttgacccattcgatgcgttcgatgtccgggaattggacccacgcggggaggtcgtcgacgcggctgtactgcgccatgaccatctcgcgttcgcgcataatcatgctgcgcatgctcatccgatgctgctcccggcgaatccatgagtgcgttttgagc

SEQ ID NO: 31344 - DNA, 1322 bp, Heterodera glycines
cccccccttctccatttatcccccccgtgtctaattatcccccctttctgaggaggttgaaaaataatccccccggggggataaaaagagaaaatacggtaatctatatttttcatcttaaaatgctttttgtcattaagtattccgtcaaaaaatgttttttttaaatgtgcccatattttgtaattttatgtctatatttcggcggtttaaggcatatttttgttttttaaatcaaattaattagcagccttaagcatgattttcaatttgttaggttttttttattactgcttgatgtagaagcttgatattcatcagcagcctttttacttggttcagcaaaaactgctttattcacttggcccattagtgtcggacaaaacttccaaaaagtcgtttcccttgaaccacaccagtttcgagcactacaaaataaaaattgcaattcttttcactagtcctatttttgaaaaaagcctggatttcctggtcaaaacctaggtccagaaaaaacccaggcttgtcatggccttgttctcaggccaggacctggataaaactgtttgaaaaaatcattaattgttaggaacacctgttttatctacttgaataataatgtgtttttaatctatttaatctttttcagataactgaaataaaacattggtcaatctgaaacaataaattctaaaatgttgctcaataagtccttgtttttcgtgcaaaacctgaaacggattatttttatatttgatctggattttctgctggacaaaatccacgaaaaatctagattgtcaaaaaaaggcctaggcatgagtccaggtccagacgatttctacgtctcacttaatagaaaattaaatttacccttttcaattgctcctgcttcggcttggacagatgaaataggtgttaaagcttctaatttttttaaaatattttattgaaaattattctttttacattttaattttatttgaaaatatttaatatattaccctcaatttgaagtatctcttttttatgtgaatcgtcatcatccgctaatgacggttcactcgaatctgaatgtttaaaagtaaattaaaaatgtcaacattttgcaaacaatgctactgttttcgtttgctgattcgtagtcactgtcggactcctaaaatttttttcaaaattttatttttctaaaattaaaaaaattcctgagttttttcttttattgcttccactgtattcagcagcgtttctaatccttctccaccaaagtgagatgtttccgccatttctaaatgaaacattttctttaattttgaattaga

SEQ ID NO: 31345 - DNA, 1405 bp, Heterodera glycines
  unsure (1)..(1405): unsure at all n locations
gggggaaaaaggggggtgaaaaaattttttgggaaaaaaaagtttttaaaaaaaaaaccccccgggggaaggggggggggaaaacaattttaaaattttatatttttttttattttattttttccaaacgggttaaaattaaaaaaaaaaccccctcccggggggaaaaaagggggtttgaaaattttttttggggaaaaaaaacttttaaaaaaatatccccccggggggaaggggagggggaaacatgatttaaaaaattttcaatttttttttattctaatctactcaaaacggttccagaattcaaaaaaaataacattcacggtgaaaaaaatggggtatgaaaagtttatggggaaaaaaaagctttacaaaataatacccctgggagaagggagtgggaaacatgatttcaaaattttcaattttttttagtctaatctactcaaaacggatcagaattcaataaaaataacattcacggtgcgaaaaatggggtttgacaagtttattggggaaaaaagactttacaaaataatacccctgggagaagggagtgggaaacatgatttcaaaattttcaattttttctagtctaatctactcaaaacggttcagaattcaataaaaataacattcacggtgcgaaaaatggggtttgacaagtttattggggaaaaaagactttacaaaataatacccctgggagaagggagtgggaaacatgatttcaaaattttcaattttttctagtctaatctactcaaaccggttcagaattcaataaaaataacattcacggtgcgaaaaatggggtttgacaagtttattggggaaaaaagactttacaaaataatacccctgggagaagggagtgggaaacatgatttcaaaattttcaattttttatagtctaatctactcaaaacggttcagaattcaataaaaataacattcacggtgcgaaaaatggggtttgacaagtttattggggaaaaaaagactttacaaaataatacccctgggagaagggagtgggaaacatgatttcaaaattttcaattttttctagtctaatctactcaaaccggttcagaattcaataaaaataacattcacggtgcgaaaaatggggtttgaaaagtttattttgaaaaaaagactttacaaaataatacccctgggagaagggagtgggaaacatgatttcaaaattttcaattttttctagtctaatctactcaaaacggttcagaattcgataaaaataacattcacggtgcgtaaaatggggtttgaaaagtttattgnggaaaaaaagactacaaaataatacccctgtgagaagggagtgngaacatgatatcaaattttcaattttttctagtctaatctactcaaa

SEQ ID NO: 31346 - DNA, 1154 bp, Heterodera glycines
gactttttcagtaccaactttgtccagttcagtcccggttgaataactcattagggtttgatctgagcgagggggctctagcggacttattgtagagttttggaagctcgatttttccaaattttaaaatttcgaaaattttcaaaaattttcgagttaggcctaaaaaacgtttttttggtttttgaattttaggattttttaacgatttttcccggaaaaacggagaccacttccaaaacatagtttttcgagctctatcgactggtatttttttcggaaaaatttcgattttttcccggaaatagaaaaaaaatttggcctgagcgggacatttgagtcccgggtccataactcgtcaggggttgattttaacaaaaaattgtcttagaacatttttgtagagctttttaagctctatcgaacggtgtactacatgatgtaaaattttcaaaaattttcgagctaggccccctagaaattttcggaaattttttttcggacgaaaatgggggtgaaaaatatttttctggggtaaaataaggtgctgagtacgaatatgatgtccattttaagtttcataatttttggaattttttaaaaattctttattttttggcaattttttggccctcgggattttggcctaatatttgaaaattcataacaaatcgaagggttgatcaattttacaggaataaagccttaaaaatagagaaaaatcaggagaattttatggactttatttggaatttctatctaaaaaaggaaaaaagttattccagaatttctggaaaaattcgaattttcagaaaaaaattcataactcggttctgaaaagatattctggaaaaataaaatactacaaaaatccgcagttttttgctctattatataaattttatttggcatttttatcacttttttaagaatttttataaaaataaaagtgattttgagattcgggaccaaaggggggtgcacatggtttttgagtgaaaaaattttttcgacaaaaatcttccaaaaacatgtctttaggggttatttgggccgctgatcacgaatacgtgatcagattttacgtttgacatcgttaagccctcagaatccctgtgtgattggggattctgggacatgttctgagggggggg

SEQ ID NO: 31347 - DNA, 1279 bp, Heterodera glycines
gcacgtggaggctgagtttccatttatcacctttcgaagggtcatttcaaaagtgtagagaaccagcgaagcttgtgtgttcagatttgatggtgcgcattgaggaaatgacatgtgacacagtcaacagagtgatggccgacccggaaatacgcgaacttatccagcagcagtggcaaaaggttagtgaccacagccaagggcagagatagataaagcgatccctttgggacaggattcccaatatgagttcgtcgctcccaaacggccttttcttcggatgacttatgcggaggcaattgaatggcttcaaaagaatgaagtgatgaacgaagaggggaaacccttccaattcggcgaggatattcccgaaggccctgagcgatttatgaccgacacaattggacaggtctttgaatccctcgtttttctttcacaatcgcccgttcccttcagccaattcttctcaatcgctttccgcatggaattaaggctttttatatgtcacgttgtgcagatcaaccggaattgaccgaatctgtggatttgctaatgccgggcgttggcgagatagtcggaggatcgatgaggatttggaaggaggacgaactgcttggggccttccaaaaagccgacatcgatcccaagccatactactggtacgtggaccagcggaaatacggaggttgcccccacggaggttttggacttggtctggagcggttcgtatgctggttggccaatcagcatcatatccgtgatgtgtgtctcttccctcggtacatcgggcggtgtgcgccgtagcttttttccgtctttgaaaaggaccaaaaacgaacccatacgaatatgggtattgttcatttttggcgttaaaacaaatgtatcttctaaattgtgcattttttttgttgttattgcataaagggataaaacacatgaatgttcacaataaatatgttatggtacaaatatgaaaagaatttgggacttagaaatttcataagttttctgaaggcgttaaaacaattgaaatatgcaaggaaagagcaatgcctaagtacactattaacatggcgaggaaaatcagttgctttactgtcatttgacttgtacccaacccttataaaaaggattgaatcagaagaatttcccataaggggatgaattcgcgtttggtgggggatgtcgttgaaaaattggagccttctgagcttgggccaatggaggcataatactgccaccgatcgcttgcacaacggttggagcacagcggaag

SEQ ID NO: 31348 - DNA, 922 bp, Heterodera glycines
agaagggagtgggaaacatgattttcaaaatttttcaccttttttctagtctaattctactcaaaaactgttcaggatttcaataaaaaataacatccacggtgcgaaaaaaagggtttgaaaaagtttattttgaaaaaaagactttacaaaataataccctggggagaagggagtgggaaacatgatttcaaaattttcatttttctctagtctaatctactcaaaacggttcagaattcaataaaaataacattcacggtgcgaaaaatggggtttgaaaagtttattttgaaaaaaagactttacaaataatacccctgggagaagggagtgggaaacatgatttcaaaattttcaattttttatagtctaatctactcaaaacggttcagaattcaataaaaataacattcacggtgcgaaaaatggggtttgacaagtttattggggaaaaaaagactttacaaaataatacccctgggagaagggagtgggaaacatgatttcaaaattttcaattttttctagtctaatctactcaaaccggttcagaattcaataaaaataacattcacggtgcgaaaaatggggtttaaaaagtttattttgaaaaaaagactttacaaaataactaggcgtcccggtagatggctgggcaattgatggggtcggctggtaggccacacgaggggtagaagtgtgaggtgtgcaccgttgcggttgttagtgcagtagcagctcaggcgcagatgcgtgtctggatgttcatgcagcagcagctaccggtaacagccgagcctagccgttcaccccccaccctacgcggcatccaaaagaattgatcaggttcgtattgactcggtacactcgctcgtcgctccgcttcgctccgctcctcgctcgcgcacctcgaggggca

SEQ ID NO: 31349 - DNA, 1370 bp, Heterodera glycines
  unsure (1)..(1370): unsure at all n locations
actcatcgccactctctccatttntggtccatatctctttcagaaataattaatcaattaatttttctaagtggaaattaaaattaatttaattatttaaattataacatatttaaataaatataaaaatttgatttatagcacaaatggcaaaaggcaaaagacgttattgagggaaacaatggattttttaattttttgtgtttttaaatagcatttttgagagaaagcggagaaggacaaccatgagaaaattgagccgtgagaaaaacaaaaaagccaaatgcttttaaatgcgttcaaaaagaaaaaaataaaattaaaattaactaaaaaatgaaaattggacttagaatttactttagcttaatttgtattaatcaataaagaaaaccatttgctaattgatatattattatttaacacttttgaagtttaaattttttctaattagtttgaattagtaagcaaaagtaaaattagtatctttccaaatggtaagattttttttttttgctaaatgaaattaattgaaaaaattgcttttttatatatgcttttaaatttacaaaatctgtaattggctatattttcgtaaataaatatgttatctgcgctgacccaatttaaaaacaaaaacaaattttacgggagagagggggtggggggtacgtacggcccatgcaaaaagccgtggtttattgccacaaggccagaggcccattttacagcattacttcaatgtaaatcaacacatgtgtatcaaattacccagcatttgctactaatggcacagacaatttaaaattttttgtttgaatccattaaattggatagaggaaatttttcgtttttaggaaatccacaattggcattttttaaaattccccattgattttatttcattgtttcctggtaagggattaaatgtgcaacacttatagttaaattaataatttacattgccacaaatgctaaatgtcaatcatgggacaaggtcatgtaatatgaacttaaatgccaaaatgtgatcttctcaagcataagcagacacacatggattatttgcggtgacaaatggccaccattttccgctctccgtggccaagtatcccagcagcaaaccaccaaaacagcagcagcaggtggttgacgtagcggtggcggtggcatttgaaattgaaccgcccgccctttggccttctgttggaccacgcacagatttttgggcggctttttagctgcaacaacagcagcagagcaaatgtgtggtgggtgcgatgtgttaaagaaaaaatggataaacaaataaataaatgattgacgaaaagcagcaaccggcgggggataaggggcgggggtggctgacc

SEQ ID NO: 31350 - DNA, 1290 bp, Heterodera glycines
tttgctgtcgatttgctcttttatttgcctttccgttgccctaatcaatccgcgactctccgccacttccaacgctctccgcgcctcttttttggacccctcacgccctttctcgtccaatttagtaatcgcaaccaaaacatggaaaacttggctctaaaacaaacaaatgctcattaattagttcgatgaaatgcccgaaagaaatgagcaagtgttttcagtgccaacccaaaggttacaccatttcccaccgcaaagagttggctggccacccgctcgccaccgaattcggccaaattggcaattccaatcagacaacgccgttggacctcggggttttcggacattgccaattctgtgaaaagctcttcccaactgttcaattcttgcagaattcgttcacagaacgttggattctcactgtgtgagaatgacaaagttcaaacagaagatgtcctcgcaaacctgagaagagcaaagccggcactgcttgccaatctcaggcggtcgtccccctcggcacagtaaaggagccaaaccttcgcacgatccgtccccgcctaaaattttgtttataatgaaaatcatgtcaattttgaattgattacggggaaacaccttaataacagtgttaaaatactcttcgcaatacaacaaattcagcaataattcggcggccgctgctcgcaaatgttcgttgttcacttcgaaccaaaattcctccactttgggtagacatttctccttgagaattcgctttcggaccgaatcgccgaccgatgccaaatttgtcagggtgagaagggcgtcgtaatttgcttttccgtcaactgaaacagtttcgaacgcataattttacaacattttggccaaccttcgggatgaaggagttcaatgcatggcttaaccacctaaaaatagagcgtaaatataaagaaatcccgttcctgaccagcgaattataataatagttaattagtatgacagttacttcgtacatccgttgcccagaaaaggcaatgtttgggtccgatcgaatcccaattttggccagtccatgcgctgccctcagtttcccttctgcactgcatttcttgaagagatgcaataaaagtttcacccctccttcactgacaatttgaccttaaaataattaatcaattaaaatccaaaaatatgcaaaatcaaaaaccaattaaatcgtcgactttgcagaaggcattcaaacaccgcgccaaattatccaatacattacgactttcagttttgaaacggcaacacatgcag

SEQ ID NO: 31351 - DNA, 1011 bp, Heterodera glycines
  unsure (1)..(1011): unsure at all n locations
ttcaaaatgaggcttcgaggctttttgtggttttttgagaaattttgaggctttttgtggttttttgagaaattttgaggttttgggggaaaattcgtcagattttttaaattttgataagttggcataatgtttgacaattatttaatttgaattttgttttttaataaattaccaaacggaaatcttacccatatttagccagaaaattacaattttttacgaaaatccacaaaattatgaatttttttgaagaaaatctgctaaaaatatggtcaaaattctcaatttttccccctgccggcggcgcctatcggcaccgccggccccctttgttccccaaaagttctttggaaaagcgccgcaaaaaaatcaacttcgatttttcatgctcagaatttcacaaaatacttattacaaacaaaaaattgctcaaattgatcatggacggtcaaaaatacaacatttgaacattttaaatgtgttttgaataaatttgtaaaaatgaggctttttttcttgccaaatgaggcttttgaaaattttcatataccagccctgcttatcgctctctctgtctcacaaactctctcgctccttcttagccaatcgacaaaaaaaggcgctttcccatcgcactatgggtacgcgccagtgtcagacaaaattgctcataacgccaaatagcgcatttggcgtaaatttttgcgcgctatttcaaaattgacactggaaaatgccttttttgtattttttattttgatctgccataactcgtttcattcccaattaaactgaacaaatttggtatctaaaaaaagtttttgaaaaggagaatctttttctaagcgaatgctaagcaatttgacatctcagaaaaaagttgtgggaatttcaaacttttatcatgttataacgcaagtcctaggcagctctttctaaccaaaatgctaaatttattcttttttttattgattctaaatgttcaaagtgattttgtaccctntataa

SEQ ID NO: 31352 - DNA, 1033 bp, Heterodera glycines
  unsure (1)..(1033): unsure at all n locations
tttaatgagttttttgatgagtattgagggaagaatgtatggcagacgaattgtcaccaccattgtcgccaattccttcaattaattgctttaaggacaaagcttcaccaattaacaagcagaagattatgcaaaagaatggaaaccaattttgttttaaatgcattttattttctataataaaaatagtttattaaattgaggataccaagaatttattgatatcggaaaattgatgcttaaatgaaaaattaaaatttatttttctattgttatttcgtttgtctatcatttaatttgaacttgggtaattgttgagattatactagggttacacgggcccgggtatcagggcatcttccggtttttgtcggatccagaaaataaactccgtccgggtccggacccaagttttaaacaatgtctgggccgggtccaatttttaaatcaagtccgggtccgggtcctgtaaaaataattcgtaatttttttgaaataaataaatatttcatgaatgaatacgtttgtaaatttgtacaattattaaaataaattattttcgatagattcaatatcaaatcgaataaattttgaaaaaaacttaaagacaaaaaaattttattcttaaattttttaaacattcagcataaataaaaagctaagaaataccattagttcggattctccctaatctcaacgttccgccattttccgttatggtctttacttaattattcaatttatgttgtctttcctatccctccttccaaatttgggactaattatgctcctggctgaaatttatttatttattaattaaaaaatactattaatgataatatttaatgctgggataattaatgaaagacaaatgcgtttaatgcgcttaaatacaacaaattgtaacaatgtgcattatgaaaatttgagaattttttcacaaattggtaaatagtaaattaattggtgcatggctgatcncgtatttgcattaatcatttgtgtaaacattttgcgccaaatgcttcttctc

SEQ ID NO: 31353 - DNA, 915 bp, Heterodera glycines
cggaaaaagaaagggagcgttattgagggggtgtccaatttgggccaagattcagaacgggcagttcaaatgagttgttgccgaggattctttcatcgaagcgcttttggcggcctccgtttccattcttttcacctgctttttctgtcgctctttcgtttgttttttccgcttttcccttcactttttctggcacaatgccaaacccttctctttttcgttcactctcttccgcattatttttcgatttgtccaatgaattgccgaatatttctgtgaggaatcgcttctgtcgtttgctttttcccaaagtgccaattccgtcgttgttttttgcgtgccgtccttttccctttttttggcttttcgtcgacgttccttttttaattgttggcatcgaattgtctttgtttttgatctgttgccccggtgcctcttttgctccatggccttttccctgttgagacagtccatgtgatttgtcacgctgtgaaggcgatcccgaagagtgatttggagacgaacgttggccaaggataagcgccgcaaaagcgaccagtaaaattgggccaagaaaatgggcacttcccattttttggttttctaaaataaaattttggtttttaaaataataaaatgatattttcctgtgggtgctttttcctttcatcgccttccttttataggcattttttgattcttttgactgtctaaacaaacacaatcatttcaaaagctttctctaatcaaaaagctttttgaaatgtttgtttgcataaatttgaaaatttaataacttttttttaaataaaataacactgaaaaaattcagtctcagacaatcgaaagttcttttttaaattttaataaaaataaaggtatttgaataaaattgtaattaaataaacattaatt

SEQ ID NO: 31354 - DNA, 1013 bp, Heterodera glycines
ttttggcaaaaaagcttcgtttaatttcagcagaaggcattccaagaagagcttgagaaaaaggtcacggaacgacttgtgacagttcagacggaagttgacaaaatggaaattgcacatcaacagcaaaagggtaagggaaatgagcaacgattactgtacctatcgtaatattacagagactaacaaataaggtcatttattgttttatttcaaattttgtttaatagaatctattccatttaagtgattattgatgaattggatggacaacaaaaacatcaaaagcagcaatgggaaaaggagacaaacggtgagttgttacttaaataatcgattaaaatattatttaaataaatttatccatttttgaataaatatgcatttattgtttatttatatataacgattttttcatgttttagcattggttagccaaatcagacaatttaaagacgaacagaagaaatatttggaaaaggtcaacgaattggaaaagcaacagaaacagcggcagaaggagagggacggtaagaaaccaaagcatttaaatttattctctcaattttaggacggattgacaaaatggagataaagcagcagcaaatgagtgattctcacaagacacttttggaaaaaattgaagcaaagcataaggaaaagcagaagatgtttaaaatggtgaataaatatttagggaaattgggaaatttatatgatatgcatttaatacggtcaccaaatgaacaaatttcaatacccaagcattattaatcgcgtacagtaggtcccggaattttcaaaaagtcgggatttgatgcctttggatagacagaccatggtcgagaaattagggggctcatataatgaagaaaaagtttggtgtatataaattagcagcttttatactctgaattatttttcagtgcattttttggattgaaaaatctggctaggaatcacttttttaaatcggcactggcatcacagcttaatccagaaccccaatgttt

SEQ ID NO: 31355 - DNA, 762 bp, Heterodera glycines
ccctatagcctgtactttaattctgcgttggatttttgctccccataattgtttgagtaccccaaacggacacttgaaaaaatcgatttatttttgttttcggggcagtccccccgaaccgatgcgcccagatttatggggagaccgaatccttcgggaatagcttccctatagcctgtactttaattctgcgttggatttttgctccccataattgtttgagtaccccaaacggacacttgaaaaaatcgatttatttttgttttcggggcagtccccccgaaccgatgcgcccagatttatggggagaccgaatccttcgggaatagcttccctatagcctgtactttaattctgcgttggatttttgctccccataattgtttgagtaccccaaacggacacttgaaaaaatcgatttttttgtttcataaatatttttttcagaaagtgctctaaagcgcaccaaattttatttacaacttaattttagcactctgatgctttttctatcaaaaagggagatgaataaatttaaaaaaatttttaattcctttttaaacaggccaaaaagtttaggcttaacttttttttcagaaactgatcagaagcgccccaaactttgcagggatactgaaaggaaaagaattaacctgttttatcacattagcttgtcatcagtttttataaaaaattttcaaaattctgagtctcctattattttatttttttttcaaaattttgaagggggggggggggggg

SEQ ID NO: 31356 - DNA, 838 bp, Heterodera glycines
  unsure (1)..(838): unsure at all n locations
agtccattggacgcataaactgtacttgagcctaaaatgaccttatttgttaggctttcttataattggccaaattattattaaaaaatttttgacgcgcacattcaaaatatggattacggtagctcattagtaggtttaattgcagttaattagggaacatatccatttgtaacggtaaaaagtgcgcatttcaaatctttgttgacaattattatgtcaatttgactcatatcggagtcggttcagaaacaaaataaaaaaagtaaaattaatgcattttaattccaattcatcaattaaacacttaataaacaaaatattaaaaatatttattaatcgattaataaatatttaattttgatttaaatcccatgcttaatcattcattattaaaattatttcaaaattaaaatattatatgtatttgtaataatcctttaattccgttcaaaaatttattcaatttttgcatttttattttcaaagcagcaagaataagcacaaaacaaggaggtcgtgccaaaataaggacaaatcttggagcccaggggttcttttgtccgtccgtctgcatcagggcgcggtggtggcgccagcgctggcggcgccaccatcaccggcgccggctggcgctgaagcagcggcggcggtccggcacgggctcttccaaaaatcggccttaattaaaacagaaaatgtaaaactcatcaattttttaggaaaaaaatcaaagaanatttaaaaaaaacatttttaattgttttcngaagtaacaaactaatcgtaagccctttttctgatttaataaatctttanatattaanttaaaaaaaaa

SEQ ID NO: 31357 - DNA, 1570 bp, Heterodera glycines
ctgaaaatctgtttcgatttgccgtccggcgcctacgcctctgtggtgcgtttttgggggtcacgaatttttttggacaaaaacactaaagtttgtgattttgcatgttggaatacctccccccgccccttgaagatccctaactaaaatttaaaggataaattgattttttttttataacaaaaaaggaccttttcattgctttctgctgctcgaatgcccacttttatgagtccaatctccaaatcatatgtttgtattaattaacacatggaaaaagttgggaagttccggttccaaccaaatcttttcataatttaacagtaattttattttcccatttgcctaggctctgcgcgagttgatgcgcaccgactttggcaaaaaggcgcaaaagcaattggaggaagaaatgatgaggaagagaaggcggaggacggaggaagcagaaggcgaagagggaagaagcgaaaacgagcaaaagaaagacgacaaaacggaaatgtgccaaattaaaacttaaaacatttttttgttgttttgattgtttcctttttcaccacttttacttgttaattttatgttggtattcccgatatgtgtgattgaaagaataagaaaaaaaaaagttatggcctaagaaaaactcatcagagtaaaaccaacaaaataaaaatattttttttaaaaattcaaatcactgttttaacattaaaaaagctaagagtacaaaatgcttgaaagtaattaggtgacgacaatgtgggctttaaataaattccttcggtcgcataaaaagggatggaataagaaacaaaaaaaaagagttaaatatttaaatgaacggaatgaattggacaaataatggaaaaagaaattcgaaaacaacgagaaaactgacagaaaatgttgtgaaacgaattcggttttttcagcagaactaccaatgtaatgtgtaaataaatgtatacaacaacaaacagacaaacccatcaagtagagagaccggattttggggaaaacaaaatttgggaccggaattttgatggaatttctgagaattttcgtggtgccgtttaaacaaaaaaaaatgttgggcatcggaatttgaatggaatttctggtaaatctgtggcgcgccgtttaaatttaaaaaaaaacaactaaaaaaacgggagttctccttgagttagaggggaatccctctcgacgatggtccaatcctagcgcatttttgtcgccgggatttgatggttaccgaaggaaaaaaaggagaaaaatttctgggggaaatcgcggcgccgccggcccctcaagactctgcgccagggcggcgccgttcccgacagacatcgatcgcctaactaagaagcggcggacggatcagcaacaatcgctgcgcaatgttgcgccagcgcagtgtcatagagataattgtcgtcgctgccgctttcggcactttcgctgtcgtcgaagacgacgacggcatcgcctcttcctccttcatttggtggtgcatctttgacacgtaagacgtcataggagtgcaaaacttcgcggatggatgccc

SEQ ID NO: 31358 - DNA, 1013 bp, Heterodera glycines
  unsure (1)..(1013): unsure at all n locations
agatagaaaaataaaaagggaggaggcctaacgtttgtcatttctaatgatataccgcttgcaatgataaaaactccaaaaatacaaaattctgatatactttgtatcgatagttttttcgcccattaccaaatcaaaaatccgtcttattttggattatacacctgcaactactgaaacactcaaaaattttatgcaacttagtagaattaatttttggaaattatattggtatttataataaatattcaattttctccctgttttctcctttttcctccgggtttcactcatttttcccgtttggcactaattttcagcccatagcgccttctaaaatcaatacatataatctcaccaaattttacaggcgtactcctctgtaaagacctaacttaccctgaaaaaatctggtctataattggttttcaaaatttttagaaattctgagttattcattaattatttattttttagcaaaattatattcataagtaagggacatgttttaaggcctgtaaaaaatgaaattttcaaaaaaaaaaatccccagtctccaaaaaaacaactataccctgctttaatatttaacaataaattttgcaaaaaataaataaataatgaaccctccctccttaataattttcctgcttctaaggtaatcactcggccgcttcgcgactctgggggggggggggggaaaataagcagatttaaattttgatcgggtattgcgtgtcaaagatataatttgtaaattgtgtcaaatcaattctgatgatatattaatacaaaattttcctgcttcaaaaatgactctgcaaaatgacggttgcagttgtggtttttttgtttgcttatatgctgaggcatggctgattaataatcaatcgcttattttaccaaaccttgatatanaattggaaaaagaagaattctttggcatataaaacgtctttataatcgtgataatgtagtatatcacccgtgctcattgntttgtggcagcgaaa

SEQ ID NO: 31359 - DNA, 1386 bp, Heterodera glycines
attcttgagtaatttttaaattttttttaaagtcagactataaagcacaattaatacaaaattaagcatttgttgtttttattagttgctcttcatgggatgaaaatgtcaactcaccctggtaatcacttcaagtgaatgataaacgtaaaaaagtggacaattttatatttcatgttataaaattaataatatttctggtcatgaaaataattttttatcaaaaaatgggggacaattttaattaataaattatttgttactcctaaaaatgaaataaatattttatattcaaaccgctttctaatttgtatttactgtgtatttgtgggttatacatatttcttatatatcgggcttttttaataaattttttccggtcccgtttttcccaaaattcacggtccccgtggaacaaaaaaagccggataagtgagactttgaaaaagtcggatgggataaatcaaagtgtaacagttttatatccaaattttaaaaatgccaattttactcagaccgattctgaaaaacgggtttcaggaatttacgaatatttgccactgtacaccaattttgagccgaacagaacatacgaactgattggaacttatgagcccatcagccaaaccgatccaccacagtttgaaatgaactttgtgattctgcacaaatctgagcaaacgcggcaaatgatgaaatggtaatttttattgtattttacaactttttattaattttgtaattgaacattcagattggtaataaaaaataataatttttgtattgactgttctctttcattcccggctttttctggtctcggttccggcgccgttttctgaaatggaaatctctagcccatattgatagtttcagtctcttttccggtcaaaaaattgatcattttttcagaaatcctgattcttcaatttgccgcataattaataatttcacttttttggaaaatgccaccaataaaaatgaaaataaccgtcatcccccccccgttagtatgttgtttatatttttctatttttgggaaatttgggcgagctttttaaattggttcagtacaaaaattttttgtttaacttaaaaaatcgagaaatatatgtgattctaattaaaaataaattgacaaattaaatttattttcacccctaataaatataataatttaaatttgcatggctttgctttgtgccgccgagcccgactgtattgtgccggttggacagtcgaacgaatgcatttacatgccaattggtccgaatttgacttgccaccggcaggatcaaagtcttatgggaattctccgatacaacatggaatatcgacaacaaattgagggttttgtttaaatcggagtaccgatcccgacttttt

SEQ ID NO: 31360 - DNA, 1394 bp, Heterodera glycines
cgttggatttttgctccccataaatgtttgagtactccaaacggacacttgaaaaaatcgatttttttgttttcggggcagtccccccgaaccgatgcgcccagatttatggggagaccgaatccttcgggaatagcttccttatagcctgtactttaattctgcgttggatttttgctccccataattgtttgagtaccccaaacggacactagaaaaaatcgatttttttgttttcggggcagtccctccgagccgatgcgcccagatttatggggagtccgaatctttccggaatacattccctataacctgtactttaatcatgcgaagcatttttgctcatacataatagtttgagtactgcattacgatacacaagaaataatagcttaaaacatgctggcgccgaaacgccagcgccgaaacgccggcgccgaaacacagaggacccctttccattgccggcaaaaaaataatgcactacattatctgcaacaacatttcatttaattcaattaccatcctacttttcatgctgttatgcaacaggaagttaaatgtgaaaaacattataggtttgtttccaaatccattgatataaaaaaataacatttcctaattaaggaaagaagttttgccaaaaatttacgaacgagttcaggccaaaattaggagtgatttggaacattgcaaggtgttgtcgttcacaagtgactgttgggccggcacttccgataattttattagcattttggttttattatttcaattttaactatttttatttagcctgacagtgcatggcattgacaaaaattggatatacaaagagtgaattttggcagttacaaatttccctggggagcacaccggtttagcaattgcgatgaaactttgtagcgttttggaacaatggagcattgacggagcaaatgtgcattgttttgtcactgattcggcaaaaaatatgtgtcgggtataaattatcctacaaaaaattataatatttaaataaaaatttaagaaggattgtgtgccgacaatgatattgagaagctgtttgtaaaatgccgtaaaatagtgggccatttcaaaaagagcaacaaagcattgggaaagctgaacgaaattcaagaacttcttgctattcctgagcattccttgttgcaagtatatatattaataattcttaatgattgtacttttaaggaagtttcgacacgttggaattcagctttgatgatgatcgaacgactctacgagcagaaaaaggcaatcaacgaatacgcctaccaaaattgtgactttggtctcactttaacaagcgaagaatggtcaattttagatgaacttattgcgggtattgttttaaagaaaaattggtagaaaaa

SEQ ID NO: 31361 - DNA, 1218 bp, Heterodera glycines
  unsure (1)..(1218): unsure at all n locations
tgcaatgttttcgggattaccctatagaattaaaagaataaaactgacaactttattantggaaaattataggtgaatcacaagaaaatcaacactcgggcttaaaatccggagaaaagtcaattggtgcaatgttttcgggatttacctatagaattaaagaataaaactgacaacttattaactgaaaattataggtgaatcacaagaaaattcaacactcgggcttaaaatccggagaaaagtcaattggtgcaatgttttcgggatttacctatagaattaaagaataaaactgacaacttattaactgaaaattataggtgaatcacaagaaaattcaacactcgggcttaaaatccggagaaaagtcaattggtgcaatgttttcgggatttacctatagaattaaagaataaaactgacaacttattaactgaaaattataggtgaatcacaagaaaattcaacactcgggcttaaaatccggagaaaagtcaattggtgcaatgttttcgggatttacctatagaattaaagaataaaactgacaacttattaactgaaaattataggtgaatcacaagaaaattcaacactcgggcttaaaatccggagaaaagtcaattggtgcaatgttttcgggatttacctatagaattaaagaataaaactgacaacttattaactgaaaattataggtgaatcacaagaaaattcaacactcgggcttaaaatccggagaaaagtcaattggtgcaatgttttcgggatttacctatagaattaaagaataaaactgacaacttattaactgaaaattataggtgaatcacaagaaaattcaacactcgggcttaaaatccggagaaaagtcaattggtgcaatgttttcgggatttacctatagaattaaagaataaaactgacaacttattaactgaaaattataggtgaatcacaagaaaattcaacactcgggcttaaaatccggagaaaagtcaattggtgcaatgttttcgggatttacctatagaattaaagaataaaactgacaacttattaactggaaattataggtggatcacaagaaaattcaacactcgggcttaaaaatccggagaaaagtcaattggtgccatggttnttcgggattacttatagaatttanagaataaaactgacaacttattaactgaanaatataggtgaatcaca

SEQ ID NO: 31362 - DNA, 1297 bp, Heterodera glycines
  unsure (1)..(1297): unsure at all n locations
tttttcattgaccatcatcataaaatttgcgtctaaatttccagattttgttccgcaacgaccccgncccacatacagggaggaagtgcgacggcgcgtggagagggcatcagcatctgacaccgcgagcgaaagtcgtcatcaacaaccccccccgcccggtagcgcaacgccggggagaacagcagcaggggacgccgccacaaccgccggacggacaggggatgcaaccgccgggagaacagcagcaggggacgccgcaaccgccagcgacaccgccgcaagggcaagaagcgccgcagcagcaacaacaacaaacgggcgaatggtacctttgatgtgacgtgatgccctctgcgtgatgatattattatatacttatgtatgtgtatatgtattgtattgtatgcatgtgtctgtcgtccgaccatttcattaattaatggtctctctctctctgtgttcgtttgccctgcttttgttcgccgttgtacatattatgtgtattgtcattatccaccaattattgtatatatatgtgtgtacatatgatggtgtatcgagcaataaactttgaaattgccttgatcctttccaattatgtatggattttgggctaatactggagaattagtgtcccggcgaaatataaattaaaaatttaggtcatattcgtcgtcagcgaccctgaaaaccccaaaatacatcttttcaagttatccttacatgaaaatatatatttaaaaaaatctagttgcttgatgaaaaatcataggcaaaatcaatgatttttcgaattctggactcagatccgtaatcagtgtatttttttattgaaaattttttgcatgtattttaaaaatgctttttcaaggttagagacattaaaatagcacgccaaaaagatagaaaaagaaatacattttcatgtttattttataataactagggatgggaattttatgtagagtgacgcgggaccgggaattttgggcaaaaccgggaccgggacttgccgggacctgagaagccgggacctgagaagccgggacctcgatttttcttcgggaccgggaccaaccaggaaattttaaaaattcataaaaattttaaaaaatttaatttaattttatttcaattgaaaataatacaaaattaatttttaattttgtttttttaataaaatccaaaagttaaagctaaattaaattaataaaaattttcaaatcgaatttacttcaattatttcaaacaatttatcattttttgactcaaataatccaatattattagaaat

SEQ ID NO: 31363 - DNA, 963 bp, Heterodera glycines
  unsure (1)..(963): unsure at all n locations
gatgacaaagaaaaaagttatagtccaaaaacctgctggggcccaactgacgtagaccggtcccataccctaccaatggtaggacaccagaaatatttacatcagtgcctccgcgtgtttggggttgcgcgccagcgccttcaggtagaagccctctgcttgcaccacgtcactgcgtgccatctccacgtaaatgccgtactcggtcagaatgtccgggttgtagggcgccaacgagtaagcgtgctgaaaacgggggaggatgcagaatcatcctgacaaaattttaagtgatttttttaacaaaatgtatcaaaatttccaataatttcccggtgacacctaacggggcgcccggattaaaatttatcatagtttaatagaaaaaaaaatggtcccaaaatgccaaaaaattagtcatacacttttaatgaaaaacggatatgaattcacaaaaatttaaaatttaccccacttctccctcctccggagccatcagatttaatgaatcattcgagtcataattttttttgagacacagacaaattgtttggaattttgtaagttattggattggtagtgcctatcaaaaaatgccaaaattggttcgattttggacgccatggaaggaaaattgtacccaaaaaaaaattccctgttgtgccactttttgcccatcaaaccctaaaagcatgccaaatttgtccaccacattctccaactacctcaatgatgctgcgcgccttgcgcaagttgccctcccaacgtgaacgtttggcggccgaaagtgcggcaaccgcttcccgttcgcgccactggcgcacctccgccgtgcaactttccacgtccgcactgtccgacggtgggcgaacgatgacggcatctcaaacagaaaatgcaaattanaaaaataaattttacataaaattggagactcaaaaatgttttcaggtataaattttt

SEQ ID NO: 31364 - DNA, 778 bp, Heterodera glycines
  unsure (1)..(778): unsure at all n locations
tcccgaccagctctaatttaaaggattcattctccttcatttcaaggcggatctcggnncccgaagcaggtggtcctttgtccgaatgcgcggctttgaaacgatggcctgcggctttctgttgctggacggatgggacacaattcggctatggtcaaaaatgtaaattcaaaattatccaattttaggtttttgtttttaatttaggtatttctggcttcatctgacaatgttgggcacaatgttggcattgaaaatatacaaaatgttgaaatgaaaataaaattttgtttattgtatgttaaaatgatattttattttttgaattttttgtttatggatgaatgttgtaaatttcacgtgcagaacacttcaaaattgcgcttctatgataaattgaattggaaaaaattaggtgatttccattttttatttattgattctcaaattttgaaaaaatgaattttttaaattttacgtaaattagtcaaaattttcttcgatgggatcttgaactgacaaatgagagcaaattcaatggcagcgctcctttttggtaatgaattcattttgtataatttaatagtttttttatacattttgtttcttttctttaaatttagcgccaagatttgcacaaaaaaaattttttggaatatttttttttggaaaattagtaattcagcataaaattttaaaaaagtcggctataaaatttttttatatatctttaattttctaatcaaaaaaaaattttttttgaaaaaaaaaattctgg

SEQ ID NO: 31365 - DNA, 1181 bp, Heterodera glycines
  unsure (1)..(1181): unsure at all n locations
aaaaaattttttgaaaattctagggggcctagctcgaaaatttttganaattccttcnnatatagtacaccattcgatagcattaaaatgctctacaaaaatgttctaaggcattttttggctaaaaccgaccccctgacgagttatgggcccgggactcaaatgtcccgcttaggccaaaaattttttctatttccggaaaaaaatcgaaatttttccgaaaaaaataccattcgatagagctcgaaaaactatgttttggaagtggtctccgtttctctgggaaaaatcgttaaaaaatcctaaaattcaaaaactcgaaaaccgttttttaggcctaactcgaaaaattttgaaaattttcgaaattttaaaatttcaaaaaatcgagctttcaaagctctacaataagttcgctggccaccccccgctcagatcaaaccctggcgcggtattcacctggtactgaagtgtactttttgagcacgcttcagttgccattttttgcaggccaggggtttgctcaaaaaaaattttaaaaaataccagcatttagaggacactttggcggagtgccctcacagcgggcactttttgattcgagttttacaaaaaaagttagggcccttcaaatgcaaacaaaagtgagaattcagtccctggtactcagttggccctcggatcaaaaaacctatagttttcccagatgcgcctcaaaaagttttaagacccttccactactttcagggcgctcccggccttcggccgggagattttgtttttggaaacgaaactccttgtcaatataacgtatatagtaaaaaaggaataataaattgggttggcgaaaagaaaatcaacaaaaaaacccatctcggtcagacactccttcatgctgatttagattctcaaaatgttttaaaaattgctgaaactttcgataaaggttcttaggtggttgctatggaaattttgagtagactcattgaagatcggtataatttttaaagctttattcaatatttctttaaaaaactttttttggtaataaagataaggttattaacccaaaaatgaatttattaatttgaattttatgaatttaaatgtatgcaattatgatcattcgttgttatgaataggaaaaattgatcaatagcatgtttatcatccacgcaaat

SEQ ID NO: 31366 - DNA, 1615 bp, Heterodera glycines
tagaccttaaacccattttgtattatctttcttcacatttcagttcagtgatgaatctgagtttgtctattttatatggacatgaaaatagaattaattttcatgtacgaaatcaagaaaaaaattttttcaattattttttaaattgtttcacttaattcaatcatttacaaaataaattcaatttagaaattgaagaaatgtaaattaaataaaatattaaatgcaaccaaacaaaactaatataataaataatataataatattattttttgtacaaaacacataataagttcgagcgataataactttttaaattctttcaatgtgaattaaaaataaattgataaaaaatataaacaaaaatatttgtcaaaatttaagacaaaaatgtatcttcatgttatattaccaacaaatatacataaacaaatcataaattccgagcagagatggatcataattataaggaagtggacaagttatgtgaaatgaataattaaagaataaagcaattatttagttggaaaacaaatatttatcaataaaatacaaaatattctattcaaataaaatgataacaatgaaacaaataatttatttatttttagcaaatgattgttaattatcgttgattaaaagcaataaataatattttgattatttattttatttctgtatttacttaaacaaaaaaaaaatttactaattattcgaataaaaattcgtttgtattaagaacaaacatttaaaataaaagaaaataagttcactttattataccaacaattaataattgaaacttttagtaaaatatctttttttgtttgtttatcaatatgagatccatttaaattttttcacaaatcaaaattttctaaattattaattttaaatgacttccgctgaaaacccaaaaagttctggacacagacaagagttaataaataattaaaaaacataaatttttgtcaagagaaaataataaatgatttaaagtagagaccggaattttgaaattgccgggaccgggacttggaaaatgaaccgggacgggacccgggacttggactcccgttttaaacgggattcccggtaccagtaacagtttttggccgggatcccgccgggaccgggattttttcaaatttttgaaattttgattaaaaattcgaaaaaattttataatttatattttagcttgggaataggccaagcaatgcaacgaccttttttgtcaatttttaaagcacttttttcgggagcgcttttttcaaataattttgggcaacaaagggtaagggtccggcagtgccgataggcgccgccggggaaaatttgtaatttttaatgagttttattaatagattttatccaaaaaacagattttgggattctgcgtcaaattttttttaagaaaataaagatttcggggtcggtggagaagttttgcagattttacatacattttaagagattttcaacaaaaattgcaattttgaatatggattttgggatctttttaacaatttaaattgtacaaatttctaaaaatcgcttaaatcttcgaactttgaaataaaaacatttcgccaaaaataattattaaattttt

SEQ ID NO: 31367 - DNA, 1262 bp, Heterodera glycines
caaatgctttcgctgctgcgctctgattgcgatacgttcgccaattatctgccaaaagcagcgaatgaaaggaatttggaataaatttgagagtgccgacttttgcggtgaatgccttcaatttgtgcacgcattttctgatggcgaacccacggccgagcagaaaccaagcgaagggacagaagtaaaacagcggagtcatcagaaagtcgtgcaagtgcctgttgaagtcggccaccgctttgacatattcgcagtgactgtccttttgaagacggacgccccattatggcctctgatgaaagacaaatttacaagaataaaaaaacattttaaatggatttgatagccaattacgtatttggatatcaaatgaatggtcgaacattctttcacctgttgcaatggccaacgaaatgtgctgaatcattttggtaatgtcttcagcgttcgaggagttgtcgtcggcacttgccaagttggtcaaactgaaccaaaatttaaacatgcaaatccagtgaacgatttacattttgcagccatttttggccaatgatttcaaaaagcgcttttttgttgacctttgcacaaattcgcgtgctttgctgttgaaaatgtccgtgtactgctccaacttagcaaagtgaaaagttggcgtcagaatgcgtcgctgtcttttccattttgcatcggtgctcagcagcaaaccctcgcccagccactgcttgaacaagttgtaatcattgccctttgtcagttccatcgaattttccaatatttcctaaatcaaatcatattcccgctttgatttcattttaattactttggcactctctgaatccaatgccaaaatgttgagctcagaggcaaaccaccagcacatcgcattgtgcccatcgcgaagtgcccgatttgcatggctaattagaaactccggcacatctgcccattttgaagattaattaaaatgaaatgattgtcatgtaaatatgataccatatctggattttggaaacaggtggagatgaccgatcagcggaatcctgccaagttgccaaaaattgtcgggcactttcaaaagtcgccgataatttgagagggcagtaaaaagccaaaaaatgaaagcagagaaaagcaaagtaaaaatggcaattagaagaaacattgtgaataggtatttgaataaatattagcaattaaataatttattttctaaattttagaaatattttattgagtgattattttataataaaacggaa

SEQ ID NO: 31368 - DNA, 800 bp, Heterodera glycines
attcccgaagggattcggtctccccataaatctggggcgcatcggttcggggggactgccccgaaaacaaaaataaatcgattttttcaagtgtccgtttggggtactcaaacaattatggggagcaaaaatccaacgcagaattaaagtacaggctatagtgaagctattccggaaggattcggtctccccataaatctgggcgcatcggttcagggggactgccccgaaaacccaaaaaaaaattttttggataaaaattatttaaatgaactgactagataatatttaaaataggttatttctcttcctttcagtatccctgcaaagtttggtgcgcttctgatcagtttctgaaaaaaaagttaagcctaaactttttggcctgtttaaaaaggaattaaaaatttttaaaaattttattcatctccctttttgatagaaaaagcatcagagtgcctaaactaacatgtaaataaaatttggtgcgtttcagaaccctttctgaaaaaatatttaagaattaattttgcaaaaaataaataaaaacgaaagactcagattttcgaaaatttttttgagccagctagctcggcgctcatttcagtgtaagttagtcctttaccggggagtatccctgcaaagtttggtacgcttctgctcaattagcaaaaaatatgagtgatcgaattttcactaaaaaagttaagcctacattttttggcatatttaaaaagcaattaaaaaatttttaaaatttaataattttcctgcaccgaaggtactcactcggcctcttc

SEQ ID NO: 31369 - DNA, 1502 bp, Heterodera glycines
atgtgtctctttcagcgctccgcgactgatcacaaacgaacgcgacgctttgctaatgagccaagcggtgctaaagtgtcgggcacacccggtctgattgaacgcggacgcgcatatcaccacttccctttggtggtggatgttgacgttggtactgcccgacgcgcactcaaatcgccgtttgatgatcagcggattcaaaccaatgcgagccgaagtgtccgcacaatatccgtcgactgattggcacgggatttataaccaattcgaatggcgcgacgttcggcggttgagcttctaccaccgtcaaatggaaatggcatttctaaaggcacgcgggccttgacttatgaggtggatacagtagggccttaccatatctcatctttaatgattactaaaaacactagattaaatctttatctcgcgagaaatgtccgtgcgattatgttgtaaagtccaaaggcaaaaaaaaaaggattttaatattccggcggaaaattttccgtttatccgttacgacaaattgctcatttccattttattttttatcaataaaatgtttaaatattttaataatttagaatgattttaattggcttaattattattgcctttgtgactttttgtcttctgttgagtttcattgggtttaggggtattttttggttatgctgtcacaaatgataatgattccttttttaagctcgttcgcactctgcctctgtgtatgagcgcttccgtcgtgtttctcaaactggcactcgcgcacatgttattgactttgatgaaccaaatacaagtgccggagcaaaccctgttcgtggtggcggtggcgggcgttttccaattgacgatgcaacgtggttgtccatgtttcgccgcttggtgggtttaatttaatttaattcttacttaaagtttatgtcttattttgacaaaaaaattttgaaaacgaatttttaaaaaaataaattctattttaagctttttttttaaattaacttaactatttttccaaattaatcaatgctaagaaaatttggccacgattttgagacattaaatttaattgaataaaaaaaattatatattttttcttatattgttaattattcgccctcttcatttttcagaataatctgacgcgaactgttgaagccatcaaaatttgccttcagtccgttctcacgaatcaacaactgaacaactgggacttgaacaactgcaacgagggcatttacctttacgattatttattattggccgagcatttgtcgaaaaacaactgtaataattgaataaataaatatttatttatttattatattgatttaaagatttcgtatcggtgcgctctgttatagctgcgaactgttgctttggattgttttactttgaattaaccgttcttcagatgaaatcgtgaattaaaaaaaaatgtttaaaattaagttgattatataagggaagttggagttgacttgccccagcgcacatga

SEQ ID NO: 31370 - DNA, 1537 bp, Heterodera glycines
ctctcccctctctctttctcctttctctctccgctctctcttttctctcccctttaattgtccttcttatgactttctctctctcctctctgcactctttctcgtgattcttatttctttctctatggactttcttttctttctttctctctgttaatagtgcggccggggccacccacagcagaggggggggggggggacaaatgggaagagactaatggatgaattccgccgggggaggggggctcatgaaaaaatctcccggggggtggtgactgaccgacgatgcccccggggggacggacccctgttcgaatcggaatgaaataggaaaggagaagcaagtggtgaaaagattttttgatttttattttcctttgcaattttttctcaaaatttttctaagaaaaatcagaaaataataattactgaattattttaaccgatcagacctctccttttaagataaaatatgtttttaataaaatgcgcaaaattctacttttatagctataataataataacaataatataaaatgtaaatgttaaatataataaaatgttgatgatgatgatgaataataataataataatattataattaaattcataaatcattcatatggtcgtgtttgagtatatggtcagtttaaatagtggcgcaatttgaaaaggattttcagggggaggggagggatgagtcacaaaagtacagtacagtagagaagatgacaaaagttacagtagacacaaaaataaaaatggaaaaaacattgactacaaaagataacagaagaaaacagggaaaaggaggaggaggagcaagcagttcacgaaaattgattagttgatctgggggatgtccattttgtgccgtgacagtccgatcaatttgtgtctgatcagaaatcatgggttgatcggtcccaaataatgacctgatcaggaaaaggtgggtgggggagggactgatcagtcctgcataatgatttttacgatcagttaaaaaaacatactgatcagtgcgggtttcgcgaccggttctaaccggtaagagctgatcagtaaaaagataagtcctatacaatgatcgaccaaccgatcggaaaaccatggactaatcatagcaggattatagacccgatattaaacgtagagaggataagatgatcagaataacatgcacttgaactggtgcgcaatcccttcactgatgtatgacgaattatagatagtgggaaaggagaagggataaaggatttgagggacagacaaacattagcagacggagggacggattatcggtggagaagccgagccgagaaacggcaaaaagcgaaggataataattgaacggttactcaaattcgcttctttcagtgccgatctccggcgggggactattacgcctattagtctgcgcaaatgaagagaactttaaaattgagaaagaatcatgaaattaatattaatgaaaatattttaaaacataattattagagatttttttcaaaaattaatagacaaatgtaaaa

SEQ ID NO: 31371 - DNA, 1617 bp, Heterodera glycines
  unsure (1)..(1617): unsure at all n locations
tatttttagcgcctaaaaaatttttgaaagagtctatttatgcctattttggcgttaggcccaaaatttgttaataatagtgcaataaaaacgaaaaatacaccccctaagaaatgaaaatttttcaaaaattcatctcaaaaatttgtttatttattttcttgacaggaatgtgatttaaaaattatttatctcaatactgatttggcctaattttttttacttttttccctaaaaatgaggttttttagtacctattttccatttttagatcctattttggggtttttagagcctagagcctacctattttggcagtttttagagccaaaaaatcnccacccctagtcataatcctttaatttttgaaacattttcaaatcactaaaaaactactcttaaaattctcagaaaagtaaatatatttttttaatttcaaagtatataatgccaaaattttatgaacatttcatttccgtcggctcacaagcccgattaactcttttaaaaaattgactaaaatttggcatttgttggaagaaaaatttcactgggaaatcggggccaaattttttaattaaccagcggcgcctatcggcaccaccggccccacccttactccctgaatttatgaaagaggcaaattggtttggttttttgtttttttgaagatttttattaaagttagaatttttcgaacatgcaaaaattccgcaatcacccgggatcccataaaatttaactggggttttagcaggattatccctcgggattccatctcacaaaaaaagattttgaaacatcattctttttattcttttctattcttttttatccattggcggatgcagttgtccaaatgtggttatttataattcccttttttgcaattatttttaaagcgaaaaatgtaaaattcttttttaaatggcataatcaagggcatccatcataagcgcataaattcatcatgaaattgtttgattttcccaatattcattcattcatctcttcccttcttcatcaagcaacattttcggccaattcatcgcttttgtgtcccattttttctcggttgaaatcgtttcgtccccattggcactcgtgcgttcttcatacggttgttgctctgaataagtttggcgctcagccggcacatagcggtgtttaaacgcagaatcggacaagcggatcaaagccatctgtcgctaaattaaaatgattatttatatatttaggttaactaagtacatgatgggaaagtttagtgtgattcaagtacgcaaattcacaattgctaagttttatgggtaaactccagttttatattaaaaaaacccatttttattttagtcatttctgtagcaattttttttatattaaattttgcttaccctcgggtccattttgagaagtcgaagcagttggattggctgattgaaattatatgtgaccaggggcagtgattttgcagtggaaataaataccattgtggtgaaaagcagcagaattgaacagttggaaatggcggaagacattttcttaataattatattttaagagtttaatttaaaaatattataaattggnnagatgaaaaangaggacattttcaaa

SEQ ID NO: 31372 - DNA, 1698 bp, Heterodera glycines
cggatcggagtcaataacgacttcgcaaaacagtgtgtcgtcagctggcacacaaaacacatcggccactcaaaatgttgagtcgtctccaagcagtaaaaaagtgaaggtcgaagatgttgaccgaccaatgtctgctattgaagcaatagcttcaacgccagtttcaactcaaagaaaccgtggcagacctataaaaaaaactcgaggaccaggcgggggaaaaacaaatgattcgttgagcgaaggctcatcaatggatcagagctccgaagccactttaaatgtagtggttttgcccaatgtgcctgaaaaaataaatttcaacacagtgccaattaatttcgccacatcgcgaaatatggcctgcaaaattcggagatgggccgatgttggcctttacgagcgtgatggcgaaacaggactaggcccacgctctggcccaagattcattgaaacgtgctggaatgatctaacacagtttctaaatgatgcctttgttgccgaatatttggcatacttggcaagtatatcacaacgaaaagtagtcgttgttgatcccatggtgtggcaagagggcatgcaccgtgtcacgtcatacaaaaatatgacattcggatacgacccaaatgttcaggcagaagtcatacttttgcccgtacattttcccgcacattggactcttattgtccatgatgttcagtgtggtactcattttgctgattcattgcctgttcccaatggcagactggattggcaacggacggacaaaattaaaaatatcatttctgatattttgccgtcatcagtgttcactggtatttttaatgccgaagtaacgtgccaaaatgatggaaatagctgcgggtactttgtgtgcctgtatgctgaatcctggcttataaacaaccgcacgtttgttctgcctgatttgtccatcaattatgaaaagcggcgcatattatggcacattaacgagctgtatggctctgataatgtgccatatcatccgagggaaggggtgccaactccttgcccaattctctaccgacatgcggatgaagcgcagtcgacatccaaggccgttgggccgatggaagttgatgacagcgatgagataacaatcatcgaacctctgacgaatggaatgaatgccattctcagccaagtccaagtggaaggtgaaaaccaagctgacatgtttggtttggtgtcggattcttgtgtcccacaagagcctattgcgcaggttgacgatgcaatcttcgtcaggccgaaaacgcctcctaggcgatcattgcgcattggcagaaggcaatctgcttcgattagccgttctccctcgcctgcaccaaagcggcgcacatcggcaaatgctgttgatcaaattagggcatttacgcggcgttgctaccttgtccacaagggttggtgctgtgctgccgcagcagcaaagcattatccggaatattcggattctggtaagcttggcgacaaaaagtgctctcattgtggagcactactcttcccgcacgaggacagcagccattgctgtcgacagggaaggggttgttttgcccaagatcaacccgcacccaaaagagcttgaagagctcattgtggacaaaaaacaatcccgcaagggaaaagagtttttgtgcgaatatgtcgcgctacaataatttgctccagtttgcg

SEQ ID NO: 31373 - DNA, 1528 bp, Heterodera glycines
  unsure (1)..(1528): unsure at all n locations
tatgacaattgtaaatatgtcttcaaaccttaccattttttgattttacatatttaataatgttctcttaaattttcaggttatttttctgcagcattttttctcatattcgcaagttccataatcttatagggagtccatgtaagggccaatctaaacattgaaagccctttttggacaaacaaagccaatgcaacagagccaatgattagctatgaagaattatttctaacacgataattggtgtggtggggactaagcagatcctgaagaaactccaccaatgaaaacaacgaaataaagctgaccttttcgtggaatcagacgtaaaaggaactataaatctctagaaattacctaaaatggtctacaaaaaagccaatatgaaaattgtaaatatgtcttcaaaacctatcattttttgattttacatatttaataatgttctcctaaattttcaggttatttttctgcagcatttttttctcatattaccaagttccataatcttatagggagtccatgtaagggccaatctaaacattgaaaggcctttttgtgacaaacaaagccaatgcaacagagccaatgattagctatgaagaattatttctaacacgataattggtgtggtggggactaagcagatcctgaagaaactccaccaatgaaaacaacgaaataaagctgaccttttcgtggaatcagacgtaaaaggaactataaatctctagaaattacctaaaatggtctacaaaaaagccaatatgaaaattgtaaatatgtcttcaaaacctatcattttttgattttacatatttaataatgttctcctaaattttcaggttatttttctgcagcatttttttctcatattaccaagttccataatcttatagggagtccatgtaagggccaatctaaacattgaaaggcctttttgtgacaaacaaagccaatgcaacagagccaatgattagctatgaagaattatttctaacacgataattggtgtggtggggactaagcagatcctgaagaagctccaccaatgaaaacaacgaaataaagctgaccttttcgtggaatcagacgtaaaaggaactataaatctctagaaatgacctaaaatggtctacaaaaaagccaatatcaaaattgtaaatatgtcttcaaaacctatcattttttgattttacatatttaataatgttctcctaaattttcaggttatttttctgcagcatttttttctcatattaccaagttccataatcttatagggagtccatgtaagggcaatctaaacattgaaaggcctttttgtgacaaacaaaccaatgaaaccgagccaatgattagctatgaagaattatttctaacccgataaattgntgtggtggggactaagcagatccctgaagaagctccacccaatgaaaacaacgaaatgaagctggacttttcgtggaatcagacgtaaaaggaactataaatctctagaaataacctaaaatgatctacaaaa

SEQ ID NO: 31374 - DNA, 893 bp, Heterodera glycines
acgaaagcagtgaaagaaaattgccagcggcgctgtcagccaccagtcaaactttagtataaagaagtcccgcttttccttctcatcggtggccggtccgttgttggcccaacaaaagcaggcacacaaatgagttaaaggggagggggggggtaattaattggttggccaattggctctggcgctgaacaatttattcttgggagagcggcgggtgcacccccaaagaccaccaaacagaggaagtttattcggacagaatgacaaagcataacaaaatttatgggggaagaacattcgggaacgaattctgtgtcttgaattaatttaggactattttaaagaatttattgtgaggggttttgaaaccctagaaaaccataagtgtatcggaattggtttttggaaatttgaaacttctccagaattataaatttatatatgctgaaattttgaaaaaattaattaaattttaaattaaaataaaaaatgacagaagttccgtcaatatattccaacttttctcctttccaattcttattttgacctgccgttggccgaccgaatttttgaaaagtaatgggaggggggggggggggcagcaaaatattgtgacattttggcgaacaaaatgaagaatgggggcttggggttgggctcgaaaggatttgtgactaacaataagcagcatcaccagcaccacaccaacacacaacggccggacggacggacggagagcaaatgaatgggatggaatgggaaaggggggaggcaaaaggcacaatttgatgaatcgctttttgccaatgaaattcggatggaagtgagtggaaatggatgggttggatgacggagtagtttatagtagtatttatatgtgaagagagatatgc

SEQ ID NO: 31375 - DNA, 1933 bp, Heterodera glycines
  unsure (1)..(1933): unsure at all n locations
ttgagccagctagctcggcgctcatttcagtgtaagttagtcctttaccggggagtatccctgcaaagtttggtacgcttctgctcaattagcaaaaaatatgagtgatcgaattttcactaaaaaagttaagcctacatttttcggcatatttaaaaagcaattaaaaaatttttaaaatttaataattttcctgcaccgaaggtactcactcggcctcttcgcggcctcgtggtgggccttcgcccccccccctcccaccgccttcagagcacgacaaatattgcaacaaaaattttgaaaaattgactagagcaatcgaacgctaacggacgacctaatggaaaaaaatccccgaaggagagaatttaattaaatccattccttcgggggaccgtgccgggcgccgcggggtaagcagcgctggttcgactcatcccagtaccgaaccttatagaccaataaagaaatgaatttttattttaaagattccgacatccgaggaggtcgtggaacgagttttttcactggcaagcagtcaatggaccaaagaaagaaattcattggaagttgaatcggtgaaagcgctcttactggtgaaggtgaactttgatctctcgtgcgcggaaatgaggaaaatgatcagcggaaacaaaaaaatattggaaaaaatccattccgatgaaaaatacaaaccatttgaataaattttaaccatttttcattgcatataataaaaattttaaatgtgcttggatttcatgaattttccccactatgtccttgaaaatcggcatacccgtccttggaaacggaggatggacgatggcagccctgttttaatttaatatgcaagaaatataagtgcgtaaatatggagaaatgtgcgtgtttaaatatccgtcaacagcgtaggaggagcaaatttggacattacaaatgcgggggaggagcaaattaagacagaaaatggtgcacaaaagaatagtgactaataggacagaattacaaaatattaaaatatcacataaaataataaaataggaatatcacatgaaataattaaacatttaaatcacatttcaactccaaaatattttctctttcattttcacttttccattttctctttttccttcatttctcttccatttctttttcccctttttctccaattttcttcatccgttgcctccttggcgacactcccnacnacantttcanttccttcctcctccnacacancttcanattctctctattcctanacaactnccatattnaactncttcattctacntcnttcacttcanatnncataactcatttattcacaaacaacaaaaattcaacataaacaattcattttaccactttattaactcctcttttttcttatccccacaactntcatttaatcatcatcntcactnctttcantntacacacaatttcnaattnattaacttattaacancttttatataccantcaatccacaatttttnctctctnacaacatnaatcatccctaattncacatcnaaaatcttaaaatactcantcacacatattnacaccaaacttttttcctaataaaacaaaatatttntctaaaatttcttaacatttttcattccactcactaattnttctcattaacaaataatctttcactacatcacacaaccaatnaatctcactacattttactccattaaaaaacaatctatctatttcttttatttcttattctcattttaattctccttttttttattatttcttttaataatttacataaaaattaaaattnttaaataaaannattnttnatattnnttattaaaaggttaactttttcatatttttaaattttataagccccggggggatgttttttttaatgttttctcaaaaaataactttagaa

SEQ ID NO: 31376 - DNA, 1206 bp, Heterodera glycines
gccaaagcagagtgggggcataaacaagaattttttaatctttggtatttcctctattttgtgcctgctctacatttatgtcttgtgccaatatgcctattgcaacagaaatttattcagctttcccgacaaattgttgagataattattctagacgatttttttatatctcaatgcttaactatcgcctttttgtttggcaactggtagaaattggcagtgaaaaaaagtttgtttgtaactatttacaataaaaatttatgtagcatttctaaaaaggatgtaaaaataagttcttgcgtaatatttttatattgtgtgttgaagaatttgagtctgcttctgatgcaagtggaaaatttttcagcttttctcgaaaagttttttcccagaaaaaggatgggacaaataaaaaactaaacatctctcatgaccaatttaaatttccttacattttgggtttactttattatgctggcccatgaaaaaatgcagtttttccggtgccaaatttttgtgaattttcattcggcgcgtcataagcggattgtttggtggcaaatgcaaacaaattttgtgttattcgaatgcgctaggcgggctcgacatttccaaatgtatcaacaaagggtctatctccactctctggcaaggtatggccagccaaagcagagtggggcataaacaagaattttttaatctttggtatttcctctattttgtgcctgctctacatttatgtcttgtgccaatatgcctattgcaacagaaatttattcagctttcccgacaaattgttgagataattattctagacgatttttttatatctcaatgcttaactatcgcctttttgtttggcaactggtagaaattggcagtgaaaaaaagtttgtttgtaactatttacaataaaaatttatgtagcatttctaaaaaggatgtaaaaataagttcttgcgtaatatttttatattgtgtgttgaagaatttgagtctgcttctgatgcaagtggaaaatttttcagcttttctcgaaaagttttttcccagaaaaaggatgggacaaataaaaaactaaacatctctcatgaccaatttaaatttccttacattttgggtttactttattatgctggcccatgaaaaaatgcagtttttccggtgccaaattttttgtgaattttcattcggcgcgtcataagc

SEQ ID NO: 31377 - DNA, 1206 bp, Heterodera glycines
ggctgagcttcggtccggcctcgtcgcctgcctctccccccgcccccgggggtgagagtgtctctttcttctgtctctgtccgcccttctgcttcattgctttctcgagtagtctcagtgaagagaaagaattgggcaataaattgctctcgtcaatgtgttgaacaaaatcttttttcatttcgctttaaaataatttttttttcctcatttgtcagccgtaattaaaaggaccattcattgggtaaatcttaattaaaaatcaacagcaaaatttgtaaaagaaaataaataattaaaaaattaagcatttcagaataaaatgtacggacgacaaagcaataatcattattttccccaacaaaatgtcatgggcatagaagaaagcgcaacaacgagcagtcggaacagcgccggagggggagagcaccgagtgatccgatcggaagtgtggagtcgcttcagactggagggactgaacgcggtttgcttggtgtgcaatgagaagctgaaagtgggccccacgcgacagacgtaagcccagcgcaatgggctgatcaacagccgatcactaattcacgcattgaaggtccagcctatggcgccatctgaagcggcacaaccgcgtggcggcggcccaaaaccaacgcattccctcgggctttctccaaatccatccgcagagccaactgtacatccagcaacagcagcagcaaatgatgcgcaacagaagcaacaacggttttgcggcattgaacggtggcgactgcacaattcaacagcaacaaaagggcgttgtccattcgcatgcctcgcgggcactttctctgcaccaattccgcctccagcagcagcagaaaatggcggcacttcgggcagcacccgcgacggcactgcttcacaacaacaatttccaacaccaaaaccaccacactcaacagcaacagcagcagaattttcgccatctgctgcacccgtcctccgcctcctcctccacgtcaccgttcatccagcaacaatcggcttctcctcccccatcctccgccgtcgaaattccgctcacgcatccgccgctggtgaccgtggattgcaagccggtgcagaaccgggaattggaccaactgctgggcatttgtcgagaggagggggaggaacagcaggaatatgatgggaccatcagcagcagcagcaggagaggggggatgg

SEQ ID NO: 31378 - DNA, 2341 bp, Heterodera glycines
  unsure (1)..(2341): unsure at all n locations
tcccaaataaaattaaaacggtagtaaagaaagaaaattcatcttcatcccattcgtaaaattaattaaaatttaatcgaacgccaaaagagcaaatattaaagtttcgttttcgtaaaataattaatttaatttaaaacgccaaaaaagttcggaaaaattaatatcgagttttatcaaaaaaactcaaattttaaatcgcaaaattagaaaacaatttcgatctttttaaaatacatttaataaaacgctaacgaaaaacaataataaacgtttttcttccatctttcaaagaaaaaatatatcaaaaatttcgaagatgggtttttcggtccaatagcccgagattctgcaatcgtaacccccccccccccccaatatccaccaaaatccttttccccgtgaggggggcaggtgtgatgcatttggatgaataaattttagccctcccctccttctcggggcgggatgagcaaatattatcatctttgtggcgctagtggacgctcccatcacattacaatcctttccctccgctggtgctggcgctttccgctctccccccccccctctttttcaggatgggatttatactgtaagcagtggcccacccctccctatcgccaaaatgccaaaagagagaaaatagtgtgtgccaacggtcatcaatggtggtgccaaaattagtcaggctaaattgggagagggagaaagtgcgtaaattctagcctggaaaaggttttttccaaaaattgaccaatgaattttttgcacgaggtgtaaaaactaagtatgtttatttaataatcaattttataaaagtacttttattttcaaaacatttacaaattttttctgtttttgaatcatcggataagggggctaattgtaagccaacgcggaccacatcctttccaaaccaattgaaagagattgaaaatttcataacaaaaatttcatcattagaaaaaagcctcaattttcaaaacaaaaactgctcgcgggcaaaaaggacataagcgcacggaaaaatgttggacaaatttggtgccaaatattttcgcgacttaataattgtaaaaaaatagttcattatttgtggcggcagcagtttttggccaaggttttaagtatcaaacggtttagccaatgccgtcggctggttttgggtggaaaaatttaaggcgccctcgccggtcacgcataccgtatcacgtctaattatcccccgtctccaattatccccccccctttctgagaaggttgaacaataattccccgggggataattagagataatagggtatctgtataattttttggcctcaattatgggccaccagccaaaatattttgaatgcaattaggctgcttctgcctattcgacccttggcagtattatattattgttcattttcttggaatttaaagtttttttggaacganatattacaatttctcataattaatttatgccttaaagcgacaaaaaaacaatttttttaagtcttaggaataaattttatttcacgtaagaaaacattttttctaaaacacggcaaaattattaagaaaatggaaaaatcaaaaattcggagaaaaaattttgggtcaatttctctgaggtgcttttaagccattcaaagagatgacttttgttaaaattaaagaaacaaaaagtaattttttttaaaccaagctcaaaaagaaattcaaggggaaaagacaaaacgataaaagaactaaacaattcataaaatgagcaaacttttaaaatataaaatttaaaatagtaacaaatggaaatagattaaagggatttaaactcaaaataaattcaaaataaaagggctttaaaaattaaaaaaaatcaacgtatgggactcggcagaacctatggatgctgccggagaaaattttttgaaactttaccggcttccaaggacaatcctggaaagaacgccgctttcaaatttttcatgaagaaaagtacattttcgaagttttagaaaaagcaataaattcgaaaaacatgggaaaatttatttttagaaaaaccctattttaaattgataccatttccggtgggtttttggcgtactaaaaaaacacaataaacactctcaaaggtagaaaaaattctttcattttcctgagttgggggtgagcaaggcaagtttaatccaacgatggataaattaatatatatcccatggattttgattagatttggtgggtggggtgagaggcaaaagggcgacagtgccagcgataattcactgtttgagagttcctccctataagatcgggacaacaatttttgaccatttttgttcagcct

SEQ ID NO: 31379 - DNA, 1168 bp, Heterodera glycines
cgttgttgttgcacagagcgttcagctaccgctgcggttggctcaaagccggtgggcccaacgtacacgtcagtgccatgcaacaccagctcccacttgagcaattcggcatctgtgcgagtgagggcagaattttttttgtggctgaattttcatacaaaaaaaaaatttttttttaaattttttgtttttgatacgatttaaaaaatgtacgaactgtatcctcattcgaatgtccaataataaatggaatttttttctttcaatttgtccatccgtaaataaaagcggcacaacaaaatgccatggaaaaaaatgcgaattttcgctctcggcatttataatagcaaaaaaaattgggaaaaaatatgctgaattaaatgtgataaatttcatggaaattagcccttttttggctcgataaacatgattttccatcatgaaataatgccaaaaattgttgaacccaaccaaagcaatcaaaatgccaattgccactgaccatcgttgccatcgttgtcaatctccagggaccaagtgccgtacgcgctttcgccccaattgtgcgtggtcataaatgcccactctttgaaccccgttctgctggtgtcccgttgccgttttgccaaaagcgtagagcgagtgcctgaaaatttgcaaatttttgaaaaaaacaattttttttgaatttttgactcacccctcggcgatgtcaaataaatttgaatgtcgccccgtcttggcgcgctcagtgtgacaattgcttgcacatgctccaagtatttgacctgctgctcccgccgatcggcacatccgtccgtgtacacttgcaaatgcagccgattgccgttgggaatggtcctgacaaaggagagtgttcgggtgatggtggaacttccaaatgaaactttgtaggtgggtagaccacccctgggttgtattgccaaattttttttctagctgcggaataagcttctgtgccgagatatgaggctttaaatatttaataattatattatattaaatttaaaaggagaagcaaaaagcgaccggttggcagggtggttgtgtgtcacgatttcatttttgtaatggaaagttcgagtcccccctacgcaaacatttttttttattgtttttaataaattttattttaattttctctaaa

SEQ ID NO: 31380 - DNA, 1193 bp, Heterodera glycines
cttcataaaatatataaaatatcaaaaaaaaaaaacaataaaatatgaaaatatgaaaatgtttaaaatcaattttgatcggcctcagtttcttcaccactctctgaatttccacggacgtgaaatccctccgcaaagccttgcatcacgagcccgtgcaagctgctctcttcggacaatggaatcgtcggagttgatgttatggcgaatgcagtccgaattgtattggtccactgcctgtcattatggacgcctgggacacactgaacgctaaaattgataaaaattttcataattttcatgacaaaatagttgcatttacgagttgtgcttcgagtgcgtcgaagaaataagcgtcctacatctgcattgggttcaaatgcctccgcttgagtgccaaagagaggactgatctgattttgaaaaaattaaaaaaaaagacttgctaatgaaaaaacttacctgaatgttttgtgaaccgattttctttgacccagtgcttcggcattgttttcggcaaataaatgaaaaatgcccatgctcctcgcttttctgaacaatgcctgcgccatgtggaagttgcagccggagcgctcgcatgacgggaagacatgccgcattgccttcagcattcctgctcgaagtcgcacatcacttaaatagtaattattaaagtcattatgtagtttttcttgcctttaattggccggatgggatcaatggcacgcttcagttgttgaaggacttccgcgtaatactttgacgctttaccaggcagtaaggcttgcgctgcgacgaccatccgattgttcacgtaacagccgatgacaaacacttgcgtccaaggctttggtgcactgcggaaagtgccgtcaaggctccaccgacgattttgtttgagcattgatacagctgattgatttctgggccgtttaattggcttttgcaaactctcaagaatttcgcgaacagttggcatttcttaatataatatgaatagaaaaaaaacaaattttaaaaatttggcataaaaaatagaaagaatgatgtatttgatatcagaacagattcatttcctcttatttactattccttaataattgttttttgatcagttgacaaaatgtcagttggcgaaatgtcagattttggttgttggcgaaatgaatgtttttggctgagttggcgaaatg

SEQ ID NO: 31381 - DNA, 1482 bp, Heterodera glycines
aatggtaattaggtaaataaatacatttactatttcactttttggactcacagaaattttttaaaaataaataaaattgcactcaaaaaaagccaaaatttttggagttgatttttaaaaaatctggaatatggcttatattaaaaagtctaaagttttataatttaaaaccggtacccccccccccccggttttcggtttcgtaattgaaatttttccggcactttctcagtatttgatgagtgccttcatgcaaaatgaaatacctatatgattttaaattattaattaattgaccaaatgagtttttcccaatgtaccttacccattttacataaatagagttattgttcaaacgatcaacgattttaatcctacaatctaaaatttaaaaaatacttttgaatgtgaaaaaatccttctaaaaacattttcataaacaaaattattcaaaaaaacaacaacaaacaatagaaagaaagtaaacagcaatgggagaaatagtacactaactattacattattttacggtaaagaaacgagcgctgcggagaaatagtgcatgaatgtgcaccactctttcacccatttctcgctctctttacaccccagcaaaaaataaaatatcaaatttctatcatatataatgaaaggcgctccacgttgacgctgtgcgattgctcgccggcgccgtttcccgcttctcgcggttggccctcgtggctggctgcgtttgtgttcgctgttcgctcgcctggcgagcagcgacacttgcgacgcatttccctcgttggggggtgcggagccaaatttggcgaagcgtctgataagacgttgagccgaaatagtcgctgtcgctaataagcgccagtggcaaatttgtccttgtggcgattgccgcaagggcaaaatgtgggaccatgtccttaataaaggtcatgggcccagaaatgggcttggcctggcaatggccttgccctcatgtgcgatcgcttagcgatcgccatgctccccgccggcggttgtattcggttggagtcggcttgagcgctaaatcgccaatttttttttcagttagccgttaaaaaaaattaattgtttttcaaaatactttcgaattttttccatttttcctccaattttatccgaaaaagcctttcaaaaagaacaataaatttatgtatgacaaaaatcttttaaaatctaccaaagtttcaaaaaaaaattttgccggcgctgcctgctccttaatttgttcttaaacccgattctttttatggtttgcttttaattttgatgaaaatctccaaattttccacggcatctatcggagaacattggcccaatttcattcttggcaaccacgacccagggccgcccttctcacccaaattttcaaaaaaaaaaaaaaaaaatttagcttaactatgaaaaaattgtattccatcgcatctcaccacaaccttttgctagcgtacaact

SEQ ID NO: 31382 - DNA, 1543 bp, Heterodera glycines
  unsure (1)..(1543): unsure at all n locations
cttattattggactttgaacgtcggtggcgacctgttggcggtcgatttgttgtcgtcatcgtcttcgatgccgttcttaatgccgattttggcactggactttgataattaatttcactctttgtggtgcacattggcaaaatgccggcaaatgtgccgggtattggcggtcgatctgtggtcgtcatcgtcgtcgatgccgttcttaatgccgattttggcactggattttgataattgatttcactttttgtggtgcatattgacaaaatgccggcaaatgtgccgggcattgtggcaaaaaataactgagtaaaaatgacgaaaagcggcaccaaattcatcgcttcttgaaaacaaataagcagaattttcttttttatcttaaataaaaattaacatttttaattgtaaattatcattaatgcataaaaaatgaaaaatgttgtataaataataaaaaacttgttgcattttattgatttacattgacaaatatgttttttttataagaaaatataataacaaatatcatgaaggctttttttgaaaaatatttgtattaaataaatagaattaaataattaacgttttcttttatttttggtgaatattaaaacccaaaatgttgatgtaaattgaataattggtccagcttatgagcgctactttcttatataagtttatataaataatacttattacgtaaatttttgtgcgctacttgctacgtgtaatattttaataatttttattcgtattattttataccatttttgttgcattattacaattataataaataataagtattcaatgcatttattaaaagtgcgatgaaacttttcaacttatagcacaatgagatacaaaaagtctgaattgccattatttttttatttgtccacaaaatctatggtatatcatttcaatttacatgtttataagataattattagctatttctaagcgattaattaacccgtaaaaagaagttaaagattgaaaattgcaaaaaaaaaatgtcagaattttatatatctttttcagaaaaatctgtattttttgtatatttattttgctgtttttgtttttttagtgttttttaattatatcaagccaaatatgtttgatttgattttcagattggcaatcatcatttaagtaataaaaatttatgaaaaaaacaactttatgacacaataatacagtatgtacattacaaaataaatcaaagcatgtatggaaatcattcaagaagcctttaaagttaaacatgcaagaattaattacctagaaatgcctgttttacatttataaaatttttttccctttcgccaataaaaatgccaaaaattccatactgttcaacatttatccggcttctttcgtaaaatttttccttttaaagatgcaaaaaacggatttctttgtagctgttgttttggactacgctgctgctgctgctagtgcttctgttccggtgcgatttgttccggtgtaattcgtggcgcgttttggcngtctgtttcgatgcacagc

SEQ ID NO: 31383 - DNA, 1070 bp, Heterodera glycines
  unsure (1)..(1070): unsure at all n locations
caaaggtactcgctcggacgcttcgcggcctcgtactggagccttcggccccccacaattttttgcgccaatccaccatcatttaatcactgggactcaaccctccagcatttcaatcactgggactcaattctccagcatttcaaccgccaacacttaaccctccagcttttcaatcaacgggactcaatccaccagcattccaatcaacgggactcaatccaccagaatttcaatcactgggactcaatccaccaacattccaatcaacgggactcaaccctccagcatttcaatcactgggactcaatccaccaacattccaatcaacgggactcaatccaccacattcaagtcactgggactcaattctcccgaattcaaatcactggactcaatctcatcaatccttcatcaatacaattaccgggactcagttctccgacatttcaatcaccggaactcaacctcagcaacggaatacagaactatttaaaaggaatccagaaattgaaatataacccataataaatcaaaacactatggtgtataattattgcccccaccccataaattcaaattaaaactgacctgtttaaaactttccacctaaatttgatccgcaagtggcacgtcaatatcccaattgcatataaatattccactcgaacacaggcaaaacataagatgtagcatttatattgctttttctatccatcaaaggctttttctttcattttttattactatcataatttttcattcattttttattattatcataacatgctttttattcaaaacaaatatcaaaaaccacatcagattcttttcatattataaggcaggaaaagtancaaaaacttaacaaacctttttcattcaaacaaatctaatgaatttttttaaccaaacaattctccattatcgtttacataagcaaaacaaaagctttcacatcaaaatcaaatcaattaacaaaaacaaaatttagacaaataaataatgataaacagcaaaaccacaaattttttcttacacacaaaaatgtgctcttcttttattaaata

SEQ ID NO: 31384 - DNA, 968 bp, Heterodera glycines
ccaggggtattattttgtaaagtcttttttccccaataaacttttcataccccatttttcgcaccgtgaatgttatttttattgaattctgaaccggtttgagtagattagactagaaaaaattgaaaattttgaaatcatgtttcccactcccttctcccaggggtattattttgtaaagtcttttttccccaataaacttttcataccccattttcgcaccgtgaatgttatttttattgaattctgaaccggtttgagtagattagagtagaaaaaattgaaaattttgaaatcatgtttcccactcccttctcccaggggtattattttgtaaagtctttttttccccaataaacttttcataccccatttttcgcaccgtgaatgttatttttattgaattctgaaccgttttgagtagattagactagaaaaaattgaaaattttgaaatcatgtttcccactcccttctcccaggggtattattttgtaaagtcttttttccccaataaacttgtcaaaccccatttttcgcaccgtgaatgttatttttattgaattctgaaccgttttgagtagattagactagaaaaaattgaaaattttgaaatcatgtttcccactcccttctcccaggggtattattttgtaaagtcttttttccccaataaacttgtcaaaccccatttttcgcaccgtgaatgttatttttattgaattctgaaccgttttgagtagattagactagaaaaaattgaaaattttgaaatcatgtttcccactcccttctcccaggggtattattttgtaaagtcttttttccccaataaacttgtcaaaccccatttttcgcaccgtgaatgttatttttattgaattctgagccgttttgagtagattagactagaaaaaattgaaaattttgaaatcatgtttcccactcccttctccccaggggtattat

SEQ ID NO: 31385 - DNA, 1387 bp, Heterodera glycines
gaagttctgttaagtcaaaaaaaatccgaacattttataatctatatagaatttaaacatgagaattcatgcgagattttctggaaataagcttaattgcggcctaggtaagctgtaaaaaaaatttggggcgatttgaaagagaatagaaagaaccaggtgcgatgaagttttggtaagccaaaaaaaatgcaaacatttaaccatctataaaaaatttaaaaatgagaattcatgcgagattttctggaaataagcttaattgggcctagttaagctgtaaaaaaaatttggagcgatttgaatgagaatataaagagccaggttcgatgaagttttggtaagccaaaaaaatatccaaatatttaaaaatctataaaaaatttaaaaatgagaattcatgcgagattttctggaaataagcttaattgggccttgataagctgtaagacacccaccacttttgcacttaaaaaaatttcaaaaaatttgatcgtccataaataatttgtaattgatcagcggctcaccaaattttgcagagatacgtatcggagcactacaaatgcttactaattttcctagattttttaaacccggtgaaaattttttgcagacacacccaccacttttgcacttaaaaaaatttcaaaaaatttgatcgtccataaataatttgtaattgatcagcggctcaccaaattttgcagagatacgtatcggagcactacaaatgcttactaattttcctagattttttaaacccggtgaaaattttttgcagacacccaccacttttgcacttaaaaaaatttcaaaaaatttgatcgtccataaataatttgtaattgatcaggggctgactaaattttgcagagatacgtatcggaacactacaaaagcttacttattttcctagattttttaaacccggtgaaaattttttgcagacacccaccacttttgcacttaaatatttcaaaaaatttgatcgtccataaataatttgtaattgatcagcggctcaccaaattttgcagagatacgtatcggagcactacaaatgcttactaatttttctagattttttaaacccgctgaaaaagttaagcctaaactttttcggcctgtttaaaaaggaattagaaatttttaaaatatttattcatctccctttttgataatataagagtcagagtgccttattcaacttgtaaataaattttggtgcgtttcagagcagtttctgaaaaaaatttatgaattaattttgcaaaaataaataaataatgaaccctcctccttaataattttcctgcgcccaaggtactcactcggcagcttcgcggcctcgtggctgtaaaaaaaatttggggcgattgaaaga

SEQ ID NO: 31386 - DNA, 1207 bp, Heterodera glycines
agtttttagtttctaaaaacctccaaaatagttgctaaaaatgggtaaatagttgctaaaaagttccgaatttaggggtgtaaaatcgaaaattttcttcaaaaagcaaaaatattttgtcaaatcattaaggatatacataatttttaaaattaaaaattatcctcaagaaaataaaaatataaattttggaggtgaatttttgagaaatttttcatttctcaggggtgtgtttttgaaaattttaggggcaattcttaggggtgtattttttgaaaaaaattttaagtcgattcttaggggtgtatttttcgtttttattgcatttttgttaacaaattttggacaaaacgccaaaatggttgaaaatagtttttttcaaaattttatagttttttagttgctaaaaataaaaaactataaaatagttgctaataactcgaaaagtagcttaacaacagccgaaaaaaacatgtttttcgtgcatttcatgccacggggagctcaggaaaaaaatagtgaaaaaactataaatccgagccctattcatgactttttaaaacaaaaattttgcaaaaataggagaggggaaccgatggtatttccgataataaattaatcacaaagtaatcaactttctccacctcaaagtcaaaaagtcgagcctgggtaaaggccaagaaaacattggacagctgaggaattggaatttgcaaacattcattaaccaatccatcgatgcaatactttttagctgaaaacaaaaaaataaatattattgttgttatgtccgaagataacaaattaaataagtttatttgccgaagaaaataaaataataaaaatgaagagaataaattgggaggtccaaattggtggggcacaattaccaactggatgaagggaatgggagggggaagatggcgaagtggcgtggggtcatacacttaatcaataattacttccttctctaacaattatctaatgaaaaacgcaaaggatcggtaagatgtaattctttttttaggaaaatgtgtttttgattaatttataattaaaatataattatttatttataatattaagttttatttttaaaaaaattcccataaaaattaaaaaatttttcgacccgcgtaaagcactgccattgcgttgtctccgtcaaattcgcttaaatcgtccgcgtaaatgaaactgagcatca

SEQ ID NO: 31387 - DNA, 1331 bp, Heterodera glycines
tttttataaattatttaattaaactatgtgtacaaatcttatctttaaatatgttttggctaaaacttttttttgtgtacagtttcatggctatcctatcccctttgtttcacaaaactcataaagttttgtattttatctttttttaatcaatttatttttgaatttatttttgaaataattaatagaactgagttattgtttataattattattttttcatttctttttaagtaaaatgttttttatttgttaatccctattctttattgttcatttcttcgttttgtgaataataaatatttaatttgtcatagttttaggtattatattttgatataaaagtaataatattcatttcttactaaaaaatagcaattgaataaaatgagcttttgatttgaaatttcaattcttttctctgctatttttttatagatccattttatcattaatacgctaacaaagtttcttattattttaaattttcaaattcaccttggtcaaaaattgaaccagtaaaccatattattttaaatttattaatatttttatgcactcataatgtaaagttttgctataatttatttttagtaattaatttgtataaattaatcataagtccttttagaaaatgtaactttatgaggttttcatgtttcccatgagccaaatgatttaaattcaaattttatctattaggctgaataattaaggtgatcaaatttgtgtttttaaatttaatttgaacaacaacaaatcatccagggacgaagatcaagttgaaaatatttacaggaaagtaaattttaaacacttaatttaaataaagcaaatttaaaaaatcgacaatttcggcgccgacttttgcggcgccaacattttatgacacccccataattaatgcgtgaaatttctcttgagttatgccgaattaataaattcttgtggcagggcagcgacgggatataataaggaagattatagctatacggttcgacgttaaacattgagatctaagtataatcttgcagaatgccgagtgatcaccactgatcatgaagggcagccagtctcgcaaactttttttttctaaatgataaaataatgatgaaaacgaagacgaaaacactaaataaaacaatatatcacaatttgatgaattattcatttcattcttgcgtccttattcgctcgaatccatgccagcacaacttgattttcaatcacaatcagagaatttagaaaataattatatttcttttaagggaatacgcaactgacgatgcaaattcttcgtcaaaactttgacccggaaaaacaattacttt

SEQ ID NO: 31388 - DNA, 1362 bp, Heterodera glycines
taataagcttgatatttgatgtggatttagaattattcttttcaaataaatatttgttattataatttaagtttagattatttaaaatattaaaatttgcttgttgaacttaaaatgtaaactattatatgtattgtttttcgtaatttaatgtttacaaataattacctttagtcgaaaatttatattgtcgtctcaagagtttaatgtaaactagcagtttttatttttagtattaattatatgtgcgagaaatatttaaaagagtctacttaattgtgaaatttttaatttctgacattcattaaaatcagctgataaagaaagagttgaacaattaaaaatcttttgaacaataaaagtctttaaaaatcttttcatgtgcaaatctacatgtatttctttctttcttgaaaaacgtttcttaatggcaatgaagtgaatattacttttatattttcttttttagcattctttatactaaattaaaaatatttcatattatttataaaaatttatatattatgctttttcaaatgtagttatctaaaatttattttctgttttatcgttatagttttttgacattttagtttttaaatttatttatttttttattaattcaattatttatattgcattctgtgccataagaacttcattttgagctgcgcatattaatttaaaattcgataatttattcgttcaaatatttatactgttcaatttttggcaaagcattagttctttcaatggtgtatgttttagccattcattgtttatgaagtgaatttaaatttaattattattatttcatgaagtttttttctttgctttcagttttttttattttttcaattagttttatacattttagtaattggagacatagtttattttttaaatatttatgaataacgatcgctatcattttatttttttaatatttatgaataaccatctctatctttcgcccaattccaacaatttgccgccataaattacacaaaaaatgctaccaatttatgccctcaaacttgggtaattaaaccaaacttttacaacaaaatgtgtgaaatgggggttggggttggacaatagaaaatggcaaaagagggaaaatggggacaaaggaatggcacaaaagattgggggaaaaaggggggaataatacatggaaattgggagaatgcctagggagtgaacagggcatgaaaaatgggggtagggcacaaaatgggggaagggtccgggcaatcaaggggggggggggagaagagcgaattcacaattcgccaaatgatcacaaaatgattattttttccctttagtcgtccgcctcggacttgtttgtcactcgtt

SEQ ID NO: 31389 - DNA, 1444 bp, Heterodera glycines
  unsure (1)..(1444): unsure at all n locations
agaccgagactcttcgaacagcagggganaaactggggggagagaggctgtgttaggaaaattattaataaactaagcattaaccagcgagaaaattttttattgaatgtaaaatgattgaaaaaggcagccaaaaaagtgtgttgtttttttttattaataaaatattttaattaatatttttaatataatttttaataaaaaattaaggttttatggtgaatgcgaaacatttattaaaaaatatctaattttgtaatgtttttaaattaagaaaagacatttccaaaataatttagcgattgaaatgatagtcattttggaaattttaattttttatttttacatacatttatttatatggacatgaaattaaatttgttgatttaaatgagacacatactgtatgattaagttaacttggttctttttcattttcttcatttttcatcattccgttttcttccgcttttatgccaatgccatcgaacggacaatcgcagctaatcaaaaatattaaataaataatataaatcaaatttgaattaaaaaacaaaaaatttaattataaaattgcttaaaatgcattattgacataatacataaaaactcttaagtaaattcatttttaaaagagattgattttctcaatggcaaatttaattttaattaattattattttttaatttaaaatgctttttttgtcactaccgccgatgatcagcacaacaaccgtagtgatggcggagattgatgctgtggttacggtaccgctttcgctcacgctcacattaaattcgacaaaaatggccgccagattggctgaggttgtgcgttgatgttcatcgggggtggtggtcgtctcgccaaccgccggtggatcaacgataggacctttaccagggaggaaattttaagaattcccgggcatcgcctttcggcacgcgcgtctgacccctaaaaaaattgtgtctcgacgaaataaaaaattttggtttttttaattattggatgaggcttcagcgaaaaatttccaaaattttgcaaaatcgcgacgaaaaaataagagaataaatagcaaaaaaatgatctcatcgtttaactagctcttggtgatctgttgatgaataaaagaggctttccttactatgaattttattcagctctttgaactccttgttgcagggataaaaactgccaaccaattggatctgatcaacacaatctttgcaatttgggctgcctcccgcttccctgcaaaagtcttcgaatttccgatcacatttgttgccatcataacatgcgctgatcacaaaaatatcattcccgttgcctggatgataaaagcttggtaaagcaagacctttaccatagagaattgcataccaccaaattttggcatctttacagttccgtcccttccccccccccctcgcccacgac

SEQ ID NO: 31390 - DNA, 1292 bp, Heterodera glycines
tttatttttatctcttttttgaagaaagtttaaaaatgaaactcattgggattcgggaacaaaaggaggtgcacatattttcgagtggaaaattttttcaccaaaatcttctaaaaatgtgtctttaggggtattttaaggctaagaattgaagcatcattctgggggggagcgttaggtctggatccgggtgaagtaaatgatttttctatattatttttccatgtttattaaaacatttaaacgaatttcatttagaattaattaatttttataaaatagaaaaagaaattatttcgaaaaaataaaaattctatttaccccccgggcagataaatagagacggggagattatttttcaacctacttcgaaaggggtagataattggagacgggcatataattagagaaaatacggtatattttgatttcgggctattgttcttatttgttttgatttcgaaaattcatttggttttaaaaaatcaccaaatcatcagaattttttcttcaatgacaaatttttcaattttcatcctttctcgagttaattatttaataaatgaggaagtaattcttgtgcttttaatcatttttacgatcattttaagtttgtaatcacaaaacagaaattattattcattattaaacatttaataatggcaagggcaaaggcttctccccattttcttccgccaaagtcaaagtgattcccccgccacccatcgttaggcaataaaaagggaaaattgaagagaaagagaaggggagggagggggaggagaagcactaaaacattattagaggtgtttttaaagagacaaaacaatgtttacggacagaataccaacagaaagaaacagcgaaagcgcacacaaaatgcattttatccgatcaaatcagtttactgattgataatgaagaattacatttgaatacacatgaataacccaatcgatggcacgtcgtttaatgacgaaaaaaacgcagtatttaatttatggcttatagacttgggcccggcttcctaaagggtcgaatgctgaaatatttttgcgtttccgtggtatcttctgaacatgtactgaaacaaatatgtcggcagcatttcctcatttgaaccacgtaagtgtcggtcagcagtaatatagctagtcgaaacatagcaaccggagtttgaagaatggagaaaaaatgccggctggctgctttttgccaacgaacggagagaaaaagcggctagtattggtttttgccgacaaatggagagagaaaggccggctgttacttgg

SEQ ID NO: 31391 - DNA, 991 bp, Heterodera glycines
gattttcttcatgttgataagataccacagaaaaacagtagaacaaccgcagaataaatcaaataaaacaaatgatttgaaaattaattttctttaatcaaataataaataccatctgaaaaatgaagaaaagatgagaaatatttccaattttactattttacaacagtcaaaatagtttcatatttttaaattggaatttcaaactacagcagcaccaaatacaattagtgagtgattaattatagtttgaaaaacaaagaggggaaaggcggaaaagataaaagagagagagagagcagcagcaattgactttgttgtggtggatttaatttgaaattagtgggacgaaattcccgttaatgacaaaccgagagcacaaattgaattctcgaaactctcgaacagtccaatagaataagtgagttcaaaaaagtgattttcttcatgttgataagataacacagaaaaacagtagaacaacagcagaataaatcaaataaaacaaatgatttgaaaattaattttctttaatcaaataataaataccatctgaaaaatgaagaaaagatgagaaatatttccaattttactattttacaacagtcaaaatagtttcatatttttaaattggaatttcaaactacagcagcaccaaatacaattagtgagtgattaattatagtttgaaaaacaaagaggggaaaggcggaagataaaagagagagagagagagcagcaattgactttgttgtggtggatttaatttgaaattagtgggacgaaattcccgttaatgacaaaccgagagcacaaattgaattctcgaaactctcgaacagtccaatagaataagtgagttcaaaaaagtgattttcttcatgttgataagataacacagaaaaacagtagaacaaccgcagaataaatcaaataaaacaaatgatttgaaaattaattttctttaatcaaataaataaatatcatctga

SEQ ID NO: 31392 - DNA, 1355 bp, Heterodera glycines
tgtttttggaagatttttggttgaaaaaatttttctatcaaaaatcatgttcacacccctgtggtcccaaattccaaaatcacttttatttctataacttttttcaaaaaagtgataaaaagctaaaataaaatttatgaaatagagcaaaaaattgcggattttttgagtatattatttttataaaatactttttcagaagggagttaggaatttttttctgaaaaatcgaatttttccagaaattctggaataacttttttattttggaagatagaaattccaaataaatctcataaaattctcctaattttttgctatttttcaaattttattccactaaatttgaccaaaaacgaagagagttatgaattttcaaaatttcactggatttccggggctcaaattttcgcgcccgttttttaatttttttagggacattcggccgcttcgcggcctcaggacgggcgcttcgcgcccgtcttttaattttgtagagaacattcggccgctccgcggcctcaggacgggcgcttcgcgcccgttttttaattttttcgtgggcattcggccgcttcgcggcctcaggacgggcgcttcgcgcccgttttttaatttttggggaacattcggacgcttcgctgcctcaggacgggcgctttgcgcccgttttttaattttgtggaaaagctaaaataaaatttataaaatagagcaaaaaattgtggattttttgagtatattatttttataaaatactttttcagaatggagttaggaatttttttctgaaaaatcgaatttttccaaaaattctggaataacttttttatttttgaagatagaaattccaaatgaatctcataaaattctcctaattttttgctatttttaaaactttattccactatatttgatcaaaaatgaagagagttatgaattttcgaattttcactggattttccggggctcaaattttgacgatttttcaaaaaatttttaccaccttccaaaaaatctgaaacgcaaaataaagcgtatatacgtattcagcaccaaaaattaggccataaaaatgcattttggctaatttaggagcaaaaaaaattttcatgaaatgcaaaaccatggggtcccccctatggttttgagtttcaaaatcacaattaattttataactttttttaaactcatggtaaaaacatgagataaagcacattagattgggcttaaaattctctacaaaaatgctcttgcatgactttttgctaaaagcaacccctgagaagttatagccacagaactgaaattgaggcctaccaaccaaaaattttctatttccaaaaaaattttaa

SEQ ID NO: 31393 - DNA, 1178 bp, Heterodera glycines
  unsure (1)..(1178): unsure at all n locations
agaatgaccgatctcttcccctgggcttgtatttgatgtcatgatggcgcaggcgattcgaagcctggacggattttcatatacgatgacgctcaacacaataccgaatttggacggaagcaagggttctgattcggtgaacacctttttcaagcaatttgatatggcgacagaagaatggcctgagtcgaagcgattgcgggcactgcgctcgaaatgttttggcaaagctgagagagctttcaattccgcaattgctgaaaatcgtcatgattatcagctgatcaggagagcgatcatccgacaattagacgacacagatgccaaacaattgacggcgtttgaccaactgatgaaaggagtttggcttcggccgaatgaaggcattgatcagcttggcgaacgtgtttcgcgcttggtccgttgtgcatatccggggctcagcgaacagctctacgacgaatattcggtcatgcatttcattagggcactccctaactcagaattggcaatgactttggagatgactcgtaaaccgggtgcaacattcgatgagttcatcgcacaagcagcacgagccgaggcagttcaaaatgccgcacgaaatttttggcgaaacagccaaaacaacggctgtttccaaaaccaacgaaggcacattgtttgctataattgtggccgagtcggacacacttctcgaaattgctattcacagccgacacatcaggcgcaccaggacaatccaagcagcaatttccattcatcaccatcattcaggaaccaaaattttcactttcagcaaagtgatgaaccacagaaaaggggaaatttgtttgtcggagccgtaatcagtgcttgtttttacaagaatttttgattttaaatattatttatctaaataccgatggcttaatttttattactttttgaatagatttttgtcattttacgtccctaaattttaggttttttagtgcatactattttggggtttttagagcctaaaaattacatcccgtaataaccagagctgtcaaaaaatatgcaaatgcatatttttttcccggattatacatagtctaactagtaggaaaaacatcttctttttgtatttttgcgtataaaagtggtgacctttatggttttatgcatatttttgngtttttctgcatattttg

SEQ ID NO: 31394 - DNA, 972 bp, Heterodera glycines
tcgcctcccaattgaatgatgacttgcgtccggccacccgtgttgtccatttgagcgttattcacttaacaatatgttaataaggtggtgtaattttgcattttaaataaaaattaaaaaataaactcactgatcggaccgaggaattggtccatgaacaaagtgaggaggtcgttgtggttgatctgttcgtgctgctgcggtcggtcggaagcctaaacaacaataacattgaatttttttgtctaaagcccatgtttttttttgtttaaagagtgatgccgagggcagatttcttgggatttcgttcaattttgattgcccagccaagatttttttgtggcgcactttttcaaaaaattaattttgggagaccagtggtggggtgcggcggcgctgtaaaaaatttttataatttaacgcggtttgttaacagcttttgtctaaaaaattggccaactttttgctatttaaagttcaatttgttgatgacaatagtttgggttacggcagtgccgagttcgatgacacgacctttccccccgtccccccattgcacagctatttatgataagcaatgaaaaagtcgcaactccgaaaacaaacaaaaactgtgcatggatggtcctgttttgtgacaagtcccccacccaatccgactcaactcccattcgaccattttgacacttttaattttaatgatttttcctaaaaaattgcctgctgctgagcgtgactgcgttgcgtgtgcggctgctgatccatcggcactggtggcggcgtggcagcggcctggcgatgctgcggctgatgggtcgccgtggacggcccttcgcttgcggaccggcgatggatgagcaccgttggacgaccgtcgttcccagccgcggcggtggtggtaggaaaaatattgttgtggatgagttggaagagctgaaataaataaaaggatggaattaaatgattcaattg

SEQ ID NO: 31395 - DNA, 1183 bp, Heterodera glycines
  unsure (1)..(1183): unsure at all n locations
gagaatttattatagaatgcanaattcgccttaaattaataaggtgaaagtttgaaatgtttattaaaatatttcaggtgaaatacaattaaataatcaaaaagaaaaaaaataaatttattttactaaataaaaaaaaacattgtcagaggcagtgcctgccgaaaaaaaagacaaaaaattttttgaaaaaagctaaaaaaaaattgaaaatttaaataaatttaaaagtgaaaaaagtaaaaaagcttacaacaccttcgattcccaggacgtctccgttccaagtactaagaaggcccaacgttgcttaacttgccagatcggacgggatggcgtgctttcaacgtggtatggtcgtaagcgaaaggccagcaattaaagtcatttaaataggcatatttaaaagagcctatttttttgccttttcacaagagaatttattaaaaaaggcaaaattcgccttaaattaataaggtgaagtttgaaaatgtttattaaaaaatttcaggatgaaatacaattaaaataatcaaaaagaaaaaaataaatttatttttctaaataaataaaaaacattgtcagaggcagtgcctgccgaaaaaatagacaaaattttttcaaaaaagccaaaaaaaaatgaaaatttaaataaatttataagtgaaaaaaggaaaaaagcttacaacaccttcgattcccaggacgtctccgttccaagtactaagaaggcccaacgttgcttaacttgccagatcgcacgggatggcgtgctttcaacgtggtatggtcgtaagcgaaaggacagcaattaaagtcatttaaataggcatatttaaaagagcctattttttgcattttcacaagagaatttattaaaaaaggcaaaattcgccttaaattaataaggtgaaagtttgaaaatgtttattaaaaaatttcaggatgaaatacaattaaataatcaaaaagaaaaaaaataaatttattttactaaataaaaaaaaacattgtcagaggcagtgcctgccgaaaaaaaagacaaaaaattttttgaaaaaagctaaaaaaaaaattgaaaatttaaatanatttaaaagtgaaaaaagtaaaaaagcttacaacaccttcgattcccaggacgtctcccgttccagtactaagaaggcccaacgttgcttaa

SEQ ID NO: 31396 - DNA, 1277 bp, Heterodera glycines
  unsure (1)..(1277): unsure at all n locations
tttggttttcattccaattttctatttttttgtaattcattttgtttctgcaagatttctttgntcgctttgtcctctttctcgaacctttccgacccaaatcatgtcaccacgaaaaagagaagtcggcacttcgtncgagaatctgannaatgtgccaccacagcagagcaacgtcgccgagctcgaccaggacggatganccaagcaacgcaaaaagcgcccggccattgcaccagtgactgtgnagatcggacagttgctggaggccttcaaatcatcattgtcggccgagatccgttcatcagtcgaacaacttcacaaggagttgacgggagaagtgcaccacgcactgaacgcactttggaccaaaatggagccggtgctcagcgatcagtcgcgctgcattgcggcgctgactgatgcgattgacgagttgtcactcaagggaaccgagcaatcggtaaacccatccacggatggaggtccagctgagttggccaaagaagcaccgatgaacccgcagggcggaggtccagcttctgagctggctaaagggcgtaccagcccagctcgttcgaccggaagagcatggcacggaaagcaacatcgacaacccgcacgcaaagccggccgtctaaactacctgatgcgccaattggagcgcgaggtcggcggcagccaaatggtccgatccccgcatccgtactgggaaaaccgccgagggaatggttatggaggaccgcgcggtgggggacgcggaggctacaatgcgtatcgcggagaccgttctgagcgcgtcggcccgtcaaacaatggacgttgaatctgtggtgtggtttggactccggaaggggggagagatgttgaatccccttttgacaaaatcatttatttaatttaatgatcaattttcacttatttattttgtacaacttttcttctctctcttcaccgatttcctctcccatcctaaccaatcgttacactttactgtaaacccaagccaagccaatttgtgtccatcccagctcactctcgactccaccccttttctcttttgctatttaaactgaattcattccttgcattattacccctttttttctactcattttgactcattcccattttacttacctttctcacttttgctaaataaactttcattaacaaacttaaagtcttgcttttgattgggaaataagtcgggaacacaacaccattcgaagagatcttagctcaaattgtggcatttatgcctcagaaattatttt

SEQ ID NO: 31397 - DNA, 1269 bp, Heterodera glycines
tttttggggtttgtttgcctttttgaaacccagtaaaaaccgtttaaattgtattgcattaattagttattcataaattttcaaaaagccatgccacaaagtgctttttattccgatttcattttctgggccatcatttgttaaatgtcaattcttccccctcccagtgacatcaattatgtgatggtttcgcgcattttttccgtgcctcgactgaccaaatattatgtgaacgcgacgacgaccaatccgttcaaatcgaagtgacccttaaaaatgcattcgtttcattacgcttttgtccctctcagcgacatttacaaatgcaccgttggcagtctgagctccgactcggacaaccagtccaactattcgaccattcgttccctggagggcattcaggtcgaggcaaattttgatttttatgcaaatgtttcgggagttttaggaatttatcaaactcaaggctcctttcctttaggaccgtcatcgtgaagtggaccatcccctcattgtcagccaccaccagcaacagcaacaattttcccaccattcgtgcgcccgctttcccctgagtttctcgcgtaattccgccaccagcagtgagccgccggagcggttcaaccgcgtgcggaattcgtcgctgcaattggagaccaacgacgtggaggacatcatggaaatggaggagttgcgcgccttctcccccaaccgattgtcgcgcactcgacgacgccaactgtcacagctcggcctggacgacggtttgtaatccgatggggcgggggacatccagtcactgactcatcccaaataaaacttagcccaggaaacagttccgaattaaccactaaaatgggtacaaattgactactttattggtcctcaattggctgcctttctaattctctttaattttctagcgctttcgttgcgtctgagcaatcgcagtcggctgagcagttgttcctccattgccgatgcttgtgcgctgggcgactcatccgccgagtggaagcagtacggattcgcacttattttgccaagtttgtccattgattgctgccatttttacaagtttgactcgctttaggcgaattccgttccttcattttcctacacattttgcaaattgaacgcgaactcgaccgattgatccttcaaattcacaaagcggtccaggacagagcacagtttttccagctgatctacgaggtttggtggtgtctaggaaggcttctatttctggctaatatctgatatttttag

SEQ ID NO: 31398 - DNA, 986 bp, Heterodera glycines
  unsure (1)..(986): unsure at all n locations
taaaaaggaaaaattaatttggagttaggaatttgattaagcaccaaaggcccccgcgtctttagaagccaacggaagtccgaggaaaccggcgcccgatgagtcctntgataaagttgaacagaatcatccgagtagcttaagggataaaggcaaagatgccatgattgaagtttctctcacgaaatgccttccttccgaataatttctccgtcattcggcaaaatggccgacccctcttcttcctcctgctggtcatctttctgttcattgtgagcctacaatttaaaaaaggagtttcagaagtccgtttcgatgagagtatttgtgtacttcttcggcgggtggcgccgtttctccgtctccaaaattcttctgcggctgactttgctccaccgctgcgactttgtcactgtacgaacgaatggacgaagtcatttcatttgcgatttaaaggtgtcgtaggaaaaagaagacacaaacacaaaaaataatatggccatctttcacaattttagcaatttatatagccttgcaaaatgggttactccattgcttcctagggaaaatattgatcatagtccccaaactcaaaaatgcttaaaaacggtcagaatcgatgtaaaaatgttcgaaatgggttggaaaaatagaattagaggcgcgcttgccctttttcaggctgaaaaagtgccggaatttgagtgccaaactcagctgggactcaattaactgcactataaagagcactcaaaacacatttgaaataatttttctaatttgtgccgctgatcacgaatatgacctttgtttttcaaaattccacccgaacccgaattcgaacaaaaattcgatccaattgaatttagcttattgcgctaaaaaaccgccgcacactcgactacggcggccagtaggaggggcgagagtacgggctagggtagcgttcgcgcgtgatccgcatgcggttgactgattggcggggg

SEQ ID NO: 31399 - DNA, 1598 bp, Heterodera glycines
caattggtctgtagcaaaacaaataataattttgaaaaacttaataagacacaaaaacctaaacatttaaaattctataaaattttaaagattttcaatttacttcagctattttattaaatcatgaaatatttttaaaagtcattttaaaatttataaaaattttctgctaaagtataaagttcttggcgtttacaaaaacttttttcaacaatgtaagcaatttttagtttttacttaaattcaaagaaaatgcaatttattcgttttcaattgaaatcatttgttagccctgatttttttcattgaaaaaatgcactgtaacttttaccatttgttttggcatttttcacccttatgttatagtaagttaatattttacattttttcattaaaaccctctctttgtattaaaagtcgagtgccgatttaccaagttaacatgcactttttgtgacttttttgcgttttttatgactttttgaagatttttaatgacttaaattcccgggagccggaaaatccgacacctatggaaaatccggcacttgcggaagatccgacactggaaaatccgacaccaactttaaattttaaaaataatttgattgtttgagttaatatctgcctaggtttaccaagttctcgaattgaatttacagagaattgttttgttttgcgtcaattttttcatgaaaaatggtttgatcagcttcggttgctggggaggcttaggtccaggtgaattctcatgattttcactcttcggaagacattgacaaactcaggggctgggctggaaccgaatgattcgagaacagaggacggtatggcatgcaaaatggataacatcccccctcccatatgctaaaaactgttaaacacttttttttctcgattcccaaggatcacagagatttttttaattctttttttgagataatcaaaaaagggcatgcaaaaaaatataaatatatatgcctaccgtagatagattatggcaataaaattatttattttggataacttcagtactgtaactttattatatgtattttaaatattaaagcaaagaatcaaaaaattatttttaaaaattaaagttggtgtcgattttccagtgtccgattttcctagagccaaattcccagccctcgttattatataatttagtccataccaatttttaaattttttctcggaaaatgtgttaatttttgggctaaaaaagatatggtcccttattttctctttcccgtcgctttgcttccatctgctgcccctccggtgaccttcaattatggctctaaccgccactgtcctcccccccccccctcgactcacacatttcccttctcggcacactctcttcctcttcatttctcgtcttcctttcctcctcatcccctcttcctcgccaacgctttcctcctcgtcgtcactccgtcaccctctcctttctctcctcacttttcccctctccattttccactctctctatctcttcaccggtgcctatttcgactcttctcaattattgtgctattttgatgcattcattccctcccccattcccgttgaccttttgggcaagaaca

SEQ ID NO: 31400 - DNA, 1050 bp, Heterodera glycines
  unsure (1)..(1050): unsure at all n locations
acttgccagttcggacgggaggggggttttcaacgtggtatggtggtaagtgaaagcccagcaattaaagtcatttaaataggcatattaaaaagagcttatttttttttccttttcacaagagaatttattaaaaaaggcaaaattcgccttaaattaataaggtgaagtttgaaaatgttattaaaaaatttcaagatgaaatacaattaaataatcaaaaagaaaaaaaaaaatttattttactaaataaaaaaaaacattgtcagaggcagtgcctgccgaaaaaaaagacaaaaaattttttgaaaaaagccaaaaaaaattgaaaatttaaataaatttaaaagtgaaaaaaattaaagtcatttaaatagacgttttttaaaaaagcctatttgccttttcacaagagaatttattataaaatgcaaaattcgccttaaattaataaggtgaaagtttgaaaatgtttattaaaatatttcaggatgaaatacaattaaaataatcaaaaagaaaaaaaataaatttatttttctaaataaataaaaaacattgtcagaggcagtgcctgccgaaaaaatagacaaaattttttgaaaaaagccaaaaaaaattgaaaatttaaataaatttaaaagtgaaaaaagtaaaaaagcttacaacaccttcgattcccaagacgtctccgttccaagtactaagaaggcccaacgttgcttaacttgccagatcggacgggatggcgtgttttcaacgtggtatggtcgtaagcgaaaggccagcaattaaagtcatttaaataggcatatttaaaagagcctatttttttgccttttcacaagagaatttattaaaaaaggcaaaattcgccttaaattaataaggtgaagtttgaaaatgtttattaaaaaatttcaggatgaaatacaattaaaataatcaaaaagaaaaaaaataaatttatttttctaaataaataaaaaacattgtcagaggcagtgcctgccgaaaaatagacatattntttcaaaaaagccaaaaaaa

SEQ ID NO: 31401 - DNA, 1618 bp, Heterodera glycines
gtcggtgccgagcaaagggttttctgtggcacgaattgctcgcctcaatggcgagtaaagaaagccgcgacttcggcctttgaccgtttggtgtcagagagaacagaggccaaattttgggcgaagctgaagaaaagtgtaaatgatcatttgagatgaaatttttttaacaattcaaaacatttgattccgtttgataattcgattgaaattttagctgattcggagcagaatctcctttgtgtccatgcattggctgctgtttgtttgtccatccatctcaattcgtccccctttccccactttaatcgaccatttatttatccatcggccgcttttcgccggcgtttcttacaccgattggctattggtctgcacagacagataaaccacaaaaaacaaaagcagggcgtcagttggttcaaaatggcagcagatggtcggtcggcttttttgtgcttttcatttgttttttcaccatgtgcaaaaacacctttttgttagcaaattaaaaacatgaattaactatacttaattatagaactcgagaacatcatcatcatcaacacaacagaacactcactcatcgcaattgaacagccacaactctttgacaaatgaacgaacggaatgagaaaagtgggactaattagagaaaagggcaaacgacttggacttgatgaggcgaaggaatgaatgccaaagaaaaccggacattttctcaaaaatagtgagtgaataatagccgaaatttacagataaagaaattataattaattaaatttacaattcttttcattattcttaaaaatattatttattcgtttaaggagcttaacatggaatacgaaagagaggaacaacacccgtttaagaaagcgatgtgtgggaaaggaatccgcgaatgggccttttggtttatcgtcacttttttggcatgtctcactattaaagatgtggtgaatttggtaaaagattatggcaaaataaagcattgttttcaagaaaattttagatcagagaatacggagaaaacccaaaaaaatcggatatgaatggtaaggacaaaagttgccaacccagaaaactcaatttcccgaataattggctacagaaattaatggaattagtgaatcagttgctactagagtgccacgggaccgggacctggtagcggacaactgagtaccaaggtcccggttttttcccggttttcccagccaaaaattcccgggttttcaacccgaaaaggtcccggtcccgggtttgcccaaaattcccggtcccgtggcactctagttgctactctccattaaaatggtaaaaagaaataaacatttttagtgcgtttcaacgacacaatgaaagtgccaaatatgacattttgtatgagtcgtgcgcaggcgtggagccatttcaaagtgaatgcgtcagaaggcgaaaaaaagtgggacaaaaaagtgaaagtaagcaaaagaatggagtaaaatgtataaatgccaatcctggcaaggaacaactcggaaaaatgatcggacgcgaagggtttttggcattgccatgggaattggaaatgacgatggagacgtacaatttggtgatggtaaaaaagacaatg

SEQ ID NO: 31402 - DNA, 746 bp, Heterodera glycines
agtgaagcaatggatgacggtgggcggcaacgatttcctctcaagacttaaaatggccaccatttcttggtgcgcttcactttcatggacaaacaacggtttgccaagatcgcatgccaattggacctggaaaagccaacgcaaacaaaaatagcactaacaaaaaggaaaaataatttttcgatgtttgttttgaaatcagttaggaattggataaaatgaatgtcaaagccccgcggaaaaacattttcacgatttttgaatataaagaatttaaaagaatggaaaacgctggaatttgtgtgtatgaaattgcatttaaaaacgccaaaaaaaaaacctgggtctcgaaaacccgaagttgttggtcccgtggcgagaaatttctgttgaagtccaacccgcattcgccgaccgcgacacattgcgaatttacggtcaaatgggagcgaaggaaatccaacgttcgtccgtcatcgaaatcttttgcgtcatgcggatgaacacctttatgaaaagcggaaaaattttttttgcaattaaaatttttttaggaccggcagtgtaatagagaaagcccggctctttgctggccaattttgccgcttcatctgtgattgattcgcttgcgccagtgatcaacaattttacgataccttaaaatgaaaaaaaattaatttttgattcaaaagtcattagagtctggttttattatagccaatgcttttcctaaggccctatgtagt

SEQ ID NO: 31403 - DNA, 995 bp, Heterodera glycines
  unsure (1)..(995): unsure at all n locations
gctaatttatatgtaatattcgaaagtgccaagctaattagcgattcaggcgcacattggggcctgaattaagccattttccctttgatcggtacaaaattggccgaaaaagagatagccattttctgaggcccgaaggaaaatttgagagggctaatttatatgtaatattcgaaagtgccaagctaattagcgattcaggcgcacattggggcctgaattaagccattttccctttgatcggtacaaaattggccgaaaaagagatagccattttctgaggcccgaaggaaaatttgagagggctaatttatatgtaatattcgaaagtgccaagctaattagcgattcaggcgcacattggggcctgaattaagccattttccctttgatcggtacaaaattggccgaaaaagagatagccattttctgaggcccgaaggaaaatttgagagggctaatttatatgtaatattcgaaagtgccaagctaattagcgattcaggcgcacattggggcctgaattaagccattttccctttgatcggtactaaattggccgaaaaagagatagccattttctgaggcccgaaggaaaatttgagagggctaatttatatgtaatattcgaaagtgccaagctaattagcgattcaggcgcacattggggcctgaattaagccattttccctttgatcggtacaaaattggccgaaaaagagatagccattttctgaggcccgaaggaaaatttgagagggctaatttatatgtaatattcgaaagtgccaagctaattagcgattcaggcgcacattggggcctgaattaagccattttccctttgatcggtactaaattggccgaaaaagagatagccattttctgaggcccgaaggaaaatttgagagggctaatttatatgtaatattcgnaagtgccagctaattagcgatcaggcgcacattgggggctgaattangccattttccctt

SEQ ID NO: 31404 - DNA, 995 bp, Heterodera glycines
tttattacaaataaaaataatactttttcacattcttatcaccaaaataaaattaaaaaatttctaaaaaatgtttactcatggcttcattaagtactttgatcgccgagtttgggttgtcgaaatggatccatttgcatatcgaaatgcgttgtcgcgcgcaaatcaatacgctgatcgacgagtccgtcacgcatggcactcaaattttgtcagtgcattagatttttggcgaaatgttggacaacggatgccaatgtttgccgcagttattggcactgaattgttggcacaactgcaggatgagcaagtatttggcaaatttgcagttcgttttaatcttattacgtaaaaaaaaatttctttttttgaaaattgatttttgaaatccaccaaaagttaagaaaacacattaagaaattcttgttttgccgacttaaaataaacactaagataaaatccatttttgagaagaaaaaaaagtttagaaaactactaatctcgattttgtcgagatcccgatcccttccttatttcacaataaaaccgggattggcgggcgggatacggtaatcctggcgagaacttgatcccttccactgaaacattttcaggaaatcctgtaaaaaaaccaaccccaaaccccacataagccctagtctatgcttaaaaaatttatttagttaagatttcgggggattaacaaaagatttaacgataattattttttgtcaagatataattgttctataaaaattttttccctatttgaagcaaatgcttgaaaatggagcacagtttgccaccgtggaagtgctgggcactaaccaaactcaaagcatcgacgacaaaaagctcaaagccactttggtatgaatatttaataaatctttattattgtacataaacgcttttaagaaattttttctaatatttattggaatatttaattgaaaaattttaaattttttcttttttaggatttgcttcgttct

SEQ ID NO: 31405 - DNA, 696 bp, Heterodera glycines
ttttgccgatggatgccattaataatgtgacgacgccggcacccattgggcccgccaaacagtcccacgacgcgctcaaggcggtcatgctggtggtgctcttcttgtccacctttttggcctcaaccgtgcgttgtttttctcactgttttgaatgggccataaacattttggcattttaatgggacaaaaaaaaagttgccatttcaaagtgccaatttgaggtgccattgatgaacaatgaatgagtgagtgttttgatcagttcataattttgtgaactttccgagtctcggtattacagaaaaaggtacttattcaaatttgtcgcggaacaatcaccacaaatttttgtgcattttaatgccaattttgggcggtgccgggcacagttgggccaccccccgccaaatttaagatatgtttccggaagtttcaaggtcgttgattacacgaatatgacatttattttggacattacaattccaaatccaaaaatttgaataaacagtcgagaattataatttttaaattatagcctaaaaatgaagattaaaacactagaaaataatagtgaagcgaatgtctatggaatccgaaattagggaagcggttgttaaggaagaatttggtaaagaaacggtggtaaggaaacggtggtgaggaaacggtggtaaggaaacaacaccaacccct

SEQ ID NO: 31406 - DNA, 1672 bp, Heterodera glycines
ttgttgtttgtttgtccatttaagaataatggctgtggataattttttccaattaccccccccccccccctctctccccaaacttctctttcctcctttcagggaaaatcatccgcaaaaaaatgattaaggccgacagagagagacaaattcaaatttggcgagtgccgtcaacagcgggcacagcttaaaacatttgcacgcgcagcagaagggtctctcaaaaaacaaacgtttggtttatttgttttcagtttggtccgtcgtccatcccatctttcctccccccttttaagtttttgtttctttctgtgcctttttgtgccaatttgccacctttcccatttttcttttcatatgcaaattttctttctccccacgcactttcaatctgttcactttacgtttggaggctttcacagtgtttttcgatttgcatattttccttttttataattggcaaaggttttttgtttgccttttgttccccgattctttggcctatccatcacaacaattcatcaacacttggcaattccctcgagagggaattggccaaggccgttggaaattcaattttaacgcccgagggacaaattttggcacaattgccgaggtcaatggacgaggcatttgtgggtttgttatttgagaagcagtcaaaaattcaaagcctttccgcttttccttttggtcccttcctatcgaagcattgccattttctgcaatttaatttattttttggatatttctctttctttttcttcgaaatatttatgtcaaggccaaactcaccaaccgcacaatttaatttttaattatgaattgtaatattttttccaaacatccatatttaaaattattttacttttttattttatttaaaattactttattttttatttcatttccatttttattttcccctttttcttgccgatgtcaaatcgctaaatgaatgtgaccttcacacgctgagtgccgaaaagctccgcctgccgtaaaattgatttattaatgccacacaaacgatattcggcaccctttagatggatttttccctgtcatcaatgccaaaaatagaaggacaggcggtcgattgttttttgttttttttttgatcaaaataagcgttttcttcttttctctgttcctctgatttttcttttctcttttctcccttttttgctgttcccccgggggataagccaaatccccgccgccgtcgttcttttgtcggctcctttcatctgcgaattcatttcctttgtttttggctaaacttcttttgacacattaattttgtatgaccttaacaaataattgctgttgtaaacagttttagaatattttttgatcaattaatacatttaatttgctttggatttgaaatatttttttatttcaaatttatattcttatcatttattgtggaaaagctgccaaaaatggcacggcaaaatgggaatccgacggcgtctgcctcggccatttaccaccggtctcggtttttgtgcagcagtgacgacgattcgggtcgaattgggaattatgaataattgggggaattaaataattgaaggctgtgcaatggacgagatttacgcgtgggtgcctccccggacaaagcttgacttggtaaaactgttttttattcataaaaaacattttg

SEQ ID NO: 31407 - DNA, 903 bp, Heterodera glycines
actagcgagtgatgtccgtaggaataaaagccaagggcgtggctgcgtcccatccaacaatttcctaatgcttagtgatggactagcgagtgatgtccgtaggaataaaagccaaggcgtggctgcgtcccatccaacaatttcctaatgcttagtgatggactagcgagtggtgtccgtaggaataaaagccaaggcgtggctgcgtcccatccaacaatttcctaatgcttagtgatggactagcgagtggtgtccgtaggaataaaagccaaagcgtggctgcgtcccgtccaacaatttcctaatgcttagtgatggactagcgagtgatgtccgtaggaataaaagccaaggcgtggctgcgtcccgtccaacaatttcctaatgcttagtgatggactagcgagtggtgtccgtaggaataaaagccaaggcgtggctgcgtcccatccaacaatttcctaatgcttagtgatggactagcgagtgatgtccgtaggaataaaagccaaggcgtggctgcgtcccatccaacaatttcctaatgcttagtgatggactagcgagtgatgtccgtaggaataaaagccaaggcgtggctgcgtcccatccaacaatttcctaatgcttagtgatggactagcgagtggtgtccgtaggaataaaagccaaagcgtggctgcgtcccgtccaacaatttcctaatgcttagtgatggactagcgagtgatgtccgtaggaataaaagccaaagcgtggctgcgtcccgtccaacaatttcctaatgcttagtgatggactagcgagtggtgtccgtaggaataaaagccaaggcgtggctgcgtcccgtccaacaatttcctagtgtttagtggtggactagcgagtggtgtccgtagg

SEQ ID NO: 31408 - DNA, 1803 bp, Heterodera glycines
  unsure (1)..(1803): unsure at all n locations
gtcccggtcccgattttttgaaaaacagaaatcccggtcccagttttgccagtcccggtcccggcgggactaaataagcactggtaagaatgggggtctgggtgagaaaagagaagggaattggtggagatggagaaatttttggagaaaaaaaaaatcaatttttattttatttaacgcatttgtgtatatccttttgtggtttttttttcattttcggcaaagaaattttgtgcaatttttttagaaatacctatctaccaaattttcccggtaactcatttataaattgccaatttttcggtttatatttgaaattttatctcttttttcgtttcatttgtcgtcaacaaattaaaatttttgggagtaaattgtgactaaagacacaaagcaaaaaattgtgctgaacacaaattttcgtactgaaagattaaaaccatcacaaactataaaatttaattcggccgattattttactgccaaaaatttaaaataagttttgaaatgactcacataatatgcatgcaatttacttttaaaaaaatattttatcaaaaaatgaacattaaataacaatacataattcaatcgtaatacttttaatttgattgagcctcaactgttacaagacttccattattgttataggaatagcgcttaattttttatctcaatttattctagcatattaaaacaataataatttcatttttatatagaaacttttacctattatcttttctttatttttaatcaatttggattgataaaatcttaaaagtgttttattcagattaattactgcagaattcgcacataaactttactttaattttatggcttgctaacgcttcatttttaattttttaaattggatttacataaattacttttttttttaatattttatcttgcgaatgtagaccggtatttttcccgccaaatataattcaacgatcaatatactcaacttggttgattaagtgttatacttaatatgacatttggattttcaaatgattttgtgttttgcttttatcgcaaattttaaaaattgttattatttttcaaatattctttaattacgaaattttataaacagtaatagttcttatttcccaaatccatgggatttaatttttcaataaaaactgttactgggccgccttgacgagccaaatttcttggtcactcatgttttcctcaatttttttcaaaattacagttaaggtgtaaacattgcttcatctaaaatatagaatattttatttatttatcatattttatccaatttctttatttatttattaaaagttatcttttgctaatcagtcgtttcttttttgcagtttttagtttattgtatttattcgaaatgttcttaaacttcagtttatatattttatataggtgtagttaaccctattgcgttttggtatttttagtcgtttgtctttgtttttaatgaatttgacaactttaaaaaattttactacaaaataataaattagaaaactctttgcaaaatttatatttattttagcattaaaatttattaatttttattgatgaaatttaacaatctctttccttttacttttttttcattctgttaagtatcgggaaaagaaaataaataatttttttcataaattctatatcatctataaaaaaataaaagaatttttcaattaaaaaacgaacatttaaacaaaaaaaatatatgataaattgaacctatttatatgtatntttatatctttttaaataaatttaatattcagaaattacatgtacatg

SEQ ID NO: 31409 - DNA, 1547 bp, Heterodera glycines
gatttatggaatgcccatgttggcggattttatgaaacgacccagcatgattttaaaacacataaatgggcagaaacttacatgaattgaataatttcttattattaattatgaccaatactttctgacacttttgtaaaaaaaaaattaagttcaaattaagcaaatcaggcctttttgataattgtaaaagggataaaaaattgggtgcgattggatccggattttttgagatttttttcgaaggttcagtttttatggaagtcaaaatatttttttatatttaccatattgactttcaacgacattggcaaaaaactgatgcttcaaaactgcaggaagaatattttttttaaaatataaatcccagccctacttagtccattttgtattatgcatggattttttaaaaattaaatttaataaaatattttttgcatattttgttattatgattttgctcgtctgtttgcccaacaattttataataattaacccaaaagaaatttatttttcttcaataaaatttctttattaaatcaacaaattctgatcacttttaacatcaaaaaatacactaatcatttctcttagttttttcttaactgatctgtctattttttctctaattttttttacttattttttctgtccgtctttttcccccgtcgttgtccatctccagctgctgctgctgctgctcgaaactgttgaagttcatggctaggtgttgagaagctgcttttccttgcttcttcttttccagcattaatatattctgaattaattatgaaacaatttaaaattaacaaaaagtaagtatattgtttaaatgcagcattaccacgcatggttgggccttgcccaactgaaacaagtcttggctccaatttttccaccttcctcgcagcttttcgaccagatttactacctgacgacgagcctgacataacagacaaaatatttttcatgtaaataaaacaaatgcatgccaaaaaaattttaaaatattatcaaaacaaataataatagtaattttcatacgaatttgattggcttattgtcgttaatttgatctgtttaagcattttgttgttttttcaagtgagcatttttagcgttacacgaaaacccccaaaagatatcttttcagcatttgagaaaaaaaccgtaaaaaggaggttcgaaaatatgaaaaatacgaatatttaaaataagttagaattatcattaaatagttgaattcgattaaaaatttctaattcattgttgtccatagaaatctcccgaatttttggtcaaattagtgtatattttaccatgcatagttggagttggcaggtcaataattgaaacaagtcttcgtccattacttggattattaatgccagatccgtcgtccgcttttgagcatgacatacaaccacctgccaacactttttgatcatcgcggaagcagaagcagaacacaaaagtgatcaaaattacaatgatgtagcaatgcgtcatcggttcgcttgtgatcagcagagaaaacaaattaaaat

SEQ ID NO: 31410 - DNA, 984 bp, Heterodera glycines
tcaaaacatttaattgaatttcaaaaaagttagggtcaaaattgttgagtctaaattttttgagctttttttagttacatctttttataatttttttgctctatttttaaaaaattataatatattggaggtttcgtagagatacctttcaagaacaagattgattaattttatttagtttaagctaagttatgattaattatttagcaaataaaattaaaataataattaaatttaattattacgaacattgatacttttgtcacttcggctcacacgaggtcgcagcatttgcattttctaaaaatgttttcctcattttcaaaggttttttacattttaaataccaaaaaagtttttgaaaaatttgattttgttttaattttttttttctctatatttaaagtccgaaacgaaattccgttaattgaattcataaaatttgattttaaagcaattaaatggaaatatttgacgaatttattattgtttacgaacaagtgatcagtcaattaacagtaccacaaaacggtgacgactacaaattgtcatctgtaaattttgatttttttaatttaaaaatattttaaaagaatatttaaaaagcaaaaaaattttaatagcatataattaagccaacatacttttttctatataaattaatcacttacatattttagtgaatttacgataagcgattatctcgtattgaaaatcaaagacattggcaatgcttcttcttccaatccgtcgaatttggagccattggcacaaattgtccgttcgcattgggaccaaaatggggcacaacaaatcattagtgtaagtttaaagaaatgatcaattaaaaaatgaattaatcaattaaatcatttagacccatacactgaacaagggcagtgaagttaattacaacaacattgctaatgattcatcaattgttatccgaattcttaaaaagcgggagaaatagtccgaaatgtg

SEQ ID NO: 31411 - DNA, 1168 bp, Heterodera glycines
attagggtaggtcgggaccgggaattttgggcaaaaccgggaccgagacttttcgggttgaaaaaccgggactttttggctgggaaaaccgggaaaaaacccgggagtttcccggttccggtcaaaactggtcaaaaccgggacttcggtactcagttgtactcagttgtccgtgttcatgtcccggtcctgacctaccctagttttgatgaaaatttcttcagattaaaaaaaatatatttattttaatttttatattttttgttaaaattttcctggtttagaaaatattgacaattaaatatcttaatattttataaaaaatatggctaaaatataaatttagcacaagaattgttaattttcaatgtttgaaatattatttttaacttcatttataaatttttattttatttttttaattaccagtaattttccaggaatgcattgggtcggcaaggatttcagtaagccgctccggcaacacatagaagttaccttcctcatcctggtcaattgcaattttcatcagctcacctttaaaaaattgtaccattatttttgaaaatttgaccccaaaatggcaacaacaaaaaaaaatgtctgttctgcccttgaaaattgttcgctttatcatgtccttgaaaataggttaaggatgatgaatgagactccgacattgtaccaatttttcccattttaaacaaatgccaaccaaccctcaatgttttgttgccgtggccaacaatagccgacaataattgccatcgcaccgccgagcagcatcaacaggccgatcacggtcaacaaacggcacacatacaagcccatccgttgcgcgggtggtggtggcaacaaatacctgagaagagcgggggccgtagtcaaagaaggtggttatggttgaataaccactaccatcatggtttacccgtagcaaatgagcaaccacgacgggtgcatggttatctaacctggtcatttgaccatgatggttggtgggtggtttgtgaacgcacagtaaacatggttggtggttacctaaccatgtaaccatggtaaaacgccaaccctgccccgacccatggtagcagtcgtaaccaccaacttttaaaaatctgccaaaaatcagcaaaacaagataaaaaccacaaataaaatttataaa

SEQ ID NO: 31412 - DNA, 1420 bp, Heterodera glycines
agtgattgaatgctggagggttgagtcccactgattgaaatgctggagggttgagtcccgttgattggaatgttggtgggttgagtcccagtgattgaatgctggagggttgagtcccactgattgaaatgctggagggttgagtcccgttgattggaatgttggtgggttgagtcccagtgattgaatgctggagggttgagttccactgattgaaatgctggtggattgagtcccgttgattggaatgttggtggattgagtcccactgattgaaatgctggtggattgagtcccactgattgaaatgctggtggattgagtcccactgattgaaatgctggtggattgagtcctactgattgaaatgctggtggattgagtcccgttgattggaatgttggtggattgagtcccgttgattgaaatgctggtgggttgagtcccagtgattgaatgctggtgggttgagtcccactgattgaaatgctggtgggttgagtcccgttgattgaaatgttggtggattgagtcccagtgattgaaatgctggtgggttgagtcccagtgattgaatgctggtggattgagtcccgttgattgaaatgttggtgggttgagtcccagtgattgaatgttggagggttgagtcccactgattgaaatgctggtgggttgagtcccgttcattgaaatgttggtgggttgagtcccagtgattgaatgctggagggttgagttccactgattgaaatgctggtggattgagtcccgttgattgaaatgttggtgggttgagtcccagtgattgaaatgttggtggattgagtcccagagattgcaatgatgatgagatgagtcacagtaattgaaatgctggaggttttgagtcccggagattggaatgttgtatgcattgagtctatatagattgacatgttcgtagtcatgcgaccccagaagattgctaagatcagagcccgtgtttccgcgcttttatatgaagctcttgtagactttgtggaccattcgttgggtattgtactctgtttggacaatctcgtggtttagaacgaatacggggacttgggaccacttcgtgtgcttgggacaagaacggtgggcttggcacaattgcgtggacttggtacaattccgttggcttcgcacaatttcgtgagcttggacaatttcgtggcttggacaatttcgtggcttggacaattcgtgccttggacaatttgtgggtcagcggatttatttcgctgatattttatttatttattttccctttaatactattttctcttcctctctttccctctcaccataactttttggtttttttgggcccacaacctattgtcagacgcataactacttcccatttttagcttttttacttttccccaatgcccca

SEQ ID NO: 31413 - DNA, 1715 bp, Heterodera glycines
  unsure (1)..(1715): unsure at all n locations
ttatcccctccgaataatgatttatcccttctaaacgcttcatanctgtccttcattgcgtcgcaatacgacccccttggccttatttccccactcattctcccattaaaaatttttctccaatcaatattccaaaatggcagcgattgggatcaaactctcccaaccgaaattcaaaacgactgggattgcgcaattaaaaattggaaaaatgcagaaaaggtgtccattccccgttgtcccgttacactcccattggagggaagaaattatcagttacattgttttactgattcctcatctctcgccatgtgtgccacagtgtatctccgaattacccatccctctttctctcaagcagaagtgtttttaattttttcaaaaaccaaatcctcgcattaaagccaccactgatcactcccgagaccgtgctcccaatacaatgattctcatttctctttttctgtgcttaactcaggtcgagttttccgatgcccacccaaagggaaagggtacaccaattcctttcccaatccgccgagttgggaaaccctttgctaaaactgccgtttcactccgctccactacggcaatttattttggattggactcattggcatcctttcttgaggatgagcccgaaatttccgccgtccttttaaccattttgggctgccttatcatccttgttttcatgttttttctcaaaattatttcactgtttttcccgacattgttccgtagacgcccactcattcatccctccagtccccaaaactcaactgagctcaccgaaaatcgctgcgctgtggatgaactcatcaatcgcactaatccttcccgtatttcccattaatttatcattttccacccctttagcaatggaaaaatcaaataaaatgacccctctcatctcccaaattatttcacatcttaaaattgtccctgaaaacccaccaaaccccccaaaatttgccgctgtccccattcccatcgatgccgattcggtttctctggcatctgatattccacacagtgaaatgccacccgcctccccgcatgacactcattcggccccacttgttttggacaacgacggcgagcagcaggatttcgaatcatcggacctggcaaaaatgccatcaccaccagcaatcaccgttgatgggtctcagcaacccattcaggtcatgattggaaatcggggaaagataggagggggggcgaccaaaacactccacgttcgaagggacgtcttttttgggcgtactgagcggcacgccgaacatccgcaacagtggcggccgccgaaaaaacgtgtgttcttccgccgaacttctgccggccccacacgcacttccagtggccacagttgtcgtatgcctcgcttcaatccgatgggcccaagaccgtttaaccccgaacgtgtgcaatttctcccgaacttttgtcaaatgtcgatgccaaaaccgattcctctcaatcaaatcaatttccacacggcccaccctcgctccctcttttcccaatggcccccttcgcccatgtgctttttactgccccaggggtagtgtcgcgatttgcgaaataatttgtatttcctccctccgcccccttgacaaaataaaatcctttattttacaattatcccccctcctcttttcgcttcattacaccacttccgttgccgacggccgactggccataaaagactt

SEQ ID NO: 31414 - DNA, 1139 bp, Heterodera glycines
ttacaccctcccccccccccttctccccattacccccgcccgcccccctcgttggaaatttcgctagggaaatttgttcaaattttacaattttcccctttcgttataacccccccccccccctccctagacgaacgaggtaggggtaggaggtatcccaggcctcttaagacgagggggcgggaggtgtttcgatatatcccttacaatgtatgtttctcgagtctataaaatctttaattttttctcgagccaagaaacgtttctcccattctcggaaaggagtcaagcacattattaatatataaacttattaatgcataattataaaataaataaataaaataatagtacactttacttgctccaaatgctgaaatagacggcttgcccatcctcgccaaccaaactgccgcgcaatgccatcgtcgaactttgattcttttggaacaacgcgtactcattgtcaatgtgtttggcacgaatagcatctgcatcggcggtttttgagatgtcgaagtcgcgtaagctgtcgcttacattcttcaaataaaaatataaaaaaataaatttatttgtgtaaaataagaaaatttcgaagccaacatcaaattgtgcagcaaaaatgaccaattttgtgagtcaaattttgaaaattgttaagaatttggtggtccggcagtgcgctaaaaagctagaaatttctggaaaataaaatgaaatttgtctaaaaatggataaaatcccaaaaaattttatgactcaaaaatattacaaaaaatgattttgcatttgaagaaataaaattaccgaatattttcactatctgtataatctatttaaattcaattaattttatattaataaaaatttaatttattttttctattttttactttgttgtaggcaacaaaaccgggcatgtacttgagatgcagctctttgccgctatttttgagcatgatcatcagggaaaagaggcagaatcctgaacattttaattatttttaggttttttagggccatttttgtaatttaaatatgccaatgggttcagaaattgctgaaattttgtaggaaaaggaaaccttagaaaattgttttagtgacttggccttaatttatgatctttaaagcct

SEQ ID NO: 31415 - DNA, 1726 bp, Heterodera glycines
attggtatgtgatcggataacatgaaaaaataactgagtttcattgatcggtcccacggtgaggggcggggcgtgtcctgagcagggaccttgatcacaatttgatttgtatctgcttggccagatcattggcataattgtgacggagaccagaggtctaatcacagtttgaggagacccaaaacataaatcttggttggaatgtcttgccaatttgtgtgttcagttccgttcggtgacgtgtcgaagtgccaaggagggcgaggagggcaaaatgttgccggccgaagcatgcaccggccaaatgccacctgaggagcgcgattgcaacttgggcccatgcaaaggcctccgttttcacaccaccgaatgggaattggtcagtttgtgtttattcgtatcagggattatagcctgatcaattgattatcaataatgattgtttaatttaaatccccggggattatagcctgataaattaattgattaaaaataattattgattaatttaaatccccccgacggattaaagcctgatcaattgattgatcaaagataatgatcgattaatttaaacccccgaatttttggcatagtgccaaaagtgcaacgacacggaggaaacacgagaagtgagctgtgtagacaaaaatggaagagagtatccgctggagaagtgcttggatgggaagaaggtcaccaaaattccggaggacacgaggccatgcgcaagccaagcggtcagtcacaaattttcccaattctgaccaattaaaaaataattctgatcagttcttaaaagcattttcaaacaaaagtattcaaatttgaaaatttttttgttttattgttggcattctgtttagccttgcgtttatgaatggcacacatcgcaatggtcaaagtgcagcacggaatgtggacatgggcacaaacaacgaaaggtccaaccaaccacagacatggctaattgaaaacattcgaaaatttattttgctatttcgaaataaatttactgtgaaaaagaaggtaccttgttttaaaattgtggtttggttctcgagtgctgggaatttttctatctcgggcagtgttttttgagattcccttgactataaaaatttttcaatatttttagttttttctttggggagggggtggcacaacattaagggattgggacggtgccgggatcgttactcaaaaaccatcaaaaaattacaacattttttttggaaggcagcacaaatttagggagggcggggtgcagggacactgttgtaagcgatacagtaaccttggtaaaatccattttcgaaacgattatggtaccaaacgccccccgcatttggcttccttcacaggtgttctgtgccatcaacgagctgggccaaaccaagcgtgtggatgaagcgctgtgtggccaaagcctggaggaaaagccggtggctcgggaggagtgcgtcaacgaggagaaatgcactgtaaacatgtataagtaccttaacacataataacatccaataatattgcataaattgactaattaaacaagtaattaattaattgaatataaatgtgtaaaaaaataataataattaataataataaatctatttaaaaattagcttaaaattctcatttctgaatcgcaccgctctactctggttaaaaaatactacaattaccaaatgaaaaatattaattataaaacaaaacttgtccc

SEQ ID NO: 31416 - DNA, 1217 bp, Heterodera glycines
acgctttttcaatcaatcaatcaaagttcattaaatcaattaattaatcaatcaattaattaattgtttgatcaataaataaataggtaattaataattgccgatttcattagaggaaaattacaattgctgaacattacaaaattttcagacgaaaaaattacattttagtataaaagcaaccaaattctttcgttgtcttcactcttattcagttcatttcatttcacttcccacctttgttcggcaacgaccaagcagtcgaaacaaccgacgcagaagtaagcgcaacggcaccagtcaaacgacacagtgacaacaccattcattccttcattatttatcatcatcagcagcaacaacagcagcgacgcatgggccaaatgtgggaaagcgagcttaatttaaaaaaatgatgatgctaattgattccttttttccagcaatgtatgcgacgacgtttggttggacacattggcatggatcaatcgtgtagaagtcggcatgaagttcgcgctggtcaatgttcggttaaacgctttggcggacaaacatttcaagcagaggaagtggtgcttcggcgagtttcatatctgtgagcggatgacggaagaatcgggcgcagaaatcatgacatcgatcgacggctccgacttcagcacgttgccactgcccaccactccgttgccggacagtgtcgtcggcttccgatcaatttccatttggtcgtcatttgctttccaaattcatttttctaactgccttctttctgcaggtacatcaatgaagaggtcgtcaattttctgcgcacaattcgccgtctcctcaccgaagacattgcgctggaattctccactttcttcacggaatatcgcagttggaaagtgatggcacaacacatttggccactgttgaaagatgggatcagcaccttgtgcctgaagaagtgtgacttggccatgctccgtaaacacgtgtcgcccaccgtgctgttcgactgtgccggcctgcaccgaatccacacgcaaatgctgcccgagtgtccgtctgctgacggtgctgtcgatgaagagaatgttgttgttgacacgacatgccgtgaattgtacacgtgggttcactcacctcgtgaagaagggcacggaccggtgtcactgaagctgaacaaatggaaggagggcaaatgggacaactttgtgaacaacttgaacaaggtg

SEQ ID NO: 31417 - DNA, 1102 bp, Heterodera glycines
  unsure (1)..(1102): unsure at all n locations
aactttcaccatattaggcattaattaaaaggttcagatcttttaaaatgcacccatttctgttatagctcatagaattatggcaactgattaatgcacaattcagcagtgttgccaatgataaaagtgaaaatttagcaaatttacgagattctcagaatttataaattccagcccccgtaaaatgctcgtgtatataaatgcctttttaaaaatcattttgtaatgtactaagaatttcaaaaggtaaaccaaaagcgctcactttcgtaaattgctcgacaataataaaaacactcaaacaatgaaaagagtttgctaaactgctcgaagccctttataagacgatgaggggcgcttatatgttccgaaaatctgcctttaatccttacaaactttcaccatattgggtgggcattaattaaaaggttcagatcttttaaaattcacccattgctgttatagctcaaagaattatggcaactgattaatgcacaattcagcagtgttgccaatgataaaagtgaaaatttagcaaatttacgagattctcagaatttataaattccagcccccgcaaaatgctcgtgtatataaatgcctttttaaaaatcattttgtaatgtactaaagaatttcaaaaggtaaaccaaaagcgctcactttcgtgaattgctagacaataataaaaacactcaaacaatgaaaagagtttgctaaactgctcgaagcccttgataagatgatgaggggcgcttatatgttccgaaaatctgcctttaatccttacaaactttcaccatattaggcattaattaaaaggttcagatctatttaaaatgcacccattgctgttatagctcaaagaattatggcaactgattaatgcacaattcagcagtgttgccaatgataaaagtgaaaatttagcaaatttacgagattctcagaatttataaattccagcccccgctaaatgctcgtgtatataaatgcctttttaaaatcattttgtaatgtactanagaatttcaaaaggtaaaccaaaagcgctcactttcgtgaattgctagacnataataaaaacactcaaacaataaaa

SEQ ID NO: 31418 - DNA, 1472 bp, Heterodera glycines
ggaagaagcggaccgaagtccaatttaacttggtttcttttcatttgtttaccaatgagaggaagccagcaactgcgaatgtcactagcaaaagaggaaaaagatgcattttattgggcagtgaaagtcgattggagaaaaacgggtccgtttgtctataaatgattggcggttcaaataaacgaacaattttttgtaataataggccgaccaaaatgaagagaagttggggaagtgaaaagtgactgatggatggggaacgaagggaaagtgaaaattgtgacggactaaccgacggatgattaatagtttgatgtggttgctcatttaagaaaaaggagtacgtctgggacagggaatatcccaggattcgcttgggtggggaagatggtacacggccggaaattcgatgtctgcttgactaatagttaatgcatttttttaaagatcaaaatcaaacttaggggaggagttcggctgtacgtcatactccgtttaccctctccctggatttgatgacaccctccccccccccccccctcactaccgctaaaacatttgtttagcccatcgccgaattcggtccggtggcgatcagacaaccgccggaagtgattgagggtatgaccgactggtgcaaggagaccttttcgaagaacggactgattgaacggatcaaagccagcgacaaaggcgaacgcgagactgaaaaaatggtgaccgatcgaggaggggaggggacgctcaagcaaaaccaatgcattgatcgattaaggtcttggactttctgcgtgagcatacgccccccggggagtgtctgttggctggcagcagtgtgcaccaggaccaggtgttcttgcgcaagtacatgcccgagttgtgcacccatctgcacccgtatcgcatcatcgacgtgaccacagtgaaagaggtgccgaggaagaccagggattcttcacttcaaaatcaatgtgaatttctcacagttggccaagcgttggtatgagcacaccgagggatggaagaagttgccgccgaagaaagagatccatttggcactggacgacattcgcgagagcatcaacattttgaagtattgccgtgagcactttttcgccaaatgagcagccaatcaacggacacatttctacgtattgttttattttggcaaaattttgtttgttttatttattattgtatctgttttcattaacattccaatcaaaaaatccgtctgtttgtccatcatttcttttgtatgcttcttcgccttattcgtttctgattttgccatttgtcactgttgcttcatctccatgccaatttcctactctcccccagtcgctgtccgtcctcagccgttgcaaccgtcggcctaacattttgcattggcttcttcccgtttcatttcgctgctccgtatcgggcacgtcatttttcagcattcgcttcagctgaggcaccgcttaact

SEQ ID NO: 31419 - DNA, 1096 bp, Heterodera glycines
  unsure (1)..(1096): unsure at all n locations
aaaagaaattgggtgaaatggggaatttaaaaatgaaatttctttcgattaggattttgaattttttttctaggcgacttatcaagtcccaatttttcaaaaaaaatttttttctgaaaatattatagttttcaagtccttctggtttgtaattaaatcacaaaacacatttgtttttctcttattgttcgcccattagcgaaagtaatgccattttcctctgttcgtttcggcacttttgccataattggattttttgcatttccgcttttgcccgacattttgcacccactctcaactaatgacattcacacgccttcctttttacttctccccaaacacctcttcccatgctttgtctgctaattttataatgaatttttgcgggcggcttttggcattactttttgtatgatggaaaaattggcatatttacttgtcaaagcctatgccaaaatctaatagtggggcaattaacgcttttccaataaaaaattcccatgatttatcgaaaattagtagccaccaaaatgcgaaactttactactcgagcagcaactcgggaacacatccaaggctttccaaaatgcgagagtttaaactagagtcgaaatgcgagattaagaccgaattcctcccccaacaaattcggtattaactcgagtcaaatcccgagattgagactaaccccccccccccccccacacctccgaactgctggaatttatccgagtcaaaactcgagactcaaaacattgagcagaaataccccaaaaatgctaaatattgaaagcgagattcgagtccagaaaatttgaaaagttttttggaaaagagtttcgggattcaaaaagctgcacacaaatgcttcgcaattgttccctttaatgagcatgttacgtttaatttcactattattgctcaaaaaatcgggtcgcatttgaaatttaaaaataattttttgattgtggagtaatgcgatgccggattttcttgcaccgcttttgacacctaaaataatggcttattcaccgagtngcatccttccactacacatgtttttgccgatggcaaatacagacgacacgacaccttt

SEQ ID NO: 31420 - DNA, 1656 bp, Heterodera glycines
aagacaaacagaagttataaaatccaaaaataattccatttaataaatcctttttcttaaatggttccatatttccttgaatgaatctttccattattttcttgcgcttccaatggtttgtctttctttcccaaaaaatgtcccccaaatcccccccccggcaatgtctctttatgaaatgccgacccgatttgtgccatcccccccctttcctttccctttcattttccctttttctcccaattatttccgtccatcggatgagcccattctgcgcacaccttgcagctggcgaacgcaagaaatgacaacaattattcttttcttttgtgtgtcgccactcgtaattaaaggccaaaatagccattaacgaaaaatcaacaaaatcagaacaaaaccccaaagtaaaaagcatcttttggggacgaaatgtacgtcgtttaattttcgcaaaatttcccgaatttctctcccccccccccctccctttgtaattttccccttgttgctttaggccataaatttgttttgtccggaagaaagggaagaggaagaaagaataatgggaaaaggaccgagaaaggggggggatacggtaacacttttggccattggggaaaggcaacaatggcattggcattgccacttgtggccatttgaaatggttgtgaaattttggaatcagtgccaattgctctgtttggcgttggcatttcacccggtcacaaccgaccgtttctggtgcagctcgcatcgtatgtcccgtgccgcccgcctcttgcgagccgtcgtcgccggtgagcagtgccgcctcgtcctccgtgccgtcccctgcggtgccgtcctcctcctcttcctcctcttctctgtttctgctgcttttgctgttgttacttttaccacgtttgtcatttccaatgttcccacttgcctccaccacaacaacaagcgattgcttctgaaaaagtgacaaatcaaagctaatttaattgaatgcttccctcttcgagcaaaaaagtaaattttaaatttcaaaatctcactaattacccctcaattgccccaatgtccccccccctccgtcccatgtcaattctcgtctgatatttttgttcgtatccaataattttgatctgccatacttccgcctgtgctgtgccgagttcggcatgcgttttgtgccgttggaagtgttgtggccccgctgccgatgttgctgttgccgcgtgctggtgctgctgctgtctcagcacatacgtcgcgtgttggcccaacgccgggggcgtatttccgtccgaattttgctgctgttgaatcggatggtaatgcttaagggagggagagcgcaagttgagttattgtttggcttcgatggattgtttttcagtgcctttcttttcccgctttttgccacctgctgaattccgttaatttggccggtccctccgaccaccactacgaagatgtcccttcccgcgttggacccgtcgctaactgtcgcgacggaccgctcccaacacggcggcggcggttgcggctccccagttaaaccgcagagcatttttaagtccagaaaggatgtggtgccaagcgagtggtaacccgtggcgatggaatgggggaaatgccatggaaatccggagaagtggcattttg

SEQ ID NO: 31421 - DNA, 1108 bp, Heterodera glycines
cttgtgacaaaagcgaaattctagggcactgaaaaaacccaaaaaaaaaaaacattttttttaatagtatgcccaagaagttagtgctgcgacgccgggcgccactttgttcggcagctggcatgtgctgttcggcaaccaggatcaggtggtcaacctgtggcgctaccaaaatgggtaccccgatttggacagatttgttgaggatttttcaatcggaggagcgccaatcttttttccctcatatttttagccacatccgggcgctcagctccaatacatcagtgaaaagtgccgagttagactaagctaggctgtgccgacgacgacgcacagtcatcaccaagccgttcaggtcggattgacgagagagtgacggattagacctttttttggttatttgtattaaagaaagagagtgagaaaaagaaaggagaggagagagcaagagagagatagaaagaaaacgagcgggaggagagagaaagaaagagagtgagaaaaagaaaggagaggagcgagatagagagagagaataagaatggaagaagaaaatggaaggcgcgatggaaagaagttattagagagtgaggacaacagaggaaaagcaagtgagagaaaaaatagagaaaaagtgaaactgagaaagggaaaagagagaaaataaaagaggagaagaagagagagagaaataaagagagagagagagagcgagagtgagaaaagacagcaaaaaatgaagaggaaggaagataaaagttaaagagagaagtaaagaaagagggaggcaggggttgggaggaagagagagagatgtgaagaaggatggagagaggggtggaggtggagagagaaagaagagacagagaaataaagaggacgagaagaagagagagaaaaatagaggaagaaagaaagtgagaaaagactgcgaaaattggagaggaaggaagataaagagagaagtaaagaaagagggagggaggggtgtgggaggaagaccggaaaaaaaagagggaaggagagagaggtggaggtgtagtgagaaataataaacaaaaataaaggcaaatactttaaaagggaaaggataaggagagaagaagag

SEQ ID NO: 31422 - DNA, 1160 bp, Heterodera glycines
gcccgagtgagtgggggcaaacaaataaagtgaaaatggaattttttaatttgaattgctaaataatgctcatttgtgtgaattatgcgtcctctttttcgcacagtctcgactcggccgactctgagcttcaacctcatggaaagaagcgagcaaagcattacgacgacttgcccgagcagtcgtacgggcccgggtcagctgactactcgcaaacgccggctgaactgcttgaaattgccgaaatggaccctgacgatttgtcattcaagtcagtggaataatgggatgaaattaaccaaaatttcatgaatcaaacaattaaatcagcattttactggttcaggccaaagcagacgggacagccgcagaaaagtgccaaagggaaagcgattggattcagaaagccgggcacaagccatgcaacgaaatcattcagaaaggcaaacaaaactgaattttgaccacaatttcaatggttaagattttgctgcggaataaaatttttgtggctaaatcgcgatggatatttcgttcgattgattttatataattaattggcttatatttgaatattttgttttaatttattagtacaaatttgacattgtttttttttttttttgaatttcgaatgctgaagtgtctcatcgtcaaaacaacgcattcagggctaaaggtgagataattttgaatcaattaaaatccttttcgactcatttagcgctttttccatgggactgcgcctgccgcccatttggcatatcgccccttctataataagcacaaaaaagtgacggacccggcgcgccaggacctggcctactttgagaaggaggccgacaagttggaattgagtgagtgacagtgtggatgacggagttccaattgcaagccgtactctcattttttgagttttgttacaatttatgaattaatttagtttttaagttgtttaattgccagtttttgtggaaattaacaaattacctggtttaatataacctacaaaattacttgtgattgatttgagcattttcacggttccctttcgtttgcatggaatttgaaatgtttatctgtttttgttggtcagatgactattacattgacgcgctgaaatcgctttgggaagagaaaatcgcagtgaacgcgaactg

SEQ ID NO: 31423 - DNA, 587 bp, Heterodera glycines
cgcatttaatgacaacatttacataagcgaatcgaattacaatgacaaataaggaaaatggaggagagaatgggagaaaatggcgaaggtacgttttttatttgacgttttttgacggaattttaaggaatcgctgttgttaaaagtgaaaaaataatataaaaatttaaaaaaatcaactcctccattagcccaaattttagtttcgcaaaaacggttttcgtccgccctgacccaatccgtgccattatttccattcctttttccctctaaaattcttttttgaacagcgatttacagtgggttaattccatcgcatgaactgctcgtgacaagaatggaggctaacctaagggtttagattgagtgtaaaacttgaggaagagatgctcgaattttttaatgaggccaaaacgatgggtttttcgtttttgaggaaacgtcggcacatctttgactccccgaaacgaaacttgtcctaattgattgagcgattactcacatcccatctacttttttttctgttgaaagggtcttctagaattttcaaattccacccccactccctcacaaaatgccatacccat

SEQ ID NO: 31424 - DNA, 1533 bp, Heterodera glycines
aaaattttaccaatgagtatatgtttcaacagataggccagcttggtcaatcgcaaaccttgaaaacatttgtttttttggtataaaatatcaaaaaatttatcaatttaaaatttttggttagataaaaacggcaaccgaaaacgacacacaagagctgcacagatcgcagtgttcttgtgatacgcctcaaagatggatggacctttgaacatttctccatgttgacttaaaatgcttgttgtttgcccttaagcaaggctgaaatatttttttaaattaaggttttcaaataaaaatgtgtgaatttgaggaaaataataataataaaagggataattggtttaaaattgtaattaactcatgtaatttcaaattgtaatcatataattaattagaggtacctgtaattaattaaaggtatatgatttcttattatgatggttttttaagtatcgcccaaattttattatgatggttttttaagtatcgcccattatgatggtttttaagtatcgacatagcacctttgtaactgcagcttttaagtcaagggtatcaaagtttggggaattttattagggaattaaaagacaattcataaaacataaataataaaatcatcataaaacaaaaacataaaatattacattggagcaaatctattatattatttgggtatgtcattccgaaaatttttgcgttttttgaacggaaaataggaatatttatcagcatgaaagtttttttttagtttattaaacaaaaaaggtgagagagagataactgaaaggataaggatagatgagaaaatggggtgctatgtcattataaaaaagccatcaaaaagggcgttataaaaaaaaccatcaaatgaaaatttcgaacaaaaaactatctgtaacttttgtcaaagtctaccaaattagacattcttgatataattcgatagccctaaaatttctctattagttcacctaaatttcaaaaaatttggccaagattgagcaccataagtacacatgtggccaggttttcgaatatttttggccataacttttttgaaacccaatgaaattttttgaaattttgcaggctaatagaggacacctaaggctatcgaatgatatcaagatcactttattttttcgttctaagaatgttttgatcagaattcttgatgatcaaaataattttatatttaattaaaaaatttctgttaggcgagaacaaatagaatgagagagacagagagaaagagagagagggaaataaagaaaggagagagagagaggggtgtggagagaagggagagaggggtgagaaagaaagaaggaactttgaagagaaagagaaggagagacagagagcgatagatagagggagacagagagggagacagagagagagggaaagagaaaggagagagagagaggggattggagcgagagggagagagggaagagaaagaaagacagagatagatagaaagagggagacagagaaagtgagagatagaggggggagagggat

SEQ ID NO: 31425 - DNA, 1990 bp, Heterodera glycines
  unsure (1)..(1990): unsure at all n locations
tgagtcaacagtaaatncggaaagcataatttctttcgctttctcaaaagatttctgttgctcaactttccattcccatttggcctccttcttaagcaattcatccagcgggcctctgagctctcgcatcggtttgatgaatttgccgtaataagtgagtgcgccgagtaatgatcggagcgttgatttgtcggtcggagccggcattttctcaatggcttctgcccttgatgggtcaggtcgaatgccattttcagagataatgtggcccaggaaaagcgtttccttttgcaggaaactgcatttttccaattgaattcgaaggccatattcactgattttgtcgaaaaccgcgaaaattgttgaggtgtgatcgatcagtgatttattggcgatcacaaaatcatccaaatagacgaatgcgcctggaattccggctatgattttgtccatcaatccttgaaaaatcgcgggcgccgatttgactccaaacggcaaacgctggcactgaaataggccacggtgcgtgttcagtacgcaaagatttttcgatgattccgacagttccaactgtagataggcatcacgcaggtcaagccgtgagaaaaatttagctccggcgactgcgttgtagatgttctctggtcttggcagtgggtggcgatgcagttcgatggcatcgtttaggccggtcgaaaaatcgatgcagacgcgcgtttttccgctctttttcttcactgccaaaatcggagccgcccactggctgaactcgattggtttaattgcgccaatttttgaaagacgatcaatttcggcattgacttcatccaatgctccatgaggaacaggccgagccttgcagtagaccggcttcgcctcctttttcaggatcagatgagctctgaatttggtgcaatggccaagttcaggtccaaaagtgttggcgtaattggtttgaagtgccgaaatgagtgacttttcatcactgatttgtgatgaaattggcttcgttggcattgaattgacgatttgtgacgaatttggaaacatcaattccttcgggatgatttccaattcttcaatccaaggcatgccaagcaaatcctggtgaatttcgtcgctgacgtaagcaattaggcttgccgttcgtcctttgtacgaaacttggcatttgaatttgccttcgattgggaatgctttttcattgcaattcctgacggtgatggccgttttgcctagctttggtttgccaagcttttgccatgagtctgttttgatcaccgtgatttgggcagcggtgtcgacattcattgggtgatccatcccattgatttggatgatcacttcccaccatttgttgctgcttccttcaatagccatacattttggcttaattgagacggtgtgaatgtgcgtgtccttcacagaatcagtaaccactgcacgaacacgtcggatctctgtgccgcttttgcatgctttcgcaatgtgaccgttccgtccgcatttttcacacgtcgagtttttgaaccagcagtctttttgccagtgacttttgcctccacatgaatagcagggctgatcacgttggtccacttttcctttaggtgccgttgaatttttcggcaggaaattttggcctttgtggctttgctgcggcttcgttttgggcttctgcttgtccctgatttgctgcggtttggctcggatggcactggtgctgcagggatttgagccgagggagagcgcgctttcctttaggatttgatattttcggcactcctctccaagctcttgcagtgaggttgaccgtccgctcgttcgactttcttccaagcgctgaaggcatttttgcctcagatcggtgaattcgtcccgcaatgcaatgatcagtatcatgcatttgagctcctctttgctcagcgacagatcggcattttcgcaggacgagttgatcaatgcgatcaaactttgcacgtcctgatgcgcg

SEQ ID NO: 31426 - DNA, 1599 bp, Heterodera glycines
ttaatagtaatttttacataaaaaatatttttcttattcaaaaattagaaaatttattaaaaatccataaaattttccgagccacaaaattcctataagatttcaaaatttaacctaaaaattgccccttttcaatgaaatctaatatcaaaattcaaaaatctatggtttcttcagactaagcccagcggaccccaaaaacttatattttttcaagaaaaaatggccttttttgtgtaaaatctattgcttaaccgcataaaaaaatccaattttttaccggcagggcccccggtgaattttcttaaaaataaaaatttgaacacttttagctaagatctgttaacaaatcacactcaaaatctatatgtgatgtaattgattgttttcagcgatttagttggtttcatttttgagctgaattaagcctcatgggccttagtttctccgggaaactttgaaaacccaacaaaactcagccgaaaagacagatttctgtccgcaaaacaaacagaatgtgaaataatatttgttttttatttagttagtatatcagtttcttttagctagttgttgaaatttgctcacatttcattgtcttcttttaatttccatcattctcattcgccgatccttttgatctttaatttttatttgttactatttttgcatgtttttggttataattaaaattttgtattactgtattcacattaatttctataaatttttaaatataattcattattaataatatcaatcttttttcattattttacttcaaaaatatagtttttttttatttggttttgttaaaagtttttttcataaaaaacaaacaattctcaatcttaatataatgaatgtgaaatccaaaataaatattaattattagatttcaacaaatttttaatataatataaaagtaaaacgatattggaaaatataaattattttgcaaacttataacaatttaactgattattaaatctcttaaatgaattttaaaattattatctttataaatgttcggtgtttttgcaatttatctaatttagagctgctttcatttggttaattaactaattaatttaaaattagtccaattatttttgaatattacacattcttcgctatttaattgcttttgttttcattttctcttaaaaaacacttttagtaaatatttttaatttttttcttttaaatctcattttattttaaaatttattttaagtatttttaaaacatttaattttttaattttttctattttaggttataaatttcttttagtaacttcttattaaaaacatttaagctcacttttttaatcaatttaatatgattatttgtacattctacaaatattcacattttctatagtatttctttaaattttcttgattgaaggcggagcatgttgttaattgttgtgcgtatgcatgttaattaatttgaattttcttttcttttacttaaaaaaattaaagtataaataattgtaaataattattatcttttaacacttttctcttttaatctcatgattcaattgattgtttcttcatcaataaattcttcttcaaatgagagaat

SEQ ID NO: 31427 - DNA, 1008 bp, Heterodera glycines
  unsure (1)..(1008): unsure at all n locations
cccccccccccccgaggggagtaaattacgctacgcttagggggaggcaaagaatttgtgtgacagcagctgtaaaatttggtggtgggggatggtaacatcggcgaacaggaaatgtgtttgctgggttggagacacacacaacaacacaacacagcccatatttgacggaatacgaaattgggctgacggggacggtcaccaccagcgattgtggtttcatgacgggacaaacatatcgccaaattgggggtggcaccgccaaatttttggaggtattggtgaaaaattaaataatctaacaattgtaaaaaggacaaaacggtgatgggtagggttgtaaattatatggattaacatattttttctgcgcatatgctatgaagaaaggggcttaaaaatagcatttctgcgttaaaattttttgatttggtgaaggtttttagtccatataaatccatattttgggggttttcgggaataaatccatatttcgccatttttgggtttttagtccatattttggccattttttggaaattttcacaagaaaaatgaaaaaaaaacgaaaaatacacccctaaagatcaactttttggaaatttttaaaaattacaccccacaaaacacgaaaaatttgagttttcgtcgtcattttggcattttcaataaatattttcgtcatttttttgcgaacatttcttttttttaatgagaattttttcgaaatttggcaaacttggaggtgtttttgatacaacgaacaacaataaaaaatatgcatttttaagttttaaaccccattttttggttgtttattgtactttttaggtttatttaagcaaatattaaatatgcacaccttttttgggatttttgggggtttacaacatatattttggcattttttatccatattttggtccatatttggccatttttggcctttttagtccatatttcgggcttttttagtccatatttaatgtccatattntcgcgtttttt

SEQ ID NO: 31428 - DNA, 1431 bp, Heterodera glycines
gctgagcgtgttgcgccgctgactttctgtacagctcggcgagctctatctcgtcaatttattaaatatctgaaattttcagaaattttcgagctaggccccctcatcacttttgaggtttttgaattttagtattttttacagatttttccggtgaaaacggagaccactttcaagcaaccgtttttgatgctctatcgattggtgtcattttcagaaaaattttttaaaatttttttggaaatagaaaattttggttgctaggcctcaatttcagttctggctcaataactcgtcaggagttgattttatcaaaaaatcgtctaagagcttttttgtagagaattttaagcccaatctaatgtgctttatctcatgtttttatcacgagtttaaaaaaagttataaaattaattgtgattttgaaactcaaaaccaaaggggggaccccatggttttgcatttcatgaaaaatttttttgctcctaaattagccaaaatgcatttttatggcctaatttaaggtgctgaactcgaaaatatactttatttttagtttcagactttttggtaagtgtttaaaattttttgaaaaatcgtcaaaatttgagccccggaaaatccagtgaaattttgaaaattcataactctcttcgtttttggtcaaatttagtggaataaagtttgaaaattagcaaaaaattaggagaattttatgagatttatttggaatttctatcttccaaaataaaaaagttattccagaatttctggaaaaattcgatttttcagaaaaaaattcctaactcccttctgaaaaagtattttataaaaataatatactcaaaaaatcagcaattttttgctctattttataaattttattttagctttttatcacttttttgaaaaaagttatagaaataaaagtgattttggaatttgggaccacaggggtgtgaccatgatttttgagaggaaaattttttcaccaaaaatcttccaaaaacatgtctttaggggttatttgggccgctgatcacgaatacgtgatcagattttacttttgacatagttaagacctcagaatccctgtgtgattggggattctgaggagtggggcggcatgttcggacccaggccgtgtttattattttttaatttattaaaaaacgggcgcgaagcgcccgtcctgaggccgcgaagcggccgaatgtccccaaaaaaattaaaagacgggcgcgaagcgcccgtcctgaggccgcgaagcggccgaatttccccaaaaaaaattaaaaatggcgcgaagcgcccatactgaggccgcgcagcggccgaatgttcccaacaaaattaataaacgggcgcgaagcgcccgtcctgaggtcgcgaagcggccgaatgtccccataaaaatcaaaatacgggcgc

SEQ ID NO: 31429 - DNA, 1804 bp, Heterodera glycines
tgagtatttaaatttgtctgaatgtttttctaaaactatttttcgtaatatattttcacatttttagttcgattcgatttttaaaatatttttaatgcaaaaaatttgtcacatttcttcctttaggcgtttagtgaatttctttggtgacgtgactgtgtgagaagaagaaactcgatcatccgaaagtatgttcctgggcattaatgacgtctggcgttctgtctgattaattagatgcttgacaaaaatgactgaaaacttgatgaaaaaaacatcaatcacttgaaataataaattgtaaaattttttgtccaggaaagccaggttttttcgtgtttagcctcaacctgggcctggattttttcatatttgacctggacctggattttctggacaaaaactacggcctggaccaaggtccaggccgatttcttatttgtttctaattttcctataattaatcgaggtttaccatgtaaaaaaaaggagaatgaagaagaatgaatcgaagagatgagaatgaagaaggaataaacaaaaatcaattacctagattaattactcaaaatgcgtacctccccactctgggggcgaaacgaaaaaaagtttcaattattgataaataatttaatttaattattcgagtcactaaagcattacataaccaattatttattcaactttgtcatttaaactgcataattttttgtcaatccaaattttactaattatatgatatggtggctccaaagattaaaattgattttatcaaactgtgagaccatacatatatacatgctttagtgactcgaataattaaaattaaattattatcaatcattgagacttttttcggttcgacctagcaccctttttttgacagggcggcccgggcccggtcagcgatttaggacttgagttataactagggttataaattgtatgattttgcatatatttttttgttcatatgctatgaagaaatgggctcaaaaatacaatttccatgttttaattttttggcttggtgaaggtttttcggcatataaatgcatatttgggggttttcgagaataagtgcatatttggccatttttgcgtttttagtccatattttggccattttttggaaattttcataagaaaaatgcaaaaaaagcgaaaaatacacccctaaggatcaattttttttaaattaaaaaaatacaaccctaggggaaccgcccactttggcgcgggtattttggcgccctatataaatctatgctatttggttaaaattgcagttattcgtccattttctaaatttaataatttaagtccaaaataatcggaaataaattgaagaacgaaaaggtcctttataccggtgggggccgattgccctccccctctcgccgaactttactaaccacgccgaagaaggcaaccctccggaaattttctgcttcacgcagcaatgctttcaggtccgtctcctccgacaatgcgcacatcggagacaaaaatattcgaaaattttataagaaaacaatttgatcactgaatacagtggtcagtgcaaaaggctgactgttcgataatttatagttttaattttaagtgtcgaggatacggtagaaagtgcaaatattcatttggctttttaagagcggaattttttttaaataacggtttttgaattgagcggagagtgaaatgcacgggtggcaaatgaggcgaaaaatgaatgaatgagttgcggatgtaagccgaggcgagagggggagagagatccacacaaagattggggaaaaaggaa

SEQ ID NO: 31430 - DNA, 1284 bp, Heterodera glycines
agaaaagttttttatttgatgataaaaaaatgaattttatctaaagctaatgaatacaaatagttgtttaaatttgtttcttttttaagtgccattctgtccaacaaagtgatttgggtggtgtggctgaacgcatttgccgacattgtgactgctgttttcctgatcacctatttgccaacttatgtgtccaaagttcttggctacggcgtgcgcgaaacgggcatttggagtgcggtgccggcactgttacacatccccgtcaaaattggggccggttggatggcggacacattgacgtgaatagcaaaattaaaatttaaaaaaaccattatttaataagaaatccctcaccaagggtgaaaatttgttcataattattttttcgaggcgctaagcattcgttttcgaagccgagcagaggaggataggagaaattttacttaaaaaccgcattttaactaagtttttccggcttattttgtgacaaaaattttcctgacaaatcggtcaaaaaaatttcaatagggcgcctttctgcgccgacggggctccttcaaatttttgaaaaaaactagctaaaaacatgcacaaaaatgactgtttttacagggccgggtttaatgaaaaaaaattttgtttttatcattcttaaaattccatgttctttcagttgcatgaacgagttgaaccgaatgcgcgcgttcaattcggttgcgctggtcggctctggcgttttgttcgcattgaccggctttgtgccaaaagaaatgccatttttggctgttattctgatgacattgaattttgctgtcgtctcgacaaattgtggtggtttttataagtgtgccacattgatcagtcggttggtaaaaaaaaataaaaattatttatttgtgccgcccctaatattaagttttgtgataaatcttagataaattcgtgatcagcggtacctcgaatttttttaaatatatatatatatatatataaataatttatatttgatttaattttaatcatttgatggggcggagtcgttatttaaaaaagatcacaaagggcgttatttaaaaaaccatcattatgaaaatttttgtcgaaaaattatttataattttgctccaaagaagccaatttttaattcttgatatcattcgatagccctaagtgttctctatcagtctgcaaaatttcaaaaaatttcttaatcgaggaactcaaaaaaccgtggttttcgaacatttttggccataactttttttaaagttaatagattttttt

SEQ ID NO: 31431 - DNA, 1042 bp, Heterodera glycines
tttttgttcatcatttactatacaatagacataaaaacaaaataattttttggtttgatgaaaaaaataattttaataatataaattaaaattaaaggttatcatgaaataggtttggtggagaaatattcttttaggagttgttttcaaaaatttttaggtttttttttataggaaatagcattttgatcgttttcgcttgaaaaaaatttaaccaaaatgccggaagtaattattagggatgatatttttatgcaaaagcatattttttcctgagctccccgtggattttttatattcgagtcaggtactagattcatgagtcatgattagggttataaattatatggattaacatatttttctgcgcatatgctatgaagaaaggggctcaaaaatagcatttgccaattttgcgtttttagtccatattttggccatttttggcaaattttcataagaaaaatgcaaaaaagcgaaaaatacacccctaaagatcgacttttttggaaatttaaaaaaaaacacccctaaaaagagaattttttcgaaatttcggaaatttttttagttattttgtccacttccgaaaattttcgctgaaaacagaatgagattattacaaaaattttgggttgtatttgattcgcaattgtgaagctagaatttaataaaaatcggcattttttaaatgttaaatccattttttggcagtttttagtgtatttttaagtctgttttaacaaatattgaatataaatacattttcggaattttataggggttaaaagatatattttggcagtttttagtctatattttggtccatattttgccatttttgaggtttttagtccatatttcgggcttttttagtccatattttatgtccatatttggcgttttttagtccatataatttataaccctagtcatgactaacaatgaccaaatcagaaaatatttatttaaagatttatatttgcatcataattttcaaaataattgaattttttaaacgtgttttgtaaaagtttgattt

SEQ ID NO: 31432 - DNA, 1131 bp, Heterodera glycines
  unsure (1)..(1131): unsure at all n locations
ttttttgaaaaatttccgacttccgatttccgacgtttttggggtcggaattccgatttccaacttccgaaaaatttttgggcctcggaattccgatttccgaaaaatttttgacccccagaattccgattccgaaaatttttggggcctcggaatgccatccctggagtaaaccgtcggaggtgtcgggagatttaaaaaagcttgttaattttaaaccggatttgtgtttcttgtgtgctgactaatttgaaggattttttttattactgggatcggaggcatttaagaaaaaaaattttgcctgggaatccgagcactttttttgttttgtgttttttttatcaattttttgcagttttgtaatctaaaaaagattttgaattttatttcattttttcggaaattcggttcaccagtaaggcacacaaattcgttaagaaactgtataaatttcaattatttcattttgctgtttttaaaaatttgcccgattttttcctttaaaatttgactttttaaaccatttttataatttgcatattttctactaattcatttttatttgtttatccggtaaatatttaattccccgcttccaccatcaaccagatatgcccaatcaacttccaccgtaccaacactggccgagtgtatggcttactgtatgcatgagcgcgaatttgaatgcaaagcatgggcttatgaaaaattatccaattaacaaaaattcattatcaaattacagtcagccatgtacttttatgaggagggcgaatgcatcacaaacgtggaatcggcaacaacggcgccaagcgattttcaggcatttcctgattttttaattatatttttttggaattattttaatttttaaatttctgaaatagtatgataaggatttaatttctgatccgtaagaaaattgaatttctacatgaaatattttgaacatcgattttaagaaaatttgaaaaatttcataaaatgcataaaacaaaagcgcatcccaaaaaatgttcgaataaatttaaaatgatcttttttgacaattgaaaattgttgccattcatgcgtgtcgaatttttttanatcaaattttattgttgcaaaaaaaatataacataaaat

SEQ ID NO: 31433 - DNA, 983 bp, Heterodera glycines
ttgaagaaataaaatatgccactttgagctcacttattgccctgtttttaccccatacaaagccttgcttcatctcatctcatctgctcccggtccactttgcattttccatcctctttctcgcacttttctacctgtatattcagattgagccaatggttccgtgacggctcagtgtcactgaacgtaactttttcccagctaaatttatcatcgtcgtcaagtcggatgcaatgaaactgcgcaacacccaaaagctcacatattttttaaaaactttaaaactaaattccaaaaatgacaaaataacaaatcaagaattgatatttaaacggcttaattttactgaagaaacttggggttgacccattttggggatttattattattattattattcaaaaaaaatctaccgcaccaaaataaatatttttgaaggctaaaattattagtttattattaaggatgcaaattatacgtaaagaaatttcacaaagtttgaaaaatgattattcaattcgtagttgtcagaatcgcggggggaagtttgggcaccaaattgttaaagtttactaaattttattagatttataaaattttacctacttaatttattttattttttgaaattcctccctatggtgcccaaatttctggtgccaaacttcatgtcaccgtcagcagaatgacttgaaatttggcaggcaaatagcttagtgtaaaggacaccactcttcaaatttcataaccttttcaaacttagtaaaatttatttacatagatttgcccaacattgttggtatcattcgatagcactttgtatcctctattagcctgaaaatttcgaaaatttttgttaaggttcaaaaaagttatggctaaaaatgactgaaaacctggtttctgatgtagttttgcccataagattgttcaaattttacgaaattttttgcaattttgcaggctaatagaagacacttaag

SEQ ID NO: 31434 - DNA, 1196 bp, Heterodera glycines
caaaacaaaaaagccagatgctgtatcattccccagcccaagccatgaaattcgccaaggtaaaatcctgagaccattcccgctgccatggttcgtttttttccgaatgtgtttactaccttaggcacttcgggtaacaaatagcccaagtccaacacgcgtttgcccacacgaattcggttgttttcctccgcatttgcggcgggcacagcaacggggacgccgacagcctttgccctctccgcgactcttcgctcttccgcctcttccaacgccttggcgccctcctcctcccggatcagtttcgttcagttcgctctccaactcggcctcgtccaccgactcaccgcccgccaatggcaaatgtttgaagccctcgcgcaacgcctcttccacgtcttggtagtcctgcatcgtctccaacacgccgtccattgtgaggtccacctgtgggaacacttgttgcattattcaaatgctgaccgatattactattagggatgcattttatcacccgaaaaatttggatttacagtgagcaatcaaaaaatctcaatagtatacaccatccgttagaattttgaaaccatttaaaaaagggcaaaaatttcattttgttgcccaacaattcgatcaaatgtctgactttgtccggtgtcagtccctgtctagccatggtctctcggaatgcgttagagccctgcttgtacacgtcgatgatttccttggtctgtttggaggccgccaactgctcgagcattgccaacagtctttggtattgcacgtctttgtcctggatgtccttgcgcactcgggcaaccttccgcataatgttcaacgccccctttttatcctttcgtccgagtgccacgcgcgcctcctctttcaaactgaaaaagaaaatggcaatcaaaatttgggtttataaaatgcaatagtaaaactattttggcataatgagaattagtttttaaattattaggttatacgaaacaacaaaagttgtacgcctgtgttactttagcaaaatgaaaaaacctttgctctcgtttttctgcattttttatgtccaagtccaggcgttgcattgtgcgcttcaggtcatggacatttgcgtcagtctctgtgaaacgggcgggtcccttcgatgattggtcctaaattacgtaaaattaattaaagtttgtgattcaatg

SEQ ID NO: 31435 - DNA, 961 bp, Heterodera glycines
tggcacttttacgaaacgaccacagtggcacttttacgaaacattcccaaggtggcacttttacgaaacgcccatagtggcactttttacgaaacattcccaagttggcacttttacgaaacgaccacagtggcacttttacgaaacattcccaaggtggcacttttacgaaacgaccacagtggcacctttacgaaacattcccaagttggcacttttacgaaacgaccacagtggcacttttacgaaacattcccaaggtggcacttttacgaaacgcccatagtggcactttttacgaaacattcccaagttggcacttttacgaaacgaccacagtggcacttttacgaaacattcccaaggtggcacttttacgaaacgcccatagtggcactttttacgaaacattcccaagttggcacttttacgaaacgaccacagtggcacttttacgaaacattcccaaggtggcacttttacgaaacgaccacagtggcacttttacgaaacattcccaaggtggcacttttacgaaacgcccatagtggcactttttacgaaacattcccaagttggcacttttacgaaacgaccacagtggcacttttacgaaacattcccaaggtggcacttttacgaaacgaccacagtggcacttttacgaaacattcccaaggtggcacttttacgaaacgcccatagtggcactttttacgaaacattcccaagttggcacttttacgaaacgaccacagtggcacttttacgaaacattcccaaggtggcacttttacgaaacgcccatagtggcactttttacgaaacattcccaagttggcacttttacgaaacgaccacagtggcacttttacagaacattcccaagggggcacttttacaaaacgcccacagtggcactttttacaaaaaattcccaaggtgggcacttttacaaaac

SEQ ID NO: 31436 - DNA, 1131 bp, Heterodera glycines
  unsure (1)..(1131): unsure at all n locations
tcgcccgacggagagaaaaaaattggccagtacactgtggacggatacatcgcagcgaccgacaccgtgattgaggtcaacggctgccactggcatgcacacgaccatccacgtcaccgttttcagccccaaacagtgatggcgaatgggaaaacggcgcagcggatacgggaggacgatgcgcgacggcttctgcaaaaaaaaaaaaaaaatttttgttgaaacttttgcctttccctttttcttttcgattctttttggtgtgccactatattttgcaaaaaattccggattaaatccctattcaaacattcctttccctctcctgtaaaattggcatcaaaattcgaaaatgatgtgccctcattttaaatttttttattgtattgctgtcgcatccctctattatttttttgtgatttgttttttttccctctcttttggtcttcaaaaaattatttgcactcattgcttttttcatgtgaaattttaacacccttgtaaagtcatcataattacagtatctgttgaattttctgtacaacaataaataaatgggtgggggttcgggaggcgttaaaaatatgaattttaaaagattccttaaaaacgttccataatttcctcccgttttcagtaccgctccaagatgatcaagtttgcccgctcgcgcatccacggctggggcctgttcgcgctggaaccgattgcgcaggacgaaatgatcgtggagtatgtgggcgacaaaatccggccagaggtggccaacgtgcgtgagttggcctacgagcggcagggcatcggctcctcctacctgttccgcattgacgaccacaatgtacgtctacttttgtgttgaatcggaacttacaaatttttgtcaaattttaaaaatttaattccaaatcaaatattttggaatttttcatgaaaaattaatttcttacgctttcgctttaatattacgatctttcaattcatttgcagtttgaagcttaagagtgttttaattctaatctattttcacattttttttcgcaggtaattgacgccaccaaaaagggcaatttcgcgcggttcatcaaccattcgtgtcagccgnaattgctacgcaaaggtcggaataaatgg

SEQ ID NO: 31437 - DNA, 1475 bp, Heterodera glycines
cgacaaaattttgtggaacatatggaacggcaggggcttcctagggagggaagtcgatggaaatgtctacatcccatactatatcccaaaatttaagtaaattgatgggtgtaataagttgatgtctgcaagcgtttctgccaatttttgtccagggacaagttggcccgatagcctttggtttaggcattggcaacacttaaaaactgggtcaggttaggtataaattacgagtccaagaggcccaaagagaaagataacgtatttgcccaccattatgattggggttcagagagagagggtttaaaatgtattaacgatttttttaaatttttccctacagaggcacctccccctccaaatcaatggatgctcccaagaacaataaactgttcaaactcatttgttttgtgcatatgtacctgcgttgaagacatgtgttcgccaacatttgaatcacgcgtggaaagcaacgcagacgatctcttacggccaacaatcggtgcggcaagcaccccaccgccgccggcatcgacagccgttgacacaacggtcacgtccttcttggccgaatcgatgagcagcgaccgtgaaaaagccttgaaaaggaatggttaatccccacaatttaagcattttttaagggggtcggacctcccctcgctcgcaaagggggctcgcagcgaaggggggccggtgtaatgtaagaggcagggggagcggattcgcagcgaggggggggggggggggaggggcaaattttgaaaattttcttaactgattcattaaaaaggccaaaaatcttccccggcggcgtgaatccattttggctgaaaatccgcttgattgacacattttgacactacaactggacagggagcacataccgtgaccggaacgacggtgcccccgctggtgttctttttggacttgttatgactgcttttgttgtgattgttgttgttgtagtggctgttttccttgtccttctggctgcatgcacgctttggcctcggctcgtacttggagtcccggtccgacccggcggaagactgagatgaagcacggccgctggcgccaccaaccacctttaccaaatgagctgactggcgcttgggcagtggagcacccgcacctgcagccggctgcacgttcaaatcgcgattgcggagcatcatcgtaattagtttcagtgtaaagaaatttcctgaaaaacattaaaattttggttctagtcgattttacgcgtcccatgacattttaccgtcacaaaaactgtttctcgaaccgtcaataaaaaaaagtctaagcctagattaaacctaaagattattgtcaggcatagtctaagccattgttcgagttgactatgtattagttttcatgaagccttaggtttaacaacaaaatttttagttaaaaaaatactaaataccggacaaaaaataggtttcctcttagttattaggacggct

SEQ ID NO: 31438 - DNA, 1200 bp, Heterodera glycines
gatgcaatgggaaaattttttcagcttttctcgaaaagttttttccccagaaaacggatgggtcaaataaaaaactaaacatctcacatgaccaatttaaattcacttacattttgggtttactttattatgctggcccataaaaaaatggagtttttccggtgccaaatttttgtgaattttctttcggcccgtcataagcggattgtttgggggcaaatgaaaacaaattttgtgttattcgaatgcgctagccgagctctacattttcaaatgtatcaacaaagggtctatctccactctctggcgagttatgtccagccaaagcagagtgggccataaacacgaattttttaatctttggtatttcctctattttgagcctgctctacatttatgtattgtgccaatatgcctattgcaactgaaatttattcaactttcccgacaaattgttgagataattattctagacgatttttttatatctcaaagcttaactattgcctttttgtatgataactggtagatattgggagtaaaaaaaagtttttttgtgactatttacaataaaaatttatgcagcatttctaaaaaggatctaaaaataatttcttgcgtaatattttttacattatgttgttgaagaatttgaggctgcttctgatgcgattgaaaatttttcagcttttcttgaaaagttttttcccagaatttatacagctttcccgacaaattgtttagataattattctagacgatttttttatatctcagtgcttaactattgcctttttgtatgataactggtagatattgggagtgaaaaaaagtttgtttgtgactatttacaataaaaatttatgcagcatttctaaaaaggatgtaaaaataatttcttgcgtaatattttttacattatgttgttgaagaatttgagtctgcttctgatgcaattggaaaatttttcagcttttctcgaaaagttttttcccagaaaacggatgggtcaaataaaaaactaaacatctcacatgaccaatttaaattcccttacattttgggtttactttattatgctggcccataaaaaaatggagtttttccggtgccaaatttttgtgaattttctttcggcccgtcataagcggattgttatgggggcaaatgaaaacaaattttgtgttattcgaatgcgct

SEQ ID NO: 31439 - DNA, 1663 bp, Heterodera glycines
tacaagccttttacgaaaattttttttttcaagtttcctcccggcgtaaaaacaacatttttattcaaggttttcggctttgctgatcacgaatatgacattcattttgaccatttccgattctcagacacgaattcgaacaaaaagtcgatacctcaatttttcgcctaaatggtttaaatacacggaaacactctgaaaatcataaatacagcgtggtatcaacggcagtattaccaacaaaaaaaaacttgtaatggtacaattttaatttttgagacatattcgtcggtctccgattctaataatttcaatattttagtcgaaattgtatgtcaataaggtgaaaaactatgggggggggggcatttgatttgtaatttttttgagcatccaaagagtcccatcccccactttgggttttcaatggtacacctaaacaagaaatgtgccaaaattaatgtatcacaattttaaaaaaatttttatatccgccattttacccaccggaagttcacgagtttgagactcgggatcaaccaacggcacaattttcttcgttgacggtcgtgaggaccacacccaccattgtggcgtcagcgccaattgagtacagcagtgaagtgttgccgttattctgttcttcattccaatcactgatgtcagcaattctggttaaattggagggaaatggtgtgggctccgtttttatgctcttttttttgtcaatttaatacggaatttagggggtgggggggggatcgcgggataagataaggcatggacggtaaaaaagggaaaaaagtggcagaaaataaaatggcgtaataaacaaaagactctattccagtttacgcgtccaatcgatgtttacgcgtccaatgagtgaccaccctcaattttataggtcataactttttttttacttggttaatttcttggtatcattcgaaagcttaaagtttagggaatttataaatacaagaaaagaacaaatacttgtattaagaaaaaattgcaatgagaaaaccacgaaatgcatattttttcgcgtatatttcaagaataatttttttgtgtattgcctttatccgagaattttgcataaaaaatctttcctaagctaaactttcgaatgataccaagaatgcatggattgaccaggaaaaaagttatgaccaaaaaaagtgagggtggtcactcattggacgcctaaacactccttggtattatcaaaaaattaatagaaatcatcccattctatcaaatgtcatcgaaatatttctcaaaaaatgattttatactataactaaataagttttaacaataaatctcattcatcgcaaaattttagaaaaattgtaaaattttctagactctgccttcggcctgtcagaagaatccattaaaaattgactcaaaaaagcgacctttgttcttatttggacgtataaaatctgttaagaaattggtgaaaatttaaaaaaatttaccggcggcgtttatcggcactgccgaactcccctattccgaaaattatttcttgaatatgcgcagcgcaaacaaagtgctgtaaaaaaacgactgaatttatcaaaaaaaccgaaacaatcgaacgacttttataaaaaatcgaaaaaaaacgaatggcgaattggagaga

SEQ ID NO: 31440 - DNA, 1934 bp, Heterodera glycines
  unsure (1)..(1934): unsure at all n locations
gatcaattatcggctctgtctcgagtccgggaatttcgacttaatttaagccactaatcccgattatcnccgcaactccgtttcagctaagtgcggacagtgctcattgttcccaagcgttgtgctaccatttggcgtaccggtctattgacggagtgtgcaacaatttggcacgaccgacgctcggcgcttctttccgggcatatatgaggtagattttgaaagctttggcaccaattgttgatcactctcgtcagtttggagagctaatattaaggactacgagccaaggatgtcggaataggaaaaactgatattccgatgatttaaactatttcggatcggcaatttgtttgttaaagcgttaaacaaatattattcaagcattgtcaaaaaaatactcatttgattagatatttgccagccgaatattcggacggattctcagagccggctggtaataaatgccattgtacagtccatctcccaaatttgacctgtcaggttcgggccgaagaccaacggcacgcgaggcttctcgtcttgtgctggccaaaggtgctccatcgatccatgatcagatcaactccatgtttatgcagttgggacagttcatggcacaagaaatggcaaaaacggcatgtatttcaaccagtttaaattgccaccttttacgcggcatttgtccgatcggttgcttcaattaaaaccaatccctggccgatcaaaatcattctaggacatctgctgtcagtccagttagcgcatccatttggctttattttttaatttattttttaataattcttaattagccagccaatttaggctcatcaacccgttgacccatgcttatcttgtgccccgttggtcggcaaatgtatgccagtgccaatttcggagcaggacaacaacccaatgttttcaatatcatattactgatcaagaaatgcagacaaattactttgttagattgatcgcaaaaaataaattgttaaaagatttcgccagaagggatgtctgaaggtgtccaggtcggcctccgtttgcggtacgggcgatcagggaaagccgcgcgaacaactcaacgagaacactgcctttgtggatggatcaacaatttacgggtcaaatgccaaggatttgtacgttttaaatttaaaatttaattatttatcgaaactgatctgctgaacaagtgtgctctgatcacaaagaaattggcgatgatcagaaagagttgagcctttttgctttgaatgccttctcgatgtcaccacacaatttcagtcggcgaatgtttggcacaaaaagggggcaaaatttcttggaccaaaaaacgccaagttaaaaggggccacttcaccgaatattctcctgcccaatatccatacggatcagaatcaatttgagcgattttcaaacgcaaataatcattgacttcaacctgaaattatcgaattttttggcacccgaattttataaaacttcagctttttgtttgttgttcaattcttctggacttggcaaagattgtgaaaaaatgtcggactcatttcccttggcaatgttctgttgacattttgaaaaaaggttataaaattcgcttttggcctgcgactcagtcatgttttcttccatttcggccaacaattcgcctccaattccgtcctaaaccaaatgtttttttgtaggtaattcactaatacaattgctttgacctgaaggttttgtaaattttcagcttcaaaagttagccaaagtttgtactggctatgtttttctatgtcgaaaaaagagagcttaaatcttgggtccagcatagtggaaagaactagctctttattttcatcccatccaactctttttaggtttccgtttgcatcaattttttcatccatccgtttttgaagcccttccataattgcttgctt

SEQ ID NO: 31441 - DNA, 1010 bp, Heterodera glycines
  unsure (1)..(1010): unsure at all n locations
acaattgtcctctatncggcccccccaaagtcaaacgtttccttgccccgccggtgacaatggccaaaagcagcgccttaggcgatgccgttcttccgctgaacttggcttcaccatcgtcggcggcattgattcgcctcgggggcccatgggaatatttgtgaagaccattttcccgcatggaatcgcttcgaaaagcggactgttgcaaaagggtaaatccgttcaaactgcgggaagggggggggggagtcatcaaaaagatgtttttttccttcaacaggagacgaattgctaagtgtgggcgacgtttcgttggttgggatgactcacgctgaatcacttcaggcatttcggaaaatggccaaaggccgagaagtgatcatttgcattcggagggggcaaaaagaaaagtaaaaaaagaaaagggatggaaaaaaggagttaattaattaattaagcatggaaaaaagtgcggaaaggcatcagcaaaatgaaaagcggaaaagcgaaggaaaaacggcgggagaaaaagccgaagggacggaaatggcggacgacggcatttcaatgctttcccagctaaacaaggcgagttggcatttagtgaccaagcagtatttttaaaaagtataaatatttttttgttttttatccatcaaatccccgtcctcccccccccccccgccattaatcgcctttaatccctcaaatgatgggaaatggaatcattccgatgagagaatttgtaggcgaatgaatcattccaataaaagtgcatttggcagagatcgcatttattgtaattgtccttttatacatttttaaaatgcgaacaaaagttgggagttttatttattaaaaattttacaatttccaaattttctacatacatttatatattattttttacgcattttttatttttggtaaatgtctcccattttttcgtatatattttcattttttaaatattttaagggtttgagaatttattttcttatgataaa

SEQ ID NO: 31442 - DNA, 1485 bp, Heterodera glycines
agcaacagtttggcaacaaaactgaaacctacgacacatattttcctgaatttatttggcgtcagcgctttggtgatcttgaaaatgtgttttataatttttggtcgcaagctatttttctatgtttgccccatttaacatttctcatcctttcctcatattttcactcaattatcataaattagctttgcaattacacaatttaccaagcactgggtttttatttgtaaatgttaacgaatcattttgtccatcagaattggcgtggtgttttctcctcaaagtgttggcgcatccgcttgaaaaccgcatttttgtccaaatcgtctggtgcttcttttacgccttaaatgtgtttcatggggataaagtgcttctaatagcaaagctctaccggagaaataatggaacaattcccattcggtgtgccgtccgttgatgatccggtcgtactgctccaactcgtgttcctccattttgaccaagtgttcctcagcaaacccacttacacacaaaattgccgtgaagaaagaatattttgccaaattttacctgatcaaaatgtcgttctcgcgtatcccacgctttctgctctggtagagaagccgtgcacgcagcacatcgacaggcccttttttggtggcacaatcggtcgaagcggtgccattcccgacggaaaaacgtttaaaaagggccgataattgggagctggacgcacgtggacaaagcaatgagtgcattctcaaaattattcgaaaaatgcacaaattgtctttttttagtaatttgaaaaatacaagaatagacacaataaatttacaatttcattcatttatgagatttcaaacaaaaatggtaaaaaacaatatttaaaatccgaatcatccaatcacttagaatttatgggcaacatcatcatcacttgactattttttgacaaaaaaacaaaacaatttttgaggcacatttgggcataaggaaaatgtcacaatgtcaaaatgctttaaaattgatgcttgggctctacttttgtaggaaaattatacaaaatttcattattatttgggggtccaaaatgcactccccccccccatcaagatggtcatttatactgaaatggacaggtgccggctggggaggctgtgccgttgcgctggtggacaaaaacaaaagcgctcggttggaagcgaacggactgaatatgctgttttggagcgaaccgtgcgaaggcatcgaagtttttccattcagtggatgaggcgaatgaaatttaattgaacaaacagaaaacgacagaaatgtttctaatagctgtttgactcaatttttatatttattgccgtaaatttaacataccgtttcaagaagaagagaaatgaacagataaatagaaaatgcaaatagaatgaactcattttagcgtatgttattcacagaggaaagaaaaaacatttaaatgtaacaaataagcacatccatcacatg

SEQ ID NO: 31443 - DNA, 615 bp, Heterodera glycines
atcttttattagcaaaaaaaccggagatattcatattaggtaaatttaacagtcaacaattatgagtttcgtaagttccttacactttacattaaaatttgtatccaaaatgttctcccactgtcagcaattgaatagtaatcattcgaagtgacaaatgagtggtcaacaagaacgaattggtctcaatttgcttgccattctccaaatattcgtacattgtttttgcattgaaatgccattccaaaaggccctggtcgagtgaaaaagtgccaacaatcacaaaactaatgctcaattaattagttaattaattaccctgatgaacaaaagaatgtccaccgattgcgagccgaacacgagaaatggtcggtatacaacacaaaaattgaccatcccgtgggctccgtcattgctcgtcgacttcttcaacagactgaacttcttgccgagttcagcgtgtttagttttgggatttgtttatttatttttatttttattatttatttatttttaatttaatttaattatttaatttttattaatcaataagtttaaaaccttcaataggtttaggttcactcccgcacccatccaataggttttggtttaaac

SEQ ID NO: 31444 - DNA, 1086 bp, Heterodera glycines
agtagattagagtacaaaaaaatttaaaatttcgaaatcatgtttcccactcccttctcccaggggtattattttgtaaaaagtctttttttccccaataaactttgcataccccatttttcgcaccgtgaatgttatttttattgaattctgaaccggtttgagtagattagagtaaaaaaaattgaaaattttgaaatcatgtttcccactcccttctcccaggggtattattttgtaaaaagtctttttttccccaataaacttttcataccccatttttcgcaccgtgaatgttatttttattgaattctgaaccggtttgagtagattagactacaaaaaattgaaaattttgaaatcatgtttcccactcccttctcccaggggtattattttgtaaaaagtcttttttttcccaataaacttttcataccccatttttcgcaccgtgaatgttatttttattgaattctgaaccggtttgagtagattagagtacaaaaaatttaaaatttcgaaatcatgtttcccactcccttctcccaggggtattattttgtaaaaagtctttttttccccaataaacttttcataccccatttttcgcaccgtgaatgttatttttattgaattctgaaccggtttgagtagattagagtacaaaaaatttaaaattttgaaatcatgtttcccactcccttctcccaggggtattattttgtaaaaagtctttttttccccaataaacttttcataccccatttttcgcaccgtgaatgttatttttattgaattctgaaccgttttgagtagattagactacaaaaaattgaaaattttgaaatcatgtttcccactcccttctcccaggggtattattttgtaaaaagtcttttttttcccaataaacttttcataccccatttttcgcaccgtgaatgttatttttattgaattctgaaccgttttgagtagattagactaaaaaaaattgaaattttgaaatcatgtttcccactccctttctccaggggtattattttgtaaaaagtctttttttccccaataaactttgcatacccc

SEQ ID NO: 31445 - DNA, 1743 bp, Heterodera glycines
  unsure (1)..(1743): unsure at all n locations
gtagcatttatcgtgagcagaaaaaataatcataaaatttaattgtttgtttttcaatatcaatttttgttttaaaaatttgtcctttcatggaaaaaattttaaagtatcttaatagtttcatttacaattcgaaatatataagtttttagatattttaatacataaaaaccgttaataaaaaattttgtttcccaatttggtgtgcgtattttgcgggtttctatgcctttttaggtccatatttcgagatttttagttcctacaatggaagcccgtagttataagaataaaaatccgcttttagtcggttttacgcgtcccatcacattcaagcgtcccatcacacagtacgcgtcccatcacattttacgcgtcccataacattctattttttaaaatttcatcaaagtggtgaatgggaagattgggtaaatatcggtcatagggcccaaactcaaaattgctcaagaacggtcagaatcagggatggtatgccaaaacctaaaaaccgggcgcagaatcccaaaaccgggcaaattcccggctttccaggtaaaataccacccctggtcagaatcgatgtaaaaagattcgtagcaacacttctgcctaccattcccgaaaacatcgaagtcggcacgagtatcattagcgatgggtgggcagcaagcagcctggggacgtctcccaggcggggatcgattggccaagtctcttagatggctcccgactgacacgactgatcccgttggctggctctccattgccttttaagcgcccctcgggatgggaggagtttatcggagtaataaatggccgtgggaaattgccatttccggtcccggcattacaataataaatttcttattggataaagaaagatattagatattttagcattcgggtgtcatatatatttatcttttttaattatttcagttaatttattttcccaccggtccgtatttaatattttccgcattacggtcctgatttaattattttggaccgatcataatttcattgattttaattaaaaattaatattagaattatttttatttttacatgatatgtgtgttttattgtttttaatttattaagaattaattatttcatgatgtaaatattttaaacaggaaattattgtttcaataattttgtcatataaagcaaatactttatcattagtagtgggaaatgctttatttaattggatcagaacaattaaaaatttatcctttaattcattaatgctcatttagtcaaacccaaatacgataatttttttctagttgttttatttcgggagtaagatttaaataaataatttaaaaaaattttctttttaataagcgttacatcctccatttattcaactacagcgcttcaagctatccatttcgcatgatttagcatttatttttatctttaaattgatgttttttatgtctcgaaatcttaatctaacgcaaaccgcttggaatgagacttaagcggcggttgcctgcgcaactgtgaatgaataggccgttgcgagatagtaatttgagaacagatttttagccgattanacaatcgactaattgacacgcgagggatagcggttaaataaccggctaatgcgacagttagctgtgcttgaccctgatccacnngcgtcattggtcctcgactggtgtgtgcagcgatcagttggcgacagcgattggtgacaccggacctggtgatgctcggaca

SEQ ID NO: 31446 - DNA, 973 bp, Heterodera glycines
  unsure (1)..(973): unsure at all n locations
agaaccggcaggcaatggatggctttcaatctgcaagaaattagattggcaatatgtggttgtaaaaaaacttttgggtaatgaattattttttgaagtgagtcaaacaccctattagtgctttgctgtgccgagaaccggcaggcaatggatagctttaaatctgcaagaaattagattggcaatatgtggttgtaaaaaaacttttgggtaatgaattattttttgaagtgagtcaaacaccgtattagtgctttgctgtgccgagaccggcaggcaatggatagctttcaatctgcaagaaattagattggcaatatgtggttgtaaaaaacttttgggtatggaattattttttgaagtgagtcaaacaccgtattagtgctttgctgtgccgagaaccggcaggcaatggatagctttaaatctgcaagaaattagattggcaataagtggttgtaaaaaacttttgggtaatgaattattttttgaagtgagtcaaacaccctattagtgctttgctgtgccgagaaccggcaggcaatggatggctttcaatctgcaagaaattagattggcaatatgtggttgtaaaaaacttttgggtaatgaattattttttgaagtgagtcaaacaccgtattagtgctttgctgtgccgagaaccggcaggcaatggatagctttaaatctgcaagaaattagattggcaataagtggttgtaaaaaacttttgggtaatgaattattttttgaagtgagtcaaacaccgtattagtgctttgctgtgccgagaaccggcaggcaatggatgggtttaaatctgcaagaaattagattggcaatatgtggttgtaaaaaacttttgggtaaggaattattttttgaagtgagtgaaacaccctattagtgctttgctatgccgagaaccaacgaggcaatggatggctnttaaatctgcaagaaattagat

SEQ ID NO: 31447 - DNA, 1793 bp, Heterodera glycines
  unsure (1)..(1793): unsure at all n locations
tagtaaaaagtcccgggccattgtttgtccgcggtctccactctctccgncaaattgttgcaccttttcgatgacggacagtggtcattgtacgatttgcggcacattcgcttgaacaatgcgacgccaaaaagggcgcgttttgactatcatttggtacgaaatatttccacggacattttaatttgttgtcggaattcgaatgtataaacctttatcttgtttcagttgcacgtgtcacaacttcggtggatgttttcgataacgggggacccctttttcgaggaaacggccaaacgatgggagaaatatgcgaagggatgacgggaccgacagacattttcaaccgattgacaaaatatttaatagttctgctcaattccacagagaaagaggtggtcaaaattggacaactcaagcgcgaaaacgtcctgacccatatttttacaactgaccatttgtaacattgagttggaaaaacagtaaaatacaacaataaagggtttggggtgaaggagcaactcatttgttccccctcaggccattccgtccaaaacttttcggggcgcttcccactttcggtcgtatccgttccagccgtttttcggtggcgcaatgaacaaccgcgtgccattcagaaaacacgtgaccactccccggtacgccgttcgtggcaccccggcttttgagtccgccattacgcccactctcaaagcaatcgacacaaattcctccatcgattcgtactcaattcgacaatctccgctgtttttactccattccaaaatgttttccatttggactttttgcgccgaataaactctctccaagaaactggcgtcatattcacttcgaataaaaccgctgagatcaatccgcgtaaaattcacaggcattcgattgaggaatactcgtcgcaaatgtcggttgaaaaacagacccctgaagggtttttccatgttatcgtggtcttttaagtcgagatgacttgctcgctccaatgcgtccaaattcagtcatcgccgtccgcgatatttcaggacgaatgcacgaacgattcttgcgctgttcaggctcacgaagaaagtcgtcccaaaaagcgcgtggccatttcggcctcaattcattccaaaaatccctaaattctggtggaattggtcaacaaaaaagaatgtgaatgacttggtcatcatccatccgagcccagaaaagaagtcggaacggaagagaagcgacgccccaaaagagaggtcgacgagtcctttctttccgttgtcattccaagcagaaacacagaaaagggagcggtcggactcgaggagaggccgagtggccaagaagaaatcgaagaaatcaggcgcaatgtccaagtcgtctaaagaaaaaggggtggaaatgaaaaaccaatttggaaatttgagagaattttaacaaattccggaattccgccatttaaaaatctaacaaaatttgcaatgggacgcgaaagaaaaaccgccgtttcaccgtctttcccaaaaaaagttctggttaattgtaagtgacgtcataaattaaaaaatttcatgctctcgtaaaatgttccttcataattcaccttttcccctgtccttagcttcccttaccctccgttatgatgacagtcgtgaaattcaatttgtcaaaaaggtgtgccaatcccaatttgtaatgcttcgctattttatagtacgtgccgaatttgtcgtgctcccgtggcggcttcaatggtcgctttcgctgctgctgtgctaaagcgcattctgtgccttttt

SEQ ID NO: 31448 - DNA, 1734 bp, Heterodera glycines
accctcccgccgacgctgatgccgcaagaagtaatcgatattaataaaaaatacacaacaggaccacaaattgagggaccgtcccaataaatgaaaaaattttatcgtctctttaaattcttttgagccattttcagatagggaagcatataatggtacatttcgtcaatttcagaattgtttttagttcccgtaattacgactttaccggtccagaaaattaacgctgtcatgcttttaccccgcttgaaatttaaaccgcaaaatatttcgggttcataaaatgcacgacgattttttcgaaactcgttcagttcaatttcatgtccgaatttaaaggtcgaaacaatattttcaaccgtgtgtccggtgtaagaagcccccggacaccccgagcccttattatttctatgaaaatttttatcgcattttcacagtctatcagacttttcgtccccaaacatatcattttcccggattcccataataatgcggtggctttgatgggagttgtacatttgataaccgcggcattgaattttctagggttatacttaaattcgcattcggtgatcatcagagagtttagtttaattccggtaccgagattagcgagagcaattatatttacgattatcggtttttgcattttttgatacaatgtaccaatcaaatggtcctttcactcctttatataccccttctataaatagcaaccaaaaaataaaattaaattgaaaaaatgaactgtccacaataaaattaagtgttgtcattactgcccctgtcattacgagaatgtgtagcaggtgtaaaaaacacagtcttttgcatatcggtacatcattttttgataatttctggttatgccccaaatgtgcgaaacatgttccctatgaaaagaaaagtttttccaatttagcttttttatttgttatccaaatacaacaaatcttggtatcattcgaaaagatcttaacatgctctattagccttttcaaaaaattgcaaaagtttttcaagcctgaaaaaatcttaatgaaaaaaattgaaaaatttcgactttttcgcaatttttatgtataacttttttggtatttgtctaatcgtgaagtaatagctgatagaaaagtttctaaatgcagtaagctttggaaagatattaaaaatgttggatgtggatgacatagaaaaaagttatagaatcttatagtggaaagtcatgctggcgcccaatttatacaatttagcttcagtgtcgtatcaaaaaaccgcagaatgaggctgaagcctcagatctggcacctttggtcttgtgccagtagcaggggataggacagagataggaccaaaaaaagtgatgcgaagaacggtagagattgctgtttagtaaaatcacaggatctgcttggttgttttgttgctgtcagaagccgtcgttaattgatacggtaatggtttagtataaaaatggcattttttcttctcctgcgcacgcgtccagacacaggcgggcaatttcgggaaaaaatatttattagcattttagttataagggccatccatacgtttggaatcctcataatattggtttttatttatattcataaattatgaatattagtttaataaagtcatcagcaaatttgtttaataaggaatctaaagaccaaaaaatttcatttgcgcaaaaattacatgttagcagctccgttcatttatcagggcatacaa

SEQ ID NO: 31449 - DNA, 736 bp, Heterodera glycines
ccgggaccgggacttgccgggacctgagaagcctggaccgggacttgccgggacctgagaagccgggaccgggacttgccgggacctgagaagccgggaccgggacttgccgggacctgagaagccgggaccgggacttgccgggacctgagaagcctggaccgggacttgccgggacctgagaagccgggaccgggacttgccgggacctgagaagcctggaccgggacttgccgggacctgagaagccgggaccgggacttgccgggacctgagaagcctggaccgggacttgccgggacctgagaagcctggaccgggacttgccggtacctgtgaaagccgatcctgtacttagccggtctctgaaatacttggatctattgttgtttttgtgaatgatttgattaacacaataaattatatttcctttcttaaaagcaagtatttaagttatgaaatcattgtcgaaaactttcattggccaagttcagttgaagtgagcaaatcctccgaaaaagcccgaatgaattattattgtttacgtattaatattgttatttttggtacccattagctcattacttttttataatttgctttatttttgtctttgatgaaaagtatgtgtcgctgtcacgatcacttattttttaaaatttaatattatacgaaacgtcaaattggaacattgtatgaaagtcccattgtacgaaacgcctattgtacgaactgc

SEQ ID NO: 31450 - DNA, 1236 bp, Heterodera glycines
  unsure (1)..(1236): unsure at all n locations
attaagagtagagtgtcacaggaccaggaattttccaataccgggaccgggactttttgggttgaaaacccgggaaaccccgggaataagtaattaaaacccatttaaagaatcaatttaaaacaaaaaatgaaattacagaaattcctagcctttttgaaaagcaaaaaattttacaaacaggagccatttggtaaaaatctgagccggaaactttttaagttttcataaggtttttcagtgttcatgcataccaaaatgctaaattcgaaaatttgtaccttcggctttttgttcgagtttagtcgaaatggataacgattcgtggtcagtgtcgtcgaaaatccagtctgatcacattaacgcatcgcgcgtaattatcaaattgaacaatttccggactaaactactcaaaaaattctgccttttaccttgagaaagaacttttacaacttttgatgaaaatttgtcgatttttattgttaaaaaatttaaaaacttcagttctaaataaattttttcatgaatcacacaatcgcatatgttatataaattgatagaaacaaaattatcacgaagaaaagcatcataaaatttattggtaaaaattaaaaatggttaaaatagaattgattaaaattaagggttgaataaaatttacaatgaaagtaggaaatcactgaaaataatgccagtagaaatttcatagtcacttacacatattattatttttatgtatagccagaaaaatttaaaagcataaagtttggtcaggcctgtttcaaggtccataattcgtcatcccgaatttaacagtataaaagtttcccataaaaatagttctttaaaattgttaacaattctaatttttttatattatggacctgattaagtaatgaacaaaaatttaaagaatcaatttaaattaaaaaatgaaattaccaaaattaatagccctttgaaatgcaaaataaaataaaaattatataatgaaaaattttccttcaagttatcaaatcaaagcaataactaaattttaaattttaagattttaaaagagataaaaaaatgccaatgatcaattgttatttttggacgagacccaactcgtacttggccaactcatactgttttttacaaaaaaaaaatcgtaataactttttgtanagtcaaccgaatgaaacattcattttttgtatcatttcatagctattaagattctctatctacatgcaa

SEQ ID NO: 31451 - DNA, 1334 bp, Heterodera glycines
  unsure (1)..(1334): unsure at all n locations
agagatttaaatggtacaataaatataaattgatacctttcgtgattattttctataatcattttttgacttcaattacttagttgaggaaataagagatacaaataggcagaaaattaataatatgaaatttgaattatgtaaaatattattgaattacaggatgcaataaggtcttcataggttatttatatttgagtttttttgcttaattttcaacaatagctgcttttttcttcatcaattttttaagttcatctttatgacaaaataatcagttaacaatttgtatttagattaaattttaataaactcaaattaaaagttgttgagctaagtgaacacacttaatttccgaattatgacccacaaaatatcaaaaatgcatgtcaattttttttttgtgggcagaaagctgcactgaaagcaatagtgaacaaaatcaattaaatattgataatttataataaatttcaaacatacaaatgtaaggaaatatacatgcacattttttaaatacattcatgaattaaaatgtagattaggttattggatttggaaccaatttgtgaaatgaatcggcaacaaataatattctcgtactgtgtacaaagctaacaaaaaattagatgtaaactgtaggaagcttttctctttttatttgccaataatttttcattttctcccttttttctttctccgttatttttcggctaattccaaattgctttctccattttttaattatgaaaatgctaactccgattttcttactgatttctttcataatttttgttccattcttttttcgaaaattttcttcctttttgtttaaattcatttgtcatttcaatgaatttctgtacagtgtcgagtttttcttcatcagtttttgatttatagcatttgcgttttttaagattcaattctttgatccattcataaatatattggcaatttgtccccaattttttcgcaatttttccttcaattttactcctttctctttttaaatttttcttcctttttgcttaattttatcttttattttataattttttccaattatttctcttcttttctgttcttcgtttcttttttcttcccatttttctccaaatatttctttaaatgttttttgttccaattttttattttctgatccgatctgatcagttagggtgataaaaaataatattgaacagaataataggcacaatttcnaatgcattcttttaaatattactaatttttaaaaataaaatgctcaatttgacagaatttgtttaatgtattattaaaatgattaactatttaaatttgatgacgtaaat

SEQ ID NO: 31452 - DNA, 1116 bp, Heterodera glycines
actcgcataaccaaaaaatgctacgacgacggctcgtataaccaaaaaatgtcacgacgacgactcgcataaccaaaaaatgctacgacgacgactcgtataaccaaaaaatggcacgacgacgactcgtataaccaaaaaatgccacgacgacgactcgtataaccaaaaaatggcacgacgacggctcgtataaccaaaaaatgccacgacgacggctcatataaccaaaaaatggcacgacgacgactcgtataaccaaaaaatgccacgacgacggctcatataaccaaaaaatggcacgacgacgactcgtataaccaaaaaatggcacgacgacggctcgtataaccaaaaaatgccacgacgacggctcatataaccaaaaaatggcacgacgacgactcgtataaccaaaaaatgccacgacgacggctcatataaccaaaaaatggcacgacgacggctcatataaccaaaaaatggcacgacgacgactcgtataaccaaaaaatggcacgacgacgactcgtataaccaaaaaaaggccatgactcaattttgtctctaaaatgtgaatttttttgaaaaatggattttgatttttttgttcgaatccgggttcggagttcgaattgggcgaaaatagataccggaatcggtttctccgaccctgaaaacccctaaagcaagtttatttcaaaaaaatttttttgaaaatctggacgcagatacctaacccacaagttccgatttttctatcatttttcttcaaatttgatttatttttttaaacttctctacgtggtgttctcggttttacgcgtaccatgacattttggcgtctgaaaaatgttttacgcgtctcatccaaattggtttattgcaaatagaaattaaaaagcctcaatatttaagctgaaaatctgacaattaaatcagaccacaaataacgaattcatttacccctaggctcataatcaaatttttgaagacaaacgatcaattacggcttgaaataacacagcaaaatacgttttttccacaataaaataaccagttcgtgcttttgaactgagcataaaatttgaattttaaaaagtatacttgaattat

SEQ ID NO: 31453 - DNA, 1549 bp, Heterodera glycines
  unsure (1)..(1549): unsure at all n locations
tatatctcttcttaattataaaatgccaaaaagtttggcacgttttatctcggcatagaagctcatttggcaaaaatggttaaaattttacaatagaacctaggagtgatctacccacccanccaaagttctcgcggggaatgcaattggtaaaaaaaccaaggaaaaacttttctacccccaattgaaaagtcccatttaaatgtcaagcaacaacactcaaattacaagtgcctgtttttgttggacggcaattgtccgttttgtgccgcgtcggcgtcttcagtgagtcgctgtacgtcgtcgataccattcgaatttcttggtttgaagaaatctgtgaacgaattgctgacttttgagccgagagtggccacattgaaataggcttgtcgaccggacgaactgttcgccttactccgctgttcatttacaaaatcagccagcgaagacattcgaatttacaaatctaaattgaatgaagattttcgatttatttagagatgtctcaagctattagggatttaataaatgcaaaacgaaaaccgttgacttaaaactttaaatggaatggaaaaggtatacctaatcattagagaacgtattttgaggcatatgccttttttctgcgcattagttccaatatattaatcaaatcggtttgaagcttctacgttgacattattatgccttttttgggattttcatcgcctttttggcgtttttttccaaaaaagcccattaaaaatgaaataaaaatcggaaactactcccctaagaattgatgaaatttctcaaaaaaagatcgccaaaatttaattttttttttcttgataaataatttaggtttaaaattttccagtgtcgttatatatacctagtcaggaaaaactctaacaaggacgaagattaatagaataatacatacgtttcttggcgatcttttgaggagctaaaattttttttctgaagctctaaaagttgggtttcttgtggattaggtagatatttttgatattcatttaaaataacgggcgccgaataaataaatgtttcttgtcggttttatgggtaacatgtgatttcgtcagaagtgaaaataaatttattttctcaattgtcaacctatatttgttgtggtaacttacatatgtatcataaaatgatttatatttgtgcctcgtctttgctacttttatctcctatgtgtgcatttctaggtggtcgtaagacattcattctgcattaatctcggcatttcgttttaaatttcttactagggttggagctcgatccgtaaacgcggcaatttgagtgcgtgttccacgaccgaggggtatttctgtccgctccacccctgtttcttactaatagaattgctgcattttgagtatgttgatgctcttagtcagttttctgccttcaaattgtatcgtagacgtcagccgatcactatggaagtgacgtttacctttttgagtgtgtacacgtaactgattttcgcgcagcctagctgacggaatgggcacatgaaaagcacaaatcaaaa

SEQ ID NO: 31454 - DNA, 1135 bp, Heterodera glycines
cttaacttttttagtgaaaattcgatcactcatattttttgctaattgagcagaagcgtaccaaactttgcagggatactccccggtaaaggactaacttacactgaaatgagcgccgagctagctggctcaaaaaaattttcgaaaatctgagtctttcgtttttatttattttttggaaaattaattcttaaatattttttcagaaagggttctgaaacgcaccaaattttatttacatgttagtttaggcactctgatgctttttctatcaaaaagggagatgaataaaatttttaaaaatttttaattcctttttaaacaggccaaaaagtttaggcttaacttttttttcagaaactgatcagaagcgcaccaaactttgcagggatactgaaaggaagagaaataacctattttaaatattatctagtcagttcatttaaataatttttatccaaaaaattttttttgggttttcggggcagtccccctgaaccgatgcgcccagatttatggggagaccgaatccttccggaatagcttccctatagcctgtactttaattctgcgttggatttttgctccccataattgtttgagtaccccaaacggacacttgaaaaaatcgatttttttgttttcggggcagtccccccgaaccgatgcgcccagatttatggggagaccgaatccttcgggaatagcttccctatagcctgtactttaattctgcgttggatttttgctccccataattgtttgagtaccccaaacggacacttgaaaaaatcgatttttttgttttcggggcagtccccccgaaccgatgcgcccagatttatggggagaccgaatccttccggaatagcttccctatagcctgtactttaattctgcgttggatttttgctccccataattgtttgagtaccccaaacggacacttgaaaaaatcgatttttttgttttcggggcagtccccccgaaccgatgcgcccagatttatggggagaccgaatccttcgggaatagcttccctatagcctgtactttaattctgcgttggatttttgctccccataaatgtttgagtaccccaaacggacacttgaaaaaatcgatttttttgttt

SEQ ID NO: 31455 - DNA, 906 bp, Heterodera glycines
aaattttttttacagcttaactaggcccaattaagcttatttccagaaaatctcgcatgaattctcatttttaaattttttatagatttttaaatgtttggatttttttttggcttaacaaaacttcatcgaacctggttctttctattctctttcaaatcgccccaaattttttttacagcttaactaggcccaattaagcttatttccagaaaatctcgcatgaattctcatttttaaattttttatagatttttaaatgtttggattttttttggcttaccaaaacttcatcgaacctggttctttctattctctttcaaatcgccccaaattttttttacagcttaactaggcccaattaagcttatttccagaaaatctcgcatgaattctcatttttaaattttttatagatttttaaatgtttggattttttttggcttaccaaaacttcatcgaacctggttctttctattctctttcaaatcgccccaaattttttttacagcttaactaggcccaattaagcttatttccagaaaatctcgcatgaattctcatttttaaattttttatagatttttaaatgtttggatttttttttggcttaccaaaacttcatcgaacctggttctttctattctctttcaaatcgccccaaattttttttacagcttaactaggccctattaagcttatttccagaaaatctcgcatgaattctcatttttaaattttttatagatttttaaatgtttggatttttttggcttaccaaaacttcatcgaaccctggttctttctattctctttcaaatcgccccaaattttttttacagcttaactaggccctattaagcttattttcagaaaatctcgcatgaattctcatttttaaatttt

SEQ ID NO: 31456 - DNA, 1026 bp, Heterodera glycines
  unsure (1)..(1026): unsure at all n locations
taataccactgggagaagggagtgggaaacatgatttcaatatttttgttgaaatatttgtcgtgctatgaagggcgtgggagggggggggcgaaggccccccacgaggccgcgaagaggccgagtgagtaccttcggtgcaggaaaattattaaatttaaaaaattttttaattgctttttaaatatgccaaaaaatgtaggcttaacttttttagtgaaaattcgatcactcatattttttgctaattgagcagaagcgtaccaaactttgcagggatactccccggtaaaggactaacttacactgaaatgagcgccgagctagctggctcaaaaaaattttcgaaaatctgagtctttcgtttttatttattttttgcaaaattaattcttaaatattttttcagaaagggttctgaaacgcaccaaattttatttacatgttagtttaggcactctgatgctttttctatcaaaaagggagatgaataaaatttttaaaaatttttaattcctttttaaacaggccaaaaagtttaggcttaacttttttttcagaaactgatcagaagcgcaccaaactttgcagggatactgaaaggaagagaaataacctattttaaatattatctagtcagttcatttaaataatttttatccaaaaaatttttttttgggttttcggggcagtccccctgaaccgatgcgcccagatttatggggagaccgaatccttcgggaatagcttccctatagtctgtactttaattctgcgttggagttttgctccccataattgtttgagtaccccaaacggacacttgaaaaaatcgatttttttgttttcggggcagtccccccgaaccgatgcgcccagatttatggggagaccgaatccttccggaatagcttccctatagcctgtactttaattatgcgttggatttttgctcccccataattgtttgagtaccccaaaacggacacttgaaaaaatcgatttatttttgttttcgngggacct

SEQ ID NO: 31457 - DNA, 1317 bp, Heterodera glycines
  unsure (1)..(1317): unsure at all n locations
aaaaatgaccccatctttggttaatttttgggtttttaggctgtaaaaaaagaaaaaaataataattattaagttgaaatattttntatnaatcattcnnaattaaagtaatgctaaaaaaataagaaaaatattctattacatggggaagcgaacncaagcgaaaaataatgaaagtaagaaggtttagccaatagaccacgtaaacatgttggaagaatgctttgaaataattaatttaatttatccttctccaccatttccttctcttttctcactttatgcgattttttaatttaatggagaattacttctattttttctctaaaattttttttagaaagaatcgcaaaacttttttttaataatttaattcttttaaaaattttttgaaaattttagtttataattgaaacggtcctttattggtgcctgaagtgaaatagagccgaaatttaacactgggaaagatttttggtcaattttgggctgaaatacatgagaaaacgtaaatttataccaaaccggtttttgagaggcagggcccggaaaccggttgcttttgaaaaagtcagcccggcagattcggaaatctcgatctctaattttaaatttatctcaatattagctttattttgttgctttttgaataaaattttgtcacttgatatccctaaatttgaggctttttgacgcctattttctgggttttttagaacccaaaaatactagttgattttcaaatgaattttaagtgatgaaattcctgctcaaatatacggttgcagtttgctctttatacgcacgattaatttatgtacataatataaacaaacacacacaaacaacaattccactaaacgagaacatttgtacatgaaatacagtggcaaaaacacatatacgaaatgtagtacaatacaggctacaaggcataaggcatcacatggaaatgggtcaatgtcaatacaaattgctgggcagtgttcagccgtggcacatcatttaaattccgccggagaagacgcccatcagacataatacaccagtttattcttcttcaagccttgcacctgaaaagtttggcttattcctccaaaatttctcanattattacaattacctccaaaaattccgcccatgaaatccgcatgcagaaattttagtggagccacgacgaagtgcaaccattccctgtaaaatgagataaagctgacgcatatcctcaaaaaatgtttatccgctcacccgcttccacacaaaactgctcgacattgtgctccaaggaagccctcaatggcagcggcgacagctcaa

SEQ ID NO: 31458 - DNA, 1311 bp, Heterodera glycines
  unsure (1)..(1311): unsure at all n locations
gcgctagtgtcgggcattttgacattaaaatgccattaaggcacgttngtagcaatgatgcacgtgtcnntngnnaattctcaggnnaataatccctgaatttcttttattttcttatcactcacaaatcactggggganaattaagatgattctgatgattagcgttcttgttcgattttggcgctagtgcgatatatattctcatggttcttggaaagtaatcaggaagtatttcgatttttgtaaataaaccatcagctgatataaagaaaagcattgttgtctgtccttttccaattatattgccatttcggcatcggtctaacaaagctgcgcatggctttgggaaattcctcaggaattaattttcgttgtctaaagaaatgcactagtgtcgggcattttgacattaaaaagccattaaggcaccgttgtagcaatgatgcacgtggtccttggaaattcctcaggaattaatccctgaatttcttctattttcttatcactcacaaatcactggggaaaattaagatgattctgatgattagcgttcttgttcgattttggcgctagtgcgatatttattctcatggttcttggaaagtactcaggaagtatttcgatttttgtaaaccatcagctgatataaagaaaagcattgttgtctgtccttttccaattatattgccatttcggcatcggtctaacaaagctgcgcatggctttgggaaattcctcaggaattaattttcgttgtctaaagaaatgcgctagtgtcgggcattttgacattaaaaagccattaaggcaccgttgtagcaatgatgcacgtggtccttggaaattcctcaggaattaatccctgaatttcttctattttcttatcactcacaaatcactggggaaaattaagatgattctgatgattagcgttcttgttcgattttggcgctagtgcgatatttattctcatggttcttggaaagtactcaggaagtatttcgatttttgtaaaccatcagctgatataaagaaaagcattgttgtctgtccttttccaattatattgccatttcggcatcggtctaacaaagctgcgcatggctttgggaaattcctcaggaattaattttcgttgtctaaagaaatgcgctagtgtcgggcattttgacattaaaaagccattaaggcaccattgtagcaatgatgcacgtggtccttggaaattcctcaggaattaatccctgaaattcttctattttcttatcactcacaaatcactgnggggaaattaagatgatactgatga

SEQ ID NO: 31459 - DNA, 1437 bp, Heterodera glycines
aattaccatcactgatttatcattttgctgatttcaacgttcaatagattttttttttgagatgctgattttcaaagagcaaaattgaactaaaaattctaattttgaaaatttttagttaacaaccttgattaaaccattgaaaatctattttcatttttttcaaaaagtcattttaatgccacgagtcgggccgtcgtcatcgctcgcttttcccatgccattccccaaaaatggcattcatcgtccattagatggagcacaaatcgttttgcttcttcatttgtcactggttaaggtcatttcaactgagaagacatgcaataatgaagaaggaaggaggaacacaccttttcaattggtcgtcgccattggcggcgaatgtttttgcccattttgcccttctcatcggacgccataaatccggatttgccgtagaaacggggggcgggggggggggggggggggaaatggaaaggattgttggctttcaatgtgtcagggcaaggtcacatccatccatcccctcggagacaaaggcaaaatacctgtgggggaagggcaatcagccggcggaagattgaaaaaggttgccagcccatggaggagagagtgcgtattcaaattggcatgtcgtactgcccgtttggaataccaaatgccaaaaatggaaaattgtataatggacgatatttgaattttgaaaaattttagaattggacccgctaaaaaacagcccaaaacgagttccaatcaatctctaatttcctttaatcaacacaaaacacaacatcccaaggtgtggaaaaatcaaaaaactgggtttttatccgtttgaaatcacgaaagattgcaccaaaaccagccaaaagacattttaaataaaaatttgaattaaattggtatcattctaaagctcttgacgagctacgttttatttgaattgaaactttaaatgctagaatttgttttaattttattccctaacccatttttgaacacaaaacacaaaccaactcacatcagcttgtcaaaatgtcgtcagactgttaaatgactgccctaagggattaaaatgaaatttccggcgccgttgtgacggacggtcgttcgttaaacatccccaattacggtagtctcctgctgctgctaaagattggcttttggcattctatccgctgaggcggcaaagcctttatttttttgtgagttcgataacaaaaattggcaggggaatttgcggttggaccaccaaatttctgctaattgatttcggcggcacttttgttttcattgtttgtcaaagggcacacacaaaataacacaaagaaaagcattttgttgattgttggcactttgcctcaggcacaaaggacgattctcccaccatatgaccgccgtggggaacacgaccaaaagtgccggcgccaactttga

SEQ ID NO: 31460 - DNA, 940 bp, Heterodera glycines
tcaaaaaaagagataccctttttttgggatagagtataaatttaaaatttccttcaaaaataaaaggtctattgcgcaccgcctcccctatcatgctcgagagcatttgtatgtgtataaaatttctcaaaaaaagagatatccatttttctgggatagagtataaatttaaaaatcctctgtgaaataaaatggcgattgtgcacagccctccgtctcatacgcaagcgcttttgtgaggtataaaatttctcaaaaaaagagatagccatttttctgggatagagtataaatttaaaaattccctcaaaaataaaaggtctattgcgcaccgccctccctatcatgctcgagagcatttgtatgtgtataaaatttatcaaaaaaagagatagccatttttctgggataacctctaaatataaaaatcctctgtgaaataaaatggcgattgtgcacagccctccgtctcatacgcaagcgcttttgtgaggtataaaatttctcaaaaaaagagatagccatttttctgggatagagtataaatttaaaaattccctcaaaaataaaaggtctattgcgcaccgccctccctatcatgctcgagagcatttgtatgtgtataaaatttatcaaaaaaagagatagccatttttctgggataacctctaaatataaaaatcctctgtgaaataaaatggcgattgtgcacagccctccgtctcatacgcaagcgcttttgtgaggtataaaatttctcaaaaaaagagatagacatttttctgggatagagtataaatttaaaaattccctcaaaaataaaaggtctattgcgcaccgccctccctatcatgctcgagagcatttgtatgtgtataaaatttctcaaaaaaagagatagccattttttctgggatagagtataaatttaaaaattccc

SEQ ID NO: 31461 - DNA, 1173 bp, Heterodera glycines
tttttcctccaccttcaacctgggttttccccgaaacgccattctaatatccgttgaaccttccaaatgttcggttggaaaatgctcccataattaagaatagatattttcagaaaaatggctttctctttttcctacgcccttcaacatgaggttttccccgaaaacgcatttctatatacggttgacccctacaaatggtcggttggaaaatggctccataactaagaatagatattctcagaaaaatggctatctcttttttctacagccttccacatgaggttttccccgaaaacgcattactatatacggttgagccctacaaatggtcggttggaaaatggctccataactaagaatagatattctcagaaaaatggctatctctttttcctacagccttcaacatgaggttttccccgaaaacgcattactatatacggttgagccctacaaatggtcggttggaaaatggctccataactaagaatagatattctcagaaaaatggctatctctttttcctacagccttcaacatgaggttttccccgaaaacgcattactatatacggttgagccctacaaatggtcggttggaaaatggctccataactaagaatagatattctcagaaaaatggctatctctttttcctacagccttcaacatgaggttttccccgaaaacgcattactatatacggttgagccctacaaatggtcggttggaaaatggctccataactaagaatagatattctcagaaaaatggctatctctttttcctacagccttcaacatgaggttttccccgaaaacgcattactatatacggttgagccctacaaatggtcggttggaaaatggctccataactaagaatagatattctcagaaaaatggctatctctttttcctacaccttcaacatgaggttttccccgaaaacgcattactatatacggttgagccctacaaatggtcggttggaaaatggctccataactaagaatagatattctcagaaaaatggctatctctttttcctacagccttccacatgagggtttccccgaaaaagcatttactatatacggctgagccctacaaatggggcgggttggaaaaaggcctcataactaagaaatagatattctccaaaaaaatgg

SEQ ID NO: 31462 - DNA, 1219 bp, Heterodera glycines
tcgccccaagatccctcaattaactctgatttattaatttatgcatcattagcattgtcattgcttcttctgactgtgccgcgcgtcgttttgccggtgccgaaagttttgtgtgcgtttgcaacacttcgtactgcgattggcccgctgtggaagacgaaatggacgacggaggaaaaggaggaggatggcatggacagcgcaaaaatgaccaaaaattggggggaaataaaacggcggtggtttttgtgtcggaccctgacaaattccgactccaccgacagttcgtgccgattttgaacgaagccaaagaaaggaaaaagaggaagcgaaatggtagcaaatgggagaaaggtgcggcacttcgccccgggggatggaaaaatgccaaacggtggccaaaacgaagccgaaaatgaataacaagtgccaaaaacatggtctacaaaacacaaaattaaaaaaaaaaaaattaactaaaaatattaaaaaattaaaatttagttcaactaatattttataggatttcaaatctattgaccaaataaaaatgaaaactaaacaaagttcctaatgaaccttgagcatttcggactattttagactttatccaaaatcttccaggccattggctgaccgttcgtgtgaatgcgtccgcgcgctttcagtcactgctcggtttcggtggcgcgttcaccgactcggccacgttcaacatggacgcgttgagcgggccaacccgctccacccttctgaaggcttactttgacagaaacattggtcattttataatgatgattgaacactcttttgtgattactcccatttttgaaggcattcggtactcagtcggccgtgtgccaatgggtgcgactgatttctctgtgcgccaatattcgtactgcgacacgcccggcgatttgaatctgaccacatttgcactggccaaggaagacttagaatggaaggtaagcaatggcaatggcacgattcggtggataattggtaattaattatttaaatagttgcccaacattcgttcggccattgctctcagcggcggtcagctgcgactttttgccactccgtggtcagcgcccggatggatgaagacaaatgagcgaatgatcggcgccggaacacttaagtgagacagactaattgaaatgatcaaatgataaatgagtgatcagagagaatgaaatgatggcattgggta

SEQ ID NO: 31463 - DNA, 1172 bp, Heterodera glycines
atggtcgtacaaaatgtgatgatatgtgattgctaatcagatcaataaagatcgccgctgtgctttcgatgcgattggttcatcattttgcttttattacttgctgaaactgtataactctctctatactgagaagagctcgagaatctcggtaatttctcgttttttttttgggggggggggtggttctttctcgactttcggtctaataagtttctatcgagtcacgaaatttgaactctcgagcagccattatcactttggcgtgtgggtgggtattttgacgtgaagttttttgcgtggaccacttggcgcagccattttgacgcagtttgttttggtgttacttataaaatggattttatgatgccgtataaaattcccgcaaaaatttgggacctctgctcgaaaaatcttaggtttttagcctttattcagcggaaagttgggtaaaatttttccgcactttaattcatatttctctgtgcacacacaaacatcccacataggtagatatatcagggaccaggaaccgagtcccgctttaaaatttttttttagtggcccgaattccgcaaatatttttttggggtctccgcggtcccataaaatcgtaacgtaataatttgtctttctctgacacatttgcatagatcgcgacgacatttttgtcgttgcgataggaatgcttactgctgcgaaatgtcagacattattcatgtgagaatgattcacagcttcttttttgccggcgtgttgcggtgtcagtcaatgcttcttgtaaaaattttaatgctcggatttcattttgcaacatcatagttattattagggataacatttatagttgctaaaaactgccaaaataattaatttttagtttctaaaaaaccccaaaatagttgctaaaaacttccgaatttaggggtgtaaaatgacaaaattttatccaaaaagtaacaaaattaaacaaaaatcagtattgagataaataatttttaaaatcacacattcttgtcaataaataaataaataaattttggatatgaattttcgagaaaattttcatttctcaggggtgtgtttttgaaatttccgggtcgattcttatgtagtggtgtattttttgaaaaaaaaaatttaagtcgattcctaggggtgtatttttcgtt

SEQ ID NO: 31464 - DNA, 1007 bp, Heterodera glycines
agtctttttttcccaataaacttgtcaaaccccactctacccagggtgaatgttatttttattgaattctgaaccgttttgagtagattagactataaaaaattgaaaattttgaaatcatgtttcccactcccttctcccaggggtattattttgtaaagtctttttttccccaataaacttgtcaaaccccatttttcgcaccgtgaatgttatttttattgaattctgaaccgttttgagtagattagactagaaaaaattgaaaattttgaaatcatgtttcccactcccttctcccaggggtattattttgtaaagtcttttttccccaataaacttgtcaaaccccatttttcgcaccgtgaatgttatttttattgaattctgaaccgttttgagtagattagactagaaaaaattgaaaattttgaaatcatgtttcccactcccttctcccaggggtattattttgtaaagtctttttttccccaataaacttttcaaaccccatttttcgcaccgtgaatgttatttttattgaattctgaaccgttttgagtagattagactagaaaaaattgaaaattttgaaatcatgtttcccactcccttctcccaggggtattattttgtaaagtctttttttccccaataaacttgtcaaaccccatttttcgcaccgtgaatgttatttttattgaattctgaaccgttttgagtagattagactagaaaaaattgaaaattttgaaatcatgtttcccactcccttctcccaggggtattattttgtaaagtctttttttccccaataaacttttcaaacccccatttttccaccgtgaatgttatttttattggattctggaaccgttttgagtagattagactaaaaaaaattgaaaaattttgaaatcatgttttcccactccctttctccccgggggtatttttttgaaaagccttttttttccccaaaaaaacttttcaaaccccctttttcc

SEQ ID NO: 31465 - DNA, 1648 bp, Heterodera glycines
  unsure (1)..(1648): unsure at all n locations
ttttctatcaaaaaggaagatgaataaatttttaaatttttaattcctctntaaacaagccaaaaagtttaggcttaactttttagtgaaaattaatttactcatttttcgagtagtgctcagaagcgcaccaggctttgcagggtaacagctgagaagaatgcttattcatataattatttaactgtcccataatatttctttaaaaattttagacattgcaattttgcgtacttttccaattttttgcaaaattaattcataattattttttcagaaagtgctcttanncgcaccaaattttatttacatgttaaataaggctctctgatgctttttctatcaaaagggaagatgattaaaaatttttaaaatttttaattactttttaagcaggccaaaaagtttaggcttaactttttagtgaaaattcaatcactcataattttacgagtagtgatcagaagtgcaccaggttttgcaggagcctaaaaaggtcaaggaaaggcgtctctgcgttgatttagcagtagtacctatgaatttaaatttcctatgaatttttaaaggttcacaatttatttattttttgcaaaattaattcataattattttttcagaaagtgctcttaaacgcaccaaattttttttacatgttaaataaggctctctgatgctttttctatcaaaaaggaagatgaataaaatttttaaaatttttaattcctctttaaacaagccaaaaagtttaggcttaactttttagtgaaaattaatttactcatttttcgagtagtgctcagaagcgcaccaggctttgcagggtaacagctgagaagaatgcttattcatataattatttaactgtcccataatatttctttaaaaattttagacattgcaattttgcgtacttttccaattttttgcaaaattaattcataattattttttcagaaagtgctcttaaacgcaccaaattttatttacatgttaaataaggctctctgatgttttttctatcaaaagggaaaatgattaaaaatttttaaaatttttaattactttttaagcaggccaaaaagtttaggcttaactttttagtgaaaattcaatcactcataattttacgagtagtgatcagaagtgcaccaggttttgcaggagcctaaaaaggtcaaggaaaggcgtctctgcgttgatttagcagtagtacctatgaatttaaatttcctatgaatttttaaatgttcacaatttatttattttttgcaaaattaattcataattattttttcagaaagtgctcttaaacgcaccaaattttatttacatgttaaataaggctctctgatgctttttctatcaaaaaggaagatgaataaaatttttaaaatttttaattcctctttaaacaagccaaaaagtttaggcttaacttttgagtgaaaattaatttactcatttttcgagtagtgctcagaagcgcaccaggttttgcagggtaacagctgagaagaatgcttattcatataattatttaactgtcccataatgtttctttaaaagttttagacattgcaatattgcgtacttttccaattttaaaagaaattaattcataattatttttttcagaaatgctctg

SEQ ID NO: 31466 - DNA, 1700 bp, Heterodera glycines
cttatgacgggccgaaaagaaaaattcccaaaaaatttgccacgggaaaaacttccatttttttatggcccagcataataaagtaaacccaaaaatgtaagggaatttaaaattggtcatgtgagatgtttagttttttatttgacccatccgttttctgggaaaaaacttttcgagaaaagctgaaaaattttccaattgcatcagaagcagactcaaattcttcaacaacataatgtaaaaaatattacgcaagaaattatttttacatcctttttagaaatgctgcataaatttttattgtaaatagtcacaaacaaactttttttcactcccaatatctaccagttatcatacaaaaaggcaatagttaagcactgagatataaaaaaatcgtctagaataattatctaaacaatttgtcgggaaagctgtataaattctgggaaaaaacttttcaagaaaagctgaaaaattttcaatcgcatcagaagcagcctcaaattcttcaacaacataatgtaaaaaatattacgcaagaaattatttttacatcctttttagaaatgctgcataaatttttattgtaaatagtcacaaaaaaacttttttttactcccaatatctaccagttatcatacaaaaaggcaatagttaagctttgagatataaaaaaatcgtctagaataattatctcaacaatttgtcgggaaagttgaataaatttcagttgcaataggcatattggcacaatacataaatgtagagcaggctcaaaatagaggaaataccaaagattaaaaaattcgtgtttatggcccactctgctttggctggacataactcgccagagagtggagatagaccctttgttgatacatttgaaaatgtagagctcggctagcgcattcgaataacacaaaatttgttttcatttgcccccaaacaatccgcttatgacgggccgaaagaaaattcacaaaaatttggcaccggaaaaactccatttttttatgggccagcataataaagtaaacccaaaatgtaagggaatttaaattggtcatgtgagatgtttagttttttatttgacccatccgttttctgggaaaaaacttttcgagaaaagctgaaaaattttccaattgcatcagaagcagactcaaattcttcaacaacataatgtaaaaaatattacgcaagaaattatttttacatcctttttagaaatgctgcataaatttttattgtaaatagtcacaaacaaactttttttcactcccaatatctaccagttatcatacaaaaaggcaatagttaagcactgagatataaaaaaatcgtctagaataattatctaaacaatttgtcgggaaagctgtataaattctgggaaaaaacttttcaagaaaagctgaaaaattttcaatcgcatcagaagcagcctcaaattcttcaacaacataatgtaaaaaatattacgcaagaaattatttttagatcctttttagaaatgctgcataaatttttattgtaaatagtcacaaaaaaacttttttttactcccaatatctaccagttatcatacaaaaaggcaatagttaagctttgagatataaaaaaatcgtctagaataattatctcaacaattgtcgggaaagaggtataaattctgggaaaaaacttttcaagaaaagctg

SEQ ID NO: 31467 - DNA, 920 bp, Heterodera glycines
ttcacgtcacttgggcgtcgtccaagtcgcccatctcctgtgccgtgtcttctccagactggcgatctgagcaccattagccatttccgttgctctgctgatcactgttcgctctaatcacctttgtgttggccgcttcgttggcgtccgttagctcctgcactttcttctgcaagttgcgcttggcctcctcgatctcctccatcttgaccaatccttccgactcgaaccgcgccttccactgttggatctccgcgttcagtttgctgatttgacgcaggcattccgctttgccctcctgctcgtcgtcgagctgttcgcgcaatgagtcgttctcgtgctgcacgttcttcagctgtcccgcgagggtttgccgctcgcggctttcctcgtcggcggttcgtttcgcctcctccaattggctgaccaactgactcttcaggcgatgcagcgaattcacctgtgatcaaatgtccatggtgatagcattgtcccaatccctgctcgtccatccgtctcacctggttctccaggtcctccacttgatgttccaagtccgcgttttcgttgtgcaagcggctcttcagcgcggcaaagtcgttgagcagtcgcgactgctcgtccgtcttgctctgcagttcgctgagctgcagctcgatgttcttgatcactttctccgcttcctgccgtgctcgcagttccgagtcggccgtttgcgtggcgtcctccaactcgcgttggatctgctgcttgtccttctccaccttcactttgatcttctgcatctgctccaactggtcggtcagctcggccaccgcgtcgttgtgcttcttacgcaacgcattcagctgcgtctcatggttcaggttgttctcctccaagtccccggcgcagttttgccaattccgcctcgcgctttt

SEQ ID NO: 31468 - DNA, 933 bp, Heterodera glycines
gcttgatgcctgaggtcttttatttcattgatttcttttataaaacattcatctttaaagagtcaaaaaatgcgattgtaacgactggtcagtgtatgatcagtgtttgtttgtttgctgatcggagtgctttcgttccttctttctttcccgatcactgcttccccccccccccccccacaactcttcaaagcgaacgcaccgccgtcggtagtaatcgttttgtgattgatgcgtgagaatggccgacgatttgatgcttttggcgcgccaataattttcagctgtcgctggtcactaacccaaaaatcgttttgatgagaaaaaaaacaaaaaaaaagaaaaaaaacatccgtgggaatattctgtcggaagtaaagaaaacaaaggaagggaatgaattgagatcaaaaagtgagtgggaaagaaaggtcaaacggacgaaagagcggcgggaaggacaaaatgccaaaaaaggaagacaaaagggaatttaaattggacaaaaggactaaaggaagacgaacggacacagaaggacaaaatgccaaaactaaatagggtgatttaaaagcgggagccatttgattatcatttttattcgtcgcatccttaacataattaattaaacaaatgatcagccaatccctaaatttagttttttctcctaagtttgcgttattttgtaaaatgtataaaccaattgacttttcgagtttggcactaaatcagcgctattttcagacacttcaattccattttgcccatgccgtcgtcaatctctgccggtggtgatgggatgggatggcttggcttcttgtcccccctccccccctgccgtgttcatcatctccatcatccctccctctccctaccatattcaccaatcaccccccccccccattgatctgatctcccctctccccccgtttt

SEQ ID NO: 31469 - DNA, 949 bp, Heterodera glycines
ttaacattacacaaaaaactttcaataattagacatacagatatttaacgaatacattacaacacttttatacactaattaatttattatcaaagtacattaacccatatatatatagttaaactatcacccacctcggtaacttgtaaaatttccatctattgtaataatttttaataatctcgacattagatggtcaataaaaataatatttcgaataaacatttttctagaatataaaaattaatttaatttaatgaatattataaatttagaatttaaacaaaatagtgatggtaaaaaaaattgattttaagaaaaaattctttattttatgcagttgaaaaagacaataaaattagtagttactaccccctcccccctcccggtccctttaacctagtagcggtcagtcattagcgctcaaattatcacaaccgtgcgctcaaatggcccctgcgggcggcgctcatgtggtacgcgcgagtgctcaaatgacccggcgtcgcttccctcccgacagctgacgccctttcccttctccattaggctttggttttgcgaattatttattttatttttaatttaaattatttttaatcaataaaaacccttcaataggtttaggttcacccccacacccatccaataggtttaggttcactcccacacctattcaataggttttggttaactaataggctttggtttggaatggtggttttccaagggccaaaaaggggggtagtaactactaattttattgtctttttcaactgcataaaataaagaattttttcttaaaatcaatttttttttaccatcactagttttgtttaaattctaaatttataatattcattaaatgaaataatttttatattctagaaaaaggtttattcgaaatataatttttattgaccattctaatgttcgagattattaaaaa

SEQ ID NO: 31470 - DNA, 752 bp, Heterodera glycines
ccaaggtcctgcccctccgggggattgtggttcaccggccaaggacctgcccctctgggggattgtggttcaccggccaaggacctgccccttcgggggattgtggttcaccggccaaggacctgcccctccgggggattgtggttcaccggctaaggacctgcccctccgggggattgtggttcaccggccaaggacctgccccttcgggggattgtggttcaccggccaaggacctgcccctccgggggattgtggttcaccggtcaaggacctgcccctccgggggattgtggttcaccggccaaggacctgcccctccgggggattgtggttcaccggccaaggacctgccccttcgggggattgtggttcaccggccaaggacctgcccctccgggggattgtggttcaccggctaaggacctgcccctccgggggattgtggttcaccggccaaggacctgcccctccgggggattgtatttcaccggccaaggacctgcccctccgggggattgtggttcaccggccaaggacctgcccctccgggggattgtggttcaccggccaaggacctgcccctccgggggattgtggttcaccggccaaggacctgcccctccgggggattgtggttcaccggccaaggacctgcccctccgggggattgtgtttcaccggccaaggacctgcccctccggaggattgtggttcaccggctcaggacctgtccctccgggggattgtgg

SEQ ID NO: 31471 - DNA, 1346 bp, Heterodera glycines
tttttccacattttttttgttttcacttatcattttcttcatttagcgacgacttttttctgctttaaaaacgctttttttgtggcgcgctttttccaaaaattttgtgggacagagggggggggggggggggggcggttacgggcgatcaccagccccccgggggggaaaaatttgatgatttgaatgcaatttgttaacagattttcaccaaaaactgcctaatttttgcgattttaagccatgcaacgactttttttgtttataaaatgggtttttttacggcgcgctttttaaaaaaatttttgaggataggggggtccggaaaaatttgtaatttttaatgcgagttgtttacagatttttgtccaaaaatgaccaaaatttgcgatttttggctaattttttaagaaaaatagtgactagtgacttaatgccataaaatttcaaaaattctcaaaaattacatttttaaatgacataatgccataatttaatcaaaatattgttgaaaattacaaagatttctcaaatttctttgatttttttaaacttttccaaatgctcattttcaaggacgtccttgcatacaaggacattttttattttcaagaaagagggcccaatttcaaggacgtccttgccattcaaggacggatggcaaccctgctttatggtcctgttatcgtttccaagatttggcgcttcatagatttaaaagttcacttatttttatttattttatttatttgaacaaaccgcaaggcaacatagttgcacttatagcggaaaataaagtaatgaatagaattagaaaaatatgatatggtcaatacagtaaaaatacataaaataaaaaataaaaagggatgaattaccactcaggacttattttctaaataaaattctttcacaaaatttttaaatttagctaaagttccgatttccatagctgttttgggtaagcaattccacggattaattgtacgattaaaaaagttattccgagatttattactgaatcttttattttgaatcctaaatgtttttcgttgcgatcttgttgaaaattcgaaatatttttttgggtctaaatgagttaagcccctaattattttgaaagtcatattcatatcagtgagcgaccttcgattatttaatttctccaatttgcaaatctcaagtcttttttcatatgatgcagccttgaggccacattttttgtatacgattcttgtgaaaaatttttggaccgtttccattcttttactctgttcttttgaggagatattccaaacttcgcttgcgtattcgaggtgaggccttatatagcttttatatgctag

SEQ ID NO: 31472 - DNA, 500 bp, Heterodera glycines
tttctctctcaacgcgaggtctgttggtgccgtttcgtaccccgggaaggaatttacctatgtttgttaactgatttgtccatttattttggagagagtgaggtaggggggaggttagcgccgacactcaactcaccccttgttacgcccttggaagaattttatgtttttttaatatatttttttggtattcagtaattcgacatactcttgtgaccattcgtgattgcgccaacgaggaaattggccgcattgatgcccgtcaggagggtgagtatgctgcttcaaactttctaaaaaatttcaataaatttaaaattcctaaaaatggctcaaaatcgcaaaatttcgacacttttttggacaaaattcgttaacaaatcgcattaaaaaaaatgcaaaaattttcccggcggcgcctatcggcaccgccggaccccctgtcccccaaaagtcttgtggaaaaccgccgcaaaaaaaagttgtgtaaagaaaaaaaa

SEQ ID NO: 31473 - DNA, 995 bp, Heterodera glycines
tgttggcatgacaaccttgagcgggcgaggtgtgttcgctgcgggttgaaccggccgagtcgaaagacggcggttggttcagcctcaacatcaagatggtccaagattttagtcacggcttccctgtcttctttaacacgctgcgatgggcgaacagcattgctttccgggaggccaatgagcaccaatgtgcgttggcgttcttgctcagcgagtgccgcagtgtttggacccgagtccggtgcaaatgccattgagcgttttggttgaggaggagtgtcttttgtcgtgttgcttcgtttcattgtcgataatcgatttatagagaaaatttagtgaaatatggacctcaaacttgggtaattaaaccaatttaataaatttaatagattgtccggaaccaatttcaatttccgtcatatcactgatctgacgtcatattttcaaatttctatttgattttgcaactatttctgacgtcatatcatatttaatcaggaaattatgcaaaaaatggaatttatagtaattcaaattaagtaatacaatttgaattaattaatttatataatgtgaataaaattaatgaaaataaaaaaatctaacgtacataaatgatggtgagacggcaaaaattaaatttagctttatttcttattttgacaatctttcgaaaaaaaaaaattttcataaaaattattagagaaaaacaatgaattttatagttttgaaagagccatacttcattctataaataacattttttgtttaatttttgattattattattaaatttatttttaaagaatatatgatttgggcacatacgcggtagagactaagtttttattgagacacattctctgatctgctgatgtcagatcagtgatatgacataaattgaaataggctctgttttttgccaaaagaaatcattgtcgaaaaaaacaacaatcaaaactaaaaatacactcaatcgtttaaatatttcgaac

SEQ ID NO: 31474 - DNA, 1060 bp, Heterodera glycines
tgccccgaaaacaaaaaatcgatttttcaagtgtcgtttggggtactcaaacaattatgggagcaaaaaatccaaagcagaattaaagtacaggctatagggaagctattcccgaaggattcggcctccccataaatctgggcgcatcggttcggggggactgccccgaaaacaaaaaaatcgattttttcaagtgtccgtttggggtactcaaacaattatggggagcaaaaatccaacgcagaattaaagtacaggctatagggaagctattcccgaaggatacggtctccccataaatctgggcgcatcggttcggggggactgccccgaaaactttaaaaaatagaagcctaaactgtccgtttggggtactcaaacaattattaaaaatttttagatttttattcatctccctttttgatagtgaaagcatctgagtgcctaaaataacttgtaaataaaatttggtgcgtttcagagcagtttgtgaaaaaatatttatgaattaattttgctaaaaaaataaaatagtgaagctttaaaaattaataaaaaattttaaattcagaattactggagttagcatcatagcagtgcttttccttgtctttttgatgccctcgcaaaatctggttcgcttctgatcagtttataaaaaaaaagttaagcctaaagtttttcgctcgtttaaaaagcaattaaaaatttttagatttttattcatctccctttttgatagtgaaagcatctgagtgcctaaactaacctgtaaataaagttttgtgtgtttcagagcacgttctaaaaaatatttatgaattaattttgcaaaaaacaaataaataatgaactctcttccttaatattttcctgcaccgaaggtactcactcggccgcttcgcaggttaagttagtcctttaccccccccgcaggcctgcaaaattggagagattatatcgatttttaattagaaaaatgataaaaaaatgaaaaaatttgatgatatattggggaaaagatgttaataaattttaatgaaattttgaaagattttcc

SEQ ID NO: 31475 - DNA, 1416 bp, Heterodera glycines
  unsure (1)..(1416): unsure at all n locations
aaaacggtcagcgagttctaccgtatgtggggcgcagcacaggcggcgactgctgccgctggaggtggcacaccagtgagaaatttcataattatatattttcactactttttatccaccggtttggtaccgttgtcttttatttccatttatattcattctntacaatcataattaatttaagaataaatttntaaattttatttctaaataatatttttaaatattttttcaattatttcaaattaatcatttttaattaattttttaaattttgttgtttttaaatatagtaatataattatgatatttattacactttttcagtaaaattttatatatttttgtaaaatattttcatatacctaaacactagagatcgacctggacctggatccagttccaggtccaggccatttttcggcaacctggatttttcctggacctggatttttgtccaggaaatccaggtccaggtctattgtgaaaaaaaatccaggtccaagcaaaacacgaaaaaccctggattttcctggacaaaattttagaatttgttattttaagtgaccgatgttttttcaagttttcaaaaaatgattaaataacttagaaacacattattattattaattagatatttttagaggtttataagcaattaattgattttttcaaacattttttgatttttaaaatgagtttcaaaaaatccaggtccaggcctggatccaggtcccgaggagtctggatttttcctgggctggatttttgtccaggaaatccaggtccaggtccaacatggaatccaggtccaggcttttttcaaaatgtcgatctctactaaacactatttttaaaataaaaaaagtatttctaaatttgaattttatttaaaaattattgattgtctttttagtcatcgattgctaacagttcaccgtttgtcaccatgtccggaaatgctgctgctgctgatagagtgacaaaatgctagaagagaagcgccagagaaggaaagaaatttttgtgatttttgatcgatagaagaaacaatttttgatcagacttttcttatccaatcaatgatctaatcaataaatttatgtttcccccgtaaaataaatgtcactgaacattttcaacataagcattttatcggggaaaaaatatatcagcatttgggttcaaaactaatcagtagggttatgattttgcatattttttctgcgcatatgctatgaagaaaggggcttaaaaatagcatttctacgttaaaattttttgatttggtgaagatttttagtgcatataaatgcatattttgcgtttctagagcatatttcggccatttttggcaaattttcatacataagaaaaatgcaacaaaaatgaaaaatacacctcctaatttgtaag

SEQ ID NO: 31476 - DNA, 1310 bp, Heterodera glycines
  unsure (1)..(1310): unsure at all n locations
catttatctcataaagtcagattaaattaattactccgatttgtttttagaattggtcccaaacacgcttgctaatagcttttctttcgaaaagagaggcgaggaaaaataaggtttgcatccaaatgtaatttttttttacattgaagcatttggatggcttgctgtttacagttggctcagtcttctttgcaagaagcagcacaacttttgtttgggccaacgaccccaaaccattcgaatagcaatcgattgggctgactagactgcatatttgcaggaatagcaatggcaggtctatcttaaaggcctgacgagttatgtttcgacaaacatcctgtacaccataaatcgattttcaaatttagtcgaactatataaatttttcaaaaaattattcatcttttttatggttagcgcatatgtctctagctttatagaaacggtccccgaatctgcgaggaactacttttttgagaatttctatagattattattctgcatgaatccttcgcttaaattcccatttatctcataaagtcagattaaattaattactccgatttgttttagaattggtccaaacacgcttgctaatagcttttcttttcgaaaagagaggcgaggaaaaataaaggttgcatccaaatgtaatttttttttacattgaagcatttggatggcttgctgtttacagttggctaagtcttctttgcaagaagcagcacaacttttgtttgggccaacgaccccaaaccattcgaatagcaatcgattgggctgactagactcaatatttgcaggaatagcaatggcaggtctatcttaaaggcctgacgagttatgtttcgacaaacatcctgtacaccataaatcgatttgcaaatttagtcgaactatataaatttttcaaaaaatgattcatcttttttatggttagcgcatatgtctctagctttatagaaacggtccccgaatctgcgaggaactacttttttgagaatttctatagattattattctgcatgaatccttcgcttaaattcccgtttatctcataaagtcagattaaattaattaccccgatttgttttagaattggtccaaacacgcttgctaatagcttttcttttcgaaaagagaggcgaggaaaaataaaggttgcatccaaatgtaatttttttttacattgaagcatttggatggcttgctgtttacagttggctaagtctttctttgcagaagcagcacaactttttgttggngcccacgaccccaaaccattcgaaatagcatcgattgggctgact

SEQ ID NO: 31477 - DNA, 999 bp, Heterodera glycines
cttaggcctagtctaacaataagccattgttcgagttgccctgtgtatgagttgtcatgataaccttaggtttaacaacgaaatttatagttaaaaactttattggatacctaacaaaaaaaagtttttctcttagttattaagacaactataataccatgagaccagggatggcacggaatttcgatttccgaaaatttttggggcctcggaatgccatccctgccatggacacaaaatgtcatgggacgcgtaaaatgtcatgggacgcgtaaagtgttgttgggacgcgtaaaatgtcatgggacgcgtaaaatgtcatgggacgcgtaaaatgttatgggacgcgtaaaatgtcatgggacgcgtaaaatgttatgggacgcgtaaaatgttatgggacgcgtaaaatgttatgggacgcgtaaaatgtcatgggacgcgtaaaatgttatgggacgcgtaaaatgtcatgggacgcgtaaaatgttatgggacgcgtaaaatgtcatgggacgcgtaaaatgttatgggacgcgtaaaatgtcatgggacgcgtaaaatgttatgggacgcgtaaaatgttatgggacgcgtaaaatgttatgggacgcgtaaaatgttatgggacgcgtaaaatgtcatgggacgcgtaaaatgttatgggacgcgtaaaatgtcatgggacgcgtaaaatgttatgggacgcgtaaaatgtcatgggacgcgtaaaatgttatgggacgcgtaaaatgtcatgggacgcgtaaagtgttgttgggacgcgtaaaatgtcatgggacgcgtaaaatgtcatgggacgcgtaaaatgtcatgggacgcgtaaaatgttatgggacgcgtaaaatgttatgggacgcgtaaaatgttatgggacgcgtaaaatgtcatgggacgcgtaaagtgtcatgggacgcgtaaaaccgactagaaccaattttaattattttttcccttagacccacatcggaccaaact

SEQ ID NO: 31478 - DNA, 1267 bp, Heterodera glycines
aaaaattttcatttttcgggggggggggtggggaattgccccctaccccctctggtaacgcctgatttaaaccactaattgtcaccagtttccagcttctccactgtgctgaaaagaaaatttactttgcgaaaatctcaaagctcgaaccgaacacggtctttagtttccgagtcagagtgtgggggaaaaatgtgggtccgattggcattttggcaggcctaggcggtcttctctcagtgcgcactcatccaaagccaaagaagtagtaaatgtttttctgttgcctttttgatttgtttacattgtttttttaattctcattcgttcacattttttatttttcacttggtgtcgtcaaaaaatagaagggtttgcataaagcgaatgtttgttttgtgcatttaagaagaaatcggtacatttcggcactgtttattcactccgtttcaaaaattgggagataaaccaataaattgagagtgcagagaaaaatatctcattttggcgtactatttctttgtctccgttaatagggaaaaactgaatttacttctcaataaacacattttttctaccagttctatttagactaaatcttccatactttttgagaaaaaaattacgaaatttttgacgcttgactttgtttttttacgctccgatcttaagttattcaaaaaacaaaaatttcgaacgctcaaatctttttcttcagaccttttttttgctgatcgggccaacgttttttttctccagtgttatttggaaatttaaacgctggagagaaaccgggaaaatttttttgagattttggctatatatttaacagattttcaatcaaaaattattaattttacaaaaaaactcatttcttaccagtgcatttttactcccgttttttgggtaaaatttccgggagcgggatcgggagttgaaaatttaccgggacgggagtcccgaacgggaatcccgtaaaaatcccgctccctttaaaaatcccgttcaccgaaaaaagcgggagtcgggagcggagacaccagtaaaatcccgcgggagtcccgatcccgccggactctagaatttatattaaattcaaccacattaaatccatttttatctcaaatttcgtctatgtagaattttcaaaaaatttcccgcggcgcctatgggcaccgccggacccctttgttcctagttttttgaaaaaattgcgccgagaaaagcggttgtgaaaagcaaaaaatagtcaaatttatggacgatt

SEQ ID NO: 31479 - DNA, 1728 bp, Heterodera glycines
  unsure (1)..(1728): unsure at all n locations
aagatttaagttcatttcgggatgttgnaatttctgttcccatctcacccattttgtcaaaccaaatttttatatcaggctcttctaaaatttgaggattgttttctcgtagtgtgttagtttgggtttggatggaattcgatatattgttgatctgattaaaatgtctttctacgtctctcccggcgcgttctgcggccctctttgcgacatcaatttttgagtctttggtatcttcagccttggcttctctccttccacgttgttttttgattttgtaatgatgtgtgaatgcctcgttaattttatttcccaggcccccggcggttttaaaattcatgtccggtaaataaacttgagtcgggacactgctgtcgttttcccatactttaataaactcttgaccgtttataccgagtgcggtgaatgagtaggggtaaataattgatgagagagctactgaccaatttgtgcccaattcgagagtctcggggagtcgaactgtgaattttgatgtactgttccctggtcccggtgtgttcgagggtagtacaatgtaaaaatcatccatctattttcactaattcctggttataaaatatgccttttattaaatttccttccaaatcttcgatcctgtatgaatcgggtgtcgtcgaattggcaacaacgattttaaacaattcttcggtaaagtttgggaggtacccctttgaaaattttcccttttccttggtaatacgaacgatatcaccgattttaaattttttctttttcgaaattttaaattccttctccttatataatttttcccagagcgcacgggcattttcaaaattaattgaagacggtttggctcccagtgttctattcacactgttgttaatgtttgttattattttgtctattacgtcgacccatcgaagagtgtctttctttgtaaaatatctgtacaagcgctcctttattgtccgatttgccctttcaacgactccggcgtgcagatcaggactatacattacatttttgatgatgaatttttcctcaaaatattttttcatttttcttgcttggaattcaagcccactgtcactatatattttcatcgggataattttagacttttcgaacacccgatcaaaagcctcaatcatgtcctcactcttctttgacttggccggtgcactgaagatcattcgactcagcacgtcgatgcagaccaataaatatttataaccgtcgttatgctttttcaactggtcaaatatgcacaaatcgcactgccaatcggtatggaagccacttggtatcgtctttagtctcgggaatcttttcctgatgggcttgtgaatcgtgtatgttttctgcctttctaggaatttattaacgtcatcggtcgtaattttcgggtcaatctttttggcctcatttaaaattttttgaattccagcaaaacttgccggagattttaaattaaaataaattttcgataaaattttctctacagtcttgcccatattagtggtttgaagggtttcttctctcgcactatgccgggtgtttttatagattttattgcctttttccttccacgtccccacatgacctttgatttatcaaccatgtcttttactgttggatccttcagtaaccgatctttgagaaattttgcaccgcgcggcgtttcatctttcttccctgcgagatacaacaaaacatctctataat

SEQ ID NO: 31480 - DNA, 996 bp, Heterodera glycines
cccaaaaacgggggcccaaacgtcgggggcccaaacgcttttgtcgcaaccgctaattaactcttttaaatccaatttgcttaatttgtagctgaatttggggagtcgtcagctgctgccgatgtctgaacggaatgaatgaatgcgcggcggatcggataaagaagggccattaattgttgacaaattgcttttgttttttaaattatttattttttcagacctcttttcacagttatttttgttcgaccataattttgacagttatttgttattctttacaagaaaaattatacgttttttatacattttatgaatgggtagttttcacttcagatgaaatctgaatgaaaagaaaacttttgattttgtgggttttattcgaatttgttctttatgatactaccgttagaaaaattaaaagttcaatgccctgctataaattacatatgatatatggtggcactattatagaaattacggtaatgactagggctgggaattatatggaaatccatattttttttcctggactatgggaggtctgaaacgcacgaaaaacatgtttttagcttggtttgaagcttctaggaagactttccatatccatcaattcggaaaatttatatccatatttttgtaattttatgtccatatttcgcgatttttggtccatattttatagaatttgaaagcatacaaaatttgtccaaaaacagccaaatttaacaaaaagtgaaatcgtggcggatttattaaagcactagcacctccatcaatccctttcccagagaaatttttgaatttaatttttggttttaatttttgctatattgtaaaataaaggaaaattttaatttttatcatattgaaaaaaacatttaaaatagaaaataatttgaaataatcaataaaaggcgaaaaattttcttattaacgtcatcaaatttatagattaaaccattttaataatatattaatattaaacattaaaca

SEQ ID NO: 31481 - DNA, 1478 bp, Heterodera glycines
aggcattgcaaacaaatgcaaaattggtcatgaaacgctgtgcaacaaaacctcagttggccaatgttcttcagacgctgatttatgctatgcaatcaaatgcgatgacagttaatctgccaaataataatttgtttcattcagaattcggtcaaaatccctttttttgtctaaaggtaatcagccaaacaaatttgtccaagagtggggctgtacttcgagcttttcaaatgtttccaagttttgcatggataaagctgctcaacttggtttcggatctgaccagcgtttgtgcaaatgtcatttaaaaccaccaaacaaatcgcacaaaatcagtgcttctggtaatgcataggatttttagtggttaaaaatagtttttcttaagtaattttagggatgtaattttttaaatagctgttttttaatttgcaaataattttaaacttaagcaaacaattttattcactgattccagttactttttaggttttttattccattttttgggaaattttccaaaaaataccaaaatagtggagaaacgcaaaaatagtggcaaaaaactattttagtggccaacatccaaaataattttttttaatggcaaagctccaaaatagtgattcctagtgatgaatagtggcgttaaaacgaagaatttccgagctaaaattatgtttttcgtgcatttctcgtcgaaataaagccgcagaaaaaatagttaaaaaactaaaaatccccaccctagctataatataaaagcattttttaaaaatggttaatttttgtgatttagccacacatttgctgaatttaaatattttccaaaaattaacatgcatataataaaatttcagttagaataagctcaagaaaattcgggtgttcttatatattcgaaacacattttatttgaccgagaccgattgacttaacgaaaattttgaaaaacaaaactaattaaatttaatatttcgaataaaataattgaaagagttaattaattctgttaataaaggccaagatgaagccattgacaattaattggcttgaaaacggaacaaaaagcacaatcgcaacttaagaggttttggcttttcattttgtgtaacttttaaaataatgaatttaagtatttatatccttgatgaaaaatgttgccgaagaacatcctataaatgatgtctttttattttaaagataaaagctaattaatattttactttttatttggtaaatttttcaatttttcaattgcaataaatgtgcaatttttagttttgttatcttgaaattatatttatttactattaacaataatctcaaaaaatcaaaaatatgggcctttttaaatggagttttttaaaatccaaaaattaaaggaaaattaaattgattttataacgctaaaaatattcaaattgaaaattataaatgctaaaatctttataagaaataatttataaatggatata

SEQ ID NO: 31482 - DNA, 1023 bp, Heterodera glycines
tggggtactcaaaccattttggggagcaaaatgtgcaccgcagaagtaaagtccaggttaaagggaaagtacttcggaagggatccgtctccccaataaatctgggcccatcgggttgggggggactccccaaaaaaaaaaaaaatcgattttttcaagtgtccgtttggggtactcaaacaattatggggagcaaaaatccatcgcagaattaaagtacaggctatagggaagctattccggaaggattcggtctccccataaatctgggcgcatcggttcggggggcctgccccgaaaaaaaaaaaatcgattttttcaagtgtccgtttggggtactcaaacaattatggggagcaaaaatccaacgcagaattaaagtacaggctatagggaagctactcccgaaggattcggtctccccataaatctgggcgcatcggttcggggggactgccccgaaaacaaaaaaatcgattttttcaagtgtccgtttggggtactcaaacaattatggggagcaaaaatccaacgcagaattaaagtacaggctatagggaagctattcccgaaggattcggtctccccataaatctgggcgcatcggttcggggggactgccccgaaaacaaaaaaatcgattttttcaagtgtccgtttggggtactcaaacaattatggggagcaaaaatccaacgcagaattaaagtacaggctatagggaagctattcccgaaggattcggtctccccataaatctgggcgcatcggttcggggggactgccccgaaaacaaaaaaaatcgattttttcaagtgtccgtttggggtactcaaacaattatggggagcaaaaatccaacgcagaattaaagtacaggctatagggaagctactcccgaaggattcggtctccccataaatctgggcacatcggttcggggggactgccccgaaaacaaaaaaatcgattttttcaaaaggccgtttggggtactcaatacagattatggggagctaaaaa

SEQ ID NO: 31483 - DNA, 1211 bp, Heterodera glycines
  unsure (1)..(1211): unsure at all n locations
ttttgattttgaaaaatttttgaatctagatccaaataaaaaatcattcgccagagtcaagatgttttaatttaactggagttacctttccgaattttcttcctcaaggttattgtttcccccgtccatgtttaatgccaaagcattttggaattcatcgtacggaacgacgtcttgatttggcctccagacattgtcagtttcaccttcctggtattctccattggtattcgcctaaaaatagagtttagttttaagaattagtttttctcgcgtcggcacaatgtgagaaaatgctctgcaaaaaatgctctgttaaatatttaaaatcaccgcttgaattaaaaatcacaaaaaaattatttttagtaaaaatctattaacaaattgtattttttccatcccaaaatctttattttctataaaattttcaaaattgaagaattcgtctttcttttttaaatttgccaaaaaaatcgaattgacccttcataaaaacaggcagttgacctgcttcttaccgaatcaattgtgatgttctcaccaacaacaaggtccgaaattgtgtccataaaattttcgacttcttcgttctctccattgcgaatttgttcggaacaaatatttttatagggagctattttaattttgtttaacatattctaaataaaattttaattgtttcggcattttaaataaaatatttgtaagcatttaaaacgggtaaaatttccaaaaaatatcaaatcaataaatgattgctgcgcaaaattaaaacgaaaaggcaaattagcaggatgggggggggggggggagaaccaacaccatatacgcaacaaaggaaagattgtgttgcgaattgttttgcaaagttttggcgttctgattactaaataaataataaacttatttcactgggagcccaaaattgaatcgtcgtatggtcacattaattttgtaaaatgaattggcattaaatggttcaggcaaagggttgaggtcggaaaccaattaataaggccacaatacaaaattttgaagccttttacacttgcattttgcttttcaaagttttcaatcgaaaattgagcgtgtcggttttccactacggcgtcacaccaacattgtaaagtgccgagaaattttcggcggcgtcttccaaantattctctaagggtcttcggggtaacggagtgcgccgctttggccaa

SEQ ID NO: 31484 - DNA, 1161 bp, Heterodera glycines
  unsure (1)..(1161): unsure at all n locations
ccggcttctcaggtcccggcaagtcccggtcccggtcctccccagaattcccggtcccgtggcactctaaaaaaaatcctcatttacctatcaaaaagccacaaatgaggataaatcctcagatctggcaaccctgcctatgatggatttgtgtttttttttgagttaattgttaaacgatttaataaagtggtggccggtcggtaggggtcaactccgtctcaacaatgttcaaaaagctaacttttttatttgtaggccaaacttaacaagcatggtaccattcgaaagccctggatgtttagaagataattcggtacttttccgttttgaggccaatgtttgaattttttttttaatcaacaacttgcgtgtagaattgctaaagctacgcgccaaaattattgcggaggcatatcaaaaacaaaaagttgtattgactcaaatttggttcattctaaatagattaagctttcgaatgataccaagattgttggatttggttaacaacaaaaaagttatagtccgaaaacttgggctggcgccaaaacgatacagacccccggtacggatggtcaaaagcaccgtcgagaaaatttttacaaatttggatgaaatttgcgatgaaaatatttattgaatgaggatatataattcgagaaaataaatttgcggatcccacgcgggattggaattggaactaaaattttttctgcattttccaaaaaattttgaattgcggaatgggacccctcataggacccttcccccggtctttgccgggaaaaaatctaaaattttttaatgaaatttgttaacagattatgtccaaaaaatcaactatcattggttaatttgtgaatttatggctgttttaaaaataaattaaaataatttttaaaagtttaccactaatttttcactcaaacccccattcttaccannnntnnnncccccacaaaaaaatcccccnntcccngattcaatttccccccgtcccaaatcncccaaaaaaaaaatcncgntcgcncatnttttccaattttttaaaccatttttaccnttttttaaaatttatgcttatataaaaaattaattaaaatcccgnatgccctgtggtgagggaagggactgaatgggtgtagggagggggggggtaat

SEQ ID NO: 31485 - DNA, 1468 bp, Heterodera glycines
atctaattaaaaacattaagcaattttcataatcgcaattttattattaaatattattattttttagaattattttttattttttgaaattattcttgaaaaaaaggttttaattgcatgaatcatctccgtaaaatatttaggccccgactgtcaaagtttcatcaccgaaactctgttcgatgtgtaccaaaaattcaagacgcacttgcgaattgaatttgtcccatttggcaatgcgaaagtgttggaggtgaacagctgagaacaaatggaaaaaaataaaatgaatattttacgtttttagaatggcacaatcaaatgccaacatgggcctgaagagtgtcggatcaacaaatttcatgttgctttattttattgaaactaatacattctcagaaggggtccgattttatgtaagaaaatcgtaatagcaatatattggcatgccaaaaaaagacataatttgcttgtaactttttttatttgtttttttttcaaaaatatttttgatatccgttaaaaaatttttgaagagtgcctttgttcaaaaattttttggttttcataaaaaatctcgaaaaattctataaacacaactaggtcaaggatttttagatctttctttacctgcctaaaatttaattttatccaaaatagaaaatattttgtacttgcactttttttggcacttctccagccatcccgacaaattttgtcgtgaatttcctccccgacttttctctttctgaggggcggggagaaccctaatttaaagcatgaagattctgaacaaacaaaatatttcatcaaaattggatcccgagttaaaattacacaaagagctaattaaacacttatcactgtagtcgtgtgccattcacttcatgcacgacccaatgccattcatttactgccttgaaaagctgatcagttcaggcattccgctggagaaagcatccaaaaaatgctatgtcaaattgcatccaatcccgcacatttacgaccaaattacgtgagcaaatggagctttacccattaaatcaactatttttgaaattagaaaagtatatttatagttttcatggtataattcgagaatcttaattcttctttattaacatttaatccaataaaaaaatttctcattcggctttgaaaaagttatgaaagcgcgtcattaaataatctataagttaaattaatgtattaattttacttaaaatatgatcaacaattacggcttgttctgttaatgccatttgtgtttttagtcactgtttcaatgggccgaccggcgatcgacttcagagggaagccggtcgtcggacggcacagatttggcctgatcaggtaaaaatgaaattaaataattataaataattatttttgcctattagcatgaatatgtgccatggattttggtgaacaatgccagtctgcaagcgactcaatttttgatgaacgg

SEQ ID NO: 31486 - DNA, 1009 bp, Heterodera glycines
ttaatatgatcggaaaattgtaatttgttatcaatgtttactcctaaatccctaattgtatccacagcatttattgtatttccatcaaattcatatgtttcttttgggttttttgaacccaaatataatacaaaagttttttgcattgaaacttttatttgccatttatttgcccattcgaataaattatgcaatgctttatgcataatttctgtgtcggttcttgctttataacaaatatataatttaacatcatcagcatataattttattttcactcctgatggcaaagcatcaggaagatcgttaatataaatcaaaaataataaagggcccaggacagagccctgggggacgccagaggtaacttttttacttgaggataaagaatccccaattttaactcgaaaagtcctattactcaaaaagccctttatccacattaaaagtttgccctttatacctattttttccaatttgtataaaagtaattcatggggcactgagtcaaatgcttttgaaaatcaatataaatacagtcaacattttttccatttataattgcctcgtaccaatcttccacaactgttattagttgacttgtcgtagacctatttctaacaaaaccaaattggtattccgaaattttattgttttttaggagaaagttgtaaatattttggctaagaattctttccataaccctgcaaagtgagcaggttatagaaataggcctataattttcaggattaaatttgtccccttttttgaaaagaggaaaaactattgattccttccagatatctggaagagaaccagagtctaatgaaatcctgaataggtcagtaataacagttgctaatgaagaatggcagtttttcaatattttatagctaatattatccggggaggtcccgtttttattcggaagttttttcaaaagtttttgtgtctcgatgatgttaaagtctatatctgatataaaacattgattaacaaaagtattgcc

SEQ ID NO: 31487 - DNA, 1131 bp, Heterodera glycines
  unsure (1)..(1131): unsure at all n locations
aagggaatnatnaaannaanatattttttttaatntttgntnaaattangtttggtcttgggaaattggnagtaaaanannaaaattattatttattgaattattgtntgatttnttgtnaattaattgagtttgattttngaaaaananagtgtaagggaaatntgaattttgtatggttatgtgganaatatttatgataataataattaggttattaaatattttgggagttggatttgtgaaaaaaattagaattttattaattgaaattgaaatttaattaatttaagaaatgaaatttatttttaatgggaganaaaattgttaattaatatgagaagaagnaattaaaattgaaagtgaagtaattagaaaaaattgtatatttgagaaagattttattttgaggttgaatttttgagtaaattttatgttgttagggtatttatgaagcttttttccattgttttagtaattgaattttaaaaagcaaaaaatagtagaaaatgtcaaaattgggcgtcgtttaagaaatgcgtaattcaatgccttactcgtataatgggattaaaaaggtcggcaaatatttttcaacaaaaccattctgtccaattagcaaacccagacgaattgccaatgcgaaaagtatttcgaacagtgccgaattaagcagcggcgcaatgcaaaacgaaggcttttcgcaaatgaaattgtcatctgccgacacaacactttgaattgcttttacaaaattaacttcatcattgaaaatctcctctgtcatttcactttttgcaaaaaaatttattaattaaaatataaaaacacaaaattaaatgttattgtttctaaatataattatattttaaatttaaatgaattttcggcacttttttctgtggtgttaggtcgaaccgaaaatagtctcaatgtcgataaatatttaaatttaatcatttcggttcaactttttcggagatcgaatgcttttatagtattattttttagtttatttttaaaaataattgtctaattaaattaatattttttcgagaccgacttgaattgtaaattaaatttaaatatttttattgacactgagactattttttcgattcgtctcagcac

SEQ ID NO: 31488 - DNA, 1012 bp, Heterodera glycines
  unsure (1)..(1012): unsure at all n locations
cagtatagtatcttcgtaatcatttacacaaaatactccacaatgcgagaattgttgtctgtttatactacgaccgtttcncatgtaggatagcgcttccgtcctcctnacgtcacgcctgccgcggcagtatctgaaaacatttgtctgggtccgatcccngcctcaacctttgttacttacaaatctaatttggttgcagtccttgtttcttctacaagccacagcatgccctgcctcgtggaatgaaactcggtgaatttcacttacgatctctccctgcatctaaatgccgtcacgatttttttctgaaacatacataaagtttgaaactatttcaacggttaaaattttgactcgttgaattgcttcctcgatgtactgttgaattcgtctttggatttcgggatcggcaagcctctcctttgaacacactccttttccgaggacaagttgcacaatttccaatccatcttcttcgattgcgcagacctagttacgaaaaatttaacgaattgaaaaaggtttttacgataaattccgctgcacgacgagcaaagtgcatgtcgcactccattccaggtacaaacggggccgcgaaaaacaacaattcagcggcggttgatccttacaggaaataacttcagtataagtcggtaaatcatttaccaacaaaatactccacaattgcgagaatttgttgtctgttgtagctttcacggcctactacgaccgttttcccattgtagggatagcgctttccgtcctcctttacgtcaacgcctgccgcggcagttatctgaaaaacatttgtctgggtccgatccccgcctcaacctttgttacttacaaatctaatttggttgcagtccttgtttcttctacaagccacagcatgccctgcctcgtggaatgaaactcggtgaatttcacttacgatgtctccctgcatctaaatgccgtcacgatttttttctaaaagatacataaagtttgaaactatttcaacggt

SEQ ID NO: 31489 - DNA, 1549 bp, Heterodera glycines
tgatcagaggagaccgacggggggaggatacgaattgaagggaccgcccctttttgccgcaggaacatttgttaatgatagattagggagaacaattaaatgtgttaaatgagtaaattattgtatctcactgcctttaagaaccgccatcgaatagtttccagaaaggttaaaatgttcaaattatttaaaataaacttttttaagatcacaaaatttatctccaaaacccattttatcaatcttgaaaaaattaaaatggaatcccaacaatttgtggaacttacgaggcaatttgttgaaactaaaatgtttcaattcgagacgttttaaatgcagaccaaagtggtttcgagctcgaattgcaccagaaaagatcactggcaccaattggaacaaaattggttgaatgtgtagtccaatcggtagctagcactacccacagttatacaattatgccaattatcactgcaaatggtttattgttgtcaccattgtttattgtaatagcagagcggaatggaaaatttccccaaaaaggcatttttcaggttaaaaatatatttttagaaaataatagtaaaaatatttgatttatcaaaattaatattaaggctaaaaatgtttatgcggtacccaatacttcccatattatgacaaaaaatttaatggtcgaatgggtcaacaccgtcttatgtccagtgttgcgacctggagaaagatcggtgttgttggtcgatagttggaacggttggaatgaatttcggctcccacaaaatgtccaactacaagtcaaacaaatcccaaaacacgggactggattttcccaaccattggacgtttatgtttttcggtactaaagtcggggtagtaaaaaatccatcaaatatttttagaatttggaagcaattcacaagaagaataacggaatttgttatggtttacgacattaaccaaacgcacaacctccgcaccaccgaacaacacaaaacggtgcaaatgtttattcgatttattgggatagaaaaaagtttggcacgtcatatctcggcactcgtactcatttcgcagaaaataaaaccacttttcttaagaacccatgggtgttctatgcacccaccaaatttcattccgaaactccacggacacctccagaccttcctttgtgagcatttattggcaaataaaaagtgaaaatccaaaaatgagtgataataaaattgcaaaaatattgaaaattcatctaaagagcattttcaattggaagaaacaatttggagaagaaatactttgaaccattcttaattccaccaaaaagtaataaaatttaaaaataaatatattttaattgtataaattcgagtacatttaaattattgattactttctatagctgaaggtatttcatctctttaattttttaatttttttatgaaaagaataaaaaatatgcattaaaatcttaaaaaccctcaaatggtcatattaatgcaaaattgaaataaacatttataaaaaaaaaaattaaaatttgataaaaaaaatttaa

SEQ ID NO: 31490 - DNA, 1096 bp, Heterodera glycines
ccatatttccttccgcaatcgaacgaaatacgctcggtccgaccccttcttcccattccaaaaccccaaaaagtacgactccatccgcacaatggcaattagcgaattgtcgtaatggcactgctaccgctggttacggtcgtggcggttacggtaaacaatatgtgccatcaccgccgatgcgtgtcattcgaaaagaattcgccttgtggattgattgactccctacgctgatcgctatttttttttttgaactttctgccccatcaaactgatttttaatggattttaagcgcctcaatgtgggcaattggggtgccctttacgacgaataatatatattttttgcgatctttggcatttaatttttttaataaaaagtcatgatggcccggtccgaaaaataggattggtttcccggagaacggaagttttagaccattagtcccggtccatcgtcaaatgccggtcccggctatttcaatattatgagctgtttaccaccataaaattttaaaaatttagggattatatcaggaaattaaatattgtgatacaattataagctcaatttcatttatcactatttaatttgtatttgtgaaagcgtaaaaaaatataaagtcaaaagaggaaatttaaaagttccaattaataatataagaaactttggttggaatttcaggtaaaaataaatttgagggcgggagggggagggggggggggagagtactagagaccggcggagatcagagttctgtcggatttattggctaaacagaattagattaagtaaggaagacatgtgtccccgaaccaatttccaagtcatcccaagtttttgcaaaaaccggtctctaggtggtacaatcacaattctgttaaaaatttaaaaatattaaaaatatggcggtctgtgcaccgcacgtccctctctctcgtcaaaaatcagtgtcagtatcttccgccggtcatttcgttcaccgcatgcgccgcagccgcacgcgccgcttggttggcagcctaaaaggagaataaataaatcgtcacggagaaaggacactgacataataatatcagagaacgactacggtaa

SEQ ID NO: 31491 - DNA, 1173 bp, Heterodera glycines
  unsure (1)..(1173): unsure at all n locations
tttttgagtcatccatttgctggttttttgagtattacatcatagcatctttttgagtatgaattttaaaaatgaaaaagtaaagtccaattggacagttttgttgctcacatcatctcacgtataaatgttttgtatttgtaaagcactatcgtacaaagtgattcacattttttaaatattttatttggatntatttcttaatttccttttcaattccaaaaataaaataataaaactaattatttatttaattgacatcatttaggtataattttcggattaaatttacattaatcaccacaatttccgctctccctaacggtggtcctaaattgcgtccatttccgccattttcccgatgcccaataaagccttcttggccaaccacccaacccccacatttccgatgggaaattgagccaataatgaaagtgcaaactcatcccaaccaacatacattgagaaggaattaatttgaataaaaagcgaaaaattattttaagaaaatccattggcgtgttcaattagcagagaaacaatttttaattaaattacgtttaattggtctaaacattctttataataaaaagattcctataacaaaaagcagaaaaagtattattattttttgttaatttacgcaaaaatcaacgaatacgtgcccagccaaaacttggtaaaattggcaaattagtgacaaaaaggtgaatttttggtattttattttatctgaatcctgcaaaatgagtttatttaaaatttgtcacgctatttaaaaaaaaatgtaaatagattctttacagtatctgttcatcagtgagtgtcaatcgacggtaataatgatgattacggtggagaaagttgttggtgccggcggtagcggcactattgttggcgctgccagtgtagatggttcaccagcacgacgggtggataaacaggagctgaacagggcgtacaaaatgatgctgcaccaacgacgggacgccgtctcaggacagtctggcaatgaggcaatgctgcgcagcacatcgccagcaacaaaaggcggcacaaacagttcgatggggttgacattggcatcggaggatgagcaaaagcagcacaaagaagtgggtgaattgatgactggtcctaatggtgaaccaaattaactaatagtgtcaaggt

SEQ ID NO: 31492 - DNA, 1146 bp, Heterodera glycines
  unsure (1)..(1146): unsure at all n locations
aaaaaattttgaagaggctctccggaacggattagcatcggggttacgagatagaaaatgntcctaaaaagagatagccatttttctgagaattaattcacaaatttccgcagctcttagggtaatggaaaaaattttgaagaggctctccggaacggattagcatcggggttacgagatagaaaattgtcctaaaaagagatagccatttttctgagaattaatcacaatttccgcagctcttagggtatggaaaaaatttgaagaggctctccggaacggattagcatcgggcttacgagatagaaaattgtcctaaaaagagatagccatttttctgagaattaattcacaatttccgcagctcttacggtaatggaaaaaattttgaagaggctctccggaacggattagcatcggggttacgagatagaaaattgtcctaaaaagagatagccatttttctgagaattaattcacaatttccgcagctcttagggtaatggaaaaaattttgaagaggctctccggaacggattagcatcggggttacgagatagaaaattgtcctaaaaagagatagccatttttctgagaattaattcacaatttccgcagctcttagggtaatggaaaaaattttgaagaggctctccggaacggattagcatcggggttacgagatagaaaattgtcctaaaaagagatagccatttttctgagaattaattcacaatttccgcagctcttagggtaatggaaaaaattttgaagaggctctccggaacggattagcatcggggttacgagatagaaaattgtcctaaaaagagatagccatttttctgagaattaattcacaatttccgcagctcttagggtaatggaaaaaattttgaagaggctctccggaacggattagcatcggggttacgagatagaaaattgtcctaaaaagagatagccatttttctgagaattaattcacaatttccgcagctcttagggtaatggaaaaaattttgaagaggctctccggaacggattagcatcggggttacgagatagaaaattgtcctaaaaagagatagccatttttctgagaattaattcacacatttccgcagctcttagggtaatgaaaaa

SEQ ID NO: 31493 - DNA, 1485 bp, Heterodera glycines
aatttcgacttttttgcaatttcatgttataacctctctttgccccccccctaatcgcgaagaaatatcttagaaatatcttctccccatgttaagctttcgaatgataccaagattttgatttggttaacaaaaaaaatgttatagccgaaaacttgggctggcgccaaaacgtcggcgccaaaacgatacggacgcgaataaaacatatatgaaaaatgcttctttttgaccaattaatagaataagaaatgagcaaaatgttaggcctcgggtgggaatcgaacccactcgtccaccaaattcgtgcgctcatctaccaatgagctaccgatggcacttccgccctttctttgtttcttatcaacccccgaatggcacagagtagtgataaaatcatttattaactaaatcagaaattcttattcataatacgaaagctcttaatgaccttgcatcccacaaaactcaaaaaaaaaatttgctcttttaaaaattcaaaaattcttattttttgatcaattaacaaattatgctgtccactaccaccactatctcggtcaatgcttcaccggcgcttctcttaaaagattcgtccgctttctccactgtttcgccgcttctctcaaatgcttcatccgttgtggtcgcgtccgcttttgtccgtctgttcggctccgtctcatacgctctgttgtcctcaatgtcaattttgctgaattggctgctaatcaccgttctatgctatgtgaggatttttacggctaatttacttccaattgaaaaatggaggcagaaagtgccatgcatttttgagagggatggaaccatttttctaagccgtttgtttgttgaattttaactgggttttaggagtaagcgttaggatgcttatataccagggatgggccgaggtttcgcttttcgcatttcgcctttcgcattattcgcattttttggcgtttcgcatttcgcatttcgctttttggcgcgaaaagcgacttttacacccctaagaattggattaaattcccataaaatttttcaaaattttacctataaattggctaattttcagtgaaaaactgtttataaatgatcaaaatttccaattttttccccgtcggcgcctatcggcaccgccgcgcccccaaaactcctatttttttcttagaaaatggccaaaatcacaaaatttggtaatttgatgaaaaactgttctcagcggcgcgccaaaactcttatttctcattagaaaaatgataaaaatcacaaaatttgatcattttttagtgaaaatctgtcaacaaattttaatcaaattttcaaaaattttcccggcggcgcctgccggcgccgcctgctggcgccgcctgctccctcttcccaaaaagtttttttggaaaaagcgcgcctcaaaaaagcgttttattgatttttaaatttggaataaaattttaaaaaatgatttttgctttatgattt

SEQ ID NO: 31494 - DNA, 993 bp, Heterodera glycines
  unsure (1)..(993): unsure at all n locations
tgtaatcgctgctcattaaatgcaaaaattatttcaatntatttttcaaaaaaacatcgatttacgacaattttaaaacaatttcataaattattttaaatttaattattttcaattttaaaaggaaaaaagaaaatgcaaaactaatgaaaaaggaatcgcttaaatccgccggagaaaaatctaaaaggaaatcatttgaccttgaacaagtaacccatttgccaccatcgaaagcatcgcattaattaactaattaattacggacggacggggttttaaatccaaacggacaaagggaagaaagaaatgaacttttacacgtcattccatccatcccccggtgattacagtaaagcatattcatatggtggcatttcttttaccattttttgtaccgtacattccccacaaaccaccgcggattaaaaaatgatttttaaatattttaaataaattattattatttaattgctttttccgctgaaaatggcggacaaagggccaccgcagcaaaatgagcagaacgacacaaaaaggtcaattcaaatgtgcgccattttaaacagactcaaaaaattcttctgctgcagcagacgacgactgcccaacgaacttttggccgaattgtgccattcggtggtccctcggcttggcatttgggacgacgcgggacagtcgcccccgcggcacaatgccaacattttgaccgcgtcggcggcactgtgcgttttcttacggcacaaattccggcagaggaaaggtccaaaaacacaagacgaattggatgatttactaccaaaattggaatttagcaattgaaattgaacagcgcgaaaagtgttgccaaatctgtgcccaattagcctggggcgcctacaaattggggccaatcggaaagatttgcatcggatgcaaagtaaaaatgggatttaacaaaaagatggctgaatgaattttgcaattagttaattaattgttgtgtcctctcaa

SEQ ID NO: 31495 - DNA, 2000 bp, Heterodera glycines
  unsure (1)..(2000): unsure at all n locations
tccctttccaggccttaactgccccgtggttggtgccatactagtttctcgaaggcacanncctcaagnggcgacacaggggttcttagacggcaatttcgcccaatgcaatggcggcactgtcgctgcgcaaaaatgacgtgcgcaagctgccgatgtttctgcaccgtgccgaggtgcacatcccgtggacaagggccagcgacggcaccgtcaactcatttcacatgatccgtgccgaaatgccacccttttttgtgcatgcgctgaagaagcttcatctgctcaagaaatgagaaggatggcactgttgctgtttcactttttgctcaaatatttaatttttgaaattttatttttcattaaaaatattgttacgcttacaaaatgtatttctcaaatttttaaatttgccatcacttttctggcattcttacgccgtttggccacacaatttccatgagaaatcaaatttaagcgcacgttttgtgtgctgctgatcacgaattaattcggaatccatggcgacccatcattacgagcccctaaccgccgaactcgaacaaaaaaccgaaaatcccaattttttcaaatatttgagcatttgtctgaattcggattcgtaatgggtcgcaacagctgtcgaattcgtgaccaacaactgctctcaaaatcacctacaaaccgaaattttttatggaaatttgtggggcctagacggtataaaaacacccattttctttggcattttcccaatttttgctggacaaatgtcaatttgcgttgatttgcgtctgtcttctgcggatttgccggtttgtggtcggcatcggcgtgtgccgtcccgcactctgctgttcttctgctcatttttgaggcactgaacttttggactcgactccgttgggtgacacttttgcgccgacggttggccatcgtcgacggatctgtgagcagttttttcgatggcatttgtgtggatatcatttcggattttcgcacattttggaactctgctagaatttcggacacccttgaaaaaatttccgaaattttgaggcttaaaatttgatatgcaacgggacggatgtgatatgattaattacaattaatgtctttcccctcccctcacttttgggcctcatttgtgcgcctttcccttcgccgtcggcggccgacatcaaagaaagcgacggactttcacattgacacgcgctggtgataattgcgtttattcgccgtttaaaaatatttaaaaaatgtgcctctaactgttttttatttgcgcgtttaatgacttttggcttttttaattgcctaaaaacagggaagaggatggaagcgcaattccacttctctaaaatctcgggatcagatttcgaggctcagaaaaggaatttggagttgatatatctgggtcatcccccccaaactaatttttttaaattattaaaaagaaattttaaaaaacgatttttttaaaaatttattatgacgaatttgtaaaatttttccaaaatttttcaaaaaatcgccgaaaataaaaaccgggcttggcagccttctccgaatacgtaaaatatccctggccatgggtggcaccactggcaaacacacaggcaattattaaaaagtatttcctttaattacatttttcagggactcccgactctcggcactcgtacaaaagggtaagcaaacaaaacaaattttgccacaatttcccaatttccccctcatttacagttctgcatgtcgagaccggtccgttgttattcttgagcatcgcctatctttatgtacttacattatctatcttttcaccctttcttaagagctttggcgcctttcaacgcttggcggcgctgtgtccgcaatgggctttttcagtcggaaatttgtaataaattacattntttttantttngnnggtnggtcgggattctgcganttggctggactggtgccaaaatcccgacttttttcatttacatcatcca

SEQ ID NO: 31496 - DNA, 1763 bp, Heterodera glycines
  unsure (1)..(1763): unsure at all n locations
gggggcagcattgcgaggcgtcactccgttgacgaacggagtgacctgatgggggggggggggagaggaaggtantaatgacaatggaacattccatcccttttttcatcttttttttctgtttctaaattttttccccttccccaatttttgttttttatatcatcaattttagaatgcctaaaattgatgatattgctaagtgtttgcatttgcgacataagcgcgccgcctttcaaagtgcggtcttattactaacagaaaaagcgagttttttaaatgtttttttctctattaatttaaaaaacttttcagccgtcaacttttctgccagaccaacgcgcggacgaaacacaacagcagcaacagttgacgcaacatcagctgcaacagttgatgaacgacatcgctgattggcttggactgtatgagcagctgcctcaagagacggaaaagacaaaaacggaaatgttcaacacattggtcaacagaaatggtcaacaggtgggcagatgactcgggaggggtggcaattaaatgcttggtgatgggtgggacatttgttcattaaccaaaaacaaaaaataatactaacccatagaattagccgcacaatttcgttttttcccttttattttcataaacatttctctcttattcacaggtcgatcagtcggaacagacaacctcgtcgctcattcactcgtccgttttgcgcgagctggcaaatgcaaagcggtgcgaagaaaatgaacgtgtaagtataaatttaacggatcgatcgggagggggggagggagtcaaaagatgtgaaaaatacaaattaaatgaacaaatttcctttttttatttattttttaaagctggtgcgcgttgtgattgacgaagacgagtcagcagatgatcaaccaccgacaacttgcagcgttgggacacagacaaagatgagttttgcgaataaataaaaataaaataattttaaaatagtagtgttcaggcactcctaaattaattttaaaaaatataaaagttgagtgctcaggcactcctaagcgaacacggacaaacagacagaaaacaattgctcgcttacgaaaagaagagatttgcaacgcaaattttttctttaaaagataaactttgtttttgtttttaattcaacaaatttgtcaaataaaaatggattaaaatgattgaattcaagttcataaaaaacatttacgggtataatgacggaccttttatttaactaatatttatcctatcaattcaattattctcttccccaaagggtggaacagttccgatccatatgaattggatagagtttctgataaactccgtaggtttgaacatctttgatcataccccacattgtcacaaggaaatttaattaaataaaattaaaaattaaattcaaatacaaatgaaaataaagtagaaaacaaggtttattgaattcatatagccataacgtttttgaaacttaatgaaattttctgagattttgttgcaaacttgtagagcatatttagtgctatcgaattatatgaataataaaaaattggttgcttttaagccaagttataaataatttatcataaaatcataatgatggttttttaaataacgacctagcaccctttgaaacttcaaatttaaataatgtaataaaaaatcattatatccaaataaaaacttcaattttctttattaaaacagcacaaaaaagtgagatcgtttaaaaaatgtatgttttttag

SEQ ID NO: 31497 - DNA, 2028 bp, Heterodera glycines
aaataattaataattaaaacggattttaaagtttaccgttcagtgattgctcgcctttttgtcgtgtaaaaggtcaattagaagcttcaaatgctcaaaagttactggtgcttcaatgctaatttcatgttgatgatcaacggcagaaattttgttcagctcactttcgctgaagaataatgtacggaagaacggagaatgaagtgccaaaagctgcaaattgaaaggatcaatgaaggaataggatgccaaaattaattgtcaaatgaatgaatggagtgccaagaattggccctataatatatccaaatttaatttttttttttttttaatcaaatttaaacaataaaaaacaaacatttttatcaacattaatatgttttggtgaacaagtttcattttccttcacaaataatacaccgaactgaggaggaggaagagaaaaactgaaaagcgaagaaaaaaacacaaaaaaggactgtgctatttaaacataaaaaattaaatttaataattaagttaattattaattttatttaacctaagtaaatagggttttattaacctatctgagaccaaacaagtatctggcattatatcgatgtttatcattatgggatcattataatgtgctccgcaaatattcatcacattctttaatatgaaatttttagcattaaaatagaagcacaaaaaacaccttttcaaataaattaagcgtaaaaaatacctcaaattcgacgtcgataaaattacccctttgaatttgattgaaattaactgctttaaacttatgtgtaactgcttgcgcttcaccaattttgatgtgcatttctgcgcttgccatacaactccaatttggcactcaatttttgttggaaattattttaaaaaattaacaattttaaatcgcagggattggcaaacgacataaaaggaaaacaaattttataaatcaaaaaacaaaaaaaaatagtgtacaaaaagtgatcataatatgtaaataaatatattaaaaaaaaatcccgaaatatgtaggaaacatgtacaaaatccaaactttgtacgaaaatatgaaatagaattttgtaaatggttttttaaaaattcttcataaaggatgaaattggcataaattgtcataaaaatgacctaaataggcagagaatcacatttagtattttatggagtacatttcaaaaaaaataaaataaataaaatatttttcactataaaatttcaaaaattctcaaaatgtacggataatgccgaaattttggatttttttcgactttcaaaaactttcgtaaaaaatccaaaaaatatgtaaaaaaaaaatgaatatgtaagaaaaaagtccaaaatatataacaaatatgaaaaaacctcgaaatatgtaaataagtccgatttttgttcgcaaacacaaaaaggaaagtgtagaacataaaaggtaactcgcccggtgggactcgaacccacgacctcagcaatccgtgccgtgctctaaccaactgagctacgggcgcctcttttagaggttctctcaggtcctttatcccactttctcccacactccgttccttctggcatcacattccgcctccctcggaagaccggtccctcgggctctccttggcccttcaccgacggacttggactctccttggtccagtggtcccggcagtgtggaggggatccacccaggagcgccaaatagtaaaacttctcgccgttcggtgctgttcgctgcttatttgccttagattaattagggcaggggcacgggaacagtctttaattaggacaggagagattggggacaatattattattagggactttgaccaattcgttcggcttctttccaattatgccgactcagtcaattcgcaataaatgcaattgactgcacaattaaaacacaaacaaaattattccacagcacacaaatatccgcaattaccacgaatcattattaaaacaaattactacaattaacgacttaaaaaaacgcaaatgaaaaag

SEQ ID NO: 31498 - DNA, 1362 bp, Heterodera glycines
tttgaatacggattcagtcagagaaattggaactcccattttatttaatttgaacatcaaaatttttgtgaattccaaaatcaaattcccccaacgaattcacaaattatcccaagtcgaaattgccaaaatgaattttatccagttcggaaaattcaaagtgaaagttttccaaatcgggcggaacacggaaactggaaagagcaaaaaacagttcggtatgctcaaagtttccgacaacaggacaaaattctttaccatcctccgcccgcaaaacaattgggcgagcatccacaaaatttccaaatgtgttgtgaaagtgagcacgacccgagcaagcagcatttgaagcgtcctgataaggcacaaaaggaatttgaagaaccaaaaattccttttcaaccaattccgttttcaaaaaaggaaacgccaaatcagcaacggacttttatggagatgtattccatttgtgagttggacggcaatcaacggattctcaatggttcgttctcaagaattgttgttgaaaaatcacaaaaagctcattttccctacaacgcaaagccaatcccgataaaagttaatgagtttgggaaccggctgttgttaggcaatcatatctcaagaaattttttaaatttcaatgccgaaaaaatgccttttgacccaatcaaattccatcctaataatttccaaatgaattcaagtcaagggctggcattaaaaatttttgtttcaaatgatagtcccatttcaaattttaatccgatgaaaacggagaaagtgggaaatatgccgaaaaatgaatttcatgataaaatccatcaattggaaaatgatttgaaggacgtgtccgccgaaagagatgagcttaaaattttgttggagtcaattttttctggaaaatttttgaagaggaaaggattcaaaaaattttcgaataaatttcagaagattttgaaatttcccaacaaaaaggagtatgcgaaatgtttggtggaaaaagccgaaactcacaaaaaaccaaattctttttatcatcagacagctctcaatcaaaatatttccaacaaaaacacatgtcaatcccaaaaactgggacactcacgtgttttcatcaattcaaagcttaaaaaggacaatttgcactcaaacattttgacgaaaaatctgcccaaaaaatctcccgaaattcccaaaaatttggacaaatcgaagtcagaacgcacatttgtcaattctaaatacaaatcgaatcaatcatgccaaactcggaataatggagttgaaaataatagttttgttaatcaaacgaaacctccaagcctcttttcaattacattttcgtcaacattttgtcga

SEQ ID NO: 31499 - DNA, 916 bp, Heterodera glycines
  unsure (1)..(916): unsure at all n locations
gaagggggtctatttggccataaacactcaattaatcccacactgggctttgntatttttcattanttttttcnnattctttaaaaatttgangntgntnaatgttttnntatnttttgttgaggtgnttttanaatgntttgttttattattatgnaaattaaattnanaaatttgtgnatttnagnanganagttntttngnntggtgnnagnagaattntttaaattaaaaagnattgtgaagtgnngaggntattngtgtataatttgtaatatttttgnagaagaatgnnaagttgtgnatnatttnntgaaaaggaanaattggngaaanngnaaagatttggngngngttgttnagnggattnttttgtnaggtgnantnatttnggnannatttgggtnggagaaggaaaaaangtngtnggtngaaacgtcgtcgggacaaaaagtcgttgtgccaaaaattccgaaaaatttactaacttgcaattagagatttttcaaagaaaaaattcttgaaaatttttgtggtaaattacttagatttgaaaaaaaattccaaaaaatcgctaaaattctctcaaaaaatttttttcttagaattttctttaaaaaaaatttttctttgaaaaatctcaagttagtaaatttttcggcactttttggaaatgacgacattttgtcccgacgacgtttcatcagcacagttgcatttttgggatggataattttgtctcttttaagatcgcttactacgaccacaccggactttacgtgacggtgaagggcgaacactcgttcaaagtgtacaaagggtcggtgctcatgtaccgcaaggaatacccaaaatggtcggcaattttcaaaaaatttcatccctacaagaaattccagctctaatgcactttatg

SEQ ID NO: 31500 - DNA, 1793 bp, Heterodera glycines
cgtcatttcgtcccgcgtcgtttcgtcccgcgtcgtttcgtcccgcgtcgtttcgtcccccaagccgaaattagtcgtttcgtccccaaattaaattctgtttttaaaaggcattaaatttcgagttattagtgcctattttggcagtttttagagactaaaatccggtccatagttaatgaattaataaaatactttattaattgggcaaataacataacataattgaaaaaacatagatcaaccaaattctaaggggcattcattgaatcttccgtattttcatagtccttcaattttcctgcgtatcctccgacctgcaggccaagagccgtgataacatcatgaatttcggcatcactgttgtatgtagcgtccgctaaaattcgcatgatgactgttagcgtttgtgtcgtttgtgcatgaagtttcgagccgatctaagcccagaaaaattcggaagaagcgagggaacagtcgaaaatttggtatgattcccgaccaaaagtcacggccaacaagttccaaaaaggagagaaagttatggtcgtctttcctggtcaaaatcgtcgttcgcctcacaaaaagttactttggtcacattttggaccatatttgatcacagaaattggtgattcatcggcaaatttggtaccaatagacaaaaaggagatcaccccaataaaagtgccgattgaacgattggttataaagtcccaaaaggcgtcccagacatttcgacactgcctaaagggaaaaatccgtttaaaaacgacctaaaattgttgtcgatgtacgcaggaattcgttcagaaatttgcgaagtgactggaaataagtgccgcgaaattgggggaaaaagcgaatcgcaattggggacaattgcttcatattgtttggggggaaattggaaaagcgactccttttcagagccaatggatgtcggaagtgtcagtgccggatttggatggacttcggagtgcagtggaggcggctcggggcacgagctgtgcgagaaaatcacgctgggaagcatcgacccggtcctggacatgtcgaatttgggatcggcggtagtcaaaacgccgcttcaagcccttctcagcatctttttgctccgatcgggcgtggcttcatcgctcacggcagcccaaactttggtccagacaattgttggagcagaaccgaagctggagttgtgtatgtacacagggaaaaggggggaccaaatcagcaccggcaaatacccaacggaggaggaccaacggcaggctttggagaagtgggtcggatcgtgctttgtggctcgacaggctttaaccgagtcgggatataagcccttgtcgatgcaaatgccagagggagtcaattcgctgcccgattctgagaaaaatggcacgaggtcttcaaagacagttcatgggcactcgaacgtgtgcgggccacgattgtgcataaagcgagccgctttttggcacatgaccgtgttctgctcggagactcgtcggcagaaatgctttccaaacacatcaacagctcctactgcattggcggagagagttcgatggcagatttaattcgccaatttcagccgatcgttctgtcaagccgcgtcaaggccctgctcattttggttggacgtgactccttggtgcagggcgaaaccgaaaaatcgatgatggcccaattcgaaatgatcgtccgcctgtgcaaacgcctttcctcacgtgcagatattttggtgcccttcaccgtacgtgcatgtcaaggccgcggagtgcgaggagctgatc

SEQ ID NO: 31501 - DNA, 1413 bp, Heterodera glycines
  unsure (1)..(1413): unsure at all n locations
cgccggctaaccgaaaacataaacgcatgcatgtgtttttgccgtagtttcagaacggcggaaggtttcaaccgtttgtgttaccggttaaaccgaacacaaacggctttaaaattgcggatttttgttgtattttactttaccaaaataacttttcagaaccgagttctatattaatttctgaaaattagactttttccagaatttctggaataaggttttccaatttcaagataaaatttaaaataaatttcataaaattctccttatttttctctttttttaaagctttattgcgtaaaaattgttctacactgaagtgagttgtgacttttcaaatattagtcccaaatcctgaggccaaaaaattgaaaatattaaagattttttaaaaaaactaaaaattataagaaagaaaagcaaccatcttattcgtgctaagaacctaaattaacacaataaaaaattttcaaagcccatttaatccaatatccattctgtaaaattgttaatttcggtaattatgaattgtaaagtttttgaaaaattagtcgtccgaaccagaataagtccggaaattttaaagacaatttttttttaaatattataaaattctacgcatttttctacattctgtaaattccggaacgcgtcagaattattctggtgtgcttcagaataattctgataattccggaacaagtcagaattattctggtgtgcttaattctggtacacaccagaataattctgataaatccggaacgcgtcagaataattctggtacacaccagaatgattctggtaaatccggaacgcgtcagaataattctggtacacaccaaatatttctgacaattctggtacgcaccaaatacttctgctaattctggtacacaccaaatatttctgacaattctggtacgcaccaaatacttctgctaattctggtacgcaccagaactattctgataatatattctgttgtgatccagaatgatcagaattaatttgaaatgtgttagaaaagcagaataaaataattaaatggaaaattggtaaaaaaaataaaaaaaatttaaaataatttaaaaacagttaaattaattaaaataaatttaaataaataaaaacagacccaaataagtgggaaacaaataaaaataaattataaattctaaaatattaagcaattaaaaaataattaaaaaatcacggttacccccataaaaaagcatgggcaaaagcttgcacaatttggcagcaagcgaatatctaaccgatccgtttgacaccggtaccattcgaaagccctattgattctctacaaaatgggtccgtgtgaactaattggncgacagcagaaatttcagaaaaatcngcggttttttgaaaacacccctaaattcaaaa

SEQ ID NO: 31502 - DNA, 1458 bp, Heterodera glycines
ttttctgaaaattttgtgaataattacaaaaaatctttaaaattaaacttattctttacgcctaggacgctttgctgtttttgggcgattgattcgccagtgtgacgagttcattaactacctcggcgtgctcgccaaccttctggacgagttgcgcacgcagggagcaaattcggtgccgggctcgtcagctgttctgctcattccgttgaattgcgtcacgatgctccgaatgttcctcattgttttccgtgctacgcttagtttggtgatggagccgatgacatttgctatgctctccttcacctctgtgtatgtgtcttattcgtgttttggcatttttcaccagatcactatgtatttctttatcgtatttttttgtctttctttcttccatctcatgccattgtactatcacttttttggttaatttgtaatgtttttttgcttttgtgctaggtcaaacctaaattatcaatggagcgaaataaaaaaagtatcaatgataataatatttaaattattaatatttaaatataattattattttaattttatttacatattgagctggacacttggagctatcgctcaataccggttttaatttaattgacaaagtttaaactaagttagattaaattttctcacccgggatcgggaccaaaaaaacaatcgtaattttgtgagctttctttccgatatacctccagtccctttaaaaattttgcgacacataaccaggccttcgatcgaaaatttttttaaactagaacattgggctaaaaaatctgattttgcggtgaaaatcagaacatttgcgaactcgcttcaaatcagttctttttacagttagttgatcaaaaattatcaaaatattttatttttcgtctccctttatcgattttaacaatttagggcagggaattagcaattgtcaatttcagtgtcatcgggatcaaaaggcggcgttgatagtcgcgcagcagaaaaatttaaaattttcacacaaatttggtaagcaagaaattttcgtgttataaatttttggagccggagtttttacctaattcacaaaaaaatattaagatttattaagattgaaaataatttaacaaaaatacgacaaaaaacacctttggacgagacaagaatgcagctcgaacaaataaaaggagtcgtattgaaagattttgaatagtttattttttaaagattttatgacaaaaatttttattttggaaataacaaaaaaacgaaaattggaaaatcggaaagtttttttgcgcttaattcaaaagattaaatcaattatttcattgaaatcaataggggctggaaattttattatgaaaaatcgcaaaacatatacataaatatgtaaaaaaaaggcccatatattaaaaaaatgtacaaaactcctcatctatgaacagaataagtaaataaaatttcttt

SEQ ID NO: 31503 - DNA, 1822 bp, Heterodera glycines
gatgtccttgaaaatgagcattcgaaataaaacattcaaaaagttgcaattttttgaagttttatacaaaatttttatcactttatggcattattggtgcaaaatctgttactaaattgcaaaaaatccaaaaatttttctggctgcgcctatcagtaggatattcaatgaataaatgcacggtgcctgtcgcggaagcgataaaggattcgatgagattttgtcctctccgcacttttaatttgttcatcttaggccaatcgggcaccagaggtgagacgcgaactcgatctgcgaccggcgtcatggcaactcgtacaattttaaattgatatggccataactttttttttagtcggccaatttcataaaacttggaatcattcaaatgcttttcatgtttagaagcgaagcgattaagcatctcacaaaaaagttgcattttaaagaacattaaaaattcacaaaagcagactttttctcaatttataaattatatcttttttgtgagatgcttaatcgcttagcttctgcttaatcatcgcttctaaacatgaacattcgaatgacaccaagttttaagaaatttgccaactaaaaaagattatgaccacatcaacttaaatgagcgggaccgggacctgaacgcggacaactgagtacaactgagtatcgaagtcccggctttgaccgggaccgggactagtcccggttttttcccggtttttccagcaaaaaattcccggttttttaacccgaaaaggtcccggtcccgggtttgcccaaaattcccggtcccgctcaactctatttaatggagaacattttgattaaaaattatatataaaaaaatttaaaaatatttttgtgatcaaaaacaaatttaatttatttgttcctcattcctatcaaaatttagttttcagtatacaatttctgtttaataattaatcaaatgcaatttaattgcaattgaattttatatgcaagttaataatttcccttttataagtagttcaattattaatcaaaaatattctccattttttgtctcaatcatcaaagaataaaaaatagataaacatcactgatgatcatatttattaattttgcatcattaaatatgtccattataaatttgagatggaatttttgttcccaattcattccaatttttaattaaaaatttatttcgccgcatattaattttacaaataaaatgtattctgctcaatgttttatagtgcttttcgtcacaattgcgttgtcacgttagttactttgtagaaaaattcaaatgttaattttaattacttttttcaaaggttctcgtcctattcctaaatccgtctattgctagccgatgatgagacataatgaatttttgttctgaagtccaaaaaaaattgcttttgagttttagtccatgcttactatatccttactgatcgcaaaatgtgacttccatttttaccgacaacggatataaaatgataaactgaaaattgatcgtgtcatgttaaaattgatgaatcatttttaatttcaagaataaaataatatttatatttggagcaagactttttttcgcggtgtcaattatgacaatgttatatttgaataaattatatacagcttaaattttatgatatgttttaaagtacttggtagataggcatattaaaatgatgcactaataaaaattgcattaatttagtcgtctattttaattttaatgaacttcataaaacatttaatcccaaaatgaaccattacaaaaatgttgattaaacagaactattccaactttttaaaatatggt

SEQ ID NO: 31504 - DNA, 1628 bp, Heterodera glycines
ccccactggatgagggtcccccaatctcattccttaaagacaatctgaagagcatgtctacatccgtgacaagtccttctcctccgtgcagggatatttggctgaaacatcctcccaagacttagtggtggccatagacaggtgacagcaattattgtgatggggtttagccttttacctcgttttcgcaggatattccaagactcgagtaacctctccggcgacgcggttattgaatgtgtgcgagcattgtcccaagtcctgctcggagagttgtgcagtcctggtggaccgagcatgtacatgctgcagaagatcctcgagatttccttctacaatatgaaccgaattcgcatagagtaagtgagaagcgatgttgcggtttcttcaataattagaggatagccattctcagttggtcaatctattcggtgcttcctcggcgaactcctcagaatgcacggtcgcatttacacccagttcacagctctctgcgtcgttaggaaactaatcagacagctctttgacgatagatttccggaaatagtctgaacaatcgttactttcggctatcacaataaaatttgttgctcatcaaagggaagtggtcctaaattgatcatctgctcaaattgactaaaaatgtctatcttttatctcgagtccggtaaagtaaaaatcttcgggagcgcgagcgggagttcataattttccgggagcgggaatcccgtacaattcccgctcccgttaaaatcccgtccatttttaacgggagtcccggacgggagcgggagtaattcgaaaatttaattaatacccacaaaaaaatttttaatgcacaaatttgaaggacaatccttttataaaatacagaaaaattataatatgcagaaacgaaataaaaaactccattcttaccagtgtatttttactccggtgtttgggtgaaattaaaaagtttactttccatgcctcgcttctgagttgatcattccgcgtgccattcacgtccttgaaattttgtataatttttcttttacttcttaaatttatttttgattttctctcattgtttctccatttgtttagaaatattttgagtttctaaaattcagatttttccgttactcatttgtttttcattttttcggtcaaaaaagtttattacagcaagcatttatgggaacaaatctcattccaatgcttttcgtcattccaagtgtatcggagcatcataatataggacaatttttttagatattatcctttgttttaatatttaaatttttaaaatttgaattacgttggttttaccattaaaaacgcattttatgatggtctttttaatctcatgaattaatcaaaattttgtcagatcagcatattcattcattagaacaacgacagcatgtaaattgataataaaatgtggagaatttttcgtttgctcaagcttgctttttctgaaaatttagaaattaaataaaatttctttaataatttattggactatacgaatatacaaaataaatttacgaataaatgagcaaaatgaacgaatggacgaaaagtgaaaacgattcccaatgaatttgcttaatgttttccgctgattcatcagcaaaaat

SEQ ID NO: 31505 - DNA, 1331 bp, Heterodera glycines
  unsure (1)..(1331): unsure at all n locations
ggagatttggtgaaacgttcttagcgggagaatggaggagaaagacaataggaagagagggggcaaagtaagaaaagtggaaatggatctttagaaatttgtttattttgtcacaaagcgaggaaaagtaaagaacaaatcaatgcataaacaccatttcacaatatatagattatttcctaaataacgaaagaacagttccaagcgccgtcgtcaaaagtgcgccgatggcgatactggcgatacgctcgaggcgacgaatccgccgatccatcctacgcatttgactcgctaatttgataagctcatcaatacgctcagcattgtttggcggctgtggcgggtcaattggcaaagcgatcggcggcgccacttgcggagcgattggcagaagtgcagccttcaaaatttcgatgtattaaataacattttaaaagcatgctttcaattcaatttccaaaaggtttttttttgattcctttatactttctgatgaattttttgtattaggggattaccgggccaattggcaaagcaatgggcggtgccattgaaggagcaatgggcggagcgattgccagcataaaaaagcttgataaaaaggttattccatatagatgtgaatataaaaatgaattttgtttagattttgttttacttcgggtctgggattcggaataagccaaaatgaatgtcagattcgtgatcaattatccgaaaagtcacaacaaaacaaaaaacaattatttgggcatgaatgaaaaaagaagaaacagagcaaacacataaactagagaaagagaaaaggtacaatgaagagacacgttcatgacccgaattgagaaatatggaatgaaccgggcaaaggcgcagaattgtggtccagggacgtatccaggatttgggcttggggggggggggtaccgatccgaaaagtcaattcttaggggtgtatttttaaaaatttttcgcccgattcttaggggtgtatttttgaaaaactttcgcccgattcttaggggtgtatttttgaaaaactttcgcccgattcttaggggtgtatttttgaaaaactttcgcccgaacgaccttttttttttgctcataccagcgacgctgggaaaataggggtgtatttgaaatgataaatttttggaatttaaaagaaaggaaatgaagaaattgaagacagagaaaatgtttctttgtaatttggcgttggaatttaaaattaatatgttgctttcgttatgataatttggcgttaatttaaatttggcattcctttttctttctggggcgctggttggtcttgttggggggnggggggg

SEQ ID NO: 31506 - DNA, 973 bp, Heterodera glycines
  unsure (1)..(973): unsure at all n locations
aggaaatcgatgatgccgaagagagtgataaaaaaaatcttacataggtataaataataataattttagnaaaattaattactttttattggtaaagaggggaaacaaanataaaaagttaaaaattggaaaaanaaaggnttggttggaataatttaatttgncaaatcatttttgancttctgtnaatggntggntcactgttaattactgtcaaattgtcaataatttcgtcccttccgaatttggcattgtgccaactcacatcgaaatgccacaccaccgcccactcgtccacgtgcgactgttcctcgggcggaatgcgttttcgacttgccgtccgattttggcgtccggcatcggcggtcgcgtcggccgcacattcaggcacaacgacaaaagcaatgataattgcctgtgaaatttgaaatttattatttataaaagaaagaaaatagtaatgaaatataaattaataatttaatgacaaaaaaataatttaaaaagtaataaaaaatgatctgaaaaacaattaaaataaaaatggcttaaaattactttttttagtataaactgaggaaatgtaaaaaataaataattaattaatacaataataataatcaaaggtattttgaaaaaggggaagaacttacagtgataataaaattgatgaagatcacccagcgaaggaatgtgaagtaactggacacgacagagccaaattggcctttgatttaaattaaattctcagttttaaatgaaattttcactttcaattcgttttatccgcgactcccaagggacctaaaatgaaaataaatcacaaaacactgaaaaagtggcacaattcccacaaaataaatgccaatgttgctcaaccaacggaggaaccagcgccaccgtttcaccaactccctcctgtacaaatgcgttttggacactttggactcgttctgctccaagtatttctggg

SEQ ID NO: 31507 - DNA, 1000 bp, Heterodera glycines
attaatttgttgtacattttagcacaaattcagtttcaaacatatttcggcaatttcattttattttttgtacaaattcaagacaattcgccaattcgttcctattttgtatatattcaaaataatttgtcgtttcgttcatttttcgtacaaatgctaaataattatattaatccggttgtttttctttattttcgcacaattttcagatataaattcgtcaattcattcttattttggtataaattcaaacacaattcgtaaattcggttcacatttttgcacaatcatacataatctatttatatttgtaatattccgaaacaattcgtcaactcgtttatatttataataattcagaaacaattcgtcacttcgccaatttgttttacatgttcgcacaaattcaaaacaattcattaattcgtttatatttgtaataattcagaaacaattcgtcaattcgtttatatttttgtactaattccaaaacaactaattattttttttctttctctctctcttctttcatactctcgtactaattcaaaaaaaatcgttattcgtacaaattcaagacaattcgccaatttgtttcaaattgtagtacattcgccaattcggtttacatgttaatacatattcaaaaataattctcaatttggttattattttcatacagtcaattcaaaacaattcgtcaattcgcttcatatttcgtacatatttaattgtataaattcaaaacaatttgttaattcgctttacagttttgtgcatattcaaaaataaatttgtttttatttttcgtataattcaaattcaaaacaattgggtcaattcgttttacactttcgtacatccgttaatttggtctttactttcgtatttattcaaaacaaattcgtcattttgttttacattttaacacaaagcacaaattcagagtcaaatatattccgtcaattcgggttatattttcgtatatattcaaacacct

SEQ ID NO: 31508 - DNA, 1310 bp, Heterodera glycines
tcagcagtggctggcagcagccagccatatccaacctcccacagttgtgaagaagaaaccaaaaaaaggcaattggaatctttcaacaacaaaaagggccccaaatctgccagcaaaacacttggcacttgcctttagaaatgccaacccaatgcttagcagcagcacatccaatcgcgatcatatgacgaagcaaatcgacgaagggaagactttgcccgcccccctccctcggctttgcctcccttcaaataccaagcgccgaagggaaatttggcaatttttcgtaaagccaacccaacccatccttcccaaccatcaaattgtataatactgtccaattttgtgctgccacattgccaacccaatggacataatccctttttactatgaaaacggccaattggaagctctttcctcggcccaccaatggcttaagcaaagcgaaatggcggggccaacctgctcaatttggtccactgggctgaacgaggcgattgcgcgcgaacggttcgcccgggacgcttctttaacagttccgcgaaacaattcgggacacgcccaattggcgttggaaatggccgtgccgccggggggcattttggtgccgcaccatttgtggcagcagcagagacagcgccaccaaatgcaacagcaacaacagcagcagcagcagaagcagcaaattcggcaaagtgtgaagagcaacatcgtcaccaaaatcaacaggcgtcgaaaggcggcgatcattgcgcgatgtgccggaggcggcactgaagccgatctcattttgatgtccgcactttctacagcgaatgccaatggcggcagcaccattgggccaccacagccacaggcacagccgacgattggtgccgtgccctcgggcaattgtaccaaccagttcccaaaaccgacaaagcaacgaactccgacgacagcgaagaaaacaattacagcggtaaaagagccatcgcagaacccacgcggagcaacgacggacatttcggagtcggacgatgagtcggacgtggaggtattcgaagtggacgagaaggaattcgggaacgacgatttgttcgagaaactgaacagactggaggagcgcaaggtaaaattggtggtggacgaattgagggcgaatagcaaaagccaatgccaatttcatcaatctttgcttaagcatcacgacgacgacccaaaagtggcacaatggcgccaaaattttgaaaaagcgatcactgaacgctaccgaaacaaatgccgaagacggaacatgctgtgccgacggatgttggagttcaatttgc

SEQ ID NO: 31509 - DNA, 1109 bp, Heterodera glycines
tttctcactttttcttgcagtttagggcccgtaacttttttttctaaaacccgaatcaaaaagtgcccgctgtgagggcactccgcagaagtgtcctctataatccggtattttttattttttgatcagaccaaatcccggacctgtacagacacggagactcagttaattttttttccccacttcagtaccaggcgaataactcattaggctttgacctgagcgcagggtggccagcagacttattgtagagctttaaaagcccgatttttccaaattttaaaatttcgaaaattttcaaaatttttcgagctaggcctaaaaaacggttttcgggtttttgaattttaggattttttaacaaattttcccagaaaaacgaagaccacttccaaaacatagtttttcgagctctatcgattagtaatttttttggaaaattttcgatttttttcaagaaatagaaaaaatttttggcctcagcgggacatttgagtcctgggcccataactcgtcaggggttgattttagcgaaaaattgacttaggacatttttgtagagcattttaaatgctatcgaatggtgtactacatgtttggaaaatttcaaaaattttcgagctaggccccctagaaattttcggaatttttttttgggttgaaaatgtgggtgtaaaatttttttctggggtattttggggtgctgagcacgaatatgatgtttgtttttcgtttcatgatttttggaattttttaaaaattcgaaaatatttttatttttttggtccttggaaatttgggttaaaatttgaaaattcatatctggcctagggtttgaccaattttgattaaataaagcattaaaaatggagaaaatcaggagaattttatgggttttatttggctttttgtacataaatatgaaaaaagttattctagaaattctgtaaaaattcggattttcagaaaaaatttataactcgcttctgaaaaatattcaggaaaagtaaaatgctacaaaatccgcatttttagctctattttataaatttatttcacatttttatcacttttttgaaaaaggtataaaaataaaagtgattttggga

SEQ ID NO: 31510 - DNA, 1348 bp, Heterodera glycines
  unsure (1)..(1348): unsure at all n locations
attgcctgcaataaaaatgctaattttctaaattcgcgtgtgccancctgnagcacctcccattaaacaccatcttttttgaggcagacaatcaatgaaactcacaacctcgggtgtaaattagaggggctgttagtggaatagaaatgttaaattttttgcctatcaaatattcgcaataaatgcccatctatttaaaaaatattctattctattaaaatgttctgtattttgctatatattaagaatagccgtacatctaaaggagtcagtaattgaacaaatttcaagaaaggttcaggcagtcgccgtaaaaattgtctatataaaaacaatggcgatacgcatttctgcactaggtcctttttcaaaattgatgtgcttttattgaaaaacatgtttaacgggccacaaattaatagacaaattcaggcacattcttaaaaaattctgcttttaattagttcatttaatagattatgcttttgctttgtttttttaaattctacaccgcgattatctgataggacaatgatatcaataaattttcttctgaagaagcgaagagttagcccaaacgttttccttcctttctatttaatgatctatcatttcagatataacagtcaaaatttaatcggccggctaaaaatgaattcggtaggattttatgaaaatagtttgaaaaaattgaaaatttctttcaaagatttaatggaagctagtagaaggatacctttttgagtaatattccagatgttgccaattgtttaatggcaccccatacctcaaaaaagcattattctttggctaaaaaatatcattagaaaatagcgggcgtagatactgaaaaaactgttcttataattttaattttacaattagaaacgccaaaggttacaattatagtaaatgccaaataggttgtaagaataggctcatttgctacaatttagaacagaatgtaatcggcaagaaagggtttttaaactaatttcaatgaaagaacttcataacaaataaattaatgacttttctaaatgaattgcctgcaataaaaatgctaattttctaaattcgcatgtgccaaccttgagcaccttccattaaacaccatcttttttgaggcagacaatcaatgaaactcacaaccttcggttgtaattagtagggctgttagtggaatagaaatgttaaattttttgcctatcaaatattcgcaataaatgcccatctatttaaaaaatattctattctattaaaatgttctgtattttgctatatattaagaatagccgtacatctaaaggcgtcagtaattgaacaaatttctcaaatttcaagaaag

SEQ ID NO: 31511 - DNA, 1588 bp, Heterodera glycines
tcagactgaccatccgttttgacaactcacggcacctttgacaggtcaaggtggacctgattgccacgatcaggcacttgttttttttgaattttcctataaaaaaattctaagatttttttcatggaaaatactgttgagaaatttttatttttcgggggggggggaacgacctgctccgcgtctaatgcttttaaatgattttgagaaattttcaaaaaaatatttcttccatttttcttgaaaatatacaattccaagcattcgtcataaagtcgtttccctttacagttacatcaatttgtgtaacggacgcattcagcaaggtgaaaaaagcttatcacaaggattgaaggcgcctttgaaattttgataatttttcctcataaaacgaaagcaaaattaaaaccattattttatttccattgaatgccaaaagttcctttttcattatcaaagcagacaattcggtgccattcaaaaaaaatccaaattggaatattctgtttttcttcttacagtaaaccgcttcgggttgggtacggtaatgatcgctctgctcgatctgttcgtgctgtccatgtgccttggctcgctgtttctctgcgtgcgctcgttggtcaaaggacatttgttgaaaaatgtttgaaaaataaaatataatttaaattattattgttattatttccaaaagactacacgtgaatacttcgatcgggcatttggcattcggttgagcatccaagacaagtgggagttcttcaacatgtggtacggcattgttgtcgtggtaaggcgtgccgtaacaaaacatacaatgatgaagtccaacatttaaaatgggatcccacgcataaataaaccccgcacggcgggaatcgagaatttgactcgagattgggtctaaaacaagggatttataacgtacctaatagtggttctgaaaccaaaaattctcttaaccacgactctcgagcatcgcttattcgtaggccgtcggtctctatggcgtttttagccttttgctctatgacacccgaagtttttcaccgcactaatttcagggaaacagtcattggaaaacggggaaggtacggcgcgacggtgctgcgacaagcgccgcccaaaattcttttttgcaaatttattagttaacgaaccgccagtataaaattttttacctaactttttaaggagggactggtgctattttgttccgccacccctttttgcacataatatgtacacatgcttttgatcggacaaaacaaaaaagttccgctgatatttctgcctaatttttgaatacacaaacagaacgacctgttgctcatcaccagcaccgtctgcaaggtgttcatccaattccgtgactttgactcgtcggcactgttcacactcaccggtgtactgctcggtctcggcgtgttcctggtgttctttggcctactccgctacttcactttcttctcccagtacaatgtctgttctattatttccataatttgctaattacaacgtgattaccccaactctcaatggacttcttatgtcaaggtcatcattctgacattgcgcaaatcgtttc

SEQ ID NO: 31512 - DNA, 1080 bp, Heterodera glycines
caacagaattaaaaatattggcaattagtgattagccgatgccgtaaagcaaacctttttatgccaaaaaagattaaaatggtcttttaaattcaattgaaaatttaaaagtcatttgttaaagtcagctattctgatttttcaaaaaaagttcagcatccattagacaacgaaggccgaactccgtttatgtgggcagtgatcgcgcagaatcagacggtggtccagcgaatggtacacaatttatttacagtacatatttatgtttgagctaccatttctcgggttacactaacccatttgatatgtatttgatcagttgttggacaaaatcatgggctgcgcggggaaattggtcagcagcagagacattttcaaaaggtatttttggagggatttaaaacaaaaatttaaaaatatcaaaagcataaatcatttttcatggctcagaactccgctgcatttggccgcattggtggggaatttggagctgtgcaaaatgcttgtcaacgagggccatttgaatgctaatgtactgaccaattatgtaattagggagtgcaaattaggccttttcatttttaaaattggaattttgccaaaacattttgtgtcgaatggacacaaatttatttttgtctttctgtacggccatagttttgaggatggggacatgcacggggccacgccagaacacatggccgccgggcaaggcaacaggtcggcacttcactttggcattttgggggcgagcgccggagggcgacggcatcgttttaataattttatttgaatttaaaaaatgttattcgcttaagtgaggtggtcctttggttcggttacattcgcgggggccacgtcaaaccgccggtggatttaattgacaggcgccgaaaaataaaaaaataataataatgattttattgtttttctcaggacaccctttcattacgcgtgtctcggtggacaagcgaacacagttgaagcgatggtataacacatttggagatgaccaattcattggtcaaatactttcttcatttattaatggccggcactttttctgatcactaattttgc

SEQ ID NO: 31513 - DNA, 2105 bp, Heterodera glycines
  unsure (1)..(2105): unsure at all n locations
caaaaatcctgggtcacccccctttggtcacgaacccccctaccagttttatttttataaaaattcttaaaaaagtgatacatatgccaaataaaatttatataatagagcaaaaaattgcggatttttgtagtattttactcttctctaatgacttttcagaaccgagatataaatttttttctgaaaattcgaatttttccagaatttctggaataacttttttcatatttatgctagaaaatccaaataaaacccataaaattctcctgatttttctccatttttaatgctttatttaatcaaaattggtcaaaccttaggccagatatgaattttcaaattttaacccaaaatcctgagggccaaaaaaattaaaaatattttcgaatttttaaaaaattccaaaaattctgaaacgtaaaacaaacatcatattcgtgctcagcacctcaaaataccccagaaaaaaaattttcacctccattttggcccacaaaaaaatttttgaaaatttctagggggcctagctcgaaaaattttgaaaattttcgaacatgtagtacaccattcgatagcatttaaaaagctctacaattttgccctaaggggttttttcgataaaaccaacccctaacgagttatggagccgggactcaaatgtcccgctgaggccaaaatttttttctatttccgggaaaaaatcgaaaattttccgaaaaaaataccagtcgatagagctcgaaaaactatgttttggaagtggtcttcgtttctctgggaaaaatcgttaaaaaatcctaaaattcaaaaacccgaaaaccgatttttaggcctaactcgaaaaattttgaaaattttcgaaattttaaaatgtcaaaaaatcgagctttcaaagctctacaataagttcgctgaccaccccccgctcagatcaaaccctggcgcggtattcacctggtactgaagtgtactttttgagcacgcttcagttgccattttttgcaggccaggggtttgctcaaaaaaaattttaaaaaatacctccttgtagaggacccttaggcggagtgccctttcagcgggcactttttgattcgagttttacaaaaaaagttaggggccgtcaaacgcacgaaaaaatgagaaatcagtccctggtactcagttggcgctcggatcaaaaaacctatagttttcccgaattctcctcaaaaagttgtaagacccttccactactttcagacccgtcccattagccgttaagctcaaattagtttttgaaacgaaactcaaaacctatataacgtatatataactagcgtgtggcgcagcagttgctcggtgtagacagtatacttgtgagagatgaaaagaatatgcattacatgagcgcttcgcgcaaaggacttcgttgctagtgcatgctcagcttcaaaattcaaaattttaataggcttatgttttttcaaaattttaaaggcgacatttgcagctacgcggcctcagacgggcgcttttgcgtccgtttcttaattttgtttgcttggacgggcgcttcgcacccgatttaaattttgttggggccaaacgggcccttcacgcccgttttttaatttgttggaaattttcggcagcttcgtggccttaggacgggcgcttcgcgcccgttttttaattttgtggtaatcattcggccgcttcgcggcctcaggatgggcgcttcgcgcccgttttttaattttgttgataacattcggccgcttcgcgcccgttttttaattttgtggggccagacgggctcttcgcggcctcaggacggcgcttcgcgcccgttttttgattttgttgataacattcggccgcttcgcggcctcaggacggatgcttcgcgcccgttttttaatttttggggggaattcggccgcttcgcggcctcaggacgggcgcttcgcgcccgttttttaagtttttgggggacattcggccgcttcgcggcctcaggacgggcggcttcgcgcccgttttttaggggtacaacagtgattcattaaattaaaatgaaaatttttttaacaaantttaattaagaaaatacatgaaat

SEQ ID NO: 31514 - DNA, 1247 bp, Heterodera glycines
tgatggagccgccctttcttttaccttacgcctttgcttgacaaaattccatacgatactttaaattctgcaatacccaaataatgacatttctaattattcgacttgtttccaatatttataaggatgtattgctatacgtttattacacacatattcgctaatcggatataatcgaaaaacattacacacaaataaagcgagtatcagaggcacttacaaaagccaaggaaatgtgtacaacaacgaagggaggggggaataacgggagagaggaagaagaacactcattcatttggaaccaaaaagagtaacttggtttgggttatcgcgacacacagtccagagaacacagagaaaaccttaaatcatgagaagtgaaactcgctcctttggtctacaatctttcaattcgtaatttatcatgagatagatgagaggaactttgtatgctttcggtatttccctccatttagcgaaaatccatcggaatcgcggataattaacgaaattagtttgatttcatagaccaaaggttcaaaaataaattagcaaaacaagaaaaatggattagtcttctctgctaaacaatcggttttagttataacagtaaatttcaatattattctgttaaaaaatgatgaacccggtttcaacctgttatcctaaaaccgaaagtggtaaatgcttaaatacagctcattttcacccgatgttcgatttgtatagtaaagtgttgattaatgaccaaaaaagtaggacgaagcgaagcgcacggtccaaaaaaggaatttgacttgcagaagaaaagaaatggtccaaaacgcccactggccgacgatgcgccaccaattgaacacaatccgagtcccttcgtcgccgggggtaaactcgccgtttttgtagtaattgtctttaagagttgggtcaaatcactcacaattaataggaagcacaaaacaaaaacatttcggtcgttggcttacccaaaagtttgtccttctcagcatacaaattgtacagccaatcgcgaagagcaacatcattgcggaaaggcacttgctcagcgtcgaacattcggtagtgcactgcgatatcacctgaagagaggcccaatgggacggagtaataaacgaaacaacattgaacatctccccgtctcccccccccccctccccctttgttccccaaacccaaacagatattctagtcatgaatattggactgtccccgaaggtcacaaccat

SEQ ID NO: 31515 - DNA, 1237 bp, Heterodera glycines
tttttagttacaaaaattgatcccaccaactcgttttttacgaatttatcagcaacaatcaaatataatgccactgaaataacaaaggccaacattgggtcacataatcgcatcaataaccaatcaatcaattcatttccgctgttctgatcagtgatcatcactcggcccgggcgaaccgtcgagaagactgaaaagaaaaaacaaaaataagcatttggatttttaaaattgttaatcacccatcgccgaatccgtcgtctccgataaaaatgttaatttggttccatcggtcgcccaattccttattcatttgctgctgtctcttatcatcgggcacaattggacaacgaatgatggaaaaaccacttaaatctgcttcttcatcttctttggacagtgccaatttttctccggtgaattcgttggtcaattcaaatggcacaacggcagaaagtgaagaggacggcggaattaaaacagaaatgccaaaagaaacaggagaagaagcagaggaaaatgactaaaaaacaaatatttagaaaaacgaattaaattagacaaatcaccgctttgatttgttccacggttgccgaccattgttcttccatggttgaattcatatagcatatgagctccttcggaaaattatcgtgacgaggcgtgaacagccatttggccaccgcttggccatccgtcgcattggcactgtcgtcgggcggaaattcgagggaaatgccgttgcttaaattgaaaaagcgaagtgatggacagtcgttgagcattgacggggccaattggcgcattcgacgaaaagcgatgatgtccaaactcagctgataaatggtatccttgaacatcggccaaatggtgcgaacaacgaactccgaaacgcgaacatttccagtggtaatggacaacattgttgtacatgaagcgaaaaagcggtcaaaacggccaagaaaactgatcacattttggttgatgaatctgaaaattagaagtgtgtgattgaagatcacaaatcatttccaaattcaattaaatttttacccgatcgaaatgcttttgaatccgatgactttgttcggcaacggattttgagggattggcaattcttttccatcggaattgacaattttcattttgcccaatttccatttgcgcgttttaaaatgttcgtcgacgtaatagtcaaaatggcggctaatcatagcaattccaaggccaagtgaaa

SEQ ID NO: 31516 - DNA, 921 bp, Heterodera glycines
ttgaaaaaaaaaaaaataattaggagactcagaattttgaaaattttttataaaaactgatgacaagctaatgtgataaaacaggttaattcttttcctttcagtatccctgcaaagtttggggcgcttctgataagtttctgaaaaaaaagttaagcctaaactttttggcctgtttaaaaaggaattaaaaatttttaaaaatttattcatctccctttttgatagaaaaagcatcagagtgcctaaactagcatgtaaataaaatttggagcgtttcagagcattttctgaaaaaaatatttatgaattaattatgcaaaaataaataaaaatttctaaaaatttgatcgtccataaataatttgtaattgatcaggggctcaccaaattttgcagggatacgtatcggaacactacaaatgcttactaattttcctagattttttaaacccggtgaaaattttttgcagacaccaccacttttgcacttaaaaaaatttcaaaaaactttaaaaattcatagaaaatttaaattcataggtactactgctaaatcaacgcagagacgcctttccttgacctttttaggcccctgcaaaatctggtgcgcttctgatcactactcgaaaaatgagtgattgaattttcactaaaaagttaagtctaaactttttggcctgtttaaaaaggaattaaaaatttttaaaaattttattcatctccctttcccctgaaaaagcatcagagtgcctaaactaacatgtaaatactttttggtgcgtttcagaaccctttctgaaaaaatatttataaattaattatgcaaaaaacaaataaataatgaactctcttccttaataattttcctgcaccgaaggtactcactcggccgcttcgcggcctcgtggtgggccttcg

SEQ ID NO: 31517 - DNA, 1586 bp, Heterodera glycines
  unsure (1)..(1586): unsure at all n locations
cagtccccccgaaccgatgcgcccagatttatggggcattgaatccttcgggaatagcttccctatagcctgtactttaattctgcgttggatttttgctccccataattgtttgagtaccccaaacggacacttgaaaaaatcgatttttttgttttcggggcagtccccccgaaccgatgcgcccagatttatggggagaccgaatccttcgggagtagcttccctatagcctgtactttaattctgcgttggatttttgctccccataattgtttgagtaccccaaacggacacttgaaaaaatcgatttttttgttttcggggcagtccccccgaaccgatgcgcccagatttaattcgatcactcatattttttgctaattgagcagaagcgtaccaaactttgcagggatactccccggtaaaggactaacttacactgaaatgagcgccgagctagctggctcaaaaaaattttcgaaaatctgagtctttcgtttttatttattttttgcaaaattaattcttaaatattttttcagaaagggttctgaaacgcaccaaattttatttacatgttagtttaggcactctgatgctttttctatcaaaaagggagatgaataaaatttttaaaaatttttaattcattttaaacaggccaaaaagtttaggcttaacttttttttcagaaactgatcagaagcgcaccaaactttgcagggatactgaaaggaagagaaataacctattttaaatattatctagtcagttcatttaaataatttttatccaaaaaatttttttttgggttnntcggggcagtccccctgaaccgatgcgcccagatttatggggagaccgaatccttccggaatagcttccctatagcctgtactttaattctgcggtggatttttgctccccataattgtttgagtaccccaaacggacacttgaaaaaatcgatttttttgttttcggggcagtccccccgaaccgatgcgcccagatttatggggagaccgaatccttcgggaatagcttccctatagcctgtactttaattctgcgttggatttttgctccccataattgtttgagtaccccaaacggacacttgaaaaaatcgatttttttgatttcataaatatttttttcagaaagtgctctaaagcgcaccaaattttatttacaacttaattttagcactctgatgctttagtatcaaaaaggaagatggagaaaaaatgttttaaaaaatttttccttatattttggttatatcgttttgcttttggtggggtgcttggaacagtggaatcatgcgcacccgtccgatctggcaagttaagcaacgattgctgactagccaaaaggttcggtgccgtgatgaaacgaaccagcactgcttaccccgcggcacccggcacggtcccccgaaggaatggatttaattaaattctctccttcggggatttttttccattaggtcgtccgttagcgttcgattgctctagtcaatttttcaaaatttttgttgaaatatttgtcgtgctctgaagggcgtgggaggggggggg

SEQ ID NO: 31518 - DNA, 488 bp, Heterodera glycines
aataatcagcaataaagtaagtaatcaaatcattttaggtaattgcctgaacagtgagattttatatattttagcttcgattagactttgtcatttcgaatgatatcaaaaagatagggtttgttcgagcatgaacaaagttattgtataaaaacccggaattgtcaattgattggactcataaaagtggattggactcataaaaaccactagagcccaaaaaacttggtctgacgccaaaagtcggcgccaaaagacccaaattcttgtaagctatttttgttttccttaattttcagtgttgacaaatgatgaggccagaacaaaacgtgaaatgcacttggacaaaatcatcgactggaaggaaattgttgacatttattatcaggtggaggatgaagcatgaaggggctaattaaggcagtgagattaggaaattctggcgaaaggtgccaatagggagagacaccaattatcaaataattact

SEQ ID NO: 31519 - DNA, 1339 bp, Heterodera glycines
  unsure (1)..(1339): unsure at all n locations
gtccttcagacgactaatgattgcgtnttgttctntaattgtattttctttatccatacagagagaccgctgttgctgaataacacaaaatgttgaaccaattaaataagcatcattaatgaaaaagtttttgcgatattacctccaattcatttgcgatgtactccgtttgagttttaaacttctgctcaacctcggcaatcatttttttgttattttcctcggaagtaatttgtcgtagctcgacaagcgtagagaatttatcacggaaataattgtcgacagattgagccaactcggaactttgaagacaatcgacgatttttcccaattctttgacgtttagacgaacagaagaaagttcctagtgcaatttctaacaattaagagaagagcattaattaatttattacctccgaaaattccttgagactcttttgggtgtttgtcatttttgaacaaaattctccgcttagatgactttcaaccttcgatttttcatatcgctaaataatgggattaaaataaataaataaaaccaaaaacaaagggagtttttcaatggaaaatcccaaatgctttgagtttctgagactcatcgtcagcaattaccttttcttcctcttctttccgagtgaattgagaatattcctgctcacgacgcattgttttgggtctaacaattttggatgaatttggctggagaaacttaataaatgaaaaagccaataaaaatgagggaaaaatgaaattgcctgtttcacatttacaaaacgacccccgcaagttgagcccaaactgccgaaagtgtcgtcgggggtgctgaactgatttgaaccaagggactcgatcgggtccatcgcgatggaatgcgaattggagggaattgcaatcggagcactctgttgacgaggggacagcgaactccgattcatttgctaaagcaaaagtgacaactcaaacccatgtcacagaacacaaatcaccgtgaaatatagtcaaataattcttaccaatttgttttcctctcgaatttcaatattttctgttttgggccttgaaattgtgtcaaaatgcactcccaatggtccaagttcccgtggcgattggagttccaatgtacttatcgaacttgtcgacgttgagaattcacagcccctttggtccattgtcataaaattaggccctccactcggcgatggcgaaaagcccatgctttcctcgctgaaaagtccagtccaaatttgagtagctcgtttctcccagccagttctctcccgtctcagtgacagaattattttttaattagttttcaaaattcattttatagattttttaa

SEQ ID NO: 31520 - DNA, 1017 bp, Heterodera glycines
ttctaaaaaggatgtaaaaatattttcttgcgtaatattttttacattatgttgtgaagaatttgaggctgcttctgatgcgattgaaaatttttcagctttcttgaaaagttttttcccagaatttatacagctttcccgacaaattgtttagataattattctagacgatttttttatatctcagtgcttaactattgcctttttgtatgataactggtagatattgggagtgaaaaaaagtttgtttgtgactatttacaataaaaatttatgcagcatttctaaaaaggatgtaaaaataatttcttgcgtaatattttttacattatgttgttgaagaatttgagtctgcttctgatgcaattggaaaatttttcagcttttctcgaaaagttttttcccagaaaacggatgggtcaaataaaaaactaaacatctcacatgaccaatttaaattcacttacattttgggtttactttattatgctggcccataaaaaaatggagtttttccggtgccaaatttttgtgaattttctttcggcccgtcataagcggattgtttgggggcaaatgaaaacaaattttgtgttattcgaatgcgctagccgagctctacattttcaaatgtatcaacaaagggtctatctccactctctggcgagttatgtccagccaaagcagagtgggccataaacacgaattttttaatctttggtatttcctctattttgagcctgctctacatttatgtattgtgccaatatgcctattgcaactgaaatttattcaactttcccgacaaattgttgagataattattctagacgatttttttatatctcaaagcttaactattgcctttttgtatgataactggtagatattgggagtaaaaaaaagtttttttgtgactatttacaataaaaatttatgcagcatttctaaaaaggatctaaaaataatttcttgcgtaatattttttacattatgttgttgaagaatttgaggctg

SEQ ID NO: 31521 - DNA, 1731 bp, Heterodera glycines
  unsure (1)..(1731): unsure at all n locations
tttcaggcatgcgattttgtattgtgcttgccatgaccattgagttggcactcaaagtcgtggcccatgnccttttcttcacccncaaatgcggtggtgcgcgatgttgcgggcgtaatgacactatttatctatgcgagtcatttttgtttctgatttggatgccgaaccatgtcgagcaaaactcattggcacaactgctgatgatattcagggcaatggtcagtggtgaagcttaaaagtaatcgattgactgattgattattgttgctaattgattgtcggatgcaaacaaagggaaaagcgacgcttttccttttccgacaaattgcgattaatttgatttggagagaaggctgaatcaccgaatgggggtcatggcatttcgtacaattggcagttcgtacaatggagtttcgtacaatcgggtggtttcgtacaatgggactttcgtacaatgttccaattgcggatttcgtacaaaaaatatatataaagtcgattttttctttaaaaactcatttaacgacttgtttttattgccacttttgtgaatgtttgaaaaattaacacaataaattgtatttcctttcctaaaagcaagtatttaagttatgaaataattgtcgaaaactttcgttgaccaagttcagttaagtgagcaaatcctccgaaaaagccccgaatgaattattattgtttgcgttattaatattgttattttggatactcattagctcattacttatttataatttgcttatttttgtcattttgatgaaaagtatgtgtcgctgtcactatcacttattttttaaaatttaatattgtacgaaacgtcaaattaaaacgttgtacgaactgccattgtacgaactgctattgaccccacagaatgacacagcaccactcactcgctcatttgctgtttgttcagcgtcctcttcgcatttacactttggtgccgcacattcgccgcgtggtcgtcgaattgtgcaagggatttcgcgaaattctgttggtcaccattctgctggtgctgttcatgttcatgttcgccagcttcggacttcaaattgtcggcggcaaattggccgcttgtaacgatgtcaccataacaaataaagtcaaaatgggaaagaaagaaaagcaaatttaaaaaatataatttattcacttcaattaaatgatgtaaaaataaaacaattcagaaaaattgtacgggattattcgagcaacaattattcgtcacgcgaatggaagtttatggaaaggcaagggcaaaaggagtgcaaattttattttaaaatggaaatatttattaatttaaaaagattaaatttatttattaaaaaatgattaagaatgatgagcagatgcatccgaaaatgcttgttccgcgagtgtggtaagctcaataattcgttgccattgtgccgattccaatgcctttgtctcttttcgcgtgcttttgactgtttttttcaattcgaaaggaccaacccgcgcaatttcaatttcgaccatattggcaattcgatgttggcactgttcgaaacattgtcttacaaagggtggaatgtcatccgcgacattttgtgggccagacaagtgagtctttggcaattcattcatcagtgaagctatgaacaaataaccaaccaaattaggggccgtgggcggtcttcttcatccacgtttacgtgttcatcggctgcatgatcggcctga

SEQ ID NO: 31522 - DNA, 1039 bp, Heterodera glycines
gaccatctagaaatttacaatatacatacaggagataaaactagcaaagactaggcacaaatacaattaattaatatatgtaaatgaccggccgaatcaaaggttggtaatcgagcaaagaattttattttgagtctacatatttaaattaataataaattagattatttattttatgaaatattaaaagtttttgttaaaaaaaataattgttatcactgacgaaatcacttctgaccaaatcacatgttaccatatgaataaattgaagtatgaacaattttcatgcatttcaacaatcttacatttttgtgtgaccataaacaaccaaaaaaaattttatacatcaattttttatttgaaaaagttgattttttaaaaatttgttgatgattgaaaacatttagaaattttgaagaatgttatgttagcccttatacaaaacaaattttcctgtagaaaggggcaggcccgttaagtgtcagaattccgaataaatttttacgattttttaagttttttcaatattattagagtggtggttccaattttcaaaatgccagcaatttctttgtcagttaaagaagcattaccattcttcatttcataataatcattaattttgctcattttttcttcattgaatatcgaattccatctaaaataaaaaagaatggataaaaaatctaaatttaaatttacttttgctaatttcaataccaaattcctttttccattttcttaatgtatctttgccaattcccaactctttcgcaaattgattctgttttccatttttaaacattcttttaaactcgtcaatttgtttaataaattccctttttttcttttcataataattttggtcattttttatttttattcctaattcttttttcatttataaatttttgtctgtttaattccctattttttgctaattttttgttctattttaatccaattttctcgcgaatatttcccattttcttaattctttcttttattacgtggaatttgtggacaattgcgcattttt

SEQ ID NO: 31523 - DNA, 1017 bp, Heterodera glycines
  unsure (1)..(1017): unsure at all n locations
cgcaaacttggtaccaacattttccttctctagtctccgctctaccaaacactcacacgatatttgaaatgctaacgaaaaaaattcttgcccaaaaaatggctatctcttttttctcctggggatttgaccgcaaacttggtaccaacatttgccttctctagtctggctctaccaaacactcacacgatatttgaaatgctaacgaaaaaaattcttgccgaaaaaatggctatctcttttttctcttggggatttgaccgcaaacttggtaccaacatttgccttctctagtctggctctaccaaacactcacacgatatttgaaatgctaacgaaaaaaattcttgcccaaaaaatggctatctcttttttctcctggggatttgaccgcaaacttggtaccaacatttgccttctctagtctggctctaccaaacactcacacgatatttgaaatgctaacgaaaaaaattcttgccgaaaaaatggctatctcttttttctcctggggatttgaccgcaaacttggtaccaacatttgccttctctagtctggctctaccaaacactcacacgatatttgaaatgctaacgaaaaaaattcttgccgaaaaaatggctatctcttttttctcttggggatttgaccgcaaacttggtaccaacattttccttctctagtctggctctaccaaacactcacacgatatttgaaatgctaacgaaaaaaattcttgccgaaaaaatggctatctcttttttctcctggggatttgaccgcaaacttggtaccaacatttgccttctctagtctggctctaccaaacactcacacgatatttgaaatgctaacgaaaaaaattcttgccgaaaaaatggctatctcttttttctcctgnnggattgaccgcaaacttggtaccaacattttccttctctagtctggctctaccaaacactcacacgatatttgaaatgctaacgaaaaaaattcttgccaaaaaatggctatct

SEQ ID NO: 31524 - DNA, 1203 bp, Heterodera glycines
acacaaaaatacaaacccccgaaaatgggaattttttttttattcgcggatgtacaaaaaaattaaaccccattattcttcccaaaaccctctccgaaaaaggacagtggaatgcctaaaattttttttcagacaagacacaaaaattcaaccccagagataggggattttgtttttttttcggagatgtacaaaaaaagttagaccctattatactgcacaaaccgctccgataaaggacagtggaatgcctaaaactatttttcaggcaagacacaaaaattcaaaaccactgaaattggaatttgttttttattcgctgatgtacaaaaaaagttagacccaattatactgcacaaagaccgctccgataaaggacagtggaatgcctaaaactatttttcggcaagacacaaaaattcaaaaccactgaaattggaatttgttttttattcgctgatgtacaaaaaaagttagaccaattatactgcacaaagaccgctccgataaaggacagtggaatgcctaaaactatttttcggcaagacacaaaaattcaaaaccactgaaattggaatttgttttttattcgctgatgtacaaaaaaagttagacccaattatactgcacaaagaccgctccgataaaggacagtggaatgcctaaaactatttttcaggcaagacacaaaaattcaaaaccactgatattggaatttgttttttattcgctgatgtacaaaaaaagttagacccaattatactgcacaagaccgctccgataaaggacagtggaatgcctaaaactatttttcaggcaagacacaaaaattcaaaaccactgaaattggaatttgttttttattcgctgatgtacaaaaaaagttacacccaatgatactgcacaaagaccgctccgataaaggacagtggaatgcctaaaactatttttcggcacatcacaaaaattcaaagccactgaaattggaatttgttttttactcgctgatgtaccaaaaaagttagacccaattatactgcacaaagaacgctgggataaaggacactggaatgcctaaaactatttttaatcaagacacaaaaattcaaaaccacggaagggggcgcgggggggggggggttgtacccctaaaactcggctcgtctgcctaattcatcattaaattttgagaaatcgtggaaa

SEQ ID NO: 31525 - DNA, 946 bp, Heterodera glycines
ttttagaaaatcaaagcaacaaggctttctctcactaggaaagtgctgtgtgtccgaggcaacaattcccacccccccccctcccgccatgtcgcccgtccattttttaataaaaattttccaagtttcgaaatccttccgtcctccccccctcacccggcgccacttactcaagtgtgtccaactcgtgcctggccaatgccatgccggccaacagattgaagcagtccgttttgaacaccgccttggccatcagttcgctcattcggtcccacttcttctcgcacgcgtccaacaacagctcaacagtggccacaatgtgcaaattttcgcccaattcgcgcgcgcacatttcgcgcaacaccggcacagttatgtgaccgtcgtcgccgtcgcggcatttgtcatttccggcaaatttctgtgtggggggaggagaaaacggtgaaaatggagaataaaatggacggaccaaagcgagcattttgaccccgtccagcaacagtttgcggttgagttggccctcttcgatgagcgagttgagcaagtccagcccctgcttgggcttatttgtctgaagcaaataaagtattttaagggtttctttcccccgcctcgttgtcccttttactttgtacaattcgaccaattgcaaatgcgtgtcccgcacaattcgctcttgcaaatggtgcgattccgttggcgtcaattccttcccaaatcggccaatttctctttttggctctccattctcttgctgctgctgtgccgtatgttccctgctcctctcctccgctttattgtgcatttcctttgtcccctccggcgtcctccaaaacgaatttgccgtcctgcagcgcaaccacccgcttgtaccgctccatcttgtgcttgcgcataaaatgctgccctgtaaagttgggaaaatgggaaaatttgggggggg

SEQ ID NO: 31526 - DNA, 1442 bp, Heterodera glycines
  unsure (1)..(1442): unsure at all n locations
tctgtccagctgattaaactcattcaatggcatcaatttcgaattttcttgctcaantttatgggaatgaaatcaataaataattgatgtttntaaaattggttttccgatgcattccttataaatgaatttggtgacaaataatttgaaaatggattttttgttgatcattaattactaatgatttttgctgatttgtttaattgctggcggtgtcttcttctttttctttttgctgggcttccaactttttgttctcattttcatttttcattttggcatattttgttgcttcatattgtgtctggtgactacgtaaatgctcccaaagatggaaggttgaacttttattttgaattttaatttctttaccacaataattgcatgtatttgaatgttcattctgcataaaatgttcccaaatttcgcttttcttaggctaaatttgtttttttatactatataaatattaaagataaatggaaatattttaattattatctaaaattaatccaaaatattaaacagaaagtttgttaaaattttcataaaaaataatgaatattttaataaaataagcatttgatttttcgaatttttaaaattaaattacgaacccttcgtatcttttttttaattatttgagatgtttcactcttgtgaatcgcatttagagatttcagttggtcatttggtcttttcaatttgttgtttttgtcatcctcttttttgcctttccattcattgtcatcaattgctaaatcaattagcattttaataaaagatatattttaaaataaatttttaatactcatcggttttcaatatattaaaaattgttaattttatatatttttttgattttgtgtcaaattatcaaaatgttttaattagttattttcaatcacactttcatgagttttatcattctccgtttgatcagtatattttaaatgatttccaacaaattcgactccatcaattgtgggcaaatcagtgatcggtgaaaattggtcccaaaattcgtcaccaagataaacatcaccaatgatatgatcgtcatttttatgatcaatgccagcttctttttgtattgtttcttgcctattttcttcatcattaccgtacacaaagcacaaaatgacaattagtatactgtaacgcaaaaatgggtaggccatttcctgtaactgtaagaaaaaaaaaatcaaaaattcttatttaaaaaaaaataattcttttatattttacaatacgtatgtttctatcgtagaataagccaatgtgaagagcaaagatggagaaaaaaaaattgtaaattttaatgtataacttttttatgagtataataaaatattgaaaacttaaaaatatattgccatttttgaatagattgatcaaattattggttatttatgatgcgcttgacatatattttttta

SEQ ID NO: 31527 - DNA, 1793 bp, Heterodera glycines
  unsure (1)..(1793): unsure at all n locations
gccgtgtcggctctgcacaaacggccggtcgccagcgaacacagagcgcacagcactgtgccggacccggaactgccctcaatccgccgtccatttggcctccattggacggtcacattgttctcgtcgaagaaattatggccggcgacggacaccaancgttatggcgcacataggcatcgaaaaagccattccatgcatcatcgtcatgatcagtgagcaaattgaagaggccgtaccggttcgttaacggttgtcttggcaacagccatgcaggcaaagccttgaaacatttttatcaaatgggaaaaaatttcaaaaaatttcttgggttttaaaaaatttatgaccagaaaattacaaagttggtttctaaatatttttggccgtagatttttttaaaacccaacgaaattttttgaaattttgcaggctaatagaggattcttagggctatcgaataatgcaaaaaatgtttaatttggatgcttcttgaaaaagttattgttcactaaacttgcaaaaaattttatggtcgtgtttttttatggtcgtgtgaactgcaatagagccaaagcttgacgtcttaacgtttttgttttcgctaattatgctatattactcgtgtgcggaagcggtgccgggtgcgtggccacatgcactccaagacattggccaggccgattagggtattgaccaaagatcgtcccctggtgatcttccttgcgccgaatgtggtcggtcacccggaccaggttaggacgtgcaaattgacagtttgggcgacttaacaaaaaagagtggccataagataataaaatttatgcattctttacttgcagcggtaaagaagggggacattggcattggcattcataatgattaaaaattttatgtaactgtaatagacgtttaaattagggattcaatagctttgatgtaactataaaagaattcgatcgtttttattaggtattaagttttgttgctgatcagaattggccgcgtattgaggatgcgcacattttagcataatgtgcagctttaaattcaaaacaaattcctcagggatgcagaaaacggcgatgacgttgaaatgagaaaaccattttttcggctctaaacagatttttggcatttacgcaacttaaaacctattttttatgcttagctccttgagtcgaatcaattgataagtcatttgtgtaattttttgcgtttgactaacatacttttttggggaaccgctcaactcgccgcagtttacaaaaaaagcagataattcatgtaattatttgaatttccctgaaaattcaacgacgcatggaaattggagcaggcgttgctgctttgacaacccaaaaataacataaaaatgaatttatttctacttttaacacaaaactgaattagtttgtttttttaactttcttaatctcactggtacctgggaactgaaccacttactgcattagttagtacctccgggggttctatttttcaactccccgaaagaggggttctaattcagtaagtaaagtatgttttttttcttctatatcggttatatttgtataattatgtcgaaaattttggtgcgaaacaatcttaaaaaaggtgcagcgagttggactgcgcggagtttactcaatggcgagaaaattgcggtgagttgtcccggtgtacagatgcaatcggtttgactttgttcttggatttaaatgtactccattttcaatacttttataagttcaaagcgcaaaatttgctgatttatgctgattttttcttta

SEQ ID NO: 31528 - DNA, 1080 bp, Heterodera glycines
tttattttttttttggtcatggaaagatatatggatttcggtaaatatcttcccacaaactcacaaaatgaatgagagagtgaaaatggttagaatttttttaaaaggcccccccaaaagtgagaaaattgcaaattatggggggcttttccccctttttttagcagaaaaattggggtttgccccccagaccggttttttctgggctggtttcccccaaataaggtaaaacttcttgaaatttcattttttttgggggtttcctgaatttttccccctcatttttcaggtttttttcccctggtaaacccctgcaaatatttggtgcccccccctttccctgtttccgatgttatgcaaattgtttggcgttggctgcaacttcattcggatcaaaccttttatttgttcgtcatacaaaaaagggggtggtttgaccttagagcagcaggccccccccccccccccgaaaatttcaaggaaaatttttttttgaaaaaaataatgaatttgcaatttttaaaattatttgttcatatttttagggtggtcaatgagaagtcgtgggtgaccatttcgatgacagttggccaggtttggttttgttttcgtttttcaaattttcgacaccaaaaatttgcatttgaacaaattaataacattttttcagctctacgatcaggagaaggatgaggacggctttttgtacatagtaagtttcttttggccaattaataaaaaactatttcatacaatttggtgaaaaaaaaaaatttttttttttattgggaaggggaagggaatccgtttatacctccccaaattcgggatgttttaccaactaatactcatcttggcctccgcgtttttcggcactgataattaatttggatgaattatctatcggcaattaatgaattcaattgtttcaggtctatgcaagtcagcacgcctttggatgatgccgcggcacagaaaacagcgatgaatggcacggggggcggaggagaatggattgataaaagtgtaaatacctaaatacaaaaccaccaaaagacgctgtgtctctctcacaatcag

SEQ ID NO: 31529 - DNA, 1067 bp, Heterodera glycines
tgagtgttagtagagccagactagagaagcaaaatgttggtatcaagttggcggtcacatccccaggagagaaaagagatagacattttttgggcaagaatttttttcgttagcatttcaaatatcgtgtgagtgtttggtagagccagactagagaaggagaatgttggtaccaagtttgcggtcaaatccccaggagaaaaaagagatagccattttttcggcaagaatttttttcgttagcatttcaaatatcgtgtgagtgtttggtagagccagactagagaaggcaaatgttggtaccaagtttgcggtcaaatccccaggagaaaaaagagatagccattttttcggcaagaatttttttcgttagcatttcaaatatcgtgtgagtgtttggtagagccagactagagaaggcaaatgttggtaccaagtttgcggtcaaatccccaggagaaaaaagagatagccattttttgggcaagaatttttttcgttagcatttcaaatatcgtgtgagtgtttggtagagccagactagagaaggcaaatgttggtaccaagtttgcggtcaaatccccaggagaaaaaagagatagccattttttcggcaagaatttttttcgttagcatttcaaatatcgtgtgagtgtttggtagagccagactagagaaggaaaatgttggtaccaagtttgcggtcaaatccccaggagaaaaaagagatagccattttttgggcaagaatttttttcgttagcatttcaaatatcgtgtgagtgtttggtagagccagactagagaaggagaatgttggtaccaagtttgcggtcaaatccccaggagaaaaaagagatagccattttttcggcaagaatttttttcgttagcatttcaaatatcgtgtgagtgtttggtagagccagactagagaaggcaaatgttggtaccaagtttgcggtcaaatccccaggagaaaaaagagagacactttttctgggagaaattttttcgctagcatatcacatatctcgtgagagtgtgtgagagacacactatagaaa

SEQ ID NO: 31530 - DNA, 1010 bp, Heterodera glycines
tgcataaatttttattgtaaatagtcacaaaaaaactccccctttactcccaatatctaccagttatcatacaaaaaggcaatagttaagctttgagatataaaaaaatcgtctagaataattatctaaataatttgtcgggaaagctgtataaattctgggaaaaaacttttcaagaaaagctgaaaaattttcaatcgcatcagaagcagcctcaaattcttcaacaacataatgtaaaaaatattacgcaagaaattatttttagatcctttttagaaatgctgcataaatttttattgtaaatagtcacaaaaaaacttttttttactcccaatatctaccagttatcatacaaaaaggcaatagttaagctttgagatataaaaaaatcgtctagaataattatctcaacaatttgtcgggaaagttgaataaatttcagttgcaataggcatattggcacaatacataaatgtagagcaggctcaaaatagaggaaataccaaagattaaaaaattcgtgtttatggcccactctgctttggctggacataactcgccagagagtggagatagaccctttgttgatacatttgaaaatgtagagctcggctagcgcattcgaataacacaaaatttgttttcatttgcccccaaacaatccgcttatgacgggccgaaagaaaattcacaaaaatttggcaccggaaaaactccatttttttatgggccagcataataaagtaaacccaaaatgtaagtgaatttaaattggtcatgtgagatgtttagttttttatttgacccatccgttttctgggaaaaaacttttcgagaaaagctgaaaaattttccaattgcatcagaagcagactcaaattcttcaacaacataatgtaaaaaatattacgcagaaattatttttacatcctttttagaaatgctgcataaattattattgtaaatagtcacaaacaaactttttttcactcccaatatctaccagt

SEQ ID NO: 31531 - DNA, 1213 bp, Heterodera glycines
ctgcaatgtccgaacatattccatcaatttgtcagccgataaatgacccaattctgaaaaataaaatgcaaagtattccatcggttggtgatgaccattgaccagcttcacatcctcgggatccaactcagttctgaaacgtgaagcatttcgttccttttcctcttttgttttcgtcgactaaaatcaacgaaatgcaaaaggatcttttaagaatcggcccaccaaatactcgctgtgcaaattccacgcccctggcaaaggttctttgaaggcaattggagaatttgtgtccagtctttcttgacaaataaattctggaacgttttgttgctgtcgcaagtcattttgtcggtccatcttagaggaatgatttaaaaaattatatgtttgtcatataaataaaagaaaggaaaatgcaatagagggggggggggggatgaaagaaatggatggaaaaagagtgagagagggggaaaatgaaataaaaggtgggagcaggaaggaagagtacgagagagagagagagagagagaaaagagagagagagagagagaaaagagagagagagagagagaaaagagagagagagagagagaaaagagagagagagagagaaaagagagagagagagagagaaaagagagagagagagagagaaaagagagagagagagagagaaaagagagagagagagagagaaaagagagagagagaaaagagagagagagagagagaaaagagagagagagagagtattgtatggggagagagcgaaacggtgagggaaagattttcaaaagtaattttttccttaatttttaagctggaaaatttcaaagcatcatacgaccgtcgtctagtttatcaggaaattctgattactgatgcattttctcgtcacgccgcgtcaattcaaactttattttgagtttttcgttccctttcaaaggtacggtaaggaatcatcgcttcatcttcaaatgaaaatgattgttttgacctgaatatgagctgattccgattattttgccgttattaaaaattaataacttttaatagatcaaataaaatttatttgcttaattatgtaagtcacatttttaattatttcctaattaaatcaaatttaaaataggtgcatttaattccaacatattaaggtttttcccttgaagagtttttttaagagttgttgttagcttggacagtg

SEQ ID NO: 31532 - DNA, 1418 bp, Heterodera glycines
ctttaattttggttcaattaaaataagataaaataaattatatttttaaaattaatttttaagcatttcccatccaaatagggcaatctaattagcatcgttggaagctctggagaggaaggaagaaaaggcattgaatcgaaatggaatttatgggatatacatatagtgagatgatcggaaattggggataaatggcactttgctaaatgattgggactgggcgataaattggttaatttgaataatcgattgatcggaatagggaggaaatctttaactgatcagcagggattgaaattttcattatttcacttcttcttctcccattgtttcacattccacttgatgatccttagacaaaaagacttttttttacttttgtctaatttttgggattttatgactttttagtcgattttttaaagtggtttttcgtgatttaaaatcacaccctttttaatcaaaaattactctcgtcgtctaccctccctccctttttgtgtactaattcgtggttccgaattttttggcattttgaaattaaattgtaaaaattcgaaacaaaaaactcggtaaagatttttttcacctcacaatgtttataagtaccaccgtgaggcgggacagttccaaaatttgtaccacattttactgcggaatgcccaagtaccttaactggacaatttcttgtcaacgaccacactcgcctttggcgtcttatggaacagaaaagggtgaatatcagatggggtgcgtcccttcctaaaaagttctcttttcgcctacccctcccattcttgtgcactatttcttttcataattggtccaaatttttttgctttttttgaaatttaattgtaaaaatatatacgaaattctttcttttcgatttaaaattgtgcttctcaatgtctttaagtcccaccgtgaggcgggacagttccaaatttctaatttgaaagcttttttttaaaaaaaaaagatggtgcattaaagttgtcaaattattttttcaagggaaaatcccttttaattgcgtatttggcgttattatttctgaaaaacgtaaacttatttgcactgtaagccggaaattgggtaaacccaactcatctaaattctaaaccaaactcatccatgccaaactcatccatgcccaatatctatatacccaactcatccatgcataaaaatgccacggaccagaccgcacaatgcaaaaaattgtacgatcaagaccgcataagaaaggccacgactaagaccggacttgggtttggatgagttgggcgtgactccccaaaattgactcatcacttgtgtttaagaatgtatcgaatccgtccatattttcccgattttccggtgcaacctgaacacattctttaccgcttatcttgtcaccatgccattcc

SEQ ID NO: 31533 - DNA, 2173 bp, Heterodera glycines
  unsure (1)..(2173): unsure at all n locations
catttggcctagtgttttttaaagtcaaaaacccatgtctttataatacgcggaatagtcgaaatccatttttgaatttggtcagcaaagaatttttaagaatgaacgtggaaatgaatagagccgcattaccccgcttaagtttgctcctccttttgccgtgccattgcgattggctcctccctcagcacggctgtgattggctccaccttcagcccgccacggacagcaaacaataatgtgaatgattgatgggggaaatttgaatatgattttgtctttctgtgccatccctcccccatcatcgccactgttgggagtgggcaaaagaaatttttttctcaatttcgttggatgattgatagggaaatttgaatatgcctttgcatttcggtgcgcttctcccctgccaggcaccactctgttattgcccactgcgatgggagggcaaaaatggactgaaagaaaatgaaatttcttcgcgagtttagttttgattgacagttcagtgtcataaaaaaagaaaatttgaaggaccaaacggaattgtcataaaaaattcaaatgcgaaggacgaaagaattgcgattgcaaaaaaaacaaaaatagtaacgatggacaaaaaatttttgtgcgtttgtgcacaatttaaatgagaagaaaaaacttgtgcgtttgtgctcaaattatgttgggcaaaaaatgataactgaacaaaaaactttgtgcgattgtgagcaattatgattgggcaaaaacatagcaaaaaacttgtgggtgcgtattttgtggaagaaatatgatgaaaaaccagaataaatagagatgatggtcgactatcagtcaaaatgggcagattattaaccaaatgagcattagtttttgtgtaaaaaaacatgtttnttgtgagcattttggtttcggtttgccgtttgtggggctatntaagacggtagaaagttattgtgatcgtcattcgagcaaatggacgtaactcttcccgtcagcaactcagttggtgaatggatcggtgaggaacggggggatggcagtgttgtgctctatgcgccgtggacggacgtgtggcatgtgcagcaacaacaacaacaacatcaacaacaccaacaacaacaacagcaaaacgaggtgcagcagcagcaacaacagcttgtccggcgaacaggcacggggtggacgcggtttccagcatggaacgaaccgctcgttgccaacgattggcgagagaaggaggaaaatctgatccaaaggaagcgactacagcgtgaaaacccggtgtattgggcgcgaatattggaggaggaaaagcgagccggtgaggagcgccgcttaagggatttgcggttggagcacacatgggatggctacaaggaaggccacttcgagcgtcggcacaatgacggctcgttttttgaggccagaaaatttcttggttcaaatcgacagaatgacttttttcattttcagtttgttgctggggtcgggaagacagtggttggaagttctggaggagggctttggtgaatgatgttggcatgggattgaaagtgttaagattaactatgattggggatggtatttgacattaatcgctgataaataaatttttcgttgagttggaacaatggggaagaggaggggagggttggaataagttggtaaatgttttttcacagaattttgggaacacattaaaatataataaatgctcacgaataatattggtccgcatagtgcatcgactaacattatgccagcgtcaatccccctcccgtgccggcaacataagccacacaaaatagccaccaatccatccccatcccctgccggatgttggcaactaaagccatgcacccggcctatcaatccacagtggtggcaacttaagccaccaatccctcagcccctgcccggtgttggcagttaaagccatacacccggcctatccatctgcgggtgggaagcaacgtaagcctcccaatccctcctcagcccctgcccggtgttggcagttaaaaccatacacccggcctatccatccgcgggtgggaagcaacgtaagcctcccaatccctcctcagcccctgcccggtgttggcagttaaagccatacacccggcctatccatccgcgggtgggaagcaacgtaagcctc

SEQ ID NO: 31534 - DNA, 1633 bp, Heterodera glycines
tttcaagtgtccgtttggggtactcaaacatttatgcggagcaaacatccaacgccgaattaaagtacagactatagagaagctattcccgaaggattcggtctccccataaatctgggcgcatcggttcaggggggactgccgagaaaacaaaaaaatcgattttttcaagtgtccgtttggggtactcaaacaattatggggagcaaaaatccaacgcagaattaaagtacaggctatagggaagctattcggaaggattcggtctccccataaatctgggcgcatcggttcggggggactgccccgaaaacaaaaaaatcgattttttcaagtgtccgtttggggtactcaaacaattatggggagcaaaaatccaacgcagaattaaagtacaggctatagggaagctattcccgaaggattcggtctccccataaatctgggcgcatcggttcggggggactgccccgaaaacaaaaaaatcgattttttcaagtgtccgtttggggtactcaaacaattatggggagcaaaaatccaacgcagaattaaagtacaggctatagggaagctattcccgaaggattcggtctccccataaatctgggcgcatcggttcggggggactgccccgaaaacaaaaataaatcgattttttcaagtgtccgtttggggtactcaaacaattatggggagcaaaaatccaacgcagaattaaagtacaggctatagtgaagctattccggaaggattcggtctccccatctatctgggcgcatcggttcagggggactgccccgaaaacccaaaaaaaaattttttggataaaaattatttaaatgaactgactagataatatttaaaataggtttttctcttcctttcagtatccctgcaaagtttggtgcgcttctgatcagtttctgaaaaaaaagttaagcctaaactttttggcctgtttaaaaaggaattaaaaatttttaaaaattttattcatctccctttttgatagaaaaagcatcagagtgcctaaactaacatgtaaataaaatttggtgcgtttcagaaccctttctgaaaaaatctttaagaattaattttgcaaaaaataaataaaaacgaaagactcagattttcgaaaaattttttagagcaagctagctcggcgctcatttcagtgtaagttagtcctttaccggggagtatccctgcaaagtttggtatgcttctgctcaattagcaaaaaatatgagtgatcaaactttcactaaaaagttaagcctaaattttttggcatatttaaaaagcaattaaaaaatttttaaaattttattcacctccattattgatagaaaaagcatcagagagccttattaacttgtaaataaaatttggtgcgtttcagaaccctttctgaaaaaatatttatgaattaattttgcaaaaaataaataaaaacgaaagactcagattttcgaaaattttttttgagccagctagctcggcgctcatttcagtgtaagttagtcctttaccggggagtatccctgcatagtttggtacgcttctgctcattagcaaaaaatatgagtgatcgaattttcactaaaaaagttaagcctacattttt

SEQ ID NO: 31535 - DNA, 1506 bp, Heterodera glycines
  unsure (1)..(1506): unsure at all n locations
ggcggagaggccgagtgagtaccttcggtgcaggaaaattattaaatttaaaaattttttaattgctttttaaatatgccaaaaaatgtaggcttaacttttntagtgaaaattcgatcactcatattttttgctaattgagcagaagcgtaccaaactttgcagggatactccccggtaaaggactaacttacactgaaatgagcgccgagctagctggctcaaaaaaattttcgaaaatctgagtctttcgtttttatttattttttgcaaaattaattcttaaatattttttcagaaagggttctgaaacgcaccaaattttatttacatgttagtttaggcactctgatgctttttctatcaaaaagggagatgaataaaatttttaaaaatttttaattcctttttaaacaggccaaaaagtttaggcttaacttttttttcagaaactgatcagaagcgcaccaaactttgcagggatactgaaaggaagagaaataacctattttaaatattatctagtcagttcatttaaataatttttatccaaaaaatttttttttgggttttcggggcagtccccctgaaccgatgcgcccagatttatggggagaccgaatccttcgggaatagcttccctatagtctgtactttaattctgcgttggatttttgctccccataaatgtttgagtaccccaaacggacacttgaaaaaatcgatttttttgttttcggggcagtccccacgaaccgatgcgcccagatttatggggagaccgaatccttcgggaataccttccctatagcctgtactttaattctgcgttggatttttgctccccataattgtttgagtaccccaaacggacacttgaaaaaatcgatttttttgttttcggggcagtccccccgaaccgatgcgcccagatttatggggagaccgaatccttccggaatagcttccctatagcctgtactttaattctgcgttggatttttgctccccacaaaaaagggagtaccccaaacggacaccatcttaaaaggacngnnntggggcagaaaaataaatgncagaaagagcgcgaaagcgcaccaaacaaaattgacaacttaattttagcactctgatgctttaatatcaaaaaggaagatggagaaaaaattttttaaaaaatttttccttatattttggttatatcgttttgcttttggtggggtgcttggaacagtggaatcatgcgcacccgtccgatctggcaagttaagcaacgattgctgactagccaaaaggttcggtgccgtgatgaaacgaaccagcactgcttaccccgcggcacccggcacggtcccccgaaggaatggatttaattaaattctctccttcggggatttttttccattaggtcgtccgttagcgttcgattgctctagtcaatttttaaaaatttttgttgaaatatttgtcgtgctctgaagggcgtgggaggggggggggggg

SEQ ID NO: 31536 - DNA, 1117 bp, Heterodera glycines
  unsure (1)..(1117): unsure at all n locations
cacttcttccagctgatcaattgacaaaatgctcacaaaaactgctgtgccggcttcgtcttcacgtaaattttgtacaaagtgttcgtgtggaacttcagcgtgaactgtgacgagtcgaatcgtcctccgtcctgtttgtacgaaatgctctcgtggttcgtcgcgttgcttatcacaattgtcaacagaaagtgattgtcctccaaatcaatggacgactgtcgtcggcaggccgaaattgagaactttcgctggaaactctgctggtgaagcggctccatgccaaacaaaacggtaccgggggcactgaacgaattttctttgacgagagaattttgacggagcggcatttggcaaaagaaatgggataaaactgaaaacaaaaagagaaatgagcaatttatagaatgaataaattattataggaaacggacggggagggcaaatggaagagaaaatgggaaaccgataaaaaacggggngggggggatcaaatgtaaaggaaaagtggggaaaagtgaagggataggatgggaaaatgaagaagggggagagatgaatcaaaaataaagggnggggggggtcaaatgtacggggaaatggaaaacgggagcgatggaataggaaaaataagtaaaaaggggggggatcaaaagatagggggggggagagcaattgacagaagtaggggaaagggatggaacagcaaccgaatgaatgcttaagataggccaaacgacggaacggatgaacggatgaatgggcaaagcattattgggggagaaagagggaggggggggatggcgtggggggcggcgaccgatgggcgacgcggcgaaatacgaagcggcaaagtgatcagaagcaacggaaggaagcaaagcacacggacaacaaccaactttaaaagtcaacaaatgattaatcaaatgaaggaaattcaaccacccaaaattatggaatattggccagttcaattcatttggctcttaaaggcgccttcttccattgtcaattggtcattcgatcgctcagccgcggggattgctcaattttttccgttccattccttaaaataattttttgcctttattaaaattggcttactttttgt

SEQ ID NO: 31537 - DNA, 1465 bp, Heterodera glycines
  unsure (1)..(1465): unsure at all n locations
attcaaatcatcatcgccaaagaaaaactcattaattgccgcatttgtatnttggcaatgnagtttgcggggtctggcaagccaaaatgcacagagcttaagttaaagcagctgtgcagccgccaatcaatgtcggctagggcttcaagctctgctgcttggcgttgtgccgatgtggtaatgccttgaggaaagtacatttggtctttgtacttgttccacaattcgacggcattactgggctggccataaacgaggatgctcatgaagagccacctcatttgatcaggccatcgtgacaacgctgcctcagcgagtgttttatcccagattttgtcatcctcaagaagaccgtgccttattgcagcatcagtgaaagaggtacaaggctgaccatttaccattttaagatggtcagggtcaccgggaaagtggcgcataagtgaatatagcgcaaatctttccggatccttgggtggaacagggacaattcgaccaattggaggccttttgatgggcttccttttgtaaagaacccatttgtccttatcccatcggaattgttccggcactttttcgaaaagcatgtccttgaacttaggatcatgccgccattcattttgccattgtttccaataggctgagcattgtgtttccggcagtgtgccttgctggatttgctgagctttgctcaccagctggaaagccctatatacaatggactgttgatttggcaaatgaatcatcaatttgacaacgtggtgcgaaagccgaacatatggtgttgagttaacaacggcatatgcctccgtagcaccacggaagttcattttggcatattgagccggctcatcgataccgattttgttgccggactcttctttgcactcgacataacaatgtccaagacctttgaatgggtactttagtgcatattttatatttgccttgttaccatacgcaaatagcacattgtgatgtacccggtagcgtagtaaaacataagggttgtacggcacgacctgtgagttgtcgtatattaagccgtttacctcaatattggcaccaccatcctggggtgcaggccggtaatacaacgcaggcctgtcgggccgcaaaatcgtacattttgagtaaggggctgggaagccctttttgcagcgcccgtaatattggtcacgagtaccacaccaactttcgctgcacctgtgcagctgcaaatgcatcaattcgcgcacttggcggtgcatttccgcgatgggagtgtcatcacctttttctggcaaaagtggaatgtgagcccaaatgtattgctgaataacatctggaactgcatccaggtcagtctgggccacaatgtgtgcatgcgggcctccacggccttggaactccatggactctcctgatccaaggattgttccaaagaactttttttcgtaaagttcttcgcggaattcagcaattt

SEQ ID NO: 31538 - DNA, 1188 bp, Heterodera glycines
tcaaatgcaaatgccatttcgatggtccgcttttgcccgttgcgctcctttttcgcattttcgacggcgttgacagtcctttcgaacttttttcgctgcgacttaccaacaaaaattgtgctgactttgtccgctcaaaaatcagcgtaatttgccaacattgatccaaatgattggcattattcattcattcctcttcagcgtgtctctgagatggaccttcgccgcgtctcttttgaccaattgtcttcgctgtccgtcaattcgtccggcacttccgcccaatcggagaccacagtgattttgcaaggggagcaatggtgagggcactcgttcattaagcgtggtatattaaaattaatgaaaatcggctgttaggcatgtgcaccccagcggatacaaagtgttgtgccgaatgagaccggccaacgacggagagacggacaacgaaacagacaaaaacaaagcgaacgatgagtcatcggcctccaatccgtcggaggacacttccaccggcatggaaatggtgccacaaaattggcacattttatagggttttgcgtccttttcagttatgcctcgaagtgcttgtcgatgaggaatggaccagccgcgagatttccatcctttgttcgttggtcaacgaattccgacaatccgtccaacggattagcgtcgacgcacccatttttgaattggtgcgtaacagcgaatttttggcacatttttttggcatttgccatttccggaaatttctctggttgtgagtgtttcaattcgtgctaacttattttcagattgtcgccaattttgcctccatcgatttgaaccggtggtttgcctaccaatgctttgtcaaagcggtggacgacggtcaaatgggcgcctcacttaacaaaatggccgctcaacttcgtcaccatgacgaggcactcactgaattggcattttgcaacggattaacctcaattacagaatgaccaaatggaatttgtgccgcgcacaagcgaattgtattggccgaacgcgaaaaccattctgatcagaaccaccgaacgcgagtcggtccatttggcacggtgagagtgcctttgggaaatggccgagtgggctgggccatcacatacatatacaaggggtgtctcgagacaccccttgtatatggatgggccatcacatacattcttt

SEQ ID NO: 31539 - DNA, 956 bp, Heterodera glycines
tccattccgatgagcgtgtagcgttcacaattgcccgcacggatgtcacagaggaaagtctgaaaacataaatttaaaatgaattggtggcaacaaaaaacagcgacagcacttttgggtcggcaaagtgccacagaattggtgaagtgaaatgagttgccaaaagatggtcaaagtgagcacaatttggaacagctttaagtagacgattttctccatgatgccaccacgtgtgacgacttcttccgtttgctgtgatcgatgaaggagcagaaagatgctttgacacaattgccaaatagaaaacaatggtgaaaatactgatggacgcaatgaatgagagcattttcttcaaatcgtttcctttatataggcggacgaaggacgattcatttttggccaaaacgcaaaattcaaggagtataaataggcaaaaatttgcagtctgttggacatttttgccggtttagtgacgatttaccccccccccccccccctccctaatttttgtttattatacaaaatggacagacaatatgcttcataaatctggacttccctcttaagcgctttcctaaaaagatagccaagtgatttcagggtatgcacacagataaaatgaaaactccatattttcccgaagaaattataaaaagcgtctgactcttgacttctaaggcccaaatcaacgcatttatttgttttacggtcattaccgtaccatagtgttcgggtttaaagaattatttaataaaattttgctatacagtaataacaatgaccaggtttcagttgaaaacctattttttcaaggacaaccaacgttattcatttaaggacaatggtcaaaagcgactaatttagcctatttttacggtatcaccgtgcccgtgttcaagcaaagcgttgataaggcacaacagcagaagaatggcgaaaaatggacgggaaaagcg

SEQ ID NO: 31540 - DNA, 1412 bp, Heterodera glycines
cccctaaaacatgtttttatgactttaaaattaacaaattcataaaataaataattttgagtaaaattgaattttgactcaaacttttcattaaaaagcgttcaaatgtgcgtcaaaaaaacaattaattacattttaataatgtgcacagaaaacttgaaaatttctaaataaaacaactctttataaacgcgatacaattgtctccgaccacaaaataattgtagtgaaaaaaatggaatgaaagatgatgagacgaacaaaaaaaaaataaataattgagcagacaaaagtcacataaatatcattttaataataatcaaatcaaatccataggacgatgatcagaaaaaatgccattccggtaataaataatccatcaaatccaaaaaaaatcccgtcacaataatgtcttgccaatcactcatttttttgttgccttttcatcggtgcctttctcctcatgagttttgtgcgattttacagccaccggtttgcgatagccggggcggtagatttcgcgctcggggcgttcctggaaatatgccacaattaaggcggtaattgccaataattagggttgggtaattgccatgattaggggatgggttccataaataatgtaattgccataattaggggatgagtaattgacataattcaggaattggtaatttccaaaataatggggtaaagtgatttccgtaattaggggacgggtaattgccataatcagggggattgggtaattgccatgattaggggatgggtaattgccgtaattaggggttgtgtttgcataattatgggtaactgcgatatttaagggttgggtaattgccataattttttggtgtgcatcagcaccttgttattgcgcttggaatttttgatgatcatcacttcgccactctttggtgccgtcgtcgttgccgccgccatcgacgcagacaattttttgtctaaaataataaacaaatgcaaattttgcatggaaataaaataaataaattctttatagaaatgaaaatttaatttgccaaaatttatgtgctgcgtgagaaaacaatttttttttttgtaagcgccgtcggggaaaagttaaaaattttttaatgacattgcaccccccccctccctgcagggacattcctaggttcggcttggagagggtaccgcacccgggcgaccgagctattttttttttgaattttaagtcatgttttgcggcgcatttttttcaaaaaaaaaaacataatttggtcgatttttggagaaatttagcgaatttttacgggacctcccctcgacacttagtgagtctgtcccatgtgccgagaaatttctcgactctccaaatcgcttcattaaactaatagccaccaccaccaccaatgggccactcaccgctg

SEQ ID NO: 31541 - DNA, 1352 bp, Heterodera glycines
  unsure (1)..(1352): unsure at all n locations
aggggtataaacccaactcgtgctgccccgactcgtactgcttttcgactaaaaatcgttataagcttttttaaaagttagccaaattaaacattcttagtattatttaattgctcttaaggttctctatctacatgcaaaattgaagaaaattttattgtttttcaaaaaagttatgatctatcgtaaaaaaattatttttcgtccataatttttacaaataattttgcatggaaatagagaaccttatgggctgctgttggtcaagtacgagttgggtttgtccaaacaaagcccccagttcgagtgggtgggcttaaaaaataaaacccctcttgaattagagccccctgaatacccacccgcccgcccccttcgaggttggttgaaaaatagagcatccggtggcacgaatacagtaaattaaaaaaaaaacatttttttaacgtttaaaatttaaattattgtcacttttttctcaccactttctttggcacagtgttcaagtcggtggctgacaccatcagcagatgctccgccattgtctctctgtccaacggtttggtgctgctgatccatcccgtgttcggatcaatgtggaacaaattggcattgtgccaatggcctccttcaatggcataaaccactgctggtggtgccgtaaattcatccgttgttgttaggtcgtcaagcaatgttcgaattcgtaacagttgagggatggcctcattctccggcactgacacattgccacaacttgtgggctcaatttttggccccccaccgaccgatcggcgtggcacaaccgtgacaaaggcatgatcaatggcacccgccgatggcacatgttcggtggttttgtttgatgaggaagagttgttgttgcatcgcttgaccaacactaaaatgcaacaaatttattctttaaagaagaaatttcaagaaattttttctttgaaaatttcaatgattttttggaaaatttttaaaaatttagtaattaattcatctaatttttaatttaatttttatatcccaaaattattgttgtaccagttaaagttaaattgtgactcatgttaaacagtgcgtcaacttcatttgctgttccaacaaattcgagagtgccgttctcctcatcaattttgaacccttccaacgatggcaaaatagcaaaattaacacaaagcgaaatgtctgaaattaaaaaacaaaataatttatttaataggtatttaaatgggttcttaacccttttgtcatgccgtngaaatttttttttctaatttttttttttcgtaggataattcgtccagtcaatttaatcaataacaatgccaatttctttgcat

SEQ ID NO: 31542 - DNA, 991 bp, Heterodera glycines
tcccagggtattatttgtaaaatctttttttccccaatagacttttccaaccccctttttcgcaccgggaatgttattttttattgattctgacccggtttgagtagataagactagaaaaaatgaaaaatttgaaatcatgtttcccactcccttctcccaggggtattattttgtaaagtctttttttccccaataaacttttcataccccatttttcgcaccgtgaatgttatttttattgaattctgaaccgttttgagtagattagactagaaaaaattgaaaattttgaaatcatgtttcccactcccttctcccaggggtattattttgtaaagtctttttttccccaataaacttttcaaaccccatttttcgcaccgtgaatgttatttttattgaattctgaaccgttttgagtagattagactagaaaaaattgaaaattttgaaatcatgtttcccactcccttctcccaggggtattattttgtaaagtctttttttccccaataaacttttcaaaccccatttttcgcaccgtgaatgttatttttatcgaattctgaaccgttttgagtagattagactagaaaaaattgaaaattttgaaatcatgtttcccactcccttctcccaggggtattattttgtaaagtctttttttcccaataaacttttccaaccccctttttcccaccgggaatggtatttttattgaattctgaaacggtttgaggaaattaaactaaaaaaaattgaaaattttgaaatcatgtttcccactcccttctcccaagggtattattttgtaaaggctttttttccccaataaacttttcaaaccccatttttcccaccgtgaatgttatttttattgaattctgaaccgttttgagtagattagactaaaaaaaattgaaaattttgaaatcatgtttcccactcccttctcccaggggcattattttgtaaagaatttttttcc

SEQ ID NO: 31543 - DNA, 1023 bp, Heterodera glycines
aaaaccgtgtttagaccgcagtaactcgctcagagtgaagattaagggacgcaaaagagacgattaaaagcgattcgaaattctatcgactgatataataacgatgcagtcgcggcgttgacaactgagatggaaccaaaagttccataatatcttttccataaggctggaaaggcagaatttgaatggccagtctatatttacactgagcacccgttgaagcgggtgatgcgaagccatagcaaactgtatttttaaattctggcagcaattctaccaaaaacgtgtttagaccgcagtaactcggctcagagtgaagattaagggacgcaaaagagacgatttaaaagcgattcgaaaattctatcgactgatataataacgatgcagtcgcggcgttgacaactgagatggaaccaaaagttccataatatctttccataaggctggaaaggcagaatttgaatggccagtcgatatttacactgagcacccgttgaagcgggtgatgcgaagccatagcaaactgtatttttaaattctggccgcaattctaccaaaaacgtgtttagaccgcagtaactcggctcagagtgaagattaagggacgcaaaagagacgatttaaaagcgattcgaaaattctatcgactgatataataacgatgcagtcgcggcgttgacaactgagatggaaccaaaagttccataatatctttccataaggctggaaaggcagaatttgaatggccagtcgatatttacactgagcacccgttgaagcgggtgatgcgaagccatagcaaactgtatttttaaattctggcagcaattctaccaaaaacgtgtttagaccgcagtaactcggctcagagtgaagattaagggacgcaaaagagacgatttaaaaacgattcgaaaattctatcgactgatataataacgatgcagtcgcggcgttgacaactgagatggaaccaaaagttccataatatcttttccataaggctggaaaggcagaatt

SEQ ID NO: 31544 - DNA, 1197 bp, Heterodera glycines
aatcgattcctctcggcatgtaacccccgtatccgaaagaattttttgatgaaaaagaaattgaaaaaagttattgggtcatcaaaacctaaaaaatgacataaaaaaaaaacaatttaagtgagccaaaaaaaacgcttttgaggactcataacttaggtaaatttcattttcataaaaaagtgcaaaattttttatttttttattaggttttcaatgatataaagaaaattttcaaaaatttttttcgaaataaagttgttttatgggttttctgggtcgaagaattcgattcttatatctatttcggcccatttcgaacccctgacccggactcgaacaaaaattcgaaaattcaattttcgaaaaattctaaatatgcagcaaaaccggttcaaatgcacgaaatactttatcttgccttctgaatcgatttttctgagagattaagcacaacaattgagatcgatcatttctcaaatacaattaattattcattttcgtacacttaatcagacgacatttttgttgctttgatccgcttcttcttctccttctttttcttccgctggtggcgacaatggcctaaaattaattaaatattttatttttcggcaaaatcaaatgctattgctgctgctcacccaatggatttatcgaaactccacagatcaaatctgacattgttcaaattggcactcggattttcgcggttttcccacttaactggcgccgtcgccgtctccccaattgggcaccgttgcaacagccaattatacaggcaattatagcctaattctttgctaagtttcagtgtcagcttttcattcgtcacttcgttcatcaattcaaatggcgcaattggcattgtttccacacgaaaataaagttgaatttggtaactgacagaagtggtggcacgacggaatgcctaaacacaaaaattggtaaaacaaaaacaaattgacgaaaattctggcgagacgacctctttgaagttgttgacccattcgaaatttggtggactcacataagcacggaaacgtaattgctttggttgtccatttttgctcggcgtgtgcaaccatttggacaacgcttggccggcagttgcatttggcccatcgtcagaaattccatcggggcacagtccataggaagtgattgaatacaattgaacaagatcagtgagaagtg

SEQ ID NO: 31545 - DNA, 943 bp, Heterodera glycines
ctgcgcatataggaaaaatgggctcaagaacagcattccttctacgttaaatgcacatatataaccagggttcgcagatctgaggctttagcctcattttgtggttttttgataggtcaatgaggctaaattttcaaaatgaggctttgaggctttttgtggttttttgagaaattttgagtctttttgaggcttttggggaaaatcctcagaatcttttaaattttgataaattggcataatgtttggcaatttaaagttaacaaatcgcattgaaaattacaaaatttttcccggcggcgctatcggcaccgccggccccccgtgcgccccaaaagttttttgggaaaagcgccgcaaaaaaatcaacttcggtttttcatgcttagaatttcacaaaatgtttatttcgaacaaaaaattgctcaaattgatcatggacaatcgaaaatataacatttgaacattttaaacgtgttttgaataaatttgtgaaaatgaggctttttgacccaaaatgaggcttttttgcttgccaaatgaggcttttgaaaattttcatctgcgaaccctgtatataatcctacatataaccgccggtttctgaaatttcgaaatggcgggggagggagtgacagctgctggcaaagaacataactagcaaaatgattgctgttttataacaacttttataatactcaaaaatcaaatataaataaatacagaaaaacaaatcaaaatacctatgtaaaaatctctgttatttctggtcatttatcacattgttagcattttgccctttggcattggcaatttaggaaagaaaagcgggcgaaaagatgctgaccatcagaaaagtttgagtgaaaatggccggcgaaagaaatgcgggggaaaacacggcaccgcccagaacttgccgcgacagtatatcggcggacaa

SEQ ID NO: 31546 - DNA, 1016 bp, Heterodera glycines
aaatggctccataactaagaatagatattctcagaaaaatggctatctctttttcctacagccttcaacatgaggttttccccgaaaacgcattactatatacggttgagccctacaaatggtcggttggaaaatggctccataactaagaatagatattctcagaaaaatggctatctctttttcctacagccttcaacatgaggttttccccgaaaacgcattactatatacggttgagccctacaaatggtcggttggaaaatggctccataactaagaatagatattctcagaaaaatggctatctctttttcctacagccttcaacatgaggttttccccgaaaacgcattactatatacggttgagccctacaaatggtcggttggaaaatggctccataactaagaatagatattctcagaaaaatggctatctctttttcctacagccttcaacatgaggttttccccgaaaacgcattactatatacggttgagccctacaaatggtcggttggaaaatggctccataactaagaatagatattctcagaaaaatggctatctctttttcctacagccttcaacatgaggttttccccgaaaacgcattactatatacggttgagccctacaaatggtcggttggaaaatggctccataactaagaatagatattctcagaaaaatggctatctctttttcctacagccttcaacatgaggttttccccgaaaacgcattactatatacggttgagccctacaaatggtcggttggaaaatggctccataactaagaatagatattctcagaaaaatggctatctctttttcctacagccttcaacatgaggttttccccgaaaacgcattactatatacggttgagccctacaaatgggtcggtggaaaatggctccataactaagaatagatattctcagaaaaatggctatctctttttcctacagccttcaacatgaggttttccccgaaacgcattactata

SEQ ID NO: 31547 - DNA, 1375 bp, Heterodera glycines
cgaatccttcgggaatagcttccctatagcctgtactttaattctgcgttggatttttgctccccataattgtttgagtaccccaaacggacacttgaaaaaatcgatttttttgttttcggggcagtccccccgaaccgatgcgcccagatttatggggagaccgaatccttccggagtagcttccctatagcctgtactttaattctgcgttggatttttgctccccataaatgtttgagtaccccaaatggacacttgaaaaaatcgattttttttgttttcggggcagtccccccgaaccgatgcgcccagatttatggggagaccgaatccttcgggagtagcttccctatagcctgtactttaattctgcgttggatttttgctccccataattgtttgagtaccccaaacggacacttgaaaaaatcgattttttttgttttcggggcagtccccccgaaccgatgcgcccagatttatggggagaccgaatccttcgggagtagcttccctatagcctgtactttaattctgcgttggatttttgctccccataattgtttgagtaccccaaacggacacttgaaaaaatcgatttttttgttttcggggcagtccccccgaaccgatgcgcccagatttatggggagaccgaatccttccggaatagcttccctatagcctgtactttaattctgcgttggacttttgctccccataattgtttgagtaccccaaacggacacttgaaaaaatcgatttttttgttttcggggcagtccccccgaaccgatgcgcccagatttatggggagaccgaatccttcgggaatagcttccctatagcctgtactttaattctgcgttggatttttgctccccataaatgtttgagtaccccaaacggacacttgaaaaaatcgatttttttgtttcataaatatttttttcagaaagtgctctaaagcgcaccaaattttatttacaacttaattttagcactctgatgctttagtatcaaaaaggaagatggagaaaaaaatttttaaaaaatttttccttatattttggttatatcgttttgcttttggtggggtgcttggaacagtggaatcatgcgcacccgtccgatctggcaagttaagcaacgattgctgactagccaaaaggttcggtgccgtgatgaaacgaaccagcactgcttaccccgcggcacccggcacggtcccccgaaggaatggatttaattaaattctctccttcggggatttttttccattaggtcgtccgttagcgttcaattgctctagtcaatttttaaaaatttttgttgaaatatttgtcgtgctctgacggcggggggggggggg

SEQ ID NO: 31548 - DNA, 1799 bp, Heterodera glycines
  unsure (1)..(1799): unsure at all n locations
tcttatttctaagaaatgttctgatttggggtagtgtcttcctttcatttaaaagaggaaatttctgaaaaatttggctaattcctaacaaaattcattaaaaattcttaacattttcccccagcggcgcctatcggcaccgccggccccccaaaactcctatttttcttaaaaattagcccaaaatcgcaaattttggtcattttttggacagaacttgttaacaaattgcattaaatttttaaaaaatttccctcggcggcgcctatcggcaccgccgaactctcttccctcacccatacccaaaaatttttcggaaaaatgcgtcgaaaaaattgttaaaaatctgtttttttgattctaaatgcactgaaatttaccaattgcttatgtttcgacaaaattgttaaaatcatataattgattttcggaaatgtataaatttctcatttctaagccgaaattgctcagaaaatagttggcggtgagtaatgcttgattttgttgaataaaaaagcgattcaaagttttggaagcgtgttttaaaaaatgtccttatttttgaccctaaaatcttattttttaattgatgagtataataattatattaaattagtgaatagaataatcaatcactgagttttttttttggttaattaatctaaattcactgcaaatttcgcacacgatatagtatgaaatacgaaaatgggcaacaaaaagttgcataacttttgccgcaccctgcacaaaaatgaacaaaaataccaaaaatatattaaatttcaaatggacgattttcaactttgccaaaaaccaataattagtggtgtataaaaaatctcggtcttgaacaaatctttgaaaactgtaggtccccgcccgaaataaactcatcgtcgaatttcgctctgattttcagactccgagaagaactgacaaatgaatcggattccgaatgatgagggattatgaggccttctacataatcagcncaactctgattgtgagaattcaaaaagatatagtagttttttaaacttcatgaaacttcgtttttttagccaaaatatgatttttaaaagagagacttgcatgcaattaacctatttttccacaatttatttttttaattagaatcataaatttttttcctaatttgtaagctgacttcaactcattttttactaccagtggtgctggtcgagacagaaaatttcccgaaactgaccgaatcccaaaaatctgagacttttgtctaattgatactcgggtacgagtttctcgagcatcactagaaatatcttgtagtttcttttctcttaaaaaaggtccagagatctcttccgacttaccaataaaatcccaaatcagctttttgatcctggccggatcggtgttttacgaaatccctgccgccgtcaaaccccaattaaaccattttccctctgttaggtctgtggcgctttcatgcagttgtgctgggacttggtcatctttctccactttcttctggcagcaaatcgtctgctgatctttatgaaggcctcttttaagccctccattttgaacaaagagccaaagtcggagcaaattcttttcaatgtaagtcaaaatgattagctaatttaagcaattaagaaaataagtatgtatataaaacatttaacgtgaaaattaagtcactgacgaaaatattcactgtcgaattcgatcactgacgaaaaaaatggaaaacagtgaaataaataaaaatcgtttactggcgaaaataatcactgacgaaaatcattgacgaa

SEQ ID NO: 31549 - DNA, 1070 bp, Heterodera glycines
  unsure (1)..(1070): unsure at all n locations
aaaaatgattagcnaacgtcnggaattttntgaattaattaacgattatacaattgaaatggccaaaccgataagatntaatgacaacactttacgagtaatatattgcaaaaaggacgagtacattaaggagcataaatgctccaatatcatgatttcgatatggtaggataataaaaaaatgggaaataaattgttttttaggaccaccgcccaggcgcggcttaaactttattcatatatggaacaaataaataattcagaaaattgcaaattaatttacacagacacaggtaataaaaaaataataacttttttatttcaatttttagacagtgtgttttttattcatcaaaaagaaatgtgtccgattaaggaagggagttttttagggtaatcatgagcaaaaaaaattttttttaatataattttagtgaaatgtcaaaagaatatgcggattcaaaaattttagaagttgtttgtgcaggtaaggaataaaaaataaataaaaataaatagcagttttaggacctaaacaatatgctttgaaattacaaaaagaaaatggagagatttggtataaaacaaaaattagaggaatgacgcaaaataagaacaacaaaattgattacaaagagttcaaggacatggttttgaattataaggaagaaaagaaaattcggtttacacactcaaacaaattcgggtaggtttttataatttttagaaaaaaataattaattttatttagaccgacgagggaaagttacgtgattagccgtaatgttacaaaggattataaaccaattcaaaagaaggggttagtttgactgtcttcattaccgaaataatattttaatttaggattattttggacgatgagaatttaactgttttgccttttggttgttggtgatttttttttgaataaatatttttaaacattgtattttatttatttttggtttttttgcctataatattttattttaaaataaaaatgtataaaaagaaaattaaatgaataataaaaaaaagaaaacatgggataaacaaaagaagtcaagggg

SEQ ID NO: 31550 - DNA, 987 bp, Heterodera glycines
  unsure (1)..(987): unsure at all n locations
taaaaaaaaaatttaaaagcgttccgtcataaggagcagagtggtgaatatgtaatttgaattgtgtttgatgggtgtcaaggtcgcattttattttgaatctccgattgatcgaagaaatgtttgcatttaaatttctttgttcatntaaaagcgacagaaagggattaaaaaattagagaattattttaaaaaattttaagccatttttttttacaatttagagaagaattacatcataaataatttttttaactttttttttcatttaaattaaagaaagtaaaatttttttttacaatataaacctaatactttaaaatgaatttgattaatacaaataatagcattttaaagaaattcaaaaaataaaaattttaatctaattaactgaaattttctctgtttttttttgtataattaaagaaattttattaaaacaaatgaataatattagatgataagaaaacgagttctgccgacgagaaaattactctaaaagcagccataaattaattaatatattatcggttaaaaacaaattttccatctgtttgttgagaaattgaatgattccgaattttttaacaaaaattgtagggaattattacaaccaaattgaataattaaaattatttcaaaatgaaaaatataaaaaagaataatttcatatggcacttggctatatgaattcaaaattgattagtgaaagcttaattttgttatctaataaaaatattaaaaaaaaaattaaattttttgttcatttatttatcatctgttcgtgataattgcaaacttaaacactagcaagtttattaatttttaaattcttatatgtttaaattttattaatagaaaaactaaataccaattaaaaaattcagatagaaaagcttttattcaaaactatttgccatttaattttagtgaaaaaattattataaatccttaggcaatttcggaataatactcacaattccttct

SEQ ID NO: 31551 - DNA, 1572 bp, Heterodera glycines
aaaaaagccaaatgaatcctcccgcgaataaaatggtatcattaatatgaaattattttttttgatttttaatttagttttatttggccttcaaagatgtccatcccagctggtcactaattggatgcgcactgatttacggactcatcgctacacttggaatcattttgaattcttctgtcattcttgtgacttttttaacaaagtatgtgtgattaatgaaatccttggcaataaatgaaattttaattagatcattccgtaacaccgttaattaccttttggcactttgttccctttttgaattggttcatcaaactggccattttctgtttgtgtacaccgcattttctggacagaatttcattgagcttcgtctggcagcaaaaatccttttgattcctacgtttggaattggtaattttttttaaatcagcataagtttcaaatattatttgaaaatataattcaggcggaattactccaacgatgcttttcactggcattgaccgactgatcggaattgctttttctgaattgtgaaagataaatttagctcatttttaattatagtaatttttagtcacgataagttgaaaacgcgattgtatctggcaatgattactgtcatttctgtgtcgtttgggtgccttttcgctgttttgaattgccaacaagcaaatgaggacgatgatctaatggtcactggctcctatactgatgctttaaaggttattaatgaaaattctttcttaattctgatgcttttcataaatatttttgtcgaatattttaaatgcgctttttcagggcatgcctcggtttggaccaataattctttctattacttcaatgggttttatcatttatctctttcttggcattacaatacgtgtaaaagcatcaggtaaaacatattaaatatgatacactcagcactttttacttttctttctgtgcttttaaaattgattaaaaattccaaaaaatttataatcgcagtaaaaaagcaataggtaaaaatagttttgccatattttaccctttcattctatgaaaaagcgttaaaagtttttgccaattaatatttccattttctttcgttcaatcattggctgtaattagctaatttattctttttttaggtttgtcgtccgctgattcgttcaatcgtcgcacttttcgtgcccttttttgcattatcactgtgaatatcggcggttattttatcacaacaattgcttacttcctattagctccctcaattacttctccagtcactgagtttttctgcgctctaatggccgcaattcctatgaacattggcgcagtgtcaaacggacccattttatattttacgaggtgtcattttaattgaaaatgttttaataataatttttaatttttagtacggagtatcgacaagcatttcaaaaggaatttccatttgtgttcaaacaaactcccaaccaaaatcaagtcgtacctcggcaaaatgggccacctattcgtgtaatctcacaatcaagaataattgacagttgtcaaccataaatgaaatttttcaacgat

SEQ ID NO: 31552 - DNA, 1427 bp, Heterodera glycines
ttttaattgctttttaaatatgccaaaaaatgtaggcttaacttttttagtgaaaattcgatcactcatattttttgctaattgagcagaagcgtaccaaactttgcagggatactccccggtaaaggactaacttacactgaaatgagcgccgagctagctggctcaaaaaaattttcgaaaatctgagtctttcgtttttatttattttttgcaaaattaattcttaaatattttttcagaaagggttctgaaacgcaccaaattttatttacatgttagtttaggcactctgatgctttttctatcaaaaagggagatgaataaaatttttaaaaatttttaattcctttttaaacaggccaaaaagtttaggcttaacttttttttcagaaactgatcagaagcgcaccaaactttgcagggatactgaaaggaagagaaataacctattttaaatattatctagtcagttcatttaaataatttttatccaaaaaatttttttttgggttttcggggcagtccccctgaaccgatgcgcccagatttatggggagaccgaatccttccggaatagcttcactatagcctgtactttaattctgcgttggatttttgctccccataattgtttgagtaccccaaacggacacttgaaaaaatcgatttatttttgttttcggggcagtccccccgaaccgatgcgcccagatttatggggagaccgaatccttcgggaatagcttccctatagcctgtactttaattctgcgttggatttttgctccccataattgtttgagtaccccaaacggacacttgaaaaaatcgatttttttgttttcggggcagtccccccgaaccgatgcgcccagatttatggggagaccgaatccttccggaatagcttccctatagcctgtactttaattctgcgttggatttttgctccccataattgtttgagtaccccaaacggacacttgaaaaaatcgatttttttgttttcggggcagtccccccgagccgatgcgcccagatttatggggagaccgaatccttccggaatagcttccctatagcctgtactttaattctgcgttggatttttgctccccataattgtttgagtaccccaaacggacacttgaaaaaatcgatttttttgttttcggggcagtccccccgaaccgatgcgcccagatttatggggagaccgaatccttccggaatagcttccctatagcctgtaatttaattctgcgttggatttttgctccccataattgtttgagtaccccaaacggacacttgaaaaaatcgatttttttgttttcggggcagtccccccgaaccgatgcgcccagatttatggggacacagtaagccttcgggaatagcttccctatagcctgtactttaat

SEQ ID NO: 31553 - DNA, 1312 bp, Heterodera glycines
ggagaagggagtgggaaacatgatttcaaaattttcaattttttctagtctaatctactcaaaacggttcagaatcagataaaaataacattcacggtgcgaaaaatggggtttgaaaagtttattggggaaaaaaagtctacaaaataatacccctgggagaagggagtgggaaacatgatttcaaaattttcaattttttctagtctaatctactcaaaccggttcagaattcaataaaaataacattcacggtgcgaaaaatggggtttgaaaagtttattggggaaaaaaagactttacaaaataatacccctgggagaagggagtgggaaacatgatttcaaaattttcaattttttctagtctaatctactcaaaacggttcagaattcaataaaaataacattcacggtgcgaaaaatggggtttgacaagtttattggggaaaaaaagactacaaaataatacccctgggagaagggagtgggaaacatgatttcaaaattttcaattttttctagtctaatctactcaaaccggttcagaattcaataaaaataacattcacggtgcgaaaaatggggtttgaaaagtttattggggaaaaaaagactttacaaaataatacccctgggagaagggagtgggaaacatgatttcaaaattttcaattttttctagtctaatctactcaaaacggttcagaattcaataaaaataacattcacggtgcgaaaaatggggtttgaaaagtttattggggaaaaaaagactttacaaaataatacccctgggagaagggagtgggaaacatgatttcaaaattttcaattttttctagtctaatctactcaaaacggttcagaattcaataaaaataacattcacggtgcgaaaaatggggtttgaaaagtttattggggaaaaaaagactttacaaaaaatacccctgggagaagggagtgggaaaatgatttcaaaatttcaatttttctagcctaactactcaaaaggatcaaatttaataaaataacatttacggtggcaaaaatggggtatgaaaagttattggggaaaaaaaaatttacaaaataaaccccggggagaaggaaggggaaacatgtttcaaaatttcaatttttttaatcttatttactccaaacggttccaaatttaaaaaaataaactttcccggggggaaaaaagggggtttgaaaagtttttttgggaaaaaaaaaatttaaaaaaaaataccccggggaaaagggaagggggaaaaattgatttcaaaatttttttattttttttt

SEQ ID NO: 31554 - DNA, 1353 bp, Heterodera glycines
gtttgagagtcagttttgtcgaaggattttaccgaactgacaaattttgtgatttgtttcacaatttcctttcccgatgctgagatttgaagtgaagagggatttgcttttcccgttttcaaaaaaaattccgtcttgttcgtctgcttcttgattcgttttccgggtttttgttcacccctttttgtcgacagtccgttgaaatttgagggatttgtgtcccgtttttcagtcacttctatcgctcgtctgttcgtgggttttactttacccttttacaaaaattagctgttcacagttggttgattcggctcttctcttgctggaaatttgttttcccttttttccgatttgtccacacttgtcgagggatttacttttccctattttcagttcgaggccacgtccaattgtttttgtccactgctgattcaccggtgccaggagcgccaagtcgtaaaaaacaaatatggttgttgttgttgcacacaacaaaagacaacagcccaaagcaaacacaaaacaatacagcccaatgccgaagatacaattatcgtttaattccaaattaaatagtcgacgacaatcaatagaactgacgaaagcataaaaaaactaaccactaactaactcaaaatcacaaacaaaaatgacacaaaatcaaataacaaaacgccaaacatattttaaatcacaattatatcacagaattcaaaaaaccgggtagttccaacattgttggccttaatttttttgaaacatggtgaaattttttgaaattttgcaggctgatagaggacacttaaggctatcgaatgatgccaagaatattgaattaaatgtttctaagaaaagttacaaagtctcaaaatgtgccgcactaaaatgaccccaccacccttctttgtattctttttttctttttataaaaaaaaattatctcttctttcgggcaaattattttcacaacgcttttcccttccatgaatttggcacaatgccaaaaaattgttggcacaatgattgcccaaatttctggcacagcgccaaacacattgattttggcattttttaaatacataaagcatgacactgctcgtcatcgtcgttggcgccgcgctggtgatggagagcctagccttggccgcagcaaatcggtgcgccaacttagcagagcgccgtcacatcgccgtttgcaagaaacattggtggaaacgaaatctgtggaaaacatgagcaccaaaataagaaaaaggtcctgtgcaattgcattttgtcgcccgcccggtgggcatcgaacccacggcatttccataccgcgtggggaatgctctgaccgattgagctaccggc

SEQ ID NO: 31555 - DNA, 976 bp, Heterodera glycines
  unsure (1)..(976): unsure at all n locations
tgacgatttgaagtttagctaaatttgatggactacccgtttaaattctaattttcgcaaatttagaaataacataaatttccattaaatatttaattaataaacattaattgttttgtggctttttggagactgacaagagtttgagatttttgggtgatccctttaaaaattggcttttttgattggtattttgtcattcagttgagctcagtcgcaatgtgtcgtgtcgacgtcttttggatgtaatggccccgagcatcaaaagccttgagggctatttacaacaatttgtaactcaacaatatttgcaacgatgttcctctcttgaattcatccaagtgtgggatgcgtttgaccacaacaatttggaaaggaacgcggatgggaagccgatgaatgacaaagaaggaaggccactttaccgcactttgattgattgggttacatgtgagggccaagcaggagcagcagcaaacaatttgcgacttcttgaatttttgtgtgtcgtcactttgccaccggaacttgaaacggttggacagcaaatgggcattttgcaattttaattactgcaactaatgagttaatgggccaaattttattcgaaaattgaatttattttaatattaataanggaagtcggttcattgtccttcagtgtcgaatgaagaatagacacttacaaaacacangggacggttttggattttaaatttaatttagcctattaattatttcgagaatttctattaattttttaaaaatttccgggttcgaaattttttgggaccgcagaatgccatccctgatacagacaacatatagacatcataatgaaaatagagggatttaggaatttgaaaattctacaaaaccagtgacgtacgccattggccatgacgataaaccgttcatagggattgaaagagaaacactgcaccaatgaagcgtccgctacatcatgatatcactt

SEQ ID NO: 31556 - DNA, 1639 bp, Heterodera glycines
  unsure (1)..(1639): unsure at all n locations
aaaaataatttctattttttagcctctgtgttgagaagaaacccggcaccgacaaagcagaatattacatgcaaaagctcgagtgggaaataattatcaagatttaactacgcganatttntaaggaaaaaataaaatttttgactgaaatttttttgaaatttccgtgttcgttggtacccacccctctcttagacctctcccatccaaattttctcactaaatttttccaaaattcgcaaaaaatttgtcgaaaattatgtgttaatcagctgattttctttctgtattagatacaaataccgagtggtgctggaagtgaagcacaactgcggcgccgacggagagcaaaaaacggtgcgtttttttgtcaattggcattattaatttattttaattgacttatttttgtacaattaataaataagtgttcggagggtaaatccgcttcatgttttcttcagcattacatttggttgccggaaattgatgtctttgataaggaaacggtggtgggccgcgtgatgcaagtaaaaattgaatatattttttaaatttttattaatttttattaaaaaattggagaaccggaggggtctggctgtgccgacatttttttggaaaaatttagccaaaatttttgggaaatttgagtgcgtgagatcttggagggttaacaacaaggagaatcgaaattttcaatattgatgccgaaaaatcggcacttttacgcttttgcactttgctatttttcagatccgccaactccatttggatttcgccgacatggaagatactgttgatttgacattgatactgtccggaagcgactccgacaaaagcggccaattcgttaatgccacattgatcccctacaaacacgaacccatggtgccaccaccatcggtagggtgccattcaacaaaaacaattaaaaggtttagaccaaataaataagctaacttttagggttatggtatacttaaattttttattgtatataaatttttattaattatagcccatcggcctctaataattttatattgtactgtaacatggacggaacggttttgattgtagaatatattaaaaatattaaaaagacaattactttttatttctaataacaaaaaagtggaaaaataggaaaaaagctaagtgggcggcgggggttaattgagaaggcacaactacggtaacacttggagtaacaaaatggcaactgcatcttaatttaaatttttcttcatcagccaaatccgccaatcgcaacaaatgtggaccatttgggagccaattgcacacaaattgtcttttccgaattgatgccgcaattttttttgaacgtctccaatgatgcgtttgcaattgcgtgccaaaagttcgcggccccaatctatactggcaaaaatttttcggcagatgattattatgccaacacttgcgcgcaagtgccaacttcgctgaactgcaacaagtcagaaagggcattgaaaaattaggcttatgtattctgtattttctctgatacagcccccggtggctccgtttttttaaattgacaaccctctcggggggggggggggggggcattaaagagggggctcataaaacagtaactctgacaaatcaaaat

SEQ ID NO: 31557 - DNA, 967 bp, Heterodera glycines
tggatttttgctccccatattggttgagtaccccaaacggacactgaaaaaatcgattttttgttttcggggcagtccccccgaaccgatgcgcccagatttatggggagaccgaatccttccggaatagcttccctatagcctgtactttaattctgcgttggatttttgctccccataattgtttgagtaccccaaacggacacttgaaaaaatcgatttttttgttttcggggcagtccccccgaaccgatgcgcccagatttatggggagaccgaatccttccggaatagcttccctatagcctgtactttaattctgcgttggatttttgctccccataattgtttgagtaccccaaacggacacttgaaaaaatcgatttttttgttttcggggcagtccccccgaaccgatgcgcccagatttatggggagaccgaatccttcgggaatagcttccctatagcctgtactttaattctgcgttggatttttgctccccataaatgtttgagtaccccaaacggacacttgaaaaaatcgatttttttgtttcataaatatttttttcagaaagtgctctaaagcgcaccaaattttatttacaacttaattttagcactctgatgctttagtatcaaaaaggaagatggagaaaaaaatttttaaaaaatttttccttatattttggttatatcgttttgcttttggtggggtgcttggaacagtggaatcatgcgcacccgtccgatctggcaagttaagcaacgattgctgactagccaaaaggttcggtgccgtgatgaaacgaaccagcactgcttaccccgcggcacccggcacggtcccccgaaggaatggatttaattaaattctctccttcggggatttttttccattaggtcgtccgttagcgttcaattgctctagtcaatttttaaaaaattttgttgaaatatttgtc

SEQ ID NO: 31558 - DNA, 993 bp, Heterodera glycines
tttatacatcccattatgaagcgctaaaattatcagagtgccgaaaatcgcatgggatctaagcctagcaaaaaatggtgtaagtaaaaatcgtaattacgctcaaaaagcttctcaaacaattttagcgcttccaattccttctacaatcgcctttatacatcccattatgagcgctaaaattatcagagtgccgaaaatcgcatgtgatctaagcctagaaaaaatggtctaagtaaaaatcgtaattacgctcaaaaagcttctcaaccaattttagcgcttccaattccttctacaatcgcctttatacatcccattatgagcgctaaaattatcagagtgccgaaaatcgcatgtgatctaagccttaaaaaaatggtctaagtaaaaatcgtaattacgctcaaaaagcttctcaaacaattttagcgcatccaattccttctacaatcgcctttatacatcccattatgagcgctaaaattatcagagtgccgaaaatcgcatgtgatctaagcctagaaaaaaatggtctaagtaaaaatcgtaattacgctcaaaaagcttctcaaacaattttagcgcttccaattccttctacaatcgcctttatacatcccattatgagcgctaaaattatcagagtgccgaaaatcgcatgtgatctaagcctagaaaaaatggtgtaagtaaaaatcgtaattacgctcaaaaagcttctcaaacaattttagcgcttccaattccttctacaatcgcctttatacatcccattatgagcgctaaaattatcagagtgccgaaaatcgcatgtgatctaagcctagaaaaaatggtctaagtaaaaatcgtaattacgctcaaaaagcttctcaaacaattttagcgcttccaattccttctacaatcgccctttatacatccccattatgagcgctaaaaattatcagagtgccgaaaaatcgcatgtggatctaagcctagaaaaaa

SEQ ID NO: 31559 - DNA, 975 bp, Heterodera glycines
cataataagataataaaaaatcatttaaatgattattaacatttttcttgcgtaaatttgtataaaagctaaacaaatcgaaataatattatttgtgatatcatattttaacggtttttcttaaaattacaagaataaatatattttatttaaatagcaataataatttctaataatatttattcattaaaacattgcagaatatttacagttcagttacaagatataaaaatatccaggttgactcgagaaattaaataaaattaatatatctacatctgaatcaactgccctttaagttataatacttttaaatatttttaaaataattttttttaaaactattgtataatgtgtactttataataaaatgagaattaaattaagaaaaaaatccatattttcagattaaaagaatctaaaataagtcttaaaattgcctaggatatatttgaaatttaatttatataaaaatatattactttatcagaatattcaaacttcgaaaaccgtttttagcgtaccaatataaaattctagtttaaattattaacaacaaaaacaaataataaaaaaagacaacattaagctcacaattttcctgaaataatttaccaattgtctaataatttaagaaaaatcttatttcaaaggtatttcataagcttgttatgataattaaaacatagcaaatagctaatttactataggggaattacagggcaggtgcctgggaattcactccaaattatttatattatttccttttccttttctctttcctttaacttttaagcgaagcgacgagcgagtgtaccgagtcaatacggaccgggtcagtttagtacgggccgttttagtactagcgcatatttttccactataactatgttaggtgttatccaaatacgactatctagatatcattcgaaagtgcttgggatgctctattaccctgtagaattacataaaatt

SEQ ID NO: 31560 - DNA, 1782 bp, Heterodera glycines
  unsure (1)..(1782): unsure at all n locations
aatgcgttttcaaatttcgttcacatagggcaccgatgttcgagcagtacaattttgtcatccgtcaaggggcgaggacaaaatttcggcatatttcccatataaaaatgagtcatccaaaaatgctaaatatgattttttctttttttaaaaaatcatataaaatagtgatagataaactcgtttgaaaaattttttaccgcattttcttgatgcattaataaaaataccattacaaattttaaaaagtgaattaataataataaaattttaaaaaataattacgaaaattttaagcaaactaatttctaaaattaaaaaaagttttagtaaaagtatcaaaaaatgtattactaaaacatgaaaaaaactaatttttaaaaataatcactaaaatttaactaaagtaattattaaatttaagtaaaattaattgctaattaaaaaaatatttcaattacgaaattaaatttataattaaaaaaagtaaaatattaaaattcgctcttaccacatatattcactgggctaatccgctcccattctttcaacaaatcatttttgcatttttcttttaatttttcttttttctttaattttatttcctctttttttggggtttccatttcattttcttcttttttaattaattcattttttaaagaattcttttttgctgacaaattaattataattaactgattattatttgttttcttagcattgtgatcagcattttcttcagaaactttcttgtttattatcattgaattttttttattattttttataataacactttctaaaagtaaaatatttagagcttgacctgggcctggatccaggcctggattttttctggatccagatccaggtccatgccattttcggcaacctggatttttgtccagaaaacccaggcccatgtcaaatgaaaaaaccaggtataaatcgatgcttttttcaaaatgtcgagctctcgaattttatttttaagaaaattaaaaaatatacctttagctttttcttcaaaattttcgtcataatttttcgtatgattttcaatttgtttattatttttttctaaaaaatctttgttataaaatttaatgtcaagcttcttgaacaaaattttgacatggtccaatgtcaaaaattgcaaaatattttttctctgttctcggtttgttgataaaactgaaaattttgatttattatgtgtatgtttttaaataattttatattttgttatcgtcaggaacgaattttatgttttaaattatttgttgcgaatagattatcacatgaaaagctcacaaatagcatttttacctgttttgcttttcaatcatagcgattttttagctcataaaaaatattttgggttttggcagtttttggcactacttggcgattaaaattttttttttttgaaagttcctttttagctttcaaattcatgcaaaatgctaataaatgttcaaaatttttctgtcgcctcctatcatcatcacctgtgacacgttgaaattaaattaacgcctaaaggcatttatgattttgattttcaattatgctaccgaaactgataaaataattgaatttttgggaaattcaaatatttttaagcagttttgtttcaatttttggcatatattggcatatattttgctcttttttttaattttttttggtacatattttgggggattttgctacataatatgtacatatttggcagttttttagcgacatataaatccgttcccagattatncacaa

SEQ ID NO: 31561 - DNA, 1268 bp, Heterodera glycines
  unsure (1)..(1268): unsure at all n locations
gaagaatgtgtacttaagcatcaatttaattaaattttaacatgtttataattttaaaaaaatttttaaaaaatcataggaaaaattagatgtttgatttttgcacttttttttttgtgaagcgcccaaatttgcactttttgtgatgtgacaaaggaccgaataaaagtacatttgttgttctgatgacttttaaaatacgaaaggaattcaaataatgtttatttgatataaaattaaattaaatagaaaattgaaatcttaaattcttctcctatttcgtcaaaaagctgcgtcatttttggtcgtcgagcccatctttgtaatccccgtccccggcggggatggagagcggggaacaaacggggacggggattctcaccgtcaatttttgttaaattcaacgaaatggacatggccaatttagaagcaaaaaaaatcatcgcacgtgaaatgagacgtgttgaagaatgcatggagttgcttcccaattcccagctccgtgccaaagcattggtcacttttgatcaacggcactcgctgagttaccaaatgccaatgggaataagaaagcaatagaagaatgaatgaataataattattttccgttttgtgtggattttcaaatgaggtgggaaattgtagttgcaccgcctgttccaaatcgaattcacaacattacaatcgttgaaactttcaggaaaattcaactaacatgttattgaccctgactaatttttgcatcgaaaaataaggcggcgagaaagccataaaacaaggtgtggcgagttggccccggcgagttgagcacagcgagttggccgctgcgagttggacgtgaattgactatggcgagttggacggttcccaaattccttggattcccccccccccgtccccgtccgtccggctgcgacgattttatctctgtctctttccctctctccctctctcttttccgcgttgcctctctgttcgcttcctcttcttgtagttcatctgctgatcactgatcaccgctcgttccctctcagttcgatcaatccccccaaatttactggttctcttccctctccttatttgtgttatcccttcgcttttgtacctctcttagccccactttccgatggtttcactgacgttcagcagtgtaaagtgccgcctttctttacagcgagaaaacgtcgaaatgaccaaatgcttaaggnggggggggaagagtgatccaaatattcggcaggtgtcgatgttcttccaatggtttgagt

SEQ ID NO: 31562 - DNA, 1586 bp, Heterodera glycines
  unsure (1)..(1586): unsure at all n locations
tttcatgtcngaaaaagatgcaaaatcatctcgaggcactttntaccaggagacgtaaaaaaacttgatccgctgaattttctgaatntaaaattttgagtttntaattaagatatttatcaatggacctgatccgaaagaactattaatttgatcaatttcctcttcggaattataatcaaaatcggaatcgctcaattgcccttcaattttaacgtatttggcattttgatcaaacaccaattcttctataaagtccaattcttcattgtttttgaggcatcgttcaatttcagaagcaaaatttttggcaatagcaatttcaggatcatttaatgaggtttcttcattatattttttaaaatatttttggagtagaaaaagaatatttttggggttaacgtacattttgaaaaaatgaatgaaaatgttattggacgggaatacgggaaacttggccacctccctttgtgagacccctttttgttgactaactcacagaccactaagacgaaaaatccaacttaattgtacttagagcccaaaattgaatcgccgtgttaaataaagattttgaaggtgtgtccatccaaattggacgatcttgatatcaattcgaaggcttaagatagaagaatctttttctaattgtaagcaactgctaattgtaagcatttaaataaaaagttaacaataagcttcgaaattttgttttttgaatacgttactagataacccttcttttgctcattattcgtaatttttacctaatatttttaatcccatcaatattcttcactttttatttcgattttaataaaaatgatttaaatacacggaaaaattctggaaaccataaatcaaatttttagaaacggacaaatgaggcctttgtcaattaattcaaaatcttaaaattccagtccaacaacaacaaattattgggttgatgaaaaagttctgaccctttaagcacttcttcgcaaaaaaaacaaatgttcaatcaatgatgtactcaccattttgatcaatgatcctcccccatcgttcgggcaagatttcaatcccctttttataaaactgatcatttttcgatccaataaagtcatccaatgcattttcgacctcgttttgatctgcaaattctttccctctcaagaagtgctccatagatcgaaacagatagtagtcacacgggctgatgtctgggctgtatggtggatgaggaagaaccgcccatcgaagttgctcaattttttgttgcgttgagaacgcaacatctaggcgtgcgttgtcatggaggagtacgccgccgcggaattttgcagaaaatggaggacgacgaatttggtcatgaacccgctgcagttgttgctggtagatgtcggcgttgatggtttgcccagccggaacaagttcatagcggaccaaccctgatgaacaccaccagacgcacagcaataccttcggtgctgttgaagacgcctgggggtcggctcgcccaattcgtttggcttcagccattgtttttgtgccgttttgttgttgagataaacccacttctcatcacacgtgatcagctggga

SEQ ID NO: 31563 - DNA, 1063 bp, Heterodera glycines
cagcggaaaatccagtgtggtttgggttgggaagcgcaaaagttcggatcgtggaccccacccaatcaggtaattgcagaagttttgtttcaacaaaaaaaaaaaattaattttttcactaattgctagggttcgagcagggcgtggcctacggcggcgtagaaaacgcagaatttttggaagccgggaaaaatacaatttgttagtgaatttgaacgactaatttcgcatggtaaattcaggcgatacattttatggaattcttgaactttttaacgttaacttgccaattagaaattttttgaatcgtaatggaaaaaaataggatttataaattagggaaaataaagaaataatccaataatgggttttcaatgagaatgggtgtcaaaatattgagtttttagattaaattcgttaattaaattaaacaattatcagcaggatattgtcaatgaggaattcggaaaattaagagaaatgaaagaagaaaacaaagacaatgaaaaggtcattggagaagaggagttgatgaatcaggcacggcctatttcacatttcacagcaattcttcggtttaatgacttgattaattaaaacaaaaacaaaaaaataggaattgatgccaaaagcgagtgcggcacacgattttttactaagttttaattgaaactgaatttttgcagtccatctcgcaaaaaaaaaaaacaaagtcaccaaatggaagacttgacatgaattggaataggccgcaagataggggactttaataaaaaaaaaaaattagttaaaaatattaagtacttaataaattaaaaataagcacaccaaatggaaatttccaacccaacaatggccatagaattttctgtgcttttcatcgcacatctttttggtgataatatctattttaacgagcaacaaatgcgaggaaatgtcccattatccttttattcgacggatttgtttatacatttacatatgtacagaagaacaataaaaaaaagcaaaaaaaaaaaaaagatttttggttacaatttttgtatatttcatttaatttttt

SEQ ID NO: 31564 - DNA, 1002 bp, Heterodera glycines
ataaaatgcaaaaattggtttaatttgacaaaataaatttgaattttaaaaaagcacacttagatttttgatgtgaaactgaagaaaattaaatgtctatttccttttttatttcttagagtttgggtttaatttcaacattttgacattttaaaaagccttttttaaatttaaccaacaaatgagaaagggtcattttttttattacaaaacccattaaaaaaatctgcgcacaaattcaagaaatcccccgcggtgcctaccgttggggtagcctcaccagaaaccagcaggctattaaaattttgaaaaagtgagacaaccaaaagtgagtcgagagactgagactcaaaaaaccggtcgaactcgtgagcatttcttggcaatttttgtcgagactgggaggctaagcacctcttccgtgcgctccaagtccgcccacactgtcaaatcgtccgcgcttgggcccagcggacacaacggcacgctgcatgccgcacgccgtgcgctcacttccgcactgatggcaccggtagacgcttccactgtcgttgcggaggcgggcagcatttcggccgtttgagcaagcagttcgacatggagtacggcttgcgcaagttcggcataatccagcggcaatttgaggggctaataatcggaactgcacatttaaaatgctggagggtcaataatcagttcaggcatggccaagaaggtgttaaggacgttcgttacccaaaaaaccatcgaaacaaaaaaattttcctataaatagcaaccagatttatttctttatatcattcgatagccctaagtttttctataagcctgcaaattttcaaaaaatttgttaaattcccaaaaagttatgaccgaaaaattcaaaaaacctatttttttttttgagttcttctgaccataacttttttgaaagtcaatggaactttatgaaattttgcaggctaatagagaatatttagggctctcgaatgatatcaagaa

SEQ ID NO: 31565 - DNA, 982 bp, Heterodera glycines
aatgattgactgaaaaagtgatgacgcattaaaatcttccagtaaatgataattctttccttattccttaatattgttttaacttaagcccattaaaccaggtgcacattttgaagtaacctataaacacatgttattattttttggccgttttcattttaaatatttacctaaaatatgatattttattgtttaaatcaattataaaatatttttaatatgggtctgggatgagggtctgtgtttgtcagggttgaaaccttctgagtcggcaaattacccctaaaataacgaagttaggtctctactttcctaataataaaaaattaactactctttatttcaaattttatttaatttaacaatttgtcatgcttttttgtcactttaaaagatgtcagacagaaaggacagtgtgacaggagggaaacgaatagagcaggaacttgctgaggacggccgtcctgtttacatcgtcgtattgaccattttcttaaaagggtttttctttttgtatgacttgctcgtctttattccgttcaaattatttgctgatcctgaactgaaaaaggagcgctctcgtgaacaaaaggtttttgaacccatgtaaaaataaaaacaattggaattcaggccgttccgattgatgggaatccggcttcaccatggcgacacgtcgacaccattggcactgctctgtacaccgaactttttgaggactgtccgacgctcggcaaaatttgggacaaagcggcagagtgcgcaattggcctttatttaaaaattcttttctgtttaaattaaggttgcaccgtgggcacaattgcatgggaacgcgcgacattcttgaggtcatccaagaacgacagtcggacgggaaaaccttccagaaattggcacttggcaaatatagctggatggattacgaacatgttgatgaagtgatcgaggaagtcgcttctggactcgacaatttgggcat

SEQ ID NO: 31566 - DNA, 1514 bp, Heterodera glycines
ggaaaaaaacaaattttaaaatttaccactttactcgcttttccgccaatgtgccaattccgtcaatttgttcccaaagtgtgcctccatagcgctccaagttttctcggctatccttcgcggggaaaacggcacagacgaaattgtttgatggtgaatttgaccgagcagcctggctgaatgagatggtaatcttcgtacaactctggccatggtcgccgctcagcttcatgtagatttcgccgccaaaggtgatcagattgtctttggcagacaaaagacgcgcctccaaagctgccccaacatcagtgcacacaaatccaacacccacattggtctcaattggtgcgtattgcaatggcccacagatacggcgtttgatgtcaagcacctaacaataatcaatggaatttttaaataatataaaaaatgctaaaatatgtttttacttttttgagtggcggaaacacatcaagttttgcattgatcagacgaatagtgccttttagtcgtctgtaagccttctgtgtaccgacaagcccgaggatcagaagagcatcctctgggtcgactgaatcgttttgtcttggcagttgttgcttcttcttttttggcgtgtaatgagcaaatttgtgccgaacttcccgactgatcccttcgagggacgcccggctggcggaacgtgatctgtcgcggcttattacatccgcaatttgatctgccaatttgcgacgtgaggtgcgctgcaaatgatcgacattcatctttggtcgtcctgttggagttgctaaaattaagaaagagaaaattatttgaaaaagataaaaaggggattttagtttcactcacttttgctggtggtcggtgtctccatcggtggtgccatcttttcctccaactgccgccgaagcgcagtgatcattgcgtctctgttgcggacctgctgtcgaagaaagctgatcacttgttcctgctccttcaactgtttgtccaattggtcggtttgtgtcgcggcgtcctcataagccaaatccacgtccgttgccttgtccaccgttgtcaaatccgtgtttgttgcactgtcggtagttgtgaagtccatgttcgttgctttgtcggcagttttttgatggacacgcacatggcgcctgatcggagttgctgacaatggccttgggcttgaacgcgggccttagtttaatttttgcttctaaaatagtgacttttttgacttacgaaggtccaaagttgacgttgatggtccactttcggcggcttgggtcgatgtcccctctccatctgctgttgtctcggcttcggtctgctttagacctaaaaaatgcagtgtttttaaaataaaattaattttggtcagttttcgtcactttttggcgtcgagccgcctttttgagcccgatcctggcgccattccttccgctttcgtcttgcttctgcactagaatttcccatatccttgaattttccagtttttttacgtgtaagaagcgattttt

SEQ ID NO: 31567 - DNA, 1037 bp, Heterodera glycines
aattacgtgacccaaggacgaattccgaacaatgaaaactccgttgatcagcctcatgaccctgaagaattaccagcagaaaaagaaggagttcaatttgatagtggaaatcgtatgatagtgacagaagaaaaagaaaaaagacaaacgaaaggcaaacaaaagaatggcattaaaatttgaaaaaaggattctttttattatttataaaatctgcaaaatgtgaaccgaattgggacaaaaactaattaacaaatcaaaacatggtttttttaaataatagtggcgaaaatttggaaaatctgtttttaaaagcgatgtaataacaaaatatttaattttaattacgaaaatgaattaaatttcatccctttttgaataaaaagcaaacagacttttttcttacagtattcacattgattattttttatacagttcattaaaaaagtatgagtccgtattctcgactgtagtttctgttaaacatattcatacaataattaaactcatgatgagaaaaattagaactttttctatcgctgaatcaagattttctgtctaatttcgtttatttgctaacctacagggtgcggcaaaaattctgtaacttttttcgctattttcgtatttcataggtacctgtgcgaatcttttaatgaatttaggttaagcaattaaaattatgcctaaaagtccaagaaaaaatgattattgaactgcttgtggacaattttcggaaacgtttggattcatgtacttccgcccatgtggccactttgaacatttgatgtaaatttctcataactatgttcctattgaatgaaattgccaagttatttggggctgagtcgttattatcaattgcggtttaattttctcttttttcctgtaataagtacgctttttagctcccaaattagcagctaatacactcaaaatgggatgggacaacaactttcacaacattaattaaaagtagaggcggccttaaaattaagaagttcgctgagagcacactcattttcgctctgagagct

SEQ ID NO: 31568 - DNA, 1293 bp, Heterodera glycines
aaaaaaatttgtaaaaacaaaaactatttccaactattttggtgttttcccaaaattttttaacaaaaatgcaataaaaacaagaaatatacacataagaatcggtcccaaaaatttcagaaaaatacacccccttaaaatcgatccaaaatttttcaaaaatgcacataataaatcaaaaatgatttgatttaagactttttaataaaattttataattttacacctctaaaagtttattaatcaatatttcaaccacttttgattatcacatgtctaaatttctcttgtcaaacgtcagctcatattaagccccctcgagtttcaagtgaaatcttttaaacacctcattcacatatatttttctatgtttttctggataatagtctgatgctatgacatctttttcaaaaaaaaatgaaaaagtagtcataccatctgaattttgtgcataaaatttaaaattttttagtttatcattaaaatttgcacgcgccgtggagtcggtgccttgaatgcccgaaatggtgagggcgtgactccgcttatctgtgccgtccagcgtcattgtttgtttctgtgtttcgattcttttaactttttcaatagccctttcatgtacaatgttgttgctagcccacggcgcggatcccagcggatgtgacaagtcggggaattcaccactgacttatgttttggaggttagttaggcgggggagcactaaaaattggcagtgccgtacaatttgatttgttttcggttgttataacttttttgaaattaaaggtaatatagtatggatggtacctcccattttgaaatctagggttttcagggtcggggaatccggactaaatatccaattcgaccgaactcggactcgctcaataatacaattttcgagaaaattttcaatacgcaacaaaaaaacaatttttttcgaaaaaatgtgggggttccatccgtactattaccatggtcaaaattaagtcgaaaaaagtaaatatgtgttcaagaatcattttgtgttatctttaatgattcaattttgtgttggtaaaaaaagaaaaaatattttgctaaaacgaccaaaaaaaaaacttaattttattacaaccgaggttatattttaataaccatttagaaccaaagaagccaaacgaaaattctgaagcttttggtgtgttttggcggacaaatcagtgtatcacaaaaaaaggacaagaaggcgttagtttctttttttgattttgtcagttttattttgtgttttagttacgaaaaaatgttgg

SEQ ID NO: 31569 - DNA, 895 bp, Heterodera glycines
atcatcctcggagcattgaatagtcaaatagccgggaccgcggacaggtcccttcaaaatgaatccgtcaattgatacatgccatacgcgtaccctccttcatcctcatcctcatccccttcttctctccccccttcttcatcccccttttcatcctctcccccttcaccctgttcacgcttcatcctcttcaccgtccctacctccccccttcatcctccctccctcccctccgcctcttacttcccctccatctcttcccttctcgccttctcattcatcctcctcttctcctcgcccccccccctccgtctctcaccccattcgctgattctccgccgctttcgtgcacacaaacattgttcttcgagaaaatcacttcgccgtttttgccgagaaaacaattcgaccctcctttttgatgaaaggcttttgccgttcagtttattttgaataatttctgtacctccccgaagctgcgcaatcgctccgtgtgcttttttcaaaaagtcattgaatcggtttgccatacgctaataatttgcgcttccaatttcacaacaaatgggaatgctttccaattattgattggttttggttggcattggaaggaaaagcaatggcaaaaggagagaaaggggaaaagcggcggagggaaacggccaaagggagagacagcggagagaacggcgcgggggggggggcggggggcaaagggcaaaggtcagagacaaagtgccgccttcgattctttggcattggcacttccttttctctgctttatttcagttttgcttttaattatccccttcttccgaaatgttttgtttttcaatggcattaatctgtgtgggggattttgttcgctttttcgattttatacgtcgacttttat

SEQ ID NO: 31570 - DNA, 757 bp, Heterodera glycines
gtgaggaagttgttttcgtttatttattatattggtcaatcatttttggttaggaattggccgattacatgcttgatgcttctacaaaatacccccacctcctcgtccatttccacggcattctttcgcgttttcgactcgagcgaatttccggcaaactctttgaacgggtgcctttttctttccctttttacctcctttcataatcatttctttagcttttcgacctttctcttgacagtttggcaacttctcccgttttgctcgacattttggagcagcgttccattgacccgaccggttttggagtgtttgacgatgtcgttagtcagaatttgaaggcgcttttcctggtgcttaaagaattcaggaaatactctgctaattatctgtctcatttatgaaagtttctcgactttggtcgtcacagaactgacattcgtgcttgggcctttttgcatacgaatttatgctatttgagagataatgccgaactgatgaaggcactgctcctgcctttgtggttgaaccgcagaaagtgagttcgcatcgtattgcaaattatcaaaaaatggtacttcctgttttgaagccacaccccattttaaaaaatgcaacaaagagcgttcaatattaatagctgtgcgatcagccactgcaacatgaaaatttcttggctttctctgcatatcagggttgacccgggtcacccgaaacccgacatttttctcgtcccgaaacccgacccgatgatttt

SEQ ID NO: 31571 - DNA, 865 bp, Heterodera glycines
aaatgccaaaattgacggatttaattgaattcccccgcctccgtttttcagctcttccgtttcgccttcatccttctgtgcttctactttggcatgggcttcatggaacggttggctgtcgcgatgatcgccgcatgcgtccgctgggcttggccaccggtgcacttcatgctcggctcgtcacggggaacgctgttctatttgacggactggttcgcatggatggaagactttttgtcaagttgggtgtgcgacatggccaacaggtgcggttttacggtgtgggggcacacggtcgataccgtaccaacactactaattccccacaccccattttcagatactgtcatcaatacggtgtgatgtgcgacagtcagtgttcctttgtcagccgaacgcagcgcgcagcttccttcaccggacgtcgcttctgaaggatgatacgcgagatgaaatgaattttgataacgatttttgatggcgacattgatgtgtatgtattgtatattctgtctattatggttctgctgtttgagtacgtccgtgtatattgtatatgtactgtattgtattttgtatccgtagggcatattcaattccaattttaacgcctaattttgtatacccatgttgtgttgcgtttgttcataaactttgtaaaattatatgtactcaattttatcagtgggctataaactattttttaggcgttttttgttattttttcatgactacattttccaagttttggactacaacttttttcattgttgaccaaatctaacaatcttggtatcattcgaaagcccttcacaagccctattagccttacaaaaaccaaaaaaattttaacttgaaaaaaagt

SEQ ID NO: 31572 - DNA, 1042 bp, Heterodera glycines
ttaacaaatttaatttaaaaaatacatgaaattctatcaattaaaaaaataattcatttaaacttataaaatttattcattaaaaaaaaattaatttaaatataattttttatttattaacccaaaaaatattttaaatgaataaaaattaaaaacacgaaaaaaatggtagaaaaataatgtacaccgcccggcttcgaacttcgcccccccccccctcaaaatgatgcctcagaatccccaatcacacagggattctgaggccttaacgatgtgtaaaataaattttataaaatagagcaaaaaattgcggatttttatattattttacttttccaaaatatcttttcagaaccgagttatgaattttttactgaaaattcgaatttttccagaacttctggaataactttttttagtttcatgatagaaaatctaaataaaacccataaaattctcctgattttttgctatttttaaagctttgttgtatgaaaattgacttaccctgaggttagttatgaattttcaaaatttaccccaaaatcccgagggtcaaaaaaaatgaaaaaaatttcgaatttttaaaaaattctaaaaattatgaaacgaaaaacaaaggtcatattcgtaatcagcatttcaaaataccacagaaaaaaatttttcacccccattttcaacccaaaaaaaattttcaaaaatttctagggggcctagctcgaaaatttttgaaaattttcgaacatgtagtacaccattcgatagcattttaaaagctctacaattttgctctaaggcaatttttggctagaaccaacccccgacgagttatgggcccgggactcaaatgtcccgcttaggccaaaaaatttttctatttcctggaaaaaatcgaaaattttctaaaaacatcactaatcgatagagctcgaaaaacgatgttttggaagtggtcttcgttttccctggaaaaatcgttaaaaaatcataaaattcaaaaaccgaaaaacgaattttaggcctaactcgaaaaattttg

SEQ ID NO: 31573 - DNA, 925 bp, Heterodera glycines
attcattttgctcaaatattgaaggtggcaaataagttcatctggtttattttacaaatgctttaattcgacgtccaaatgagcgcaccgaagaggtccattcaaataactcgtcagatttttcttcaactgtttggaagttgtttaaaatataaactcagaaatagaattatttttcaggaatgtatctgtgatattcaaccaattgcgtcggttggaatgtttttgaacggttacacgactcccctcttcggagtgtttgtcgaactgcacgactggagagacacccggccaattatgtgttgttcaggtgggaagaaagcactgtttaaacggacttacagcatgagaatcatttcaaactgaaagaaaatcaattctttaataagtagacctgctcatggatatattttttattttagaaaaggtcagttggccacttgctggtacattcttctgtccggatcggtgttcatgtgggtattcgttctttatgttcttatcccaattgctattgactttaattttctaaaacccaaaaatatacactgtacaacgggatttattttttaacgaattgaaaattccataaaaattaagatttcacataaatttggtagtttttgaaaaattggacagttttagacaagttattaattaatcactattttttaataagttttgattagcagaggcaacataaaataatccctgaaattttcaggaacaagcaaatctacttgcccattggatggtatgtctgttttggattaattgatattatcttcatttatttgtcaatgctcaaaattagtcttctttttttgcaaacttccgccccgttttcaccaattatttttttgaaaagttcaaaatggctacaaattcgtgctatttagcctctgtgttgaaaaattttgaaaaa

SEQ ID NO: 31574 - DNA, 1098 bp, Heterodera glycines
  unsure (1)..(1098): unsure at all n locations
ttgctaaggtggggggggggggggaggggggtcaatctacagtatacccttaactctcattcaatggtatcaattatataaattttgtgaattttttttttttgctaaggtgggggggggggagggaggacaaactacagtatacccttaactctcattcaatggtatcaattatacatattttccgacttacaattagttctggtggttcccctgtaagggaatttaatacccaaatgatttctccgattttcgagcaagtgcagccagacaaatgagcacagaatttgggtcttgcccttcgaataaatcaacggtttggaacagttcacctggtgataaaggaaagtagaaacttataaaaagctggaaagaattcttatatgatttctgatttattgaattatattaatttgatggtttagttaaacatcttacttttgttcacatatttttcagcaaaacccaaaaagaatgaaatgttttccatctgtttgaatggaaaattactggtgtttattttctttatcgaattgggcgacagcgcatttgcgagccttaaaaattaagttatccatttttcatctcgccttagttgttttagattatgctcatcttacttgcataaaacagtcccatctttgagggtagacaaaaattcttccacttcgccactgacagtaaaagattcaccagtgacttgagaaatccatccaaatatttgtttcgataattccaagtcaaatttgctgtgaattttttgttgggcctcagccgctaaaccagacttagtggcacgctcagtcattaattttcaatctatgttgtggaagctaaacctgaaaaggtactaaaaacaacaaatttgacagttagggtttcaaaggccggactcggcatccagtcccggtccattttcaagttccggcccggtcacggccatttgggccatgactaacgggactanatttgactagtacaagtgtaactacccaaatttgaaaaattaataattattttggcgaaatgacatcttaaaaaatggctcagaatcaaaaaattggtctttttttggacaaagcagataacaaatctaac

SEQ ID NO: 31575 - DNA, 1193 bp, Heterodera glycines
ctgttcaggggcctctccaaaccattttttattttttcttttattcttttctcggcatggagttataacaatttttcacaccagttttgcatttaacagacccattctaaaaattttaattagtatagtagtccaagcctattattattttttttgactagtctctgaatgggttatcccagttttagtatcctttttgaaaaacaacaattttaataactgatacggtagcccaacatccattgccccaatgtacccttcggtttgtcaacgggagcaaacaattgatgagtttgtttggtttcttttttaagcaattttccgtcattgctcaccaactgttaggcgtacagcaacggcggtacttgcatccgatgcagctgttcacgggctctctaaacctatttttattttttttctatctcttctctgaatggagttataacaatttttcacaacagttttgcatttaacagacacattctaaaatttctaattagtatggtagtccaagcctattattattttttttgacttgtctctgaatggggttatcccagttttagtatcctttttgaaaaacaaaaattttaataactgatacggtagcccaacatccattgccccaatgtacccttcggtttgtcaacgggagctaacaattgatgagtttgtttggtttcttttttaagcaattttccgtcattgctcaccaactgttaggcgtacagcaacggcggcacttgcatccgatgcagctgttcacgggctctctaaacctatttttattttttttttctatctcttctctgaatggagttataacaatttttcacaacagttttgcatttaacagacacattctaaaaattctaattagtatggtagtccaagcctattattattttttttgacttgtctctgaatggggttatcccagttttagtatcctttttgaaaaacaaaaattttaataactgatacggtagcccaacatccattgccccaatgtacccttcggtttgccaacgggagctaacaattgatgagtttgtttggtttcttttttaagcaattttccgtcattgctcaccaactgttaggcgtacgagcgacggcggcacttgcatccgatgcagctgttcacgggggcggaaaacctatttttatttttttttctatctcttctctga

SEQ ID NO: 31576 - DNA, 1019 bp, Heterodera glycines
aaaaaaaaataaaaaatagtttaggagagcccatgaacagctgcatcggatgcaagtaccgccgttgctgtacccctaacagttggtgagcaatgacggaaaattgcttaaaaaagaaaccaaacaaactcatcaattgtttgctcccgttgacaaaccgaagggtacattggggcaatggatgttgggctaccgtatcagttattaaaatttttgtttttcaaaaaggatactaaaactgggataaccccattcagagacaagtcaaaaaaaataataataggcttggactaccatactaattagaaattttagaatgtgtctgttaaatgcaaaactgttgtgaaaaattgttataactccattcagagaagagatagaaaaaaaaaataaaaataggtttagagagcccgtgaacagctgcatcggatgcaagtgccgccgttgctgtacgcctaacagttggtgagcaatgacggaaaattgcttaaaaaagaaaccaaacaaactcatcaattgttagctcccgttgacaaaccgaagggtacattggggcaatggatgttgggctaccgtatcagttattaaaatttttgtttttcaaaaaggatactaaaactgggataaccccattcagagacaagtcaaaaaaaataataataggcttggactaccatactaattagaaattttagaatgtgtctgttaaatgcaaaactgttgtgaaaaattgttataactccattcagagaagagatagaaaaaaaataaaaataggtttagagagcccgtgaacagctgcatcggatgcaagtgccgccgttgctgtacgcctaacatttggtgagcaatgacggaaaattgcttaaaaaagaaaccaaacaaactcatcaattgttagctcccgttgacaaaccgaagggtacattggggcaatggatgttgggctaccgtatcagttattaaaattgttgtttttcaaaaaggatactaaaactgggataacccattcagagact

SEQ ID NO: 31577 - DNA, 1220 bp, Heterodera glycines
  unsure (1)..(1220): unsure at all n locations
cccagataaatttttcttcaaatctccagaccaagaatctcgagcagccttaggttccactatccgaactgttatttttattaccatcgatttgccaaaacagtagccaacattgcagaggtacgggtcccggttaagcacggcctcgcggagtttttcaagaagctggttgatctgttttttccgttcctcaatcgctgtcagcggtatgttcttcagcttaatgctctcctcgataagtctcgtaaattcaatgcctatgaaaagggagggggtggggaaggttcggtggttccaataggcccgacggaaatattttgggtttatttttaaaattaataaagaattggccaattttttttaggacttaccgctatttgaattaaggaggttccaaataaaatttggcaggtagaagagaatcgcttgcaaaagcagcatagcgggcacccaccaaatggggaaaaaattgattaggtaattatttaaaataaattaattttgaaaaaaataattagaataaaaactaaatgaatacaataattaaataaaacagttggataaattaataattcaaaccagaaaaagattcatttgacattataaatttagtacaattttttctaaaaaaaaacttaaaataaaacataaattgctaacaattttcccggtcggtgtgaatttttttgatgacttcgaaaataattaaggtaactgttgtaaatgagttaagctaattaagttacagcaataagaaagtgtataaaacaaaaataccgcgtggtaataataagtgatcggctgatgcgcatttcgcgcccaattgtcccatggaatgtcctcttctggtgccaaataatgttgcttttgcatttggcagtaattcagcgcatattgtctctcatcttcatttaaatcgtgcgatatctgaaatgggacggtcacaattatgaatacaaataaactttttaattataaaataaaatatttaaaaataacgaatgaaattatagtactaggcaacgcattggctcatttccgagatagccgaaactgaaaagaaagaaaattagcgtggatttgacaaaattaattaaataattttaattggataatttatttatgaatttaatttctaatatgtattatatgtatttttanaaataattcatcaattanattttatttgctttttaataattactattatgctttactat

SEQ ID NO: 31578 - DNA, 791 bp, Heterodera glycines
ttttgtttcataaatattcttttcagaaagccatgcgctcccgtccgatctggcaagttaagcaacgattgccgcctagccaaaaggttcggttccgtgatgaaacgaaccagctctgcttaccccgcggcccccggcgcggtcccccgaaggaatggatttaattaaattctctccttcggggatttttttccattaggtcgtccgctagcgttcgattgctgtagtcaatttttcaaaatttttgttgaatatttgtcgtgctctgaagggcgtgggagggggggggggcgaaggcccaccacgaggccgcgaagaggccgagtgagtaccttcggtgcaggaaaattattaaattttaaaattttttaattgctttttaaatatgccaaaaaatgtaggcttaacttttttagtgaaaattcgatcactcatattttttgctaattgagcagaagcgtaccaaactttgcagggatactccccggtaaaggactaacttacactgaaatgagcgccgagctagctggctcaaaaaaattttcgaaaatctgagtctttcgtttttatttgttttttgcataattaattcataaatatttttttcacaaaatgctctgaaacgcaccaaattttatttacatgctagtttaggcactctgatgctttttctatcaaaaagggaggggaataaatttttaattgctttttaactttgggaaaaagtttaggcttaactttttagtgaaagcttgatcactcatatttttttagtctaatctactcagaac

SEQ ID NO: 31579 - DNA, 1192 bp, Heterodera glycines
  unsure (1)..(1192): unsure at all n locations
gaccaaagaccaaaagaaggaggaagtatcaaaaaaggcggaaaagcgaagaaattagagaaaaacattaccancagaaggaagaacacggtaagtgagacgagaatattgatgcacaaattgatctgacaaatgaggggaggatgagtgtgattggccagaacagaaaagcggggaacggcggaacactttcaaagggaaccgggaatagaaaacccgggatttcccagtcagtcccggttctaagttaccctaatgaacgatgggcgggggggaataaagggggagtggttaataatgatgagtgatgactttgttgtgcgattggctgggaaggtaaaagacaaaagatgtcagaatggcaatgccaacgcaagggatcatcagattgacagtgtagaacaactgtaaagcagcacaacgccaaatgttaagttacaacaaaagcacaatttacttttttccggcgaattttcaaaaagtaagtgatgtcgatcactctgaaaaggggggacaaacaaagcaaagtttgaaaggcaacgccttctgttcacagtctgctgatttaatggcatttgcaatcagcagacttttgatctccaatgacagtctttgccaattaagctgatcctaatgcctttttgaaactcacgggtagtcacagcatgggtaacgcttctcgtgacgccttccggtgaccttttggttaagaatggaaagcaacaaatcatatcacatagtaagtaagctaatagcgaagcatacagaaagcaattcgaactccacagactcctgatactcgctgatgtccacgcccaattccacgttccaaacggtgccgttctcctggctgacgtgttccaccacgtcggtgtccaactgcaacatttgcccgtgacagtttcaacaaaaagggcaaatgaaaaaacccacgtggaccatgtcaagttcaaatccgccgtaggtccatgagcctaaaaattgcgaatggactttgagccgaggggcggggaaagtgaacgaaccgaatttcatgtaacattcctgctcatcgtaaggaaaccatttgatgtcaatggcacacatcgaattgtacaccacctgaagaacaccaccggtcggtggacaaagaaacggaggaccgaaccggcggttcccaaaaaacgctgccattcgcataaacatccgcctt

SEQ ID NO: 31580 - DNA, 1594 bp, Heterodera glycines
  unsure (1)..(1594): unsure at all n locations
aaagcaatagccgtggtgagtcgatccaaaaaaaaaaaactcagtgtgggcgatcaaaaaaaaaggtccggttcttgatccattcactntgagctataaatatcttttgaattaatgctttctattactctgaacattgaatttaaaaatataaaataaataaaatgaatacattttcaatcgttttattaaattttatttattagatagaaatcagcataaatttttttacatattacaattttagaaaaatttatttacaataggaaataaactaaataaaatgtttttttctgtattgaattttatctttcctattttttaccaattaaatatttatgaaaaagttcaagtcaattaaactaataaggtgaaaatatcgcagttataaatgattatattgacttctcaatgtaattacatcagctttctgttaggggtatgagaattaaattttatattttttatttgaattttattttaagttttttcttaacttccttttaaatttctttattttcgaatatcatctgtttattcgcctcaaccaattttaattaaaacaaacattattttatcatttatattttaaattttttagattttttgattaatataattaaaattgaattcattttgattttaaatttaattaatgtgacaattttataatacgtaaattttcttcattgctacttgcggtgctaggtcgacccaaaaaaaaactcagtttgggcgatcaaaaaaaaactcagtgattaataaaattaactaattttgttttaccctttaattgcgcataaataaaagatattgaaattttttttttaatttttaaaaaattaaaaaaggattatatttaataagttgtattgctaaatttttaaattaatattttcttgtaaaattgaaaggtgaaattatttttctaaaacactaatttaaaaaaaaatacatttatgaaccataaaatcatttaaaaaataaatgaacattttgaaatttctaccaaaatatttaaggcaaatgataatagtaatttacatcatggaaattattagatacattttttttaaacaattgcaatacaagatttatggccttttcgataatttactaatcaaaaaatattttaatataatatctcagtaaaccgatttgaaaaaataataggtgtataagaattattcagcatctcgagggctcgccttaatatcgaaaaaataaaaaagtaataaagttttaaaattatgtgcgactttaacataaacactaaaaagtaggttttattacccaagttttctcaaagaaccccgcacgtgggagatatttttataaaaacaaggtcattaagctatgcaataatatatacgtaaaaataaaaaactaacagactatagaattgaataataaaatgcaaaaaaatatccttattagagtgaaatatattttcatcatcataagaaaaaatgaataaaattacgtatgcaaatttcaaaataacaaaagacttcatgcttaaaaagtttgaaaaaattgtatttaatataataagaaacctaaattaaagtaatgattaattatttattcttat

SEQ ID NO: 31581 - DNA, 1537 bp, Heterodera glycines
ccaaatttaaaaaaatctccaaactatttaacccaaaaaatttttttatctgccaaaatccataatatttgttaatgcgaagttttataacagcaaataaatgtcctaatttattatttttaatgaattttaactcaaataaataatttttctcagagatgctttcttaccaatgtataaaaattatgtgttttctgccaaaatacgaaacacgaaaaaatcaacaaccatgtcttatagctttattaaatttgacaaaatttgctacatcataatttagcttaaacataatcaaattaaatcattcttgttattgagtgatatctttacatgtcctccattgtattataattttttataatctagcaaaaatttacaaaaagttataaccaaaaaattcagaaaaattttgactcactaattttgtcgctaacttttttaaaattcaataaaattttctgaaatttcacagaataataaaaaaatctttgggctatttttcgatcaaggtcggtgtgaatttaagtttgaaaattttatgcatttaaacgaccttacattttttgaggaccatttaaatatgacactattaatttgtttataactttttaaagaaagaaccaattttaattttgtttagaaattttaacaacagcaagccgagaaaagagtgttgccgagcaaatgagacgaaatgattgagcaataagtgggccttcggtttctgagataggaagtcgcgcatccgttgttcttgggccagaaaaccacggaactcctcaatttggcgttcaaatgcgtccaagtcatttggcgaaagtggttgatcctaaatttataaatttgggagtgatttgctcaaaatttgtacttttgtgaaattttgggatttggcctgaatgcataagagcttggcaaattgtctttggccatgagagatgttccatttccgatgcacgtttgaggacttagccaatttgcggcgtgaggtgcgctgcaaatgatcaacatttttctttggtcgtcctgttcaaatcgccgattggtgtgacatatgtcgacggcagcgaaaagccaaattccaaaatttcctcgtccatctcgggcgtcggcactggtcctggagttggtggcggcgactccatcgcttcttcggccggtgcagcagatgttgacggccctgcttcgtcctgctttggcgtttcggcattggggttcggctgtggatcgtctgaaatttgaaaaatggaatttttgtgttaaaaattggtgaaaaactcacttttgttggctcatcgggcttttgtctcctttgcattttggttcgtctctcctaccgcttgttctcacgcgtatggcgtgcatttttgtctctcgcttccgtaataaagttcttttagccattaaatctttaaaaagaataataatttaacttttttatcttataactttttaaaacaacatttaagcgatgataataaagatagaaatcgatgcagatttttttctcaatcgatacgcaaaatttggtgcagat

SEQ ID NO: 31582 - DNA, 937 bp, Heterodera glycines
caattatggtggaaattatataacaagtttaatacatgcacaagaaaatagtttcaataattgtaattcatctgggggaagaaacttgttcaaaaaataagttgttcagccgtttcgggtgataatttggaacggcgataatcaaaaacatcacgggcgactttgaatgtttgttcacttgggacactggtggcaggtgctgaaagatatttttccgcaaattttgcaaggattgaaaatcgaggagcaattttcttccattcatctaacggattcgcttctgggttcgcaatttccagcgcgagaaattccttattttctttttcaatgtcatcgtcttgcgatgtttggaagccttaaattcgttattaaaataatggttgatgacccaaaatcaccctgttctgttgtgtttgcgcctgtaatgtgtttcagacgttcaaaaaatgacattcgtcgtttagctggcggattttcgggttggggcgaaatgacaggacgaacaaattcattttgtagttcgtctaagtcattttcaacttgacattctttcacttcatttttgatccagacattgactcgagcgcgaaaagttgcggaattttccatcagcactttgtccttgaatcgcacatccaaaaaagtggctagcgcatattccctaagacataacattaatttaaattaattaaattttttttacttcaaattcgctagaccaaaaaagcgcctttcaactgcatagtaaagtgttgtcctgattgtctccacagtcctgttgacaattttcatttcgtacaactcatcatgtagtgcccgtgcttgagggaggacaaatgaaattggctcggcagtgaacctttttgttgcttcttcagcacattttaacaccccaaccagttcttcaatttgctcccactcatcattcttcaataaa

SEQ ID NO: 31583 - DNA, 1529 bp, Heterodera glycines
  unsure (1)..(1529): unsure at all n locations
ttcactgaacgatttgatgaatttaaagaattatatggccaaggcaaacagaaagaatttgtgaaagaattgggcatttctgaaaaaacatttattaaatggaaaaaaagatttgatgccaaattaccacaaaagtaagggaataaaggaataattaaatttttaattagtttaatcatttttattatntaagcacctaataaatattccaatgaggaccaattagaaaagatgaagcattattttgaaataaaagaagccaacccaaaagtgactgacgaaataattgccaaggaattgagaattggaattacaacactgatcagatggaaaaagaaatgcttatccatttgatcagtgattttactttgatcagagtgattttgaagcataaaattcgttgctaataattgtaattaaatggtttaatccattttttcatatctcatttttccatctcccttattattagcccatttgtgcgctctggcaaaatttgttggcacacactaatgacacacaatgacttctttctcaatccatcattcatattttattattctctctctacaaaattaatctttatgcgtttgttcggtctctcattttcacgttatccctcctctttggccaattttgtctctgcttctttctcaattaataatgcattttctctgcactccgtttttttctctaccctctctctttccctcctctctctctctttctctccatttatctccctctctctcaatctatctcttatgcttttttttcttatcttttggatatgcttttttctctctcttctttaatgtcattttctcctcaatttctctgcttgtttttctcttctctattcaagcaaattgtctcttccattctctgtctttctctctctctctcccttttcgcttctctgtccccactgtttcctttcaattttttttctgttttctctgcttccttccattctacacatactcacacaaataacactttatgtctctgctctcccctctctgcctctctcccctcatttctctcgggcaaaatgcccatcattccctccgctccccccagctcccacattgaatgaaacctcaatttctccctcttcctcctcctcctcctcctttcactgttttgccccattcccacccccgagggatttcttcccctctcgtcctcatatcccttcaagggctctttgaccttgtgcccctcccccggggtccctcttccgtccgtcgtccgtccgtccgcggcctccgtttcctcccattgattgccaattcggttgagggcattcaattgggcttggctgagtgtggtggtgggcttgtgtgggatatgtgcctgctgggccaccacaggcttttggttctcctcctcctcgtcgttgtccgtccgtccgtccttcaaatccttggccaccaaatgccctcgggcttccttccgtcccgtctttggttttctttacttggctattcacccccccccctctcctcgccggacatttatccccc

SEQ ID NO: 31584 - DNA, 1351 bp, Heterodera glycines
  unsure (1)..(1351): unsure at all n locations
tgacatcaatggccaatgtcactttgtcctcttttttgtcatacaatcctttgctcgagtccaacaattccttaattttccataattgggtcaattaagggaaagtttaattgtcactcacagcaaaagaaatgatagcgacacaatgcaacatgttcttattgtcaaaaataaggtcaacgaattcgtccaacactccgttctttagagagacaattcgaaagtttgccgaacatttgcaactccaagtttctgctcaatatcaattaattaattgttgttaatatatatattaattattagtaattttgcaccttcttttggagcatcgcaccaaagagaaatgcccaaccatttctcatttttgtcagtgcttccaattttcgtttttatttgtgccaatattttccatggcaatcatttgatgtgcacagtttcgcttttacgttgactcccaattatttcacgcgcaaattccgacactttttcaatttccataaagagtgtgcctttcgaattgctttgatccaaattgaatttgtccacttttggttcatcaacagttgtgagatcgatggtcaatttcactttgtcttcttccctgtcgtaaaaaccattgttaaggtccatcaattccttaatttaaatcatctaatttaatttttgtttatgcgtggtcaattggttatgttttagaaattaatttattttgttatgatttctttacaccaggcaaataaataaatgaacttcaatattggctggtccacgaatgtcaaattaaaatatttgtttgaattggcacttaccgcaaacgaaacgaaattagggaatcccaaattatttgattttttgtcaaaaacatgatcacaaaatgtcccaatcgaattctccgtcccatttttttgcgagataattcgaaaagtggcagaatgaacgaagcagcgccaattcgaatcttaatgattattacttatcgtagttaattagcatttaataacagttaatttgcacctttttcagtagaatatatttttaaaatagtaattaaaattggaccttcttttgcatcgtaccataagtaaaatcccaaatatttcttctcatcagtgtctttcgtaatttctgcttcaatttcccatggcaatccatttatgtacactttttcgctgtaccgactgctcccaacctcctctcgtgcaaattctgacactttttcaatgtccatcaaaagtgtgcccttttttcgatcggaaatccgtccattagtcgaaaatggcattgngaaaagtccgtcggaaatcccatgancatttggaagggaattgaactgataaacgctgatcacttc

SEQ ID NO: 31585 - DNA, 1467 bp, Heterodera glycines
  unsure (1)..(1467): unsure at all n locations
ttttttcctcatccatacccaaaaatttttcggaaaaatgcgccaaaaaaaatgttaaaaatatgttttttattttaaatgcactgaatttaccaattgcttaaacccgggatgtcaattgattggactcataaagtgcattagagcccaaaaagcatattgagcatggaaaatcgaaaattaagcagtttctttttaggccttattaaaacagttgcatttcccgcttgtgtcacataaatcgcttgccaatttgataagatgagcgaatttgtgagcattgtgtgtggacaccctcgacgattgttgctcattggtgtcggagttggcgtttctgtgttcgctatccaagcattttggaggtgaaaatggaaggcacaactcatggaaaatatggcattcgcctctcatatttgtttaggtatttcttcgctgaacgaagcggcaagaaattgccacggttgcgcaatgaaaaatggaaactttcggaacgttgtgaaatcggtgagcgtaaaacggaaacaatgccaataattgccttttacaaatcactaataacgggattggatcattcagctcgaattattttctccctccactttatttgtttataataaaatccctaatacaacattttagggtttcttttttgcggggaattctccaaaattgaaaaaaatccctgaaactcgtcaaagttattaaccttttttcagatatcagttctttgaacgccgccattgacagtttggagcttttgttggccgagttggagccgaacaaattccaatccgaatttggacgcggaaaatacgacctaatcgcatcaatcatcgcccgactgcgcggagtgtacagcgatttgcagaaatatgtcaacgaagactttctcaaaagggtgtgccaaattaacatttttgaatttctttaggagatatgccattaaatgaatcactcatctttgcataataaaaaaatcataaatttctctgccaaatttcctgtttttttttttgcaggtgtccaccgaggacatcgcacggtcggtgtggcacgcgaaaagcattatgggctgtcgaactggcggggccggcactttgtcagtgctgtcggacaactctttcatttcggcttatgacgaattcgtatgaatttgtttttcatgcttttgtgcttctacttaacatccactaaaaggaacgctataaacaatcaacagcaaaagggcgaacttaataataaaaaaggggggatttaccaaaaagggaaaaaagaattaatctgcgactgttcgttgggcagacgaacaaacgattggaataagacgcatgggaatggatacacttctgctgtttacaattagcatttcatgtaaagcaatgcctttgctgaattatagcgaattgttgcgccatttttgcgtataattttacatgcggactgccaganggaaaagtttttaatttt

SEQ ID NO: 31586 - DNA, 1507 bp, Heterodera glycines
  unsure (1)..(1507): unsure at all n locations
atagttgggcgtcaccaaagacggcgctgcgccttcaaccaaatcgatgggcggagggtcaggcattgtgccgtcgccaccgctttacaccagcgaacagtgcgctacgggtgccgaaagcggaaagggcacgacgacggaacagcggacggcatgcgtgttggccacgctgcgctacctgcaacgtgccggtgaatacggagcagttcaaaaaaaaaataaagttttttgataaataggcaaaagaccctgaagaagaggaaaggggaacagtttatttccgttcccaattagaaaaatgcgggcttttcaaaaaccgctaactcaccgattagacagtgtaaaaaaaaaatttttttttactcccaaccgaaattttctaaaaaaattttttttttaaaaaacataaaaaagaaatgcagattttccattagatatttttaaaaaatttaaatactagggattttttaattaaatatctcattttaatggcaattattttattactattttttttgcgtccaattttagaacacttctcaataaatgtttgtagtgttcatttttttaatgaataaattgtttccggtgcttttccccgaatttctgcccctccctcagcaatttaattttctaaacaaaaaaaaaaagatgaaagtgcagctgcgctgccctgttggctcaccgtttggacagtcgccgatttggacagcgctgacgggcgcaaattggtggcaaatgcgctgaagggcatgaagaagagcaacgcgatgcgcctggctgtgctgcacaatggcaaaggtgtgtgacggaagggaagggcaaagcgggagcagttcgttaaatttagaaaaatcggtaataaaaaatttctgaaattttattataaaaaaacccaatatttttttaaattttctacagtaaattttaaaaaatcggggtgtgtggggacgacatggggacgggaaagacagacataattaaaatttttaactattttttttggtttttaaaacaataaatcttttttgcgttaatttcacttctctactagcgattgtcctgggatttagggtttttggcgcttgttcggtcaccccttggattttttaaaattttccccctcagttgactcctcctccaactctgtgtccgtgctcatcgacgcgctgctccacggtctttcatccaccgcggccaaacagtcgctgaacaaactgttcgccgccgaccagcaacaactgattgacgaagtgcacagaaatgggcccgagtcggtgctggacaaaattggtggacatgtgagtgttgaaagtaatcgaaaattctctatcaaaaaatatcataaaataaaataattcatcgtctgtcgggcgggtccgaaccaatgaatgacaaatggtcattaaaatgtaatagggaaaatcgcattaaattaacgtatttttgcttgtctttccattaaagtggatttttctgaccanattttgaggtcgctgctaaaaat

SEQ ID NO: 31587 - DNA, 2269 bp, Heterodera glycines
atggatatttatttaatatataaaaataagtcaatactaattctactattgaataaaattacattcacttattaaaaagctcaaaaattacaagttacaaaaccatacaattgaagagtcattcaaagtaaaaccattaatctttttcttatgtaacgatatttaaaaagtaacaaaataagaaataaataaacttaccaaaatatagtttattgaaacaaataatattattatgggagacaagccaaaaattgccatattggagtaaacgtttgaaggtcgagtaaagcatacaatgaaagattttaagaaaataatttaaatttatgcatttaaagcaaaaataattatatagaataaaaggaaaaactaaaatgattataaaataagacatagcaaaaaagagataaacataatttcattcatttactttgtcaattcagtaactttttccaaacacaaaaacaaaaaatcattcaatgggtaataaaggcaataaatagacttcaacgaatgggaactgatttaaataatcaagaaaaaaactgatgataaaaatattaaagcaacgatgaagtaataaaataatctaaaaattacatgtaaaaataatttttatttgaattaataaaattaaaattaaaaggaaattaaaaaagagcgttaatttaacaaaaaaaaatgtcgtataaagagctaaaaatgaatgtacatataaatttgaaaagcattcttataacaaacacaattttgaaaaatttaaaataattataaaatcacatttattttcatttatgaacaaaagcgtgaatgatatgaaaaaagagaaagttacaaaaaagaatttatctgccaaaataaaattttgactacttagttattgaaatgaaattaacattagaaattttaaggaagtccattcaacttaatttcggctagagcagttcgcaagtttttatttattttttgaatatacctattatttatatatatatcataaataaatttacttacggaaaataaagtaaaaaattgaaagtttcagttatccacaaaagaatgaaaaaacaaaattattcataatttatataaaaaagaaaaatttaaatgcatattaaattaaacatacaaatttcatttattcgttttgtcaattgattgattataattttttatatatgatcaataaactaaaaataaaaacaaatataattttataaaaaatatttaaattaaatataaaaaaggtcctaagctcagtatataaatttgcaaataaaaaatttcaaaattgaacattattgaaattaactaaattattaattattatcattattaaagataaatttttaaaaatacaaaaaaaaaaattgaataaataaataatgctaatgtgactataccgtattgaaaaagccaaactatagaattttgttttttatttttgcacatgatatccgtcttgtaataatattaaaaaactactaaacaaaatgtcatatatcattcattcgtttattctacataggaaatacatatttctgttttaaactcatcaaggattaattttcgaattttaaagtttaatctttttgctttgtaattggttttatcttgccagtgccccaaaaattgtttttaagaggcaaactcggatattaatgccattttgcggttattaaacgctatgactaacattaattgtcaataaaattggtatttaaaaaataataattttttttcactagatattaattttattttcataccaatttatttcattattatttttttaatatttttaataatttttttcactagatattaattttattttcatgccaatttatttcattattttttaaaaaatttttttttggtgttatttaaaaatttttttagtttgtataaagaactgttttccattaaaattaattaatttatattgcaattttttttaaattatttaaaataaatataaaatttatttgcttcttcatattaaattacattccgtttttttttgcgtttcgcctcggcttgttctgaaccataaaattattttaaatttagaattttattattatttctttgttgacgccttttttgaggcaggccgaggattcgtcctcgtcaattttcgcataagtaatgagtagagaccgacttttgaggcatatgctttttttctgcgcacttgtttcgatatattaagcataaataacacattttccacttggtttgaggtttctactttgacttttatttt

SEQ ID NO: 31588 - DNA, 1644 bp, Heterodera glycines
taaaataaccttcaaatcatcattaaaaaagcatcaatcacatctcactaaattgagcaaaaatcttcattgaaagccctgaataaaaacccatacaaagtaaaatagaggatgaattttgtttttttagtattttaaatttgttttttggttttgacctggtgatatgtccacatttgtcaatttttaaaaagaatttgttgattttttaaattattatttaataatattccaaaaataatttcaaatttgtaatgtctcccaaaatgccttttcattttcctctccaaaattggcccacctgctcaaataaattcccgtggatcactggcagcgggggacagctggcgaccgcggcagaagcactctctgcgctcggctgacgtttcattttaagccgatgagaaacggagagaggggaaacttctgaggaaatgccaaaaaagacaaaatgcaaaacgatcgacaaaatatttttaacggcatgaaaaaactcttttgctgcgtgagaattaaaattaagggtagaaaatgccatgaaaaataaaattgtttgtgccgctcgaagacggggggggggggggtcgaatttggagagataaaccatcaaaacctttgagaaatgagtcgtaatttaatgaattggatgtgatgtgacctcattgatttgggccgagaaaagggtcaattaaattacagtaagacaccgttttaccgggggcacttccgttgtgacgcccgttgcgctgctggcacagaaatttgttgccgggagggctgaaaaggctggtagcacttgaggaaatgttcacggatagcagcgaatcagtgcccatcggggaaatgttccgcaaagattaattcatccgcacgaaaaacaaagggagaaaaaatgacataagggagagagaagagagatggaggagaagaggaagaggagagagagaggaagagagagagagagagagggagggagggaggaagagagaaagagagagagggggggggagagagggaggagagagaaagagagagagagagggggagagagggaggagagagaaagagagagagagagagatggaggagaaaaggaagaggagagagagaggaagaggaggagagaaagttggagtatgccaaaaagagtaaaaagcatgcctcattaatttaattagttgaaaaagaaagtggaggaaaagagagaagaaaaagcgggtgaaatcagcagaaaaaaagaagagagtaaaaatggaagagaaagaaaaagaggagagacaaagaaaaattgagctgaacaaatcgtccgagaaatttaatgtttaaatgaggataattgaataaatcagaagaaaggaatgggcggtgattatcaaaaggatggcactgtcgtcacaattttctctctccaaaatgcctccattgtgtgagttcggctttcataaaagctaatccacgcgctaatgacgccattagcgaaatgagcggtagaattcaatgggaaagacgaaaggggcgggaaaagtcacaacgaattgggggaggggactttatgagcagagaaacctagtaaaagggcaattaggacaaatttagccaattattgctaatggtacctgaaactgttgtattcccattttaaat

SEQ ID NO: 31589 - DNA, 1040 bp, Heterodera glycines
  unsure (1)..(1040): unsure at all n locations
agattttatgaaatttcattgtcaataatttttctctgtatttaagtaaaaaatttaaaaaattatattctgatagataaaattaaagccactgaattataccattaaatattaattggttgaatttgagccaagctatgaatttatatatatatatatatgtataacccatttttgttttcaaacctattggcggatttaaaaaacagcacgaattgttgactttggcaaattgtccaaaaaatcatattattttcttgttcttaaagtttaataaaatgttgatgaaaatgaaatttcgggagaaaacagggccaaaattgtatttacattgcagaaagtagcttttaaaaaataatcaaactaaaaataaatttaaaaaaaaaagttaaatactcaaacgatctaatttatatgtacttggcattatttgggtcgaggcagcttactatttgccactctctcattatgcccacataagcaatggttttaaaaagccatcaaatttcgagaatcgaaaattgctcaacagggaaaggggggaattagccaagaaatcaaacagaaaatattttaccaaaagagcttaaaacagatttaaaatgcgtcgtttgtcttcttcttattaatgacatcctcttcggcatccttttcatcatcatcgtttctttattcatcaccatcgtctttctttgcacctgttaaatacacaaataaattttttttgatcagttttaacaaggcgttaagtcaatcaaacccccaagaatttgcgattaaagaaaatgccatgaaattttcgtctaaacacaaaatgctaatctcaaggaccaattaattcaaaagatcaattataaagaaatttatcacccccgccacccaaggtgtaataatttaaaataattttaaaaatatttcataaatataatctgatttttactaacttcaatcaaaaaaatagcattattcaaatcactctaattgttcacattaacagtgacactcattaattaattaccctncacgagatgcactacaat

SEQ ID NO: 31590 - DNA, 1087 bp, Heterodera glycines
tcattctccaatcattattcattcttcaatcactcattgttcatgcccttccccccgtgtttccctagtccactcaaaccaatcgaattctttcttcaccgattcttctgctgatcatttccattcaaaaggcagcagaaccgttcattgcttcgcttttgtttctgctgctgttttccctctctccctttcctctgatcagtttttctgatcactttatctttgtttttttggtcccacactcttttctgcttatgtttcttgttattatataattaattgttctaattaagagaggagagagtgaaaagtgagagagagtgcattgaatggtcccttttttctctgactgcgtttgtctctctcttcctctctctcttcccttttctctctttctcttccctctctctttttaattcgctaaattatgcattttttcctccaaatttctgagggccaatcacaaatcatccctccgaaatgaagagacaaaagcaaattgtccgccaccgccgcacaatcaatttttgtttcgtttcttttcaaattgaccaaattattgtagcaaagcgactatcaaaatttcgcttttaaatgctgcttcttttttattatgtttttttgtgtcaatttattctttcccattttatcgccgattttaataaaatttttcgttcgctaaaaataaatttaaatggaataaaaatgtgacaaaaaaggaaaggacgaggcttctttgggtggaatgaaagacaaacaaataaagaaaaaatatcagaaaaagggcaatcaaagagagaaaaaagaggggggggggagaatgattagccggaaatgggcaaaagcgaagtgatcggagagggacggactgatcagcagacaaaaaagtgatcggacaaaagtaaacaaacaaagcgacggggggaaatggacaacggcagaacaaaaccatcattcatttctaaaaaataaaattcaaagaagctttgtctgggtctgttgtctatcttaaaccaataattctttttaaaattgaaaaaggccgcgctcaaatttggcatttttatttttaatttttgactctaga

SEQ ID NO: 31591 - DNA, 1673 bp, Heterodera glycines
acatcgacgatgaagtcttcgaattgctcgggtccaacgatgcactagaccaaatgacgaacaggtataaaaagttttagtcaaaaaatggtacaatatttagaacaaagaacaaatttgttggcagtgttaactgcgctgatccgctcaacatacaatttccccctggtcttttgacaaagaatgatgagtcagtcctcatttatgatagccgtgaagtgaggactggacaatctgatgtcgtcctgattttcagcaatagcaaggcgtgtctccatattttcttttttaattaatataacttcagttgctgtcagtgctcaaacaaaatcggcggtggagcttcgacggcacatttcgcagtgcgccaaagccatggatgcaggtgttcgtcatcggttgttatgtcaacaaccgaatggtggttgcagcgcaagccttactgcctggtaaagcttctaagtattacacagaagtccttcagcagctgaagcgtgcaattgaacccctccttccaataaaaggcaacagaaatacagcaaatcgccttcactgataattattttaagtaatgagcgacttcgagatcggaatgttgaaagcgatgcgccatgtcttcccgtcatgcgaacactcgggctgcagcttccacatggcgcaagcgttgttccgaaaggccaggagcatgggaatttttaatctgttggacgaatatgatgacgaagcactggttcaaataaaggtcgttcacaaaacatttaggtttttgtctttcattagctcatctgtgtttaattgtttcccaaatcagttctctctttggcactcattccagcagtttacgttcggcacgccttttcaacgattcaacgcggcaccgcttggaattcaaggatggcttgcgtattttggcagaacatacattggcaccattcaattcgagattgatcgcggggcggaggcatatgagccgcaggctgatgtaggacacttccttctgcgtcgcattcgaagcacaactcgtaaatgcgcctcttttaatgaaatttatgaaattttaattttagcgttcagtgtgtcccaaacgtcaataatgacaggtagtgggccaatacaattcggactgcattcgccacaaccatcaactccgacgattccattgtctgaagaaagcagcttacaacttcttcgacgctgggaacaagagatcgtccaacctccgcgcttcccaatctcgttttggaatgtgcacaccagggctcaaatggaaattgagcgaacaaacaacggcatggaagccgcgcatggacaatttgcagtataaaatttctccataggagtatttatttttgttaatttagcgtgaactcaatcatcatccgtcactgagtgatttcatagcagcattcatcaaggaaggacatcgacaaacaactggacattggacgagcagaacgtctccagaagagtcgaaaacgaccgcaacggtacatcatcaaggaacagagtgttgtgcgtatccttgacgaggctgactttgaatcggaagaaggattggcaaacgccttgcatctgctcggactcgtaatgcagggctttgtagaggggcttcacatccgtggaaatgatgagagtgatgaagaaactgctgatgccgatggaaattgaattta

SEQ ID NO: 31592 - DNA, 1163 bp, Heterodera glycines
  unsure (1)..(1163): unsure at all n locations
taaaatataagcgtattgtatgtgcttatttgagggtggctaataatttcgatgcagagaaatttcgacaaactantagaatgagatggctntatttaaaataaagaattngatgaaattaccgttggtaaaaatgaaatgaaagacaaaagattggcaatatttaaattcgatagaaaatgcagaagtgtcgatttttgaggaaaaaccatacatataaaaggcagagaaaaatgacagaaagtgtctttttttttgcaatcataatttacgactaattaattataagtgtgttcagcgctaattgccacaaaatgaagcgaccttcaaggaaaatgtaaagaatttttaacaaaaaatttcataattacctattttttacgcatttcagctggatttgtcttgacgtttggatggacattcttcggcgcgccaacgattcgtcaactcgacgattcgtcaactcagccaaaatgcgacgattcgtcaactcagccaaatgtcaacgattcgtcaactcaacgattcgtcaactcgacgattcgtcaactcagccaaaatgcgacgattcgtcaactcagccaaatgtcaacgattcgtcaactcaacgattcgtcaactcgacgattcgtcaacccagccaaaatgtgacgattcgtcaactcagccaaatgtcaacgattcgtcaactcaacgattcgtcaactcgacgattcgtcaactcagccaaaatgcgacgattcgtcaactcagccaaatgtcaacgattcgtcaactcaacgattcgtcaactcgacgattcgtcaacccagccaaaaatagttttaaaaagcagtttcaagagcttttaatggcgcttagcacaattatagcattcttttaggctaatttagaaacaagaacacataaaatcacgacccttccgatgaaatattctatcaaaaacttgcataaacaaattttattaaacaaaaattcaaagaaaaaaacgaatcaaaatgatgattatcagggattgaggttanacaaatttcaactgatattatagggtgaatgaaggtttaaaaatttcaatcaattgcaattggnntcatcttccgcttctgcatagtcctcatgttcttgtgcccctcgtgcacgcagcccgcccacatatccctgca

SEQ ID NO: 31593 - DNA, 1004 bp, Heterodera glycines
tatcaaacaatcttacgatatttgaaactcaaacaaaaaaaattcttgaccaaaaatggttatctcttttttctcatttttttaccgcaaacttggtaccaacagttgccttctcttgtctggccctatcaaacaatcttacgatatttgaaacgcaaacaaaaaaaattcttgaccaaaaaatggttatctcttttttctcatttttttaccgcaaaattggtaccaacagttgccttctcttgtctggccctatcaaacaatcttacgatatttgaaacgcaaacaaaaaaaattcttgaccaaaaatggttatctcttttttctcatttttttaccgcaaaattggtaccaacagttgccttctcttgtctggccctatcaaacaatcttacgatatttgaaacgcaaacaaaaaaaattcttgaccaaaaatggctatctcttttttctcatttttttaccgcaaacttggtaccaacagttgccttctcttgtctggccctatcaaacaatatatctgaaacgcaaacaaaaaaaattcttgaccaaaaatggctatctcttttttctcatttttttaccgcaaacttggtaccaacagttgccttctcttgtctggccctatcaaacaatcttacgatatttgaaacgcaaacaaaaaaaattcttgaccaaaaaatggctatctcttttttctcatttttttaccgcaaacttggtaccaacagttgccttctcttgtctggccctatcaaacaatcttacgatatttgaaacgcaaacaaaaaaaattcttgaccaaaaatggttatctcttttttctcatttttttaccgcaaacttggtaccaacagttgccttctcttgtctggccctatcaaacaatatatctgaaacgcaaacaaaaaaaattcttgaccaagaatggctatctcttttttctcatttttttaccgcaaacttggtaccaacagttgccttctcttgtctggccctatcaa

SEQ ID NO: 31594 - DNA, 1225 bp, Heterodera glycines
  unsure (1)..(1225): unsure at all n locations
taatgcgatttgtttacaggtttttgtccaaaaatgaccaaaatttgcgattttgggctaattttttaagaaaaaatgaaaagaaatagttttgaaaaagaagaaggtaaaagaaatagtataggaaaagaaaaaagcaaaagaaatagttaaagcaaaaagatttctcttggaatgccggagatttgagtcccagagattgaaaaaatttaccaaatttcctttgattattttttccacttttccaaatgctcattttcaaggacgtccttgccattcaaggacggatcccatccctgcattaaaataaagagatagtacccaaacagagagaaattacaaagaaaaagagaaacgacgagatagtactaggcttttctctgcacagtggagttgacccatagtgctacaccataaatgccgttgataggcatttaaaattaatcattgatttaattggcttattttgaaattctatgtgggagtgcagacagtgaaaatttgacagttcctatgttaatgcatgttgtatgtaataaaataaaaatagtttaaaaaagttttaaagaatatgtaattattatatacttttacatcattctaattaattacagaaaatgcagagacttgctaaactggccaatactggcggacttttaattcctttgtctggtgccgttcagacaatttcgacgaggggcgttcttcgtattccgcactgggagaatcacatccgtttcgacccccgatttggacgcaagcgaccgtgtcaagatgtattggaccgattcgcaaggctgaacaatggtcttcttctttttttatgcttcattttcttttaaatttacaatactttccataaaggtttgtgggtgcgatcgcgacaaggcagaaacaaacaagtttatcagaaggacgagatttttcgaaaagtcaatatgcagtgggacacgtgcaccaaaagagaatgtgcaatgcttgacaaggtccccttgtcatgacaatatttatcttttcagcgcactcacattgtttctcttaattcaatttgtgtttagcttatgactccgttttggcttcgtcccaagcattacgtcggtgatccaatggagccttatcacacgcngtatgggatcactttcgcacgtgtcgatgatcaaaaacgtcttgtgcgagaaggnnccaactcctgctttgacgattgactctgaccgattcttttgac

SEQ ID NO: 31595 - DNA, 502 bp, Heterodera glycines
tcactcatattttttgctaattgagcagaagcgtaccaaactttgcagggatactccccggtaaaggactaacttacactgaaatgagcgccgagctagctggctcaaaaaaattttcgaaaatctgagtctttcgtttttatttgttttttgcataattaattcataaatatttttttcagaaaatgctctgaaacgcaccaaattttatttacatgctagtttaggcactctgatgctttttctatcaaaaagggagatgaataaatttttaaaaatttttaattcctttttaaacaggccaaaaagtttaggcttatcttttttttcagaaacttatcagaagcgccccaaactttgcagggatactgaaaggaaaagaattaacctgttttatcacattagcttgtcatcagtttttataaaaaattttcaaaattctgagtctcctattattttatttatttttcaaaattttgaagggcggggggggggggggggc

SEQ ID NO: 31596 - DNA, 1075 bp, Heterodera glycines
tcgcggctaaattccagtcgagacattcccacgcttgatcaacgtgtgcacgtaatcgcccttggcctctgacttctgctgagccccagcgcccatggcctttgacttcacaatgggccccagcgcccttggcctttgacttcatgatgggccccagcgcccttggccattgacttcacgatgggccccagcgcccatggcctttgacttcacaatgggccccagcgcccttggcctttgacttcatgatgggccccagcgcccttggccattgacttcacgatggcctcagccaggcccgtagtgtagaacataaaagatttcgcccggtgggactcgaacccccgatctctccaaagcatggagtgctctgtccaactgagctacgggcgccacttgtagagtttctcctttttgcgcctgcttttgcttcagtctgcgccttcgattgcattttcctcagttgcgcctgtcttcgatctcagtttccaccgttttgcacttccattccgccccagattgtgcttcttcaaattgtgcttcgtcaatttgcgcctcttcaaatttggctttttcaatttgctcctcttcattttgcgcctcctcatgcgtctcttcaaattgtgccacctcttttgcaccttctcaacgcgcctcctcaattggcacttcttctgtttgcgcttcatctttgcgcctgctcattttggccatcctcaattcgcctcctcaatttgcgcttcttcgagtgtgagataggctcactgcctaagggctcggcacactgccgcccttctgagtgcgagataggctcgctgcctaagtgcatgaccattctttactgaggggctgtggtgcggaaggcgaggcgccacgggccaaaaagagacccgaggggccgtatggcgcggaatggaaagcgccccggtcacaaaagatccaagggaccatatggtgcggaatggaggcgccccgggttacaaaaaacccgggaggccaaaaggtgcggaatgcaaggcgcggaaaggcgaggcgctacgggtcacaaaagacccgaggggccctatggcgcgga

SEQ ID NO: 31597 - DNA, 1151 bp, Heterodera glycines
acttgtattttttatttatttaaaatttcaaattctttattctttctttatgatgaaaattctattaatttgcagattaaccaatggcatccgactgtaatccgtgccaatggctctgaagtgatggcattggccacaatgttaaagcagcacagcggaggcaaaattggcactaatatttgtggaaaaggcccggattcgaatgtggaaagtgctgcagcgattggacacgcaaaagtattaaaaaattaattaatggcaataaataaattaataccagcaaatgcaaaatttaattttagaatatgaaaattattgaatctaattgctttagtgtttttttgtaaagattaataattctattttttcagattgtacaaatcaaaatttccggggctcctaatggcatcaccaaattattaacgaagagcaaaaaaagattttaaaaaattgccagtttaatgattattgggttcaactctgaaattcattcaaaatttcccggggcccctaattgcatcaccaaattattagcaaacaaaaaaaaattcctttatcaaatttttcttaaaattaaaaaaatgtcatatttattgtttttttggggttcaattcatgtaaatttgatttaaattatgttttataattaaaaggatttggcattgtgtagcggaagtgttgtggcaatgactggcaaaactgactttttgattgacccatcatgtccatcattaatgacccaattggacaatggccacccactgatgaccaaagtcaccggcatcggatgtgccctctcggcgagtgtcgctgcctttttggcactggccaaatcggacgagcacaaacgacgcattgcctgtctaaccgcgttggctgtacgtacttaaaacagttgatcagagatgattctaatcaaagaaagaccttttttggcattcccggtcaaatttatggaaataattgatttcatcgaaaataattttttttatagttttagctaaggtaggtcgggaccgggaccaaaacacggacaactgagtaccgaagtctcggttttggccagttttgatcggaacccggaaaattcccgggtttttcccggttttcccagccaaaaagtccggttttttcaaccgaaaagtcccggt

SEQ ID NO: 31598 - DNA, 1280 bp, Heterodera glycines
gggcttaaccctatctgtccaattggcaccatacagtcgggctcggcggcacaaagcaaagccatgcaattttaaattattttatttagttgggttgagattttaaccaaataattcttataaaaaatgaagcttatgctatgataagactgcatacttttctattttgtcccccccccctccctggattatgacgccgtgttgggacatttcctaaattccgccaatttgtgcaataaataataaattagtccatatttatttactacacatcatatgcctgatggcggataggtcctagcaccttatgaagaagctacagcattttacgccaaaatgtcttttactgagtgaaaaaatttgatggttcgatttggttaggacattcaaacattacggagtcggaatcataattgtattgcatttctcagcagttcaaattacccctaaaaatctaaatgaaaaaattctaaggcttgtgacaaaacagaaaagtacctttgtctaagtttttaccatttcatcacttgccgcgtttgctcggatttgtgcataatcacaaagtttgtctcgaactgtggcgggtcggttttgatgatgggcttataagttccaatcagttcgtatgttctgttcggctcaaaattggtgtacattggcaaaaattcgtacattcctgggaatatggggtgaattacaaagtaaggccattgaaaatgttttttttaccaggatgagttgacatattcattgtgtggagagcaactaaaaaatgataattagtttataattcactcattaactttaaaaggtcaattcatttcactcacagcttgggatttgcacagtgccaatttttccgttttgcatcggttcaaaaaatcgtttgaaatcatttttacggaaaaccactgaagtgtcaagccaaaccacagtgtcatactccaataaaacgtgctttaccattttaacgaatcattttaaattcaaaatttaaaaataattaccgcccacacaaaaattttccacgcgtaacttttggggtggcgaacccgtccttccaccatttgaccgaaatcgaaaattcgccattcgaaattgcacaccgaatcccattcattcatcttcagaaataaaggaaaaaaacattattagaaaacggatttttaagtacaaaaatttcacgaagttggaactagctgatttattattaaatgaataattttaattaaaaaattttttttgaaaaaattcttaaatttttacttaaaaattttttt

SEQ ID NO: 31599 - DNA, 989 bp, Heterodera glycines
ccgcgaaaattatgcttcaatttcttgaatgcttttttagaataaaaccaaagaaatgcaaatgtcaaaaattttattaaaaatttatttataaaaattcctttttcaaaaaatttttccgtttctttcttgttaagtattaaagaaaatatttggcattattttaaaatactttaattatttattaacagcagtttactaaattaaccatgttttacttgtaaaaaactgtcattctcaagaaatgcatcaaaataatttggcgaatttaagaggtgccgaagtttatgaagctttatagtatccaaaaatgaaattgttacctatgtcctggaattttagtatctatttcaaattttaacacctatttttgggtcaactatttgctgttttggcgcctaaaaattttatattgaattgtaatgcatgcgtatgtaactttgcaagaattgacataaaaaaatttattatactaaaatgccaaaataagtgccaaataagtaaataaaaattatgaaaatattgaaagcggatttatcacttgttgtggacatttttgaggctttgtggctataactttgtttaattttttgggcaaacgcggcgaaactgcggtttatttcgtcacagaaaggtccgctgaggactatttgaattagtaacatatgttatttgaatgtatcagttgaacacatgtcatatatattatatatatagggcttggattgtatggatttccataaatttaccctgcgctgcccacaggtgccgtcggggaaaatttgggtttttaatgaaatttgtttaagagaattgttcaaaattgttaatttttaaaaagcagcgaacatcagcggtagttaagcattgattttatttaaataaatcattagtattaaaacattgattttttcaatggcagacaaacaagaaaaggaaaatgaaaaattaacctggtgattgcttttttctttaaatatgtaaataaa

SEQ ID NO: 31600 - DNA, 1326 bp, Heterodera glycines
ccaccccctttttccccctttttttttttagccatttctcattgggttttccgatccacccttcggggtacaaaattgtttaacctcccaaccttttaaatcaaaatcttaaaaaaaatttggttgattttttcccctttttattgggcaaatttttgaaaaaattatttcttatttaaaataaaaaattcagaagcaaatacaagattttttttatttttaaatgcattttttccccatgaattatgattaaattttggcgtttggattccatttgaaaattaagaaaaataaaaattgataatcatttgatgatttttagcgcactttaagcaccgccgttaggcagcgcagttccaaaatttattccatgccacagatattatgggcaggacacgccaagtacctcaaacttgggtaattaaaccgaagaaagaagtgcagtggggaagaatgacgcctaaaatgaaggaaatattcgatgctgtgcgaactctgtgacccctctctgactctgccaatgcaacagttgtccatttttaccactattttctctcactcatcgtctgctcgtctctcctttattataagctatttttccaaagccaacaacgcccttttctccctcttttctgttagtcatttctcattggtgtttacgatccaacattcagtgtacaaatttgttaaacctctcaacattttaaatcaaaatcctaataaaaatttcgttgaatttcttcgcctcttatttgtgcaaaattttcgaaaaagtaattttctatttaaaattaaaaaattcagaagcaaattcaagaattttttttatttttaaatgcattttttaccacatgaattatgattaaatttttgcgtttcgaattcattttgaaattaagaaaaataaaaattgataatcatttgatcatttttagcgcactttaagcaccgccgttaggcagcgcagttccaaaatttattccatgccacagatattatgggcaggacacgccaagtacctcaaacttgggtaattaaaccgaagaaagaagtgcagtggggaagaatgacgcctaaaatgaaggaaatattcgatgctgtgcgaactctgtgacccctctctgactctgccaatgcaacagttgtccatttttaccactattttctctcactcatcgtctgctcgtctctcctttattataagctatttttccaaagccaacaacgcccttttctccctcttttctgttagtcatttctcattggtgttgacgatccaacattcagtgtacaaatttgttaaacctctcaacattttaaatcaaa

SEQ ID NO: 31601 - DNA, 1686 bp, Heterodera glycines
gatcaaaaaattggggtataatcattttaggattttttctgtttttctgctgaaacctttagacggcattcttttgccacacaacgccggcgaggttggcacggtcacactgaatgtcgttccaccagtcggtcgcacgggtgccacacttggacacactcttccgcggactgatcttttgccaaaaagcatcattcatattagtagggctgccaaaaatatgtacaaaaatatgtaaataaatttttaaaatggttattttcttgaaaaaggcacaaaatgccataaaaattatctaattagcagggaacggatttatatgtgctaaaaaacgccaaatctgtacatatatatgcgccaaaaatccccaaaatatgtgctaaaactcaaaaaaggctaaaatatgtgccaaaaaatgaaaaatatttaattttaattatacaattcaaatcggtgtcaaaaataataaattaattagacgattatttaaaaaaaataaaataaaaaagagataaaagcattccatctccgaccaaaaaaaaattacatggaaacgaaaaatttaaatttcaaatcatgaacccatcaaattgatttgcaagtaagcttactagtggatttttcaattttagaaaaaagacaaatctactaattttctactgaaatttcacccaatattttcgtaaatttaagttcttcattcgtttccccataaatttcatgcattttccccataaattttccatcatccctattctttttccactcaaaattattctgcatttattaatggtacgaagctagcatttaaaaaacattgaagaaaagttgaacctcgaattttaaaattattattaatattcaattaaaaaatagctttaaaataattcaatttaaatatttttattgacactgatttgtgagactattttcaaaatatgcacataaaaagtaaaaaatatgcacataaatttttccaaattgggcaacattttcacaaattcttcaaattcgttaaatttaagctaaaaatctcgaaaatagctaaatgcaaaaatatagctaaaatttattaattttgaagaatctgagtaaaaatagaaaatttttaatttttggacatattttccattttttaaaaagttacattttttattaatatttttgaaaaaccccaaaaaatgaaatttttgaaaatttttcggtccttagagatcaaaagtttctgttccttgtttatgaattttgcaagctcttctcgtcatttttgtaccagtgttatcctcgggggttatcgatggcgctgatcacgaatctgacatcagattatcatataaatcatctaatctatgatttttcatcaagtgataatgtcaaaaaaatttttgatggattttcacttttactgttattcattcacaaaaataaattccatcaatatgtatgtagctggaatagttgttcgagacgaatgacacaagtcaaaaatccaactttcacatgaaaacattttcgacaaattttatgttgtcaattaattttatgcatattcaagtacatacataaaaggtataaacaaaacagtatattagatgaaagtttttttagtgggtgaacaacggtaaaaaagtgaaaatccatcataattttggcatgaatttactagaattaagcagaccgagttct

SEQ ID NO: 31602 - DNA, 953 bp, Heterodera glycines
ccaaaccaagtttaaaatatgtttttcgtgcgtttccggtcttccacagtccaggaaaaaaaatatggatttccatataattccgtaccctagtgattatattcgaaaataaatattagaatggatgaattcattatactcttttagctgtaaaacggaacttgatttgttctgtcttgaaatcgacaaataaaatgtttattggaggagcaaataaataaacaatttagaataggcgcataatattttggaggagcacaataaatttaggcgaaggaaaatgagtatacaattataattgtatttgattttcataaaaaataacaataatttttaaatttgaagaaattcggaaatattaacctcagtcatttttggtgcatgtgacaaataattcatccaacactattaaattaataatatctcgtaaactataaaaccggttttaatcgtttaatatttaaaatacagaaaactaatggttaaagaatggttggttccaaggatgttaggctttattacaatttcacggctttaaaaaaaattacattaccaaaaattgtttattttatataaaaatatgataagtttaatgctccataatttccctgtcataagcaatcaaaaaagctcttattgcctagcccgtcggtttctctatttactcataaaatttctaactaaagttatgctgataaaatttactcgctttttcgcattttttggttataacttttttgttagcaaaatttttggaattgatattcgtgtagagaatatataaatgctattattgattcggcatataatgaaacatgcaaaaattagcttggaagcacgctcatcaggaaaagatggttgtggtctttcacttggtcttttatgcggtctctcgcgctctggattgtcattttctgctttgaaaaaaatacggaatttataaaaagatatta

SEQ ID NO: 31603 - DNA, 1329 bp, Heterodera glycines
  unsure (1)..(1329): unsure at all n locations
gaacgactcaccacggattttggggtttaggtattcatctatttatttttatttaagctaaaataattatttatttaaatattggtgtttgtatacttaattgtttttccgcataataatggacgaaagtgagtgaaatattcccatttttacattcatatttttatttatttttcattcatgaaaaggataaagggtaaaaatcaaaatactgaaaccactgatttgatatcaccagtcttcaccgagagaagtcgaatggtacaacgcacaacaaaattacatacgatactaaagtgtaggtctaaccgtgctgagccgaacctaaagaagtcaatgaggcgaacttaaagtctcaatgctaataatatttaaatttattattttaaatttatttgcagaatactaaaattgtaacttattgttgctcaaactaaatcaattttggtacttatatgtagggccgcaacttttagtgacgaaaaatctcgaaatagttaactaaaatagtgagtaaaaatgccaaaatagtgacgaatagtgacataattttcagccaaaaattgagcaaaaataatttttattcactgattgcagttgcaaatgagtaggactgggattagctccaaaaaatctcacaaaaaaaattttttttttcaatgatgtgtttgtctccacattcctttattcgatgtatcgcctcgattcaattctttttttggtataattgcacaaatattgtctaaaaataaccaaatttaaggattataaattatgccagaatagtaaatttttatgggtgtttttgtctaaatccagggtttctatttcaaaataagaataaagaccatcaaaaataagaacattttgcaaaattgcttcaaatatttttacattttattcgatcaaaaatgtattctattattatatttttcatagatttcagtgcattcaggatcactacatcagatttttaacattttttgcggcacatttccaaaaaacttggtgaatgtgcgaggggagaggtccggtggtgccgattggcgccgcaagcggaaaatttttaagactttatatgaattttgttagaaaatagccaaattttttagaaatttcccttctttagatgaaaataaggtactaccccaaaaccagaacatttcttagaaataacaacatagaaaaaccngttttttttgaaaaaaaataaaatcaaaagaaacgtcaaatcggtgtcggactcatacaaaaagtatttggtaatgggtgagcactaaccactanaccacaatattttanaaatacaagcaattttactttatttca

SEQ ID NO: 31604 - DNA, 1026 bp, Heterodera glycines
ttgttttccatttgaatgcattggcgttttgttttttacgctaatgattttttgccgcttttttctttttttaccgtccatgaagacaaacgaaatatttttgtctaataaaaaatggagtagcgccccatgttccttggtatacaaattgattaattttattacaaatattacaataatattcaatgagagaatgctaacaaaaagtgagttaattgtttgtttgttttggttttttctcttctccccactctttccagcgcttttcactaattgcccaaaaactgttgctgtctgatcagcccacaatggttttgatcagttggcagaattggtccgagtgcaaaatgcccacgtgagttgggcccacaatttctgtcacactgtccacctgaaagtgagaagccgcacattccccattttatgcttttgcccatttaatttcatctttgctcttgccagtctcagaattaccaatttgccctgctccttccatttttggcacattctcatcgattcggcatttaccaatccgtcccccgggcccattatcgtgttcgcttttttgtcaattccgttcggatagtcaaattccgtcggagtgcctttgtcggaaatcgaatgcacacaaaacatctttagcaaaacgattaaatctgaatcggtggaatagcttaagctttaccggcgtgtatttatttgcgtcgatttgtgtcgacaaactttggtaaagcgattgcatttgggcgatgttagcaaccgacaaaagttgtgccaagtcggcaaaagtgtaattggtgcccgaaatagaggccaattttgtgtccgattggaatgccaacgaattgggcaacaggaaagcgacggcagccaaagttcggataaattttctgaccaccaaatttggcacaattagcgaaaggccggggaaaagccggtcgacatttcctaaattaactagaaaatgcaccttttttggtcatttaccagagagtatctgctcgatgataaatgttgtgccgcccc

SEQ ID NO: 31605 - DNA, 1111 bp, Heterodera glycines
tcagaatattctgattattaaggttcaaacttaataaccgaaaaagttgtgattttcattgcaaaatcagaatgcagttttgctttacctttcatattttaagtattttgatgactcagaatattctgattattaaggttcaaacttaataaccgaaaaagttgtgattttcattgcaaaatcagaatgcagttttgctttacctttcatattttaagtattttgatgactcagaatattctgattattaaggttcaaacttaataaccgaaaaagttgtgattttcattgcaaaatcagaatgcagttttgctttacctttcatattttaagtattttgatgactcagaatattctgattattaaggttcaaacttaataaccgaaaaagttgtgattttcattgcaaaatcagaatgcagttttgctttacctttcatattttaagtattttgatgactcagaatattctgattattaaggttcatacttaatcaccggaatatttgtgattttcattgcaaaatcagaatgtatttttgctttacctttcatattttaagtattttgatgactcagaatattctgattattaaggttcaaacttaataactagggttcggaccccgtgggcgggggtggcttttcacgggggcgggggatggcgggggtcagagtcgcgggggcggggacgggggtttgatttgaattaactccaaaaaattttacaaaaaattaattttttatgaatgatgtgatggctccacattcctttagtcaatgtatcgcctcaattcaattccttttggcataaattacacagattttgtctaaagaattaccaaattttagagatttttggctaattttttaagaaaaaataggtttttggggggccggcggtgccgataggccgcctggcgaattttgaaatttaagctcgatttctaacagatgtttacaaaaaaataagatttttacgataaatgtgtgtttttttaatatattaaattatcatgatttactccagcaaaaatggaaactcagatttgtaaacatattttcttgaagcacattttttccaaaaaaaaaaaacttggtgaatgggcga

SEQ ID NO: 31606 - DNA, 1508 bp, Heterodera glycines
ccacgggctgtgagtgccaaaaaggaaatgcacacaatgccaatgctttgttgtaaggtgcacgaaatcggccacaccctcggcctgggccattccaaaaagcagcaggccatcatgtttccgatctaccgcaaggagcagttggaaatgatgcaattggacgtggacgacaaatgcgccgtcaattggagttatgtgggcgccaccgatctgtgtctgtacatttggctgttgagtgaggtgttgccgaagaaagtggcacaggaaagggagctgtccagcaacagtgagcagggggagggtacgaacggaatgagaaaggggtggggacacccccgggaaggggggggaagcagtacttgggcatgaattgtttcattaggcgtctccctttcctccctggcagtgttagcggatgacaaagacgcgccctgggaggacatggacgccctcaaaatgcgtttccgtggcctcaccatgccgcagtgtgggcatggcccgggtggtcggatgcgttcgcagttggccgaattgctaaggcgtcgcttgggctttggccatgccatcgcccgtgactacggtaatcaccgattttgagatggaatctttcattcattcatttccgtttagccgaaaatctttgcgaatttttcgacgcctttcgcaaagaattcgacttgaaaagtacggacaaactgcacgaagtgatccgtcttcacagcgtgcacaattacttccatcccggcgacaatttcaacaaattcgagcagttcggccggaaacagcggttcgactccgccttctttcaccaattaatggcaattttctttggcgggtaatccaacggaacacagaaagtcattcccactgaacgcactttaacaaggctgagaaaaaacataaaacattgttccccaatttggcatttctttccctttttggcattttccgtttttctcgcccttgtaattctcccccccccccattttctgtgcaatatttttgttttcattcgttgcattttccatcctcctcttctcccccccccctcattttcctcatcttccggttagttttacgatagaattgtccttattctgctgcccattcattcccattggtctttgccctcatttgtatttcgtccgataaattctaaagtaattaatttgattgattaattggtcaattacccaattcaaacgaaaaaaggcattgggcgaagtcgaaaaaaatggaacaccaaaaaagtggggaatggaggagatttattggaacaaatggataaaaggaaaaagaaaaggacaacagaaaagtcgaaaaatggacaaaaggacaaaagacggacaaaaggacactcattccattccaatttaaacaacatttccacaaacaatcaatatatacatacacaaaagagcaaaaaaaaacccctcccagcgaagaaatgtcaattaaaaaacattcatttaatttatggggttttggaatcccctcccccccccccc

SEQ ID NO: 31607 - DNA, 959 bp, Heterodera glycines
gagtagattagactataaaaaattgaaaattttgaaatcatgtttccactcccttctcccaggggtattattttgtaaagtctttttttcaaaataaacttttcaaaccccatttttcgcaccgtgaatgttatttttattgaattctgaaccgttttgagtagattagactagaaaaaattgaaaattttgaaatcatgtttcccactcccttctcccaggggtattattttgtaaagtctttttttccccaataaacttttcataccccatttttcgcaccgtgaatgttatttttagtgaattctgaaccgttttgagtagattagactagaaaaaattgaaaattttgaaatcatgtttcccactcccttctcccaggggtattattttgtaaagtctttttttcccaataaacttttcaaaccccatttttcgcaccgtgaatgttatttttattgaattctgaaccgttttgagtagattagactagaaaaaattgaaaattttgaaatcatgtttcccactcccttctcccaggggtattattttgtaaagtctttttttccccaataaacttttcaaaccccatttttcgcaccgtgaatgttatttttattgaattctgaaccgttttgagcagattagactagaaaaaattgaaaattttgaaatcatgtttcccactcccttctcccaggggtattattttgtaaagtctttttttcaaaataaacttttcaaaccccatttttcgcaccgtgaatgttatttttattgaattctgaaccggtttgagtagattagactagaaaaaattgaaaattttgaaatcatgtttcccactcccttctcccaggggtattattttgtaaagtctttttttcaaaataacttttcaaaccccatttttcgcaccgtgaatgttatttttattgaattctgaaccgtttgagtag

SEQ ID NO: 31608 - DNA, 1670 bp, Heterodera glycines
  unsure (1)..(1670): unsure at all n locations
aatgttcagcgcgggacttggtttgtgcagtgcatctgcagagtgtttttaaaagggcgcgtgaggatgacttgctcacgatgatgacgcgagtcaatcgaatgatgcaggattttatgagccgagacgagaaggccaaacaagtcccgatggtgagttattctctcaccaaattattttattttaaccccgaataatgtatttattgtgtctcttttattgttttttttggttttaaataatcccgttggcccttgggaaaggcataattaattatattatattgcaataaaaaaattttaacattttattcccattgacattttaaatttacagaacaagaggagggtttaatgtggggtgtgtgttcatttgttaattgtacggtgttgcatttcacaaaatttcaaaatagaaatcgttttcaaagcagttgttgaaaattcgcgattttaaaggcatcaataattttttattataagtattattagagtattacaaaataaagacaaaaaaaagtgggcgtttttttaaatttcttataattttaattcaaagaaaaaataaattgtgcaataaaattaaagtccagtccggcgggaacggcattcttgcgggaaaaccagggaatcccgtttcggtcttttttgcctgacgagatttttacgggaacgggaaaaaaggcgggaattccaccctgttcatatacctttccagttcccgttccctgtaaaattctgtctttcattatttgtcgcttgggttcaattccctactgaaattggagatttttaatttttttataaattaatttaaatgatagttcattttttggacaaattctgttaacagatttcacaaaaaaaatcaaattttttccccggcgacccctatcggcaccacctgaccctcctgtaccactaaagattttgtaagaggtgcgccgcaaaaaagagacttaatcaataaaaaatttgtcaataaattgaaaatatagaaaaattctctaagaatttggaattataaactttctttttcgttttcccgttcccgtgcatggaaaaattttttaccggaactctaaataaaatggagggcgcccccacaaaatgtccatgccacgaaatgtccacaagagtaaaaacacacgaaatgtccaaaattttcaaaatttataaaaacaaaatgagtctaatttggggtttttaggggtttcggggtcgctgaatacgaatatagcctttatattaccccttgcctaaccttaggcccatccgaataataaaaaactcaatttcaagacttggacatttcgtggcctggacattttgtgggtcagcgcatttttcatcgcaaatttcattcaaaatttgtgacattttcccggtaccctcctccaagttcacaaaaagttttgaaaaaagcgcgctgtaaaaaacgtgtaaatagtcactccttttcccaaaaatgttctaaaataatgaaaaatgacaaaaaaagattttgataaaataattgaataattttttcaagagaatatactaaaaacatttgtgaaataccttttacttggttaagaattaaaaaagttagcctattaaaatatttagaaatttttttattataggagatattttttgaaaaatttccgatttcttgcaccgcanaaa

SEQ ID NO: 31609 - DNA, 1460 bp, Heterodera glycines
attttttgtataaattttaattatcgtttgttttttcatttttttaaatgttttttgtattcgtttttatctttttcaatatttaaacaggatatcatattaaagcgtaaaaattagtaaatgaatatattcatatttatcctttctttattttgataaaaactttgtttaactattttattaatctaataaatttattttgcattaactcaatgtataatataataaatatttaacatcattatttaacaatattgttattagacaaaattatggaatttttgggattcatagattttgtttttgttttattttcaaatcggctgttaattttcattcctaactaataagaattttttaaatatttcattatttaaataccttttattatacttataaaaatttattttcagcctcgttttttgatcgcccccagcttgacatcattgctccttcgaatacgatgacagttaaacaatggtttgttcctcctttatataattaccattaaataattacgtaaattttttatttttttgtacttgcaaatattattagaatcattttaaaagaatgctgttttttatttattctattcatttttagccgagatatttgcccacaaataaatgttttattatgtttattttaaatatttctttcactttgttattatatttcattatagacttatttatataaatgaattactttgtttaatgttttattatagctatttttatctaaaaaattagctccatatttttaatatgcaatttgttgcctaattttcttgttatttagaaaattgtgccgactattttgagtgaattctaattttattgcaatttcctccggtttttgtgataagcatatcggccatggtccgattgtatctttcaccgcttgacgactagtgatatggtagatgtctggtgtttgaatccccaaattttggctagagattcaaatgttatgttcagaaaatgagtgccacactcagtgacgagtatttttggtagaccgattaagctggtattatatttatttattgtgaatttcaatctctaacagataaaattatttattaagaatatattttaataaaaattttattatttgaatttttcagcaaagtatattatttatttttatttgatattaatgaaatcgtacaaaatttattgtgctcacgcggccagctttgactcatcatttttcatttaattatttacattaaatttgataatatctcttatttaaaatatttatattataattaataaattttttcattaaagttgaataataaaagtgtttaattttttgataatcatttttcaattaatagatatcatggattggtaaatcatcaaattttctttattaataaccatgacattaacagaatgttttttttttcaatttgaaataattcacttacaaatttctgctttatt

SEQ ID NO: 31610 - DNA, 1777 bp, Heterodera glycines
ttttctgtcaaaagaaacatttatttgatttggggtaggggtaaggtgtggattttaaaaaggttaaaattcaggggggtttggtgtttgaaaaatcctctagaagaattcgcttttctcgaccctttaattatccatataaaatttaaaaaaaaaactaacgaattgcccggaaaactcattgttgagcagctgatcgaagtgcacacttcagacaaagtggcactgatacaattgacatgttcgaacaaagccaaaactaaaaatataggaaaaaattaagttataggattttgaaaattttttttacgcattccatttaccccctcccctaaaatttgcattttttttgtatgccgggttgggaaataacaaattttgggtaaaaaatagaaaattttcaaaatgctttgaccatgcgatgccagccattcgtgtcggtccaaccccttaggtaatgtgcacaatttgtccaacatttggtcgtcaacagagtcggccacgcaattgtccaccgattggacaacttttcgtgccgattgagcagagccggactgaaaaatggattttttttttaatttaactgaaaatttgcaaaaattttcctcggctgcgccatttggcaccattttggacgactaagttccctggattttttaagaatttgacacaaaaatgccatttttctccgcggtgtttaaatttggaaaattataatggcaaaaaaatagactaaataagagcaaccaaaaaaaaaaaaaattttttttttcgggtacccacgtcgaaaaattgtgcgaaaattttgtattttttcatacttgcgaaaacgatgggatatgcaccgcctttttctgtccagacgatgtgcacgcggacggtccgttggtgtccggcacgggacacacgccgttggcacgggactcgccccgctggggtgccaagtcgcgcccaccggtggccaaatcggcgcccttgcgacgggaacgactaggagaaaaatataaaattttatacattgaaagcagattgaggcctttgtaagcaatataataacctctttgaaaggcgaaatcaggcctaatttttttttttttgtaattttgaaaattttaccccaaaacgaaaaaaaaattggaatttgaactcatttttaaaatattacaagcgttcaaataggttgacaagccaattcgacgtttccaaatcggcctctttaaattcatttgaattagaattggtgtttaagtcgcaaacggcgaccgttgtaaaatggcgtttaatattctttggcatatataaaaaaaactatcaataatatgtgttatccgagggattatctcttaaaaaatgggtttaaattaaaaaataaatttttgaaaaaaacgacctaaaaagaaagacaattctcaatgaaatgtaatgatttattatcgacgagttaatttattatttgacagcagagcaataaaatcaaaaaaatatttactcaaaataatgtttatttacaaataatttgtgtgtttgtcttaatgagaagtgtttgctgtctgaattttgtacggtttaagaattaattaggctaattagaaatgagacggagagaaatcggaaattatttttagtaacatatcattatgattattttttgctttgcttcatcatttgacggaatgcaaattgagccaattaaataaattgggagtttttagcgggtgaatttttgagggaaaattttatggaaattttagttgtaaaaattcatgataggtttttc

SEQ ID NO: 31611 - DNA, 918 bp, Heterodera glycines
ctttgactgtttttgcctctgccgctcaattccctgctcattcattactcattgtttcctctgttatgtgattattcccttttttgttttaattaatcaattagcactaattatcggttgatggcattaattaatttcttccttgccttcccttaatctctctctctctgccattcccttaatctgtctctctctctctcttcatcgtcccaccgtggtaatcgccgtggcttttcccccttcccaaaatgcactctttcgcctgcgtttgctccgtcttcgtcttccacccgttttcatctccaatccgtgaacaaaaacacttcattctcccctttttccctctcatctctttcgcgtccgtccctctcattaccctctcaatgggcttcttccttatattcctgatcactttcacgttcttccctggtttgtttgattattcaacatcgctaattacactttttcgatgttttttgacattggcatcactcaaatgggggggggggcgtgagtgacttccccacccccagcccacaaagtggccgaaatggaggggccttttcgcagtgggaggggagggactttaaaatggtgagggagagataggggtcgcagcgagaattgtggcattgtttagtaatttattaataaatttcatcaaaaattaaatattttacaggagaacttgaaacttctctaaattcccttaaatttcatgtccaaagcaaaatctgttaagaaacgcaccaaatttccctattttcctttattctttgtttgtttttcctttttgttatgctgttttgcttagtctgctttattttcattcaaaaacatttgtaaataaatgtaaattaatttgatcattccgtcgtcactgtgattcactttggaattggaagggcccgtggggat

SEQ ID NO: 31612 - DNA, 1547 bp, Heterodera glycines
aaaaaaaaaccaatttttgggattttgagctattttttttcaaggaaattaaggagttttagtaccgctgagagaatttttttggaattttaaatgaaataaaaatcaaacaaaatttctgtgtttttctactccccctcccacttgcgttcgacaaatccctctattgtttgtgggaattgcaggattatcccccgggatcccgttccgcaaaaaaaaatttgggttcaaatcccggagcgggatgcgaaaatttgaaattccctggctctagcagagatagtttgattatttaaaataattaattaattattttgtcattttgtctcacttcccaagcccatcacgcgctgtacggccgaaatgatgcgctccaaatgtgcaatttgatcagggatgatcccattcttgttcacgttcccgacaccagtctcgaatcgtgatttttcctggcgctgatcacgatcatcatcgccaagcattgtccgctccaaagtgtcggccactgttgataacggatcgaatggctttctgactaaaagcaaataatttatttaaaattatttaaaaatatttttgtacattttgtgggcttgatccgttggccgggcaatggatgctcagtgttggcacggctttgcttaatgtggtcccggttttcttctctcggcttgatccgctgatcaatttggtcattgattttgtgcaatgatttctcagtttgggcgaatggcatcacttttggcgctttatcatccgtagttgtcttcttccgatcgttgacattattctctttgggatcgcccagatcaataatcactgctttagacttcaccgaagtattggcagcatcttcctttggctttatctgatcagttccgatcgtttttggctctttctgatcattagtctcttcctttggcttcataaaatcagttgaattcgccttcggtttttcttgatcattaatcccttcctttggctttgtctgaccgatcattttggtcttttgaccatcgatctcttcgttttttttcatctgatcagtttccaatgcctttagctttccatgatcagctatcacgtcctttagcatcttctcagcattaatttgttctttgttgatgtcatgctcttttttgttgctctgatcagtcaatgcttcttttggtttgtccaggccgttgctttgatcagtaacttctggcttcttttgaacattaatctcttcctttggcttggtctgatcgatcgttttggtcctttgatcattagtctctttgttttgcttcgtctgatcagtttccaatgcctttggctgttcattgttgatgttatttttgttgctctgatcagtcaatgcttcttttggtttgtccaggccgttgctctgatcagtggcttctggcttcttttgaacattgatctctttctttcccgcccgctgatcaatcaccactccattcgtcgcatttttttctttgatcacttctttaggcattttcggatcagcgatgatccccgtttttttctctcttcaactttct

SEQ ID NO: 31613 - DNA, 1103 bp, Heterodera glycines
aaaatgcttttttcgtgcttatctaagcgtattaggtgcgcagaaaaaagaagacctaatgatcagtccctgtaatatacttaatgaaataaatttgaaataaaaaaggttcaaagcgttcaattatgccattcgccgttcacttaagtgccgatggaccaaaacaatgtggcggtgcaacggaagtcgctgagtcggctcgaatttggggacatttttgtaaatgacagagaagcgatatatgttttgctatatcgtatttcctaaaatggcttttaaatcaaatataatttacttagaatttatggaattggtaccattttattggatttttgggttctaaataatattatctgataaaattattttatcatgcaacttcaaaattgattaattcaatgattgtccatgttctgaatacaggatttatttaatatttggccatttttccatttttaacaaaacaaaatcaaactatcatattttgttaagaaaagatatttacacctttaatcgccaattaaattaaaggacaaataaagaaagcataaatactttccattttttcacttttttttgctttccttcaatttattccattgtgaattggtcctaaataatattatctcataaaatgattttatcatgcaacttcaaaattgattaattcaatgattgtccatgtcatgtttctcttattcaattcagtgacatatttcactccatgaaattgttaaaatataattttttgggttatattttttcatgatcaatttgcttccaaaatacctagcccatttagaagcgttttaaaacaaaactaaattgaaatttggggtaacgacagattttggcgtcgatgaatttgaaaattttaatgcgattattttcttcacaagaggcgtcggcgggagaaaatttcgcaaattttttgccatttcttaatagcaattttgggtttggggtcaaattctgaaatttacacaaaatttttcaaaggttaaaatttgtttaatcaaatttcgtttttattttcacgaattcccattcgcaatcaatattttatcataatgggcgaaatgtttcataaatatagcgcgccc

SEQ ID NO: 31614 - DNA, 1229 bp, Heterodera glycines
tttttgcgatttttcgacaaaacatggcataactttgcttaaaggcaatcaaattttacattcttggtactgtttaaacaagctttttttctattagctttgcaaaactttaactaaaattatccaacatagcataagttatggcagaaatagtacttattttcgtacaactttttgtaaaattaaccaaattttttgttaatttgcatactaatagagaaaaagcttgtctatcgaatggtactaacaatgtaaatttgattgcactttaagcaaagtaatgccagttttgtcgagaaattcgctaaatggcggattttatggaacattcaaatgccaataaatatatatatatatatatatatattatatgcatgaattaaaaattttaataactataaaataaaaacatttattcatgaattaatgtcataaattgaaggcacgtgagacaaaaaaaatgattaaaaaacacctgctggtccttgaaacttcaaattctgcatcgtttgttgcagatgagtgaattggccaaaagtttctctttagtattaatatttatatttaaaaaatgggaatttacataaaatttctttacaattggccagactaataaccatgacaatttgcacttttctatttatatgcactataagccatcattgtatatgattaaatatttcattatatgccatcattgtatatttatatggactataagccatcacatcattgtatatttatatgcactataagccatcacatcattgtatatttatatgcactataagccatcattgtatacaatatgcactataagccatcattgtatataacatgcactgtaagacaccatgtatatattatgtatgcctaatagtagcatggaaatattctttttttggcacattgccaaaaagaagggcaaacaaaatgaggggtgaataatatgtatatttttgcacttgttgctaaaactttattataatagcatagaaaaaatatacggcatcgttgtaaaaaaaatcatcaaaatacaaggcatcattgtaaatcattattaaaatggttattgttgggcacgtgaccggaaaatccggcagtggaaaatgcgtcagtagaaaatgcgtcaggagaaaatgcatcagtgatgcaaatattttaaaataaaattctatgacattagtattgtaatagagaagtaaagttctataaaaaaatcattctca

SEQ ID NO: 31615 - DNA, 1306 bp, Heterodera glycines
tctccttcctcggcatcggccgtgacgtgaagtgtgttgggttatttcggttggaccccaatggcatttcccccggcacaattccccctttgactttcattgttcccccatttcacagacattgtgccttcatcgttgcccaatcttttgaccatttcgtttgctatgttttccatgccgacccttccgccgcttcactggccaaaacaatagaagcggcgtgtaagctgaggtaccaaaaagtgatggacgcgcatttgccggacaacggagaataaacggagggaggaaaaagatcggatggaagacggacaccacattttgaataaaaatggataaagtcgaaattcatcaaggggatgtcgggacaaaaagcagcgattttagaggaattaaaaggccattgggccctccttttttatactttgttacactgaaaaatcagtcgttgaaaaatggaacaattatttcacgacatggtctttttttcctcggcaaaatgtcctcagatctgattggagaaataaagggtggaacaaaggttatgtgctgcagaagaacttcggtatcggatctaatagaaaataaataaaattaattgtacgaaaattccacaattcttagtggtatttttgaaaaattttttagaccgattctcaggggtgcattttttgaaaaaatgtttaggtcgtttcttaggggtgtatttttttggttttattgcatttttgttaaggaattttcctaaaaatgtcgaaatagtaaattttcactattttagtacgaagcgccaaaataggtagtgatttctagtgcccgatagtgacatcagaatcgaaaaatttcaacgaaaaaatacgttttttgagctcctttcttcaaaacaattgagcaaaaaaattcgttaaatcactaaaagtagcgacactaatcatcagaaaagccaaaaaaaaaaaaaactaaaaacttttaaaattaaaattaaaaaaaataaaaaaaggcttcttcgtgatcgtttcgtccatctttcaccattaaaaattccaatttttatgcataccggaagcaagaaaatgatagattttttgtcattttggagtcattttcagaagttctttaacataaatgcaataaaaatgtttttttttgacgcgatgacattttttggcgacatgttcaaaataaatttcaaaaattttccactaaataaatcatcgaaaaataatctcccagtctccattagtctaccaatctccaattatctacccccttctgaggaggttgaaaaataatataccatggcata

SEQ ID NO: 31616 - DNA, 1176 bp, Heterodera glycines
aaaaggtcaatggaacagttaaggggaaaaagcttccaaaaaactgaccgtaatgttggtcaccaacatcagaagacgcccgaaacggccgatggccaattgcatttgtgtgcattgatcaacctaagaaaaagcaataaaatataaaatacacagatttgcataattgtaaatttaattattgtaattaattataccgtatttcctaaaatataagtccccctccctctcctctgaaataaaagcccccttcctttttgagagagagggggggggggggtttaaagatactgtagaagtgccccagggctctttttttagaaaatacggtaaaataaattttgtcaaaatttcctaccaaatgcaaaaacagcgcattctgcacactgtcgcgcgccacgttcagcagacgcaccgtttcactgctgaggccgggcgtgtgggcgtccaacgcgacgattgccttcagtgtcacatattccacctccgtcagcgacagctgttccagcgacggttgctgaaagcgcaaaataagatttattttaattgaaataattattaaacaatttttgagggattttttgccctcagataaccaaaaccaattagcaatgtgattattaactgttgaattgtaccaaagtgttaagccattccgagcgaattgcgccgatgcgccagcgcaaagactcggggcaatgactgagcggaggcaccagaaggttcagcggcgtacgctcgtcgacaaacagtccgttcgggagcagaatttggtcgggtcgatggacaaacgaactttggcacgccaccgcaaaaaccataaaaggcatggcagtggagcggagcaaactcagctgaaaacgagggcatttttaggagggaatttggaaaaacattcattgagccgctttttaggaaatgaatatttatttatttatttttgaattttacaaattctcaccctttccgccaagtgcaaatccgcgatgggtttcagcgtatttgcgtagtcaatcgccagcaacatttgtcttctcaacgcatcgcgcaattcggcccattcgccgagcggacgcccaccggagtaattaagctgaagggggaagcgaaaagtgattagaaagcaacagactaaataatttaaaaatttgaatttgttttaaggtctaccccccc

SEQ ID NO: 31617 - DNA, 1025 bp, Heterodera glycines
aaatgaattttcttaaatttataaatgcagcagtgtggtgcatttctttaattgaactgataaacttatattttttaattaaattagaacgtaagttttgtttgtcaaacaaaacttcttcttatgttttgacagattgagccttaaaatgatcaattatataataaaatcaattctctatcttgaaaaccttttagttcttaaactaattaaacaataaaaggaaaaagtgcgcttgtttttctcccatttgattcagtcgattagtctcgtttttatttaatgcattttcatacggaattttattcaaaaattttgagacctgtgaaaattatattcaagagattaaattaaattaaaaattttcagaaatcatggcttctttttctcccgtttttattgccattttaataatcatttacacttccgctgttggagcgcaatttggtcaatttggcagtttgctaaacggctttggaggtgccaatggcggcgccaatttgatgaacggaatggcggccaattcgcgcaactttgccaatatgggtagcagttttggcggcatgatcaatcagttcaaagggatgggacgaaacttcaaaaggcagttcggaggcaacccttcgcatcatcaccatggaaaatgatggcacccattcattcagtgttcattttgtggctaatatcacacatacatattaatataataaatgtatatgttttcagtgtttttcattttatgaaaatagttaaaaacgctataaaaaaatttctgatgaagaaaaattaaaaactgaaatattacactataaaaaaaattttttttttttactattattattattattgccaattaatttctgcaccaatgcccaataggctgttgttgttccctgcaactgtgaatagatctgctcattctcttgtcacaaattaacctcagcaccttttactaagcatttgggcagctaattaaagaagcaccaacaattaagtgcgtggtcattgtcgtcgtcgtcttcgtc

SEQ ID NO: 31618 - DNA, 1217 bp, Heterodera glycines
gggggggggggggaaaacaataattttttaaaattttttcattttttttttttttttttatatttttttccaaaacgggtttaaaatttaataaaaaaaaccattcccgggggggaaaaaagggggtttaaaaattttttggggaaaaaaaaaccttttaaaaattaatcccctggggggaaggggggggggaaacaatattttcaaaattttttaatttttttttatttttatttttcccaaaacggttcggaaattcaaaaaaaaatacctttcccggggggaaaaatggggttaacaaatttttggggaaaaaaaggtttcaaataattcccctggggagaagggagtgggaaacagattttaaaattttcaattttttttattttaatttacccagacgggttcagattccaataaaaataccattcccgggcggaaaaatggggtttgaaaagtttattgggaaaaaaagagtttacaaaataatacccctgggagagggagtgggaaacatgatttcaaaattttcaattttttctagtttaatttactcaaaccggttcagaattcaataaaaataacattcacggtgcgaaaaatggggtttgaaaagtttattggggaaaaaaagactttacaaaataatacccctgggagaagggagtgggaaacatgatttcaaaattttcaattttttctagtctaatctactcaaaccggttcagaattcaataaaaataacattcacggtgcgaaaaatggggtttgaaaagtttattggggaaaaaaagactttacaaaataatacccctgggagaagggagtgggaaacatgatttcaaaatttttgttgaaatatttgtcgtgctctgaagggcgtgggagggggggggcgaaggcccaccacgaggccgcgaagaggccgagtgagtaccttcggtgcaggaaaattattaaattttaaaaattttttaattgctttttaaatatgccaaaaaatgtaggcttaacttttttagtgaaaattcgatcactcatattttttgctaattgagcagaagcgtaccaaactttgcagggatactccccggtaaaggactaacttacactgaaatgagcgccgagctagctgaaagaaaaaaattttcgaaaatctgagtctttcgtctctagggagatttgcaaaattaattcttaaataattttcagaaagg

SEQ ID NO: 31619 - DNA, 1110 bp, Heterodera glycines
tttctttcctttccttccctttgcttccctttctttccctgtccatccgcgttccaattccttcggttcccctccctttcctattcatccctttcctttaatcctcactcacagtccgttcctccatgcttcctttcccccgtcgtctcttttcgacccatccctttcctcttcctcttcttcttcctctttctttcttcttccactttgagctcaccgcttccaaatctgtcgttcatccaacgcactttcattacttcaaactccggcattcaaagtgacgacaaaagcgctgacaaatcgggcaataaacggcgatgaacggaaaaaaggcgaaaaggaagaaaaggcgggggggggggggagcgacggtcattttgttgaaatccgaaattgaagattaattactgcgaaaggggacaaccccgcaaattccatcacatccgtcccctttccgcttgtttcagctaatttcgcatccaatgccaaaaaccctttccatcgccaagtgccgggaaaacagcgccgatgtttaaaagggtcctcccccccattgatgaaagttatataattttgaaagagaggaaaaaatttgaatgactgagaattttaaattttgttaacccgggcctgctgctctgctgtaatccgtgctaagatggcctaatcctattttttgttttttcaatttttatattatttctcgatctgctgacgtcgtatcagagtaaaaagccaatagcaccgaattgtcccaaaaatgccaaagaaaggcggcgggtcctcccccccccctccgtcgctattctttctcagtcccggcatttgtttggccaaagctgcagcaaatttggccctattcttatcaaatgtttattttcgcggatgagcaaatatccatttattactgtttcaaattactgcccttccctttttcatttcttcgctttgcttctcttcctctcactctgtggtcattttttcttaaaacttccatctttgttctcgtccgcctctttttcctttcccattaccccattctctcccttctctcccccctctctctttctctttctcttcctccttctcctcttctcttcttatctctct

SEQ ID NO: 31620 - DNA, 1479 bp, Heterodera glycines
aaaattagcaatttgccaaaaaaaacttaagatgatcaaatgattcaatttatcagtcccattaattcacctgccaattctgcccgttgaacagcgccttgagcacttcgtacccccagagttggtaattccggccgatgaaagagttcagaacgaagaattgcatggccacgttgcccaggtagagcacctttatgccgacgtacagcagctgaaccgggggaaaaaagaacagattaaacaagggggcatagaaatgtcagaaaattcaagaaattataagttattttcagcgccgaagagaaaaaaaaacattaattagtaaccgctgttcgagaaaaagtgacgatttttttttgccattttgagtaaacatttcaaaaatgccaataggtgtcgccggcagaaatttttgaaattttaatgcattttataagaaaattttttttaaatgccatttttctggcaaaaatttttaattgttcgtttaaggggtcgagaatcccccccccccttcccctgtctacgcgggcgtggacacaataaacatcgaatgattgttggactcattaaaacgcggcaaattcataattatatttaatggtaatttgttgccatcaaaacccaccgaaacatatgcgcccatcgattgcccaaatcgacagccgacgatccgccggtacgggtcccgattcagcacggcttcgctcagcttttcccggagttggttgatctgctcctggcgctcctcaatcggtgccaggggcatgcccttcagcttcgttgcctcctcgatgaatttggtgaattcgatgcctgtgaaaaggggagaggaaaagggagtgaataataattaatcaattaaataattaatgaactaattagtcataataacagtaggagggatttgaaaaaatttagcaaattcttcacataaaactgcttaaaatagtaagaaaattttcaaaattaccacttaaaaataatgggagaactgagaacatttgtgcccatttctctttgccaaattaggagcaaattcagtccccacacccctccgggagaaaatggaaaccgaaatcttccaattgcccgattttgattattttcgaggacttaccgctctgctggttcagatggttccacaaccagttgggcaggtagaacagcatcgcttgcaagaagagcattatcggcacccactaatgggtatgggtgtattagataattattttaaagaaaaacaaaaaataaatttttgaaccaaaaacgaaaatcataaattacaaataaatacgtgtccatgataaattttcaaaaattttccaatgtaaagttattttaatggtttttaggtccgtagaatctatttcaggcattcacttcgagttaaagacaaaaattaaaactttcggtgatcgttttcgaccattttcatatttttaaatcattaataaaatcaaaaaaacattttttttt

SEQ ID NO: 31621 - DNA, 975 bp, Heterodera glycines
  unsure (1)..(975): unsure at all n locations
tcttaatttgggttttaattcggaattgggtcagcacccctttgaccaattccgacatctatttatttttaaagttatttctttttttttattaatatttcgagaaaatagccaaaaaaattaaattttttgaaaatttcgttatttgaaggtcaaaagggccgctttaatagagtggaccgttttaatagcggattttttgaaaaaatatacccaaatacgcacataaaatatgcatagaaaatcgcgtaatgtgctaaaatatgcaaatatgcacaataaatggcgaatatgcacaaatatgtataccgtatttgctctttttatgtgccagtctccattaatctgcccgtctccaattatatacccctttcggactaggttgaaaaataatctgccagtctccatttatgtgcgaggggggataaatagaattttttaataatttagttggcacatttttcaaaaaaaaataaaatcaattcaacggtagggatacgatttatagttttttcattatttttttctgagctccccgtggccttaaatgcacgaaaaacatgttttttttcggctgttgttaagctacttttggagttattagcaactattttctagttttttatttttagcaactaaaaaactataaaatttttgataaaaactttttcaactatttttgggtttttcccaaaatttgtctaataaaaatgcaataaaaacgaaaaatatacccctaagaatcgacttaaaaattttttttcaaaaataaacccctaagaatcgacttaaaaatttttttcaaaaaatacactcctaagaatcgacccgaaaattttcaaaaatacacccctgagaaattaaaaatttctcaaaaattcatctccaaatttatttatttattttttaacaacaatttttgattttaaaattatttatctcanatactgatttggtttaattttgtaccttttt

SEQ ID NO: 31622 - DNA, 1772 bp, Heterodera glycines
  unsure (1)..(1772): unsure at all n locations
aaaaaaatcaccagttggaaggaccaaatttaattttcgttataattttttaatatatcaaaaagattttttcgctgatcatcgattttgtttaatgaaaaagaaaaataaaaaacaaaataatggatatattcacgtatctatttaaataaaaaaatattaataaaaaagatattaaaatgatacaattttattgtgatttaaaacatcaaatacaccgtatataatttaaataatatagaacatatagaacaaaaaagagcatcacgatctagaccatttcttgttcttgtagatcatgaattcaaaactttgttattatagaaattaaaatcttaataaaaaaatatgcccatatggaaatagataatttatttatttacacaacgatattcgaccatttttaatttaatatttattcttcattaaagtaatataatgcaatattctgaagaaaataaagctgtaattgaaataaatattgatccggattccggactaaaaggaagagaaccgctcattcgattttgccatttttgcataccgattgaataaaaattatacattatcctttaattataaaaaatgaaatataaatgaaaaaaatcctttttaaaaaagagatccttttaatcagtattaattttactgctttatgcatttattaaattattcatcaataattatttatttaacatgaaatttttcagaaaaatattaaatgttgataaaaattagattagatagcatatctaaaaataaaaaatacaaaaaacccaatggttgaattgattttttgttatttcttgcatatgaataaccagcggtttatgttagggttcctcctcgagcctcggggagcaaaatgtcggggaacggggaggaaattccccgaatgaatttgtcggggatggctggagaaatttaaaaaatgtcggggagcaacaccttcgtcggggaggaaattttcataaaaagtctaaaaaagcacaaaaagaaaaagtccagaacaaaaaagtcttaaaaactcatttaaagatacttccatcttatttcaagtgcaatttacgactttcgtaattccccgaaacatgtcgggggttaaccctaaaatgaacttttaaatgggtttattcaacgaaggtataattttcgttttgatgctctattaaacacccaaaattattaaatgtaaactttttgagagaacaccgtgggttactgaatgatataaaatcaaaaaaatttcatttgattgttttttgactaatggccattttgattgctcacagcgtccacttctgatttatggtcattttgctaatttcaagttgccaatgatggttttacttttttaaatgaagattagggctgcgataccgagtatattgttgtcactagagactggcgcgggacgggattccgagcgggattctacgggatcccagtccataatccagcattttttgaaaattgcgggattgcaggattttgctggattaatcccgcgggagcccattccgcagaaattctgaattccaatccagcagcgggatcagctaaggacatctatcaacaaaanttttagaatttttccattgctacaggccggcctttgcaactggcaaataaaaaatgtttattatggaaagattagaaactttcatcaattggttaanaatggtgttggcaaaaagttagttgcccaatttattttttttagaggntaatgcctccgtctataagtgctaanacgacgatttgccatcaaa

SEQ ID NO: 31623 - DNA, 1237 bp, Heterodera glycines
attcattaggcgcttggcaacaagtgataatccccccttaggccagctaatataagcttaagcggctgatggtggcaaaagcgccgggggcggggcgctgagaaagttcaaaagtcaacggcggcggagcgtaaaaacactgtcaacagcacggcacacaacagattaattacaaaatagggagattagataaattgggaaggacacaaattgctaaaaaacaaaaatataacattaataaaaaaaattggtactctaataggatttgataccatttatgtgggattacccaaatagaaatatttaaaaaatgaaacacattttaatgttaaagataatgggttttggactcaaaagcacacatttgttttgtgcgcaatttctcaaaaaaaaaaaaaaattttttttggatggcttccaccggttttgaaactgatacggagtaaatttttgggtttgaattaaaaaaaatatatttaaatttaatggtcatatttttaaaacagatatttgtgcgtgccgctcagtcaaaaaaaaatattatttaaaatatttttataattttcaacgaattttcatttaattttactcaaactactgtgcaaaacaacaaaaaagcatttaaaagaattacaaaaaactaatcacaacaactttttttttgtcaatgcgtacatccgcagcaaaagacaaatttgatgccaagaaaacaaagataatgaagatttaataagccacattaatatatgtaggttttagtttaaataaaatttgtcacgaaaaaagtcataaaaaatgcaagtacgaggcttcaaatcaagtgtagaacacttttaagtcattttaaggtcattttaaggcagcaaaaaaagtcatttttgacttaaattcccagccctaatgatgcgcagaaatgcaaaatttatcaaaagtttttttttctcaacaagtcagacagacaatgacatcatcaacaaataggtaaatcactcaatcgttgttttccatcggaagcgtttgttcgtgttcaacatcctcactatagggaaacgtcaccagcaggaccttgcaatagttcagcttgtacacttttgcgctgaaaaataagcatatgttaaaaggctgccaatttttaagcttaatttatgagggacagcaagcagataaagcaagtgatatgggtgggacagaattagtgaatgcatatgtatgatgttttatttgatcatttaaattt

SEQ ID NO: 31624 - DNA, 1492 bp, Heterodera glycines
ctgtccggtctcttctcactgatcactttcctctcctttccttacagtcttttccctctccctaaatttgtctgtcggtctgttacttttctctttcgccctaactcttaaaagctcttcattatttccccactcgtcagatcattgccgaccattccccgtccctttgatccgatggcttctcagtgcgtttctcctcttcccgtcaaaggttctcgacggaaacatcctctcctggcaaatttgctcctcgtcctcactctgattagcgtatttattggcattggcatcgccttttttgtcagacaattccaaccttctcaaaggtattgtgccattaggagaaaaaatcggaaacgcaccgccgggggtggtctaattaattaataaaatgaaaattctcgcgactaatccgccggcacttttcgaatgcagaaccatcgacatgatcggcttcccaggcgaactgttcatgaacttgctcaagtcgttgatcctgccgctgatcgccgccagcctcgtgtccggcctcagtcagttggacacgcgtcaatcgggccgtatcggcgcgttcgccgctttgtattacgccatcacaatggtcagagagaatcagtggccactgggccgaatgatcgaccgatcgctcactcattttcccctccctccctccacccattcttattattggttttaaggtgctcgccgttacggtcagtcagtcgatgtgaaaagagttaaatgaacggattaattgggccaaaataaaatagcccggggggagagactaaaggacctttgattttttggcagtgcttttaccctttcctcggggaacagaatcaaaaatttcggaagcaaaaagaagacattcagcacaaagagaaaaaagggaaaccaaaatcgaatgtgaaattttgtggacaaaaactaaacgcaaaagaatttctgaaaatgggacgaaatgaaccaaaaaaacgaattgcgtgccctttgccctggtcagactggcatttgccttgtgcttctcatccatcccggcgacccgagcatcaaagaacacttcgcttccgagaacgattcgcacccggcaaatgtgtccgcgttggagaaactgatggatttgctcaggtggagaagaaataaattggaaaaattgaaaatggactaacaaatacataagacaaaattagtgggcattattattcaattcgcttttcgaattaatttgccttttaatgccaatttctccccccccccccccacttttttcattttccccttttcgcccccatttagaaatatgttccccgacaacattgtccaggccactttccagcaaatggagaccgaatacgtcgaaattcgtccaccaacaaatgtcagcagcacaacagcaattgtacacgcggtgcacagacacatcgacggaatgaacactttgggtgggcaaagaaacggggggaaaagatggcatttttattccattata

SEQ ID NO: 31625 - DNA, 1338 bp, Heterodera glycines
cgagaaatagagttaataataatatgaaccagatcaaatgttcatcaggccccgcatttaatctgcagtatttattgtgccattatgatgcacgatattatttttaaaaatgattaagaatttatttttgctattgaaaccttttatagtgaataaaaatatagaaataattttgtttttaattctacctccgacaacaggtatagccatatcatttaattttctaaaatgattttaggctttgtcgtgaattttagaaaagagtaaaaaatttgaatttacctggtccttcgtttttaaaaattactttgtaacgagaaatagagttaataataatatgaactagatcaaatgttcatcaggccccgcatttaatctgcagtatttttgtgccattatgatgcacgatattatttttaaaaatcattgtcggattaaatccgaaaaaatataaaactattaaaaaaaacaaaaccaaattaaaataataagaattttacctgaaaatacaaaataattaataaaaataaatccaaaataaaataaacatttcataaaattttttattttaaaataaaattaaataaataaatgaatataaaataaaagtaaactaaaataaataaataaaacaaaatgaattcataaaaaacgaagcgaatgcttctcacaataaaaactaaaaaataatctaataaaacgccccaaataataaataaatttattccacaataaaacggttgaacgtaaaagcaattaaaattgtttatgaaaagttttcctttcttaaataaaaggggagaaaaaaaataaaacgataaaaaataatttagaaatgaaaaaaccataaaatgataatgtgtaaattttgaatgttattaaataaccaaaaatttttggtataaaaaggggaagggttttcagtttaggcatgcttcaaccaattcactctgctagcccatcggttctcttcactcaacaagccggacaacaactcgctctgaatacatcacaactcgggcattcgaagcatcgcggatattgatcaattgtgatcagaaatccaccaaattttccacgttgtgtcttttgtcgccccatcccaaataaaatattaaattaattgattggatcaaccagtgcatcccatcaattttggtgccacgacccgggaagtgcaaacgacaaagaacaacaacaacaacaaaagctgatcactgatctgagaactggaaaaagccggtcatctgttcaaatagaaaaattgttgtgcactgttaaagaaaactgcaagactgttcatcatctaaaactgttcttcgtccatcaaaagtctga

SEQ ID NO: 31626 - DNA, 2087 bp, Heterodera glycines
  unsure (1)..(2087): unsure at all n locations
agcatttgcaagtggtgaatggccgcggccgcgttgtacgccttgaaaatggaaagcgaagcgaattattttaattaacacttttttgtttttgctaatttttattccgttgaaaccggcaccggattaaagcggatatgaatgagttggtttcgggagtcgggatttcagtgaaattatgggatgttggcacgcatttaagatgggaccgtgggacggacacattttcaaccgggattcgggattctcatgcgcggaactcattccaccgaatgttttaaatcgggtccaggtttgccgcgggttgggaaaaatgtcgggattcgggccgaaacccttggttgggccggcccaaaaatccccaaaacatctggggatttgaatgccttcggcactttttttaaatgacaaatcccatttaacaaattgtcaagtgctattcatccactgatgcttcttcacttgcctttcgccacttccgtttggccagactcttcttcagatgagtgaccacagtgatgtgaatgtcttttgtgcgtgcggtgttaccactgatcctgcaacagcaacaacaaaaaaccatttagaattgagacgagaattcaaaataaattcgagaattgggttatccaagggatcctgggccctgttttagagaaattcaattgctctgccagcaggagttgtgtgaaaacaagatttttgtcttgtcctggtccatctcgaagaccactggtcctgtggtccgggttttaattcaaaattcggggctccaccgctaattacccccctaaaatgagccatgtatgcattaaattgcactgaccacgggtgggccaatgctcgctcgcatgtgtatctttgttccggatcacagcacatcagatgggcaatgaagtccttggccgactcactgatttcgtcccaatatggcgaatctgtgagtgaattgatctgatcgttcttatcaatcacgctgatgatctgctttacatctttacgcatatcactactactaaccaaattcgtattctcccttgatgatctgtgcgaacaaatttgcgtcgttctcatcataaaatgggggatagccgcacagcaaaatgtacgcgatgacccctgaggggatgaaggagttggttggatcactttttgaatgtacattagcaaggacagtgcgtgcgggaattactggttttccagggtccgaaattccgatttttgaaaaattttggggccgcctcggaacgccgtatgcaatcggcattctgctggtcaggattttccaggatttcgatcccaattacggttttgccaattttctggtctcttcctggggtgggctgagaacggcacgagtgttacgccaaacacattaaagtgccatgcattcccgaataccggtacatgtcctcaattttcatggtgctctcaattgtgccgtgttcaaccggccgagtccgaggaatacaatacccaatcgaatccgatgaatacagtagccgaggaactaacaataagcacacgcacagtaacccaaaaaaacgcaccaatggaccaaacgtcgaccgccttcccgtaaggccgttgttggagcacctcgggcgccacgtagccgggcgtcccacacgctgtggccatgatgcccgactcttccgtcttggagaggccgaaatcggagatcatgatcttggagtcgtcctcatggttgtagtagagcaaactgtaccacgggacgggaaattttttttttgtccaagaaggcataagtattgcacatacttttctggcttcaaatcccgatgcacaacgccattgtcatgcataaatgacactgcttccagcacctaatgaatcatgtaatttgttttatattccgaaagatttatggcaaattttaatcgaaaattccatttttttctgtctactatgccctcaaacttatttgggaaccccaagaactaggccagcagatggtctagaattttaaaggtcagcaggttcactatcggattttgcgaaattctgaaaaaccccccaacggttccgtggaaatgattcatccangattaacattataatccaag

SEQ ID NO: 31627 - DNA, 994 bp, Heterodera glycines
  unsure (1)..(994): unsure at all n locations
agggcggtgccaatcgccatttaatttctcagagaatttttaattttatcttattccaagaaaaatgattatctctattttgagaaattttatacgtttcaaatgctctcgagcatgataggaagtgcggtgcgcaatcggcatttatttcacagagaatttttaatttatcttatatccaagaaaaatgactatctcttattttgagaaattttatacgttacaaatgctctcgagcatgataggaagggcggtgcgcaatcgccatttaatttctcagagaatttttaaatttatcttatatccaagaaaaatgactatctcttattttgagaaattttatacgttacaaatgctctcgagcgtgagagggagggcggtgcgcaatcgccatttaatttctcagagaatttttaaatttatcttatatccaagaaaaatgactatctcttattttgagaaattttatacgttacaaatgctctcgagcatgataggaagtgcggtgcgcaatcgccatttaatttcacagagaatttttaaatttatcttatatccaagaaaaatgactatctcttattttgagaaattttatacgttacaaaagcgctcgagcgtgagagggagggcggtgcgcaatcgccatttaatttctcagagaatttttaaatttatcttatatccaagaaaaatgactatctcttattttgagaaattttatacgttacaaatgctctcgagcatgataggaagggcggtgcgcaatcgccatttaatttcacagagaatttttaaatttatcttatatccaagaaaaatgactatctcttattttgagaaattttatacgttacaaaagcgctcgagcgtgagagggagggcggtgcgcaatcgccatttatttctcagagaaatttttaattatcttatatccaagaaaatgactatctcttatnttgagaattttatacgttacaaatgctctcgagcatga

SEQ ID NO: 31628 - DNA, 966 bp, Heterodera glycines
ggccagggatggacgaaatttcgtttcgttttcgtttcgtcctacattttcggcactttttgagtttcgttttcgtgtttcgttttcgtctaccaaagttttttcgtttcgttttcggtttcggttttcaaaattttgtttttcgtttcgtgtttcgttttcgtcagagcaaaattagacgaaaaaagtacgaaaaagcactggtaagaataggccccgttggtagatttttcattggcattccgtttttttccaaataaagggggggggggggcaaactacagaattaccatttttcttagtccgttttttccgtgttataatttccgttttactacacatcaaagtcttttttaggcctattaatgtcttccaaaagcaaatatctccagtattttaattgcgacacaattccaagcggcaatttatggtgttgccgttctgaaaattgcagctacaaatttgaatcaaagaaattgtctgggtatccaatggcttcacttcgttctcacttaaaaaatcaccatcaaccaaaattgaaagaattggaagaaaaagataaggctgcagaaagcctcaaaaataatgaagcgaacccgagacaaccgacgttaaaacgaatttttgcgacttcaagtccagtgattaaaaaaatagcgagggctgaatctgctacctcgtcgcaattaacctcgaaaaaaccttttgtacgaatttaattttaaatgaatttacataacattttcagctcaatggacacccgacggagaaatgactaagaaaattgacaaggcaattaacgatttggtatgtactgctggattgccgttctcttttgtggaagaacctgggctaaaaaatttattaagaatattggttcctcactataaaactaggtattaatttgataaataaaactttcgatgatcaacttttttcaggggcagaaaatatttcacaaatgat

SEQ ID NO: 31629 - DNA, 977 bp, Heterodera glycines
tcactaattggggggtactaattggtcagcggtcaagagggcactaattggtcagccgtagggtgtggggtagcaattaattaattaattggggaaacctaaacctattgaacggtttcaaattgtcttgtactttttttgacagaaaatttgattgatttaaaaagtgacagccgaggggggagggggaatttgattgatttcaaaagtgacagatgagggcgggaaattttttgattaattgtaaaaatgacagatgaggggaaattcaaatttctgatgggggggggggatcggaattttgattgatcaacatatgacagtttttgatattattaaattattcaaatgaagtgaaataatttgttttgcactcggtctttatcaaacttgttatgaatgtgcaaatttgcaatttgttgacgatttcgcgcaatgtttcgaccgaaattaaattgtttgtcacttataaaataggtcaatttgtgaatatttaaggtttccaaaatggaattcattgtaattgctacatttgttccatacttttcttccaaaaattttccaacccattctattgtttacccaaaatggcaccacgtgatgactctattaacaataacaataatggtcagccagtcattcaatttgatcaacaaattcgccaggaccctggactaaatgccgtttttgactttgttcgggaacagggcgcacgggtaatttgtcacaacaaattaattttttcattttttgattaattttgtttagcatggcattttcaacacacccgccgaaatcgtcaatgttcttcagcaaatggcacagcatcgactgaatgagcgcagagcggggaataattgagagaatgaagttgagagaaaatgaagagcgaaagttgagaacaaattgatgaaacaatacaaagatgatggaaattctgaattattattttttttttcttacatgattttcttcgc

SEQ ID NO: 31630 - DNA, 1250 bp, Heterodera glycines
attttaagtttattatttctttgatggtttcaattatctttatttttttatgaaaaataaagaattcatccaattttacttctatagataatatatttattaaatgttctaatgtgctgctttatatttcaattttcggtatttttattcttattgttttttgattttacaaatatgacaattttttatactttagaagacaataaattgtgttcttcaatttttactattcagttttagaataataatttataatactttaaaaatgttcaatctttaaagaatctttgcgaaatgatcttaacatgttattttttctattaattattttcttattcctcatctttttctgactttttacaaagcgacctttatcaatttttgagaatttgtgttgtgttgttaatatttatagtttgtttaatgtttaatgtttaatgtttgtatttttagttgtattttcatcttttattctcatgctctttctgttgtgtgttggcacagcggaagtaggatttatattatttatattcattatcaatatttattttgttttattagtaatgatttttaatttatcttaaacaaattgagttttattttttgttgtggctgttagtgcttttttcttttaagataattcaattcaattatctctttttttgcctcagctttattattgttaaactttcgagttttaactttatacagtcatggtcatatgtttaacaacactcaaaattttctaccaaatttgatttaaattgattataaaatctcaatatgactatattgtgtttatatgttttatatttcttgtagcattttttgtgggctttataatgataccattcactatcccttgtaaaaatgttattattagttacaaacaattttaccaactgcactccctttttggggtggtcatatgtttaacaacactacccatatattttttcatagcattaaaaaaatctaaaaaaattcaggtaagcataactttggatgctgatcaaaaaaggtagcaacaccaagttgatcagatcactccttcatggtgatctgatcagcccattttggctgggaacgtggggtaaatttcaaaaaaatttctagggggttgggaaaatttttctggaaattttgagtaggcccgttttatagagcacaaaattctctacaatattcaaaaaaccgcatgtctctatgaatgataccggctgaggtatgggcacttcaatttgacgtag

SEQ ID NO: 31631 - DNA, 1278 bp, Heterodera glycines
tcatcccacatcgccagttctgcttaccaaaaatggcccacttggagctcaaacattcaacgcctgggttcagagtcaagcaaccctggcttcatacccatttagagtttgagaataggttaaggacatttcgtccccaagtcctctaatcattcgctttaccgagtataactgcttaacgagctccagctatcctgggggaaacttcggagggaaccagctactagatggttcgattagtctttcgcccctatacccaagtcagacgatcgatttgcacgtcagaatcgcttcggacttccaccagagtttcctctggcttcatcctgctcaggaatagttcaccatctttcgggtctcagcgcatacgctctgtctccgccccatcgcatgcgatcgagacgggactatgttgcgccccaacaccgcagtgccagggatcacacatcagctccgtaagaagccttcactttcattgcgcctttgggttttgaacacccaatgacttgcgcatacgctaaactccttggtccgtgtttcaagacgggtcgaacagatgaccggcttttacaccgagaacgcacaactgagagcccgagctggaccgaactggttgctggtacgtgtcgcacgcgaccgccaccgacccccagctcgagtcaacacggacccgaaaccattgcacaattcacccagagtaaacagcactcccccgatccgggtaccagaccccgaaaggctggcctcaagaccgagctcacgcagctactccgagcatctcagcgcactccgcctgcaaatgccccattcgccactgaacagaaggacagcaaaccccagtctggaggctagcaggccaacgtacagcaacaaacgggtgaatgcagaccagatacgccagctctgtccgtttccacctcatcggtttcacgtcctctttaactctctcttcaaagtgctttgcaactttccctcacggtacttgttcgctatcggactcgtggccgtatttagtcttagatgaagtttaccacctgatttgggctgcgatcccaaacaacccgactccaagacacgtaaagatgggtaggcaccgccagttggacaggtcttgcaccttctctggagccccggtcaagggaaacttgaacaagcgggccaacccaagctcacggtctatacgctacacctcgcaaccccagaggagctgcgattcagcgctggactcttcccagttcactcgccgttactacgggaatcctcgttagtttcttttcc

SEQ ID NO: 31632 - DNA, 1166 bp, Heterodera glycines
gatcaagtttattggaattattcaaaataatagagcttcagaaggggctctcaatgataccaacaatgttagatttggtggaaaaagaaaaaagttatattccaaaatttgggctggcgcagaaacgagcggcgccgaaacgaggtggacccaaccccgacgcttccaaccccgactcttaaccccgactcggggtcggggttaaatatacacccctaagaatggcatttttgttgaggaaaggcaaaaaatttaaacaaaatttcaattttttaaccattttgccaaattatattaaataaagtaaaatgcatttgtttattagtgtattgtgaggtgtggcggttattgcttcaacataacattactcctttatgagttcgataccggttaacgttttctttttaatatatttttatgtgattaataggattttttaaatcaaaaatacccatgaaaatcaatcatccttgacataatttattgacctatttaacccaattttcctttagtttaaattaaaaattcaatttttttactaaatcatcaaaatttaatacatttcaaaataattttgacaaaaaaaccaaagaaaaaacaaaaaattatcagaaattcataaattttttggtgaaaatctgttacaaaatagaacttaaatttcaaaattcgcccggcgctgcctatcggcatcgccggcgccacaaaaaaaacttattttttcttaaaaaaatttggatcaaaatcgaaaaatttatcattttttggacaaaatctgttaacatacccatccaaattttcaaaatttttttcggcggcgcctatcggcaccgccggacatctttttcctaaaagcctttagaaaaagagcgcagcgaaaaaaaagatgattcgaaaacaaaaaaaagaaaggtgatcagaatttttgaacattttttttgaataaaatccactatttttgggggctaggcgtcagaggaaaaatttgaaattttgactatttttacagattttcaccgaaaattggtcattttaaatgccttatgcgtttttaattaattctatacaaaaataattatgaaataaaaaaacacctataattattaaagaataataaaaaaaattttaagcaaaaataatataaagttttttgattatatggcata

SEQ ID NO: 31633 - DNA, 1084 bp, Heterodera glycines
aattccattaaaataacattcacgtgcgaaaattgggtttgacaagtttattgggaaaaaagactttacaaaatatacccctggagaaggagtgggaaacatgattcaaaatttcaaatttttatagtctaatctactcaaaacggttcagaattcaataaaaataacattcacggtgcgaaaaatggggtttgacaagtttattggggaaaaaaagactttacaaaataatacccctgggagaagggagtgggaaacatgatttcaaaattttcaattttttctagtctaatctactcaaaccggttcagaattcaataaaaataacattcacggtgcgaaaaatggggtttgaaaagtttattttgaaaaaaagactttacaaaataatacccctgggagaagggagtgggaaacatgatttaaaaattttcaattttttctagtctaatctactcaaaacggttcagaattcgataaaaataacattcacggtgcgaaaaatggggtttgaaaagtttattggggaaaaaaagactacaaaataatacccctgggagaagggagtgggaaacatgatttcaaaattttcaattttttatagtctaatctactcaaaccggttcagaattcaataaaaataacattcacggtgcgaaaaatggggtttgacaagtttattggggaaaaaaagtctacaaaataatacccctgggagaagggagtgggaaacatgatttcaaaattttcaattttttctagtctaatctactcaaaccggttcagaattcaataaaaataccattcacggtgcgaaaaatggggtttgaaaagtttattttgaaaaaaagactttacaaaataatacccctgggagaagggagtgggaaacatgatttcaaaattttcaattttttctagtctaatctactcaaaacggttcagaattcgataaaaataacattcacggtgcgaaaaatggggtttgaaaagtttattggggaaaaaaagactttacaaaataatacccctgggagaagggagaaagaaacatgatttcaaaattttcaattttttctagtct

SEQ ID NO: 31634 - DNA, 1233 bp, Heterodera glycines
agcaatgctccgtgtacaggcgaaagcatttgccgggccgcgttcgacccgcccttccggccctttggacggcggaggcgcgtgaaatgtgttggacgagcagcgactcgatcttcgagttggggttgtaaatgttgcgcttgcagaagcccgggtcgataacgtacacaacgccatcgatggtctatgagggtaagcattggagagataaagcagaggattaaagaaagggaagggagggaaaaagcattagagagagttaatcagaggattattcaaggggataattatttacaaagatgaagaagcccaagaaaaagaatgaaagactgcggcataacatgaccaacccaccattgatgtttccgcaacatttgttgccacaatgcaacggcgataacccgtaattgctaaagcaccggcaaattaattattaatcaatatttccatttccattaagcgttcaccattagtcaattggttttgctccgcttccaacaatttgcgctgttgttcgagttgcattgagccgtaaagcggcaaaacgtcctaatgaaatattgaaaaggcatttaacggcacaaatgcaaccgaccaattggccactttcacggcatttttttgcctcttcttcaagcatttcgcaggccctttcgatctccttgatttagttgtaattttatactttttaaattttattatttttaatagttttcttccatttttaaaaactttcatttacatcttgcccacaaagaaacagcagaatatcgccgtgcgcttcccttcgatgaattgcaatggctttttccacagcttttgaaatgtattcgttcggctcaaaggtcaaatcccaatcggagtgctgaataattaacgccaattttaatgtaatgattaaattccaattagtaaatatttaaatacttttatttcaacgggaaatgttcgtccgctgattttcattgtaagataatcgaactctgagaaatattgcacaaatgtgccggtttgcagcgacgcactcatcacaaccactcgcaattcgggacgatgtcgcattattctctgatgaagcgggggttataaaaatgttcatctgggataaaggaaatgggaccactgactttgaccagtcccatgaccacgtcggtgatcatcgtccgctcgtgtacttcgtccaacagaataaccccgtacattgacagcatttcgtcacgagacgactcggcc

SEQ ID NO: 31635 - DNA, 1056 bp, Heterodera glycines
ttttcggcactccgttgcgccgatagcaaatgccgtcaaaatggcattgaaagttcggcagaaaatcgtcgtgccgttctcggcccggcactgttcaaaattcgattcccgcttatctcaaaagaggaatttttgaaaagcggcacaaaattaattttgattaattttcatctttttccccaaatttttcagttccttcaaaggttttaacagccgaagaaaagttcggcatatatcagttccattgccaaccgaattttcgtggaaattatactcaattttatccactccaatttccgagcaattgacgaatttggacatttggcagaatttcgatggacattgagaaagtgttggaatttgcgagagaaccaatgtagagttacagattcagtgatgataccgtatacataaagggactttcttggaaaatattggcacaaataaaagaaaagacggaaggcactgacaatgagaagtatttgggcattttctttggtgcaacgacccgagggaaggtaaaacaacacaaaatgactcaacttaattaatataattgacatttaatagatgtaaattggagctgcaaatgttcggcaacatttcgaattgtctccaaaatgattggcgtggagaattccgttgggaaattatacgattttgtttttaacaataaaccgcagggtcgtggctttagttttgaatttgcagtgagtgtaaattgaataattcccttaattgatcaatttgggttaattaaggaattgatggaaccgagcaaaggattttatgacaaaaatggggacaaaataacagtggcaatcgatgttgctgtgtgcgaaccaaaagcggagaaatccatttctaattcaagcaaatcccatgggacactttcaatggatattgaaaaagtctcggaatttgctcgagaagtgtttttgagtgaacgtgaaagtgtaactgtcacatacataaagggattgccatggaaaatattggcaggaatatgtcagaggacggaaagcagtgacaataatgagaaatggttcggcattt

SEQ ID NO: 31636 - DNA, 1010 bp, Heterodera glycines
tgataaaaacaaaacatggcaattgatgttattaaaataaagtgataaacaatgatatttacagacagtgataaattgatattgacaaaaacaaagataaaaaaaataatgataattaatagtgataaaaacaaagtgatagtgataaaacaatgataatcattaatgtgataaaaataatgaaattgatagtgataaaaacaagataaaagcaatggtaattgatattgataaaaacaaaacatggaaattgattgttataaaaataaagtgataaaacaatgatatttacagacagtgataaaataatgaaattttaatagtgatttaaacaatgaaattgatattgacaaaaacaagataaaaaaaataatgataattaatagtgataaaaacaaagtgatagtgataaaacaatgataatcattaatgtgataaaaataatgaaattgatagtgataaaaacaagataaaagcaatggtaattgatattgataaaaacaaaacatggaaattgattgttataaaaataaagtgataaaacaatgatatttacagacagtgataaaataatgaaattttaatagtgatttaaacaatgaaattgataatgataaaaacaagataaaaaaaataatgataattaatagtgataaaaacaaagtgatagtgataaaacaatgataatcattaatgtgataaattaatgaaattgatagtgataaaaacaagataaaagcaatggtaattgatattgataaaaacaaaacatggcaattgattgttataaaaataaagtgataaaacaatgatatttacagacagtgataaaataatgaaattttaatagtgatttaaacaatgaaattgatattgacaaaaacaagataaaaaaaataatgataattaatagtgataaaaacaaagtgatagtgataaaacaatgataatcattaatgtgataaaaataatgaaattgatagtgataaaaacaagataaaagcaatggt

SEQ ID NO: 31637 - DNA, 1299 bp, Heterodera glycines
cttcgtctgccgatttttccatttgttccgtctccgatgagcaaaatcagccgaccaaagcgttgccttccgcggtgaccgcaatgagtttcagcggggcggatcaggtgaggtgcacctctggggctcgctgatcacacgaatctgacattcattggagggttttagcccccccccccccccttagcctagtctccctcctctccctggatacacctttgtttcggtgtcggtcagaagtgagttgttaggttttcagatggaagttttggtcgggcgcgagaatggccgcgtcgaccatttcaattctttgactgaccaattcaatgcgctttttgctttaccacagccttccgaactcaaaggaattcatcgcatcgacgggtttcgatttcggacagcatttaaaacttgtggtaattaagtgatcggattctgactgctcaagaatgtggcactttggctgtttggagcgcttctggagaacggcaaacgaccgaaaattggacggcgggagaaaatttgttgacgatgcgaacagagcccggagaaaggaccggagtgttcgcaacgggcggaagagaaaacccactcaaagtttggaatttggaagagcaaaagtgcgtattcaccgcgaaaaacgtaatgttggacaatttattatacaaaagttggtccattttaaggtacgtccgaatgcgctcgaattacgtgtgccaatttgggtgacgtgttgccgcttcttgggagaaacgggccaatttattgtgacgagcactggcaaaagtcaggtcgcttttagacaaatgagagccaaactcacaatcagttaattttatgacctttgagtcttcgtagttacgactttcgaaccaaaaataaattcaaattttatattccacaccaaatttttggttttagttgaatgcgaggtcgtcatcaaaaaggggtcgggagcagcgatttgttttctcatccctccaaaaaacttaattttctaggatttcgctttttgtgttttcaacaataactttctcgggggacacaaggttttccaatacggattccttaaattattgctaactattatttttttaagttttttcagaaatcgcttttagttaaggctttacgatttgcgagcgcagcggcgacccctttttgaagagaaatggctcgatgagcccattctcgcgttgtccacgtgctgcagagattggcaagtcattgccggcaacagtcggggagaagtcggactaaacgacttgcgttcgtccgttaaatgtgagaccgccttca

SEQ ID NO: 31638 - DNA, 1121 bp, Heterodera glycines
tctctctctctcttcccgttctctctctgtactaaaaatcccagtgtacttctccgaggccaattatctgcttcgttgcaggcattttcggtctctcaacctcagccaaaatgatgccatgccaaaagcatttgtgccttatttgccatttttcctctgctgctgtcggcattttgctgctgaagttgacagctgtttttcttgcgtctgttctgctctcgactgacggaagaagcccaaactgaccggattgagcaccgaattgcctttctcacctcaattttctgaaagcctcccttttcttcgctgccgatttgcttaacatcaaaaggagacgagaacgaaaatgggcactgctcagacaaaaaaggacaaagttcaacgatttgccgaggacgacgagaaaaatggagacggcctcctttgagggaaaatttatgaaattggcacaaattaacaatttaattttgcttaatagaccggcataggattaaagccattagagagttctccaaatattaccctcctccaattttacccattccaagttgggattctgcagtggataagcgggccttacgaacagttgcacaactgcggaaggcgtctgacaattgggcgggcggggggggggcaaagtgttaaatacggcacgtaaagaaagcgggcaaagacattcaaaagatacttgtgtaatggtgaagcaagtgatgatggacacctgaaagcaaaagcattataaagcctagccatgggaagggggagaggggcgggggggggtcttggcttggattagcggactgacatttgcaagtgaatgttaagcaagaaataaagctcaaaaataaaaatttcactaacaaaacacaaagaacaaattttattcgttattttattcttttattatcccccattttgttttaattacattttcaaaatgaagtgtccgtccgtccgtccgtccgtccgtctgtttgtccttcctcttccctttctcttcttctttcttttcaccccttcctcttctcttcctctttcttttctccgcttttctctcacctttttttttgtctctttctcaagtttctctaatggaatagaccgacagaatcaattagcca

SEQ ID NO: 31639 - DNA, 957 bp, Heterodera glycines
acaattttctatctcgtaaccccgatgctaatccgttccggagagcctcttcaaaattttttccattaccctaagagctgcggaaattgtgaattaattctcagaaaaatggctatctctttttaggacaattttctatctcgtaaccccgatgctaatccgttccggagagcctcttcaaaattttttccattaccctaagagctgcggaaattgtgaattaattctcagaaaaatggctatctctttttaggacaattttctatctcgtaaccccgatgctaatccgttccggagagcctcttcaaaattttttccattaccctaagagctgcggaaattgtgaattaattctcagaaaaatggctatctctttttaggacaattttctatctcgtaaccccgatgctaatccgttccggagagcctcttcaaaattttttccattaccctaagagctgcggaaattgtgaattaattctcagaaaaatggctatctctttttaggacaattttctatctcgtaaccccgatgctaatccgttccggagagcctcttcaaaattttttccattaccctaagagctgcggaaattgtgaattaattctcagaaaaatggctatctctttttaggacaattttctatctcgtaaccccgatgctaatccgttccggagagcctcttcaaaattttttccattaccgtaagagctgcggaaattgtgaattaattctcagaaaaatggctctctttttaggacaattttctatctcgtaaccccgatgctaatccgttccggagagcctcttcaaaattttttccattaccctaagagctgcggaaattgggaattaattctcagaaaaatggctatctctttttaggacattttctatctcgtaaccccgatgctaatccgttccggagagcctctttcaaattttttccttaccct

SEQ ID NO: 31640 - DNA, 1575 bp, Heterodera glycines
ttccacgatattccttgaaccatttgattgatttactagctcactctccactcggcataaattcatggcccataaatggaattggcaaatgccaagaaaagaattccctcttgcaaacgcgaaattgcgtatttagtcatcgcataatcggcatattcattaatggaattaaatcattgaaaattatttttaaaaaattgttgaaatttttttctttttgttaatccaacatttgccaagtgtatgttttgtgagattttatttgtcatttataagcagcgcaacgttaaaggaacagaagaaaggtattgtgggtcgattagcaaacaatttgagaaatttatgatcagagcgacggttttgcaccgttagtctgcatttacaccactaagaaaatgctaaattttaattttaaaataacaacaacactgaaaattaaaaaaaaatcgttttttagcattttcatgtcaacaaggtcacatcaaaccatcttaaaatttgctactgatttgccgccaaatattcgtccacatagccctcacagaaattggcaagcgtttggatgacttaattatccacattatcgctcattaatgggcatttttttttacatttttgtgcccaggaaatgtcctggagattgttgcggtcaatcgtctcaaaaatggcgtcaaattgaatttcgaaaatctccggagtaagttccccgcgaaactggttttcagtcaagccaaaacaattgtcgagacggaagtgagaggcgatgactgaaaatatggaaaattatttctttgtcataatagtaatggcaaattacagtcgaatgatactgtaaacagtaaataaccaaaaatacggtaaaagtgtactgtaaaaaaagaaaaagcactggaaaacttacgatccctcatgttgcgcaagcggttttcaaacagacggaacgacattaatttaatccgacgttttgcctgtccaagccgtcgcctctaaatcccaaaaaaatgtttaaataaattaaaaattaattgaaaaatacattttcttccacaattttttgtctgatcaattcatttctgatccattgggcttgttttttgtacaaaaaatggtcaaatgcaaaagaaattcgcacatttgcccagcgaatatcaaagggaagtgccgccacaatttcgacatttaattcggtcggcatttttctttttggcatttttgaattgaatttttggcataaattttgtaattttgggaggaatttggcgaagaatttgtcgctgttttgggtggagggcgaaatgaaagggcaaatgaatgagtgaatgattatgacgcccacttttgcgcactttgccctccgagcagagactaaaaccaccgctgagaggagggtggagggggtcaaatgtttaccaaaacgaaaccattttaaggtgccgtttaaaaagttagttactgatttgcagaatggcacccgttataatggaaattttttaatattttcctcgggtactcgaagctgaaatcccgtttatttttcaagggcatgtaaaaatttccgataacaaatgaaggccg

SEQ ID NO: 31641 - DNA, 945 bp, Heterodera glycines
  unsure (1)..(945): unsure at all n locations
gtctggcccgaaggcggtccgagtgctatcgaaatnttattggacggctgagcaggaggcgcgtcctgttagccgttactttgtgcaacgtatggacaagggccgttggattaatgtgtcgaaggttactaattgggtttttaaaattgttatgtggggcgagggaggttcagctaatgtcctggatttctgagatcgggaaaatcgcgaattccagttttcttcaaaaatctttcgagaaatcctcccgttgaatattttacccgagccaaacatcggttatgctgctctctctctactgcactcaaactttaaaaatttaagttgatttactgatgggcaggcaccgcactgaaaatttagcaaatttatatttctataagaattttaataactacaatcaattcttttcagcccattcctttcactggacaagccgaatactgccacaactttcggcctctttcacttgttcacaacatcgagcacactttccgcgtcatcactgtgtttgttgatgggcaggaggaggcgagtgaaacgtttactggccgtctcactatgaatgcggtaagcttcaattgaccgtaattgctgcttaaacattgaatcattttcttgacttgtttagtgagtgaggaaggcccaacaaatgctgtgtcagtgtgtggagaaatgaaaaagctccgtcctcttcacatattgttgtgttgttgctgttgttttgctgttggacatacttatttaacttatttgttctttttctgataaaaccgtgtagactttctttttctttttttgcaggttaaaaagacatttgaagtgcaaaatgaggcggcattagcctatttacctagttggtttttcacattgatttgtcattttgcttgatgatgcaccaaacatcatcattatcattgtcaccctcgtcctgatcgatgccac

SEQ ID NO: 31642 - DNA, 884 bp, Heterodera glycines
atataaactgaatcagtgtttgcggaggaccgagctgataagtcccaataatctccaatttacaattttcatgatcacttttgtgatattctcaatatttcaatttcttatatccaaatgtaatctgtataagtttacagtaggaaattgtaatttgggggttattggcgatttcaaatcgatccttccggaacactgatgctgtttatatttagagcgtaatgagctgaaaatgtcagaattcaaaaagtggggtcgcgaaaatagtaaatctgaggttattggcgcttatcaacctgatccgtctgcaacacttaaacagtttatatttaaagcctaattagcagaatgtgaaattctctcatttgttactttatgatcatttttgtctaattcgcaaaattacagctcattcttcgcgaaatataaactgaatcagtgtttgcggaatgaccgagctgataatcgccaataatcttcgattacaattttcttggtcacctttttggaattccaccatttcaactccttatcctctaaatataaactgaatcagtgtttgcggaggaccgagctgataagtcccaataatctccaatttacaattttcatgatcacttttgtgatattctcaatatttcaatttcttatatccaaatgtaatctgtataagtttacagtaggaaattgtaatttgggggttattggcgatttcaaatcgatccttccggaacactgatgctgtttatatttagagcgtaatgagctgaaaatgtcagaattcaaaaagtggagtcgcgaaaatagtaaatctgaggttattgccgcttatcacctgatccgtctgcaacacttaaacagtttatatttaaagcctaattagc

SEQ ID NO: 31643 - DNA, 912 bp, Heterodera glycines
ggaaaaacgcttatctctttttctgctcaccactctagacaattccaaccccattacggaataatagcgccaaccctaattttcccggaatttctttctgggcgagtttgattgtgaaaattttggaaaaacgcctatctcttgttctgctcaacactctagacaattccaaccccatttacggaataatagcaccaaccctaatttttccggaatttctttctgggcgagtttgattgtgaaaattttggaaaaacgcctatctctttttctgctcaacactctagacaattccaaccccatttacggaataatagcgccaaccctaatttttccggaatttctttctgggcgagtttgattgtgaaaattttggaaaaacgcctatctctttttctgctcaacactctagacaattccaaccccatttacggaatgatagcgccaaccctaatttttccggaatttctttctgggcgagtttgattgtgaaaattttggaaaaacgcctatctctttttctgctcaacactctagacaattccaaccccatttacggaatgatagcgccaaccctaatttttccggaatttctttctgggcgagtttgattgtgaaaattttggaaaaacgcctatctctttttctgctcaacactctagacaattccaaccccatttacggaataatagcgccacccctaatttttccggaacggaatttctttctgggcgagtttgattgtgaaaattttggaaaaacgcctatctctttttctgctcaacactctagacaattccaaccccatttacggaatgatagcgccaaccctaatttttccggaatttctttctgggcgagtttgattgtgaaaattttggaaaaaagagccctatctctgttttctgctca

SEQ ID NO: 31644 - DNA, 1088 bp, Heterodera glycines
ttttttataatttttgccaaatttttgccccgcctccaattattagttttaaatgtttcactaccctaattacatattgttaattgttcttcacccaatattaattattctccccctcccaatccatcgttaattgatccgtccatctttaattgtttcacctcctaattaacattgttaaatttctttgatcagtcattaattttctcctccccctaattatctatcgttaattgatccgcgcatcaaattaggcaatggctaattggcgcttcctgaacgtgttgcaccgcgactcgcgcgtcaacacaagcgttgtcgaatgcgcggcactattaccattgccggcacctgtcggtagtcgaacatcctccactgttccgctttgggtgctactgtacggacagttggacgcgtttgacccgcgcaccggacggcggaacatgtcgcctgcgtttgtcggcacctttgacgggcggaaattccgcgcactgttcgagcaggtgaacaatcttcataataggcttcaagatcaatgaatgttaaatttttataaaatataaaaagaaataatataccgtagcagaaatcaaatactgcaacataccgtattcaaaaattcggcaaaaaagccaaataaaaagttgattcaaaattgagaattataaagattgtgaattatttcaaaaattattgaattattggaagactaaaaatttattaatattttcaacagagtcttaaatatcggtcaaaaatattcctttttcttacaggaattggacttcgccactggctcctatgcattccaagtaaaatatggcactttaacgaaaaattttaattttaaaaatccctgattctggattccggttgttttcaaaacggcatattttttttacccaacaaagtttttctatgcattttcaaaataattttcgttataactttgtttaaataatcggaaccagtgtattcaaaaatcggaagtcatatttcaaaaaaagaggaaatctttgaaattggccgaaaaatataatttcgttaatttttgtgaaaatatcccaattgggggggggggggggggg

SEQ ID NO: 31645 - DNA, 1619 bp, Heterodera glycines
  unsure (1)..(1619): unsure at all n locations
cgcgttttgaaatgttcgtcgacgtaatggtcaaatcggtggctaatcgtcgcaatttccagtccaagctgagagcgtggaagcaaatcgaacactttgagccaacagtcggcagaaatgaagctgaaacggaaaagcaaaattattaccatggaaaatcaaatttagataaattgttttacatcgctttttccatttctttatccgattccttcggattgtcagacattctttgtattggtaatcaaagcaaattgaagaagtgaactgaaaaaaaaaatatcaaataaattcggatggaattaatgggatgaagaatatgacgggaaggggatttggtcggctttatataatcgaagtccagaaaaccaatcggagaccccatcagtttgtgccatttctgacaacaatgacgtcacaggttttcttgaccagctcgggagacccattctatagtcagctacagaatgggatggtacagcaaagaccgagcaagaaatggtgcctgccgtcccataaaagtcgtgctccccgcctcatcttttcggcgcacatgccttcaccaatggaataaaaaatcattggaaattcgccgacagttggacaacaaaaggctgaacatcagggaatcgctcactcaagaacaactgaaatcgagacgtgaacttcaagcgcagtgtgccgaaaagcgaaaggaaacatccgctgactggatcatctacaacggcatgcttgtgctccgaagtgaaatcaaaggaaggaggatgaacggagagaacttgagcgggccttttcctcacattgactctctgctgacacgctatcaaaaaaactaattcatgacagcaatgttctgaggtttaggggtagacaaaatttccaaaaaatatattctcaaaacagaaaatcccctaaacctcatcgtaaattttctcatgctaatgtatcggcactgtcagagccacaaaattatttttgggttttttcccttcatttttataccccagaaaactgatgattggcaccatttcccggcaaattcaaaatttgagacaatttttattggtcacgaattgttaaactagtttaaaatgggttttcccattcattgctgtcttggtccattttccaaatcttgtggccatttttcaaaatgtacccattttgttttacaatactttaccatgtccgttcagcaagtacaacaaccaattccggtgccaacaacaccagcaacaacaacaattgaacataaagtgctcaaggaactcaaagtttgttgcattttaagagtaattgttacatttttacacaatttattaatttcagcatttccaatgtttaaattcgggacaaaaacgccttgaaaagcagattttgaactcaaaattcagatttttaagaatataatttagtccaggagactttttattcctggaaaaggttcatgaatttttaatgcgatttgctaagaaacttgggtacttgtgggttttgggcctaaccaaaaaattttaaaaaaggtcaaccaagggcgtgctggaggcgatttagccatttccataccatanatttgcttcagattacggctcgccggcgttcaacggaggcagttttta

SEQ ID NO: 31646 - DNA, 1143 bp, Heterodera glycines
tgatgggtcccggtctttttttctgtttgacaggaaacaagattacaaactctgatccttgattacatctaaatgataaaaaaatttgttttttgttttaagaacagtttatcaggtataaatataaattagaaataaattgacaattaattctcaactgctaatgacaaaaacatataatatattggaaattatttttgtttttatttttaaatattaaaataattttaaaaaattcataaaaaactgcgtaccaaaaattgagtaaatgctttatgtatattttttggatttcaaataactcagttattagatccattttaataaaaagaaaaataggaattttgtggtgggattttcctatttttcagatattcccaggcatcatgcctcaagcatttggggaggcgatatacagtatgaatgaaggcacgccggtaaaagacaagcacaggaacaacgatacggtgaaaaagctggaggcagtcgagtgggcgcaaaagaactcgatacatgcagcagcaaagaagttcaaagtggaaaattttttatttaaaatggatttttggatgattttttctgcaaattttcgtgatttaaaccggttcaaaaaccggtttaaacgctttgccgcgcagtttttgatggtttagctgttttcagctcctaagaaaacacataaaagtatttttatgcaatagtgagtctgagacctatgatggatattttccgacgacaggtatgtaactttattataaagcaaaaataaatcaaaaacaatttttaagagaaaatattttttgctgaaaatcttcgctttcccttatttgtccacacccaagacctacctcatcaaaatttccaaaaaatttttttgtaattttttgggaaatctaaaaacctatcggatactgccgcatttgtctacgtaaaatttgcgccaagttttttatgaatataaataatttgatttaatatttaaaataattattttttgttatattttttaaattagtttttaaattaaatattgcattataaagctaattttcatcaaataaaattttataatttaattaaattatatttatttttgcttataaaatgctttgctttgcttttttgcagtggcttgtgtgtcta

SEQ ID NO: 31647 - DNA, 1931 bp, Heterodera glycines
taacgaggtaataataataataagaaaaatagttgttactttttaaattacataacatactaacaaaatgcttcaaagcaaagaatagacacacttccgaagacaaaaactaaaacaaataaaggctttaatcgttttattattgctatcctttcaaaatttcttttaaatttcttttctattgttaaagttctgaatatattaaaaattaaaaataataatacaaggacttatctatatcatagacaaatctacaagaaagatttatttctaaatgattcctatttcattttttatcgaaaaaaccacgtttcttttaatctaaattaaaataatttttaaaattgttaaatgaaatcaaaaaaaaactaataacgacggcctttaaatttttaattaattttatacttttaatataagttaaattgtaatttgagaaaataaaaaaattctgttatgaaaactttaatactcaaattattcaactaaatattgcgtaaataaagttagcaatagctgctcctacacgtttgaatatggcatgataaactaaattttgtataaacaaaacaatgtattaattatttttcaataaaattataaaaaattaaataaaaattatatacaattaaataaataaaagttaaaaacacgcctcttattgaaattatttcatagctttaatatattaaagcaggaacaaatttgaaaacaatttaaaagtattaaatgcaaaaacaagataaaaccgcgtccagtcatttgcgggcggacatttgcggacggtttttgaatttaaaaaaaaaattattttttagaaaaaaatttggaagagtgggcctcgtcagtacgttctctccggttaaaaagcaactaattacgtgtgtttcagccggcccaaccgtagacacactaacttaaaaagcgcacaccaacaaacaaaaaaagcaaagaaattaaattttctgattaattaatatgtgaaatttattaatcgataaaatataaaatcattattcatggattaaattgtcaaatccattggatgctaagcgatattgaagggctcttaagtgattcacaatttggtatggttcggggtttgcaagtgcataaatctagtgagaagagtgtgtatggccacatcattattatagtatgtccttcgcctaggttgcaaattcaaagcgcttgtggggtccaactcataagtcctaactttgtcttgatgaattctttcttcctctttcgtaactaaaattatactggtcggttttttattcgaaattttttttcattcagagaaaatagtattcatttacatatatttttttttattactttggctaatgtttttttgatatatttaaaaaactgcttatataaattttgaatatagaaactagattttgtatttgttcttagcatgagcttcataataaataaattaatttatgatattaataaaaaattttcctttatcgctttaatttctatattattattattattacttttcttgtcagtttatgtttttacacatgtttttacacacagaaatcagtgttcgattacactttacacgaacttgttaaaatgatggcctagagatgcttcggaatgaagtccaggttaaatttcaaatttatgccattatttatttaaatttttaaatattttattttcaatgtttatttttaatttattattaattttaaagctgaaattgcgagctgctttaacttatgtgaaaaatgattacttttgcgtaccaagaataaaagacaaaacactttgttaaaggagaaaaattagtaatgcttcaaagagtaattaaatattgtacactcacaatcaagatagaaataaagtaaactaatatcaaatttaaatactatattttaaactagccgtatcgaaccttaaccaag

SEQ ID NO: 31648 - DNA, 1135 bp, Heterodera glycines
  unsure (1)..(1135): unsure at all n locations
gccagcgacaggatattgtaaggaagaagccgcttggatgagtaaaacgcggaaagcggggattgataaaatccagggggaaaatgaataaaatgataataattgggttatttaattctgcgccgcaaatgtcgcatcaccggcgggaggattatacttagtaagaataaattaaggaattgaatcaaacggaaaagcaatcgaactaattgtgacacttttaaacgacaaaacaaacgccaaccgtatgacgcaaatattgggcatcacaacgaagcatactgtaatagaggaagaaaagggggagagagtgcagggaatactagagagggaagagatggagagcaaaaaggaagtcaacgccggagcagagatgaagaaaagggtgaaaaagaaaaagggaaaaagaaataacgaaaaaacgacggaggaaaacaagacaggaaaagaaacagagacggaagagacacagtcacgaaggaagacgggaaaagaaacagagacggaagagacacagtcaccaattaaaacgggaaaagaaacagagacgaatcaaatgggaaatagcacatgcagggaaggcgacacagaaaaaacgccaaaaaattcacaactttgtcagaaaacggacgaatggacgaataatctgagaggaaaaataaattcatcaaagatcaaattaaaatttttcgagaatgaccattttctgactgcaaaaattgaggaattcttaagcaaatgttgccaaaatgaaaacgaaaaaactagtaaaaataacagtgaaaataaaagttccgaaacggacgaaagcattagcctaatccaaatgctcaatgtcggcatttatgccaatgaaatttggcaccgattggtaataattgagcaaatcgaaggcgatgaaaaagagggaaaagagttgggactgaattggcggagattgaaagggacggaattggcaaatgatgcgaatggagagaaggccaatttggcacatttggaggacaaattgcacaaactgttgagacaaattgtgatggcaatggaaggagaggaaatgaaaagcgacattttcgccacggcggaggaaaggcgcgcgnatcaagagcatttgtatttgcacaaattggcattcctt

SEQ ID NO: 31649 - DNA, 1696 bp, Heterodera glycines
tttgggagaacatgcacgtgatctggcttttcaaccatcgaatttgggagcatcaacatctgatcagtcttttcaaccgaatttgggagaacatgcacgtgatctggcttttcaaccatcgaatttcggagcatcaacatctgatcagtcttttcaaccgaatttgggagaacatgcacgtgatctggctttacaaccatcgaatttgggagaatcaacagctaatcaagcttttcaacaattgaatatgagaaataggatacccattcaagctttgcaaccatcatatgtgggagaacatgcacttgatctggcttttcaaccatcgaatttcggagcatcaacatctgatcagtcttttcaaccgaatttgggagaacatgcacgtgatctggcttttcaaccatcgaatttgggagcatcaacatctgatcagtcttttcaaccgaatttgggagaacatgcacgtgatctggctttacaaccatcgaatttgggagaatcaacagctaatcaagcttttcaacaattgaatatgagaaataagatacccattcaagctttgcaaccatcaaatttcggagaacggacatctgatctggctttaaaactttcgaatttgggagatatggcatttcctcaggcatttcaaacactgaatttggaacaaccggcgttgatgccttttgtaagttagtccagtggttttattcgggaaaatctaaatttttttttatcaatttaaatttaaatcctattttagcgcaaaaaacaaattcaacaagcaaaaatgctttacttaagtcgggcacaacagcaattagctgccaaattcgaaaaaatgcgaagcaattttttggcaatatacggcgaattgcccaaattctcgggccaaccaaaatcgcttttgggtatgccggcacatcttcagcaacagtacaaatcgcatccgtacattgccaaactgctcgaatatccgcagccagcccaaccaacagacattttcatgcaaaacttaccaaaaatgccatcagtaccgcaaaatcatcaatgcaatctgagcaccagccaacatttacggcacaagcaatgccatttgagtaccaaacacaagcaatggcacctgagcaccagccaacatttacggcacaagcaatgccatttgagtaccaaacacaagcaatggcacctgagcaccagccaacatttacggcacaagcaatgccatttgagtaccaaacacaagcaatggcacctgagcaccagccaacatttacggcacaagcaatgccatttgagcatcagccaacatttacggcagaagcaattccatttaagcaactgacacaaacaatgcaatctgagcaccagccaacatttacggcacaagcaatgccatttgagcatcagccaacatttacggcagaagcaattccatttaagcaactgacacaaacaatacaatctgagcaccagccaacaacatttacggcacaagcaatgccatttgagtaccaaacacaagcaatggcacctgagcaccagccaacatttacggcacaagcaatgccatttgagcatcagccaacatttacggcagaagcaattccatttaagcaactgacacaaacaatgcaatctgagcaccagccaacatttacggcacaagcaatgccatttgagtaccaaacacaag

SEQ ID NO: 31650 - DNA, 1249 bp, Heterodera glycines
  unsure (1)..(1249): unsure at all n locations
gccatcgatgggacgacacaattcttcggcattaaatgctaaaataaaacaaaatttttggaaattttttatcaaaattgtttttgtgaaatgtaccatttttgtctgcggttatctgatcatttgaatctcctacttcaaatcggatgatggtaaacaaaataacagccaataaatttgccattntaatgaatgtcaattttgaagacaaaaagcaattatattattttatctaattcaatcaaaacataaataagttatttaataatatatttagataattttcagttaaaaaaatgaatgttatttattaatgaatgaatttttgactggtacataaagcgattctatgcaaacgctcttttttgatgattcacttctattggcttcgccattctgtgcgatgaaagcgtaaaattatggtgatgttctgctgataattataatattgcgatagaaaagcgtcatttatattcattttattttattaaaaggattatagtttaatttgtaaaaaatgataattcttaattaatttaaataataaaatggtaattaatgatggaaattttaacgatcaattgatattggaacaaaggccactcattaacaatatttagttttatggatttcaaaataagaagtaccagtggcggttttctagtgccaccgttagtggtattaacctggtaaaatttgcattggtaagaatgggaattcgagcataaattattcatgaaaatttggaaatggtgaaggaatattttcataaaggtcggacatttacgccaattttaaaacaattcttttctttttttaattatttactagcgcaggcgcgctcgcttcgctcgcgcacctcgcgctagccgagctttgaaaaaatttattatcttctctctctctctcacctctctttctttctccctctcctctttttctctctctctctcttcctcctcttttctatctctctcctcttctctccctcctctttctttctctctctctctcctcttttctatctctctcctcttctctccctcctcttttctctcccttctctcctctctttctttctctccctcctcttttctatctctctcctcttctctccctcctcttttctttctctctctctcacctctctttctttctccctctcctccttttctctctctctctcttcctcctcttttctttctctctctctcacctctctttctttctccctctcctctttttctct

SEQ ID NO: 31651 - DNA, 2213 bp, Heterodera glycines
  unsure (1)..(2213): unsure at all n locations
tttgtatgatactgggtagatatgggagtaaaaaaaaagtttttttgtgactatttacaataaaaatttatgcagcatttctaaaaaggatctaaaaataatttctgcgtaaatatnttttacattatgtgtnngaagaattgaggctgctttctgatgcgattgaaaatttntcagcttntcttgaaaagttttttcncagaatttatacagctttcccgacaaattgtttagataattattctagacgatttttttatatctcagtgcttaactattgcctttttgtatgataactggtagatattgggagtaaaaaaaagtttttttgtgactatttacaataaaaatttatgcagcatttctaaaaaggatctaaaaataatttcttgcgtaatattttttacattatgttgttgaagaatttgaggctgcttctgatgcgattgaaaatttttcagcttttcttgaaaagttttttcccagaatttatacagctttcccgacaaattgtttagataattattctagacgatttttttatatctcagtgcttaactattgcctttttgtatgataactggtagatattgggagtgaaaaaaagtttgtttgtgactatttacaataaaaatttatgcagcatttctaaaaaggatgtaaaaataatttcttgcgtaatattttttacattatgttgttgaagaatttgagtctgcttctgatgcaattggaaaatttttcagcttttctcgaaaagttttttcccagaaaacggatgggtcaaataaaaaactaaacatctcacatgaccaatttaaattcccttacattttgggtttactttattatgctggcccataaaaaaatggagtttttccggtgccaaatttttgtgaattttctttcggcccgtcataagcggattgtttgggggcaaatgaaaacaaattttgtgttattcgaatgcgctagccgagctctacattttcaaatgtatcaacaaagggtctatctccactctctggcgagttatgtccagccaaagcagagtgggccataaacacgaattttttaatctttggtatttcctctattttgagcctgctctacatttatgtattgtgccaatatgcctattgcaactgaaatttattcaactttcccgacaaattgttgagataattattctagacgatttttttatatctcaaagcttaactattgcctttttgtatgataactggtagatattgggagtaaaaaaaagtttttttgtgactatttacaataaaaatttatgcagcatttctaaaaaggatctaaaaataatttcttgcgtaatattttttacattatgttgttgaagaatttgaggctgcttctgatgcgattgaaaatttttcagcttttcttgaaaagttttttcccagaatttattcagctttcccgacaaattaattggataacaattatagacgatttttttatatctcagtggtaaagtattgcctttttgtatgatggttggtagatattgagagtgaaaaaaagtttgttcgtgactattcacaatcaaaaatttatgcagcatttctaaaaagggatgtaaaaataatctcacacataatatttgttacattatgttgcggaagaattggattgtgcttatgatgcaatcgcaaaattgttcaggttttctccaaaagttctttctcagaggtcggatgggtcacataaaaaaataaacatattacattcccaatttgaattcccttgcattgcgggttcactttattatgcgggcacataaaaaaatggagtcatcccggtgcaatactttttgtgaatggtcaagggctctcgtccgcccccccccccgcccttcaaaattttgaaaaataaataaaataataggagactcagaattttgaaaattttttataaaaactgatgacaagctaatgtgataaaacaggttaattcttttcctttcagtatccctgcaaagtttggggcgcttctgataagtttctgaaaaaaaagataagcctaaactttttggcctgtttaaaaaggaattaaaaatttttaaaaatttattcatctccctttttgatagaaaaagcatcagagtgcctaaactagcatgtaaataaaatttggtgcgtttcagagcattttctgaaaaaaatatttatgaattaattatg

SEQ ID NO: 31652 - DNA, 1108 bp, Heterodera glycines
tcttcttcggctttgcatgtttagtaggttacgccatctgaacacatgaccgagcttagaaagggacggagggaattgacaaagaaaaaaggagcggaccgaccaagtcgccacagaatttcctgctgatttaagccggtgttcaggctctgcttggccaacaggcaataggcctcctcgtgtttgttctcactgtcaagttggtcgatgtattcaaactgaaaaaagagggagggaaccattcgtttaaatttaaaactttttttttctgaattttgagaattttttttaccatgagcagctgaggagcacggaaaaaagtcactatgaaaacctgaaattaattacaaataaatttgtttgtacttatgtacatacaaatgtatgaaggacgagagaaaagcaaataagagacaattaaattgaggggagggtcaagaataacacaataacaaattataagttacacggaataattgttgttatgttcatagacagacagaccgaagaagttggtgcttgagacaggccgtagccagaaaaaatttcggacggcagaacccgaagttttttttttttgctattcgggcaaaaagcaggaatttgtaccgcttttgccaaaaagaagactgctttttgctattttcggtcaaattttcaaaaatatactaaaatgggggaatagagtctggcggtgctgttaggcgccagcgggaaaattttctggaaattttaacgcaatttgttaaaattaaatatttaaaaattactcattttgcttgaaaattttttatttctgggggaattccccctcccccttctccccctgactacgggcctagttagaaattcgtgcagaaacggagggagggcggagggtggagggggcgcaatcgaagaaaaagaaaggaaaacgctcggcagtgctccaaacagaaaaaattgatttaggtactcatattttttgaaattaaagaccttagtctgaattttctgcacgatttgtaaaaaatgaacctgcctacaaataataatacgaagcgaaataaaccgcatatccttctctaatacccataaaactaaaatgaatggggaaacccgagtaact

SEQ ID NO: 31653 - DNA, 769 bp, Heterodera glycines
cacccccgctgttgaagggaacgcgtcacggcacgccctgcggggctttatctacagatgacggcatttgttttaaaacaaaaaattttataactcataggattgaattgtttaaattagtcatcatggtcaattttaagggataatttgaaccaattttttttgaataatttaaaataagtttatgaataaaatttcaaaaaatttcatcatcgaaaaattaaaattattgtacgcaaaaagatagggttttgaataatttttaattattaaattctcttttaaaatcattttgcactttaaacttgaaagtaattaaagaaaattcataaaaataatggaaattcattattagttgatatatgaaaaaacaatgtaaaattttaaaacaaaaaatggattatttgaataaaaagaaaaccatttaaaaaagaaaactccgaaaattaaaaacaagcattttgctctgtcatagaaacaaaaaaacaatagataaataataaattaagtaaacttttgattatttgaaaagtaaacacaaaaaaaaaaataattacaaggaaatagaaatttaggaaaaaaattgaaaattttaagccgcttaaaatttggcgtcacggagaagaataagaagaaaaaagctaaaaaatgaagcaaatttgtttaaaaaattgagaaaaaaatatatatatttagttaataaattcaattaaaaaataataaaaatttgagactaaaacaaaattaaagttttttcaattattgttat

SEQ ID NO: 31654 - DNA, 1739 bp, Heterodera glycines
tagtaacttgatagcctatccattggttctcctctattaaccttttttgcagactaatggataacacttttactatcgaatgatagtttttttgcttttgagcataaattacgataaattatttgtcgaagaatgcccaatttatgaaaagactcggcacgaaagaaggaaatggtggaaataatgccaaagtcccaccgtaatcggttacggtgccccacccgaataccattctcctcaattggccaatgctcccactgacctgatgctttgctcctgcgcctcgtccgccgcttctcctccctcagcttctccttccgctcgtcttccatcgccgactttgccgcgccgagaagtgtcatgataattcccgtctgcgaattgactcccaccgcagtaattaccatccgaccgctgccttccatcactaaaaggaaagtgcgaacaacaaaatgggcaccactgaccatgagttcccgaaagaagcattgggtcatgctcggccgactttttgatttggtccgattcgccggtcagcgacgactcgtcgattttcaaatcgttgctttggattagcactccatcggtgggcagcaaatcacctgaagaagcaagggaaagtgtcaatgagtaaaagtgccaatggtcggcttgtcaaagtgccatcgtccgctttttccggcaaatcattaccgtatttcacttgcgcaatgtctccgaccaccaactcgttgaccaccacttgcagctgctttcctccgcggatcactgcgaatttgtgttccgtttcgatcttcgcttgcaatccttaaattcaaattcaaattaaattcattttttgtccgcctttcccggggatggccaacctctgaattgtctctcttttgtgtaatcattcaaagccgtgacgagtacgacaacaacaaccgaaatcaaaatggccgcaccttcgatccaacccgcttcctgctcagtttcgtcttttccacctgaggaaagacggcgattggaaatgatggaaaagcgaacctccgagttccgatccggggttataaaatgaaagggcaagtgaaacgactgcggcactaagtaaaatgatcagagtgacgtcctaaattgaccgacaaaaagactcattaagaaatgccatcggacagacctggagagcctcccagacgagcgtaaagaaagactttggcgggaggggagggatttcattggcaccgaaggcatccctccgcctgaaattccaatttcaaaggtcaattcacacagaggccttaaaatttaaaagatgggcaatcaaacgaggatgttcatcggcactttggggcttaaaagccaacaaagggccgaataatcggaaaagtcaaagaaagaagagtttgtcggactatggccagcaaaggcaacctcttcagttcgtcctgcgtattcgctattccgttgtttgggtctgtcgcgagtctttcgcaaaggcccaaagtgtttccgtagtcggtgcttattttctccaatgcttcgcctccacgaaattccatcaatgtccgcagttcttctatcgtcacatcgaaggcaccggcacccgacactccggcagagtctcgatgcccggaatcgggactcattctgtcgagagtagctgtccttctgctgggagagggatcaattttgcaaggaacggcgtaaagcggcgattgaacattcattcattcattcgttggcaatgtgccgtttct

SEQ ID NO: 31655 - DNA, 1398 bp, Heterodera glycines
ctgagcacaaatatgatgtttattttaagtttcagattctttggaatattttaaaaattctttattttttggcaattttttggccctcgggattttggcttaatatttgaaaattcataacaaatcgaagggttgatcaattttacagtaataaagccttaaaaatagagaaaaatcaggagaattttatggactttatttggaatttctatctaaaaaaggaaaaaagttattccagaatttctggaaattttcgatttttcagaaaaaaattcagaactcggttctgtaaaggtgtttttgaaattttaaatactgaaaaaatctgcaatttttttctctataatataaattttattttgcatttttatcacatttttaaaaaaagatacaaaaataaaagtgattttggggttcgggaccaaaggggggtgcacatggtttttaagtggaaaatttttttcaccaaaaatcctccaaaaatatgtctttaggggttatttgggccgctgatcacgaatacgtgatcagattttacttttgacatcgtcaagacctcagaatccctgtgtgattggggattctgaggcatcattttttgggggggtggcgaagttcgaagccgggcggtgtacattatttttctttgtattttttgggttaattttcattacttttaataaatttaaatgtttggttttattaataataaatttttttagtttaattaaattattttttgatgaataatgattttcatttaaattatttattatatttaattaaagaatttcagctattattttaaaatttaattgtaaaatttttttcatttcaatttaaataactattcaattattatacatttcataagggaggttcggacccgggcggtgtatattatttttaatgcattttttcgttatcttcaatgttttaaactaatctgaagatttgttgtagattattttaaaaaattttttacattaaagaatttaattatttattttttgaatttgtaaatttcatctaaaatttattaaataatcaatttttaattttcaacgttattttcaattaataaatggaggatttatttttaaatttaataaatttataattcatacaatttttaatttgaatttatgttgtacctcttctagtcactgttgtacctcttctaatcatagttggacctcttctaatcactgatggacctcttctaatcaccgtggtacctcttctgatcactgttggagcacttttaatcgccattgtacctctcctaagcacaggtggacctctgttaatctcagctgtacctcttctgatcactgttgtacctcttctaatcactgttgtacctcttctaatcactgtttacctcttttagtcact

SEQ ID NO: 31656 - DNA, 2107 bp, Heterodera glycines
  unsure (1)..(2107): unsure at all n locations
attgatgtgaatcgtcttaaataataatttattttnttattaagtaaatttttttccaataaaaaaatttattatttattaaatanccctgcaaaatccaatgcttcgtatcacagcacttatttcttctgattgaaaatcgctgctaaataccaataaaactcgtccaattaaatacgcatttgacaagcttttaattagcgatttcaaatatttcacccgatcatggaccttaatttatttttagtaaatttgaataatatttatatatttttttaattgattttatttcaaaaaacaaatttaaatattaattacctggattatgatcacataatctacattttccgcattagggtcatcaaatttgtctattcggtccgcagaaataatagagctctatatgaaaaagaaggttcgaaaatttaatccgatgttaaaaaaaccggaaattcacactaataaaatgaatgtaataattttttcttaaaattcaatcgatgacgatttattgaaaaaattctgcttttgcttttaaagcttatttttcctggctttttcatgctaacaattgagaacccacgtaaaatggacccaaaattatgaaaataagcaaaatattatagaaaatatttttgtttattaccggatttacagaaatggtttcaattttcttgaattgttcaccaacagctgttctaatttctggcaatttaaaaatttttgacgaatttatcaacaatttatgccattctaaattaatgttcatgtcgtccaaatttggcaatctgtcaattttgctcggaatttcattcccattttttggctcagacatttttctgtcgttggagttcagaaacatggaatttagctcaattttttgccaataaattgattttgttgcattgaatgttacataaaagaggaatggcaacagaaaaatcaactaaaatttaaatttaatttaattaaatatacttaattatttattttcatcaccgcgataataaaaatgattgtcgaagggcgaacaatgcgcaaaataaagtcgtgcataaaaaaattatttttacaaattaattttaaaaaaaatttttttatgaatttgtgggccgaaaatggattttaacaaatatatcaattcacaacatttatgtttatatttgagatttccaatctgccaatgttcgagaataaattggagtgggtgatggagggattatcttacgaatttgcattgattaatattgaatggagacgaatatgtatgttgtataaacatttcgcaccaattatttttataaaaaaaaattttcttttattaaattattattaaaataaattttaattaaaaaaaaatttgcctgaatttaccacatttgtttaaaattattttgagtgaagcaaatgttgctttattttggataaacaggtatttatttatctgatctaataattaatgtgaattaatgtttctttttttttatcttgaaagttcatgtgaaacatttaaaaattttgaaatataaaagaaaagtgaataaaaaaaacctcgtaactctttaaacacataaaattaattgtattaaaattataataattgttaaataattaatgtatgaaaaatcataaaaataagtaataaataagcaatttaacactctaatatacataaaaagtcaaataatattttatattttttataaacgattaggtagtaagaataaatgaaactatttttggttctattttaatgtaaatataatcttccagggaggaattctcctaaaacactgaaaaaaaattaatataaagttaattataattaaagttaattaaaattttcataatttctcagccactttttgacattttttcaatttaataaaatgtcaaaaatttaaacaaaatagtattactcattcatcagtctcattaaacacttgacatatggaaacataattttaataaaaaattctaactaaatgacaaaactgaatcatcaaggcaagttttacaattttgttatttaatatcggcaagaatatgttctctctcaatccattttcaaaaattattttattgctacaaaatgtcgatgactcta

SEQ ID NO: 31657 - DNA, 999 bp, Heterodera glycines
  unsure (1)..(999): unsure at all n locations
tgtgccgaattccaaggcaacaaccagcaaaaggagccgcctatgttgcgcagtttcgacgtcggatcgaaaggcgatggcaaaaattgcatcatttcgggcaccaccagcggctgatcagaagaatcaaagaagtgttaaaatgcgaaaggaattatttaatcgaagaattaataaatataaaccttgaaaatgtcacaataattaattacttattaatatgttgacgcaaaattttgtggataaatttgtaatatttgaaaaaattcataaatattatttaattcttaatggaattatgcatgccaaataatgggtcaaaaattaggcggagttattgaaatcaatgatttttttctaaactcatatatatcatagcccgaacagtagaatatgtaatttttcctcaaagaaataaaaagatttttagttcatttaagtataataaataattaattagttaaataaacactctcttttcaccacaagtaattcaaaaaatgtgttcttaattctctcaatgaattgtcatataattaattttcattttaaaaatattcgtattattttttgacttttctatcttttgtcatacaatgagtttgcagttggcatttccatatgatcagcaaacacacaaattagaaatgtatcaaggattagaattaaagaaaggtgaaaaatctaaattaggtgtagtattaatataacgaattaccaagaaagtttttgctattttttcgaaaattttttgctgaaaatctgttaacaaattacaattaaatttcaagaaatatttccggcggcgcctgccggcaccgtcgagacccttctgttccctagaaaattttaaaaaaatgagtggcaaaattttttttcaagcaattcattttaaatttttggtccaaaatttatgtgtaagtcttttaagttacaatgccatttcaaaaactttctccggncgcaccaggcaccgccggcactccaaattccccttca

SEQ ID NO: 31658 - DNA, 1176 bp, Heterodera glycines
aaaatagaagagccgatctcgaggtaaaaactagacagctaaaaaataaactgtgattcgatagagggggacaaaatatgggcctatacaaaatttcaaaaaaagttaccctcgggaaaaaattttttcccagggcaaacatttcaataattttaattcttttttagccaagtccacaatttaaggccaaaccaaataaaatttacaatattctccagaattttcccttcaaaatgagcataaaatggttttatttgctctagtattcaccaagttataagctaaaaaaaattcataaaattatcgatgctgtacgtaactaactcttattgaaaataatttttttttgacgcgaaaacttttattaataaaaaatatttctgccttctttaagagaagaaattgaaattaacacacaacatagggaggacttgaacctaggaccccccttttggtgactaactcacagaccactaagacgaaaaatccagcataattgtacttggagcccaaaattgggccgctgtgtttaagatgcaaaatttgaactttagcgaagataattccgaaaataaataaatctttgagagcaagaaaaaaatttatgccaaaaagcattaaaatgcttttattagcattgtgctagcgaattaataaaaaagggagacttttttgagaaattcacgtttttattgcagtttttcttcagtttttggcacatattttggctttttttttgagttttagcacatattttggggagttgttggcacatatatatgtacatatttggcgttttttagcacatataaatccgttccctgctaataattaaataattaaaaaattccccccccccccccgcctccaatacaatttttttttctcgtcgatgtcgtttatgccaacgcattaatcgttgtattaattcttagaggcatgcgaaaatatatgcgtatattgtattattcatagttatagccaaatgaatattcccccttcattttatcgaataagtcatattaaaataagcattgtcattattatattcatttctcgcttccatgagaatatgcatttttacttttttgtaagaattattacatttataggaggttatatttaatttaaatatggataattaaattgagtccctatgataatacggttttatat

SEQ ID NO: 31659 - DNA, 1153 bp, Heterodera glycines
acatgccaaaaagtttaggcttaactttttttatataaactgatcagaagcgcaccagattttgcaagggcatcaaaaagacaaggaaaagcaccgctatgatgctaacgccagtaactctttatttaaaaaatttttattaatttttaaaacttcactattttatttttttaatagatttttaaatgtttggattttttttggcttaccaaaacttcatcgaacctggttctttctattctctttcaaatcgccccaaattttttttacagcttaactaggcgatattaagcttatttccagaaaatctcgcatgaattctcatttttaaattttttatagatttttaaatgtttgcattttttttggcttaccaaaacttcatcgaacctggttctttctattctctttcaaatcgccccaaattttttttacagcttaactaggccctattaagcttatttccagaaaatctcgcatgaattctcatttttaaattttttatagatttttaaatgtttggattttttttggcttaccaaaacttcatcgaacctggttctttctattctctttcaaatcgccccaaattttttttacagcttaactaggccctattaagcttatttccagaaaatctcgcatgaattctcatttttaaattttttatagatttttaaatgtttggattttttttggcttaccaaaacttcatcgaacctggttctttctattctctttcaaatcgccccaaattttttttacagcttaactaggccctattaagcttatttccagaaaatctcgcatgaattctcatttttaaattttttatagatttttaaatgtttggattttttttggcttaccaaaacttcatcgaacctggttctttctattctctttcaaatcgccccaaattttttttacagcttaactaggccctattaagcttatttccagaaaatctcgcatgaattctcatttttatttttttaatagatttttaaatatgccaaaaaatgtaggcttaacttttttagtgaaaattcgatcactcatattttttgctaattgagcagaagcgtaccaaactttgcagggatactccccggtaaaggactaacttacactgaaatgagcgccgagctag

SEQ ID NO: 31660 - DNA, 1037 bp, Heterodera glycines
  unsure (1)..(1037): unsure at all n locations
attaaaaattttttaaaatttattcatctccctttttgatagaaaaagtatcagagtgctaaaattaactcgtaaataaaattcgggtgcctttcagagcactttccgaaaaaatatttatcgaattaattttgcaaaaaataaaaataaattggtgcatctttaaaaattcatagaaaatttaaattcatagttaccggacttaaaacatcacagagatgcttttcctcgtcttaaggaagtccttaaaaaatatactccgcttttgatcagtactcgaaaaatgagtgattgaattttcactaaaaagttaagcctaaactttttggcatatttaaaaaggaattaaaaatttttaaaaatttattcatctcccttttatataagaaagtatcagagtgccttatttaacttgtaaataaaattgggtgcctttcagagcactttctgaaaaaatatttatgaattaatttagcaaaaaataaaaataaattggtgcatctttaaaaattcatagaaaatttaaattcatagttgctggtcttaaaacatcacagagatgcttttccttgtcttaaggatgtccttaaaaaatatagttcgcttctgatcagtactcgaaaaatgagtgattgaattttcactaaaaagttaagcctaaactttttggcctgtttaaaaaggaattaaaaatttttaaaaattttattcatctccacttttgatagaaaaagcatcagagtgcctaaactaacatgtaaataaaatttggtgcgtttcagaaccctttctgaaaaaatatttaagaattaatttagcaaaaaataaaaataaattggtgcatctttaaaaatcatagaaaatttaaattcatagttgctggtcttaaacatcacagaggtgcttttcgtgtcttnaaggatgtcttaaaaatatcgttcgcttctgatcagtactcgaaaaatgagtgattgaatttcactaaaaagttaangcctaaactttttcgcatatttaaaaagcaattaaaatttttt

SEQ ID NO: 31661 - DNA, 852 bp, Heterodera glycines
  unsure (1)..(852): unsure at all n locations
gggaaaagggcatgaaaattagcaaaattattatttttttgaaataatttttttgctttggcaattgtgaagtgaaatcctggtaagagaccggggacggtctttggtaaggttggaggtgtaagagagagtcgaaattgtcgggtttttactcgtttaactgccgaagctctaggatttcattattttcacatttatttctttttgcatttaattttcctttttactacataattgtaccgccctcccagcgataattgatcgatgacatttcacttttcacttgtatttaacgtttgccttttcaagcgaacggagctcagtcgtcccgagaataaagccacttattgtgtgaccagcgagtgtgggaaggcaatcccgggcttgatcaccccgtggacccatccttcgggaatatgtggcacttttccctttccctccccattccgaattccaattcccaacgccagcacgaccaccgcgcacggccgcgctactataatatgcttaccccccacccctctcacaactaattatgccgtgcaacttttttccgctaattaattttccattttcatccgttgtcatagtgccgccgattgttctcctcccactttcacatgaacctttttgtacactgtgtggtgctattcttggccagaatggcattggccatgccatttcccaccccctctcccccctaaaaattatttgttgcccctcggagatttattggcgtgacaccaccgttgggcttcattttggccgcctgtcttcccttcacatttttccatgattaatangctaaactcgttgtttggaaatttcatattatcgcttttgctgcacctg

SEQ ID NO: 31662 - DNA, 1718 bp, Heterodera glycines
gccgcgattgtgcgcgtaaaatctttgcgagtgagcacggcattgccggcttctacaagggcgggctcagcaatgcaagtgtcacttttcattcttttttttgaaatcgacagcatgaactgctccaagaaaggggtgttcctggtcttctcaaattccaagcggaaaatgtttccgtcttgaacttgtgtctctcattatacgacatagtcgtggcctggggcgttaagttgcccctctgccattttctgaatttaagcaaatttttctaacattattacaatttgcaatattgcgtaattagcattaacaaattatacaaaattcctgaatggccgcctaattcccccgcttctctcctgatttatttgaaaattgcgctggttaaaggctcgcggcctatgcaaagccgtgaataattttgattttcctggaaattgaaatttgccagcaacctttccagtgccacaattattgccttttgtttcagattcttcgcagcaccggcggcgctttggtgctcgttctttatgaggaaattgcaaaatttacccccaattaatgaagaaaaacaccggatttatgtttcattctcattcattgctacaaaatgcttctcttctcctctcattgctcaatccgtgatctgttcgactttctgcaaattattttattcaaattccttctctcctttccttttgctgtaaattccaattttgccaattctcattttgcaattttcggttattttgttgtgccaattccttttgattattttttgttttgtttcttctcctcacttctttcctcctcgtttttttttgttatgcaatccaaaataagcaataaaataaaaataaaactttctccgcccaaaaggataaataaaacaatgtttacggaaaacttttttcagaatggtttgtttttaacggatttgtgtaggcaaattataacaaaagtgaaaaacattagctttctccctccataatcattcattaatcctcatccatcttttcgtttaattctgatcgactcagttttgctttcctgaacttcctcaacaatccctcctccttctgcaattggtcccattccgaaggcgcctttcgcacgcgccgtttcagtccattctgaatattaaaatcgggtcaaaagcagaaaaatttgctgaaaagaagaaaaggtcccttgaaaatttgctttcgagaacccccccccccccccgtctcatccgtcgtatggcgtttggcctatgccactccttaaatatttacgaaaaaaactaccgaaaataaaaatgagaaaataattgtttatcattaataaaaaataatttttaaataaaatctactttaaaaggaattttggaaaataaatttttgaaattttcgagccaaaatttttcagccttttaggagtgcgtctcgaaaatttttaaatttataataaatcacatatgctcaaactattttggctaatcctgaattccgattctaattaattcagaatgttcaaaatggatttctaatttgtcggtcagcaactattatataatttgttatttttctctatccgtccccgtccacctgctgctgttgtactccattttttgcggttgttccgcgcttggccatgcttgggccatttgtcctctctttcccctccttccgtctcttctccccttcattcgtcggtggttttcgtcccccaaattt

SEQ ID NO: 31663 - DNA, 1296 bp, Heterodera glycines
ttttccatgtttcagttggctttgcagcgacgtttggatggacattctcccatcttttgaccatgcccaactcggactcaaaatggcattgctttccgatcgtttcgacattttagtggacaaacattttgatggcaaaagcgaattgacaatttggagaacaatcgcaattcacccgggcattgaaatgccaaaactttttgtcgaaggcaaatttgtggcatttccgatgccggaccgtccgcttcccaacaaaatcctctttcataatcttgagattcggtcagtcttaacttttgtgcacattaaagcattttaatatttcttcaggtacattgatcattccgtcattgaatttctccatgccaacaagcaaatttgggacagaagtggcaccaatttggaagtgtttgtgtgttcaaacaacaaggaagatgagcagccaatttggaatgtttgggcccgtaaaatttggccaatttttgctaccaacgttcgacatttatgcattcctaatggtgctcatttggacaatttgcgtcgtctgatttcaccgacaattctcactgatcttgaccaactgaattcaatcgatgccggtcttctgttcccagatggaattgctgacgatggaccaaatgcaactgccgggcaagcgttgaccaaatggttacacacaccgagcaaaaatggacaaccgaacgaattgtatcgcgatgcttgtttgaatccacggaatctcgaatgggtcaacaatttcaaagaggtgtctcgccatgttttcgtcaaattgttttttttaccaatttttgtgtttagaaatttcgccatgccaccacttctgtcagttacacaattcaactttatactattgtggaaccaacgccaactgaacaatttgaattggtgaatggacggaccaatgagaagctgacactgaaacacagcaaagagtccattggatcagtgtataattggctgttgcaacggtgcccaattattggggagatggcgacgacggcggcagttaagtggaaaaaccgcgaaaattcgggtgccaatttgaacaatatcagatttgatctccggacttgcaattatttgtgtgccaatttgaacaatatccgatttgatttgtgggatggaattcattgcattgggtgagcagcaacagcaatttttgattgccgtaaagtaaaaaagtaaaatacttttaggccattgtcgtcaccagcagtggaagaagaagaattggattaaagcaatggaaattaattatatttgataaatgatcga

SEQ ID NO: 31664 - DNA, 773 bp, Heterodera glycines
tttatttttctttcccacagcaaatgggtcgcaatggtaactaaattatgaaattagccatacaagaaagaaaattttgatttttcgcgaaaatttactattgaatatcattggcaattcacaacttattttaagaattataaacaaaatgcagaatcattattttggttcccacatttactttcattatccacatccacaacataagaaaaaacaggaatttttccttaatgttgttgaacggcaatatgtagtttagaaattagccaaatagcaatttaaaggttggcttaagttttcattgcttttcgttatactggatatcttttctgcagtaatcaacatgcgattttgcctttttctagatgtatacaatcaccctttaaaaacgtcgaaaattttaataaacaaactgaacatcagctcgctaaagtgaaagttacacactactataggaaattctgaaattgccagttctgctctattttattacaaattttcttctgtagttattggatttttgccggcaaactgcagttaaataggttttctttttatttattgcagcttttcgcatttgaagccgcttaaaaattaattagaactgggaaatttttcaaatgtaaatgccataaatccggtttatttttctttcccacagcaaatgggtcgcaatggtaactaaattatgaaattagccatacaagaaagaaaattttgatttttcgcgaaaatttactattgaatatcattggcaattcacaacttatttt

SEQ ID NO: 31665 - DNA, 1183 bp, Heterodera glycines
aaatgttactcaattatgtacacaccgtccgaaaaaacgagatgtgtaccaataaatagagagtgccagagaaaaaaacatctctttttttggcgtactatttctttatctctgttaatagaataacccgaatttacttcgtctatagaactttttttccgccttacagattttctttaaattttgcaaatcgatagagaaaaatataaagaattgttcaatcgcttttttaaagaaaacaatcgcttttattttggtctaaaatttaaaataaaatttcgaactcctataacttttttctaatgcatctaaatgtctagcttttgcttagaataagcttctcctcaccaagagctttcgaatgataccaagtttgtccaatttggttggcaaaaaccttcaaaaataattcccaaatatcgtgattttttaatattttggacaaaaataaatggaaatattcatgttgcacaacggactcgaaccaccaccctttgtccctttactatcttacaaaaaccactgagccacacacgcaaatcttttttggtacagcagctcagttaaaagaatcactcgagaggccaatacttcgcccaggctcgcatcaattcttcaaaaacaaatctaaaaatcaaaataaaatgtgaatcttttgaaaaatggattttgacttttttgttcgaatccgggtttggggttcggaatgggccaaaatcgtggcgcgacgtttgcggatttgacatttgcggacccgacatttgcggacccgacatttgcggaacccgacatttgcggactcgacacttgcggacccgacaattgcggataaccccgacatttgcggacccgacacttgcggacccgacaattgcagactcgacacttgcggacccgacaattgcggactcgacacttgggaatcacctttttaataaaatcgtgttaaaataattagaaaaatcatttttgaattcaaaaaaaaattattttttaattaaattaatttaatatggacttttcaaggcaacaaagtcgttgattctttatttgaaaaaaagaaaatgcctttcccaagggccaacgggaaaatgtagttaattactccacatcgggcccatcccaattttcaaaatcatttcgcatcagacggtattgcaacgatctcagatgagtaaggaat

SEQ ID NO: 31666 - DNA, 1104 bp, Heterodera glycines
tattaaatatttataaatctcttttcgttgcgccttagtcattatgtttgcgcaaatatgccaaaaaattcgcctctccacgattagcaattgcccttccccgttatttgaattacgctttcccttcaacactgagaatgtttatattagttgcgctgttgggttaatcgtcggtagccaaaaagggatttacggtcagcagttcaagcactatggcaaaaaatgaagatgagagcggagaagaaatctgagacgtcagaattgtcggcaaattgggttgactgtggatgggcgggatcaaaacgataaatcgagaattgactgtggttttgatcattcatcgccttttgtgtctccaaaatttttttatattttcgtttggacgatttgcttataatagaatacaattattgttttccagctaacaactgatcaacaaaatgtcggactccagtatggatgctatccgtgagttgcaacgagcgttgcgcgaacaacagagaacaatcttctttttgcgaagtcaaatggtggaccaccgtgcggtcatactccaaaatgttgcgcgcacggaagccctggagggctacgcggcgaacgtaattttcaaaccaaattttgaaatgaattttaatcagtcatatagttattaaagtataaatttaatttggaaacatttcagagtcgcgggggcagattccgcccccgctattctccaatggtttcgctggagatgactcatcttggacgacggctcgaagagcgagagcagcgctgtcgtgctcaggctgaaacggtggatgccccagctgcaacagagagcgctgaggagggaacatcttcgagcagtgctccttctaatggtccgttttaagacaaatatttttctaatttttaaaattttcaagtccaaggaacttccggtccgagtactggaatggtacctgtcaacgctgagttgccttcaaattgtgtgttttaagtaattattttaaattatttattaaatattattaagcacaagcaacaccgctcagctcccgggttaacaatggtgtgccattgccttcaagtatgttggcttaattcatttgaaccaaaaaa

SEQ ID NO: 31667 - DNA, 1460 bp, Heterodera glycines
gtaaaaacggaagagccgatctcgagttaaaaacatcaactctcgaaaaaataaacaggggattcgatagagggggtcaaaatatggcctcatcacaaaatttcaaaaaaagttacccacaggaaaaaatgttttcccatggcaaacatttcaatactttaattcttttttagccaagtgcgcaatttaaggccaaatcaaataaaactaacaatattctctagaattttttttattaatgaaaaaataattctgccttcttctttaaaagaagaaattgaaattaacacacaacatagggaggacttgaacctgggaccccccttttggtgactaactcacagaccactaagacgaaaaatccagcataattgtacttggagcccaaaattgggccgctgtgtgtaccaaatacaaaactaagatatcatatgtattttaaattgaaatttttttattttcacaaggatttgatattttttgaattgaaagaaactgttttattttcacaatttaattcgataattaaatttagctatcaatggtacaaaggatctataattaatagaaaatttggcaaaccttttcatgcatattaaaggaaaggaagattataaaaatggatgggatttatatatttatttttttatccactaatatttttttatcgaaattttttagttttatttcgaaaaattatttaaaactcttggaatttgaccttttttcaaatgcactaaaatatgagcattacttaatatttaggagttagttacatatttcttaacaatttcgggaaaaaaggcacgaaaaaggtattaaaggctgttccaaaattacgtgcccggcattatgcaccaaaatcgcagcaccaaaattagctgactgcgtgttcactgaggtattgtcatatgagattgtccacttactgatagttcgctaaccatccattagcaattctcaactcgattctacgcaaaataatccgagttttttacctgataaaaaccgtcaaaattttccttctacgcttatttagtgatttgaagccggattttgttcaacaatgggtgaaacaatgaatgctgtgatgctgtgaaatttttgaaactcatcgacatctgattgttttttggaatagccgattttaaacaagtccatcagatcacgaagttgattcattgggacttgaactttctgcaataaatacataatcatctattgcatatttttcatggcaaaattatattttttgtgaagcccattaaaaatttcctggaaccataacggaaaacgaaaaaatcgcgacaggtttcccgcttatttcccgttgccgccaaattcccgtcaatttttgcgcaaatcccgacgcaaacataaaaaatttgaatttttcataaatttatttaaatattatcaggtggaaaatatttaatattaatacatttctttgaacatag

SEQ ID NO: 31668 - DNA, 1045 bp, Heterodera glycines
ctctcccgctctctctctctctcccgctctctctatcccgctctctatctcccgctctctctctcgcgctctctcttccgctctctctctcccgctctctgtcccgctctctctctctctcccgctctctctctctctcccgctctctctctcccgctctctttcccgctctctctctcccgctctctctctctctcccgctctctctctctctctctcccgctctctctctctctctcccgctctctctatcccgctctctatctcccgctctctctatcccgctctctcttccgctctctctctcccgctctctttcccgctatctctctctcccgctctctctctctctcccgctctctccctctctcccgctctctctcccgctctctctctctcccgctctctctctctctcccgctctctctctcccgctctctttcccgctctctctctcccgctctctctctctctcccgctctctctctctctctctctctcccgctctctctctctctctcccgctctctctatcccgctctctctatcccgctctctctcccgctctctctatctcccgctctctctatcccgctctctctctcgctctctctctctctcgctctctctctctctcccgctctctctctcccgctctctttcccgctctctctctcccgctctctctctctctcccgctctctctctctctctctcccgctctctctctctctctcccgctctctctatcccgctctctatctcccgctctctctatcccgctctctatctcccgctctctctctctcccgctctctctctctctctctcgctctctctatctcgctctctatctctcgctctctctctctctctctctcgctctctctctctctctcgctctctctctctctctctcgctctctctatctctctctctctatctcgcgctctctctatctcgctctctctctctctctctctctctctcgctctctctctctctctctcgctctctctaactcgctctctctctctctctctc

SEQ ID NO: 31669 - DNA, 1237 bp, Heterodera glycines
  unsure (1)..(1237): unsure at all n locations
gacttatatgcggatttgacgggaggtgtaaggcagctatacatttatgcaccaaatntaatcgaaaacacaattatcggcaaccagatggccncactcttaagaatagttaacgtcgtcgatgacccgggatcaattagtgaagttatatatagcaccgagtattttcatcgtctacagtcgaaacgaatttcagaaattacaattgaaattcacacaccgtttggtgaattcgttaaatttcactggggaagttgtattcttacattacattttaagaaaagtatattttaaaaaatgacacatgtgtttttcgatcccgagtcggtcgattggtcatcttttatcactccccagcatggaagaggacagaaacaatattttgtcggaagcaagtatcaacggggattcggtttcctcggtaatgtggcacgtttcttgacccctattgcgaggaatattgcctcgagtgcaggacatgaggggctcgccgctgggcagagagttctgagtgacatcgtccagggtcgtgatttaagggatgccgtcagggaacattcaagacaggggttgactaaccttaccgattaatattattttaatcattaaaaatattttagttatataaatgataaatcgaaatttattaatgctctaataaaaaaatcatttgataatggattcaacagaaacggaaaaattagcactttgtggaaaatattttacttacagatttgaatgtttcagacgcggtgtagaatcttaaaaaattaatattatttaaatcttttataagatttacgcgatacaaattaaggaaatagtaaagttcatgtgatcttgatagaaaatggataaagaaaaggtggtttattgaaaaaaatggtgttaattcgcgtgcagaatctataaataaattaatattattttaatcatttaaaatattttagttatataaatgataaatcgaaatgtattaatgctctgataaaaaaagcatttgataatggattcaacagaaacggaaaaattagcattttgtggaaaatattttacttacagatttgaaggtttcagacgcggtgtagaatcttaaaaaattaatattatttaaatcttttttaagatttacgcgacacaaattaaggaaatagtaaagttcatgtgatcttaatagaaaatggataatgaaaatgtggtttattgaaaaaatatggtgttaattcgagtgcaggat

SEQ ID NO: 31670 - DNA, 1192 bp, Heterodera glycines
taatatttcatcaaaatggattcattatttgttacatattgtcattgttagtgctcatttggtttgatacgtgcgttttcctcaaaagcggcgtgaaagtggacaccaaaaatagtgtcactgaaaagcgcaaaatctgacatcatttatcaagcgaaaaaatgaaatgtcgtcggaaaaatgtcatcttaattgtcctcactcatgactctcgagtttctccaaattctaaattaaccagattgcaaacgatggcgactttttgccggtctgctcaacgatgccaacttttttatagtaaataaattttaattgctccattttcgactgtggcgcttgtcagtctttttcctcagccctccgtctcgcctcaatacttgctccgtcttcgcatgctcctttttgcgaaattttgcttttaaacactgggactcaattgtcccagtgttcaggtggcatcgcttcgactttatttcctgatttttagattaagctcatcaagagctttcaaatggtaccaaatttgtcaggattcgatcgtttaaaaaatttatagtgcgaaatctctcaatttttcgagttttgaaccggttcaaaaaccggtttttttggcatttccgcaactcgcgacatatttttccatgcttagctccttgagacgaatcgattggtatatcatttgacccttttttttcacgggtcgttcactacagttcacccgaaagatttatcgctatttgagtttaaaatcacattaaagaaaataagtatgtatatagatagaacactttacgtgaaaattaagtcactgacgaaaatattcactgtcgaattcgatcactgacgaaaaaatggatggcaatgagtttgatgagtggcttgtggaattaggccggttggcggaagaattttggcgattatgatgccgtttttcaccatttttggttccaagtttctgaactttacccatgcgaaaattgatctagcatctctgtattgtccgctaatttcaaacatttgcagatttcggaattttgcagcatatgattgagttgaattttaagctattttatatgttacgtgtgaagtagagtagagcgggaccgggaccaaaacacggacaactgagtacaactgagtaccgaggtcccggttttgaccgggaccgggaccggtcccgggttttttcccg

SEQ ID NO: 31671 - DNA, 1993 bp, Heterodera glycines
tacgatttattcacccatttcattttttgccagatttgtcgactggttcagctaccatttgtcaaactttgagtatcgttggtcatggagtgattggattgaatgtgtcgaggttcgttttttttttttgaaaaatctgttccattatttcgatttttaattttcttaaacctccctcccaaaaatgtttttttaaattttcacagttggattcattgcatccaaagcgcatttttgtacgtgaagtcattgaaaagtgtttgcgcttttcataccacaaaaaattggtcgaatttttgccctcagaattggcgccgatcattccgggcgagctgaacatcatttacattcttgacgaccgtcagtttttgcatattacccattttagaaaccttggtgtagtaccaatcaaccagtcatgccaatttccaatggaaatttgtttttccaatacaaaaaagggttccagttttcagttagctatagtttcggtatcagatagtccattgtggctgcatgattcgcgtccgtcaaaaccctggcggtgaaaaacaaaaatgcaaattatttagctgatataaaaaataaattgtgccatttaaagcaatttatattttttgtatatttgtataataaactaaatacataaattaataatattccttttattttaaactttacccaccgcgagagcgagttgagcaagcgacgaaaacttggaactatccaaaacaatgagaacataaagcgtgacatagtcctccgaacaatgtaaaaaaaggaagaaattgcgcggcaacagcaatgaatgattacggcacaaatacgcacagacttttgttggtccaaatttacggtctgagaatgtggactccaaattctggatggaaaaaccataaattatttattaatatttatatttttatatcaattttggagcaattttaccaaatttaagttgaaaatgatagtttaattttaatattaaaaaaggtaattaataaagctaaagccatgtgaagagaacgctttgtcccgcatttaactgcgcataatgcgtgcgctaggcaataagcaaatgaatgataagacagagaataaggagaaatacaatcatcagagatctaagcaagataaagctaacttatttttgaaaaaaagaagtttaaacttgaagaaagcctatttcaattgtttgatctacgattttctcaaccaaatttagttcaaaaagaaaaataagatctcaattgcacaaaagtaaatggacattttccattatatatttttaaaaacactttcacgcattacccaaacatcgtaaggctcatgccaagtaattgcatgtttgccacccgtaagcaaacgacacagaatggcactggttgtaagcatttgccgaacgcgccaaaaatagctgggccggacccataggagcagctcatagatgagctcattaggaagccaaaagtttcgttgttgtcctttagcagtgccattcattggcgttgccagtgccggcatggcctttttgatgagtttgttctttttgggtgccaaaacggaggaatttctgcaaatggcatctccgacccctccttcatagtcttcttctcattctttgtgagcagcagcagatggtcaccatttgtggcataatccgggaagagatggagctgatcagatggcttagtcagcgagtgacctgcatgatggaacatgcaaattttgttcccgattatcctcgctcattgttcaaaggagtgataaataagcaatttgtgcacgatttaattaaagacgaaaagggcatcgtaaggaataagcagaataattttatactatgcataagaaaattcaccataaatgaatgccatattgggactaaaaattacaatgaacaaatgccattggaaatcccgaattaattaaaaaatttaaaaatatgcaaaactaaaaacccccacaattttgttccaaaatgaccaaaaaa

SEQ ID NO: 31672 - DNA, 489 bp, Heterodera glycines
  unsure (1)..(489): unsure at all n locations
tggatttttattgcatgcaggtccaagttcattacatttttcgtaaaggtggatttttcctggacctggattttcctggattttcgtccaggaaatccaggtccaggtccaatgtgaaaaaaaatccaggtccaggtccaggcaaaacacgaaaaacctggattttcctggacaaaattttaaaatttattatttcaagtgaccgatgttttttttaattttcaaaaaaagattaaattaatttaaaaatacattattattatgaagtagatattttttgatgtttctaagcaattaattaattttttcaaaactttttttgatttttaagatgagtttcaaaaaatccaggtncaggnctggatncaggtntcgaagagnntggatttttnntgganntggattttttggaatttttgttaagaaaataaaggaggcaggttgaatatggaatccaggtccaggcttttttcaaaataccgagctcta

SEQ ID NO: 31673 - DNA, 1087 bp, Heterodera glycines
cattgcaaaaactagataaggactaaacaaatatgcaactaggcaggcactcgagaacgcatgggaacgatggcgagataagaagtttgagaagtaaatttactaataatattcaacagttttaaagtacaatttcttttatgtaaatcatttattaaagtacaaataatcacttattttatctagagttaccatacgcaaaaagcgataaatactgtattaaagaagttgataaaaatgaaaaatttttaattttatgcatccactgacgaaaatgttcactgacgaattggaacactgacgaaaaaaatggaaaacagcaaaataaataaaaatagtacactgacgaaaatgttcactgacgaaattatccgctgacgaaaatcactgacgaaatcgttcactgacgaaaatgcttactgacgaaaatattaaccacgaatacatagtgtactattactagggctgggatttttatgtgctaaaaatcctgaaatatgtaataaaatatgtgctaaaaaacccaaaatatgtgctaaaaaccaaaaaaaaggcctaaatatgtgttaaaaaatgcaaaaatatgtgctaaaaattggaaaaaccaagtgtatttacgcaaaaaaaaaaatcatatttaatatcagtctttatcaattttcgcccgacctccaatcaaaattttggcgatatcaatcaatttgtaaagtcccggattaatttttccatcagttgaataagttccttccgggaactttgaaatccagtgacgatttaacacagcgtttgatttggctgctttaggcatttaaatatataaagaaattttctaaatgcttaagaaacgtaaagtagtcaatttttagggtgcattttcagattttcttgtatttttttacgatttgaagcagccgactgctggcggtgccgccgggatttatttggtcaaacgaaattggcacttctgctgataggcatgggttttcggcacggcacagtttcacatgatgatgctgacactaatgaggctaattggcccccgttttacggcgtttgtttttttgccggacaattccattttcagtga

SEQ ID NO: 31674 - DNA, 848 bp, Heterodera glycines
gcaacaacagtcgccttgtttttcgccgaatatttagcgtgcagacagtccgatttcttctgttgccttttaaacaactccactttgtcggcctgtctcagcatacattccaacttatgtcagaacatttcatccccgaaacattatcgttataagtcaccagcgactgcatacatttcacacagattgagacccaattcgtgcgctttgaccaaatcttcgtcaaactctgcccgtttttggtacgcccgatgcattgcccaaaccgcttggaccgcgtaaacattgtcacggacccacgcatgcgctaggaaaacgttaaacatttcgacattcagtgggcaactcacaagggtattgttcgggattgttgacaaaaagaccagtaaccggatctaaatcactcaatcccactaatcacacagtcgcaaataaccttgacagaacaaaattgtcttctgaacgaggaccataagttggtcaagtcgaacgcctgaactaattaagaaagcaacaaaggtttcagcataccagattgacttctggcccgcatcttcacaaacacaaaggcaaactttaagaaaaattcaaaatagttgtttaattattcttgcggagctattctaataagctattaactttgacaaattgccacaaaatgagagagcggacaaacattcaagactttatgtatacacgggtcttgatttacgctcgatttaaaaaaaaattggccagtttgtatgctccttttaatttaacaaattaaataattaaacatgaaaattaagtgtgggaaattttttgaggaaaatgattattgacaatcactgagaaacatttcactt

SEQ ID NO: 31675 - DNA, 1417 bp, Heterodera glycines
  unsure (1)..(1417): unsure at all n locations
ggaaacatgatttcaaaattttcaatttttttctagtctaatctactcaaaacggttcagaattcaataaaaataacattcacggtgcgaaaaatggggtttgaaaagtttattggggaaaaaaagactntacaaaataatacccctgggagaagggagtgggaaacatgatttcaaaattttcaattttttctagtctaatctactcaaaacggttcagaattcaataaaaataacattcacggtgcgaaaaatggggtttgaaaagtttattggggaaaaaaagactttacaaaataataccccttgatgggatgcactggttgatccaatcaattaatttaatattttatttgggatggggcgacaaaggacacaaagtggaaaatttggtagatttctgatcacaattgatcaatatccgcgatgcttcgaatgcccgagttgtgatgtattcagagcgagttgttgtccggcttgatgagtgaagagaaccgatgggctagcagagtgaattggttgaagcatgcttaaactgaaaacccttcccctttttataccaaaattttttggttatttaatagcattcaaaatttccacattatctttttatggttttttcatttctaaattattttttatcgttttagttttttcttcccttttatttaagaaaggaaaacttttcataaacaattttaattgcttttacgttcaaccgttttattgtggaataaatttatttattatttggggcgttttattagattatttttagtttttattgcgagaagcatttgcttcgtttttatgaattcattttgttttatttatttattttattttacttttattttatattcctttatttatttaatttaattttaaaaataaaaattttatgaaatgtttattttattttggatttatttttattaatattttgtattttcatgtaaaattcttattattttaatttagttttgtttttattaatagttttatattttttcggatttaatccgacactcccaacagaggaagatttaggtttagttttggtcttccgtcggaagattattcttatgattagaggccatactattggacccagaaaaactgcaaatattaaaatgactattaatggtagtatgaaccaggcaatccataaatttgactttaagaaatttataattttagaaccgaaattcttaatattattgattatttcatcaagggttataccagtttcgggattttgaatagtattattcaaattcgttttttgttcttcctgttgttgtacgtaaaataattttccttttatttctacttcactattacctcctggacatattagcgagcatttttcattgatttcttctatattataagttagttggataatctgttcttt

SEQ ID NO: 31676 - DNA, 625 bp, Heterodera glycines
acatacctgcccaagggggtagtcaagggtgggagtcatgacgtcgaacgtaaggggtcagcgggtgtcgaacgtaagaaatcggcgggggagggtgggtcaaaagaggaaaaaaggagagaaaaaagaaagaggaaggaaaaaggggaaaagcgagaaaaggcagcgtcgaaatcaaggaaagtgccgttaattacgttcgattaaccctgaggactgggttttgtcgaacgtaaaaaaatgaaattaactaatttccattaagaaattttgctaagtgtttcaattcagttacgttagacactctttctttacgttcgacgaattctgctgaagaagattcgtcgaacgtaagaggagtggctgaaaaattcctaaaatttttcctgttttttaaataattaaaaattcctaaattttcttaaaaaattgactcaaatgagcaaaaaatcggtcctttttttgacaaaatttgttaacgaattactagtacactcaaattgtcaaaaaaattttcccggcgttttgtttcttggtttttaaaatccaagctctgaaaatgcttaacgagaaataaaccctcattttttattaagctcagccacactttccacaacaaaaaaaa

SEQ ID NO: 31677 - DNA, 1051 bp, Heterodera glycines
acaaatttagggacctctttgtgggctgatcgcagctccagagaatttaagaagcacgctaaagcttaacgatgtgccgtggtggctatgagagagggtgataatgatatttggaatacaatttagtgagcttttttgcgggctgatcgcagctccagagaatttaagaagcacgctaaagcttaacgatgtgctgcggtggctatgagagagggtgataatgatatttggaatacaaatttagtgacctcttttgtgggctgatcgcagctccagagattttaagaagcatgctaaagcttaacgatgtgccgcggtggctatgagagagggtgataattatatttggaatacaaatttagtgacctcttttgtgggctgatcgcagctccagagaatttaagaagcacgctaaagcttaacgatgtgccgcggtggctatgagagagggtgataatgatatttggaagacaaatttagtgacctcttttgtgggctgatcgcagctccagagattttaagaagcatgctaaagcttaacgatgtgccgcggtggctatgagagagggtgataattatatttggaatacaaatttagtgagcttttttgcgggctgatcgcagctccagagaatttaagaagcacgctaaagcttaacgatgtgccgtggtggctatgagagagggtgataatgatatttggaatacaaatttagtgacctcttttgtgggctgatcgcagctccagagaatttaagaagcacgctaaagcttaacgatgagccgcggtggctatgagagagggtgataattatatttggaagacaaatttagtgacctcttttgtgggcggatcgcagctccagagattttaagaagcatgctaaagcttaacgatgtgccgcggtggctatgagagagggagataatgatatttggaatacaaatttagtgacctcttttgtgggctgatcgcagctccagagaatttaagaagcacgctaaagcttaacgatgtgcccgcggtggctatgagagagggtgataatga

SEQ ID NO: 31678 - DNA, 1034 bp, Heterodera glycines
ttctttttttaatttatttaaaatttaaaattattttcccttaatccgttaactgtaagtttttctcaaattaatttcgctattttcggtttcaattgtttttaaacttacgagaagtgtctcgattctgtttcgccttgtgcgaaatttgagaattggcacacacaatcgaatcgtcatgagtcttgtttctgttgaattataagtgacgccaacgcaactataaatatatttttttcacaaatattatttgagaaaataataattttcataaaattaaagccaaaaaaataataatttttttggcggtaaaaaatgaaaatttaattgtctcaaaatcgtcacttttgcaattacgttaatgtcccaatcaaaaagggaaaataccgtaaaagcttgttgctccggttaatgatgacgcagctttgggtcaatcgtccttggaagtatcgttgatcatacacccggaaaagtgcgagtacgtcgggtttgaatccgtcaattccaggccgggtccaccagattgaactcggacatttctaaaatgtttcaaaaattttgatcggtgggaagaaattaaagtttaatttgaatttactaattttttaataaattttcaatatttcttggtcgctattttacaaagatttccggtccttatctgtggagttaattaatttttgataattagttgaagattactattttatttaattttcacatatatcgaaattacctgtcggaatatagccttctatttcactatttccatcagatgcattgctgctttgatcaactaaatttaaatacccattaatttaccgtacacctgcccgcaaaatattacttttttcaaaataaagcaaccataacactccaaaaatagaatttggttaaaatccgaattaaaaattttacaatttctgcttcattctctatacccctaaatttggattttttcgcccttattacggccttattttggttttttcgcccttaaaaatccgatccatatttaggtcctaggaagaaag

SEQ ID NO: 31679 - DNA, 998 bp, Heterodera glycines
ttgtcgtcccatcccaaataaaatattaaatcccttgattggatcgaccagtgcatcccatcagtcaatgaccgcgtaaaccacctttaaaattatatgtataaaacattaaattatcttcatttatttattgatcttgtcaaaatagcaatgaaaaaattataaattacttctagaaaacttaattaatttttttgaaagtcaaattaatcactttctggtcttttctttttgttttttgaaatgattgatatcttcatttttatggctcgaaaaaaactttcaatttttcattaaaaaaaatagtaaaagcagcgaggcagatgtatttatatgaggtaggttcattttttaaaatattttttaatatatattttataaaaatttatttatattaaattattatgtttattttcattttaaaatatattaggcatgagattgatttgtgatttttaccatggaagcttgctatcagaaattatgtttttttcaaagaatggtcattttttacttttatttgcaaaaatacgttttctaagtacaacttggaaataagtgcaacatatatcatcattttgacaaaaattgcctaaggacaaaacgccaaaaaaccccactaatttaaaaattttgccgagattttcccttgtaaaaactgaagagccgatctcgagctaaaaacttaagttccataaaataaacttggaatcgctagagggggtcaaaatatgggcctatgcaaaatttgaagaaatttaaaaagctagaaaaattttttgaaagggacgaatatttttaaaaacaatgataaaacatatagtgtctaactcagctgtctgttttttcattggcgtattgttcaccattaacttttaatagtgtctaactcatacagtgtctgccgtttcttcacacttattgtttttttaactttcgcttcgaaactttattttttttataatgttaggcaatttttgtcaaaatgatgatatatg

SEQ ID NO: 31680 - DNA, 712 bp, Heterodera glycines
acaaatttcttttatttttcataaataattttattttcatttttctaagatcgtgtcaagcgagagaaggaaattcttcttcagaagatcaaaggcgaaaaagtaaatgcaatgatattaaaataaattttcagttttttatttatagtaaatttgctaaataatcccgaaacattttgatttatttaaaatttataaatcaactattattttaattatttattttattaactataaaatacattggcaccgccggaccccattgaaccattattttttgaaaatttgaattcaaaatggcaaaaataaattgtcatttttggtgcaaaatcgctacaaattcctgttttttcgccccagtgctgaaaatattttgaaaaattcattggagaaaaaaaaaacttttttggcccgatgagcaaaaaaaaataaaataaataaatacaagctcttcgggtgcattacccgaattattaaaatttcttagcaattttccaatggtttctattgtcatttcgccaaaccataaatttttattgactcaaaaatcgcaaaatttagtttggatttaatttattgcattagaaatttttgtttgaaaaataaattggcaatttttattaaaaacacatttgctaatgatttacagttgaccactgaacaaattcttcgtgccgagttcacgcgcgaacgaaatcagctggaaaaggcg

SEQ ID NO: 31681 - DNA, 955 bp, Heterodera glycines
aaattaagaaatacaacaacaaaaaaacagggcatgacaataaattaaaaaattaaattttttcatttgtctttgttaaaaatattgatttatttgatcaaataaatttattaggtatttgatttttatgaattcgatttttggtattatttaataatttaattctgcatcctatttaatgtttaaaaccgcgccaaactcgtacaaaggcaaatcgtgcaatggcttagttaggcctaagctttaggcaaggccaagacttaaaattagaaaaatttattattcatttagcaatattttttgcaaaatcacaattaattaaataaaagttcaaatatttaactatttaaaaaaagtatttcttctatataaataaaatattttttttagttagttcaaaagaaaataaaaaagtttgaaaagggctttagttaaaatatgttttttaagttttggactcatttaaaatttttaaagtttttttatgaaattaaatggtcattacttagaataataataaattttcattgaaaaaagtaataaaaatagaatttaatgttcaagtacactgtaataaataaattcgcaaattttaggggctcaactaaatcattacccacaaattcacaatatttaatatgaaaatgcttttatattttaagaattaacggaagtaaaaattaaataataatataaaaacggctttatttatatgatattttattcttgcaaataatgaaagaactattattaattataattgaagtaatattaaaaaaattacttatcaattgttggatctgcatttttggcttaattcattttttcatttatttatttgtttctctttttttcttcgtttctttgacatttcctatgttgtaatttccctggcccttctgctcctcactcactcataaaagtgaccccttcgtccatccatcggaaaatattc

SEQ ID NO: 31682 - DNA, 1810 bp, Heterodera glycines
agttggcatgtcgtcttgctgtgaagacatttttagctcgcgagttaagctgcggcgactcatcatatcaattggtgttgatcttcgaactttttgcatggcaaatggaaaagcaaagtgccgacaaatggtaatggacacactgggacggcactcagacaatgaaagagcattctcgacgaagaggtgtaaattgctttttgcgtatttaaacaattcttaatgttaataaacccaaacttatttcagtcggatttgctgctgaaggacggcgtttcctcggagagtctttctccggcagagtcttccgcttctcttctgccgcgttatgtgcgcgtgaacaccgtcagaatggccttcacacaagcagttgaactgcttgaacgggacgggtggtgcctttgtcgtttgaagaagcgcattacgccaagcaaatatcgaagattggtgtcaacattggagtcgcctaaaatttacgtggacccgcacatttacgacttgttgatattcccacggggggtggatttgcacaacaacaaattggtcaccgatggaattttggtcctccaagacaaagtatcccactaaaatgttggcacttttcatttgtctgttttccctaggcaagttgtctctccgcctttgtgcttcagcctgagcccggcgcatcggcgatggatgtttgcgcagcgcccggcatgaaaacgactcatttggctgccttaatgcacaaccgcgggtcactttttgatgcacttaagtggacacatttgtttcacattttcagaacgatatgggctttcgatcgcgatcagaaaagggtggcagtgctacgacaaatggtcaagcgaagtggcgcagggattgtgacggcgcaatgtgcggatttcttacgggtcaatttgcttgacgggcgatataaaaaggtattgcatcgatttttacaaagacaggaattttacgccctttttaggtgagatttgttgttgtggatccgccatgttccggctcgggaatggcaaagcggagcgagcatttggacgaatttgaagagcccgatgagcagcgtataaaggcactggccaaccttcaggtaaagccaactgcaaattgggattttgcttttcaatttcgacccgtttcctgagggttcgcgcctcacctcatacttttctttctttttgggtaatgcttcttcggcacgccttccgtctcccctctctgcagcgtctcgtctactccacttgctctgtgcattgggccgaaaatgagggagtcatttcggagattttgtcctcttcaccactcagtgagcatttctcgctggtcgaccctttgcctcaatggcgccaccggggacaattgggccaaagtgggaacgccgaactccgcaaatgtttgagggcgtcaccaaagagggatttgaccaacggattttttgttgcattgtttcaacggagaaattcataaacaaaataactattctaacggatacttttcttttttttcactgtttactctattttccaatattaaattcgaataataatttcctacgcaaatgcctttttcatgtttctccagtcgaataaattatctttttgccaacaattcatgttttaatcatttttatgatacaaaagtgacaaggtgatatgttgtcaaagtgtctccgctcgtcaatttttggctgctttaattgtgcgctccaaaatgtgtcttctgctggcgttttaatgaattcgggtgtcaaattctgtttctgttcgtcctttaaatacgtctttggtcctttcagttcgccatgcgg

SEQ ID NO: 31683 - DNA, 1206 bp, Heterodera glycines
aagtccagaaaggaatattttaaaacgatttcgttttgttttggcattatgataccgaataactttcggaaattatggaaacaaaattggagaaattcgaataattttttgactgcaaatttttttccttttttgaattgggttcaaaaaaattttaagagaatttttgattattattttgaagtcttgaatttatttgacaaatccaagacttaaaactgggagaagcaaggggctgtggctgggggcctaaaatttgggccacattggagaattaattctgatttctgaaaaagtcccagaaataactattttttctttccatacgttcttgtagagctcgagctgctctttccaatggtcttatcgcggtctcgatccgtgccgaactcacaaagttatggagtgaaatgtgaaatattgttttcaccacaaggcattttttctgaaaaccggattcaaaaatctggggtttggtataaccgttttagaaatagcgtagaaaacagcttcgatatcaagaaaccaagtcaagtccagaaaggaatattttaaaacgatttcgttttgttttggcattatgataccgaataactttcggaaattatggaaacaaaattggagaaattcgaataattttttgactgcaaatttttttccttttttgaattgggttcaaaaaaattttaagagaatttttgattattaatttgaagtcttgaatttatttgacaaatccaagacttaaaactgggagaagcaaggggctgtggctgggggcctaaaatttgggccacattggagaattaattctgatttctgaaaaagtcccagaaataactattttttctttccataccttcttgtagagctcgagctgctctttccaatggtcttatcccggtctcgatccgtgccgaactcacaaagttatggagtgaaatgtgaaatattgttttcaccacaaggcattttttctgaaaaccggattcaaaaatctggggtttggtataaccgttttagaaatagcgtagaaaagagcttcgatatcaagaaaccaagtcaagtccagaaaggaatattttaaaacgatttcgttttgttttggcattatgataccgaataactttcggaaattatggaaaccaaattggagaattcgaataattttttgactgcaaatttttttcctttttgaattgggtc

SEQ ID NO: 31684 - DNA, 1357 bp, Heterodera glycines
ctcctcccctatttttccgttttgtcccttcttttatcctcctctttgtttcttttcatccgaccatccatcatttcatctttcaccccgctgtctgttcatctcctcactcacttcctccgtcccaaagcccagcccaagtcgtgccagtccgggctctgtttgctcatcgaacgaacaacccgattggcgactaccgactgaaattgttgcgatggctttttgtccctcttcttttaatgggtttaataagtgcccccccgcgtgtcattcatctgaatgccctccccctttttatttcgtcccccttcccggtgctttgccctccctcccccaaaggtctcaccaaaattgggtcagtcccgtgcgcttttgccctcctcatcgcttcgcctcctccgccggccgacgatcgctttccccacgcccagcccaaatcgtcccaatttgcgctgctctgtgccgacttttccgaatttggaagtgaacgttttccccaggcccagcccaaatcctcccattgtggcgactcggactttttcagaacgtacagacgccgattgtcgacggaattcggatctaaaatgatttttatccaaaagttataatggaccaaccaaatctgtccaaagttccgaaatgccaaccaaacgccgaagggaaggcgaaaattggaagaagaaaaagcaaagaaatgccgttgagaggaaaggaggggcgacccatggacaagctttaactgtttggactctgctaaatttgtgggagatgcaatgatcgtaagggaaatgtaaaaattgaaacggacgaatggacggaattagaattattagccaaatgaatgtggaaaaagggggggggggaagacgcgagggattggcagggccaacttttgggaatgaaaagcaacgactcgtgcgcttagtttagcaaaacatcacagcgaatggagcagggagtatgagaagtgtgagatgattttgggaattattaatggaagtggtggcacgggggcggtaattggagaagtgcggcccaaattggatggattttgacggagggggggggggggtcatgccgcaagaaagcgtggggggacggaacgaatgccgacgaaccaaacgaacggacggacgaatgagcgaattgccccccggggcacaaattcccaccaaaagttgtttaacttatgtttgcacttcacttgcaaattgatctcatttatcagtggtttagcgttcctttttccttttgctctttttttgcattttctttccctctcaaaaaaataaattagcaaaaaaaaatgaattgcgatttatttcggtccggggcgataagcaaattaggcaacaaa

SEQ ID NO: 31685 - DNA, 1292 bp, Heterodera glycines
attttccaatgattgaacattttattttatttatttttgtttccccattattccccttttaattctcttgttttcctttttcattaacttgttaaatccaaaaaatttgattaaattaagttgttaaaagtcaattctcacataaaaaagctttcgatggccaaaagttgagtgccccccccccccaataaatgcgacatttccttttctttttctccttttctttttctccttttctttttctccttttccttttctcttttcctttttttatttttcttttttcttttcctttttctcttttctccttttttccttttttcttttcctttttttcttttccttttttccttttccttttctcctttttcgacacgcaaactcttctctgctggtctgtcttttttgttcttttttctttgatgcgattacatttatttcatttcattttaatcacatggatttcattaattttgatgttttaaaagggaaatgcctttaaatttcttatcacttccaaatttcccatttcccttctgataaaagttccttccgtgcttttctctgatgagcagaaaccaaaccaagcaccccaaagtgaataattaaatgcacaaaacaaatggattaataaggatgcaattaattatttataaataattcgggcagccaaatggacaaaaacggggggggggggggggaattagacaaattaagcaaaaagcgactgatatttgcatggactgacaaatgagtgcggtaaatgggcgagaaaggaatgacggatggatgataataaacaaattggcattcactgaaacattccattcattcgtcagcatttaaaaatgtttttatttaatttaatttataattaacaggcgcaatttattatttgattttattaagaacaaaacaaaaaaacatgctgagtaaagcgcgcatcattgtggaacagagcagttcaaaatttttgtcattttatttataaaatgccacttatgtttctacctctttttaggcaactccttttatttaattttccttttgctaaaattcggatataaaaatctgtcattcataatttaaataatatactaaattagtcatttttaaaaatcaaaaattcatttgtttattgataaaatgtgaaaatgtcgtatgaatgaacccattcatcttcatcttcgtttgacggtctttcgaccattttcagtaatttaatttacataaaacataaattttaccctcccgaacaaaaaaagaaaaagggatggacaataataattggt

SEQ ID NO: 31686 - DNA, 1255 bp, Heterodera glycines
  unsure (1)..(1255): unsure at all n locations
gcatcattttttgggggggggggggcgaagttcgaagcccgggcggtgtacattaattttctttgtattttttgggttaattttcatactttntaataaatttaaatgtntggttttattaataataaatttttntagtntaattaaattattttttgatgaataatgattttcatttaaattatttattatatttaattaaagaatttcagctattattttaaaatttaattgtaaaatttttttcatttcaatttaaataactattcaatcaattattatacctttcataatttgtttttcattaataaaaagtgtattatatgttaaaaaatgaaaaatataacacttcgattttttatctattttgattaaaaacaattccttaattaccataaatgctctatttgaatgcccactttctaatcactgttgtacctcttttaatcacttttgtacctcttctaatcactgttgtacctcttctaatctctgttgtacctcttctaatcgctgttgtacctcttctaatcactgttgaacctcttctaatcactcttctaatcgctgttgtacctctcctaatcactgttgtacctctttttatcacagttgtacctcttctaatcactcttctaatcgctgttgtacctcttctatttactgttgtacctcttctaatcactgttgtacctcttctaatcactgttgtacctcttttaatcactcttctaatcactgttgtacctctcctaatcactgttgtacctctttttatcacagttgtacctcttctaatcgctgttgtacctcttctaatcactgttgtacctcttctaatcgctgttgaacctcttctaatcactgttgtacctcttctaatcgctgttgaacctcttctaatcgctgttgtacctcttctaatcactgttgaacctcttttaatcactcttctaatcactgttgtacctcttctaatcactgttgtacctcttctaatcgctgttgtacctcttctaatcactgttgtacctcttctaatcgctgttgtacctcttctaatcactgttgaacctcttctaatcgctgttgaacctcttctaatcgctgttgtacctcttctaatcactgttgaacctcttttaatcactcttctaatcactgttgtacctcttctaatcactgttgtacctcttctaatcgctgttgtacctcttctaatcactgttgaacctcttctaatcactcttctaat

SEQ ID NO: 31687 - DNA, 1397 bp, Heterodera glycines
ggtggagctacttttgtttttgatgcggaagtattgccttcaagatcacgtttaggatctggtaagttaaaataataatgggaaattttttttctcaataaaaaatattaataaattattatacgtgcttgcaatttttcaaatggaatatttttctatttgctgcaattcaaaaaagttatgggcacagagctataaaactttctagcacattttgttatttgtggtgcatcagtgtgataaattcataaatatcccagtcctcgtcataaaatattgttctaagaatgggaatgtaacatcaagttactaaaagcaatcacagtcgtttctcttttccgcagcgcacagtatcctggtggcagatgatagtcgtagcaaccgtaagtaatgaattatttgattgcattctgtaactctattacctgaatccattcgttatatttctcagtcacaagcggtaagacacttgtccgtaaaaattcaatcgctgttcatattctgctgtatgcgggtggaattccgtagtaatcccgagcagaaaagaaaataagcaattctacacaattctcccaaacaaacgcgccgagaagcaaattccagaacatttagtatcggcgtaattattctgagaatgcggttgtaattcctattactgttgagcagaaaaagagataaccaattttccaaatttttcccaaacaaacgcgccgagaaacaaattccagaacaattagtatcggcgtaattattctgagaatgcggttggaattcctattactgttgagcagaaaaagagatagccaattttccaaatttttcccaaacaaacgcgccgagaaacaaattccagaacaattagtatcggcgtaattattctgagaatgcggttgtaatccctattactgttgagcagaaaaagagatagccaattttccaaatttttcccaaacaaacgcgccgagaaacaaattccagaacaattagtatcggcgtaattattctgagaatgcggttgtaatccctattactgttgagcagaaaaagagatagccaattttccaaatttttcccaaacaaacgcgccgagaaacaaattccagaacaattagtatcggcgtaattattctgagaatgcggttggaattcctattactgttgagcagaaaaagagatagccaattttccaaatttctcccaaacaaacgcgccgagaaacaaattccagaacaattagtatcggcgtaattgttctgagaatgcggttgtaattcctattactgttgagcagaaaaagagatagccaattttccaaatttttcccaaacaaacgcgccgagaaacaaattccagaacaattagtatcggcgtaattattctgagaatgcggttggaat

SEQ ID NO: 31688 - DNA, 1338 bp, Heterodera glycines
  unsure (1)..(1338): unsure at all n locations
catctgtcagaggtgtggtttatgcattttggcaactaattaacaccaatttaacgctttttctccncatggcacagcatccaattttatttatgggccagtgacgtgctttctgaacaaggaaaatcgtggagtaaatgacgaacgctttccaagcaattagtgattatctgggaaaattcaagccttaactcacaaatcagcacaactaggaaatcctgaattcactttatcttttttgtactttttttggcaaaataagtttgacaaaatggttaatttattttgaagaatttttttatttaaagtccaatttttcggaattcaaaaagtccgctatcccgtactgatgatcccacaataatgttcggtttcttatattaagaatttctgtgccactatttgtaaaaaaaaaattttaaataggatttttaaaaaagcaaaaaaaatttttgaatgcgcttccgcgtccgcttttgcgcattttttctgttcgtgctccttccccgttggcttcaacactttcagattgtctgatcccgagcatttcaacttcgatgcccagggaaacaaccgacacagctattttgacaatcggtgtggagcggaaagtatgaaatttcttcattttggcattttgatttcaaatttggaaaaagaaaaattttaaaaagcaattttatttcgactttgctccattattcccttaaaatcaaaaaagcatttaatgccaaacaacaacaggagaaatgactgccaattatttgggcacattttgcggtggcggcggtggcaccactgagacgacaacggcacaactcaaagtgctgaagaaaaagtggcggaagaagaagaaaaacaaaagtgccagcggtggtgccaaaaagagcggcaaaaacaaaaatattggcattttgtcctcgtcatcgtcgtcggtggagcagcagccggaagagaacggcaccgtcacaacgccacagcagcaacgacacatggcggcagcatcatttgaaatgacagtgactgctaccacggctggtaacactgctgatacggtagtgggggtgcccaaaacgacaccgccagtgttggcaacgtctgagagtgtgccatcgtcgtctgccgcctcggcaacaaaagcgtccgctcccgcaggtggcgatgcctcttttgaacgtgccgacaaagtgggtaccggaactgcagcaacaacaacagtgacagctggcagcaccagtgccgctgcgcgtaaattgccggacgccaccagcagccccgctggaggggaaattcgcttgctgccagccgaggcggaggaggaactgccagctgactttg

SEQ ID NO: 31689 - DNA, 883 bp, Heterodera glycines
ctgtcgccgaatttctgcctaaattttattagtttacttaattagcaatgattgtccgaaacccgttgtttttgtggctctgggaggtgattatggactttttgtccgaaatatccggccattccattgtcgcttttgtcggtgattgtcacgcgtgcagggcagtcacgcacactgcatctccacaactcattttgtttgtgcgtaaatcggaacccttaaaaacgaaaatatttcttgaaaaaattttttctcaccattaaaccaaatgcagacacctcctcttttcgtttctccaagttcgaagtttacgatggcgtgttcttcaaaatcatcgtcgcggtcgttgttgttctcattttgttcacggtgatcagcagatagcgtttcgttttcactgtcattgttatccaaaaacttgcgcttacgacatttttgaagattttcaatttttttacgattcatcatacgtctaaattcgtaaatttatgctgtgttaactaaactcggaaaaaattttagtggtaacactttaaaaactaaatattttataaataaaaagaaatttggggacgaaacgactaattttggcttggggggcgaaacgacgcgggacgaaacgacgcaggacgaaacgacgcgggacgaaacgacgcgggacgaaacgacgcgggacgaaatgacagcgcgccaaaatcagcaattctatcggggaatagagcaccagaatcgatcgaagtcaattgatcaagatcagtgagaaatgttggcgattggcgatgtgcggcgacgcaaattgtccaaagcatcggcatcgtgaaagcccaaatgacgaatgcttttcgcaaaaataggccaaatttcacggaaaaaacatcccaaa

SEQ ID NO: 31690 - DNA, 1038 bp, Heterodera glycines
  unsure (1)..(1038): unsure at all n locations
gttaagagtttatatgtgatacacattttttgttttcgaanccatgnacggaatttaagaaacgctccagcacgggtgaaaaagcatgggtggaatcgatttaaattttttttaaatttgaaattggggccatcccattttccatttgccaccttttctgccaattgcaataccattttccatttttgctacagaatgtgtgtgccgtcctttggtctcacaacggcaccgcactgttcagcgtctttatacgtgacgatggccaacagcaaacagttgtggatgtgatcgacggagcaaatggtgacggaatgatggtggaggaaaagcagaaaaaatggcacacaaaagacggagcaatggcactgatattcacggcaaagcggggaaggcatgcaattatttggcaaaaaaaaaaacaaatattaacaaaaagataaagcggacactacacaaagttttaaatgacataaaaaacaaaaatagactattaaaaataattagattcaaaaataagaattaataactttctcttcatactagttaaattatttattcttagatggaaagatagggggcattaaattaattttgtaaccataagtttaatttacaaattttatctaccatacttcaaaatttaagaagttgagattctacatattctgctgacaagggaacattttattgtaaattcgaatccgcttgacagatggttaattatttagatttttgaaagtaaagtatcattccatcttgcatcttttttcaactatactatttaatagaggaatgaattattgctgatcatgtaaaaaaaattgatttggaaatttttttatgaattttaaaatttaagcattttaccgatttttgatactttgatcactttttttctgatcatttttaaaacgccgaaaatttacaatagcaaatgacaatgctctacaccataaaattggttttaaggtgatcttagcagttatagttaggaatattgccttgtgagcccttattcttaggggatggtatttttga

SEQ ID NO: 31691 - DNA, 1687 bp, Heterodera glycines
ctgcctaaaggagggatcaccagcccggcgggctgtccaagtctaccctccctccgacggcaactacccggtggtcgtgcaacttttaaaagagcgattcggcgacacggacgatttacagcgggcaattcgggcccggcttcttcatttggcaccggcaaaggacaatgtgaacagcttgacgacgatgatcgacgaatttgagcgatgcgtttgccaactcgagcagctcggagcgaacgtggacgacgactcatttgggccattgctggaagccaagttgccagtgcgagtgctcacggaattgcggatcagagaaagcatgatgggatcgaaatggtcagtgcgcgagttcaggagagcggtggcagcgcaagtgcggtgcatgcgatcagctgagtcagcattagcagcaatgaaagacccggaagtacgcactgatcaccgaaccgagcgtgatcagacgggacgaggaggcaaagcaggtcgggagccatttcaaagggcatttatggtacgggacagccaacaaacccgtgcgcagcccaacggaacacgaaaagaagagcagtacgggacgaatgcccgtttcaccgggcgaacagtggcacgcggcaacgagaacggacacacgggtgggaatggaccccgcttcgcgcaaaatgggctccctccaagcttcgggagggggaattgttcgttttgtctggagagcggacatcggccgagtgaatgccgcgcctatccgacgccacaggcacggaggaagcgactaattgaacaaaagcgatgcctgcgttgcctgggctctgatcacacattcgaccagtgccaacgaacggtccgatgtgacgcatgccgaaaggacgatcatcacattggcttatgtgctggaagaaccaaccgggaaaccaatcccggccctccggtgaacccgaacggaaggagaacaaccacgcgatgctgatcagtgggatggaccaacccactcacgttactacatcacgagacgagccgaacagtcgagacatatccgagacgaatgccggggagcaacgggctttcaccgcttttggaagccgagtcccggcccagcaaatgatccgaagagtgaccgcagcagcagaagaaggcgaagacgaatgccaaacaacattgttgtttgatccaggaagccaccttgactgcgccgagactgagctaattcaacatctcggaccgcaacccatcgacaagcggccgcttacagttcaagtgttcggaggaaagaagcagcggattcggtcagcaacttatcgcctacgactcaaacggaccgacggcaaatgggagagcattgaggtgtctgaagtacctcagatctgtacgctaatcagaacagaactcatcgagtcgggagcaacacccgatagcgacccgcgaaccatcacacagacaacgcaacctcaaataatgatcggcattcgaaagttctgggattacgtggtcggatttcggaaaatcgagagtggcgcgcatgtgattgacaccgtgtttggacaagttttgtgcggcgaaggcacccaagcgagcagcggggcaactcccgcggcatcaatcctaacaaccatgcaatgcggaaatatccaccaaactcgaacaaataaacaacaacaaatcggagaagtacgtcgaaatggaagcgaaa

SEQ ID NO: 31692 - DNA, 1430 bp, Heterodera glycines
caggtttttaatagcatcgacccaggcctggaaaaggatgtctatttaaatttattttacaaagcaaaaaaagtataaaaatcatttaattacttaggaacttttctataatatctatttatcaataacaatgtttttaaatttatttgtatttttttgattttttcaaatagcctcggtcccattaagaaacaaattttgagaattatccaggaaatcccattttttcatatttatctgaacctgtattttctggacatgaatctataaaatttcaggcccatgaaaaattcaggttgtcgaaaaacagtctggacctggacctggatgaaaaaaaatctaggccaggatctcggtcaaggtgagctcaactttttacagaaattttaaatcagatgaaaatttcaactgaaaagctatgctaaaaaatgaagttataaaatgaaaatcgaattgcaatcggattttaattggaaaaacaaaaacctcaaaaaatcgactttcaactttttctgaattttttcatcacttttattttataaaacacaaatatgtattaatgttatgccatataatttattttaaattaattttctattctcaagtttcgcgtttcatttcttattatttggattatgtccttggatttcaggacgtccttaggcataaacttgcagccttcggatggataaagatcggatttaagaaaattatgattttgaacatggataatttccactgacaataattcttggtacatggtgctgttttacataactgaaattcagtaccgatttttacaaaaatttcctctcaggcatatttctcctaataaaattttaagctgtcgtttatttatacataaatgacaaaatttgaatgtcttccttaattggttgttaaatgtcaatgtaattaattctgttttatgtggctctgttgtgcaattaattagcgtgctaattagcactactaattagttgaattgctggcgtttgaaataattgaccactagcgctgatggtattgttgccaagagataagttaccaagtccaataagagaagaaaatttcttcaattcaacagcaaatgtctcgcgatagtgcgaactaaaaaaagaaaaaattttattttatggatctaaattgatgtcacaaattcggcattactggaaagtgtttccattaattattgaagtatttagatttaattaaaattataaatggattttttttagattgtttgcttatttaaacgcagtaattaatttattaggtaatttattatttcataaatttatatgaactaatttttaaatgctattcctcctttttatttattaaatttataaaattactgatttttataaacctatttttaggatttttgtcgctgaaaattcgaaatttcgattaaattaaaaatttat

SEQ ID NO: 31693 - DNA, 1758 bp, Heterodera glycines
  unsure (1)..(1758): unsure at all n locations
attttgctgcttttccacttgatcactcgattgggccctccttgtcccttttaaaatgaataaaaataaatatttatttttaatagttataaattattaaattagatattttaaattaattaaaagcatcaaacaaacaaataaatcatcaatttcttgttggttcttttctctaatttttgcttctgcaaattttcgccattgtgatagccctttttggaaccattcctgaattaaaaaatttataaatttattttattattttagtttttaattattatttttttattattattatattaagccttacctcaacttgtttctccgtaaggcccgtttcaatggccaattgtgcacaagcagaagcacttgggcattccgttgtgtcaaatttgcgttccaatttgtccaaaatttcccacgaaaaataaaatggatttaatatttattattattattatcatcttaattaattaggatgacccaaattgttcgcttacatcgtcatcattttgtagtgcaattacttcgtcatcaacagttttttgcacaacagccataattttgtcataaatgtgtggcaattgtgggttttgttggtccctaaatttttgaaaaaaaaatgttcaaggcttaaattcgttgaaaattaaaaaattaaaaaaaatatttagccaaagcccacattgtttttcgtttccgttgtaattgtcgttcttggaaccattcctaaatgaaaattgttgtttanaataattaaaaataaatttttaatatttttttcaatgaaattagtgccccctacttggacttgcttctccataattccagtttccatggccaactgtacacgcgaagcagcacttgggtatttcgttatgccaaatttgcgttccaatttgtccaattggtcggccgaaaagttttgtttttgtgccttaaaattaaaatacaaaaaaaattaaaagccaatcaattcccggactaatctcggctcccggacaaagggacaacttcgggaatggcataaacgaataaaattgaaaagagtcagacaaattaaaatacaaatgtaataattctatttaattgattgtagaaactgcagaaaatctaattttctgaaattcgtttcgtcagcaaattcccgtccattttcattcacttacaacaacatcattttgctgtgaattttgttcttcgacttccactcgggcttttggttgaacagaaatgccaacattttggggaaattgttgtccgcttaattcactcattttttgtgatttttgagaaaaaataataattaaataatttttaatgcttcataatgcatacaatcaatgcataaccattagaaaggcctatacgtgttaaaaaaagtactaaaaattccttaaaaatggtcggcatcgacggagaaaattaaattttttttttccaccagatattgccgtttttcaatttcggataatagaatttttaaaatttaaataaatttttttgagatatccgtaaaaaattggtaaaacaataatttagtaccaagttgtagttgtagttgttggttctgttgtttcttgtcgtttccatcgattacgctgattttggaaccaaatctaaataaaataaaagtgaagaattaatatttaatatttttgttgcaattttaattaggtaatttatacacagtcgcggcaaaaaaatattggatcagaaatttttttacaaaaattgtagtttttatcaaaatgactg

SEQ ID NO: 31694 - DNA, 1103 bp, Heterodera glycines
gcatgcttttagtccaaaaggcggtgcgcttgaactgggacagcacacggggatcacatcagcaaaagtggcgtcccaattgctgtacgcgtcctcgccacttttgcaaacatattggccaattgctgcttcatgcaaagcagctaaattcacagaaacattttaatgtaattaataaatggatttgaaatttatttttcaaaaaatgggaaagaattaaaaagttttcatggaaaactttttagtgattaaaaataatttaaaagactaaaatttcatcctcatccttaaaaaagttttacaataaattttaattggccaaaattaatttatgaagttatcataaattgaatgtaaatttattgtttaattttatttttttaattttcttaaaattaatttaaatttataatttttttaatttgatttaatttttcaaatttcttaccccggcacccctgcggaaaagttgttggcggttccgttgcgaacgtcctgtaaattaatgccgtgccaaattccgagtcctccttgcagcacaagtgcaccgaagcgtaataagtgagcggcggatccgtcggagggcaaagattctgtcccgactcatagacaaagtctaaaaaacatatataatatttttaaatatattaatggcttaatgttgttgcatttttggtggaaaattactggaaaagaaatccagcaatttttcaatttttccgcttgtttcctgtccatcattttccaatcctcttcatttttcggcatttttcaaaattccgatctctattacaatattcttttagcaacgcccaacctttaaattttttaaagtttttgacaaatttattgttttaaaacattggtaatttggactgaattttttttcacccgtaaaatctcgtcactttgtccatagttaaataaattcacagacttacgagtacaataatacattgcttcaacagccacgtaaataactgcacaaaaattgaccaaaaataattttagtcgaaatttttcccatttttaattcgaattgtaaatatgctatttttttcaattcttttaataagaaatgtttccattctgataaataattt

SEQ ID NO: 31695 - DNA, 637 bp, Heterodera glycines
ccctacttatggtataagaaattccagttccgtctcgaagattgacttatttttcggaattttcatcacaacagtcaaattttgccttaaaaagtcaaaaaaatcatgaaaaaatgtaggcttcaaacaacctgtagaacacttttaagtcattttaaggtcatttagagtcagcaaaaaaaaaaagtcatttgacttaaattcccatcccccggtgatgcgacatttgcggcgcagacacttgcggcgcccagtcaaagcgacacttgcggagcagacacttgcggcgaggacattttcggcgccgacatttgcggcgcgacacttgcggcgccgaaagatgcggcgcccagtcaaaatgacatttgcggcgcagaattaaatggccccaaaaatattccaacatttatttaagttaataaaattgttattttaagtttattttttaataatgactagtttaacaataattcttgcaacttaatcacaaagataaaggttaatcggttgccgttgtaacatattcagaaaacgtttcactttgccccacccagcattttcaaagtataaatgggatattgtaataaaaatatttttacaaggtttattatcgtcattaaaaaagaggaagagcacc

SEQ ID NO: 31696 - DNA, 698 bp, Heterodera glycines
gtcttgacctggttttaagccaatcttttcgcgaatgttttcacacctgcttaattccttttttaattgcgtgaagtttatgcttcttttcacgtttttgttgatcagtgcattcatcattctgatcgtgacgaattgaatcaaccaaatttaattttttttgatattttgacgaaaaattgcgttttgattagttttttattattctgttttgtcatttttccattcagtgccaaatatttcagcaaaatttggccgaaattttttacaaatttgaatgataaagttcaatttatgaataataagtagggttcgagccccgcccccgtcacccccgcccccgccgggggcgggacaggttttttgggctcacccccgtccccgagcccgggacatcgaaataggaccagaatcgatatctaggaagggtaagatgagtagggtaagggaaagatgagagaaaaagaaagataaaaggaagggaaattatgagaggaatagaaagatgagaggatgggaatctcactgagaggaagagaatgataagtaggaagggaaagtatgagaggtagagaaggataagatgaagggaaactatgacaggatcagaactgatatcaggactggaagagctatgatatgaagagaaatatgagaggaagtgcaaagatgtaaggaagagaatgataacaggaagg

SEQ ID NO: 31697 - DNA, 1512 bp, Heterodera glycines
aaaagcggagggtgacgcgacgaggaggaggacgccttctctgtcgtcgcccccacaaatttgcctctaaatttatttttttttgaatgcccaaattaaatggatgggcttcgcgagggacagacatagacaggtggggtagggtgttggctgctgctggccttggggacggacggagtgtgaatgaatgaatgtttaggggatggaataaaaatgaattaatgggtcggacgagcgggggcaaaacggggggaggggaggggaaccaccttctttagcgatgatgagatgcttgcttatgctctccacttttattaggtctcgtgcaagcggaaatttttgatttttttaccatacaaaacattaaggtacagtatatatgtacttgtagattttttaatcccaatggagaggcaaaagaaatgaagcatgcttaaataataatccaatgcaaaaaaagcagctaaaaacaaaacacgtaaacaacgctgtcgtagtgtagtagtactgtaaaaagtgagtacgatatttaaaatttaaaaaaacggccggagggaatttattattatataaaaaaaaaaaatattgtttattttatttaataaaaaagggttatcacacataaaaaagaaaaaaccggcaaaaaaaaagcaaaaacagccggagggaatttttcaaagatgcaaaacatttgaaaacaataaaaagtgagacaaagaaaattagggagagggggggaggaggaagaacaaagatgggtaagagaagtcgccgaagggcgaaggaagtcgaagaatcgcccaatttgttaataaatcaatttggggcagaaaccaaacacaaacagaaaatatataaaacaaatcgtaaatcaaaaagaaaatgagaagatataattggatgtataaaaatggggggaaatggggaccatatccataaatagaagaagcccaatacatagacaaatgataattaataatggaatgtatgtaattgacaccgactaatccaattttagttccaacagttttgtgatggatgatctgattaattgttagaaaaaaaatatgaaaaagaacatttatggattaaaaaaaggtgttgaatggcacaattgagaatcattaccagaagatttttgtctggagagaattaaaaaatcaattagtttggcctaagtgttaaagggatcattaatttaattcacaatcattagcctccctaatgaagatggaataagcggtgcaatcaatgcatgccgaacgaagagcagagagatagcccataatatatcatgtgtacatatacatttgtttctgacgctgacaaatgagcttagttcattctcattggttaaaaaatggctaattaaattatttgggcggaatgccacaaacaaaaaaaacagcgaacaatacaaaaatgaaaagaaaaatgggcttttaaattttttttatgacattgctatatggggtgagtagtgagtcgatttgtgtgtgttgtccaggggaa

SEQ ID NO: 31698 - DNA, 1866 bp, Heterodera glycines
aattggaacaaacccaggggccaaccgaaaaggggacactttcgatggaaattgaaaaagggtcggaatttgcgggagagtctgtcgggagaagcagattcagtgatgccgtgtatataaatggatttccatgggaaattgaagcagaaataagaaaaaagaccgaagacactgatgagaagaaatatttggggttttacttattgtgcgatgcaaaagaaggtacaattttaataaatattaaaaatataatcattattaaaataggaggaccatggaactgcgttttttctgcaacctttcgaattgtgtcagaaaagaccgaagcggagaattccattgggacattgtgtgactgtgttattaaccagtcacgtttctgttggggattcggatttttcattacttttgctgtgagtaataatttaacatatttacttaattgatataattatggttaatcaaggaattgatgggctcgaacaagagcttttacaacaaagcagaggacaaattggcattggccattgatgtcataactgttgatgagccaaaaattgagaaattcgtttccgatcccaacaaatccaacggcacactttcaatggaaattgaaaaagtgtcggaatttgcgcgtgaaataattggaagtgaacgtaaaagtgaaactgtgcacatcaaaggattgccatggaaaatatgggcaggaattattacgaaaaatggaagcactgacaaaaatgagaaatggttgggcattttctttttgtgcgatgctccaaaagaaggtgcaaaattactaataattaatatatatattaacaacaattaattaattgatattgagcagaaaattggagttgcaaatgttcggcaaactttcgaattgtctctctaaagagcggagtgtcggattttaaattagaattaaatgacgatgtttttgacaataaagggaacaacaggggatactttaattttatttcaattgctgtgagtgacaattaaacattcccttaattgaccaattatggggtaattaagcaactgatggaccccagcaaaggcttttacgaccaaagcgaggacaaagtgacattggccattgatgtcacagtgaaagaagcaaaacggaggacgaaacataaatgcccaatatgatttggggaaaaatgcccattgaatatcatccatcctatgatgaacctgtttttttatttattaatttttcttgattatactttcaaaactggtgatatatgaattaattaattgtcggagctgttttagtagactctcattttttttggacttggatttattgcattaattttgttaggatttacgtaaacatttttttaaactttttttttttaaattgaaaccattcctaattgactgatcattttttccttttatttaagcagaattttttgggaccagaaatttgggaaccgggaagtttgggcttattaaattaaaaattgaaaaactattactaattacgctatgatttcattctttaataatccaagctgcgcttaaaaatttatatttactacaaaattaaattcaaatccaaatcaaattattaattgttcctcatcttttttgggtcatttctttgtcgtaatattaaataaatattgtggacgaatttttgggaaaattttttgtttcttaggggaatattttctgaaattttggtcaatctttaggggtatatttaaaaacaattttttggacaggttcttagggagtgtgtttttcaattttattgcatttttgctatgaaatttctggaaaaaggccaaaatacttgctaaaactcgaaaaaagccaaaatagatgctattgaccgaaaat

SEQ ID NO: 31699 - DNA, 1211 bp, Heterodera glycines
gggggggggaaggcccaccacgaggccgcgaagcggccgagtgagtaccttcggtgcaggaaaatattaaggaagagagttcattatttatttgttttttgcaaaattaattcataaatattttttagaacgtgctctgaaacacacaaaactttatttacaggttagtttaggcactcagatgctttcactatcaaaaagggagatgaataaaaatctaaaaatttttaattgctttttaaacgagcgaaaaactttaggcttaactttttttttataaactgatcagaagcgaaccagattttgcgagggcatcaaaaagacaaggaaaagcactgctatgatgctaactccagtaattctgaatttaaaattttttattaatttttaaagcttcactattttatttttttagcaaaattaattcataaatattttttcacaaactgctctgaaacgcaccaaattttatttacaagttattttaggcactcagatgctttcactatcaaaaagggagatgaataaaaatctaaaaatttttaattgctttttaaatatgcgaaaaattttaggcttaactttttttttataaactgatcagaagcgaaccagattttgcgagagcatcaaaaagacaaggaaaagcactgctatgatgctaactccagtaattctgaatttaaaattttttattaatttttaaagcttcactattttatttttttagcaaaattaattcataaatattttttcagaaactgctctgaaacgcaccaaatgttaattaaaagttaaataaggctctctgatgctttttctatcaaaagggagatgaataaaatttttaaaaatttttaattcctttttaaacaggccaaaaagtttaggcttatattttaaaaagtttcatcgaacctagcgcactaaaatcgatataatctctccaaattttgcaggccttctccattgtaaaggactaacttaacctgaaaaaatgccaacgcttgttgtttttaaaatttttcgaaattctgactttttcattaattatttattattttgcaaaattaattcataaatattttttcacaaactgctctgaaacgcaccaaattttatttacaagttattttaggcactcagatgctttcactatcaaaaagggagaagaataaaaatctaaaaatttttaattgctttttaaatat

SEQ ID NO: 31700 - DNA, 1030 bp, Heterodera glycines
tttaaaaaggaattaaaaatttttaaaaattttattcatctccctttttgatagaaaaagcatcagagtgcctaaactaacatgtaaataaaatttggtgcgtttcagaaccctttctgaaaaaatatttaagaattaattttgcaaaaaataaataaaaacgaaagactcagattttcgaaaatttttttgagccagctagctcggcgctcatttcagtgtaagttagtcctttaccggggagtatccctgcaaagtttggtacgcttctgctcaattagcaaaaaatatgagtgatcgaattttcactaaaaaagttaagcctacattttttggaatatttaaaaagcaattaaaaaattttaaaaatgagaattcatgcgagattttctggaaataagcttaatagggcctagttaagctgtaaaaaaaaatttggggcgatttgaaagagaatagaaagaaccaggttcgatgaagttttggtaagccaaaaaaaatccaaacatttaaaaatctataaaaaatttaaaaatgagaattcatccgagattttctggaaataagcttaatagggcctagttaagctgtaaaaaaaatttggggcgatttgaaagagaatagaaagaaccaggttcgatgaagttttggtaagccaaaaaaaatccaaatatttaaaaatctattaaaaatttaaaaatgagaattcatgcgggattttctggaaataagcttaatagggcctagttaagctgtaaaaaaaatttggggcgatttgaaagagaatagaaagaaccaggttcgatgaagttttgttaagccaaaaaaaaatccaaacatttaaaaatctataaaaaatttaaaaatgagaattcatgcgagattttctggaaataagcttaattgggcctagttaagctgtaaaaaaaatttggggcgatttgaaagaaaatagcaagcccccggttcgatgcagttttggtaacccaaaaagaatccaaacatttaacaatctataaaaaattaaaaa

SEQ ID NO: 31701 - DNA, 926 bp, Heterodera glycines
aaaatgcgcctttttatttgatttttacaattgtatttagttaccgaaaatgcgccttttcatttgacattttacaattgtatttagttaccgaaaatgcgcatttttaattgacttttacaattgtaatttgttatcgaaaaatacgccttttcatttgatattttacaattgtatttggttaccgaaaatgcgccttttcatttgacattttacaattgtatttagttaccgaaaatgcgccttttcatttgacattttacaattgtatttagtgacgtgaaaatgcgccttttcatttgacattttacaattgtatttagttaccgaaaatgcgcatttttaattgacttttacaattgtatttagttaccgaaaatgcgcatttttaattgacttttacaattgtaatttgttatcgaaaaatacgcctttccatttgatattttacaattgtatttagtgacgtgaaaatgcgccttttcatttgacattttacaattgtatttagttaccgaaaatgtgcatttttaattgacttttacaattgtaatttgttatcgaaaaatacgccttttcatttgatattttacaattgtatttggttaccgaaaatgcgccttttcatttgatattttacaattgtatttagttaccgaaaatgcgcctttttatttgatttttacaattgtatttagttaccgaaaatgcgcttttcatttgatattttacaattgtatttagttaccgaaaatgtgcatttttaattgacttttacaattgtaatttgttatcgaaaaatccgcatttttaattgacttttacaattgtaatttgttatcgaaaatacgcctttccatttgatattttacaattgtatttggttaccgaaaatgcgccttttcatttgacattttacaattgta

SEQ ID NO: 31702 - DNA, 984 bp, Heterodera glycines
aagacaaaaccttaaagcaataggcgattggaataaatggacaaaaaagcaaagtcaagaacttatcctacctaatttcatggtggcaacgaggcatttgactcccttaagagagccttccttctcatgtacttgtacctaaaatgttgttggcacaaaaagtaaagggggaaaaagaagacaaatcatccgatcaagggctaagtctcaacagatcgcagtgtaaaagctgctctactgctaacaaccccctgaccagtagtcaagtcgtatacaagtgattttgcgccccgacgttccaccatggcacacgagtgctacggctttggcaatgtgcgagcaattaagcacgcacatcgggccagatgctggggcatttgtgctgcaccgcaagcggcgcataagtagtgcctcccgacaccggggagcaagaatattgctatcttgcctaggcgggattctgacttagaggcgttcagtcataatccctcagatggtagcttcgcaccattggtctatcgaccaagcacatgaaccaaatgtctgaacctgcggttcctctcgtactaagcaggattactatcatagcaacaggtctttagtagggtaaaactaacctgtctcacgacggtctaaacccagctcacgttccctattggtgggtgaacaatccaacgcttggcgaattctgcttcgcaatgataggaagagccgacatcgaaggatcaaaaagcgacgtcgctatggacgcttggccgccacaagccagttatccctgtggtaacttttctgacacctcttgctggaaactttacacattcaaaaggatcgataagccacgctttcgcggtccgtattcgtactgaaaatcaggatcaagtaagcatttgcctttttgctctacgagaggtttccgtcctctctgagctcgccttaggacacctgcgttacgctttgacagatgtaccgccccagtcaaactcc

SEQ ID NO: 31703 - DNA, 1446 bp, Heterodera glycines
ataaaaataaataatgatggacattttttttacaacctttttgtgcataaaaggtcaaaaaactataaataacatgaatttcgcaaataaaaatccgggtcgttttgtctaacatacaataaatccctccgtctaatttattcaattaattttgataaacgtggtcgtttatatgatataacgtccggaacatgaattcgggagggagatttatttcccgtgaaaatgaacaatcaaagtaaactcttttggtaaatttcgaagcacattctctcgcgaaaatatgaaatgtgtttctgcgtaaaagtgatcggtgctctgcgcgaggcgtattctgcgaacaaacagctgaacatgccgcagtcggaaaagttggactggctgggaatatcctgcaaaaaaatttgagggatattatttaaattccgccggagtgaatcccataattcaaccatttttatattattacaactgaccttccgacattccatcatccatccttcagaatcgaatggcctctttcgcttgtcaagggattcttgttccagataatccctagaaattgttgttttcaagaagtaaaattggcaataaacctcaaattatgcagacatttttcattggtccccatcaaagagtcgtaatagtccagccttttctgtctgaagtcaattatctaaattaccattgaagttttaccattctctaactttcaattgctttcttaccgccatgcaccaatgattgggcaaatggatgggtatgatgagcatttcgtgcgcgaaaatgtcgatctttcgagtccatcgtttgacaccggtaaaaccatttttttgtagattttggtagaagaaagtgttaaacgtgaacacctataaataaatggtaaaaaatttggaaggctcaaatggacctttgggaggttgggatcgctgttgttccgttcgaccaccaagttcaaaaagaaattgatgactaaattacgaacaattaacaatcaatataaagcaattttaaataaataaacagcaccttcgtcgttcaaccactccaaattggagagggtcagcaagtctttccgcctgatttttgcatcgaaaccacttacgaatacctcttcaagggacatcgagcggttccaaataattttgacgatttgtttgtcggcattttttaattctgaaattaaatagtcttgcccaaggaagtggtcggaatacactaaacccgggaattcctccttcgggggcactctccgctcgagtactaatccttcgagttggaggcgcacgcgtcggttctcttcctcggtgagttccctgttgtgacgtgacttttctctcagacggagctctttttccaaactctgcgcctctttttttacggttttcaatttcctcattgaatctctttccacgccataactgttgaaccgaccgtaacaag

SEQ ID NO: 31704 - DNA, 1664 bp, Heterodera glycines
ttcttcccattttatccgattgcgtccgcccattcaaattatccccattatgcttcaaatttgtccacactggtcactgtgctcatcgtttctccttccaatggcgatgaccaattcaaaagcacacaatttgtccatatttattcatatatttctcccccccccccctccgatgggcttttcttctttttgctctccgtttctcccccgttcaatctccaattattttcatccaattttccaattggtcagtttgtccgacgttttttcttctgtcaaatgaccatttgaaatgagcacttaattttcattcatttctcccctccggcggcttttttcatttctcttttttgtccccgaccccctttggttttaacacattcaaaacttgttctttttaaattaccgtccattaggcaaaagatgcagagtttttctaattggaaaaattggcccaaatttacgcaaatttaataccccacaaaattcattatcttttaaatcacttaaagagcgaagaatttaattaattctttttaaatagatcgaaaaaaacaaattttgcaacaattgcaatggcatcgcgtgcccatttattcaagcagtgtatgtggcgaagaggcgggtgatgttagcctttcagtcgcacaaccatccgccgccggaagaggcgggcaaccaagtggcggcgcgacgaaactgtttgccgcaacgcaatcagtagcagcaggtgcttaatgtttccatgctttgggaggggtcggccagccaacccgagacagtcacgggaggaagcatatgctgggtaaagccctgcgcaggacttttagggataatcccgcgggatcccgtccagcaaaatttagaaaaaaatttaaatttttgggatttttaattgttacttcaggaaaagaccatcgtcggcgtgggcgagtgcgagacgttcgcagaaaaacgccaatttaccgacttttgtaatgaggtcggtttgggactaatgtcgagagttgtggaaccaaggcaaaaaaaaagaaaaaacgaacggcacgaaatttaaattaaatttcagcactgtctgtaccgacacggcagcaacgaaatgcggacggcacattgcgcatttattctttcacttgcaaagaatggtgcacttaaaattcttaaaattttccccctgcggcgcctatcggcaccgccggccccccaaaactcctattttttttcttaaaattagcccaagatcgcaaattttggtcattttttggacagaacttgttaaaaaattgcattaaattttcaaaaaatttccccgcggcgcctatcgacaccgccggacactcttccctcacctatacccaaaaaattaaaaaaattaaaattgattttcggaaatgtataaatttctcatttctaagccggagttgcgcagaaaaatagttggcggtgagtaatgcttggttttgttgaataaaaatgcatttaaagttttggaagcgtgtttaaaaaatgtccttatttttgaccctaaaatcttatttttgaccagcgatgttcttatttcgggaaattttcaagggtaaccctgatgtagttacatagcttacccttactcatcttgtttgtaagtttttagtttttttaaaaaaccttttctctccttttcc

SEQ ID NO: 31705 - DNA, 1262 bp, Heterodera glycines
ttttatgtcttttgatatttgacgtttacaggattctttaggggtcgaagcatgcatgcagaaaaaacaccactttttgttcatttctctgtaaaataataacgattataaaaataaaaaattaaaaagaaaatacctttcaaatagacaaataaacgattcaatgattatttgagcaaacgacgacaatctacctttgaccaaataagtcgtaataatctcgtcaaagtctatttcacacctcataagccacccttgataagaagaaggagctcgaaattttccttccccttcctgatagaaatagatgaaaatacgcggttttttcttatccgtagatacaatttgtaccagtccgttaatgtatcggtaaaatttggtaaccgggcagtgaattcgtcttgaagcatgtttaaaaaaatcccacgaaagacgataatcaccatcacggatcagaaaagagaaaagatttttacgaaatcgtccgctcttaggaatgttcgaaaaagggtggttattgtccttatgaacagcaatactatacggactagcatttatcattcgttttttgaggtctttacgagttttattccaataaaatgactcataaacgtcaggtatgtgattggtgacgcaaaattaaaataccttttcgagctcctctcggaaatattcagtgaacggacccattctaaaaatctttccatacatatatccagtaaataaaaaataaaaaatgatcacacaatttattagaagtttaaaacataatcatttttttattaaaaacgtgtaaataattttttaaaaacaaatgggaacgatcgaaattcttccaaagctttctcattctcagaaatgcttttggtgcatatatcctttagcgaagggaggcctatgttgagaagtttccacgcttcttgcatttcactgaaaatattaatttattacaccttaaacccgaaacctaccggtcgacaatgctaaagaagccataaacaattaggatgaccggcgaaactagccattcacgaatactgaacaaatttacaatcgttttggaccgtagtttaacacggtacagagggcttagatagaactgaaacatattataacggtgttcaccttctcgaaaaaagaaatggtaactgatacgtcgtcaatatatacaacaccgttaagatatagattataactccctatagtgtccttaacattacaacaacacattcgcacatttctttcataaatcagaaacgaaa

SEQ ID NO: 31706 - DNA, 834 bp, Heterodera glycines
ctctagagtcctcaacccaccaacatttcaatcactgggcactcaacccaccaacattctcaatcactgggactcaacccaccaacatttcaatcactgggactcaacccaccaacatttcaatcactggtactcaacccaagagcattacaatcactggcactcaacccaccaacatttcaatcactggtactcaacccaccagcattacaatcactgggactcaacccaccaacatttcaatcactgggactcaacccaccaacatttcaatcactgggactcaacccaccaacatttcaatcactggcactcaacccaccaacatttcaatcactgggactcaacccaccagcattacaatcactgggactcaacccaacagcattccaatcactgggactcaacccaccaacatttcaatcactgggactcaacccaccaacatttcaatcactgggactcaacccaccaacatttcaatcactgggactcaacccaccagcattacaatcactgggactcaacccaccaacatttcaatcactgggactcaacccaccagcatttcaatcactggaactcaaccccaccagcattccaatcactggggactcaacccaccagcatttcaatcactggggactcaacccaccaacatttcaatcactggcactcaacccaccagaattcaatcactgggactcaaaccaccaacatttcaatcactggaactcaacccaaaatattttcaatcactgggactccacccaccagaattcaatcagtgcgactcaaccccacagcatttaaatcactgggactcaaaccacc

SEQ ID NO: 31707 - DNA, 1260 bp, Heterodera glycines
ttccccccaataaccttttcatacccccatttttcgcaccgtgaatgttattttttattgaattctgaaccggtttggagtagattagactagaaaaaattgaaaattttgaaatcatgtttcccactcccctctcccaggggtattattttgtagtctttttttccccaataaacttttcaaaccccatttttcgcaccgtgaatgttatttttatcgaattctgaaccgttttgagtagattagactagaaaaaattgaaaattttgaaatcatgtttcccactcccttctcccaggggtattattttgtaaagtctttttttcaaaataaacttttcaaaccccatttttcgcaccgtgaatgttatttttattgaattctgaaccggtttgagtagattagactagaaaaaattgaaaattttgaaatcatgtttcccactcccttctcccaggggtattattttgtaaagtcttttttccccaataaacttttcaaaccccatttttcgcaccgtgaatgttatttttattgaattctgagccgttttgagtagattagactagaaaaaattgaaaattttgaaatcatgtttcccactcccttctcccaggggtattattttgtaaagtctttttttccccaataaacttttcaaaccccatttttcgcaccgtgaatgttatttttattgaattctgaaccgttttgagtagattagactagaaaaaattgaaaattttgaaatcatgtttcccactcccttctcccaggggtattattttgtaaagtcttttttccccaataaacttgtcaaaccccatttttcgcaccgtgaatgttatttttattgaattctgagccgttttgagtagattagactagaaaaaattgaaaattttgaaatcatgtttcccactcccttctcccaggggtattattttgtaaagtctttttttccccaataaacttttcataccccatttttcgcaccgtgaatgttatttttattgaattctgaaccgttttgagtatattagactaaaaaaatatgagtgatcaaactttcactaaaaagttaagcctaaactttttcccaaagttaaaaagaaattaatattttattcacctccattattgatagaaaaagcatcagagtgcctaaactaacatgtaaataaaatttggtgcgtttcacatccctttctgaaaaaatatttatgaattaattttgcaaattaaataaaaacgaaagac

SEQ ID NO: 31708 - DNA, 1412 bp, Heterodera glycines
  unsure (1)..(1412): unsure at all n locations
tctcgccccataaattaataattgaacctaaattntggagttaaatgcacatatgaaaaagttttattttccacctcaattggcatgtgagcaattttcctctttcgaatgccattctaaaaagtattaaaaaaaataaaacatttgggtagaaatccagaaaaaaaatttgaaaggcttttttctcttctaaattggattttccttgctgcatatatattaaagaataatggagaagtgagagtggcactggcggtgccgggggggggggacacgtaatgttttgtcagatttatgaactacagattttgacaaatattgtccgtttttatggacatttggaacccgcggtgccgaaatttttaatgagagattgttaagaaaaatagaaaaatttcatccttccctgctaacaattttgacatgaaccaacggaaaaaagactaaaacctagagcactagacatttaaagcctactaaaaagtaaaaaataattatattaatttcaaaaaagaaattaaatttttaaatttagagaaaccaaaattaggaattaaaaaagtctcgtcttcgcgataacccgagacctggacgaaaaaactaagaattttctcgcgttgggaccgttactcatgatcaccaggggaaattcccggttttttcccgggtttcccagccaaaaagtcccggttttgcccaaaattcccggtcccgtactaccctactataaatctgaacgaaatgctgatgttttttggcattttgcccaaatttctttataaataaaataaatgccaaactatgtctcttttattaaccaattttaagcagctaaaattggaattaggtcattttcccatttttaggtctaattaggtcattttcccatttttaggtctaattttggtcgtttttagaccaataaaataagttttaaaaaaaaaattcattttaaggcacaaaaaagtgcttacatcagagaatggcacgacaaatatttggcggacatggaaaaggtgttgggacagaagcgagctcagccgcgaaatctattgacagagcaaaagtataaaagtctaatggaaaaagtgaaggtaaagaaagaaaagggaaaagcaaaaaaaggaaataaataaaaatataaataatttagagacaaaaaattaataaagcataaaaacaaaatgaaaatttaaaaggcaaaaaatagaattgaaaaagggacaaaaaataaataattagaataatcaaaaggaaataaataaaggaatttaaatattaatcaaaaaataataaaaacaataaaattaattaaaattttagttggccgaaagcattcgaagaatgaatggccaagtgccgaagaagcatttaaatggaataatgaaaaagtacagaatttggaaaaataa

SEQ ID NO: 31709 - DNA, 1705 bp, Heterodera glycines
aaaaaattgaaatttttgaaattcatgtttcccccactccctttctccccaggggtatttttttgtaaattcttttttccccccattaaacttgtcaacccccattttttcgcccgtgaatgttatttttattgaattctgagcccgttttgagtagattagactagaaaaattgaaaattttgaaatcatgtttcccactcccttctcccaggggtattattttgtaaagtctttttttcccccaataaactggtcaaaccccatttttcgcaccgtgaatgttatttttattgaattctgacccgttttgagtagattagactagaaaaaattgaaaaatttgaaatcatgtttcccactcccttctcccaggggtattattttgtaaagtcttttttccccaataaacttgtcaaaccccatttttcgcaccgtgaatgttatttttattgaattctgagccgttttgagtagattagactagaaaaaattgaaaattttgaaatcatgtttcccactcccttctcccaggggtattattttgtaaagtctttttttccccaataaacttttcaaaccccatttttcgcaccgtgaatgttatttttattgaattctgaaccgttttgagtagattagactagaaaaaattgaaaattttgaaatcatgtttcccactcccttctcccaggggtattattttgtaaagtctttttttccccaataaacttttcaaaccccatttttcgcaccgtgaatgttatttttatcgaattctgaaccgttttgagtagattagactagaaaaaattgaaaattttgaaatcatgtttcccactcccttctcccaggggtattattttgtaaagtctttttttcccaataaacttttcaaaccccatttttcgcaccgtgaatgttatttttattgaattctgaaccggtttgagtagattagactagaaaaaattgaaaattttgaaatcatgtttcccactcccttctcccaggggtattattttgtaaagtctttttttccccaataaacttgtcaaaccccatttttcgcaccgtgaatgttatttttattgaattctgaaccgttttgagtagattaaactaaaaaaaattgaaaattttgaaatcatgtttcccactcccttctcccaggggtattattttgtaaagtctttttttcccaaaaaaattttcaaaccccatttttcgcaccgtgaatggtattttttatatgaattctgaaccggttttgagaaattaaaataaaaaaaaattgaaaatttttgaaaacctgtttcccactcccttctccccggggtaatatttttggaaaagtttttttttttccaaaaaaaattttcaaaaccccatttttttccaccccgggggaaagtgtttttttttttgaattttctaaacccggttttggagaaaaaaaaaaaataaaaaaaaaattaaaaaatttttaaaaattttttttccccccccccctttccccagggggtatttttttttaaaaaggtttttttttccccaaaaaaaatttttaaaacccccttttttccccccccggaaaaggttttttttttttaaaatttcttaaacgcttttttggaaaaaaaaaaaaaaaaaaaaaaaaaataaaaaaattttattaaaaaactttttctcccccccccccccct

SEQ ID NO: 31710 - DNA, 1155 bp, Heterodera glycines
tagagtccgacctggacctggatccaggcctggatttttcctggatccaggtccaggtcattttttgacaacctggatttttcctggacctggattttcctggatttttgtccaggaaatccaggtccaggtcaatttggaaatccaggtccaggtccaggcttgaaaaacctggatttcctggataaattttttttccatcttttatggcgaaatgttttaaaatgttgtgtaaattcaaaaaatttaatttttttttaaattttacacatgttaatgaaaattctttttgttttttaggcattaatgaattctttaatttggaatatagggttgttcgaaaaaaataaaaatggcaaagttgggatttggaatgttggaggaaattatcaaatcagttcccaaaactttctaaactggccaacaaatttctttcaactcccgccacaagttgtcgctcccacaaatcaattacaaatattaatttatgttattgaatgatcatttgaacgattaatccaggtccaggtccaacatggagtccaggtccaggcatttttcaaaatgtcgatctctactattctcaatcccagattcgaattcgaacaaaagttgcaattaaaatttgcgataagcattgtgactttttcatttgggtaatagtttggtttgccccccccctttttcaaaaaaataaaaatttaaaaaaaccgtgtaagacaattttttatggggttttcgaggtcgctgataactaatctgatacccattcgaccaatttcgaacctcggacccgaattcgagcaaaaaccgaaaactaatttttcaccaaaattcacttaaaaagttgtcttacacgattttttgaaaattattattttttttttgaaaaaggaggggggagaacaaaccggtacttgtttggtttacgggatacttttaccatacatttttaaatgcatgtaaatgtgttttagaaattaatgtaccttcatttcttcagggggtgcatattcgatattcagttattgcaaattgttactcaaaatggcctcttttctccgttttttggcctgccgtcacttttctatgtcgtccgttttgcgcaaagaggcggaacaacttaccaatgaacacatcgacaaaattcggcag

SEQ ID NO: 31711 - DNA, 1670 bp, Heterodera glycines
accaagtattatgttgtccacataaatgtctctctctatttctcttacttttttgtccttgtatttggacaaatgaagtttgattgtcaaagagagatgagctggcgaacaaatgactccaaacgtgactctcgtaaaccgatactccacgaggggagaatcttctacatatgggtctctgacccacaaaaatcgcatcgcatctctgtcttttggatgtaccaaaatttgatgaaatgccttagcgatgtcacaagtcaacagcattggcttaattcgaattcgaattaatatacctgccaaatcgttatagtcattttctcccttttctaacacttggctgagggtgagacctcctctgcatctagcggacgcattatacacaattcgaaccttagtatgttcactcgtttcctttaccactgggtgatgtggtaaataatgaactttatttccaaccaaatacctttcttcaataggtaatggctcacattcttcaataaacccggtttcgacttgttccattttgatttcatggatttgtcgaagcaaatccggtgtttttctaagtctgcccaaatttgacattaactgtctaaaagccatatcataatttgttggcaattgagcagccaattcttcatcccataacaattccgtttgatacctatccccattgaatgatattttatcaatcattctttgtctcacgttttgcttatctgaattgagatcagacataccgacatgttctagaccattccagtccataatcattttattgaaatcattctgactcagttggtcgctattcagttcccattctactgaaccttcgttactgtagtctgatacttgaccaataatccatgaatatcattaccacacttttggtttacagtatggtgaatgactgatgatgatatgtcggattgagatccgtttaatgacttaaagaattgaacctttccttgtccactcaaaaattgaccaatatttgagtcattgatatacagtcccgattgtaattcctctaagacactaatgttcaaacgattataataatcgtttccaataattaaatcaggctcaccatatacctctggtaccttcaattttgttttccgtaattgctcctgagagagctgattgagttcaatcaccggaattttcttcaaaattttatcaagggctcgacatttcatcaaaatgtcaaagttgccctttttaaggccaaactcataaattggagattcgaatttacccaattcgacattcgataaacctgagagttcaaacctttgattaccaattggcttcaaacccaaaatttgagccaatttggtcgaaatgtatgtcttttgacttccatcgtccataaaaaccaaaatcctttccctttgccttggattttctggattataaatggtaacatatttacatttcagcaaagataatttcgttgttttacttgtaacatacgaagtgaccgacgttatttccttttcaacttcttcagactctgagaagtcttgagccgtatttatcttcgaccgaactggtgaattttctgaactactattcctcctatctttgggtttatctttggatctacacaatgagatgtgatgacccgcccgattgcaaatgttgcacttatatccttttaa

SEQ ID NO: 31712 - DNA, 910 bp, Heterodera glycines
ctattcagtgatttatcaattaaggcactaatagagcatttttattgtattatccctctattcagtgatttatcaattaaggcactaatagagcatttttattgtattatccctctattcagtgatttatcaattaaggcactaatagagcatttttattgtattatccctctattcagtgatttatcaattaaggcactaatagagcatttttattgtattatccctctattcagtgatttatcaattaaggcactaatagagcatttttattgtattatccctctattcagtgatttatcaattaaggcactaatagagcatttttattgtattatccctctattcagtgtttatcaattgggcactaatagagcatttttattgtattatccctctattcagtgatttatcaattaaggcactaatagagcatttttattgtattatccctctattcagtgatttatcaattaaggcactaatagagtatttttattgtattatccctctattcagtgatttatcaattaaggcactaatagagcatttttattgtattatccctctattcagtgatttatcaattaaggcactaatagagtatttttattgtattatccctctattcagtgatttatcaattaaggcactaatagagcatttttattgtattatccctctattcagtgatttatcaattaaggcactaatagagcatttttattgtattatccctctattcagtgatttatcaattaaggcactaatagagcatttttattgtattatccctctattcagtgatttatcaattaaggcactaatagagcatttttattgtattatccctctattcagtgatttatcaattgggcactaatagagaatttttattgtattatccctc

SEQ ID NO: 31713 - DNA, 1737 bp, Heterodera glycines
ctaattgcaaatcaatagcttagaaaaagcttctaaaaatcttaagctttcgaatgaaatcaataatgttaaataacatagttagagattgaaataactagggagtgtaattatatggatataaaatcgcgaaatatggccataaaatatggaccaaaaatcgcaaaatatggacataaaatggcaaaaatcgcgaaatatggacataaatttttcaaaattgagtgcaaaatttcttcaaatttattggttgaaattgcatatgagatacatttccaaattttttgactcggtaaggcgctttgacaaagacggctttcgttttgcaattagtcggtcaacattcggaaattggtctcgaattttttcggcaattacgcgcaatcattttaaaagaaaaaaaacataaaagctaaaattttcaacaacaaaagcgaaattttcgcttttttgcttatttttgacataatttactaatttttaagaaaatttaaatttattcaatattctcgagaaattttggcgaaaaaatgattttttgaaaaatttttcgggttttgggctcaaaaaggctaatttagctgctgggggccgttctaatagaggtttttttgaaaaatgccaaaatatggacataaaaggagcagctgataattggattcgagggcgaattgaggcgcttaatttggcacagactgacgcgctttttccaattgaattgtggaatgtagtggacagagtagcagaagggcttggaagaacaaacaattcgcttgaagtgtggtgggatgtggccattttttcatgtcctttattcagggttggcattcaatttggaatgtgcaccttagggggaaccaacggccgagttcatttgctcggaaaatgatcgaggaagatgaaatgtggagaattcgtgttgcagattatcagattgcaccggctgacggcattttttaaacatgaataagattagcttaatacattcgtcaagaccaaaacttggaagcacttgtgcaggattttttcaatcgtgatccgatccaatttcttcgcgcttgcgcttatcatctgcacttttaaacatttataggattttagcattgtcgttttacacaattttgtcgttattttcgatatcaatttgaagttttcaaatgttagaattggcaaagttaaaattttgttcattgtcgaaatcggtcactgtcgtaatcagccactgtcggaaatgtcggaaaacagtaaaataaatgaaaatagttcactgtcgaaatcggtcactgtcgaaatccactgtcgaaatcggtcactgtcgaaatcagccactgtcgaaatgttacagcacccatgacaaacatagacaaaatcaacgctcgcatcgatacaattcaaatgctacaacttcatgtaactacacgcagccggaccaccaatacgcagcttgcgccacatttcctttttgatttcgatttttgattttttattagattttttaattgaattaatgaatcaaataaacaattttactgcttcgaaactctatgagaaactagcgttagcggatgctgaatttgatgcttggctcactgaattaggtttgttgcatgccagacgcacatgtcctcaatgccatggcggaatgggacgttgtgaaccgaaccgtaacgagcgttacggagtctggagatgcaaaaatgcgcagtgccgtcgcacgaaaaatcggatttcttgtcg

SEQ ID NO: 31714 - DNA, 1207 bp, Heterodera glycines
ttatgatctctgaggaaatgcattactgacgaaatcccaagtacgataataataattatttgttacatttctttatttaattcatttgctaaaattttgttgtgttgggatcaaagggatggcatctgcaaaatttgttttaacaaatttcccagtaattaggttggcgtctctagtgaaaatggtaattgccagccacagaaaactaacgacaccttaagccaatggcaaacctaataaagtctccattttcatcagatataaatctttttcatgaaaataaatgtttaataataatgaaaatattttttacattaagaaaaattttaatgagaataaatatttattgtgaaagcaattataggaaaaaaataaatattttttttacaccgaaaaaacatttaaaacccgaaaaaactcctccttttttatataaattcctggcgcagcgtttttatgtacacaaaaaaacgtactttttttataaaacaagtttaacaaaatttaatttctttacagaataaacgccctttaaaatggattttcaaaactactccatggtcaatttggtgaggaaatttgagcataatttccggatttaaataatttaatttttcaaatttaatattatataaaattataaatttaaggcatttaatcgtttcggtgttggcacctttttaatggaattgtttttgtcaaattcgtgccgttggctcattacgcttcctggcttaatgtttaattctgcacttttgtacacaaccatacgcgaaaagttaaatttaaattatcccgagcccgatacccgggcccggttttttgaaaatcaaatacccggtacccgacccggtaagtccgggtacccgggtaccaaaaatacactggtaagaatgggggtcagggtcaaattgttaagcaaatttggaagaaaaaaaaaatttaaaaaacgaaattaatataattctttctcatagcaatctcttttaaacattttttaaattgttgaaaactgttattttatcataagtcaaaaaacgctcaaaatttttttaataaaaataattttaattttttaacacttaagttttaaaaaatcatgttttttacaatatcccataagaaattttgatgaatttaaccttatattcccttaaaaattaaacattttggtataaattctgtaagtaaattgactcaaaatcac

SEQ ID NO: 31715 - DNA, 1293 bp, Heterodera glycines
  unsure (1)..(1293): unsure at all n locations
gataactaaatttgctagaaaaatcataaaatctacaaaaatgtgttggctgatgatttcttctcctctgaaccgcccaaattggcatcggcaagcgaatgggccctcaaagtttcaatgagaggagctgaaaaatgaatttaaaaaaggaattaaaaatattgaaaaagagagaaagaaaaaaaagaaagtatatttataaatgcacttgtaaaaagcaaatcgccaagtgctgccattagtccattccttacagattttggatggtccttaaaaaaacggattttataaaaaaaaaactattttttaaataatttcaccttgggattttcccaatccgtatatttgttgagaatggcttgaaaaatttcggtgcgatgaaagtcgaaaatatttcgcaccaaagttcttgaaagaatagcccgtcataatacatatatacaatatatcacttatccatggtaaaaattttaagtgccagtcaaatatactgtgtactgacagtatgcccaaaaccatttcgttcattcacctcaatattttgtccctcttctccacactgatgccattctccaggtcatccttcgccaacagatggtgtgccggattaagcacagtgccgaccataaggtcaatttcacggaacaatgtgccgtattgggggttgaacagcacacgcggatgatttggcacaatctgtttttaattttataattaattaaataaaattagaaattttaaatattggcccacctgtccgtcaacaattggtgcaaatgcgctcaaaaatgttggcgatgctgaagcaacatggcgcgcagctgtgctcacattctgttcactgtgctccttaatatatatatatattatttaaaaataaaaaatgtttttaaataattaaaatttgtgcctgaatacaacgaagaacttgtaaagattcgtccaaaaaactgctggaagatgaacgatggatgtggaaacacttaacaaaacaataacattgggacaattttacattaattgatttaattaatttaatttaaaattatttatgtctcccaatttgtacaccttcaactcctcggccagcctcatgaactgagtctgcgcagtgtgtgccatggcccatggcgacatggcacttccgtccagcaaaattgcacgatgaaaaagccgattctttggctgggtaatgggcgagcccatcaaaagcctcaaatttanaaataataataataaataaaaaatgtttttaaatgtttacgtgacgagtgcagcgccggattccagcct

SEQ ID NO: 31716 - DNA, 1346 bp, Heterodera glycines
atatttagcctaccccccttggtgtttgcacattttcatatttgcatgccatgagatcttttagatgttgtaacgaagatttcgtggagggtgtgccggctgcggagaaggaacgaaagaagccatgcgacccgccattttgtggatgcttgacggtcaattaaaatttcttgacagtaaactatttatcaaatctaatttaatactaaattaacaaaacgcagccggttgggacttattgtgcttgaacgttggtaatacaatgtgcactgtaatgcttcttgccggtgacgagccttataaaagatatttgggggtgagttgaaaagcaaagccaaaaacacacaatatgattttgtttttaattttagcacatagcccgatgcaaaggtttagtaatttaaaaaaggggaattttaaaattttcacacaaaaattcttgaaattctaggcgtggacaacttattggaagggtaagtgcattaaaataaaattattcattaatgcacaaatgttgagcattttttcattcaaaaatttgaattaagttggaccgatgtgtgtaacgggacaaaagcttctaagttttacgatgtttgttaaacatatttaattaaattttgagaaattaatttaaataaaaattgaactattttttggggaataaaatattttggaaaattgactagggacaattgccgaaatgttcaactattactagtgctgttctcgagaccaaaaatttcccgagactcgagaccgagagtcgtcgaccagagaccgagagtcgacctagagacctcgagaccgagaccaaaaaaaacccgagaccctagacttttttcaaaaaattttcttattcgcttaaaaatcgttaaaaattttttgcgcatatcttaacaaatttttttttattttaattcaattaggtaccataatcaatcaaaaaacgcaattttttcgcggtttttagtcaattttaaaaacaaagggaattttggagctgcggtataatgttgaaaattagaagaaaaaagtaactactcgaaggggaaatgatacaacgcaaaagtaaaagacttaaaccaagagcataacccactagaccacgtattcaaataagtaaatgtagcaaaaagtttccaaaaatacattaattttaaatttacaaaaagcccgtgctgagtcgatccaaaaaaaaactcagtgattgacaaaacggtctcgagtctcgaaaatcgagaccgggactttaaaaccagagatcgagactcgagaccgagaccaaaaaaaccccgagacttttctcgagtcgagactagagaccgagactctcgatcagcact

SEQ ID NO: 31717 - DNA, 1466 bp, Heterodera glycines
  unsure (1)..(1466): unsure at all n locations
atttggtgcgtttcagagcagtttctgaaaaaatatttatgaattgattttgctaaaaaaataaaatagtgaagctntaaaaattaataaaaaattntaaattcagaattactggagttagcatcatagcagtgcttttccttgtctttttgatgccctcgcaaaatctggttcgcttctgatcagtttataaaaaaaaagttaagcctaaaatctttcgcaaatttaaaaagcaattaaaaatttttagattttttattcatctccctttttgatagtgaaagcatcagagagccttatttaacttttaattaacatttggtgcgtttcagagcacgttctaaaaaatatttatgaattaattttgcaaaataataaataattaatgaaaaagtcagaatttcgaaaaattttaaaaacaacaagcgttggcattttttcaggttaagttagtcctttacaatggagaaggcctgcaaaatttggagagattatatcgattttagtgcgctaggttcgatgaaactttttaaaatataagcctaaaatctttcgcaaatttaaaaagcaattaaaaatttttagattttttattcatctccctttttgatagtgaaagcatcagagagccttatttaacttttaattaacatttggtgcgtttcagagcacgttctaaaaaatatttatgaattaattttgcaaaataataaataattaatgaaaaagtcagaatttcgaaaaattttaaaaacaacaagcgttggcattttttcaggttaagttagtcctttacaatggagaaggcctgcaaaatttggagagattatatcgattttagtgcgctaggttcgatgaaactttttaaaatataagcctaaactttttggcctgtttaaaaaggaattaaaaatttttaaaatatttattcgtctgccttttgatagaaaaagcaggagagatcctctatttaacttcataagtaacatttggtgcgtttcggagctgaatctgaaaaaatacttatgaattaatttcgcaaaaaatgggtgagtaatgcaaaagtctagaatttcgatatattttaaaaacttcaagcgtaagcggtctctcacgttaagtgagtccttttcaatggagagggccggcttttttgtgtgcgcttgtgtcggtttttgtgctcttggttcgttgtcgctttttggcggcgggtcctgggcttttccggcccgtgtcggctggtgtcggcgctctttggcctttcttttcgtcttcctttgtgctggcgttgcgtccgtggttttcgtttgcagtttgttcttcgtccggcctttttctctccggtcggtctgttggttctctccttcgcctctcgttttccttaaaggtttctttttctccttgctcgtttgtgggcagtccctgaaatgtttttagatctaagcaaaaattaaaaacaataataa

SEQ ID NO: 31718 - DNA, 1091 bp, Heterodera glycines
aagcatcagagagccttatttaacttttaattaacatttggtgcgtttcagagcacgttctaaaaaatatttatgaattaattttgcaaaataataaataagtaatgaaaaagtcagaatttcgaaaaattttaaaaacaacaagcgttggcattttttcaggttaagttagtcctttacaatggagaaggcctgcaaaatttggagagattatatcgattttagtgcgctaggttcgatgaaactttttaaaatataagcctaaactttttggcctgtttaaaaaggaattaaaaatttttaaaatatttattcatctcccttttgatagaaaaagcatcagagagccttatttaacttttaattaacatttggtgcgtttcagagcactttctgaaaaaatacttatgaattaattttgcaaaaaataaataagtaatgaaaaagtcagaatttcgaaaaattttaaaaacaacaagcgttggcattttttcaggttaagttagtcctttacaatggagaaggcctgcaaaatttggagagattatatcgattttagtgcgctaggttcgatgaaactttttaaaatataagcctaaactttttggcctgtttaaaaaggaattaaaaatttttaaaaattttattcatctcccttttgatagaaaaagcatcagagagccttatttaacttttaattaacatttggtgcgtttcagagcagtttctgaaaaaatatttatgaattgattttgctaaaaaaataaaatagtgaagctttaaaaattaataaaaaattttaaattcagaattactggagttagcatcatagcagtgcttttccttgtctttttgatgccctcgcaaaatctggttcgcttctgatcagtttataaaaaaaaagttaagcctaaagtttttcgctcgtttaaaaagcaattaaaaatttttagatttttattcatctccctttttgatagtgaaagcatctgagtgcctaaactaacctgtaaataaagttttgtgtgtttcagagcacgttctaaaaaatatttatgaattaattttgcaaaaaacaaataaataatgaa

SEQ ID NO: 31719 - DNA, 1214 bp, Heterodera glycines
ttggttgttcgcgtcacaaatgtcgcattggggctctcgcataaacacatgctccaccaatttacagtagaagtcttggccgtattggccgcaagtggcggtggcgcggatttcggcatgagtggccaagttgaaaatggacgggaacagtcccttctctgatagaaccaaaacagcataatcttatcaaagggggagggcgcctgccgaagattctcctcactcccccctccccccccccccccacaaatcgcaccgatcattcagacaaacccttttcacaactcaccgcctttgccgacagaaaactcgcgaaaaggataagccaattgagaggcggaagagcgaactgattggtcatttttgtccggcgtcaattcgttgttggaggaatcaattcgaatgatttcttcggcaaatgaaaaatgccaaattaagagaaaaaggggcagcacggaaagggagaaacatcgccttggggtccctgcgggggacatccgacgaacgaactgaagaacaataacaatggaaatgatctcaaaatggcatatttattacaggatacaatttagtgccatggcaatccaacaaatgcccttggggttggactgtcggatacctccgttcccaaatccaacaaaatcccgaaattcatcgtggaggggtcggccccggttaacctaatgacctcttttgagaatggtacaccctttgtttgacaacggacagagcgatgcatctgtgaagagtttgtttgttttggcgaaagaaggaaattcattcatcggaccaaagagaaaaagacaccccgggggaggggagagaatgtggccaaatgatcaaagggggggggggagaatgaaggatgttgatttgcattttgtaaatgatggcatttaagaagagggaggacgggggacaaatcgtaatgttgcaaatgaaaggggaatattatatttaaagggggggggcaaaggacagcaaaaagtgacgggggaaggaaaagccaaaagggaaaccaaacaaacaaactgagagagagcgaaaggggagggagagaaggaaatttgataaattaaaaacaattaatgggggaaaccacaattataattataaggcaccgacgcaacccaaagaacgcaacgcaataattataataataataataatctgttgggttggaaactgtcggaggaaatgacggcaacggacga

SEQ ID NO: 31720 - DNA, 1536 bp, Heterodera glycines
tgtacatttcatcatttcgggaatgccaaatgagccaaagaaagaaaccgttcctaaaaaatggacacaatgataatgagagagatttgttaaataaagggcaggaggcaatgctcgacaatgtcggccttttggctgttggatgactcacgcgctcggtaaatgtccgcgttccaatgggacacaatcgcatcgaacagtttgggccgcatataaagcgcggcgagcagcacagactcgtaacactcgggctccaattgggggtcctttgtcggaatgatcggcacgagtttcagaatttggtggtgccgttcgaattcgttgacgtaaaactcccactccaccttatgtgttgaacaaacctaaaaaatatatattacgattgggtgttaaaatatttatgagtgattgtcaaaaaacctgtggcaaaaaattgacagccaaatcgtaggccttttgctccatcaaatggttgaccagccgtttgccaacctccagcactgaattttcgcgtagcatttcgctgtttctgaccgctcgttcccacgcctcctcaaagagtccattgtccattagccaggcaatgcgttcgtcgatggagcagggaattgcctgggaaagaattgttttaaaatttggaaaaacgaagtctgatgggccacctcaatcacttcacgggaacccatcagaaagaaaatattgtcgggagaaagcgaacacaaagcaaagcggggcaaaacgcacaggtcgacggtgcgcatttcgatggtatcctccgaaatgagcacaaagtcctgcacagagagcggccgcaacagcaaaagttgggcagagaacggcttcgatcgaacctaaaactatttttacatttttcatgtaatttttatacattttcatgtaatttttaaagacttttaaaaagggaatattaggtggcaataaactttcatcgtttagaatattaatgattacactagggacaaagttttgtcctttttttaaattttggtcctcatccttgaaaatgatatgaaccctccccttttctcgcctggttcgatgggtccgtttctgctgacgattgctcttggttggcccttatgccaaatacgaccaattcgtatttattttcaattatttggtgcatatttttaacggaatttggaggcgaattcgaaggcaaaatttgagtggtttgttggtcgtataaatcgtcgacacttggcaaagtgaaggaaaggccggcaatggaaaagccaggaattgtgaatttgtgcaaaatttggccatgtttaacgggcaaatcaatgggagggcccgcggcactgttctgagattaagcaaaaggccaaaagattaattgtgtaaagaaaacaacacacaccgagtgtcttctgagcccgttctgaacagcgcaaacgcaaagcgaatttgcccagccaatcgcaatggtcgactcgtccaacctttttcgagaattcaaccaatttagcaataacttattacaaaagcagcagtaagagcattcctttggat

SEQ ID NO: 31721 - DNA, 1475 bp, Heterodera glycines
  unsure (1)..(1475): unsure at all n locations
ttgtttgctgttttaactcatctttcctcaattggaaatattgtgttagcaacaacagcagcaccactttcatttgccatttcacttcatttcatccaaaataaccaattcaaagtatctaaattaattaattagtcgtttaattgccttttcaattctttggcatggtccgcgatcggctgaacgaacttcaaaaggtcaatcggaggagggattgttaattaagtgaattaagcgaaagtgaacgaatatgtcaaggggagggaaaataagccaaatttagcctaatatttgtaccttttcgtttgaccaaatgaatgcttttcccttttgccaaggcttttcccaatggacgcccttcgccctctccaatccccgtccatttgctaaacgttcaatcgctccaatcctctggcgatccttcgctcgatcgcatcacacaaatgcgacaatccgtggaggaaatcgaacggcgcattcggacgatggtggaagtgcaggaaacaattctgggacaaacgatggtcagatcggaggaaaaggtcaaaaaggggaggaaaagcaaagggacaccaaaaagggggcaaaaaaatattaaaaataaatgctataaatattagccgaaaaacaattatggggggggggggggtgtaaagagtgaaaaagtcgagagttaagactttaaccgaatgactttttcaagtcgagattctagaccgtaatgctaggaaaaggattctggaattaatgctttcaaaaagcaattccgacttcacaaattgagcagaatcagttggacacactaatcgatgagattcgccagcggagtgcgaaactccgcccgaaattgcgtcatttgtgccgcgacttggaaacgcaagggacggcgcacgacgcgtttaggcgaatgcggaaaattcacaggtggaatggcggaaggaactgatcagtgtgggattgatttgatcagaaagaaaagtcaattgtagtgagcaactgatcagaagactcaacgaagtcttggaaatgttcgcgtcggcgcaggaggactaccgacagcgcgtgaacagtgagttggccacggcactcactcattggcattatgccctaaactcggtccccccccctcctctccccttcataatttgtcttttgaagggcgcgtccgacgtcagttggaattggccggggaacgcatcagcgcggacgaagtgactcatttgttggccgacaattccgaggacattttcttccgtcgaatttctcccatttctttcgctgctcagtccgcgttggtccgtccctttctctcttttgctaatttgttttttcgttctgtttccattaggaggatgcctcctctcgccacgttgaactgctccaactcgagaggaccatcggcgaactgaacgactgtttccaggacatgctccaattggtccactcgcaggtccatttggggggggngggggggg

SEQ ID NO: 31722 - DNA, 1340 bp, Heterodera glycines
  unsure (1)..(1340): unsure at all n locations
tgaggcgccgtgtgccattcattgatttgcttttaacctactcatataagtaagaagatcgtttgcgcctctaaacgaggcgctttcccgagatntagttcgagcgatttacggcgggggaaattgcgaaaaagctgtgacgatggaacatttttatccggaagttgtttttgatgaaaattggaaagctaattgagtgaaatgtttaagatatttatttatttgttcagtgcagcgcaacagaaaacttaaatgttatgataattgctaaattaagtggtgtgaatatgtataagcaattgtttcaaatgttcttgggaagttttttttactaagagaatcattgtttcaaaatcggtgaagagaaagaaggccacggaatttaaacaaaaagacattttcctaaatgacagcccaatggtcaaaatttgtaacttggtttttgaaattttgccaaaagaggaaaatggcatagggaaattggaaaaaatgggggttggggatttggttgggaccaatgggatgacggattagtattattattttttaaatagctggaaagcccatcagtgatcaaaaaagcggagaatggccagggatggggaaggggcagtcccccaaaaagccattggctaatgccatcgccctttggccaaggcattgttggcaaggagagagcgaaatgaactgcaaaataaaacatttttgcgcttttaaacataaaaatcaaaaaatcaaatttaagcaaaaattaatcaattttcactgaatgcggagcgatccgccggaaatctgcttaccgtattttctctttttatcaccccgggaggattatttttcagactcctcagaaaggggggggggggggataatttgagacggcgggataatggagacggggtgataaaaagagaaaatacggtaattaattaagaaagactaattctgtgttgctgacacatttgcccgtccaacaccgatatatacatattattagattttaactttttgcatgaactaaatgatcattaaacacatggccaagagaaaatggaaggggggggggggataataaatattagtagggctgaaaattttagtacgaaaaatcgcgaaatggtatttaaatataaaaaaaaacccaaaatatttattaaataggtaaataaaaatttttattaacgattttttagtggaaaagagcaaaccaaaaggtaaaaattgaatctatttttgtataaacgaatattttaaatatttctataagttgattctttgagaatgtattttcagacggtcccccgcgtcgctcttcccgactccaccccacccccctcccc

SEQ ID NO: 31723 - DNA, 1477 bp, Heterodera glycines
catcaaaggcaccatatttttgaaattaaatggcttttttacagctttatataaaaattgccaatttttatggatttttgatctttaatacattgggcaaaaattgtgctaaaattattgtctgccttagccagaattaattttcgaaaaatatttgaaaaacgacagggcttggtttgaataaatcataagttgaatggatcaaaaaatttcccatattatgctacctcctcatggatcagtctgtaaacaaagttattttaatttcatttttaattgataaaaaacaaagtgatcagtgcaatattttataattttttctttaacatctttttaactttatagaaagatttattctaattttgcactttataaaaccaaatatttcagtttatttttgtttttttattgtttgaaaatttcttttttgataaaattttgaaaattgaaaattttgtcgaattgtttggcctttgtcgcacaattggttattcgcaaaaactggttccttgagtatttttgttcataacttttgggcagttttttgttaaaaattttcatttaattattttttatattgtataacgccctttttgattggtttttatataacgacatcaccttttaaacaacccctgacatattatttattttcgttaaaaattcaagaaaacaaatttagtattttaaagacgttaagcctgaggacacacacacccgtcgacctcaatccacgtcatattggttgggatgtaaagcattgttgaagcagatcaggacaaaaactcaaattaaacagaattacagaaatttaaaaaaaaggaaaaaagctacaaaatttggcgcaaaacttggtgatagaatgatttgagatgacatgcccatagccttaaggccttttgctccattctaccgcccattcatttacattggacatctgcagcacaatcggtccttgtccacagctttgtccattcgattgtcctccgatcaaattgccatccttttcttgctttgtccacaattttttggccgttgtccacctcacccccccccgtccccaattcccccttacaaccctttcacatataagttgctgttttctgttttgcatttttccagtgaataagagacagtgcagaaaacggagattagtaagaccaacacattattcgagacacagcgcgagaagagaaagagagaaggagagagattgcttgcatttactccactccttcatctcttcccactcccccacccatcaagtacacagcaaagaaagggggatgggtttaacgcaagggaaaggcaaaatgaaatgaagtgaagagataagtcctaacaaaaaaatagcaaaaaaaaaaattttttaccgcacaaaccccgaccccggacaaacaccggcaaggtgtgaaaacacatgttttcacaccggacaaacaccggacaccgaccggtctttaactactaagcatca

SEQ ID NO: 31724 - DNA, 1508 bp, Heterodera glycines
cctccttcactccggcacggaattccaaaccgtcaatgttctgacgaatggcaaaacaaagtgagaaatgaacaaaatttattcattaaataaaaaaaaattaaaatccttaaaccaaaaaaatggaaaaaaggttttttttagaaaattagaatgaagaaaaagtttggatctgctaccttaattcaggtttatttattttttattttgaataaagagattaatgctatggtatatgaatccaaagcactaaagcttatgttacttatggtcgtgttcattttaaaggtcacctgagtgaagcatcgccgaagcagccctttgtccgccaccaaacgaatgaaatgatgcgcggaagtcggcttaatgggataaagtcaaattcacaacaaaagccgagaatgggaagaacgcaagaaccattatgctttcgtggaaaagtgcgttggccagcacaaaaaagggctcgggattccttctgaagtaatttatgtcgaagatcgcctgcggatttgggatgtcgtactgcttcaagttgtcgtagagaccggtgccttgacaagaattgcttggattggacgccgatgcctcgaaagcgaaccgggcgtccgaaagtccgggatgccggctgacgtggacactccggcaccgaccatgaacacaatctcgggtcgttcttcgcggatgaacgccgcaacgccctccaagtccaaagatggcaatttttgctgtggacgcgtcgccacgtcatctgcgaagtgattcctacgccagcagttataattagtcagttttctaatagacaatttgatactgaaacgcacctgagaccaaactgttgatgacgctctcgaagctggtcacaaattggctgtacaagctcggctgtgaagcgctgcccgcctcacttggcactccctcaacatttggcacctccgcttcattttgcactttctcttccgatccttttggcacttcctctttgtttggcattcctttttcattggatccttccgcttcgcttttgtcattacaaatgctctcttctttagacgtcgactcactcaccgaagaacaatgtccttcggtttttccatcattttcttttgtattctccataattatttagtctttttcttttaatatttttcttaatttatttgttaattattacaatttaataaaagctaatatgtagcaaaaaatatgtactggttaaacaaattaacaatttattttcaaattgggacaataaatatttttatgtaaaagaacaaaagaaaaacaacaagcacggaggaaagatgggagtcagcgattcattcattattcactttcagaaagaaatatcaaaaaggcggtgagagagaccattgtgggcggtcgaaggaatcatcgaacagtccctcttgaaccaattaaataacaaattgccattaaatacctgaagaggcgacggggggagggcacatttaagtaaagtgggaagcttattaaggggaaccgaa

SEQ ID NO: 31725 - DNA, 1317 bp, Heterodera glycines
ttttttctaaaacccaaatcaaaaaatgcctgcttgagggggctaagtgaaagtgttttctaaaaaacaaaaaaaattccaagcctctatctgcaataggaaaggctgtaggttcgtggactttttcagtaccactttgtcccagttcagtcccggttgaataactcattagggtttgatctgggcggggagttaccagcagacttattgtagagttcaatgagctggatttttccagtttttaaaatttcgaaaattttcaaaatttttcgagctaggcctaaaaaacggttttcgggtttttgaattttaggaatttttaacgaattttcccagagaaacggagaccacttccaaaacatagtttttcgagctctatcgactggtatttttttcggaaaaatttcgattttttcccggaaatagaaaaaatttttggcctgagcgggacatttgagtcccgggcccataactcgtcaggggttggttttatcaaaaaaacgccttagggcaaaattgtagagctttttaagctctatcgaatggtgtgccatatggccggaaattttcaaaatttttcgagctaggccccctagaaattttcggaaattttttttcggacgaaaatgggggtgaaaaatatttttctggggtaaaataaggtgctgagtacgaatatgatgtatattttaagtctcataatttcggcaattttttaaaaattctttatttctgttgctgctgcctctgttaccgggcaattgccaattcgcttacttcgcttcgatttcattcccccccaacccttctcttccctgctgattcccttccttatccccccccccattcgcccaattcgtcgtccttcacttttctgcaaaatgaatgtgccattatttgaaaggggggacgggtgggcatggcatggacaggtgctactgaattggcataagtaatgcactgagtgccatttttggatgccaatgccaacattttctgcttgctctccggccttaattgagtaataaaacgaaccctcaagcaattcccaccgctctttgacttggcatagaattaatttcgttggcatatcgcaacaattggacatgccaatgctttcggtatatttttcatttacatatttgaacattctaagaaaggcttgccaaatcactgctctttgctccctttccaaaagggggaatccatcgcaatttgttttttggctattttggccaaactgttgagcctttccctccattcctcttcctcccttacccccccccccctccctctccttctctcgtactccctttc

SEQ ID NO: 31726 - DNA, 1193 bp, Heterodera glycines
ataaaattccaagaaattccgaaccgcataaaaaagaactcaatgttgaaaaactcctcaacagaaagcaggacgagacaaaagaaagtcgaatttttgtactggagactgtcaaaacattgggtttattgtataattttcttagggttttgccccatgggtcgtcgtccgatttgaacctgttgaacacaatggagcgtgttctttaacgtcgaattcggctgatctctccagtccaacccacacagcgtttggtacacaatgtggtcggcctgttgaagctgtttcaaagtgcctaataaaggcaaaccaaagcgaatggaaaggcaacatcacagaatacggtaccttcgttgatgtgtgttactgtaatgtcattgatcggtgtaatattatagccgagattgaacccaaaaacgaccctaaaatgatggggacgaaaatgagttaaagccagaaaacaaaaatatcaaaatgcaagagataatttttaattctgtcgaaccgattgatgaagtgacactcgttgggcagcagtcgtgccaactcttccagtttcagccatgggatgtcctccaacgacgggtctttggtaaacaccgctgccacgtatgaataggaacgccggtcgccctgcacaccaacggatttgatgggtaaaacaatggcacaaagtttgtcgtcgaatgcctcgacatattccttgacgcgctgttgcgtttcgtcgaaatgttcttcctggaaagaaaattcaattgaaattgaaaacttctttcgactttgaagggttcgtcggcgcaaatgatgcgaatggccaacccgggcccggggaacggatgtctgttgacgatgtgctcgggcagtcccaacgatcggcccaactcgcgcacttcatccttgtgaaactcttgcaaaggctccacaacccggccctaaaatatcaaaaaaaggataaattgttgaatcgccgaaaatctcaccaaatctctcagttcgcgaaccaaagcgctgtcgttgtgatgcgttttgattacatccgcacaaccgctggccaattgagaggcactttcaatctgacaaagagaagaaatcggataaataaaaagcgaaatgttcaccaaatcgggacggagtgttccctgcaccaaaaaaatgttgtccacattaaggtccaaactgaatggagacattta

SEQ ID NO: 31727 - DNA, 2034 bp, Heterodera glycines
taatccaaattcaacattgttggtgtcattcgaaagctcttcacatgctctattagccttacaaaaagcgaatagattttcaagcctggaaaaaattttattaagaaaaaacttcaaaatttcgactttttcgcaattttcatgtataacttttttggtaattgtctaatcgtgaaacaatagcttagaaaaagcttctaaacacatcacattaagcgttcgaatgataccaacaatgttggatttggttgatagagaaaaaagttatagccaaaaaagttctggggcccaatcgtgtcggcccaactgaggtaaaccgagcagttaaaaaaagagtaatggaaagggtgggaggcctcgtcagtacggctcttcagaaatgttttacgtgagttaagttttcagatcaccatgaaggagtgatctgatctgttggtgtaaaagactttgttgatcagaatcaaaagttggcttagcagaaatttttcagaattttttctctacataaaattgagttttggtcaattaaactttttgcttccatatttttgcaccgccaaaaattggatcaatttggttgcggcactataactttttgatggcttgactaatcgggatacttttttatttttttaaaaggcaaatattaggggtttcttttggcagaggggagagtttcattcaaacattgatctcttggagagccggtttaaattaaaaaaaaattttcttccatacttttgcacctgactgtatgtctgaattggtttacctcttttcccaattctttttcaaattgacagcagcgaatttttgatcgatgcagaaaatttcaatgctgaatttttatttatagaagaacaaaaattgagtggtcggaacaatttagaggagctttgcttccacagtaggggatttattgttaaatgaatcttattttaacataaaattcgaacagcaaaagatggcgaagataaaaaaaatcggcagatcggagaaattcatgccaatcctattgatgtatgctctaattaatgaaacgtttggaattattcttgtactgatcagaaatagctaaatacagaacataacatataataaattcgattaaaatttttatggaataaaaatgcttaattcttgttataattttttgaaatgagtgggttgggaccgcaaatgtcggaaaatgacctttaagaaatgggccgcaaatgtcggttttttcttcaattttttcaatgttattccttttcgatggaaagttcaatttaagcccggtgggaggggaccagagcgtttgggcccgcgtttttgggccccggggtcgtttgggcccccgtttttgggccccgtggtcgtttgggcccccgtttttgggccccggggtcgtttgggcccccgtctttgggccccgtggtcgtttgggcccccgtttttgggccccggggtcgtttgggcccccatttttgggcccccgtttttgggcccccatttttgggccccggggtcgtttgggcccccgtttttgggccccggggtcgtttgggcccccgtttttgggccccggggtcgtttgggcccccgtttttgggccccggggtcgtttgggcccccgtttttgggccccggggtcgtttgggccccaacccaaaaatagaaaaatgtgcttttttaaaaattaagattctaaaaactaagcctgagggatccctcgccacttggcataagttaggtttaattaacattcgctcattttttacaattttacttattccaaatcctattattttttaatagttaaccaatttgatgtgcattctgatttggacatttttcagaaatgactaacccaattgcaaccaaaaaacaaaaagtaaaattgtcttacgaaggccacctttacaccttcgctaaaatgagttctgatgggatgacaaaattttggagatgcgagttcaaaaaatcaatttcacattattttggagtttctccggggaatttctcgcaactatcgaatgaatccgtgaattt

SEQ ID NO: 31728 - DNA, 1101 bp, Heterodera glycines
tagaacttatttgcgcattttgttcgtgaaagtcttactgttgtaatttcattgggggaaacagaacatctatgtggaaatacttcatttattttcagtcgtacgctttatgtaaagcacttagacaacacaatcaccgaagaggaattgaaagttcgctatggcaaattcggacacattttggtactttcctttatcgttttttaaaggataacattttcctctttaggacattgaagtgaaaaatcggaatacaatggcaccatatgcgttcattcaattcacaaagtgaccattttggttttacttgttgaaaattcttttcactttagcattgagtccgtggcaaatgccattaaggcgtttaaccaacaatttgaggaatgcggcggagctcgtcacaaaaaggtcccttctgtgtctgcaccttaattaacttaagggtttttaaactcaaaattgtattcccaatttctgttctttttaccaaacttttcacgtaaatgcaattctttactttttcaaaaacgagttcagttttccaatctacattggtggggcaacactattgtcacttcacgactttggattggccgactgccgcccaactgtggcgagcagtatttgatgagcaaaatgcgggttgtgctcacccagccggacgatgtaacccaagtgatttatgacgccggtttcaacgaggccattgtgatgttcgttggccacgaatccactcaaattgccttcaacaaagtcaaaaaccgaaacatgtaagtgaacattttcgcgaaaatgcttcctcgacatacgttaaaaggggggtgggtcggaaattttttgcgaaagggtgtcggttgccgatgacctttttggcgccgccgggataattttttgaagctttgggtgggatttgttaacagattttcaccaaaaatggccactttttacgatttgagccatttttttaaagttgagatttttgagggttgggaaattttttggactttttaatgaatttgttaagaaaatttccaaaatttgcgaccccccccacacctcgtgaaggcccccccccccctaaaaaatatatgttccccgaaa

SEQ ID NO: 31729 - DNA, 853 bp, Heterodera glycines
  unsure (1)..(853): unsure at all n locations
cggggggactgccccgaaaacaaaaaaatcgatttcttcagggggccggngggggnacgcaaacaacgagggggactttttacccaacgcagaacgaaaggacaggcgagagggaagcaaggccggaaggagccggacgccccagaaagctggccgcagcggaacggggggacagccccgaaaacaaaaaaagcganncgcgcaagggcccgnccggggnacgcaaacacnnagggggagcaaaaagccaacgcagaaccaaaggacaggccanagggaagcnanncccgaaggaggcgggcgccccacaaancggggcgcagcggcgcggggggaccgccccgaaaacaaaaaaaacgagcaanccaaggggccgcacggggaacacaaacaaccaaggggagcaaaaagccaacgcagaagcaaaggacaggcaacagggaagcgaaacccgaaggaaacgggcgaccccagaaagcggggcgcaacggagcggggggaccgccccgaaaacaaaaaaagcgaccctttcaagaggccgaagggggaacacaaacaagaacggggagcaaaaaaccaacgcagaaaaaaagaacaggccagagggaagccaccccggaaggacacggacaccccacaaaacggggagcaacggaccggggggaccgccccgaaaacaaaaaaagcgaacgacacaagaggccggcagggagacacaaacaaaaatggggagcaacaaaccaacgcagaaacaaagaacagggcaaaaggggaagcaaaacccgaaggaggccggcccccccagaaaaacgggggcgcatcgggccggggggaaggcccccaaaaacaaaaa

SEQ ID NO: 31730 - DNA, 1014 bp, Heterodera glycines
atgattattagtgggggatgcaaattaaatgtaagaaacattttaagttcgtacataaaagaaaattcagaaatatataagaaatacgggtaatagaaagctggtgccccccccccccatttttgttcggaaaccaactaaaagttataactgcttagataaaatggtaatttgaatcattttttactaagactcaaattcgactttttgtttgagttcgggcccgggttcggaattggtcgaaatagatgccggattctggtcggcgactcctaaaacccttgaaagcaagacttttgaaaacaaaaaatattttcaaaaatgggtggggcaccagcttcattattactgaaatatgcacaaaaactcaaatatgtagaaaataggtaaaattgtaaaaaaacattttccgttttgctgaaatacttagaaagcgtgaataaggcaccaaatgtcatatgttttatgggcgcccctacaaagtgtccaagcctcgaaatgtccaagcctcgaaatgtccaagccacgaaatgtccaagcctcgaaatgtccataagggtaaaaaacacgaaatgtccaaaagtctaaaaagcacataaaaacccggaaacggatctaatttagggtttttggagtcgctgagtacgaatatgacatttacattgccccttgtctatcccttgatccacccgaacatgaaataagttcaagaattattttaaatgtgtgctgtactgacgactttagatttttctattcatttggaccaaatgattcgtaataagcttgaaagtctacaaaaaagtcgagagaagcgttaatttcagacatttcaaacacaaatgaggatgccgtgaatttgggagtggagcttggcgacccgaatgccgtgataattttcgacaacgttgacagactttgaacgaggctgaagtcttaataatgaactttgagcgcggaaaaacatattttgggggacattgcctgtggctgaatggtatgtttgaagcgaca

SEQ ID NO: 31731 - DNA, 1663 bp, Heterodera glycines
gaagaaaaaattttttaatttgaaaattatgttaataaataggaaaaaagttgatttttaggggggggtatttttcaattttcttgtatttttattgcaatttttttcaaaaaagccaaaatatgtgcaaaatatgtggcaaattccaaaataagtgctaacatattttatgtgacaaaacgccaaaatatgtgtttttatgtttttataagtcgttttaaatcaaaaatgttcggagataatgctatttttgggcttctctcgccataactaattttgccgcaaaaaaaatatgtaaaaacataaaaatccgggccagaatgatcagcgagcatgaaaactcgaggaaacttgtttttgaacatttttttgatcaccatcttattccatttgtacacattgtttaaaccactgtgaaataaatgctttttcagcttttaatacactccatgcgaattcaaaatgggctattgagtattggcgtaattatggtcttcctgtttcaaccggccaaggtttagcaaatttggcggatgttcagcaatctgttacttcattttctccaattcagacatcttcattcataacaacggacaagaaagcgcaggtgtccggcattcgcattgaacctgagcagggcgcgggcggattcgtcggatatgcgtaggtcattaatgtcgatgtaagatctaacaaaaagtttcgcagggataagggcgtcagcatcgttgagccggacatggatgtgcgcgttgtgctgtttggcatccacctggacgaaattgaccttgtcggcttcacatccaccgacaattgctccgacgcggcggtgctcatcgatcgaaatgaatttgctatccaatcggaaagacgtgtcgtggtcatctatcactttgcaaggttttttggcgccatgattgaatttgttaaacccataaaactttaagcaattcattatacaaattgtgcgtgcgccaaaagccccatcctgattatccacacgagcttcccattcatttggttggttggtttttaaataactatcatatcgctccctttgcttgcagacggatgaagctcactgttgggtgtctacgaatataccgcctcgcaaatactacttctcaatgcctcttcaaattgtcatcattgcagtgctgctcgtcctttctggtctcttctcgggtctcaaccttgggctgatgtcacttactccacaagagttgactctcatcaaaaattcgggttggtgagaaaatttttgtggaataccatggatttattgtttgtctgcttgttgatagttcttggttgttgtttttttcgagaaatgatgttcctttctgtttaggttcaccaaaagagcggaagtatgctcagaccatcctgccagtgcgcaagtccggcaaccggttgctgtgctcgttgctcatcggaaatgtttgcgtcaactctgccatctcaattctcttcgacgatttgaccagtggcaccgttgcattgatcgtttcatcgaccggcattgttgttttcggcgaaatcttcccgcaggcgctgtgtgtgaagaaagggttggctgtgggtgcctgtaccatatgggtcactcggttcttcatgatgttcccttttattggatgttttttttgggatactgtttgtaagc

SEQ ID NO: 31732 - DNA, 1375 bp, Heterodera glycines
acccccccccctttccacctgtgctaaaagttcgtgtttctccatttcttctctttccaattgcgcatgcaattcccttttttgggcaagcaatgcgagtgcatcgggtggaaaccttaaggatgggtaagctttgttcaccatcatttttcgattgttgtttttgcagtaaacttccaaaaaatcgcagattttaaaaataactttccaccccaccactcattgcgcacttttccctttccaaagctccgaattgtcttcgcgtcgcctccaattcgcgcgttcgttcctccaacattttcctctggtcgtaaaataatgaaatgaacatttatcaaacatgtgttacataagtttgcaacaaaagaaaaaatgtctatgataagcagagcagacaaatgagcgagttataaaaacatccctaacaaatatctaattttggggggggggggtcggcaattggaaaacccatttaagactcataacacctatttatccatttccgcacttattaattgcaagcacatgcagccggacttagttacctatgttaaaaagcagcatttatttgggagggggcgtttcgggactttatcctatttaaatagttaatttgtgactaaaacctttaaattcaactctacgtaggaatgaaatttattgtagcaattgtttattcactcaccaactttccctgctgtgccttctcgtcattttcgtctccgtttatcattttcgttgactccgcctaacatatatcatcaatttgacaaaaaatgcctaacattataaaaaaaaatgattattgaaacgaaaattaaaaaacaagacttgcgaagaaacagcagacactatataagtcagacactacattaaaaattattgaaaataaaagtgaacaatgcgccaatgaaaaacagacagctgaggttagacactatatgttttatcattgtttttaattaaattttgtatgcttgtaacttggtcaatagaaaaccaaaagaaatttttttgtgctcattttgaagggaaaattctaaagaacattcctaatttaatcaaaagttttaaaaaaattgtttattagcaaaaaaatgaatagtgttattttatatgttagagacatggaaatagtgcgtcaaaatgagagaaaaagaaaaaactttgtccttgaaaaaaaatttttcctattgaccaattttcttgaaattttctatagacctatattttgaccccctctagcgattccaagtttattttatggaacttaagtttttaactcgagatcggctcttcagtttttacaagggaaaatctcggcaaaatttttaaattagtggggttttttggcgttttgtctgtgcgcactttt

SEQ ID NO: 31733 - DNA, 1220 bp, Heterodera glycines
cgcattgcggagctttttcgcttaatagtagggttgcgttttaccggtaccgatactggccggtaattaccggtttttttggtaccggtactggttttttcaaaaatgaaattaccgttaccggtttgtctagtaccggtaccgccggtaaaaatttgcactggtaagaatgggggtctggtcgagaaaagagtaggaaattggtgaagaaggagaaatttttgagaaaaaattaaattttagccggagaccccttcgcaaaattggaaaattggccgctgattattcaaaaaaccgcatgtctctatgacttatagcggctgaggtatgggcacttcaattttgacgtagtgtaaaatgcactattttcttaagaaatacagtactttttataggcaccgaaataaaagtcgacgtatcgcagcgggcctaaatcgtagacccactattccaaaggcaatcggtagcaaattttgtgctctataaaatgggcctactcaaaatttccagaaaaattttcccaaccccctagaaattttttttgaaatttacccctcgttcccagccaaaatgggctgatcagatcaccatgaaggagtgatctgatcaacttggtgttgctaccttttttgatcagcatccaaagttatgcttacctgaatttttttagatttttttaatgctgatccagagaagcaatattttaaaaatgaaatgggacaacacttttgaccacctatattttgatcaaattgtgaatatggtaaaataaatcaaataaatgtttatgtcacaaatgcaaatatggtatcattggaaagcccataaaaaatgctatccaatggtatgctacttatctgttgaaattggaaaatgacaattttatacgcaattatttttttcaaagcatgatgggacaacacttatgaccatgactgtatgtcctgaatttgaaaaaaaaaacttggtcaacctgaatatacatatacttctgaacaattctaatgctaaaaaacaggtactcacgcgaaaactgaataaaaattttgtatttggaaaattttgtccaaaaatttttacgttggaaaattaccggtttttaccggtaccggtaccggtaccggttgaaaaagttggtaccggtaccggtaccggtttttgcagtaccggtcagtaccggtaccggtttttttgcaattaccgattaccgctcaactcta

SEQ ID NO: 31734 - DNA, 944 bp, Heterodera glycines
attaaaaaaaatttgccgcgacgatttctgccggccactttttgtcctgctccgccctacaacagcccctttcccgagaaagcttatgttgcatagtttcttgtttttttatttctttactatttttgtcttttattggggacggatattccattataaaatcttggccctgcccattaataattctgtcttgcaaattcagagcatccgaggcagatttggtccttttggtgattgacccttgccaatctttcggtgattcggaaaacgatcaattgcccaccgcttcattgctctctgaattcggctttgacccttccacgcagcgattgattgtcgtggtgaataagttggatttggtgagggaccgaagtgatcgatttcgcattgagaaaagtgagaaaaagggagcggtaggaggggcactcaccacagaagagtgatcaaattgtttctggacttggggggaggcgtacgccgtgtactcctccaccccgccccaatggtcgatgttccctgtagtgcgactgattggcacaaaactctttacaatcatttcatacaaaaagaaatggaaaagggttgatgacaattttgctagggataaagccaaataattcggagagtagaaacttagttgaaattgttaacaggtttgccaaaaatgacctctgcgacccttcacacctccctcttttacaccggctccctttgtgctgatgggtccccattttggcccccttttcattatgctttagttttaaacagtgatgggtcgctaactttggcatggacgagctgtgtgaaggaaaatggattggacgaactgttggggacgatggggagggcatgttcggaggaggaatgcggaacgggaaaagggggcgaagtgtttctgagcagagagagacacgtccactgcttggaaagagcagtgactcatt

SEQ ID NO: 31735 - DNA, 1197 bp, Heterodera glycines
attaaatgctactgtcggccccttaaactcattaaattcaaaatgacaaataaataaataaaacaggataacccgaatcaagtgaactgaacttccaaatgcgaaagataaagtgtagttcacagattgtccaaaatcgcgcttcggtctcacattcaaatgcatgaaccggtaagtgcctcgaaccagaagagtgtttgaaagaagggtagccctttcctctcttgcacaaatatgaacacgcaaatgttgctcattttccaacaaaaggtttatgctgggcgcggatgtgccattgcgaaaaggaattctttccgcgtaatcaaactcaagcactttaagggttaatccactaagcaaaaaaaaaactttgtactcagactttaatgaaagggtttacgggatgtatgatccaatttgccaatcgaagaccaaaaaatcatttgttgtagtgccatcctgataaaattgctccagaaatggtcgaacacccgcattccgacccgttccctcattgttcattggtataatttgttgttgttggggggtgacgccctggctatggacatctgtagcaatgcgctcaaagtgttgtctatgggtgagtgttatccctgtcggagggggaaaagcagcaggaatgggtgtctgagcaaaaaccggatgtggaaatggccctgtaagcggatgcgcaaattgattcatcaatggaagaggcaagaattgggacggcattgacattggattgatgaatgggttaagaagaaatggcatttgtggcacttgcgacggtaacagcaatggtggtggtggtcgtggtggaaaaggcaggtatggttggtggtgtaccggcaacggaaatgtcaaaccatcataccacgcaggctgaaaccgggtaagaaatgtacatttattcttaaaacgaaaagattacaaaatttgtttgtccattaactgcaaacggtgctctaatttcagtgaggttctaaatatatttttaaacaggaaacattgctgtgacaacttgccctcggattcgacattgagtgcgttgtgaaaaaaaaaataaaatacaaaagctaaaatggattctttttttaatctgcataaagtgacttatgcaataggcattattgccttttattacgcaaaaatagttggccttttgcaataaaaaaaatcgctaatcatttaaca

SEQ ID NO: 31736 - DNA, 911 bp, Heterodera glycines
atgccgaaaccaccgctgatttggttggcatttttctttctttttttatatttcttttgtgccaaaacattattggagtgagattccggtgcgggacgggatccggattttacggggtcctagtccgcaatcccgcattattttcagaaaaccttcaaaaacgccaaatgaatagttaaattttaatgctaattgtaagcattaaactcatagcacgcttctataagcctaaaataatgttagaattacgtctttcttgttttttttgctcgaccaaagttagaaaaaatttaagcacatgcttcaaactcttgccggtcccaattaattaattaggtgcaattaaaattccatttggagtcaaaaaaaaaactatttacgaattttaattcatttgttaggtgttggcattgaaccgctgcttggatctgagctcaccctatttgtccaacttgtttttctccgggcgtcgtacctcgttttggatcatcggctgttcactgtacgcactgtactgggccttattctgtaagccggcggtgtacagtagcctttactttggctggttcttctacccatttgttggctaccgtaacacaaatcttgaggaggtgaacaaaatgtgtatctatctgtttttatcatttgaaagaagcaatatgcataggtattcgaaatatggtatgaactcaaagaactgtatgtaccgtacaccttgttaaatgaagcccgttcttacagtatgaaaacttgttgcatgttgtgcacaattgcctggtctcaattctgtgcccgctcatctatctgatttttgtgggaaaacttttttacaatgtccgcaaaactcgtcaacagtttggcactgtgctttcggatatcagcgcagtgcagatacgggtaaggatggttgg

SEQ ID NO: 31737 - DNA, 1249 bp, Heterodera glycines
aaagtttattagttcatttcctctctcaataaaatcttaaaaataaaacaatatattttaaatgtttaaaaatatctttttggctttgtccttcgcaattatttttatttaaacatataaacaatatagtacaaaagaagtataaaattactaaaaaaattaacaaaatccaatgagacaattcagggaaaaccctatagagtttgtctttttcaaataaaaaaagacaaaaattaaaattactttttacgaaaatctgaaaaaaaaacaattttttcaaattgtagtttatatataataaattttatttttgaagcatatatttaaccgatacatttaattgattaacgtcatcattaaatttatagaatcgccttcattaataaaaaaatgaatttatattattatatttattatttctttaactgtttttgtttcttttaatgaattatattcaaattataacttttagaatgtttcaaaaacgtttggattattttttgattttttacacatttattttactgctgataatttcagtgcaagaagaaaatgaagtacaaataacttatgctggcgacgtaaccccacctggaaattattaaattgttgtttgggataacctaacaaaaagttcggacaaaatgttttttttatacttcaaaaaataacaaaaaaggtaaaatttattaaattttaaaataattaaacataacattaaggatcgtatataatggggtacttttattagcatacaatactcttggactcgaattagaaaatattgggattctaaatctaaaaaattctcatccaaaattggtgccggtctttacagaatcggtccgtagcgttcgcattgaaatagttttttagggttttaaaaataaaatttctttaagtatatttaaatcaattaagaatcggatactcaacgcgaatacacaaagctatgaaaatgtggatgtgatattatcattttcaaatatgagaatggaattgttttggagaatttaagcgattgtttcgttcatttttattcagttcaaacaaataatgatggcgaatttgagatcaaaatatccatcaatgtcaatgacaatttaaatgttcacatatttccacttgacaaacaaatggtaaattaaattttaattatttacaaaaaataaataaattttaattttaagaatttgattccatccacaaacgaaccaggcataattctacaaaacaaaatgaaaagaga

SEQ ID NO: 31738 - DNA, 1200 bp, Heterodera glycines
  unsure (1)..(1200): unsure at all n locations
caaaatgagcaaagaatgcaaatattgtggtgtggtttgggatttgcgtaataatacccaaaatggaagagaggacttaaacaaaaaatatatttctcagtaatgaaattattatttagggtcacaaatgcaatgagcgatggtgcgaaaattgtcaaattttccacgaattcaaacgggggtgtttcattcgaccgctggagttaagcccaaagaacgaagcacgggtgtggagattagtcattttcgaccttgaggcaatgcagcacgaaccagtggatccacaaatccctgagcgacggaaacattaagtcaactttgtcaccgcaaaagttgcttgtcctgactgcatttcaaatggacaatggaaagaaagtttgctcggaaaaaatgcaatattttgatcaaaaacggaaacagattactcgaaatgaaagtaataaatatatttttaataatatttaaatttacaatttttaggtaaaaagtcggaagaaattaaatccaaatatatcattccgagattcttggaatttggttcctggtccattagcctcaatggtcccaatgtttggcttagatgttcaagacaagccgttctttccacatttggcaaacaggccggaaaattacggctgtcaaatatttccgacgaaatcaaactatttggccgatgggatgaatcctgagaagcgtaaagaatttgacatttggtatgatcaaaaccgaaaccagccatttctacttgatgaagcattggccaggtattttttatatattttttgaaatacctaactaaattttcagtattgtaaaaatgacgtggatattttgatggcgggccttattgccttcagaactgaatttttggagatgagtaaacgaccggctgatccggacggcaaggcaaattgagcagcttacagaactccacacaacggaattgacccgctcaaacattgcataacaattgcctcagcatgcatgcggcatttccgaactaatcatttaaagcctggtcacttggctcttgttccggaaaaaggatacgatagttgcggtgacaatcagagtgatttggcaatgagttttatgcagtggtacgccgaaaaatatgctgttcggattcaaaatgctttttcggcagaaggagagaaaaggggagttgagggggggatgctgagcaaaangttaatctca

SEQ ID NO: 31739 - DNA, 1112 bp, Heterodera glycines
tataacattcctcgtatgaacgcctgtgagctcagctttgacattcattcgtcaaaccaagtcagttgattttaataataaaaattagcgaattattttattcaaataaatcactattaataacgaggcatcctccgtcggtgggctgttctatccggcttgtatgcgtctctaattataacattcctcgtatgaacacctgtgaactctgctttgacattctttcgtcaaactttgttaattgctttaatattaaaaattagcgaattatcttatccaaatttaccactattaatactgaggcatccaccgtgggttgttctatacggcttgtatgcgtctctaattataacattcctcgtatgaacacctgtgaactctgctttgacattctttcgtcaaactttgtcaattgctttaatattaaaaattagcgaattatcttatccaaatttaccactattaatactgaggcatccaccgtgggttgttctatacggcttgtatgcgtctctaattataacattcctcgtatgaacacctgtgaactctgctttgacattctttcgtcaaactttgtcaattgctttaatattaaaaattagcgaattatcttatccaaatttaccactattaataacgaggcatccaccgtgggtctgctgttctatacggcttgtatgcgtctctaattataacattcctcgtatgaacacctgtgaactctgctttgacattctttcgtcaaactttgtcagttgcttttaatattaaaaattagcgaattatcttatccaaatttaccactattaatactgaggcatccaccgtgggttgttctatacggcttgtatgcgtctctaattataacattcctcgtatgaacacctgtgaactctgctttgacattctttcgtcaaactttgtcagttgcttttaatattaaaaattagcgaattatcttatccaaatttaccactattaataccgaggcatccaccgtgggtctgctgttctatacggcttgtatgcgtctctaattataacattcctcgtatgaacacctgtgaactctgctttgacattctttcgtcaaactttgtcagttgctt

SEQ ID NO: 31740 - DNA, 1416 bp, Heterodera glycines
  unsure (1)..(1416): unsure at all n locations
gggggggggggattcctttttaggattttaagacaaataaatttattaattacccatcgcttcaatgagtcgattcttaaattagaaaaaaattacaaaatatgtggaatnaataataaataaatgagggtcaaagtcaatgaggtcgaaataccaaatcacttagaaatttgttacattctaactttcnccgtcttacagattaccctagtgaacttntaagttttattttaaattgttntaaagaatttgtttttattagttctttatcgagttgattccacaattttgttaccctcncagcaaagggaatgaattttttgcccagtttgtattttgtgttaaatctataaaaggggatgttaaagcgtgtggatggattaaaaatagaaaatagtttcagatctgttcggccataagcaattttattataattgcctcgtaccaatcttgcacaactgttattagttgacttgtcgtagacctatttctaacaaaaccaaattggtattccgaaattttattgttttttaggagaaagttgtaaatattttggctaagaattctttccataaccctgcaaagtgagcatgttatagaaataggcctataattttcaggattgaatttgtccccttttttgaaaagaggaaaaactattgattccttccagatatctggaagagaaccagaatctaatgaaatcctgaataggtcagtaataacagttgctaatgaagaatggcagtttttcaatattttatagctaatattatccggggaggtcccgtttttattcggaagttttttcaaaagtttttgtgtctcgatgatgttaaagtctatatctgatataaagcattgattaacaaaagtattgcccaagtttaggtagcctgggtcaacatcagaattattaaacgaatttgcaaataagttggcaaataattcacatttttcatcaccatcatgatagcatttgttttcaaagattaaattcggtatttcaaagggattaacatcgtatttttgtaggtatttaaaaatggaattttttccctttgaaatagcctttttctcaatttgcgagtgaaatttatttgtttgtatttttatgtgtaaactaatgctatcataaagtgctttttttgttgggtcagttttacattgcctatacagtctggctttctctttgatggaggccaataaatgcgttggatatttaggggtcaaatcttttttggtaattttttccattggaataaactcgtttaaggtttctagcaatgtattattaaaggcgttgtatttttcgttcacactaaaatgctcgttagataaagcgctaattctagaagaaaccataatattaaaaagagaaacattcgacggaaaaaaccgtcgagtgtaaaagaa

SEQ ID NO: 31741 - DNA, 1649 bp, Heterodera glycines
atattcgggtttatatatgggagttggactgggagggaaaattctagaacacacctgaaaggaatggaaaatggggaaacttcgggaatattaatcacaaagatcacaagggaacattcgagaatcttcttccggtcctccacaggacttcctcatttctttcctccgggcggtcctccaagcggtcctccgggctgtcctccgagcgatcctccgggctgtcccccaatttccacgcgttcagtcgccagcggcgacactccgggcggagacgaaagttcacgacgcagaaccgagattttgaggcgcaacgactgcatgaatgctgccgcctggcgatgttccagcgcgtcgcggtcggctctttcctgttcgttggccttcagcacttcgcccaatttgcgcgtccactccacgtacatttgtccgatttgcgccccctgagcgatgacttcgtcgattgctgccacggcgcgttttccacgttgttgcaattcctcagccatgctcaaatgattgtctcgctcgcggtcgatgcgtgccccgatttcgctgagtccattcagcacggcatttgtctccattggcacttggagacccggtcgggctgccgccttcttttccgccacactgatggctgccgccttgggtttttccattgcggccatcaattcttggcgtgctcttttcttcgatgcgcgaaatgcgccctcagctgatgcccgtccaccagcgaccattgaggcagcaacgcctccagctctggccgcacgtgcctgtccaccacctttgactggcagttgaatgatcggaggtgccgagcattccatagttgcttccgcgcgtttggcaaatgctgccgccttctttcgatccatctccgcttttaccagggcattggtctttgggcagcgagcctcgtcgccagacaaatggccaagcaatccgcatttgttgcaacgcgatttctgcgcattcagcgggcctactatgcgcgctcgcttcacgaatggtccctcagctgccgccactcgtttggtcttcggtgcctccataggtccctgaattcgaggctttttgacctcttggacaaccggcgatggtgcggcactggctaccgctgcttcgagtgctgccgccgcttcttcctcatcgtcgtcgtcttcctcctccgactcactctccgaaatgtcgattcggagcgcttcgtcgtcactttcttcatcaatttttacgaaacggacgacttgttgtttctgctgctgctgctgttgttgttgttgctgttgttgatggtgttgctgtgctgctgaacgaattcttcgctttcatccaagaacttttcaatatccatgttcggtaggagttccgttgatataaggggcaggaataaggaaatgtaagtgactttttgcccatttccctcctccttatatagctgccgccagagggcagaggacacaattttgtgtccctgattcatgccataggcgcacaaaaacggatgactcatgttcgttcccttcattcggaaggaagcatctccatcaacagcactcatcggcccatgattctccgcctctttctcgcttcccgggtgcacatctccgccgaagccgtgcagaaagacctgattcatcggcgcttct

SEQ ID NO: 31742 - DNA, 1610 bp, Heterodera glycines
ccccccccaatgtgtccgtccctattgttctcccctattctcatctgccgagtgctgtgccgtgcattctccgagcaatttaatgtgtgtgtgacgacgcccgcgacgaacaagtgcaagtgcggcggagcagcagctcccaccctccggggagaaacacgaaaaaatgtaacggggaggtgagaggaaagaatgggaggagaagggtcgaaacggtttaatgccccccactcctctctctctccctattcatccgcccccccccccccccgggggacactcgtgtgagaagagaccgtccgttagactgtcccccatgcacctccccggcggggccaaccaatgccccccatggaaaggcattttcttgtcaagtggggggggggcagagcgaatgaatgggatgaattagcggaagcaatgaatgaatggatgcaattggatgtacttcttcttgttcttgttcttcttcttcagctgatgatgtgatgatggaagggatcaattgaagtgcttttttcgcggggcggggtaaaaatggtaagggacgagaggagagagagagaaacatggacaatttttgaataaatgctcaatgaatgggcggggagaagcggctcggcattataatttggcaacgaattttttgcaaaaatgggaatcaaattttcgggaaaaatggcacttaattgtttgggccctaattagttttgcgcccgtcaatttttaagaatgccatagctccttttttacgagaatggggtagcgagaagcggcgcggcattatttggggctgctcgacaaataggttccggtatacaaatccatccacgatgccacttcaggtaacaatccattcttggtatcgctatacacggacattttttctcaactcgatactcggaacccacatcgagaaactaattaggccaatcacgaaatatgaatctaaagattagggccggcctaatttttccatcaattttgcctatgatatttttttaggataattccccccagcaggaaaatagtgttttccactaataacccgaatacaaaattttgggaattggatttgcgaagaaaaacccaagagcttggacaattcccgcccctctccattctcgaaatttcccagccaaaaaaacggcaaattctcaatgcataatttaggaataatataataattgattgattgatcccggcggaagaaagcaagaaaaacgaacaccccccgcagcagaggagcacacaatcggccgaccggtgcttttctgctgctcctctcttttcttcccattcatttgtgccccggggggacgccgattttggggcccaatcgccgacgccgccgctttttggcggaagaattcttttgaagcggcgccggcgccatcccccggggggacgacggaccaaccaaagcaaaggtgaaactgctgggggaagagaagagttggacaacgacgaaaacggaggacagtgtgtaaggaaatgtgattatgcaaattgatgatggatgcgatggcaaaagggcggcccaagcagcggcgatgggttaaaattgaaaaattttgggggatgggggcccggggcgggggggggggggg

SEQ ID NO: 31743 - DNA, 910 bp, Heterodera glycines
  unsure (1)..(910): unsure at all n locations
cttaactaaccgcaaaaggcttcgttaagagtttgttgngccgggnnnacgatatctttaatgtcctggaaaaaaccaaccccccccccaggagtgcctcaaaaaaacaaaaacaaaaaagcatcaaatcattctatcctttcaatttaatttacatattcactatatttagttaatggatttaaaaccaaatccggatggtaatttcaaccagagcattaggacttttttctaattgatattttaataaatttaaaaaacaatttttttgtgaagtcgaacgggaaggggggggggagtgaggcaaaaaatttttttttgtctcattcagcaatcataagctgcacatttatttgttcaaaagcatacatatactcgttaagctaagcaaataatcacattaaaatttccaatttcaatccatcatatgaaacaagagaaggcatccataaaaacattaaaaaatttccttaaaacatcaaaataaattgtcaacatacagtcagtcaggtgcataaaatttccattttgagattcgcgcggtattttgcgctattctgacaatttgcgacaatcggtgcaaatttaatttttcggtgcaaatttttaattttttttaaagtttaagccaattacaattcatgcttcttctaacatcatcatcatcagcaacacaaaaccattattaaatcgctcacattttggaaaatgttaccatcaaataaattcttcaatttcaaaattcggattaaaatgcatttgttgacaacagtttttgtgccatcaattttgtccatttatctcctcatttcttcaccaggtgagttttgtgaacaaaaaatattaaaacccgcagttttttctagaatttttttttgcagagtttcaattcttgatttctacatattcc

SEQ ID NO: 31744 - DNA, 1697 bp, Heterodera glycines
  unsure (1)..(1697): unsure at all n locations
ttgatttgatggcattggtgggcaattggctgccgactgaaattaaaaatgccaaaaattgggaattgccaattaaagcaaatttcgaattaaaaaaaactttgcatttcttccatttgaccaccacccaaatgaacacataaaaaacaattgcgataaaattggccatcagcatgaaagagaagaagatgggcttaaactcgaacaggaaaatgtcgctaattgtgcctgtctggggccatttggggtggcaaaaggcaatttgggcgtatttgaggctcatcaaagtgccgaaaaacagcgaaacaagcacaaaagtgccgaggtaaacagtgcgattcacttttgcatgccttaattttgaaattgcattttatatttaatgccaattcttaattcatttaatcaatttattaatgttgcaattcggcaccatttttcaaatgccaattggatgagtctgtccagcccggttagtgcgattaatgccaaactcgcactgcagccgaccaacggaacgacaaggaatttgaacgcagtgaaataagggacgaaattgcggccggagagggaaacgcaaaggaaaaactaatgaccaaattggtggacagtctcaaaaagagcagtcaatgccaacagaaagctcgaagtgccacgaagagagctgcgaaagggaaagccaagctcaagaacagaaaagtgaaaatggaaacattggaacagataattaaacgaaatcaaattaagcgtaatttagggacaataagcggggaaaagtaatcggaaacattatgccaaggcttagagcctttttgagtaagcttttgcctgtatttgaaggtgatcaaaaggatgccaatgttcatcaaaatgccggggacgacgatagcattgagcagcgatgccgtgaagatgagcattggggaatggccagagtctttgtattggacccacagctganaaagcattggctaacgtaattgaagaaccaattaaactttacctgataatatgaataatttttattaagtccttcaatttgcccattcatttgggattttcagaatttaataatgcgataaaaaattaaatgattaccttttacgccaaatagatacctaattgctgcaatttccgcgagtttacattgaatttttaattactacaattagcattaatgagataagcgttaaagtaatcttcagcaggtgttttatattttttaattactttttttctgtgccgtttccgctagttaaagtcaatggcatggtaatgggcgataaatttaatgatgtgattgatatccttttatctaattcattattttcacggttcataatttgagcaattgcaataattattttgtacaaaattaggtttttcttgaaaaagattataattgaaatagttacagacagattcatttaaaaaataataataattttgatatgaattaagcatgtgcaatgaatggacaaaattgaaaatgttttctaattataaaaaattaaatcaaaaacctttccagatagaaataaaattgatttaatttaactaaaacttttgaaattagaataacaaaatttttaagtggaaattcgctgactcatttaaatgcctcaattttttgcacaaaacaaaaagcaatcaacaaagccatttgaattttggtgggaaattataattaaattgtc

SEQ ID NO: 31745 - DNA, 1431 bp, Heterodera glycines
  unsure (1)..(1431): unsure at all n locations
cttttattattgttaattgtaacaattctaacccccccccccccctcgcctccccaaggtttgggtttttaattagttttatggactaattattttaacaaatgtaaatttgaaaaatcgttggacaaatatccccccccccgttttccccaccacgcaaatggcaccgccaaaacgtcgttttgttccatcggaaagcgcttcttcatcatcatcagttgggcgtagtaacgcttcgccacacaaatggactccacgtcgttgccgcagcgggcgaccaactgaaaaaattgggcaaagcaattgaaattgcaaaatctaagctaggggatggatgggtcttggaccgggcactaattgtcggtctggcttaagacctggcattaatagtcgagagtagtgggcaagttacaaattgttgggaaagggtcttgaacccggtattaattatttgatcatcgctcgctaccgttcgcattttctccagctcatccaacgccgcgtcgtgttggctcgggtcggcttggtagtgctcggcaatatactaaatgagaatgtgccaatgtgggaaaaagtgatccggcacagaaatggatcaatcagtccaatccgatcagtcctaaccagtctgatcagcttcttctactgatcagtcagtgcaaaaatgccaacaaatcaccgatttgatgcgcggacggagtttgtccggaaagggctgactgggcactttcatctccggcgccaccatcggaacacgcggaattccctccatcccttcgggcaaaaatcaaatcaaagcaaaattgggcagagataaatttttatttttattaattatttaggaagatggaaaaatggacaaaagaaataaatttgcgtgcaattgcatcagaatttgttaggcaaaaaaataatatttaaccgatttggctaatcaaaaatttatgggaaaaaagtgctgatcattaaaataagtaattcaaatttagacgagaaatcaaaattgtacataagtaaaactcatcaaacacagagttgccctcaattaggacaacggtggcaaggccaatgacagttttatgatacaatgacgtaattaacggtaattaatgtaatcaaatgtaaaagccaaaaacacagctgttcattctggtagtttattttgtgatacatatataaatattctgttggacaaatattttatgggatttaaaagttagaaaattctatcgaaaaagaaaagggatacaaaatttttatgtaaagtaaaatttgaatggtaatgaatacaatttgtaataaataaaagaaagcgcacgcaattgggaccagcattttgcgcaattanaatcgaacatttgtcattttaattattaataattgccccattngcgacgancgacagtcaaacggaaaaaatgatgctgaaat

SEQ ID NO: 31746 - DNA, 1374 bp, Heterodera glycines
gtgcacccatttggacaatgcttggccagcagaatttgttgaatttggcacatcaaaatcagcatcaatcgcagcgggcgacagaccaaatgatttgattgaaatcaattggttgagatcggtgagaattgtcggcgaaatgagactacgcaaattgtccaaatgatcaccacgggaaaagcgcaaacagcgaatgttttcagaaaaaattggccaaatttcacgaacaaaaacatcccaaatccgctggccattcgtagagtgtgatgatggaatccacaactgtaaatcgatgcctcttttgtcgaaaatttggtgattggaacgaagaaaagcgatgacggagtgatcgatgtaactgtgaaaatgggatgaatgcttttattgcgatagctctgatttttaattaccacatccgaaggcgcttaaaacggattttgctgggcaacggacggtccggcaacggaaattccacaaatttgtcatccatccgcacagatagtttcggtcctggtcctttgtccttgcgaattacgatttgtctccaaattgtcaattcgcttttgccatcgaaatgtttatccaccaacgcatcgaaacgtggcgaaagaagtgccaatttgaggccaagttgaggacggtcaaaggatgggaaaatgtccatccaaacgtcgttgcaaatccaactgaaatgggaaaacagtttagtcaaataaacgacgaatttgtgacttttaaaattcattaccgtcggttcatttttggcagcaattagcacaattttggccgagttccgaatgatttcaaacaaaagagcagaataataattcgttggaagctttatttttttaatgagtcaaagcggaaaacaaaagatttttatagtcatgaaaagggaattggtgaatattttttgcatatgaatagagagagccctgatttttttagatttttcctattttttacggattgtacttgatgaaagaaacacgaaaatcacattttattaaaacaatttttgaagtttttgccttcaatggggttggacaatgtttaaatgggaaacgaaagattattgacaaaaacggaaggggcggaaacattttggcataaaatgaccgattggaagaggaagaaaaagggaacgcaacagaggaggaccaccaaagaggagaatattttgcaaaatgatgactagggatgggaatttaagtcaaatgacttttttgctgactctaaatgaccttaaaatgacttcaaaagcgatttttagtccatattttatggccatatttcgcgatttatatccatatttttaccatccctagctcatgaaaaaattcaactatctaaccgattaaaatggaaaatcat

SEQ ID NO: 31747 - DNA, 911 bp, Heterodera glycines
aatcgcaaaatatgcacaaaaaaacatgaaaattatggcagcctgatcattattattaatttgttacacatttcttggataaacaaattccataaattccatgtgaagtgttttgttaccgattcggcagttattattacgctgtgtaagactatttggtccaaatacaaattccttttaaaagttattcatgcaaggaccaactgaataatatccataaaaacatcaacaaaaacatttattattgttatgtggcgaagtgctgaagtgattgatggtggcaatttttgtaccattccaatgccgggggggggggggggcaaaaaatcggacaaggcaaatgccgtaattgtaaatgatgatgaagttgtcaaaaaaacgcaaacaactacagcatcaggagcaaagtcaatcgttggtcaacccaaggccattgaacaaatggaaggcaacccattggttaagtaagtacaaaaggacaccgagtaaatatttgtaaataggagcagcgaaataaattattaaatgaaatgctattacggccttactttatttaattaattgctaaccatggatttgtaaataaacatctttaatttcaaatttcaattaaaatattggaattttcttttgtgtgtgtttaaaaaatgctcttattattcagttaccactggtggatatcaacaagattagctatggataagttaaaataacatatgcgcttttctttgattgaatctattttatgtgctatattttctttggggatttgcccgcgttgctttaaacccctctcccctccctcttcaaatgtttaattttgcatatggacaaaatggaatgttcccgccccttctgtgcatctcctctttggctgacgttggacattgcctcgggcgttacccctatat

SEQ ID NO: 31748 - DNA, 1492 bp, Heterodera glycines
atggaaattgtcaattctgttcgagaagcattgccactctttcaaaatccgttgccgaacaaagtcatcggattcagaagcattgcgatcgagtaaaaattgaattgaatttgtaaatgattgtgtgccattacactttcgcattattttcagcttcatcaaccaaaatgtgctcacttttctcggccgttttcaccgtttctttgcttcatgtgaaacaacattgcacatcaacaaagaaaaaagcattaaaggtcgcaaggccattattgatggtcgcattttgaagttcgttgtgctcaccatttggccaatgttcaaggacaccattcgtgtgatgtctttcaacaccaacaccttccgtcaaatgcgcaaattggccccgtccattctcgacgattgtccatcccttcgcgttgttgctttcgatggcaccattttgcccaaattgccgccttatgacagtgccagtgcgtcgaatgacaaaacggtggccaaatggctgttcacgcctcgtcccgacaatttgcggaaggttctcattatcgagaactcatcggttgagaactcagcggttgaccaatggttggcaacattggaacaaatcaaagcggtgattattaatcgactactcatatttcttttctttttttatttgtcttctttgtaggcattttcctctgcttcttctcctgtttctttcgtcatttctgttaactctaactctgagtcgtcctcttcactttcttcatttgtgccatttgaactgaccaaccaattgactggggagaaattggcactgtcacattatggaaatggtattatgcttgtccgttgtccaattggcgaaggcagtgatttggaagaggagattgaacaattgatagacggacgaaaaaacaaaattgagatttccatcacaaaggactgtgtcgacaatgggtgatcaatttaattaattcaatttgatttaatttgtttttgtttttgaagtcttctcaaggatttgcccgggccgagtggtgatcactgatcagaaacagcagaaatgaattgattggttgattgatgcgattatgtgacctaaatgttgagcgttgttatttaattgttgttgtatttgatttttgttcattcacaaatcaataaattagggcttaccattattttcatacatgaaaaaaggggccaattttgccaaaggatccatccggggccaatcagaattacgaacgacaaacggctcccggacaatcggacagtggacaatcggacagtggacaatcggacagttggacaatcggacagtgaggacaatcggacagaggtggacaatcggacagtggacaatccgacagtcaaatatacaaatagataagaaaatgccggtcgccgaaagggaccgatttgggcatatcaagaaaaaaaaggaaaataggcaaatcaggggaggagtttttgcgaatgacctagaaaatgtaaatgatgtgaa

SEQ ID NO: 31749 - DNA, 922 bp, Heterodera glycines
  unsure (1)..(922): unsure at all n locations
attatagaaaaaaacttttctcaaataattaaagagtgcgagctcattttacaagcaaaaattgacattaataattaaaataattaataacaattgctcattattcaagcctctattaaaatttacaatgcttcaataataattaaataagaagaagataagatgaaaccaattatttaaacgaaaatctttttgcttcttcaatatttaataaatataaaaaatatgcaagataaagtttattatattttatgggaaaagataaaaattattcactgcgattattttcatgtataaacaaaataaaattttgtattcgtgaacgaaataatagttttttataaaagaatttgtttgtaaacttttcgataatattaaagaacaacattatgccgaaataaaaacttatttttaaatttgttaattttttatgtaattttatttgaacaactttatgaacgcaaacataaaaccacgatttgacctggaccgaccaagataatagaatgattaattatatcaaaaaaaagaaatacatgattattttttcataatgtgctgtaaggcgcaatttacttatccgttcaatctctttcccacaccatttatccccgctttccccatctttattccgttccttaagtccaactatttaatcgggagaattctcttgataaggagtcagttgagagggcagttaaagttctctacttccaaatccaagttatattatttttaaactaaattttacttaaatttatttcttgaaattttatttttaatgttaaaaaaattttcattatcaatatactgtgtatttttgggtaatgaattcaaaacctttcaaatgnaaaaaatcctttattattatttntaatcaanaaagcatttttacgaaatggtaaatagattattactaatt

SEQ ID NO: 31750 - DNA, 1320 bp, Heterodera glycines
  unsure (1)..(1320): unsure at all n locations
gcgcaacaacgaaacgatcacccaaagattcccggccatactgtaaaaaataaataaatttaaattcaattttttatcgataaaaatttgttaaaaaacgtacccaacggcaaagattggaataaaataggcaattagcacaatttgaccccacaaattttcgatcattcctttgtttattcttaaagataaaaaaatttattgcttttatttcaagaaaataattaattaaattgaaaatgagcataaattattggataaaacagaaaaaaatataatctcgggactcctccctcacacggaaatgaaaaaaagggaattgatatgaaattaattgtgttaacatgtaaagatagaatttcaatcctacaaaacggcttatataattccagcttctaaataaaaaaaaaattaaaaaaaataataataagctaagtccggcccttgggagggagttgatcgagaaacggggtggacatttcaagaaatggattgattgtccatcaaagtttaggtttcaggggggaatgccagggacgaagccagggatgaggcaaacaacgtcgaggattcgctgtcggaactatataaattgtggaaatggatgtttcgaatgtcagagtgatctcaaaaaatctggcatctgggaatctgggtcggcgggtagagagagggcctcggagtgccaactctaatttcgtcaaaaattttgtgaattttagcgcataatattttgaatgtttttttaaatttttaattagaataatgtaacgaaatggcaaaaaatgaatgatttaaagacactcttatcaagcggatgacagctttgtgcgcccaatccgttgagggggaaccggaaatttatatgtgtggcacgcaaggattatgagaatttgatggtcaattggcgagcgcgagacggcgccaatgccgacgattcccgacttagaaaaaggtcagaaattcacacgcggggaagcaaaagaagtgacaatggcacataatgcaattttttgattcataatgaagtggtggatgccattttatacaatttataaggaaaaaatttgcaaaaaatatggcaaaattaattttttttaaaaatatcttaaagtaacaaaaagacggaagtattagtgaggatttattgtaattataatataaaaattggttggctaataaatggataaattattttttgggaaaaatggagaattgcgattagaaaaagtaataatgaaaaaaataaattatatacaaaacataatttctaatttaatgtaaatagcatagtaaaagttagttcaaaaagtgntttta

SEQ ID NO: 31751 - DNA, 1149 bp, Heterodera glycines
  unsure (1)..(1149): unsure at all n locations
gatttgatttttatgtaattaaatgtaatgccattaattnacgtagatgaaaagagaaggaaagggaaaaaaaaatcgacttaaaatgtgttagacgagtctatttgatcggactgacaatctcaaatttgggttatgattgatcagaattccattggtctagtcagattggcaaaatgtattaaaaatgtacttatactcaaaatttggttctcatttgatctgatcggcaaaaatgtatttcatttgaaaacaaattggctaataaatttgttaaaatccgaaattggggaacaatgtttaattctgatggacctgatcaatcaaagtgccctttttgatgatgttaaaattacattgaacgtcgattgggagaagagaaaaagaaattgcattgatcgaaatttggatgagttcttttcattttaaacccgaattttgatcaccgaatttatactgatatgagagaagaagagagagtgatcagggaaaaaaaaactgatcagcccgaaaaaaattggccaatttttaattgttaatattgatcagaattggggaagggcaccggaccaggaaatttaattgagaacgaaatttgcgtgcccaaaattcgccccaaagttgaaatctaaccaggggagaacaggaagaatagggacagcttctcgacttggggcgggcagattcagggagtgctgggtgaagtgggccaaagtgatcggagcagagatgcgttcgaattgagtggggcgggcgggctggagtgatcggaatttgggatgctggaaaagggaaattgggattgctcaaaagggctcaagcgcagggagggagctccaggtctaaacctggcgatgtttcgtcggcaatgttcggcacaggcgcagactttttggtggaggcaaaggggaagagattttgagttttcaaataggctaaagcagagttcaattttctattaaattctaatttcaatctttcaaatgcttaagagagaaaagggggggggtgggcatatccgaacggcatcacaatcgaaatgagcagagtaaatgagaagggggggggggggggggaggggcagtagccactttctctttggctggtgctaacgcaacaatttaatggcgatgaagcggagagatatgg

SEQ ID NO: 31752 - DNA, 465 bp, Heterodera glycines
  unsure (1)..(465): unsure at all n locations
aattatgattttttgttcaatttagattaggcaatcggaattgatcaaaataattgagggattcgtgatcggggaccccaaaaacaccagagaataaatttttatgactatcacaaaaaattttttgcaaaacaaaagggtccccccttttgaaaaaattttcaaaaaggcccactttccatatagcgccggtaatttaataataagccctttttagacaaaaaaaatgcgaaattcgaaaatttgaacttacgattttttgttcgaattcgggtcagaggttcgaaattagtcgtgtcatattcgtggtcagcgaccccaaaaaccccatggctacattttttatgtcttttaacaacaaaaaatccaacccgcaaaagtcttaaatctcgcgcttacgatcaacaattaacatccgatatgccattctatcatatnngcagatactatatatgtatacaatga

SEQ ID NO: 31753 - DNA, 1362 bp, Heterodera glycines
catccaaaacattaaaaatgtaaattattttttcataatttatctaaaagcatgaaatctgagttgaattttcataaaattccttattttaaaatagccaatcacaggaaatgaacgatttgctaagttttgtcataagatttttaagaattttatttatacattaaataaatctataaaacttcgcataataattacaaaatttgtaatatttttcacgaaataattattattaaaaatccagaaaataaatcatttcaattgcagagattttgaaatattttctaaatcttttttagactgagtcattgcataaaaatgaaaggatgcttattaacttctttatttgtatttttgatcagcagcttaattagtattaattatgttggatcagaaaagaaaaaaatggaacaaaaaacatttgaagaaatatttggagaaaaatgggaggaaaaaagaaccgaagaacagaaaagaagagaaataattggaaaattcaataaaataaaagaaaaaatcaagcaaaaaggaaaaaaatattcaaaaagagaatgggaaaaaattgaaagaaaaatagcgaaaaaattgggcacaaatcgcaaatatatttatgaatggaccaaagaattgggattaaatcaaaagaattgctacaaatcaaaaactgatgaagaaaaactcgaaattgtacagaaattcattgaaatgtcaaatgaatttaaggaaaaaggaagaacatattcgaaaaaagaatggaacaaaaattatgaagaaatttgtaataaaattggagttggccttagaataattaaaaaatggaagaatcaatttggcattagccgaaaatttataacggaaaaagaaaaaacggagaaaatgaaaatttattggcaaataaaaggagaaaacccgaaaatgagtgacaaggaaattggaaaaatattgaaaattcatcaaaatagcattttcaattggaagaaacaatttggaaaagaaataatggaggaatgaaaaaacggatgattctaagaaaataaatgacaaattttgcctaaaaatgactgatgaaagtgtgatttaatggaactaaaagaatttctttaatttgtaacaattaatgttgagtagtgaacagggcttggcgtaattatggattacggaaattacagcattttttgaaatatttatcgcaatacttggcatttattttggtgcttttggataaaatttttacaaacaggcgaaaattttttctaattaaattaacgtcatcaaaattatggattattaacaattttaatcaaattttttactaaacattatagaaaatctgcccaattatgcattttattatcaatttaa

SEQ ID NO: 31754 - DNA, 1073 bp, Heterodera glycines
cttttcccctgtcatttaatatgtatgatggattcatgctttacgacgtcatgaaaattatgtgcacttttttccgttttaccgccacttttttttaattccgttttatttaccgcgcatttattatatttttaatatttaaatataatttttctgcttttgttaatgatagtaaatgtgtgccaacatttaaaaattaaaaaataaataaataaattcgtttttatgaagtagaaaggaatggatacaaaatggaaatagtgtactcaattattaccaatatgaaatttaatttcatttcatttttctttaattgtataaaaatttaaaattctcggcaagattaatatagagttagagaagggataaaaaaatgactgaataagccagagcttgttgtatctggggatttatcctaaatttgtggaggatttttagtgtcaaatgaggatttgtatggctccaatcaggatttcaaaattttgagaaacgaactctggtataaaattgccttaaaattcccaatttctgcggagtttgaatttgggtgtcggacggatccgaatttttactttattaaacacaactgggatttttggttttccatttgcaaagctggaaaatcgattattttttggcttggcaaccgccggcggcgggtcgtaaaatggcggcacggacggaaaataaggctttagccctttgtcagcggcagcagttaaatgcgagtgcgttcatctgtgtccacacatatttatgtgtgtatacattgtgtatggccatgccaattttggtcattgcattttccgtccgttttccccattctcgtttcccgtgtgtgagaataaagagggagagaagcgaaaaattaaaaaaatatttctgccggagttcaaaaaatttaatgacaaaataatttacagggccccgaagtcaattttctatgaaatttatatgctaattttatttttcatttttaagatatgaatattatatgtaaaacaaattaatctgcaccatcatatattttccctgtacgaagtacatcaaatagtatgaggagattaaagtac

SEQ ID NO: 31755 - DNA, 1411 bp, Heterodera glycines
  unsure (1)..(1411): unsure at all n locations
taaaagttttcgtaagtttaagaaagatgataaatttttttatcatgcaattcgttaatacaataggtaatgtttattgatgaacaataaataaanaaacggagggactattttaagtttatgggaaacactccaaaaaggcaaagaaaaaatttaattcattttttaatttgaaaaatgaaataattttttatcggaaataaatttgttaaaattttattactatataaaaaaatatttattatcatttttcgcaaatgattgtgttcaaaaggtcggcattaaacaaaaaatcgnggcagcgaaatgagtcaaagaaatgaatgcgacagaaacaattccattgagaaagtgccaacgccgaaaagatcgaatgcctaaaaatggaaatttatttaaggatcggcaaatcgaagtgggtaatgaccatgctctttttcaaccatttatttaaaaaatcgtttttaccgcattgaccatggaatatttttaaaaggcattatgattattttgaaaattccggcaattaattgtctagataaaaattaaataatgaaatttcttataaaatttattaattctttcaaatacgtttttcaacacagaaaaaaatttctatttaaaattttggaattcatattaaacaattaagaagaaaaaaacaacaaatatgttttgtttttttaacgatgcttttcatatcaatctttcataaggaagtacaaagtaataaaattttgacgggggcgcaattcattattctttttcagtgttttccgatgaaaaatgtcggattgagtgaccagcgatcagaaagcaacagcccgattaacctaccgttttactgctataaaaccaatgcccgatcggttttatggcagcaaaacggcaggttaattagagggcgggggcaccagcgcaattaaaccactaattgtttgtttattgtctgccgtcccgcgacatttcctccctccctctaaagtgcaacatattatgggaaattgtcattaaatgaagaaagaattcagcgctttgaattcattccttttgaaattgataaagcgattaatctttttaaaattaaatttggcatatgataattaattcactttgtctgccaatgttggcattcgcatttctaattttgttcacttcttcatctgcttcatcaatgtcagctaagcagcttcattcttttcccaaagtcaccacaattcaaatttccacggaggagggatatcgggtaaataaattcaatcttttttaattatttaaaatgattgaaaaaacacttattcgttaattgggtttagatttatgaacattggacaacacaagcatttgcctctgttctgtcagtatttttgcaagaaatgttcgtttctgttatttgtgctctttttaatgg

SEQ ID NO: 31756 - DNA, 1411 bp, Heterodera glycines
  unsure (1)..(1411): unsure at all n locations
tcaaaataaataaataaatactgtgcaattttatccgagtcattttgtgtcgtcactttttaaatcttaataatacctcggaaaatttagaactgctaatntaaaatttattatttttgttatactttctttttgtgagcagttcaataattgtcgccatacagtttatcattggatcatttatgattattcgggctgccaaaatcatgtacaaaaagcggtcacatttagtgaaatatctatgaaatatttacaaaactgaaatatgtactaaacgtaataaaaattttaaaatggttcttttttggtaaaaaattctttgtaaagggtgaaaatttcgaacttttggatttttgaggcatttaattaagattttcataaaaaattttgctaaaaagattcttaatatgtgcaaaagatgtataaaaagtaaataaaagttacaacccttctgcttcacattagtcctcaaattatgtttttatcgaaaaataaaattctatgcaggttagttgggtttcactacagcactcacaacaaacacaggccttacgctgaataatttgtattatttttctcaacaaaaatttttgctttttagaatatattaatttgttcttgagaattctttcgcttcatttgtagttttgtacacagtaaacacactttctaattgtcattaatggaacttaattattcaaaactgggccaagaagatgcctatttaagctgcaattatcaaaaataaaataattttcttcggttttcccaaaaatggcatattttgccccttttccccccatttgtcttttccatttaatttttattttccaattgctcggccccgttttctgtgctaatgtttatttgaaaaagcaatacggtgagaacgagttccgtattgagtcatggggcaaaacgaactgttcactgaacggaattgacattgcgcagcttggaattggccgaccatgtgaagaatggccagattttggtaaaaagacaattaaaaaataattagccatttataattaacaaaaaaataaataacactttataaatgatttttaagcaaccattttctgtgatggcaaaatacttgaggtaataattaagaattattaattaattacgtttacgtaatttattaggcagtgaattattggggcgagcgaatgcttttcatgcgcgactcaaagcatttcgttgaccgtcctctgctgaaagatgccaaaaaagtggtcgatgaatttaaaaccatttttgatgtgacggaatggaataaattcgtggtcagcgaaatgaacgaagcgcaagtggacaaattggccaaatttgtccaacaaaattttggaatggccgacggtgcactgattgagtaaaatttagaagattaaaaatgaaaataaat

SEQ ID NO: 31757 - DNA, 1088 bp, Heterodera glycines
ggaatggcaaagacgatggccagagagagggacggaggaaggcatcggatggcaatttggggacgaattgggccaaaaatgaggacgaaaatgccctgctttttggaggtaaagcattaggaaaagggcacattctctttgacaatggcaccgttcattcatttattttgggttatcgtcaacgatgtcaatgacaatgcacctcgtttcggacacattctgtacttggtgggttaatgagctgatttcgtattttgctaatgatttttcttaattctctccccgatcacttttcccaatttgtttctttctccgatcacttcctaatttggtccctttttcctcgtctgatcgctttccctgtcccttcttcttccctcttccatcccattctttccttttccgcttcagtccctcaatcggtcgactcccgtcggttcggtggttttccgagttcgaattgaggacccggatttggctgaaaatgcacgaaattggttctcattgagtggagaaggagttgaagaggcggagagattattttccatcgacaaatggacgggcgaaatgacactgatcagagaattgacaggggaaaaggttttctgattaaagttggcaagtaactaatttttggcatcttgtgatttgccagattagtgcgcttcgattcggcatcactgcacaagacgaaaaatggcacgtgcagagcataatgacagtacaaattgttgaagacgaaaacgaacagcggacgaacagaatgccaacagaagcgaggacttttgaatttttcgctttcggggagggaggcgatcaaagaacagaagcggaacttgcacagacagaacagttgggccgagtcccgggccaatgctatgccatgccaacgattggatgggcatggactaaacacgaggggacggaaacggcactgatcgctgatcggcgactgttcaaattgttggagagaggcgaaggaacggcggagagagaggcgagtcgaaatagatcagtaaaaacgtcttggcactcaaaaagcgcaaaaatgttgcccatcagttcaggttgctcttttctgtgccgat

SEQ ID NO: 31758 - DNA, 954 bp, Heterodera glycines
aagggggggggggttgggtccgaaattttaatataaaatttatacaattccacgttttatcacaaggacaaaaatgtgttgggccaccaatcttatttttgccccttttgcaggccgttcaacatcactaagcagcagcacccgcagcccaaaaatgttgaaatgctttgatgaatataagaatactttttattattccaagtgtttcgtttcgctttttttgtgggatttctttttatgttttcttcgcatttttgtgtgttttggtgaataacaaacaaagaattacaaacctcggacccgaattcgaacaagtataaaatttatttttcaccaaagtccacctttattgtccaaaatcgattcgaatgcatggataggccatgaatccctattttctattccattcagtatatttgaatcgattttggacaataaaggtgggttttggtaaaaattaatggtaatagtttagatggtgccacacctttttgacaaaaatttcttgaagtttttaaaagtcgtgcaaacagttatgtggggttttcggggatgctgatactgaaaatgacacccgttttggccaattccgaaccccggacttggattcgaacaaaaatttgaaaattcaaaattcatttttatgttcgtatcattacagaatgaccattctttgatgttgcaatgtttgcgaataaacttagattgtttttaattgatttttgaatagaagtgagaatttcgaaagttttgaatttcaactttttgttcgaattcgggtccgggattcgaatttgatcaaaatgaatcttagattcgttatctgcgacccttaaaaccccataaaacgtgttttcacgacaaattcacctttccctatattgatcctaaatttaaagcggtacaaccaaaactgaacattcttttaccaaccgtaccacaaaaaattacaat

SEQ ID NO: 31759 - DNA, 1350 bp, Heterodera glycines
tataacaaattgaggaactggcgagcgctgtttttggtagttcagccggtagagcaaaggtccgcaaagctaaatccgaacccttacatagtttttcccaaaagcttttccaatcaacattaaaatgattaatgggcaaaaggaagagacttttgtccggcaaagaaatgccacggagttgggagggcttgccattaagacctttgactatcaccaatccttgttagtccattccactttccaccccaaatctttcacggctacaaaagcattaaaattttctaaaaatggtcaaaaccttacgcctcgggagtgaatcgaacccacgccttctccatccagtgaaatgacggaaaatttaaaatgccacaaaacacagatttacaaagcaagcaaattcatgcgaggcattcaactgtcggaaagcgacaaaggaaaggcattggccgtaaaagtcgtctccacgggagttatcaatcgaaccatccatttggccaagcctacggtgatgatcaagcacgagatgaaaatgttggagtttatgaaccagcacgaggacgaaaacccgattgaagagcattcggttgtgaaattgtacggtggcggagaggtggagaacggaagtgcattcgcgatgatttacataatggagtttggtgacagcacattggacaagtatttggagcagtgggacgagaaaattggaggcttaaatttcaaggaaggcaagccgtttgagagtgcttgggccacaaaaatcaagaatgaagcgcaagagttactgcctaaactcgccgacacattgctcaaattccacaaaagtgagccaattaagcacatttcttatcggccaatctcgacacatgacagcattttttaaccttttctaatcttttaaaaatcacaaaagctcttaacactaacggtgcctctgtcggcatcagcggaccattttctttccaaaaaatgaaaataatccagaaaaaattatgaaaaaagtgcataaaactaaaacaaattttctgttttaatatggaagaaataattttttaagcccactctttagaaacaattgatatccgccgctagggaaattggaaaaatttctaattttgttaatggcttcaacaccaaaattttaaaattttgtattatttcggtcaattttgaaaaaaaaatattttgcctcgcgcctcgccagagagaattaaaaaaaggatatgaaaggcgataaaaaacattttataatcgggagttcgggtgttgtgcagcatttcgcctcttttcagaagcagtccatttgcacctgaagccagacaattggattttcgtaaaatctgaaaataagtg

SEQ ID NO: 31760 - DNA, 1656 bp, Heterodera glycines
  unsure (1)..(1656): unsure at all n locations
agtcatgaagtggttgcgtgggttaagcgaattttgcgtgtcaaaaagactggacacagcggcacgttggacccaaagtanatatagtacaattttgtttatgaatggaaaaaatgtttattatccatagtaaacccctatttgcaatttattttttttctatgataggtttccggtgttctcgttgtgtgcgtcgaccgcaccactcgtctggcaaagtctcaacaaaatgctggcaaagaatacgtcgccattttcaaactgcacaacccagttgaatctgtgaagaccatacgccaggcattggataaggtgtctgaattacataaaaagtctaatgttttcaaatatttttgactttagctgactggtgcgctgttccaacgcccgccgctcatttccgccgtaaagcgtcagctgcgcattcgtacggtgtacgaatgcaaactcatcgagtacagtccatcccagcaaatgggcgtttattggatgagctgcgaggcgggcacttatgtgcgtactcacattgtccatctcggtctgatgctgggagtcggggcgcaaatgcaagaattgcgacgtgtacggtcgggagtgactggggaaaatgaccacatcgtcacattgcacgacattatggacgcacagtatttgtacgaccagcacaaagacgaaagttatttgcggagaataattcgtccgttggaggcacttttggttcagcacaaacgcatcgtggtgaaggacagttcggtgagtttgattgcaatcgaaagaattcaacgattgtttaaggtaaatgctatttgctatggtgccaaaatattgatacccggcatacttcgttatgagaatggaattgagataaacgaagagattgtgattgtgaccaccaaaggggaagctgtttgcatcggtgggctaattactcaaatggttgtgctactgaccaaatgaatgtttagcgattgccctgatgaccacttcgacgatagcgatcactgatcacggagtggtggcaaagattaaacgtgtcattatggaacgcgacacttatgcggtgagttaaaccggttgagacgggagtatttctaatttgtgattgcccatgatttcggtttggtggtggtactgagaaaattccccctttttgcttcgtgtgcgaaaaaaattttgcgctctataataaacaaaatttttgggaatgaaggagagggaccgtttgtgcgttaggcgttggaagagggtgcaaacagaaaaagctaaattttcaacaaaaattaaacatttaacttttaagcgcaaatggggactcggcccggtggcgtcaaagaaaaaggcgatgatcaaagatggtttgctggacaaacatgggaagccgaacgagagcactccaaagggatacgtgcccggaatgatggactattccctatcaaaagtgaaggcatgtcacaactcgctattacacatttatatttagacattgccacttttcagcaaattttaaaattcataagaacaccaattggtatcctttggccttcccttttccatgaaagagagctataaaaaatgatgaatgatattaatagacactcggattcctatgcaaaaacttttgttataggccattcatccaatctccatactttaaaa

SEQ ID NO: 31761 - DNA, 372 bp, Heterodera glycines
aagctaagcccacacccattgaaaatcgtacgagttgccattgaccccttttttcttttcttcagttgaccaattctaacaatctttgtaccattcgaaagcttaccataccagaagctgtttctaagctattgcttggtgattagtcatccatttaccaaaaaaattataacgcgagaaaagtgccaaaaagtcgaaaattttaacttttttcttacagttttttttacatgttggagaaaatcattatgatttttatagaataatagagcttgaaagggctttaaaatgacaccagatttatagaatttccgcaccttttttcgtttcggagtcattcctaaaattcgaatctttgagggatttctataa

SEQ ID NO: 31762 - DNA, 1126 bp, Heterodera glycines
  unsure (1)..(1126): unsure at all n locations
tctcagcccagtccaacacaaatgttaattggttttcattcaattctcagattcgatgtgatcatgccccccgaactgattagcatggacgaagtcgaatttgaaggactgcatgaactgctcgatgacgtgttgagcgaagaggggatcatgtgagtgacaaacgaacaatctgtggatgatatagccgaacttgcatggacccttttggttcaggcctgggttttacctgggtcaggttcataacagtcacttaaaatttcatggctttttttcgaacatacagggcaaagtcagcatgaaatccgaatcaaaatattagctttagtggacaaatacgcttaattccttggcattctgtcaatgtttatttgggttccaccgattcgctgacccacaaaatgtccaagtctcgaatttgagttttttattattcagatgggcctaaggttaggcaaagggtaatataaagggtatattcgtattcagcgaccccgaaaaccctaaaaatcctaaattagactcattttgtttttataaattttgaaaaattttggacatttcgtgggtttttactcttttggacatttcgtggcttggacactttgtgggggtgcccaccgattttgccatgttttttccattttccatggctctgttccatctccatctgtccttcccgttcagtttgttctcgtcccgttcccattacacggcgtgcgattgcaccggcaatttgcccgcgtggttggacctgctgaagaccaagggcaccttcaacgcgcacatccgttgggtgtcgcccaaatcggacatcgcccccagaaaacttgtgcagatgacgcgttccatccgatgacaatcatcccccgcggggcattttacgtcatagaaattgtggctgggatttttaagaattatctgatttcacccctgaatttcagtgccaaaaatcctgggaatcttttttcgtgtccgatttgtcccaatttggcatttccaaagatttatcaacaaaaatgcaaggatttgctaatttttagctgtttaaaattttggtcctgtaaatcccagcagtcccttcagattaatcccaacgngtttcatccctcacaaacattcacaa

SEQ ID NO: 31763 - DNA, 1255 bp, Heterodera glycines
  unsure (1)..(1255): unsure at all n locations
cgatgttattgcatatgcgaaattgggaaattttcattaatataaatgtagatttatgcgtaaattgtttcatntaaattatgaaaggagtgcagaaaatattttcattttccaatttttgtcaaaaaagttaatttttttattttcaaagaaaaaataataattattattaaaaatgtgccactgcttcttcatttttgcaatcggagcagctcttttgacgaaagttcgtttttctattaaataattttaggaatcgcagccctttttcattttattttttggacatttagtagtaaatttaattgatagcattcatttgtcggtaatacgttttgtttgttatttcggctaagatccccagggttttcggaaatctttggcgcttcgtcggaactgagtcgggcattgtttttcatccgcttttaacttcacttggcattggcacatttcagtgccaagctcagcaaacaatgcccggcaactccgtgatcgatttcaccactccgtcgacgcccgttgccaaccaaacactgatcaaaatcgccattttaaccgcacaaaattccactgattttgggttgccaagaaagaactctgcgctgcgcgattcgggcggcgccattccaatggcattggagcagctgtgggcggaccaaatcctgccaaaaaacgtcaatttctcgtgagtaacttttaattcaaattgccaagtgtaatttccttagttcatcaagtcaaatattgattagaaaagcatctttcaaatattttaccatcgaaaatattctttcgaagtgccataaatcagggatggaattccgaggcaccgaaaaacttacattatttgatatttttttggacagttacagccttttttttttgcggcgcgctttatccaaagaaaatttggggaactggggggaggggtcagacggttccgaaaagcgccgctgggaaaattttagtcatttttaatgcgatttgtgaactggtctttagaaaaaataaccaaatttagcgattttgagcaaatttttaagaaaattaaggattttcaggtccggcggtgccgataggcgccgccgggaaaatttaaaaaaatttcaatgcaatttattaacagaaattgtacaaaaagtgctaattttatgaaaaaaaattccgaaaattccgacattttatcaaaaatttcggaagtcggaattccgaggccccaaaaattttcggaactcggaattccgtgccatccctg

SEQ ID NO: 31764 - DNA, 868 bp, Heterodera glycines
ggggactgtaattatttcaacaaaattcaaatgtcttatatttgtacgtttccatcagggtcgctgaccatggacacataatttgttttggatcatttttatttaaaaaaaataaagaattgaaggtatcgcgtgagcttttttttcaccgggtccgctaaagtaaaaaagtgccaaaaacagtccaaaacaaatcctgacggataacagacagaattgcgctaaaaaggggtaaaccaaaaggattaaatttttctaaaccaagagggctaaaaaacgttcacgttttttactggtcccataaaaatgattttaagttgtactcggggattttctggcgtgcttgaacacgataagtgacatacatttacatacaatttgaatcacacgttaaataagggggggggggggggggggtcggcgcctaattctacgaagggggtaaagccatgtaaatcgacgaccttttttttctttttttttgcttttcaaaaactttttttttgcggcgcgcttttttcaaaaaatttaattaattaccattgtagagagcaagatttattgtacattaaacaaaaaatatttaaaaaaatggtaaaaacaaaaagggggagcaattcggtgatttgaaaaattggacgcttaaaatgcagtatacctaaccctgggaatcacaccctggccgggtctcgggaattttgcatggaattttcaaactgacatagtctgtattcttgaatcaaattcaggcagattaggtaatattgtttggttatgaccgtcaatcacatcagtttcatggaagagtatggcgaaaatcaaaaatccgacataatgtccttcaaaaagttctaagttagaatttttt

SEQ ID NO: 31765 - DNA, 1502 bp, Heterodera glycines
accatcaaccagagactgggccaaggtcagcaagcgtacttgcaaatgtgccgccaaatcgggctcggagaaaccggagagcacttctggattcctccgcagttcctcgttaagagcaaggaagagctgatagactatgtctatcctaacttccaacaactccttggcaatgacaaggagctgctcaatcgtttgattctcgctccacacattgacacgtgcgacgaagtcaacgagatcatgatggcgaatgtgccaggtcaagtgcgggaatacttgtccacggataagccccttgacgaccgcccactggacatcgatgagatcgagtccgaagtggctgcgttgaaccggcgcacagactcgggcatgcccccgcacagtctccggcttaaagtcggatgcgtcgtcgtccttcttatcaataaaagtgataaggaaggactgatcaatggcacacgcatagttctggaagaacttggcgatgatcgcctcattggtcgtgttatcaatagcaatgctattggcggccaagtgagattctttcttgaaagaacacgaaatgtctatgaagacaaatcgcctggcggcataaaatatgagcgtttgcagttcccaataaagcctgcattcgctatgaccatttaaaaaggtcagggccaaacaatccgcactgtcggcattgatctggaaagggaagtattttcccacggtcaattgtatacggccttctctcgggcaacagacggaaacaatgtccgtgttcatgctcccaaccgggaaattgatgcccaaggccgagccaaagtgctgaatattgtagctactaatatgctcaagttacaataaatggcttagtccagagcagttgggcacatggtttttggagagatgccaatcccattcccatctgcactatgttgggtgcgaaaatggtgagaagcttggatccgggacatggaccggtcagccctctttagggcctacaggtgaattgccatttagcgctcaacccaataacgtgccaacgcctggacaaagggagggaggagggccatgacgtgcaacgttagggcacttccggtttccattgcattatgcgatgtgtcaactccaattattggaggaaaccaagtgcatgtcggctgacgcaaagaccctaacagactaaaacgcgcctaggtagcgaagctcaagaagcgcgcagcgctttcccaagcgccaccctcgcatgcacacacttcagcgcggacgactgagtcccggggaccgatttctcactttttcttgcagtttagggcccctaactttttttctaaaacccgaatcaaaaagtgcccgctgagagggcactccccacaactgtcctctacatgctggtattttttatttttttattagagccaccccctggcctgcacgcttggctaattgaagtgtgctcaagaatgtacacttcagtaccaggcgaataactcgcccaggggttgctttgaccgaaa

SEQ ID NO: 31766 - DNA, 962 bp, Heterodera glycines
tttttgccttaagccaaatagtcaaaatttttttaatattttttcggaaataataattattaatttccataataatatttgtattgttttatatttttttatttcttttttatcagaaattttgtatagaattaattttttttcttgaaattttaaaattttttattacttttttgttttccaaaacatcttttttcacgtcgctcttttctaaagacttaaggagaaagggtacggcgtccggcggtgccgataggcgccgccgggaaaatttttgaaaatttggttagatctgttaacagattttgtccaaaatatgctaaatttttgcgattttgagccaatttttttaataaggtttatgactttttgggccctgtgatgccgataggcagcgctaaattttggaattaagctctactttcttgaaacttaacgaaacttttttattttgtaggctaatagaaaacacttagacctatctaatgatatcaagaattaaaaatttagttgcttttgagcaaagttatatcaaaattttcatttgatggttttttgactaacgtcatagcaccatttggacgggtagagagagagagagagagaaaacgggagaaagaagagggacagaaggagcgagagagatggagagagagagaaaacgggagaaagaaaagagacagaaggagcgagagagaaaacgggagaaagaaaagagacagaaggagcgagagagatggagagagagagaaaacgggagaaagaaaagagacagaaggagcgagagagatggagagagagagaaaacgggagaaagaaaagagacagaaggagcgagagagatggagagagagagaaaacgggagaaagaaaagagacagaaggagcgagagagatggagagagagagaaaacgggagaaagaaaagagacagaaggagcgagagagatggagagagaggg

SEQ ID NO: 31767 - DNA, 1369 bp, Heterodera glycines
aaatttctttgaatattatactatcgtgctttttgctccttttcagtttattataaaaaaattcacttcccttcgaaatcgtaggcagaatgctcatttgaggctacgcaaatataaattaatatttgctgtcgccaaaagcgacacaaatttcttggaaattttcatttattttttaatccttttcatcgatcaattttgcattcgctcgctcgttaattatgagtcatcttctctcttcctcatatttttatggatttttttctatttgtttgtgcacatttttcacgtgcctggccccgcccccattgatttgtgagggtataaaagcccggcccattctccattttcctgacttcttgcttcttgcttctcacttcttgattcacttcatcttgtgagatttctacaagcacttctgcttgatcagcattaagtcgggacagttttctgtccaagcatttgcattaaattgtaattgtgcaattgaattgaataaagattaagaaagagtcttagtcttttctctatctgtaaaagggacacccaggagccctttaatacagaccattaagccattgacccccgttgggtcacaaaaggcttatcaaaggaaaggagaaggatttctccttccaaattgtcccttcagtaaaggagaggaatttcctcctttaattcgtccctttggacattcagtgaatttctgtcttttggacagaaattcgctttgcttaaaagactccccccttctgctgggagagtctgcttccccttctgccgggaagtgcaaatttttgtggctttttgcccacaaaattggagccccgtaggggtcggcttccagtcgtaagcctaccctccaacaaacgccaatccaaagcgcaaccgtagcgcttggatcaaacgcacaacccaaaggggtttattgcgttttcatcaagcgtaagagcaatgagtgagctcttgcgtatctccattgcaccaatggtggtgcgtctcaagatgtacattgagacagcccaagaaaacttgggcaaagagctgacggaccaaagtgtccgtgcagacttaattgcagagagacaaaatctctgcaaaaccatttctcttcttgagaaatacaatggaaaatgggaagccattttcctgagagtgaagggacaagctcttcaagatgaagagcaaaattacagagacttcaaaccagaaggcaaggccttcatgcattgggtcgaccaagcccgagggcttgtcgacaccattgaaggggatttaggcctctcggagctgggggatgcaattccccagccaaatcagccagcacaaatgtgcagcaggcaccagtggtgcatcagcgtcatgatgt

SEQ ID NO: 31768 - DNA, 1023 bp, Heterodera glycines
attctccggcatttcaatcactggggactcaatccacctacattccaatcaacgggactcaatccaccacattccaatcaacgtgactcaatccaccaacattccaatcaacgtgactcaatccaccaacattccaatcaacgggactcaatccaccacattcaagtcactgggactcaattctcccgaattcaaatcactggactcaatctcatcaatccttcagcaacacaattaccgggactcagttctccgacatttcaatcaccggaactcaacctcagcaacggaatacagaactatttaaaagtaatccagaaaatgaaatataacccataataaatcaaaacactatggtgtataattattgcccccaccccataaattcaaattaaaactgacctgtttaaaactttccacctaaatttgatcccgcaagtggcacgtcaatatcccaattgcatataaatattccactcgagcacaggcaaaacatgagatgtagcatttatattgctttttctatccatcaaaggttttttctttcattttttattactacaatcagattcttttcatatataagcaaggaaaagtacaaaaaacttttttaagtaacaaacctttttcattcaaacaaattctaatgcattttttaaccaaacaattctccattatcgtttacataagcaaaacaaaagctttcacatcaaaatcaaatcaattaacaaaaacaaaatttagacaaaaaaataatgataaacagcaaaaccacaaattttttcttacacacaaaaacagaaccttcatataccggattttccactcaaacaaacaaaaaatgtgctaattcttttgttaaatattttatacaataaaaaatgggttataaataaggaagggatgcgagagaaatttcccattatctctcccttccatttcttttctcttatttcttttactttccacttattctctctttttgtccactccctccttctccccacacacaagcacgcgtcc

SEQ ID NO: 31769 - DNA, 1506 bp, Heterodera glycines
accaaaaatcttccaaaatatggaaaaattcgatttttctgaaaaaaattcagaactcccttctgaaaaagtattttataaaaataatatactcaaaaaaatccgcaattttttgctctattttataaattttaatttagcttattatcacttttttgaaaaaagttatagaaataaaagtgattttggcattcgggaccaaaggggtgtgaccatgatttctgagtggaaaatttttttcaccaaaaatcttccaaaaatatgattttaggggttatttcgccgctgatcacgaatatgtaatcagattttactttagacatggttaagacctcagaatccctgtgtgatttgggattctgaggagtgggagcgcccgtcctgaggccgcgaagcggccgaatgtcccccaaaaaattaaaaaacgggcgcgaagcgctcgtcctgaggccgcaaagcggccgaacgtctcccaaaaaattaaaaaacgggcgcgaagcgccagtctgaggccgcgaagcggccgaatgtcccccaaaaaattaaaaaacgggcgcgaagcgctcgtcctgaggccgcaaagcggccgaacgtctcccaaataatttaaaaaacgggcgcgaagcgcccgtcctgaggccgcgaagcggccgaatgtccccaaaaaattaaaaaacgggcgcgaagcgcccgtctataaaaataatatactcaaaaaaatttcggcattttccgtttttcgcgaataactcgctgggagttaagcggagcgggttggcgccgcttgtgcatttgtgtagtttttaaagctgcatccgatggcgttttcagattttgaaaattttcaaaatttttcgagctaggccccctcgaaaatttttcgtttttgaattttatctttttttgcagatttttcccaggaaaacggagaccactttcaagcaaccgttttttgagctctatcgattggtggcatttttgaaaaaatttcaaaattttccggaaatagaaaaattttttggcctgagcgggacatttcagtcccgggctcataactcgtcaggggttgattttagcgaaaaattgtcttagagcatttttgtagagaattttaagctctatctaatgtgctttatccggtatttttatctttaatataaaaaaagatataaaataaaaatgaatttttaaatgcaaacccaaaggggggaccccatggatttgcatttcatgagaaacttttttgctcctaaaattgccaaaaaatacttttctgggctaatttgaggtgctgaacacgaatatgcactttatattgcgttttggattttttggagggtggtaaaaaaattttgaaaattcaataatttttggcccttgaaaattcaacctaaattttaaaaattcataactcgcctcaaaatggtccaattcagctcatttaaagcataaaaaatagcaaagaaggcgggagaattttatgagatttatttgaaatttatacca

SEQ ID NO: 31770 - DNA, 1327 bp, Heterodera glycines
tttattggaaagtaaaattattattttttttatttaagacaaactaatgacccatttcttttgtttgcttaggctaattttttgataaatttttgcagtttttaagcgacaaattaattttaggctaatatttctgcagctatctaaataaaactgacgcattaatgctgtatttaatcagaattttttgtctcattattatcaaaatggcgtcatttattttgtttattattttgattattacgaaaggtatgaaattggtttaaattaatttaataaaaaataaaataaaaaatttaatttagctaataactcaatgggacaggattctggtactaatggtaacacgatcatatgaaatattaagaaaatggaataacactaattatcaaataaaaaattcatttaaatttcatttttttctatgaaaattttcatttaaattaaaacgaattgaaacattttaataattattaaaaaataaaaaataatgaaatattaaaaaaatatatattcaataatatatgaataaacaaaggtatttaaataatttaatattttgttccttataataaattttgacatcaattaaaataaaaatcttttcgattgaatcattatttttaaataattaacctaataaaattgatcagttgttcctaattaacagatgtccaattaacgttggtcaacggttgtccatacaaaatttatgttgccggtgcggtgcaagtgaatttgacggtcaatgaaagacaaacaaaaaatgtgccgtcagtgagcacagcgcaacgattatgggccaacactgactgtgacagcgaagtaaggaataattgctcaagagtcgagttctcgactctcttggtcaattcccgattttaaatattaagacaaatttcgggcccaggttcattctctctatttgaaaaattgtcggtctcgacaataatcatcattattggaaaattgttggtcttatttttaggggaattctcggtattggacaaattgtcagtctcaaggtaattctcattcttgggcattatcagtatcaatattgggacaattctctgtatcaactcttgagacaattacctgtcttggaataattgtcggtcttttttttggcaattctcggtctgggttaattgtcgatctcgagaataattctctttcttgaacattatcggtccgagaggtcaatgccaattttcgtatccgtctcgagtcttggaaattttcaattgtggaatagcatcagaaatcgttttacttacaagcaccattaagatgcgtgccgggaaatttcgacagtggctgattt

SEQ ID NO: 31771 - DNA, 984 bp, Heterodera glycines
aaaacggttcagaaattcaataaaaaataacattcccgggtgcgaaaaaatggggtttgaaaagtttattggggaaaaaaagacttaccaaaataatacccctgggagaagggagtgggaaacatgatttcaaaattttcaattttttttagtctaatttactcaaaacggctcagaattcaataaaaataacattcacggtgcgaaaaatggggtttgacaagtttattggggaaaaaagactttacaaaataatacccctgggagaagggagtgggaaacatgatttcaaaattttcaattttttctagtctaatctactcaaaacggttcagaattcaataaaaataacattcacggtgcgaaaaatggggtttgacaagtttattggggaaaaaagactttacaaaataatacccctgggagaagggagtgggaaacatgatttcaaaattttcaattttttctagtctaatctactcaaaccggttcagaattcaataaaaataacattcacggtgcgaaaaatggggtttgacaagtttattggggaaaaaagactttacaaaataatacccctgggagaagggagtgggaaacatgatttcaaaattttcaattttttatagtctaatctactcaaaacggttcagaattcaataaaaataacattcacggtgcgaaaaatggggtttgacaagtttattgggggaaaaaagactttacaaaataatacccctgggagaagggagtgggaaacatgatttcaaaattttcaattttttctagtctaatctactcaaaccggttcagaattcaataaaaataacattcacggtgcgaaaaatggggtttgaaaagtttattttgaaaaaaagactttacaaaataatacccctgggagaagggagtgggaaacatgatttcaaaattttcaattttttaaagggtaatctactcaaaacggttcagaattcgataaaa

SEQ ID NO: 31772 - DNA, 1076 bp, Heterodera glycines
tttctagatgtatacaaacaccctttaaaaaggtcaagaatttaactaaacaaagtgaagatcagctcgttaaattgaatattacatactcgtatagaaaattctgaaattttcatatatgctctattttattacaaatttccttctgtctttattggatttttactggcaaaactgatgttaaataggttttatttttattaattgcagcttttcgtattagaacgcgtttaaaaataaattagaaccgggaatcttgtcaactgtaaatgccataaaatcgatttatttttcatttccacaacaaattgatcgcaattgcaacaaagttataaaatttgcaatacaagtgagaaaattttgatttttcgctaaattttactaataaatataattgacaattctcgacctatttttagaaacatacactaattacagtgtcattattttggttcccacatttaccttaattatccacatcctcaacaaaagaaaaaacacaattttgtccacagtgtagttctgcggcaatatgtagtttaaacctgagccattagtcatttaaaggttggctttatttttcattatttttcgtaatacggtctatcttttctgcagtaatcaacattcgattgttccattttctagatgtatacaaccaccctttaaaaaggtcaagaatttaaataaacaaagtgaagatcagctcgttaaattgaatattacatactcgtatagaaaattctgaaattttcatatatgctctaatttattacaaatttccttctgtctttattggatttttaccggcaaaactgatgttaaataggttttatttttattaattgcagcttttcgtattagaacgcgtttaaaaataaattagaaccgggaatcttgtcaactgtaaatgccttaaaatcgatttatttttcatttccacaacaaattgatcgcaattgcaacaaagttataaaatttgcaatacaagtgagaaaattttgatttttcgctaaattttactaataaatataatagacaattctcgacctatttttagaaacatacactaatta

SEQ ID NO: 31773 - DNA, 1953 bp, Heterodera glycines
ctgaaaaaggagttcaaaagcgactttgaagaactgatcttctttataaaatgcaaaaacagccatttaaatttaaatttactaagcatttctttgatgcaaacgcccgccgtttacgatgccaaccaaatgcgtgccgcattgtccggctccaatgagtgagtacatttacaattgaattgggataaagcgcatgggaaagaacttcaaaaaggaacgccagtagctcaacaggtttaagtgatagattacggtataaacgccataatgaccacaggagaaacttagctatttgttttggctaaatttaatgttcatataagccatcgaattgatggtggattctggttacagtttacctcatggcttaccgtatatacatttcattacggtgttaccgtagggcggtgctaatcgaaattttggcgacgcgcacaaaccgacaaattacggcgctgaagcaggcgtatgagcagttggacagaaggcatcagcacaatcagctggaggaggacatcaaagcgaagacgaagggctccttccaaaatctgttggtgtctttgctcagctgctctcgcgaagaaagtgcgcccgcaagcattgtattggcacacgacgtaattagtggcaatgaattaacatatacatattaagtggcaaattagaatgaattaataaaataattacaattaacatataataaacaaaacatatcacacggctaattacatggattggaaaaaaataaaattattaattagtatattcaatatcacatatatttaattatatttataggtaaaaaacaaaatatagaataaataataattattattttggtggtgataatttccatatatttttctcttctgcaggaggccatgaaactgttcagagagggcgagggccgacggggcgttaacgccgtggtgttcaaccaggtgttggccactcgcagcttcgcccaggcaaacaaaacttaacaaagcctttgccattaccagacaataattaattaaaataaaatataatcaattatttatagttgaaaatgtttcacagttttaacaatttgattgcaaataatttgttaaaaatttcagcttcgggaaactttcgagttttaccgacaagccgcgcaccacgagattgaggagggaattaagcaagaattcagcgttcacaacgaaacggggtaatgggagaaggggcgggaaccaattagtgatgatattgtacacgagaggagacagtctaattaggctaattggatccaatgtttataaatatttggatttttaatgtcatttgctgttaatgctttcattttcagtttcttggcactaatcaaatatgtccgcaacgcttctgtgttttttgcggatttattgttcaattcgatgaaaggtaaatttaataattaatggataaatcaatatctattaatcagaacaatttacttatttaactgcattaattatttattaatctctctgctttttcagggctcggcacacgcgactcggatttgattcgtctggtcatttctcggtctgagattgacctggctgacatcaaagtgctttcaaatttaaattctgttaattgaatgttcaagaaatcaaaagccttaattaattcttatttatggatttaacaataatatttgtcatcccattaagcacgcttttcacacgttgcacaagaagagcctggaggagtcgatcaaaggggacaccagcggagcttaccgagacgcacttttggcattggtcaagggcaacacggagcagtgatggagcagcggcagaagggattttgcaagagattaggatagattaaaagagataaacatgtaaatccaaaaagaacctatggaattttataaataaaatttgaatattttcattttgctaaatgcaccggagtctttcataaaaccagtgcaaacta

SEQ ID NO: 31774 - DNA, 1421 bp, Heterodera glycines
ttgatcaaatccctaatcagggggtcaaagcttccaagccacttaaaataaattaattagatgttttttagagataataaaataaaataggtaaataaaatttatacaattaagaaatttcagtgccttattttcgttgtttagttttgaccacttataaatcggcatcaaaccgaacaattttggtataattcgaaaggatttgaaaaggagaatcttttttaagcgaacgctaaacaattttgcacaacaaaaagttataagacaggctatgcctaagctttaggcttaagtataggctaaaatgtggtggtgaacagcaacaggagcgcagttccattcacgtgggttttggagtggaggtaattggagaaaatttctgaaaatgtaaaaattggcgatcatacacacagccagtaatcagctaacagtaaatgatcgctgaccgtcatttcatccctggtcgtttcgttgcctaagccaaaatgagtagtttttccccaatttttttaaaaatgatattaatttattaataaatttaataaagcaaagggcaaagcgatgtggtttaaaaaaattccctcattctcaaactgtggtggtggtggaacagcagcgcagttccgttcatttgggtttttaaccaaaatcagggagggggtgggaattttttctgaaaatctaagaaattaatcatcaccggcggagggaagccatttcagtacaaagtacacacacagccaccaatcaccaaagtgatgatggacttttgctgcagtgaaacaggaaaagtggtaaggtacagatacaacaaacatataatgatgattcattcattcgtttattcattcatatttcgcactcccatctccttggccccgccgaggccccggctttgttggccgggtcaaggttttgacatttgtccggccccgctttcttggccaggttctgggctttgaatggtcatgtacctcgggctctatgaatccctcctcaaaagggcaagaaatgttggaaattatgtgctcaaaattcgaattttcgagtctctcgaaaatcgagactgacacttaattctcgagatgaaatcagcaggacaccaaatgttcgagccttttcatgatttgagaatcaagaataaaaattttaatgcgtacgggcccaagaaaccaaggcctccgcattagaaattagaacatttatttaaggatttttgtttgtttttcaacaatatgggcagggcaaagttaaatcgtattgcaaaatttgtattaaaaggtcactctcggcgtgcgatgtgaaacttttcccgctgcgtcagtgcgcctcctttgtttgcacttggccaagcccatttacgggaggaatgaaagtcataaaacataatttttcatataaatctttgatgaatagccttt

SEQ ID NO: 31775 - DNA, 1216 bp, Heterodera glycines
ttctttgtcatgtctgcctgaatttaaattttactcggttttctttaatgttttgtttcgtggaatttaataattagctttttaagttttcaaatttttttttcttaaaataggttttaatttggagtagcatgggaccacccaataataataatttaattcaattaaagtttcgtaataaaattgaggactatttttaaaaatggttttataatttttgattaagccaggtatagaacaaatttccttttttaaaatcagcaattgttcgatgttccgtcaaaactctgaccatttcgggcacattgaacagctcggaggtcaccgaaaattcatcagcggtgtgcataacattcagtgttcggctgcttaatgtgctcgcgtagcaaatgcttatactaaaaattggaatggaatatttaaatatatatatatataaatattttttaattttcgcttaatttcgcaatctgctgacccttctttgtcacagcttccgccattcttcgggagacgaaattcgatgccgaatgttttcgattcctcagatgggaggcattggtcaaaaaggccgagttgtatgtttgcccagctgcttttttggccagtcaatcgaatcctattacatacatatttgaaaatttattaaatataaatttttatttataaatttatttttaaccattgctgggtgatatagtaactttgccatttgtttcaaattatcttacggtttaaaattatcttacggtattgtttccatttgtgagttgacgccggcagagagaagcagcaacaatccgaaaatgttcataacagaatcaaagcagaccaaagatttttcacacatttttctccaattttatattatttaaaaaatgaatattaaaatgaatttggcttaatcggcgactcaattaaattctgtgcacacactgtccaatggaagcaaaaatgtgctgctgggatgagacggacaaattcaattcggacaatgaatcataacgataaaatgggactccatttttgatttgtcaataattctctgatatttttcccattttttgtgatgctaatttagataatttatgtttggtgtgttaaatcagcattagaaatgctaaaatagtgattaatttaatgattataactgaggtcattctttggtataaaaaaacggaaaatgagaacctaaataggtaaaaaaaacaaacaa

SEQ ID NO: 31776 - DNA, 724 bp, Heterodera glycines
gtaacaacaacctcagagcattttgggtgggtcagtgcaattggttatttgggaaaggattgccaaaggcaaggaacggcacagactgacccaccgcagacatctcgcagtcctcgagggggaaattgagtggatttatatactggcacaatggggatggatttggatagcatgaggggtaatgacggtaaaacacaaagggaataagagagatggatggcaatgcaacagaggtgaatgggatagaaatggcacggtaaatgagagggaaggattggcttgggattggatgaacagacggacaagtttatgacgggattgggtcggggaaatagggcaatttacattatgcacaaaatatgaaattttgaatgctgcggatacagcataaattttgtcaaaaatagatttatattgctgataaattagagtgctagtgcgtttcttaaaactgccttccctaagcctcatttcaaaaaactttgaaaaatttttgaaaagtaaaatatttttaaaaattaagcgaatatattcaaaatttagagaacattaaatatataagaaattttattaaatttttcaatgaaattttctgaggttttccaaaaatataaccatttagggctaacaatactgtatggctaaattgcattttaattttcttcaatttagttttctaaaaattttaagaattctcgaaatttaaaaatatttttcattttaa

SEQ ID NO: 31777 - DNA, 681 bp, Heterodera glycines
  unsure (1)..(681): unsure at all n locations
gggggggggggggggggggggggggaggggggggggggggggggggggggggggggggggggcccgcccccaacaccccaacaaaagggaagggagagaggtgctgggagggcgcccccccccccccccccccccccgccgccggggggggggtgggggggggagggtgggggtgggggggggggggggggggggggaaataacacacccccccccccccccccccccccccccccttcttttctttttttttttttggggcggggggggggggggggggggggggggggggggggggcctcggngtnnaaaaaaaaatataaaaactttttttttttttttttttttttttgttgggggggggggggggggggggggggccgggggggttttttttattattttttttttttttttttttttttttttttttttcccccccccccggggggggggggggggggggggggggggggggggggggggggggagggaaaaaaaaaaaaaaaaaaaaaaacacaccccccccccccccccccccccccccccccctcctcttttcctccttggtgttttgtggtggtgggggggtgtgggggtgggggggttttattttgtttttttttttttttttttttttttttttttttttttttttttttttttttatttttttttttt

SEQ ID NO: 31778 - DNA, 515 bp, Heterodera glycines
aaaaaaaaaaaaaaaaaaaaaaaaaaaaaaaaaaaaatattttttttttctttttttttttccccccccccaacaaaaaacaaaacacaaaaataaaaaaataaaaatataattattattttttttttttctccccctcccccccccacccccccccgcccgcccccccaacaaaaaagagaaaaaaaaaaaatattttttttttttttttttatatttaaaaaaaaaaaaaaaaaaaaaaaaaaaaaaaaaaatattttttttttttttttggggggggggggggggggggggggggggggcggcccgctccttcttcttttttttttttctttttttcctttcttcttctccttcttgtcgccgcggcgcgcgggcagaaaaaaaaaaataaaaaaaaaaaaaaaaaaaaaacacaccacccccccccccccccccccccccccccccccccccgcccccccccccccccccccccccccccccccccccccccccccccccccccccccccc

SEQ ID NO: 31779 - DNA, 1775 bp, Heterodera glycines
  unsure (1)..(1775): unsure at all n locations
tttgtttttttttttttgtttaaaaaaaaaatataaaaaaaaaaaaaaaaaaaaaaaaaaagaggggggggggggtgtgtggtgtttttgttttgtattttttgttgggggtggggggggggggggggcggcgcccccccgcccgcccccccccccccccccccccccccccaaaaaaaaaaaaaaaaataaaattttttttttttttttttttttttttttttttttttccccccccccccccccccccaaaaaaaaaaaaaaaaaaaaaaaatcttttttttgggggggggggcggccacacccccccccgggggggggggggggggagggggggggggggtgttttttttcttttttttccgcgggggggaggagaaaaaaacccccccgcgcccccctctcctttttttttttttgggtggtgtgggggggcgcccccacccacccacttttgtttttttattttatataacaccccccgccgccccccccccccaccccccccggggggggaggagggacccccctcccttctaaaaaaaagaaaaaaaagaggggcccccccccgcgggggggggggccccccccccgcggggtttttttttttcctctcccccccccttgtttttgttggggggggggggggccccccacccacgggggggggggtgttttttttttttttcctcgggaagggggccgccctccccccggggggggcgcaagaaaattttgggaaaattgggggggttcttttttttgcacccccccctttggggtgtttttccccggggtgtggggggggggtttttttttggggaaaaattccaaaatttttgggggcccggttttcacaaagggggggggggggggggggtgggggccccacttcccccaaaccaatttgggcccactgggggtttcaggtggcgttttcggggtgaaccccggtcttnggctttctannggtagaccgctctgcgacgaccaacggtgagganganggannnnnngggnggatgtactaacaccgccagcatgacaggtttcttacggagctgatgtgtgatccctgccactgcggtgtggggcgcaacatagtcccgtctcgatcgcatgcgatggggcggagacagagcgtatgcgctgagacccgaaaagatggtgaactattcctgagcaggatgaagccagaggaaactctggtggaagtccgaagcgattctgacgtgcaaatcgatcgtctgacttgggtataggggcgaaagactaatcgaaccatctagtagctggttccctccgaagtttcccccaggatagctggagctcgttaagcagttatactcggtaacccgaatgattagaggacttggggacgaaatgtccttaacctattctcaaactctaaatgggtatgaagccagggttgcttgactctgaacccaggcgttgaatgtttgagctccaagtgggccatttttggtaagcagaactggcgatgtgggatgaaccaaacgtggagttaaggtgccaaagtgcccgctcattagacctcataaaaggtgttggttgatatagacagcaggacggtggccatggaagtcggaatccgctaaggagtgtgtaacaactcacctgccgaatcaactagccctgaaaatggatggcgctggagcggcccacctataagccaccgtcattggcttgtacacgtgcttgtcgctcagggggaggcatgacgtgtaggagggtcgtggtggttgcgttgaagg

SEQ ID NO: 31780 - DNA, 1045 bp, Heterodera glycines
  unsure (1)..(1045): unsure at all n locations
ttaataaatttctaaaaaattaaaaaaattaaagacaaaaaaaaaagaaatttccatttgaaaaattaataaaatttgcttaaaacaaacaaacaaacaaacaaatttttaacatagcaaaaaaaaaatggaaagaaatttagcaaaaccaaaagtaattaaggcttaattgaaggggaattaatgaggtggaataattaatgggtgcactccaaaatcactcactccgctaaaattaatgagttgtgggctattaattaattaccccggccaattgactcttctccaattgtgggcctttgattttggcgagcagaatgccgagtttgttgatctgctcctgaatgccatgctcaaagctgacgaccacaaattgggctgccagtttgtctaacacattgttaagcttaatcaaattttattttttatttttttgaaaatatttaaaaaaattaaaattatttttttaataattttaaattatttgatggtcccccacctttttctgcaaattgttcaatactttgttggaatccgcatccaaatttggtccacccatgttctcgtaaattttctcaagttgtaccctaaaatttcaaaattaaaaaaattacattaaattcgccggccaaaatttcgcggccggaatttttttttaatttagaaatttaaaagaataaaaatcagaaaaaaatttttatgaaaattccaaggaaaaattgttgaaacatttttacgattttttggaaacattctcgaattaataattcatcataaatttgaaaaaaaatcgctgaaaattttttaaaatctttttcttaaaattttcttataaaaaaattctaagatttttgttgaaaaatttctaagttaattaattaatttattttttaaaattttggcggtgaaaatttttaatttcaataaaacttttanaaataaaatctttgtgccatttttttttaccttaattgctgcacattattcatcanaatgcatgccaatttttcactgctcacaaatttgacaaaatcttcttgcacca

SEQ ID NO: 31781 - DNA, 454 bp, Heterodera glycines
acctcaaaaaattataacatattaaaaatttaagcaattaacgagagaaaaacccttttaattaacataagttttataaaataaaatttaaaaaaatttaaacaacgcaacaaaagagaataatgaaactgacaacaaaaattaaaagaaacagattctttaaaatgtcgtgccattggtttcgtgatgtcgtggaagatttcccgttaatgagaccaattagtgagtcgcatgaaaaaatgttaagcaatttaaaatttacctaaatattttgttttattagaaaaaaacccgtgaaattggactcatttctttttaatgataaacaaatataaaagtttcacgaacattttaatgaattacaaagatttttgtaaaatttaagtagtgccatcggtgagagataaatactttgatatgagaccaatttaattactatgtttatgaaatctaa

SEQ ID NO: 31782 - DNA, 605 bp, Heterodera glycines
gaaattggtcaaaatgaattcagacccagcaaatccctatgatgtaccgtctttttagaataaacatttttcttccaaatagttgccatcatctatagttctagccgtgcggagaaaaacgggcggcgaaaacgaacacaaaaaatgagtgtcaaaaaaacagtcggcaaaaacgaatgccgaaatgctcggtccccaaaaaatttatttgtgtgtttgtatctatacataagaccattttttgacgttgcaatggtttttgacgacatttagcttgttttgatcaacttatgaacaaaagtaaattggcaaaagaaaaataaaaacttggaatttagtcaatgactctaaaatagccaacttaaaaaaataagtgaatttaattttaaggcctatccgatcaacaaaaccggcgaaagaggcctttgtttgatcataaacaacgttcacttcttggaccaaaaaaattcgaagacagacgcgggtcaaacatcgaccaggaacgtttcaaggccttaatggaaaagtttggatacaaagtgtttgaggaggttgaccggacgaaacaggtgaaaatttacagccaaaaatgccttttcattgat

SEQ ID NO: 31783 - DNA, 1287 bp, Heterodera glycines
  unsure (1)..(1287): unsure at all n locations
atcattgttaataaaaattaactatccttacgaaaaaataatacaagctaaataacaattttttataaattccctgtatagatattaattagaaataataacttcattgaaaaaataaatttatttaaattatatagctcaataaaaaagcaaattttaatatattattttaattctacacaaaaagatttctgaattatattgaacttttttaatttgaaaaaagagaaaaaaagcaaatatttataaattaaaataaaaaacacaataataatattgttattttgcgccaacaaatggctaattattaaataaaatctgcattcaaatttaaatttgcttattaaaccattcatttttatataaattaaaaattatatgctgttttttaccgatttgtcgttgttgacaaaatagggaaatgttggggggggggatcaggcggtgccgatatacaccgccgggaaaaatattgaaaaattgtgtgtcctttgttaacagttattcaaaaaatgaccaatttttattgcttatatggtttgtataaaactattcaaattttcagggaatatagattaaacttcaaaatttcttatggggatattgtaaaaaacgaagaatttttgtgtaaaccttaatttaaaaaaatattattatatatcatattagtattttcgctttacaattttttgttataccacttcaggaccaacaacatgtatcggcactgcaaatgagaccgcggttggaaaaattatgagatttcataatatagatgacattgaaatggggccggttaagcatgatttttcacgtgaattagatgaaatgggaaaacggaacctgattgaaaaagcattgagattttatagttttaaaaccagagttcccaagtgtgcttatttctaagatttgtgcttattttgaggggtcggatcttagaaagtaaaaatgtgcttatttctaagatttgtgcttatttcagcgttacgtgcttattttgtgcttatttttggatttgaaaataaaaaatgaaaaatttgaatgactattttgatttttcatttttttctgaagcgaatatttgaattaatttgattttaaaaaaaaattacattttatttcattttttgagtgaaattcacaaaatgccaccaaaacgtaaacatgtttatttggaaagctacgncaaagaattccggcatantaagaanagtcgaanaggcgaagaaaattgccctttgtgtcgtctgcatattttttcatanaaatgggctcaaatctcaa

SEQ ID NO: 31784 - DNA, 1066 bp, Heterodera glycines
gcgcagataattgacaattttaatgattatgagtaggacaaaaagagtgacgaagccaataaatgcaaacaatgcgagagatgggtgaatgctgctttcttcctcatttttgccaaagagtgcgtccattccgaaataaagggcagaggtgccaataatgggtaatgacccttttgccatcggttttaaaattcctcccttacccatttttcccttggggtgcgcctcagtatgggacaggaaaacgagggtcaagatcaaaatcacataaacagtgggaattgacgagggtgaatgagggcgatcaggttcattctccgggttgggctggttgctggaattggcagggagggaaaggcgacgaaaaaatttacggaaaataaaaattccaaacaacagtaaagctccaataaaaattgttagggtcataatggcgaagaagaaccaaaagttgtgggaagttgtgtcttctggtgggtgctgatgataggccaattcaagcgcgatgatatttcccattgctgatggttgagttgatgaagaataattggatttgcttataggagtttattatataaggtgggaatcgcagtgattgtaagatgataggccaataatcgggaaaaatttaaacaaagcgtgtgaccggggagtgattaaggtgaggtgcggaaaggaagagaaaaaattcaatgctttaaacattgtgaatgggaaaatgtaaatttaatgtcataaaggccgtgatcggtggaataagccgtgtgaataaattgcgatagcatcatcccgtcgctaaagaaaattaaatcagtgatttggtactagtggtggttggagggcccaagtccatttctttccggcataagttttggcacaagagggggatggtggcgcattggccgggttaggtttgaaattgggagggaattttgcccaattatatttttgtggttgtgcttcgacgattggtggattacggttacaatattcatcttctgtttccaacgggtagagatgactcactgatctgttagttatatgaccggaaatagtttttattttt

SEQ ID NO: 31785 - DNA, 865 bp, Heterodera glycines
  unsure (1)..(865): unsure at all n locations
cattttactaagctcgtcgagccgagtctaatggtaccgaaaatcaacaaatctgttcacttttcatcaaatgccgtaagtgtcaatttcgatgaccactgattttttcaaaaaaaaaaattgaactattggaatttgtcgtaaactgaacagatttgatgattttcggtaccattagactcggctcgacgagcttagtaaaatggtacctcattcgcacggttttgtccacttttcgacaaataccgaaagtgtcaatttcgatgaccactaattttttcaaaaaaagtgacactattggaatttttagctaaaaattatttcagtttttatgacccaacaacccaaagcaaactattaagcgtttttggctacaaaaaaaaaacgaaaaaatatttagcgctaaaaagaattgttcaagttaaaattctattagtaaatttcataaaaatttaaatgcaccgaattgtccgagttgagccgagccaacatcgcttgtcactggtcgatgtgagtggagccgtccaaccaaacaatttgtagttgtggtaggacagaaaagcctgcaaaattttattggttattgaaatgtttaaattcagggcccaacatgctaatatttttttaaaaaatccaagcaaatttttcagtaaaaatatgattttttgcgaccgaaatttggtgatttatgacgctcaaaattcaacagaaaagcatttttgcttcctactcaatattaatgaataatttacgcaattgtgatgccaaaaacataaaactcgaaggaattttcttcaaaatcttttactggaaaatttcctttatgggttgtttgttgggctcaaanatttaacagaaaagcact

SEQ ID NO: 31786 - DNA, 1666 bp, Heterodera glycines
  unsure (1)..(1666): unsure at all n locations
aaataagatcagtgctaaactccgtggtttattnaaaaaatattagcaccaatttttgattttggcacccttttcaaactttttatgaaattcaaaaaattgactaattgtaaggttgaaacaaagtcttggtaattttttttaaatataaataaagatttaaaaattatattatttgtttacttgcatgacgtggtccaccacccattcctgttcctgcttgaacacattgatttgctgcaaccaaatgttgagcttagtgaggagaaaagaaaatttacaattttttaagaaatattcaaaacaaaaaacaaaaacagcaccgttttgatcccttctttgctgcaggtgtggttcacttccagcaacacgcggtaattgtagctaaaaacagcaaataaggcaattaatcaaacactcatcatttacataataattactttttaaatataatttaaattaaattttgaataattttatttatttttttacttgagctgttgcatgtcatatacgggggccggtgtggttgcgttctcttttggctcgggttcggtggttttccgctcagcacagaggctaaaaaagacgaatttttgccaaattaaaaattttttttgttcagcagttttttctgttttccaattgaaattttttatgttatttatgtgacaaaaatgaatttttacaataatagtgcgtgttttactgcacataattaccgtaccgttccatcagcgtaataccgaagcaaagctgccaggcttcacccccgacagtgcattgctaaaaaacaaagaaaacaaatatttatttatttatttgtttatttttttacgtcggccgtttaacttatgcttcacacgtatcgttcaacagtccctgaaaaaatcataaaaattgataaataaatgttttgtttttgagtacctctggcatgtattggcgaagtgacagcgatgcagtcattttttggtttgcgcaaacgacgcaaccctcaaaaagcagcaacaccatgtctgagaaggaaatgttttaaattagattaaaaatttgtttaaaattttattcgattcaatttgggtgccaaagtcagtctttaaaattgttatcaagcccgtagccagaaaaattttggggggggggggaacctgaagaccttttttgctcttcgggcaaaaaaaatttttccattaaaaattcagcacccgagagcaaaaaaaatagggacttgtagccgtttttgcgtcaaaaactgtcaaattttggcaattttgtggctaaaattccaaaaaactaaagtaaattgggggtccggcggtgccgataggcgccgccgggaaaattttagacaatttgagtgcactttgttacaaaaacgcctataaaattcaaaaatgtcctaagcatttttggaaaattaataatttcaacaattgaaaacagaatttaataaattaatttttagcttctcttccaatgcttgcaaatttatgatgttcaatggctttttcaatgccaacaattcaccatgcatgaagccgtatttgtcgaactcggtcatgttcttgaagttttcctccggcccttctgttttgttgagaccgtacattttggcagatgcttcagtatagccagcatccccgtagaatgcaatctgaaaaaa

SEQ ID NO: 31787 - DNA, 1053 bp, Heterodera glycines
acaaatgttcagcaacagttgcgactgctccacaaagtccgccagtcgaagtgtgcgtccgtccgcactttccaatcggcacaacaattggccgagcaaatgcattttgaacgcctctttaagcacttccaaaggttttggcggctgagtcaaagcggagaagggaaagttcggcgtcttttgcacgccgctttgtgagagaattgtgccgacgcgcacggggcacgaaaggaaatgccgggcgagtggatggaacacccattggacggagttcggcacgcgacagccctcgagggcggcactctttcgtaggtgacgcctttgaatttgaacagaggcaaaattagcaatggcacgaaaaacagtcaaagggactgactttgcccggcggaagaaataagcggcgaccacccgacgcaaacacttgggcatgcacaggacggaacggagcgcggcacaaaggtaaatttcggcacggaatgagtggggaatggctggggagcccgccgactcggccaaattggtggccaacagtgccaaattaagcgcaccgcgtgaactcaatctgaaacttttttctttggccaaaaggggcgacaaaaatggcaaaagattcaattattttccgattttttaaataatcgaatggtagttgtggctttttctgacctaattccgtccacatccaaaaggtgcagctggtggagttggtggtaaaccagcgcagtctccgcatgacttcggcacaccgattgatgcgtaacggagggacgacgacggcgcgcgaaccatcggccaatccaaagaccgttaaggaagtggcgaatgacctgacaaaattttaaagtaatagttgacaaagaggtaattaattagatgtaaacgataaccgactgatttaaaaaaagtttaaattgcacttaccgaaaaggtcagcgacatccattcgtctacacttccgccggagggcaacggacgctgcagaatctgtaaaggctttttattagcctaattaaatgggtggcttttcatcgccatggcgtgccttcagcg

SEQ ID NO: 31788 - DNA, 1243 bp, Heterodera glycines
  unsure (1)..(1243): unsure at all n locations
accccgatgctaatctgtncgcagagctctcanaattttttccataccgcaagagctgcggaaattgtgaataattctcagaaaaatggctatctcgtttnaggacaattttctatctcgtaaccccgatgctaatctgttccgcagagcctcttcaaaattttttccattaccgcaagagctgcggaaattgtgaattaattctcagaaaaatggctatctctttttaggacaatattctatctcgtaaccccgatgctaatctgttccgcagagcctcttcaaaattttttccattaccgcaagagctgcggaaattgtgaattaattctcagaaaaatggctatctcgttttaggacaattttctatctcgtaaccccgatgctaatctgttccgcagagcctcttcaaaattttttccattaccgcaagagctgcggaaattgtgaattaattctcagaaaaatggctatctctttttaggacaatattctatctcgtaaccccgatgctaatctgttccgcagagcctcttcaaaattttttccattaccgcaagagctgcggaaattgtgaattaattctcagaaaaatggctatctctttttaggacaatattctatctcgtaaccccgatgctaatctgttccgcagagcctcttcaaaattttttccattaccgcaagagctgcggaaattgtgaattaattctcagaaaaatggctatctctttttaggacaatattctatctcgtaaccccgatgctaatctgttccgcagagcctcttcaaaattttttccattaccgcaagagctgcggaaattgtgaattaattctcagaaaaatggctatctcgttttaggacaattttctatctcgtaaccccgatgctaatctgttccgcagagcctcttcaaaattttttccattaccgcaagagctgcggaaattgtgaattaattctcagaaaaatggctatctctttttaggacaatattctatctcgtaaccccgatgntnatcccccccccccagcctctccccaattttttccattaccgcaagagctgcggaaattgtgaattaattctcagaaaaatggctatctcgttttaggacaattttctatctcgtaaccccgatgctaatctgttccgcagagcctcttcaaaattttttccattaccgcaagagctgcggaaattgtgaattattctcagaaaaatggctatctcttttt

SEQ ID NO: 31789 - DNA, 994 bp, Heterodera glycines
tttttgactgcaaattttttttccttttttgaattgggttcaaaaaaattttaagagaatttttgattattaatttgaagtctggaatttatttgacaaatccaagacttaaaactgggagaagcaaggggctgtggctgggggcctaaaatttgggccacattggagaattaattctgatttctgaaaaagtcccagaaataactattttttctttccataccttcttgtagagctcgagctgctctttccaatggtcttatcccggtctcgatccgtgccgaactcacaaagttatggagtgaaatgtgaaatattgttttcaccacaaggcattttttctgaaaaccggattcaaaaatctggggtttggtataaccgttttagaaatagcgtagaaaacagcttcgatatcaagaaaccaagtcaagtccagaaaggaatattttaaaacgatttcgttttgttttggcattatgataccgaataactttcggaaattatggaaacaaaattggagaaattcgaataattttttgactgcaaatttttttccttttttgaattgggttcaaaaaaattttaagagaatttttgattattaatttgaagtcttgaatttatttgacaaatccaagacttaaaactgggagaagcaaggggctgtggctgggggcctaaaatttgggccacattggagaattaattctgatttctgaaaaagtcccagaaataactattttttctttccataccttcttgtagagctcgagctgctctttccaatggtcttatcccggtctcgatccgtgccgaactcacaaagttatggagtgaaatgtgaaatattgttttcaccacaaggcattttttctgaaaaccggattcaaaaatctggggtttggtataaccgttttagaaatagcgtagaaaacagcttcgatatcaagaaaccaagtcaagtccagaaaggaatatttaaaacgatttcgtt

SEQ ID NO: 31790 - DNA, 1270 bp, Heterodera glycines
aagaatcaagcatataaagtaaaactaccccattttatattgtttttcaacaaattctgaatacgatccctaaaagagagatttgacattagattttataatctcagaatttaattgatttaaataaatttatagaattatcatttttctttcagacaatccaagtgatcatttacgtcggtgccattgtgtccgtcctctatttctacggcattatccaagcagtgctcaagcgcatggcaatgcttatgcaactaacgctgggcacaacagcgaccgagtcgttaaatgcatgcgcatgcgtattgcttggcaatgtatttaaatttttttcaatttacttattattaccttgaaattaaaaataattattattatttaatttattgacttttgtgatttaaacattcttttatatgttgttaagagttaactaaattaaaattattaattaataataaaaaattttctattaaattaaaattatttcgagtcaccgttttgttaaatgaatttttttaaattctaatttaaaataggctgagtcgccgcttctaatccggccctacatagaaaaaatgaccgcctcggagcttcatgctgtgatgaccactgggtaatttaaaaataattaaatgattaaaagcatttttttaatcgaagatattaactagaaatgaaattttgtctttgttctaagttttgcctgcattgcgggcgctgtgttcgccgcttacattagttttggcgcgtgcccgcgctatttgctgtccgccgctgtaatgagcgccccggggtcgttggcctgttccaaattgctttatccggagacagaaaagtcgagcgtgaaaagtgtgaaggatttggaattaccgcccaggtataaaaataagcgttcaaaatagtaggaaaaatttaattcccctatcgagataaaaatttttgttgtgggaaaggggaaaatttttgaattaatttaaaaatttcgagaattttcctgctgcttgggcccatcttacattgatcagtagggatgggaatgtatttagaaataagtttgaattactaatccaaaaagtggcattttcggattatactctaatcatgcgttattcaacatccaatccaaggaaacatgcatttatgaatattttttataaattagtttacgtgaataaatatcccaaccctaaaattttacttcgtttttaaattttttgaattgaatttaacgataaaactgttcagcaaagaaagcaatgcgatggaa

SEQ ID NO: 31791 - DNA, 1519 bp, Heterodera glycines
aatccttcagctttgtgcttaattggctcgcttcaccctgcatgaagttgtccatgatgccactttgcactgcccaatgtgccaatctctccttcacatggcacacttcttcgcactcttttgtcaatcattaatttggcttttcatccgtccctttcccttctcacctttctcaacttctgtcgactgcgcgtcaatgcattcgatcaccgcttcaaatgcttcaaattggttgtctcatgtcaattagttaatgaccagcagaccactgacctttcctctgctcaatgcaaatgtatcgaatacctgcagcatttgtttattagctgtgaatgtatggcgagcgaaagtgccaaagtaagcgggcggcactttctttttttacggggccatttataacccaattaacacattaaatttctttattattattttttttttttttgatatcatcccacatcgatgattttgccacattaaaatgccattctctctccgcctccccttttttctccgtcgtaccgctggtaaaaacgtggaatgtctcctggttggagcatcgtacgccctccaatttgtccatgcaatttaccgtttcattgtaatttctgaattactcacaacaattcccctccccccccccattttccataccgacagacgcccttaaagcggttgaaattgttgcccgatttcatcgccattttcaccgcttcgttaaacttcgaaaggcactccttctgacacaatggcacttccttccccccaattcccggcagaaaaagcccttccattccctcctcgggaaattcggccggaccaatatggggcttttcagcactggtgaaataatcggagtcaggcagagaaatgcctttagaaaagagaggaaaaggactgatttatgggagaagaaacccttcacaaaaatgccttcatccagcggactactgtagcctttcaaatggtgaacttccggcactttaattggaactttaatttgacggggcggcgaaccgagcgaaaaaagaatgggaaaaattgggaaaaaagggaaccgccaaccgaaggagggcagcaacattttaaggttttttaatatttgtacaattgctactgaagctaattgtaagcatttggcggatgaatcaaagggcggaagggcggggacctttgctcttttgtgtttctcaattacgcaatgactaacggacattcgatcacatcgcttaaaagagttaatttaattgttggcagtttttttagctaaaaattaattaaaaaatgattttatacaataaattctctttttgaatgaataaataaataatgaaattatggcgacaaataaaaaataaaattaaacataagaatgaagcacaattagaagagccaaaaagaaaaaggaaaattaaaattaaaaaattaaagaatttattcgttaaaaatttggttgacaaagagcaaatggtgagtaaaaaaaggcgaatttaaactttttcaatggcaccaaatttct

SEQ ID NO: 31792 - DNA, 1008 bp, Heterodera glycines
  unsure (1)..(1008): unsure at all n locations
taattgttctggaatttgtttctctcgcgtttgtttgggaaaaatttggaaaattggctatctctttttctgctcaacagtaataggaattccaaccgcattctcagaataattacgccgatactaattgttctggaatttgtttctcggcgcgtttgtttgggaaaaatttggaaaattggctatctctttttctgctcaacagtaataggaattccaaccgcattctcagaataattacgccgatactaattgttctggaatttgtttctctgcgcgtttgtttgggaaaaatttggaaaattggctatctctttttctgctcaacagtaataggaattccaaccgcattctcagaataattacgccgatactaattgttctggaatttgtttctcggcgcgtttgtttgggaaaaatttggaaaattggctatctctttttctgctcaacagtaataggaattccaaccgcattctcagaataattacgccgatactaattgttctggaatttgtttctctgcgcgtttgtttgggaaaaatttggaaaattggctatctctttttctgctcaacagtaataggaattccaaccgcattctcagaataattacgccgatactaattgttctggaatttgtttctctcgcgtttgtttgggaaaaatttggaaaattggctatctctttttctgctcaacagtaataggaattccaactgcattctcagaataattacgccgatactaattgttctggaatttgtttctcggcgcgtttgtttgggaaaaatttggaaaattggctatctctttttctgctcaacagtaataggaattccaaccgcattctcagaataattacgccgatactaattgttctggaatttgtttctctgcgcgtttgtttgggaaaatttggaaaattggctatctctttttctgctcacagtaatagaattccnaccgcattctcagaataatacgccgatactaattgttctggaa

SEQ ID NO: 31793 - DNA, 1420 bp, Heterodera glycines
cgttgaaaattttcaaataaaattagaaaaattttcgaatttttggccttgataaaaaataatcttgcgttttgggtctagggatttatttttgcatgttccattgtcacatctttgcgccagttttccttgtcccagcaaattttatggaaattccgacaaaataaattttcaaacctgatcatgaaaacaaaatatattttaaaaaaattagaataaaaatttttctagcgattatttggaaaaaatgttgaaaaaccgctagaaaaatttcttaaaatttttttttaatttttcgggggggggggagctgagctgttcccgaaaaaagccaaaatttgtaaaattttaacctcacccatgctaaatttgtaacatctcagatttatgtagagggaaatttttatttaaattttcaaaaatcaccgaaagcctcaaaatcgatatcgaatgaaagggggagaattacttaccaaacaccgttgtaattgattttttcgtgccatttaattttaaaaatttatttgggccaataattgtcacattgaaataatttacaataataaaaaaatagtttacgtgccgcggacgcgaacccacgctcctgtgcacactgatcattgcatggcgccatccccgcctaaagggaaaaattccgatttttgagggcccgtaactttttgcttcgtcattatgcatccgtaagattaaaaatccacaatagaagtcgaccctgctctatcgaatggtatataacacatatgcatttcccgacttacagttcgggtggttcccttgttagccctaagcttaatcctaggtaaaaaattttgttgtacgaacttcctattgtacgaactgctattgacccaaatctacttggggtgacggtttattaaataaaagaaaatttaatgaaatggacaatcagtaaatgaatatgatcatagccgattttactgtcggcgataggtacacacagcacaaaaaacaaacaatcgaatccaatcagtcctcacaccaggcattctcgcgacgaatctgctcctcttcttcgggcgtgaaatcgtttttgatgttgaatgtgcgacgaatctcatccggcgacttgcctttgatcatgttggccaccgtcttgcacgcaacgtcgagcaacccgcgcacgtccaaatagttggctgccttaatgagagcaacacaattaaattgtgccaaattcaatgtgaataaaggggacaaatccccataagattctgatgacaaaaaacgaatgaaaattttggagcgtccaaaaatgtaatttaaaaaaaatatatattaaatttgagatttctctattttcaaaattgcagtctttttgataaaaacttcagcatgtaaaccaactgaccaaattagctcaacagcgttcctggtcgac

SEQ ID NO: 31794 - DNA, 1349 bp, Heterodera glycines
  unsure (1)..(1349): unsure at all n locations
taatattttntacattatgtgtgaaagaattngaggctgcttctgatgcgattgaaatttttcagcttttcttgaaaagttttttccccagaatttatacagctttcccgacaaattgtttagataattattctaaacgatttttttatatctcagtgcttaactattgcctttttgtatgataactggtagatattgggagtgaaaaaaaatttgtttgtgactatttacaataaaaatttatgcagcatttctaaaaaggatgtaaaaataatttcttgcgtaatattttttacattatgttgttgaagaatttgagtctgcttctgatgcaattggaaaatttttcagcttttctcgaaaagttttttcccagaaaacggatgggtcaaataaaaaactaaacatctcacatgaccaatttaaattcacttacattttgggtttactttattatgctggcccataaaaaaatggagtttttccggtgccaaatttttgtgaattttctttcggcccgtcataagcggattgtttgggggcaaatgaaaacaaattttgtgttattcgaatgcgctagccgagctctactttttcaaatgtatcaacaaagggtctatctccactctctggcgagttatgtccagccaaagcagagtgggccataaacacgaattttttaatctttggtatttcctctattttgagcctgctctacatttatgtattgtgccaatatgcctattgcaactgaaatttattcaactttcccgacaaattgttgagataattattctagacgatttttttatatctcaaagcttaactattgcctttttgtatgataactggtagatattgggagtaaaaaaaagtttttttgtgactatttacaataaaaatttatgcagcatttctaaaaaggatgtaaaaataatttcttgcgtggtatctgttacattatgctgttgaagattttgaggctgcttcggccgcgattgaaaatttgtcagcttgtcgtgaaaagttttttcccagcatttatacagcttttccgacaaattgtctagataaatattcgagacgatttccagatatcacaaagctgaactatcgctattcagtctgctctcttggtagatctgtgcagtcctaccctaatatatatatatattatttgccaagataagttccaccaggacctgtttgagtgccatgctcccatctgacgggtcccaatgtgccatataatccgaacgttggagttgaacagccaatggctgatgaatgccctcgtcgtggaccacttgggcgatttgcacaaggcgtgccataaatgggtcgccttt

SEQ ID NO: 31795 - DNA, 823 bp, Heterodera glycines
tctacgagtctatggtttataggcgaggcaaaaataataaatttgaatgattgcattatgcctatacagtaatgtattaattttattgggtgataaagtgctacagtatacatttttttgccattcgtaaaacaaaacaattaattcctctcaaaaggcgccaaatttgcacattcaaaaaaatgtcattcgtaaactcaatgtctgttttctaaaaatttgttcaaaaaagtgtgggaaaaaaagtccaaaacattattaaaactttacgaaatgaatggggaaatgtttcaatagccgtgggcaaatttttagcgtctacaattataaaaaattaagattttcaaatttgaaaaaatatttttgaaccctgaattgtcaccctatctgtgtataaaattgttaaaaattttaaaataatttttttaaccctgaggttgcttgccaacttgtgcatccgctgctgacataggggggagtaaaaatttgggaaatttgtggaggggggggggtatataaaagcaaaacgccgacaaaattggacactttcacagcacacaaaattaaatttggagggcagcaggagcaggcagaaactgtacaacaacaataacaacaaaaatatgtcaagctgttgaagaagaaaaagaagaatggactgactaatgactgactgacttttacatgttcataaatttaattttgaagacgatgacgacggatgaaaagtcagtctcctgctgctgctacgaaaaaagagggggaaggacggcaaaaaaaatgtgcgaaattgatttaatgaaggaaatttatgggagaaaat

SEQ ID NO: 31796 - DNA, 1937 bp, Heterodera glycines
ctcatgtatgcccaaatttgtgtccatgcgacacagacagttcggctcctggtttatccaagcgttttgcaatgttatgcggaagcatgctaaaaccatggatttggaagccatgttaagaagagtcagagcaattgtggcacacatgggagaagaaaggtcaattgcccgaaacgcacacttctctaacgaaagaattttattttttccccggttggaatgtggattaattatagacctgaaagattgctcattgagctaaaaactgttgctaaatcaaatgttaaaaattttttgcattttattatgcttttattaataaaaagatgaaagtaggagttcaaataaataaattttcaaaattgttaaaacttattgccatttccttcctctgctggcggtgtgttcatttttgacaggccttcgccccgggggggaggaggcgggcgccctcacttcaacagcaggtggtttaaatatcaaatggatttggcatttcaaagttatttaaaggcagcggccaaacaccacgaaactgacaaatgagagcaaaggtgcgcttgtccaatggttttaaaggttaggggcgtattatctgtcatttgcaagaaaaagtaagaaaatgtaatgagaattcgttgagggtgaggcaataaattggaagataaagccggccacaatcaacacaaaaccattagaaccaataaaactgaaaatgcgacattaaaaaagagtaaacatttggtctccactaattgcccctaattgggtgccccttttggccgttccatcgccgcccaacgaaatttctttttatttagtccgacggcagcagcacttttctaaaaaactttataaaatttttgcttaaaaatatttattattcataataataattttatatgctttttttattattttttatcataaatatttttgtagagaataattaaaaacacaaggcatttaaaatgacaaattttcagtgaaaatctgtaaaatagtcaaaatttcaaatttttcctctggcgcctggcccccaattagaaatagtggattttattcaaaaaaatgcacaaaaatttcttatcaccttatctttttttgtttttcaaatcatctttttttttcgcggtgctctttttctaaagacctttaggagaaaggggcccggcggtgccgataggcgccgccgggaaaaaaatttgaaaatttggatgggtctgttaacagattttgtccaaaaaaattataaaatttttcgattttgagccaaattttttaatgtaataatagttcttccttttttgtggcgctggcgatatacgtacatatattaaattttcatgatttagtcaaaaaattgaatttttaattccaaagaaaggaaaattgggtttaatacgtctataaattatgccaaggacgattgattttttattcagaagaaataaaatatccagcgaaggggtgaccacttacacgttagattttagtaaattaatatcaagtccaaggagctcttttacagactaaatttttgtttaactcaatccatttatttatacgttttttgaaactgtcaacagatggagcatctgttatatctttgttgagtttagaccatattaaggccgttctgttgataaaggaatttgaagttttactggattgtgattttaacacaactttacgtctaagattataagggatgtgaccagaaaattgtgggaatatgtcttttttaagatgagtgagaccattaattgcaatttgttaacatgttttatcggaaaaatgaccaaatttgcgatttttaacatatgtatatagggttgggcccccgaccccgccccgaccccgaaccccgacatttttggccatttttcggggttaaccccgaaccgaaccccgaagctttcaaccccgacgacccc

SEQ ID NO: 31797 - DNA, 2168 bp, Heterodera glycines
aagaaacatcgataagctgatcgatttggccaaaaagaacaaagagtttatatttgccgatcatattaatgaattgaacaacgagaaccgtggattgcacttattgttggaagattgggaaaaagaaataccgtatcagtatgaccgtaaccaaatgaaattatgggtagagaaacattcgacaagtaaggggcattcattctatgttgtggcaattaagaaaaaaattcactcgccataaattcgtcacacaaaaatgaaaggctcagctaaatcgggcataaattcccttatttccaagaaacacatgaaaacaaagattggaaaatagatttcttacgtgtccttaaatatgcgccccggacatttggcccaagacatttgccgaagatatttggcccggacatttgcccaagacatttggcccaagacatttggccccggacatttgccgaagatatttagcccagacatttgcccaagacatttggccccggacatttgccgaagatatttgccccggacatttgcccaagacatttggccccggacatttgcctaagatatttgccccggacatttgcccaagacatttggccccagacatttgcgcccatttgcgcctatgtccaaaatcgggttcaaacttacattttttcaatcttagagctcttaaacagcattaaatttaagaaaacttgttcttttagtttagtaggaacagtaattaggtatgttgtttcaaaatatgttttttggggttttctcgaaaattaaaaaaacatcactgcttaagaactggaaattatgccaaaaacaagacaaaaatggaaatatttcggtttttgctaacctaagcgtttaatgtccttgaaaataaggatgagtcggtgccgtgacattagtcaaataaccatcaaatgaaaatactttttgatataactttgctcaaaaacaatcaagttttaaaatattgatatcattccatagctccaagtgttttcaattatcctgcaaaatttttaaaaatttcgtttactttcaaggaagttatgatttttttggaacttaacgaattttttttttgaaacttttgcgggataatagaacacacttagggctatcgaataataccaatatttaaaaatttggggtcatttgggcgaagttatgaataattttctgtcaaaaattttccatttgatggtccttgcttgactatccgtcaacggcaccgatgagtcttgtgccttccggttttgaaatttaaaaatattttcgtccttgattttctctaattatatgcccgtctccattagtctgcccgtctccaattatctcctcctttctgaggaggttgaaaaataatactcgggcatataattcgataaaatacggtaggataaaaataggtgcctaggcattaagcagaaaaagccaaaaataggcaaaaataggcattatataagtcatcgtaaactccctaaactaaacggaaaatgctttttttcgtgcttatctctgagtgtatcatgtgcgcagaaattttatccgtgatttttggttttttaaagaaaaatatacaaaactcgaaatataaacagaactttagttcatacaggttttgggcgctgttttagataaaaagaatacaataagccgtacgatttaatagtattataaaaagccttaatttataaaaaaaataaagtgtattcaatataacattttaattccatttgtttttaaataatatataataattcaatttttatatattttaactataaaatttccattgaataggaagtgtcattcgaattgccttttgccgaatctaatgaccgtaaaaagaaaataatggatgaaaatgcggagccattgcatccaccaaatcctcttgaaattggaattattggcagcagtgccaacaattcgttgtcagaggtgggtgaattttaaaaattctagttttgaaaaaatttgtaaaataataaaaatgcacaaagtatgtcctaaatatgtagaaaaattcgaaaatgttaaaaaattggttagacttattttcctacaaaacgctaataatgtgtttaaattatcctgctttgagataaataaaagaggattaagaaaataaaaaagtttttcgaaaaaataataaaaataaa

SEQ ID NO: 31798 - DNA, 1688 bp, Heterodera glycines
cgcttgaaggcttttccgggaagaggcggcacaattatctgacgaaacagatggaacaaaaatgaaaacaaaaaactttgctgtctcgctccaactcattcctcagccattcgaagtccgagtaacgtcgacggacgctcgactccttttgagaagggagacaaacactccaatttaaacagagccgccaatgccaaaacgactcactttgtgtttgaacaccggcaagttggtcctcagtcgaacttcgtagtccgtgtatcggttcttcccgaccccgtgagtgatctgctgaaaaaggtcacaacgggccacactaagcattgcttacgggattgaccacttcgatctccaaaaaattggctgggggagcataagcctcgtccaaagtttgccgcttcgcttgaagacgttgggtcgcagcggcactcattgcgaagtcgaaaggaagaaacgaattgcgaaacggaaaagaaagaaactgataaagggtgaattaaccaatgcaatttcaatttaagtaaagaactgaattatcagaaggcaaaatcacagtttgttataattagtccacaaaacaatcacaatgggaatgttttggccttttttgttttccgtcgcgcactttcttttaatacgcccatcggtcgacgcggcgcatttcggccggcgttaattgtaaaacggcacctgaaatcgggaatcctgtcagttatttaattcaaaatcgcatgcgttaatttccctcggacacggaccaattgccttgagaatgtgccgtcgcccgctgatggacccttgtccaacgaattgtacaaaaatatttcgcagataggccatattcgtttgactgctggccaacgaaagtcgtcctaaagtgactgaccattaactgccatttgtcagacccaaaaagtcaccttccaacacacgaatttcctctttcaatgtctctattatttgcaggtactggacgtccttcatcagcattgcctgctcaatgtcgcgcactttgagttcaagcagtcggatcatattcctgcgttttcctcttttttggccactcttcgccccccccccccgccttttccgcctctttccccggcccaccttagttctccaatctcttgctcccttttgctcagctcctgctcataaaaaatattacgcgctgccgtccccgcaactatcggtgccttttctgtcgttggagtcgaatttacaccggaaaaaaccgacgaatggctcaaacgacgggcataaacggaacggaaagaagctgaaggagaagcaaagtcaaccaaaaacaaaaagagtaccaaacgaaccggaaaagtctgtttggggaggcgtttttccgtcattaccattttcaccgaccgatgaacgcctttcgccccctccgtcggcacagtcttggccggtgttgagttcatcaatcgaattcgccatacttgcatgatttttcgaatgggtagctctcgtttgattccatttcatccgggcggaagccgacaccgatgcgccgttaggctgaggatccatgggaagagcggggacggactcacaatcggaggcaccaaagtgaccggaggaagtgactaatttcctaaaaggagtgcagaaagaacatcagccaacatacgtgtgcaaggggtggggggatcaggaaaagggtcgtgcgtttg

SEQ ID NO: 31799 - DNA, 867 bp, Heterodera glycines
ccgacccccggataccttgttttgagtgtatcgggcttagttttcgagttttttgttcgagttccggctcaggctctcggaataggacgaaattgaaggaaattactagattatttgttgtggattgcacacccaacacacacagaacacgatgatgctgctgcggatcacccagggactgatgcatttgggcaagggcactcaaacgttgaaccctttccactccgaccgtcagctgatgtgccccgcagcggttgccgcactgttgaccacctgttttgcgtttattgacggagaaaaatgtacggcaaaaccaacaaccattttaaatgaaaatttttatttttcgaaaatttttttagtgattttgaatggtcgccaacactatttgttctacacattggtggccgccatccagcccaggatgttgatcacggtgttgcaggtgagcagtggagaagttcaaaaaggggggttttgtcgccggagagaaaagccggggaatttgtagccatttttggcaacaaaaaaaaagccaatttgcatttaggggtcaaaatttcaacaaaaaaggttaattttggggattacggattgacacgcacctcataccatcggaaatttttaaaattatccgaaagttattcctatttttttcaatagcaaaccctttgattaaatgcatttcatttcgagaatggagcttgcacattttttttcttcaaatcttgaataaatatttgcttctccccctttccaggacccattggaccccactcgactcgtccagaaagcggtttgtttggtttttctctattgtccattgctttccaaatacatgtctttgtatacatactgtatcactgt

SEQ ID NO: 31800 - DNA, 1195 bp, Heterodera glycines
aatgcactccaagtccaggtactgctgctgcaactgttgttgtttttgctggattcgattgcctaaaaaattgagtttcttttttttataggaaaattttgccgatagtacgggaaatttttggatcggattaggctatataactacaatttaaaaaatccttttttttttgtttttttgtcggtgctataaggaattgctccaatgcggccgtcaaagtttcatcattggcacacaaaacatcccatttaggcattttgaaaacaaactaaaaaaacgaagtttctttttataccaacggcccctttggcacaaatttgaataagattttcaatgcattttttattttcataaaaaaaattttaaatggtaaagcaagtatttttttaaattatttttttatcgtaaaaaatttaaaaaattcggaaggacgagttgaaaccgagatgccttctatctttacatatttaaattaaagacgctagaattgcatttcgtttaaaaaaaaatttctgtataaaagtggaaaaggaaacaatccacaaaattttttttcaaaaaaaatggctaaaaaatttgccgcgaatatttaaaaaaaaaatacggaaaatttttacccattcgcttctgctgttgctgctcctccgctgggcttggcattggcatttggttggcaccgggcaaatatttgcgtgtcagcaacaggaaaaagatggagcccaatgagaacacgtcagccgacattgtgtatttgccggcacggacttcactaaacatggggagtggggggggaggggttaaagccgtacaatagaaaatcgggaaaattttttttttgaaaaaaacattccaaggtccacaggatacggccaaaaaggaacgggaaggggtacactatggtagtaagacgaattttgaaaaaaccacctcaaaagctagggcaaccaagccagaaatcttacatgaaaagggggccggagggggggggggggtcaacccgaaaattttgggtagggtccggccataccatgtacatagacggtctttttttattgcttttaaaaccgccttttttgtgacgcttttccaaaaaacctttggagaacgggggaggcggccggcagtgccaaggggtcgccgaaaaaataatttaaaaattttttttttaaataaaccgagttttgttcgcccactg

SEQ ID NO: 31801 - DNA, 1193 bp, Heterodera glycines
tttttcaaaattttcaagagcccagactcgcccaagaaagaaaatccagaaaaattaggggtcgtcgctactattccgaaaatgtggttggagttcatttgagtgttgagcagaaaaagagatagacgttttttcaaaattttcagagccaaactcgcccagaaagaaatccagaaaaattagggtcgtcgctattattccgaaaatgtggttggaattcatttgagtgttgagcagaaaaagagatagacgttttttcaaaattttcagagccaaactcgcccagaaagaaaatccagaaaaattagggtcgtcgctactattccgaaaatgtggttggaattcatttgagtgttgagcagaaaaagagatagacgttttttcaaaattttcagagccaaactcgcccagaaagaaaatccagaaaaattagggtcgtcgctactattccgaaaatgtggttggaattcatttgagtgttgagcagaaaaagagatagacgttttttcaaaattttcagagccaaactcgcccagaaagaaaatccagaaaaattagggtcgtcgctattattccgaaaatgtggttggagttcatttgagtgttgagcagaaaaagagatagacgttttttcaaaattttcagagccaaactcgcccagaaagaaaatccagaaaaattagggtcgtcgctattattccgaaaatgtggttggaattcatttgagtgttgagcagaaaaagagatagacgttttttcaaaattttcagagccaaactcgcccagaaagaaaatccagaaaaattagggtcgtcgctattattccgaaaatgtggttggagttcatttgagtgttgagcagaaaaagagatagacgttttttcaaaattttcagagccaaactcgcccagaaagaaaatccagaaaaattagggtcgtcgctattattccgaaaatgtggttggagttcatttgagtgttgagcagaaaaagagatagacgttttttcaaaattttcagagccaaactcgcccagaaagaaaatccagaaaaattagggtcgtcgctattattccgaaaatgtggttggagttcatttgagtgttgagcagaaaaagagatagacgttttttcaaaattgtcagagcctaactcgtccagaaagaaaatccagaaaaattagggtcgtcgct

SEQ ID NO: 31802 - DNA, 1450 bp, Heterodera glycines
ccattgacaacggcacaattaggacaattagtaccaggggcacttaaacaggcgtgtgactttgtgcacacagttttgatgagtcatcaaattgccggcgcggataattttggcaaaaattggatagttttgtttacattaattaacatgaagttgttgtgagcgtgggaaaacggggcggaaattgtgaatgaagtgttgatattttgggcttctttccattctgaaaaaatggcaccggcaaaattctgtgaatggcatggacaaaaatgttgaggcctccggcataaaaaggtgcgcgcaagaggtaaaaatgggcaaaagtcaaacattggcataacaccgcgcgtataaatagcggataagtgtaaaggaaaagccaccaattacgtcccagttggatcatccccaaaatatcaaaatatccattaatttggttccaaaaatcccattaccacactactatgacttccttcatcatcattaccattgcattcagtttttgtgccatttcgatggctcatgtgccgttttggtgggagcagctaagcgatgcggaagagcaatggaggatcaacacaagtaaaaaattggattacaacttttaaaactaagatattaaaatcggggaattcattgaaaaattcttttgaattttttttgttgaaagaaatcatcaagcccatttctgaaaggctggctctcggaaaacgaaaacgcagaaaaacaatatcaataaaaatctgaaagaattttctggaaattttttaatggcatttctgggactgaaaaagcttaatttgaataaaataattttcaatttttaagcaatcaacgaatgctgcccaccagccacatattgttgcgtcaacaatctgttcgtgccgcgagagcttgacgaaatgggaatggacaggtgcatcgatgacggcacaatgggaaaggtgaaaaacattaaaaaaataagaatttaaataaaatttaaataaattatacataaaataataatttaataaattatacataaataatcatttacataaataaattttgcaaaaaaataatcatttgataaattatcgataaaataataattaaataaattatacataattaataatttaaataaattatacataaaaataaaattttaaataaattaaacatgaaataataattaaataaattatacataaaaataataattttttataaattttgcataaaataataatttaaataaatttttgcatctaaatttattggattgaaaaaaaaacaaattattttaggaacaaagttacaacaccatcaaatgtgcgcaacgcaaatatttgggtgacgaatcaacggatatttgccgtaagttgtaaaaccattaacagttaatttgtagaatataggaaaaatgagtttttggagatacgaaatattggttgcctatttttgt

SEQ ID NO: 31803 - DNA, 1106 bp, Heterodera glycines
agaaatgcgagaaaaaaaggagccccgtgcattttctttctcagagtttcggtgtgatcgactcagcaaatttacagatcggcactcgtttaggaggggtaccaaatttattttataggtgacactgtcttcccattaattttgttccactatttgtagggcgcttttggttgtgttaacgaagcgaagtggaccctaagttgtgcgaaagaggcagagaaacagcagggcaaaaccggaaaagcgagcaaaagctcgaaaagggtcggtcattcagcctttcacacctccaaattcaatgcccttttctgcaggtggccattaaaacattcacaaattttgctgacatggagaaagaagcggtgccttagcctgtttactattcgaattccgaattccctaatttttagggtctgctcaaacagctcgaccacccaaatattttgcgaatgtttggtgtgacaaaattggatgacaaaaacgcaatggtcattgagctgatgaacttgggcgatttgaagttattttttgtgattctttgctgcgataattaaaaaaatcgttgcttcccatcagaacgtacgttgatggaaggaagccgaagccgcatcttaccggatacaccaaatcactaatacccgcgttggagacattggagctcgtaaaaattgctgctcaggtagagagtaatgagggtgccttaagtttccccaccccgagaaatttatctaatttatcgaaaaagtttcaaatttcaaacctattttttcaaaatcatgatgaactactaaattattcaaaaaattcccgaaaaaattttctatttgttttgttcgaacataaaagtgagaattttgacaattttaaatttcgactttttgttcgaattcgggtcagggactcgaaattggtcaaagcgaatattagattcatgttccccgacccagaaaaccccctataaacatgttttcacgacttctcttttctcaggtcgcagatggacttaagtacctcgtccagcagagaattgtccatcgcgacattgccgcccgtaattgccttgtttccggggactctgacttccgttgtaaagacgccgcctcacg

SEQ ID NO: 31804 - DNA, 1086 bp, Heterodera glycines
attataattagataaaaaaatttaatgttcccgtattttttttttttattccggctctaatttttagattgttttacttttcgtgacactctggtacatccttttgtacatattttcagatttttttcatattttgccatttttcttcaaatattttccgatttgaatatctcttaggaaaaaatttttgattatgcctaaaattgaatccaaatttgaatggatgcgcgagtggatcaacagtttttgggcaaaaccgggacccggacttgccgggacctgagaagccgggaccgggacctcggttttattcgggaccgggaaccgggaccaactgggaatttttcaaaattcaaaaaattttaaaaaattcaaattttaatttatttcaagtgaaaatattaaataattaattttgatttttattttataaattccaaaagttaaaacaaaattaaattaataagaattttcaaacaaatttgttcaattatttcaaacaattaatcaattttggactaagtgatcgaatattattataaattcagatttacttttcagatcacttttttttaaagaatatattaatattttttaaaattttttccttgtaaccaatttccatcactaatttttcacccagacccccattcttaccagtgcttgtttttcccggtttcggttgcccattgggaccgggacctgagcttttcaaaatccggaaccgggaccgggacctcaaaggatcgggaattcccggcccggtcccgctgcactctaatttgcacccctaattttcaaattttttgtgcatatttgatgcatattttgcgatttttatgcatatttcacgactttatttgcatatttatgcgcatattttggccacttttagtacatattttttgcagccctgttgattggtatatgtaattaataaaatatataattcctttaattaaaaaaaaaaattatgaccaaaaaaggatgtaccaggagtgtcacgaaaagtaaaacaatctaaaaattagagccggaataaaaaaaaaaattacgggaacattaaattttttatctaattataat

SEQ ID NO: 31805 - DNA, 1202 bp, Heterodera glycines
atctttattatattgtaaattaattcattggtttttcccacaacattattatttatgataattattttaatgtatttttataattaaaactttaacttttgtaaaatttctaatcgatgcgtgctgcatcaaattgccatctattgtaagacagactttcacccaaatacaaaactgagaaaaaaaagttcagtaaatatacgaagttactgattctgatatcccttattcgaccaacataaagccggacaaaaaaaaacatttttatttaaataccttcaacaaatttgacagcaagggtgaagaggagagaattttaaatattagtttttttttctaaaaattacataaaaatactaaaatttacaatttttcaatgaaaatctattaaaaatttggcaaaaatttcatttttatcagcgacactagtgacaccggcaggcccaaataacccacacaatttcacccaaaatcaacctgaaaaataggccacactaattgattgtttatttgaaataattaaagaagaatttaatttgttttaaattttcgaactggcataactaatttgatgaatttcaagtagagctggtcgggaccggaaacttttacaaaaacagggaccgggaccggaattgtggaatgttcgtaaaagcacgaaaaacacgtttttaagcttggtttgaagtttatcaaaattcatttttttttgctattttctcgaaaatttttaaaaatgtcgtttacataaaatattgaaaatatgtcaaaaataagtcaaaaaaatgaacatttttcaatttttcatcaacggttttttgacaaataaattaacataagttgaacaccgtgctacaaaaaatggccatcaaattttttcccaacctttctatataaattatattttcttattacatattttacgattttttttacatttaatcggatcattaataattttattagcattgcatttcccattttataagtgcattatttttaattaaaaatgtgttttattaatgtgatcagcagatttgtcactatgggaaaccatcaaaaaccatcatccatttagaaagtgatgaatgaattaatgaataattactttttcaccatttgtgaaggcccaaaagagaaaaatcacaaaaaatggaaattaatagccactggaaattattttatttaattatcaagaaatt
